(19) United States
(12) Patent Application Publication
(10) Pub. No.: US 2025/0264482 A1
(43) Pub. Date: Aug. 21, 2025

(54) STEREOTYPIC BCR CLONOTYPES IN ALZHEIMER'S DISEASE PATIENTS AND USE THEREOF

(71) Applicant: Seoul National University R&DB Foundation, Seoul (KR)

(72) Inventors: Junho Chung, Seoul (KR); Hyunji Yang, Seoul (KR); Duck Kyun Yoo, Seoul (KR); Ji Won Han, Seongnam-si (KR); Ki Woong Kim, Seoul (KR); Jong Bin Bae, Seoul (KR); Sunghoon Kwon, Seoul (KR); Yonghee Lee, Seoul (KR); Namphil Kim, Hanam-si (KR)

(73) Assignee: Seoul National University R&DB Foundation, Seoul (KR)

(21) Appl. No.: 19/195,699

(22) Filed: Apr. 30, 2025

Related U.S. Application Data
(63) Continuation-in-part of application No. 18/827,742, filed on Sep. 7, 2024.

(30) Foreign Application Priority Data
Sep. 7, 2023 (KR) 10-2023-0118789

(51) Int. Cl. G01N 33/68; C07K 16/28

(52) U.S. Cl. CPC G01N 33/6896; C07K 16/2803; C07K 2317/622

(57) ABSTRACT

The present specification discloses a composition, a system, and a method for predicting or diagnosing Alzheimer's disease, comprising a detecting agent of a B cell receptor clonotype specific to an Alzheimer's disease patient, and the composition according to one aspect of the present invention has an excellent effect in predicting or diagnosing Alzheimer's disease by simply using peripheral blood mononuclear cells isolated from a subject, in addition to methods such as MRI and PET scans using radioactive substances, by comprising a detecting agent of a B cell receptor (BCR) clonotype specific to an Alzheimer's disease patient.

### CROSS-REFERENCE TO RELATED APPLICATION

[0001] This application is a continuation-in-part of application Ser. No. 18/827,742 filed Sep. 7, 2024, which claims priority to Korean Patent Application No. 10-2023-0118789 filed on Sep. 7, 2023, the entire contents of each of which is incorporated herein by reference.

### INCORPORATION BY REFERENCE STATEMENT OF THE MATERIAL IN THE SEQUENCE LISTING XML FILE

[0002] The XML file submitted herewith is incorporated by reference in the Specification. The XML file is identified as follows: (i) Name of the File: OF24P125US_sequence list; (ii) Date of Creation: Jan. 22, 2025; (iii) Size of File: 33,390,077 bytes.

### TECHNICAL FIELD

[0003] The present specification discloses a composition, a system, and a method for predicting or diagnosing Alzheimer's disease, comprising a detecting agent of a B cell receptor clonotype specific to an Alzheimer's disease patient.

[0004] [National Research and Development Project Supporting This Invention]

[0005] [Project Identification Number] 1465039792

[0006] [Project Number] HU20C0339000023

[0007] [Name of Department] Ministry of Health and Welfare

[0008] [Name of Project Management (Professional) Institution] Korea Health Industry Development Institute (KHIDI)

[0009] [Research Business Name] Dementia Research and Development Program (2023-KHIDI-4635)

[0010] [Research Project Title] Investigation of Antibody-Mediated Pathogenesis through B Cell Receptor Repertoire Analysis in Alzheimer's Disease Patients

[0011] [Contribution Rate] 1/1

[0012] [Name of Project Performing Organization] Seoul National University Research & Development Business Foundation

[0013] [Research Period] Apr. 1, 2023 to May 31, 2023

### BACKGROUND

[0014] Alzheimer's disease (AD) is a progressive neurodegenerative disorder that causes dementia, cognitive decline, memory loss and impaired daily functioning. The major pathological hallmark of AD is the presence of plaques of the amyloid beta peptide (Aβ) and neurofibrillary tangles (NFTs) of the phosphorylated tau protein1, which are accompanied by neuroinflammation in the central nerve system (CNS). Recent studies have revealed that the pathogenesis of AD is not solely restricted to these changes in the brain. There is mounting evidence that the peripheral immune system is intimately linked to AD pathology, particularly emphasizing the crucial involvement of immune cells in the development of AD. However, there has been minimal discourse concerning the contribution of T and B lymphocytes in AD. Several studies have demonstrated that peripheral homeostasis of T lymphocyte is changed in AD patients, whereas little is known about the role of peripheral B lymphocytes.

[0015] Meanwhile, to date, there are few diagnostic tools in the clinical field of AD [5,6]. Although several alternative methods have been developed, people suspected of AD have to rely on several factors such as medical history, neuroimaging data from magnetic resonance imaging (MRI) or position emission tomography (PET), and neuropsychological examination. There are still shortcomings and concerns regarding the molecular accuracy of MRI and PET scans using radioactive substances. In particular. PET imaging, which is considered a first-line diagnostic method based on AD-specific pathological features such as decreased synaptic activity and accumulation of amyloid plaques in the brain, has several considerations that should be carefully considered. It takes time for brain Aβ to accumulate to a certain level of SUV [7,8]. In addition, additional time is needed until pathological symptoms develop and translate into cognitive changes in daily life [9]. In particular, phosphorylated tau protein has been considered a subsequent consequence after the appearance of Δβ, but it appears with a relatively long time interval of about 5 years[10]. Most blood biomarker tests have detected AD-specific pathologic proteins in human blood, serum, and CSF [11,12].

[0016] In other words, the current diagnosis of Alzheimer's disease relies on the patient's medical history, brain imaging data, and neuropsychological scale evaluation, and with the development of molecular imaging technology, the presence or absence of medial temporal lobe atrophy and ventricular enlargement due to neurodegeneration can be diagnosed with structural brain imaging tests such as magnetic resonance imaging (MRI) and computed tomography (CT). In addition, the presence or absence of brain function decline and the area of decline can be visualized and confirmed through functional brain imaging tests such as PET (position emission tomography) and SPECT (single-photon emission computed tomography) using fluoro-deoxy-D-glucose (FDG), amyloid tracer, and tau ligand (Cold Spring Harb Perspect Med. 2012 April; 2 (4): a006213, Hum Brain Mapp. 2019 Dec. 15; 40 (18): 5424-5442).

[0017] However, structural brain imaging has the disadvantage of low molecular accuracy and cannot detect histopathological features such as amyloid neuritic plaques and neurofibrillary tangles specific to Alzheimer's disease. Functional brain imaging based on synaptic activity and the pathogenesis of Alzheimer's disease (amyloid hypothesis) has relatively high diagnostic accuracy, but there are high screening costs and risks of exposure to radioactive drugs in the human body through intravenous injection. Additionally, FDG residual amount in the brain acts as a nonspecific indicator of metabolic processes, so there is a possibility that it may decrease due to various causes such as ischemia and inflammation unrelated to Alzheimer's disease (Alzheimers Dement. 2018 November; 14 (11): 1522-1552).

[0018] In addition, it takes an average of more than 15 years for the standardized uptake values (SUV) of Aβ measured through FDG-PET to reach the Alzheimer's disease-specific threshold value (Neurology. 2013 Mar. 5; 80 (10): 890-6, JAMA. 2017 Jun. 13; 317 (22): 2305-2316), and hyperphosphorylated tau gradually accumulates and spreads together with amyloid neuritic plaques as the clinical stage of the disease progresses (J Neurosci. 2018 May 9; 38 (19): 4482-4489), making it unsuitable for early diagnosis of the disease (Neurology. 2021 Mar. 2; 96 (9): e1347-e1357).

[0019] Therefore, in addition to traditional biomarkers, there is a need to explore various targets that can be used for early diagnosis (Front Immunol. 2022; 13:1010946), and there is a growing need for biomarkers that can be detected in a cost-effective and non-invasive manner.

[0020] It is believed that blood-based biomarkers are likely to meet these needs, and attempts are actively being made to use them as alternative diagnostic methods by measuring the ratio of Aβ42 and Aβ40 present in the patient's blood, the concentration of tau phosphorylated with specific amino acids, and neurofilament light chain (NfL)-related biomarkers of neurodegeneration (Lancet Neurol. 2022 January; 21 (1): 66-77, J Clin Neurol. 2022 July; 18 (4): 401-409).

[0021] Currently, there are three blood-based diagnostic tests for Alzheimer's disease approved by the FDA, but there are differing opinions in the academic community that question the efficacy and necessity of blood-based biomarkers due to the lack of standardized measurement techniques, lack of cutoff values for individual biomarkers, and lack of evaluation of confounding factors such as aging, underlying diseases, and racial differences (Biomark Insights. 2020 Aug. 21; 15:1177271920950319). In addition, blood-based tests cannot be used as a standalone test for diagnosing Alzheimer's disease, and the clinical validity of blood biomarkers can be proven only when the presence and ratio of the corresponding biomarker in the patient's cerebrospinal fluid (CSF) corresponds to the results in blood and also matches the results of existing molecular brain imaging tests.

[0022] Accordingly, the present inventors completed the present invention by discovering a BCR clonotype group that is not present in a normal human cohort but is found only in a group of Alzheimer's disease patients through research under the assumption that Alzheimer's disease patients have various B cell receptors associated with the progression or suppression of the disease.

### DETAILED DESCRIPTION

[0023] The present inventors confirmed that AD patients share stereotypic BCR clonotypes that are not found in the CG (control group) and that the degree of overlap between patient pairs is higher than that between CG pairs.

[0024] Specifically, the present inventors confirmed that the BCR repertoire of AD patients has unique characteristics, and then discovered disease-specific sequences that can be utilized to discover antibodies that bind to pathological markers, and identified 3986 unique BCR clonotypes that are specific only to the AD patient cohort. In addition, the present inventors selected the most prominent clonotypes in terms of degree of sharing and persistence within time points, and confirmed that they have affinity for the Aβ42 peptide, one of the major Δβ peptide isoforms found in amyloid plaques in the brain with AD and reported as an autoantigen. Accordingly, the present inventors confirmed that AD can be predicted or diagnosed by detecting the Alzheimer's-specific B cell receptor (BCR) clonotype.

[0025] Therefore, in one aspect, an object of the present invention is to provide a composition, a system, and a method for providing information for predicting or diagnosing Alzheimer's disease.

### Solution to Problem

[0026] In one aspect, the present invention provides a composition for predicting or diagnosing Alzheimer's disease, comprising a detecting agent of a B cell receptor (BCR) clonotype specific to an Alzheimer's disease patient in a sample of a subject, wherein the BCR clonotype comprises the V gene; and the J gene; and an amino acid sequence of complementary determining region 3 (CDR3) of the heavy chain of the BCR.

[0027] In other aspect, the present invention provides a system for predicting or diagnosing Alzheimer's disease comprising the composition for predicting or diagnosing Alzheimer's disease.

[0028] In another aspect, the present invention provides a method for providing information for predicting or diagnosing Alzheimer's disease comprising: detecting a B cell receptor (BCR) clonotype specific to an Alzheimer's disease patient in a sample of a subject, wherein the BCR clonotype comprises the V gene; and the J gene; and an amino acid sequence of complementary determining region 3 (CDR3) of the heavy chain of the BCR.

### Advantageous Effects of Invention

[0029] A composition according to one aspect of the present invention has an excellent effect in predicting or diagnosing Alzheimer's disease by simply using peripheral blood mononuclear cells isolated from a subject, in addition to methods such as MRI and PET scans using radioactive substances, by comprising a detecting agent of a B cell receptor (BCR) clonotype specific to an Alzheimer's disease patient.

### BRIEF DESCRIPTION OF THE DRAWINGS

[0030] FIGS. 1A to IC are schematic diagrams illustrating a sample acquisition schedule and BCR repertoire analysis pipeline according to one example of the present invention. FIG. 1A shows the peripheral blood samples of 44 patients from 2 different time points were collected for the Alzheimer's disease cohort (AD). The second blood samples from this cohort are chronologically separated by 13.3 months maximum and 3.4 months minimum. The black arrowheads represent the exact sampling points of the samples in the given time frame. FIG. 1B shows the vaccinated control group (CG) comprises of 55 vaccine recipients who were subjected to peripheral blood sampling before the first shot (TP1), 1 week after the 1st shot (TP2), 1 week after the 2nd shot (TP3), 1 month after the 2nd shot (TP4), 6 months after the 2nd shot (TP5), and 1 month after the 3rd shot (TP6). FIG. 1C show the process of performing sequence filtering based on the shown flow chart to obtain BCR clonotypes that are representative of each cohort for further analyses. Clonotypes which were comprised fully of naive sequences were removed and cohort unique clonotypes were obtained. Next, clonotypes that were present in two or more subjects in a cohort were selected. Due to the potential risk of sequence contamination during NGS library prep and during sequencing, clonotypes where patients did not possess unique nucleotide sequences and were completely eclipsed by other patients were ruled out.

[0031] FIGS. 2A to 2E are diagrams showing the results of analysis according to one embodiment of the present invention, wherein Alzheimer patients show distinctly high similarity within the AD cohort in context of stereotypic and group specific BCR clonotypes. FIG. 2A is a heat map of the BCR similarity values between each subject pair within each group and time point, and the similarity is calculated as the cosine similarity between two one-hot encoded linear vectors representing the presence (1) or absence (0) of group specific and shared clonotypes within each subject's BCR repertoire. The collection period is denoted inside parentheses. FIGS. 2B and 2C are the boxplots representing the distribution of BCR similarity for all subject pairs of the group and the heat map representing the P-values between them. The dashed line represents the median value for the CG TP1 repertoires. The color of the heat maps show whether the median value of the group written on the y axis is larger (red) or smaller (blue) while the intensity of said colors is encoded by the P-value. FIG. 2D is a Chord plot displaying the similarity matrix of the top 20 AD patient pairs. The similarities were calculated from the combined repertoires of both time points if they existed. The chord width represents the similarity value with the thickest chord connecting patient 26 and 28 represent the value 0.961 while the thinnest chord connecting patients 11 and 25 represents a value of 0.063. FIG. 2E is a diagram showing the number of shared clonotypes between each AD patient pairs for the time point combined repertoires, and the pair with the most number of shared clonotypes is denoted with a red star pattern.

[0032] FIGS. 3A to 3E are diagrams showing the results of an in vitro reactivity experiment for Aβ42 peptide according to one embodiment of the present invention, wherein the in vitro experimental results show highly shared BCR sequences within the Alzheimer patient cohort weakly bind to Aβ42 peptide. FIG. 3A is a table displaying the AD group specific BCR clonotypes that are shared by at least 4 different patients. The grey columns represent samples omitted from the TP2 stage due to dropouts. Patients who possess similar clonotypes, 1 amino acid mismatch in the CDR3 sequence, are also shown in the table and are coded with lighter colors. FIG. 3B is a graph showing the number of CG repertoires that possess similar clonotypes for the AD specific clonotypes shown in FIG. 3A. FIG. 3C shows amino acid sequence alignment and representation of highly shared and highly persistent BCR sequence. FIG. 3D shows the light chain sequence information for the Aβ42 binders found via biopanning, A-4-3 and A-4-52. FIG. 3E is ELISA results of recombinant scFv of A-4-3 and A-4-52 clones against Aβ42, and the graph is normalized by the absorbance difference between Aβ42 and BSA (blocking only) signal.

[0033] FIGS. 4A to 4C are graphs showing the results of analyzing the similarity of Alzheimer's-specific-stereotypic BCR clonotypes according to one embodiment of the present invention, wherein Alzheimer patients show distinctly high similarity within the AD cohort in context of stereotypic BCR clonotypes even without filtering by the control group. FIG. 4A is a heat map of the BCR similarity values between each subject pair within each group and time point. The similarity is calculated as the cosine similarity between two one-hot encoded linear vectors representing the presence (1) or absence (0) of shared and not group specific clonotypes within each subject's BCR repertoire. The collection period is denoted inside parentheses. FIGS. 4B and 4C are the boxplots representing the distribution of BCR similarity for all subject pairs of the group and the heat map representing the P-values between each group. The dashed line represents the median value for the CG TP1 repertoires. The color of the heat maps shows whether the median value of the cohort written on the y axis is larger (red) or smaller (blue) while the intensity of said colors is encoded by the P-value.

[0034] FIG. 5 is a diagram showing the experimental results confirming the expression of scFv-hFc fusion proteins according to one embodiment of the present invention. Total six out of eight Aβ42-binding scFv clones were successfully expressed in mammalian expression system. All recombinant scFv proteins tagged with human IgG1 FC (hFc), a. Representation of scFv-hFc fusion protein. The expected protein size is 56 kDa in non-reducing state (NR) and double in reducing condition (R) because of the dimerization via disulfide bond with cysteine residue in hFc tag.

[0035] Hereinafter, the present invention will be described in detail.

[0036] In one aspect of the present invention, the “Alzheimer prediction” may refer to predicting or diagnosing whether a patient has a risk for Alzheimer, whether the risk for Alzheimer is relatively high, what the cause of Alzheimer is, or whether Alzheimer has already occurred. Additionally, in one aspect of the present invention, the “Alzheimer diagnosis” may refer to confirming presence or features of pathological conditions. On the purpose of one aspect of the present invention, diagnosis may refer to confirming whether Alzheimer has occurred. The composition, kit or method according to one aspect of the present invention may be used to delay the onset or prevent the occurrence of Alzheimer through special and appropriate care for a specific patient, who is a patient having a high risk of developing Alzheimer. In addition, the composition, kit or method according to one aspect of the present invention may be clinically used to determine treatment by selecting the most appropriate treatment method through early diagnosis of Alzheimer.

[0037] In one aspect of the present invention, the “BCR clonotype” may comprise an amino acid sequence of a V gene; a J gene; and a complementary determining region 3 (CDR3) of a heavy chain of a B cell receptor (BCR), or may consist of an amino acid sequence of a V gene; and a J gene; and a CDR3 of a heavy chain of a BCR, or may be a combination of an amino acid sequence of a V gene; and a J gene; and a CDR3 of a heavy chain of a BCR.

[0038] In one aspect of the present invention, “detecting a BCR clonotype” may be detecting at least one selected from the group consisting of the following a), b), and c):
[0039] a) detecting at least one of the V gene type of the BCR heavy chain, a base sequence of the V gene, and an amino acid sequence encoded from the base sequence of the V gene; at least one of the J gene type of the BCR heavy chain, a base sequence of the J gene, and an amino acid sequence encoded from the base sequence of the J gene; and at least one of the base sequence and amino acid sequence of CDR3 of the BCR heavy chain;
[0040] b) detecting the entire base sequence of the BCR clonotype comprising the specific base sequence of the V gene of the BCR heavy chain; the specific base sequence of the J gene of the BCR heavy chain; and the base sequence of the CDR3 of the BCR heavy chain; and
[0041] c) detecting the entire amino acid sequence of the BCR clonotype comprising the specific amino acid sequence encoded from the V gene of the BCR heavy chain; the specific amino acid sequence encoded from the J gene of the BCR heavy chain; and the amino acid sequence of the CDR3 of the BCR heavy chain.

[0042] For example, detecting a BCR clonotype from a sample of a subject may be detecting a BCR clonotype in which the V gene of the heavy chain of the BCR is IGHV1-18, the J gene is IGHJ1, and the amino acid sequence of the CDR3 is SEQ ID NO: 72 from the sample of the subject, or may be detecting the entire base sequence of the BCR clonotype including a specific base sequence encoding a specific base sequence of the IGHV1-18, a specific base sequence of the IGHJ1, and a base sequence encoding an amino acid sequence of the CDR3 represented by SEQ ID NO: 72, or may be detecting the entire amino acid sequence of the BCR clonotype including a specific amino acid sequence encoded by the IGHV1-18, a specific amino acid sequence encoded by the IGHJ1, and an amino acid sequence of the CDR3 represented by SEQ ID NO: 72.

[0043] In one aspect of the present invention, “homology of 80 to 100%” may mean that the homology is 80% or more, 81% or more, 82% or more, 83% or more, 84% or more, 85% of more, 86% or more, 87% or more, 88% or more, 89% or more, 90% or more, 91% or more, 92% or more, 93% or more, 94% or more, 95% or more, 96% or more, 97% or more, 98% or more, or 99% or more, and the homology is 100% or less, 99% or less, 98% or less, 97% or less, 96% or less. 95% or less. 94% or less, 93% or less, 92% or less, 91% or less, 90% or less, 89% or less, 88% or less, 87% or less, 86% or less, 85% or less, It could mean 84% or less, 83% or less, 82% or less, or 81% or less.

[0044] In one aspect, the present invention provides a composition for predicting or diagnosing Alzheimer's disease, comprising a detecting agent of a B cell receptor (BCR) clonotype specific to an Alzheimer's disease patient in a sample of a subject, wherein the BCR clonotype comprises the V gene; and the J gene; and an amino acid sequence of complementary determining region 3 (CDR3) of the heavy chain of the BCR.

[0045] The composition according to one aspect of the present invention may comprise a detecting agent of a B cell receptor (BCR) clonotype specific to an Alzheimer's disease patient. A composition according to one aspect of the present invention may predict or diagnose a subject as having a BCR clonotype specific to an Alzheimer's patient, and specifically may predict or diagnose the subject as having Alzheimer's disease, if a BCR clonotype specific to an Alzheimer's patient is detected in a sample of the subject.

[0046] The composition according to one aspect of the present invention may predict or diagnose the subject as having Alzheimer's disease when the BCR clonotype detected from the sample of the subject is i) the V gene is at least one selected from the group consisting of IGHV (Immunoglobulin Heavy Variable) 1-18, IGHV1-2, IGHV1-24, IGHV1-3, IGHV1-46, IGHV1-58, IGHV1-69, IGHV1-8, IGHV2-26, IGHV2-5, IGHV2-70, IGHV3-11, IGHV3-13, IGHV3-15, IGHV3-20, IGHV3-21, IGHV3-23, IGHV3-30, IGHV3-30-3, IGHV3-33, IGHV3-43, IGHV3-43D, IGHV3-48, IGHV3-49, IGHV3-53, IGHV3-64, IGHV3-64D, IGHV3-66, IGHV3-7, IGHV3-72, IGHV3-73, IGHV3-74, IGHV3-9, IGHV4-30-2, IGHV4-30-4, IGHV4-31, IGHV4-34, IGHV4-38-2, IGHV4-39, IGHV4-4, IGHV4-59, IGHV4-61, IGHV5-10-1, IGHV5-51, IGHV6-1, and IGHV7-4-1, ii) the J gene in the BCR clonotype detected from a sample of the subject is at least one selected from the group consisting of IGHJ (Immunoglobulin Heavy Joining) 1, IGHJ2, IGHJ3, IGHJ4, IGHJ5, and IGHJ6, and iii) the amino acid sequence of CDR3 in the BCR clonotype detected from a sample of the subject is 80 to 100% homologous to at least one selected from the group consisting of SEQ ID NOs: 72 to 4047, and 32396 to 32481.

[0047] The composition according to one aspect of the present invention may predict or diagnose the subject as having Alzheimer's disease when the amino acid sequence of CDR3 in the BCR clonotype detected from a sample of the subject is 80 to 100% homologous to at least one selected from the group consisting of SEQ ID NOs: 72 to 4047, and 32396 to 32481. Specifically, the composition may predict or diagnose the subject as having Alzheimer's disease when the amino acid sequence of CDR3 in the BCR clonotype detected from a sample of the subject is 80 to 100% homologous to at least one selected from the group consisting of ARDLPATGAFDI (SEQ ID NO: 214), VRLAEYFQN (SEQ ID NO: 875), TRDRRGWD (SEQ ID NO: 1211), ALGRGMDV (SEQ ID NO: 1048), VLRGSAFDI (SEQ ID NO: 798), ARSGGLDP (SEQ ID NO: 668), AGGRSFDY (SEQ ID NO: 613), AGNLMDV (SEQ ID NO: 2257), ARRGEY (SEQ ID NO: 2070), ARDMFRGIPDYLDY (SEQ ID NO: 1988), AKSLGSGTYSFDY (SEQ ID NO: 1326), ARNAGLDY (SEQ ID NO: 1128), ARDDGYRSIDY (SEQ ID NO: 990), VRGGGSGWPFES (SEQ ID NO: 3709), SRGRDGIG (SEQ ID NO: 2815), ARSGGLDV (SEQ ID NO: 2415), ARSRSGSYYYGMDV (SEQ ID NO: 1198), AGDWNDDDIFDY (SEQ ID NO: 32396), ARKGEQLWHY (SEQ ID NO: 965), and ARDPIAVPGLFDY (SEQ ID NO: 347).

[0048] The composition according to one aspect of the present invention may predict or diagnose the subject as having Alzheimer's disease when the BCR clonotype detected from the sample of the subject is at least one of BCR clonotypes of the V gene; the J gene; and the amino acid sequence of CDR3.

[0049] For example, the composition according to one aspect of the present invention may predict or diagnose the subject as having Alzheimer's disease when the V gene and J gene in the BCR clonotype detected from the sample of the subject are IGHV3-7 and IGHJ1, and the amino acid sequence of CDR3 is the amino acid sequence of SEQ ID NO: 875.

[0050] The composition according to one aspect of the present invention may predict or diagnose the subject as having Alzheimer's disease when the detecting agent of a BCR clonotype according to one aspect of the present invention is a detecting agent of the entire amino acid sequence of the BCR clonotype, comprising an amino acid sequence encoded from the V gene of the heavy chain of the BCR; an amino acid sequence encoded from the J gene of the heavy chain of the BCR; and an amino acid sequence of CDR3 of the heavy chain of the BCR and the entire amino acid sequence of the BCR clonotype detected from the sample of the subject is at least one of SEQ ID NOs: 18222 to 32395. For example, the composition according to one aspect of the present invention may predict or diagnose the subject as having Alzheimer's disease when the entire amino acid sequence of the BCR clonotype detected from the sample of the subject is SEQ ID NO: 21427.

[0051] The composition according to one aspect of the present invention may predict or diagnose the subject as having Alzheimer's disease when the detecting agent of a BCR clonotype according to one aspect of the present invention is a detecting agent of the entire base sequence of the BCR clonotype, comprising a base sequence of the V gene of the heavy chain of the BCR; a base sequence of the J gene of the heavy chain of the BCR; and a base sequence encoding an amino acid sequence of CDR3 of the heavy chain of the BCR and the entire base sequence of the BCR clonotype detected from the sample of the subject is at least one of SEQ ID NOs: 4048 to 18221. For example, the composition according to one aspect of the present invention may predict or diagnose the subject as having Alzheimer's disease when the entire base sequence of the BCR clonotype detected from the sample of the subject is SEQ ID NO: 7253.

[0052] The composition according to one aspect of the present invention may predict or diagnose the subject as having Alzheimer's disease when the BCR clonotype detected from the sample of the subject is at least one of BCR clonotypes of the V gene; the J gene; and the amino acid sequence of CDR3.

[0053] The detecting agent according to one aspect of the present invention may comprise a detecting agent of a protein specific to the BCR clonotype or a detecting agent of a nucleic acid encoding the protein.

[0054] For example, the detecting agent may comprise the below A) or B):
[0055] A) a protein detecting agent capable of detecting at least one selected from the group consisting of an amino acid sequence encoded by a base sequence of a V gene included in the BCR clonotype; an amino acid sequence encoded by a base sequence of a J gene included in the BCR clonotype; an amino acid sequence of CDR3; and an entire amino acid sequence of a BCR clonotype including a specific amino acid sequence encoded by the V gene, a specific amino acid sequence encoded by the J gene, and an amino acid sequence of CDR3; or
[0056] B) a detection agent capable of detecting at least one selected from the group consisting of a base sequence of a V gene included in the BCR clonotype; a base sequence of a J gene included in the BCR clonotype; a base sequence of a CDR3; and an entire base sequence of a BCR clonotype including a specific base sequence of the V gene, a specific base sequence of the J gene, and a base sequence of CDR3.

[0057] The detecting agent of a protein according to one aspect of the present invention may comprise an antibody or aptamer specific to the BCR clonotype.

[0058] Specifically, the antibody may be one or more selected from the group consisting of a polyclonal antibody, a monoclonal antibody, a recombinant antibody, and a combination thereof. More specifically, the antibody may include all of not only the polyclonal antibody, the monoclonal antibody, the recombinant antibody, and a complete form having two light chains with the full length and two heavy chains with the full length, but also functional fragments of the antibody molecules, for example, Fab, F(ab′), F(ab′)2, and Fv. The antibodies may be easily prepared by using a well-known technique in the art and antibodies which are prepared and commercially sold may be used.

[0059] In addition, specifically, the aptamer refers to a single-stranded oligonucleotide, and refers to a nucleic acid molecule having binding activity to a predetermined target molecule. The aptamer may have various three-dimensional structures depending on its base sequence, and may have high affinity for a specific substance, such as an antigen-antibody reaction. The aptamer may inhibit the activity of a predetermined target molecule by binding to the predetermined target molecule. The aptamer of the present invention according to one aspect of the present invention may be RNA, DNA, a modified nucleic acid, or a mixture thereof, and may have a linear or cyclic shape, but is not limited thereto. The aptamer according to one aspect of the present invention may be used for the BCR clonotype. The aptamer having binding activity to the protein may be easily produced by a person skilled in the art by referring to each base sequence according to a known method.

[0060] The detecting agent of a nucleic acid encoding the protein specific for a BCR clonotype according to one aspect of the present invention may comprise at least one selected from the group consisting of antisense oligonucleotide, primer pair, probe, and polynucleotide that specifically binds to mRNA or DNA encoding the BCR clonotype. That is, detection of a nucleic acid may be performed by an amplification reaction using one or more oligonucleotide primer that hybridizes to a nucleic acid molecule encoding a gene or a complement of the nucleic acid molecule. For example, the detection of a nucleic acid using a primer may be performed by amplifying a gene sequence using an amplification method such as PCR, and then confirming whether the gene is amplified by a method known in the art.

[0061] In one aspect of the present invention, the “primer” refers to a polynucleotide having a base sequence that can complementarily bind to the end of a specific region of a gene, or a mutant thereof, which is used for amplifying the specific region corresponding to a target region of the gene by PCR. The primer is not required to be completely complementary to the end of the specific region, and may be used as long as it is complementary to the end to such an extent that it can form a double-stranded structure by hybridizing with the end.

[0062] In one aspect of the present invention, the “probe” refers to a polynucleotide having a base sequence that can complementarily bind to a target of a gene, a mutant thereof, or a polynucleotide and a labeling substance bound thereto.

[0063] In one aspect of the present invention, “hybridization” means that 2 single-stranded nucleic acids form a duplex structure by pairing complementary base sequences. Hybridization may occur not only when there is complete complementary pairing between single-stranded nucleic acid sequences (perfect match), but also when there are partially mismatched (mismatch) bases.

[0064] The composition according to one aspect of the present invention may further comprise labels which may quantitatively or qualitatively measure formation of an antigen-antibody complex, general tools used in the immunological analysis, reagents, and the like as well as the detecting agent of a protein specific to the BCR clonotype or the detecting agent of a nucleic acid encoding the protein.

[0065] In one aspect of the present invention, the labels which may quantitatively or qualitatively measure the formation of the antigen-antibody complex include enzymes, fluorescent substances, ligands, luminescent substances, microparticles, redox molecules, radioactive isotopes, and the like, and are not necessarily limited thereto. The enzymes usable as the detection label include β-glucuronidase, β-glucosidase, β-galactosidase, urease, peroxidase, alkaline phosphatase, acetylcholinesterase, glucose oxidase, hexokinase and GDPase, RNase, glucose oxidase and luciferase, phosphofructokinase, phosphoenolpyruvate carboxylase, aspartate aminotransferase, phosphenolpyruvate decarboxylase, β-lactamase, and the like, and are not limited thereto. The fluorescent substances include fluorescein, isothiocyanate, rhodamine, phycoerythrin, phycocyanin, allophycocyanin, o-phthaldehyde, fluorescamine, and the like, and are not limited thereto. The ligands include biotin derivatives and the like, and are not limited thereto. The luminescent substances include acridinium ester, luciferin, luciferase, and the like, and are not limited thereto. The microparticles include colloidal gold, colored latex, and the like, and are not limited thereto. The redox molecules include ferrocene, ruthenium complex compounds, viologen, quinone, Ti ions, Cs ions, diimide, 1,4-benzoquinone, hydroquinone, K₄W(CN)⁸, [Os(bpy)₃]²⁺, [RU(bpy)₃]²⁺, [MO(CN)₈]⁴⁻, and the like, and are not limited thereto. The radioactive isotopes include ³H, ¹⁴C, ³²P, ³⁵S, ³⁶Cl, ⁵¹Cr, ⁵⁷Co, ⁵⁸Co, ⁵⁹Fe, ⁹⁰Y, ¹²⁵I, ¹³¹I, ¹⁸⁶Re, and the like, and are not limited thereto.

[0066] In one aspect of the present invention, an example of the tool or the reagent includes suitable carriers, solubilizing agents, detergents, buffering agents, stabilizers, and the like, but is not limited thereto. When the marker is the enzyme, a substance and a quencher which may measure the enzyme activity may be included. The carriers include a soluble carrier, and an insoluble carrier. An example of the soluble carrier includes a buffer solution that is physiologically acceptable and known in the art, for example, PBS, and an example of the insoluble carrier may include polystyrene, polyethylene, polypropylene, polyester, polyacrylonitrile, fluororesin, cross-linked dextran, polysaccharide, other papers, glass, metal, agarose, and a combination thereof.

[0067] The composition according to one aspect of the present invention may be applied to a sample of a subject, and the sample refers to all samples obtained from an individual from which a protein detection agent specific for a B cell receptor (BCR) clonotype specific for an Alzheimer's patient or a nucleic acid encoding the protein according to one aspect of the present invention may be detected. Specifically, the sample may be one or more selected from the group consisting of saliva, biopsy, blood, skin tissue, liquid culture, feces and urine, but is not limited thereto, and may be treated and prepared by a method which is generally used in the art.

[0068] In other aspect, the present invention provides a system for predicting or diagnosing Alzheimer's disease comprising the composition for predicting or diagnosing Alzheimer's disease. The description of the Alzheimer's disease, the B cell receptor (BCR) clonotype specific to the Alzheimer's patient, the detecting agent, and the prediction or diagnosis of Alzheimer's is as described above.

[0069] The system according to one aspect of the present invention may further comprise an instruction.

[0070] The instruction according to one aspect of the present invention may describe that when the BCR clonotype specific to the Alzheimer's patient is detected in the sample of the subject, the subject is predicted or diagnosed as having the BCR clonotype specific to the Alzheimer's patient, and specifically, the subject is predicted or diagnosed as having Alzheimer's.

[0071] The system according to one aspect of the present invention may be applied to a sample of a subject, and the sample refers to all samples obtained from an individual from which a protein detection agent specific for a B cell receptor (BCR) clonotype specific for an Alzheimer's patient or a nucleic acid encoding the protein according to one aspect of the present invention may be detected. Specifically, the sample may be one or more selected from the group consisting of saliva, biopsy, blood, skin tissue, liquid culture, feces and urine, but is not limited thereto, and may be treated and prepared by a method which is generally used in the art.

[0072] In another aspect, the present invention provides a method for providing information for predicting or diagnosing Alzheimer's disease comprising: detecting a B cell receptor (BCR) clonotype specific to an Alzheimer's disease patient in a sample of a subject, wherein the BCR clonotype comprises the V gene; and the J gene; and an amino acid sequence of complementary determining region 3 (CDR3) of the heavy chain of the BCR. The description of the Alzheimer's disease, the B cell receptor (BCR) clonotype specific to the Alzheimer's patient, the detecting agent, and the prediction or diagnosis of Alzheimer's is as described above.

[0073] The method for providing information according to one aspect of the present invention may further comprise predicting or diagnosing the subject as having Alzheimer's disease when the BCR clonotype detected from the sample of the subject is i) the V gene is at least one selected from the group consisting of IGHV (Immunoglobulin Heavy Variable) 1-18, IGHV1-2, IGHV1-24, IGHV1-3, IGHV1-46, IGHV1-58, IGHV1-69, IGHV1-8, IGHV2-26, IGHV2-5, IGHV2-70, IGHV3-11, IGHV3-13, IGHV3-15, IGHV3-20, IGHV3-21, IGHV3-23, IGHV3-30, IGHV3-30-3, IGHV3-33, IGHV3-43, IGHV3-43D, IGHV3-48, IGHV3-49, IGHV3-53, IGHV3-64, IGHV3-64D, IGHV3-66, IGHV3-7, IGHV3-72, IGHV3-73, IGHV3-74, IGHV3-9, IGHV4-30-2, IGHV4-30-4, IGHV4-31, IGHV4-34, IGHV4-38-2, IGHV4-39, IGHV4-4, IGHV4-59, IGHV4-61, IGHV5-10-1, IGHV5-51, IGHV6-1, and IGHV7-4-1, ii) the J gene in the BCR clonotype detected from a sample of the subject is at least one selected from the group consisting of IGHJ (Immunoglobulin Heavy Joining) 1, IGHJ2, IGHJ3, IGHJ4, IGHJ5, and IGHJ6, and iii) the amino acid sequence of CDR3 in the BCR clonotype detected from a sample of the subject is 80 to 100% homologous to at least one selected from the group consisting of SEQ ID NOs: 72 to 4047, and 32396 to 32481.

[0074] The method for providing information according to one aspect of the present invention may further comprise predicting or diagnosing the subject as having Alzheimer's disease when the BCR clonotype detected from the sample of the subject is at least one of BCR clonotypes of the V gene; the J gene; and the amino acid sequence of CDR3. For example, the method for providing information according to one aspect of the present invention may further comprise predicting or diagnosing the subject as having Alzheimer's disease when the V gene and J gene in the BCR clonotype detected from the sample of the subject are IGHV3-7 and IGHJ1, and the amino acid sequence of CDR3 is the amino acid sequence of SEQ ID NO: 875.

[0075] The method for providing information according to one aspect of the present invention may further predicting or diagnosing the subject as having Alzheimer's disease when the entire amino acid sequence of the BCR clonotype detected from the sample of the subject comprising an amino acid sequence encoded from the V gene of the heavy chain of the BCR; an amino acid sequence encoded from the J gene of the heavy chain of the BCR; and an amino acid sequence of CDR3 of the heavy chain of the BCR is at least one of SEQ ID NOs: 18222 to 32395. For example, the method for providing information according to one aspect of the present invention may further comprise predicting or diagnosing the subject as having Alzheimer's disease when the entire amino acid sequence of the BCR clonotype detected from the sample of the subject is SEQ ID NO: 21427.

[0076] The method for providing information according to one aspect of the present invention may further predicting or diagnosing the subject as having Alzheimer's disease when the entire base sequence of the BCR clonotype detected from the sample of the subject comprising a base sequence of the V gene of the heavy chain of the BCR; a base sequence of the J gene of the heavy chain of the BCR; and a base sequence encoding an amino acid sequence of CDR3 of the heavy chain of the BCR is at least one of SEQ ID NOs: 4048 to 18221. For example, the method for providing information according to one aspect of the present invention may further comprise predicting or diagnosing the subject as having Alzheimer's disease when the entire base sequence of the BCR clonotype detected from the sample of the subject is SEQ ID NO: 7253.

[0077] The method for providing information according to one aspect of the present invention may further predicting or diagnosing the subject as having Alzheimer's disease when the amino acid sequence of CDR3 in the BCR clonotype detected from a sample of the subject is 80 to 100% homologous to at least one selected from the group consisting of SEQ ID NOs: 72 to 4047, and 32396 to 32481. Specifically, the method for providing information may comprise predicting or diagnosing the subject as having Alzheimer's disease when the amino acid sequence of CDR3 in the BCR clonotype detected from a sample of the subject is 80 to 100% homologous to at least one selected from the group consisting of ARDLPATGAFDI (SEQ ID NO: 214), VRLAEYFQN (SEQ ID NO: 875), TRDRRGWD (SEQ ID NO: 1211), ALGRGMDV (SEQ ID NO: 1048), VLRGSAFDI (SEQ ID NO: 798), ARSGGLDP (SEQ ID NO: 668), AGGRSFDY (SEQ ID NO: 613), AGNLMDV (SEQ ID NO: 2257), ARRGEY (SEQ ID NO: 2070), ARDMFRGIPDYLDY (SEQ ID NO: 1988), AKSLGSGTYSFDY (SEQ ID NO: 1326), ARNAGLDY (SEQ ID NO: 1128), ARDDGYRSIDY (SEQ ID NO: 990), VRGGGSGWPFES (SEQ ID NO: 3709), SRGRDGIG (SEQ ID NO: 2815), ARSGGLDV (SEQ ID NO: 2415), ARSRSGSYYYGMDV (SEQ ID NO: 1198), AGDWNDDDIFDY (SEQ ID NO: 32396), ARKGEQLWHY (SEQ ID NO: 965), and ARDPIAVPGLFDY (SEQ ID NO: 347).

[0078] The method for providing information according to one aspect of the present invention may further comprise predicting or diagnosing the subject as having Alzheimer's disease when the BCR clonotype detected from the sample of the subject is at least one of BCR clonotypes of the V gene; the J gene; and the amino acid sequence of CDR3.

[0079] The sample of the subject according to one aspect of the present invention may comprise nucleic acid of the subject, wherein the nucleic acid may comprise DNA, mRNA, or cDNA synthesized from mRNA.

[0080] Hereinafter, the configuration and effects of the present invention will be described in more detail by way of examples. However, the following examples are for illustrative purposes only and it will be apparent to those of ordinary skill in the art that the scope of the present invention is not limited by the examples.

[0081] The present inventors identified BCR clonotypes persistently present and shared among AD patients but not present in normal healthy populations and analyzed their characteristics. For this, we collected peripheral blood (PB) from 44 AD patients at two sampling points with the interval of 14-53 weeks and used them to re-constitute in silico BCR repertoires of these patients. As a control group, the inventors used the BCR repertoire from 55 healthy volunteers vaccinated with SARS-CoV2 mRNA vaccine whose PB samples were collected for six times over 42 weeks 15. In comparison, the AD patients showed much higher sharing of stereotypic patient-specific BCR clonotypes compared to the control group. One of these BCR clonotypes was found to encode antibodies reactive to Aβ42 peptide, which are the well-known antigen of autoantibodies found in AD patients.

### Statistical Analysis

[0082] In the below Examples and Experimental examples, the P values were calculated using the student t-test unless specified during comparison of BCR repertoire characteristics. Unless otherwise indicated. P-value <0.05 was regarded as significant.

### Example 1—Blood Sampling and Peripheral Blood Mononuclear Cell Isolation from Study Subjects

[0083] The present inventors acquired data of all subjects, including demographic information, subtypes of dementia, Clinical Dementia Rating (CDR), comprehensive neuropsychological tests with Mini-Mental State Examination (MMSE), neuroimaging results by using magnetic resonance imaging (MRI) and amyloid-PET, from the Korean Longitudinal Study on Cognitive Aging and Dementia (KLOSCAD) [16]. Each data was valid for 6 months except amyloid-PET. This study was approved under the recommendations of the Institutional Review Board (IRB) of the Seoul National University Bundang Hospital (SNUBH, IRB approval number, B-2102-664-305), South Korea. Protocols and manuals were also approved by the IRB of the SNUBH.

[0084] Total 55 of vaccinees who received BNT162b2 mRNA vaccine were participated, and their peripheral blood sampling was approved by the IRB of Seoul National University Hospital (SNUH, IRB approval number, 2102-032-1193). The details of the vaccination cohort data are described in previous article[1].

[0085] Additionally, for the above subjects, all peripheral blood samples were collected by EDTA tubes (BD Vacutainer K2EDTA tubes, 367525) at least 15 ml in total per a patient[17]. Peripheral blood mononuclear cells (PBMCs) and plasma were separated by density-gradient centrifugation using Ficoll (Cytiva Ficoll-Paque Plus, 17-1440-02) solution. After the PBMC suspension was resuspended in CELLBANKER (Amsbio CELLBANKER 2, 11914), the collected PBMCs were immediately cryopreserved and stored in a Freezing container (Nalgene Mr. Frosty, C1562) for a week. Total RNA was isolated by TRIzol Reagent (Invitrogen TRIzol Reagents, 15596026) following the manufacturer's instructions.

### Example 2—Preparation of Next-Generation Sequencing (NGS) Library and NGS Data Processing

[0086] An NGS library was prepared using the peripheral blood mononuclear cells of Example 1 above by the following method, and the NGS data obtained therefrom were processed as follows.

[0087] Specifically, for the NGS library preparation of BCR heavy chain sequence, genes encoding the variable region of the heavy chain (V_{H}) at the 5 prime forward part and the first constant region of the heavy chain (CH1) domain at the 3 prime reverse part were amplified by specific PCR primers as reported previously[4]. All primer sequences are listed in Tables 1 and 2. In short, one microgram of total RNA was used as the input template for library preparation. Next, reverse transcription was conducted as following the manufacturer's instructions using SuperScript IV First-Strand Synthesis System (Invitrogen, 18091050) with CH1 gene-specific primers for five immunoglobulin heavy chain isotypes containing UMI (unique molecular identifiers) barcodes that consist of 12 random nucleotides. 14 base pair in total; NNNNTNNNNTNNNN, and partial Illumina adapters (No. 1-8). After first-strand cDNA synthesis, it was purified with SPRI beads (Beckman Coulter AMPure XP Reagents, A63882) at a 1:1.8 ratio and second-strand cDNA was synthesized using a KAPA Biosystems kit (Roche KAPA HiFi Hotstart PCR kit, KK2502) with VH genespecific primers (No. 9-14; 95° C. for 3 min, 98° C. for 30 s, 60° C. for 45 s, and 72° C. for 6 min). Double-stranded cDNA was purified through SPRI beads at a 1:1 ratio.

[0088] Following that, it was amplified using KAPA Biosystems kit and double primers containing Illumina adapters and index sequences (No. 15, 16; 95° C. for 3 min, 25 cycles of 98° C. for 30 s, 60° C. for 30 s, 72° C. for 1 min, and 72° C. for 5 min). The PCR products were subjected to electrophoresis on a 1.5% agarose gel to separate through the length of DNA and purified using QIAquick gel extraction kit (QIAGEN, 28704) following the manufacturer's protocols. The final NGS libraries were obtained using SPRI beads at a 1:1 ratio and quantified with a 4200 TapeStation System (Agilent Technologies, G2991BA) for QC. Libraries with a single peak of appropriate length were subjected to NGS analysis using the Illumina Nocaseq6000 platform.

TABLE 1
Primers used in the study
Primer used for the preparation of BCR repertoire

| Primer | | Sequence | |
|---|---|---|---|
| No. | Name | (5′-Primer Seq-3′) | Step |
| 1 | RT_ | TGACTGGAGTTCAGACGTGTGC | cDNA |
| | IgG_ | TCTTCCGATCTNNNNTNNNNTN | synthesis |
| | 1_ | NNNAGCCCAGGGCCGCTGTGC | |
| | 250PE | (SEQ ID NO: 1) | |
| 2 | RT_ | TGACTGGAGTTCAGACGTGTGC | cDNA |
| | IgG_ | TCTTCCGATCTNNNNTNNNNTN | synthesis |
| | 2_ | NNNAGCCCAGGGCTGCTGTGC | |
| | 250PE | (SEQ ID NO: 2) | |
| 3 | RT_ | TGACTGGAGTTCAGACGTGTGC | cDNA |
| | IgG_ | TCTTCCGATCTNNNNTNNNNTN | synthesis |
| | 3_ | NNNAGCCCAGGGCGGCTGTGC | |
| | 250PE | (SEQ ID NO: 3) | |
| 4 | RT_ | TGACTGGAGTTCAGACGTGTGC | cDNA |
| | IgA1_ | TCTTCCGATCTNNNNTNNNNTN | synthesis |
| | 2_ | NNNGCAGGCGATGACCACGTTC | |
| | 50PE | C (SEQ ID NO: 4) | |
| 5 | RT_ | TGACTGGAGTTCAGACGTGTGC | cDNA |
| | IgA2_ | TCTTCCGATCTNNNNINNNNTN | synthesis |
| | 2_ | NNNGCATGCGACGACCACGTTC | |
| | 50PE | C (SEQ ID NO: 5) | |
| 6 | RT_ | TGACTGGAGTTCAGACGTGTGC | cDNA |
| | IgE_ | TCTTCCGATCTNNNNTNNNNTN | synthesis |
| | 250 | NNNGAGTCACGGAGGTGGCATT | |
| | PE | GG (SEQ ID NO: 6) | |
| 7 | RT_ | TGACTGGAGTTCAGACGTGTGC | cDNA |
| | IgM_ | TCTTCCGATCTNNNNTNNNNTN | synthesis |
| | 25 | NNNCAACGGCCACGCTGCTCG | |
| | 0PE | (SEQ ID NO: 7) | |
| 8 | RT_ | TGACTGGAGTTCAGACGTGTGC | cDNA |
| | IgD_ | TCTTCCGATCTNNNNTNNNNTN | synthesis |
| | 25 | NNNATGCCAGGACCACAGGGCT | |
| | 0PE | G (SEQ ID NO: 8) | |
| 9 | PCR_ | ACACTCTTTCCCTACACGACGC | Second- |
| | f_VH1 | TCTTCCGATCTGGCCTCAGTGA | strand |
| | | AGGTCTCCTGCAAG | synthesis |
| | | (SEQ ID NO: 9) | |
| 10 | PCR_ | ACACTCTTTCCCTACACGACGC | Second- |
| | f_VH2 | TCTTCCGATCTGTCTGGTCCTA | strand |
| | | CGCTGGTGAAACCC | synthesis |
| | | (SEQ ID NO: 10) | |
| 11 | PCR_ | ACACTCTTTCCCTACACGACGC | Second- |
| | f_VH3 | TCTTCCGATCTCTGGGGGGTCC | strand |
| | | CTGAGACTCTCCTG | synthesis |
| | | (SEQ ID NO: 11) | |
| 12 | PCR_ | ACACTCTTTCCCTACACGACGC | Second- |
| | f_VH4 | TCTTCCGATCTCTTCGGAGACC | strand |
| | | CTGTCCCTCACCTG | synthesis |
| | | (SEQ ID NO: 12) | |
| 13 | PCR_ | ACACTCTTTCCCTACACGACGC | Second- |
| | f_VH5 | TCTTCCGATCTCGGGGAGTCTC | strand |
| | | TGAAGATCTCCTGT | synthesis |
| | | (SEQ ID NO: 13) | |
| 14 | PCR_ | ACACTCTTTCCCTACACGACGC | Second- |
| | f_VH6 | TCTTCCGATCTTCGCAGACCCT | strand |
| | | CTCACTCACCTGTG | synthesis |
| | | (SEQ ID NO: 14) | |
| 15 | Illumida | AATGATACGGCGACCACCGAGA | Indexing |
| | adaptor | TCTACAC [i5 index] | PCR |
| | amp-fwd | ACACTCTTTCCCTACACGACGC | |
| | | TCTTCCGATC | |
| | | (SEQ ID NO: 15) | |
| 16 | Illumida | CAAGCAGAAGACGGCATACGAG | Indexing |
| | adaptor | AT [i7 index] | PCR |
| | amp-rev | GTGACTGGAGTTCAGACGTGTG | |
| | | CTCTTCCG | |
| | | (SEQ ID NO: 16) | |

TABLE 2
Primers used in the study
Primer used for the construction of human scFv libraries

| Primer | | | |
|---|---|---|---|
| No. | Name | Sequence (5′-Primer Seq-3′) | Step |
| 17 | KC | GGCACACAACAGAGGCAGTTCC (SEQ ID NO: 17) | cDNA |
| | | | synthesis |
| 18 | LC_RT1 | GCTTGAAGCTCCTCAGAGGAGG (SEQ ID NO: 18) | cDNA |
| | | | synthesis |
| 19 | LC_RT2 | GCTTGGAGCTCCTCAGAGGAGG (SEQ ID NO: 19) | cDNA |
| | | | synthesis |
| 20 | LC_RT3 | TGGAGCTCCCTGCCTCTGG (SEQ ID NO: 20) | cDNA |
| | | | synthesis |
| 21 | KV1 | GGGCCCAGGCGGCCGAGCTCCAGATGACCCAGTCTCCATCCTC | Second- |
| | | (SEQ ID NO: 21) | strand |
| | | | synthesis |
| 22 | KV2 | GGGCCCAGGCGGCCGAGCTCGTGATGACTCAGTCTCCACTCTCC | Second- |
| | | (SEQ ID NO: 22) | strand |
| | | | synthesis |
| 23 | KV3 | GGGCCCAGGCGGCCGAGCTCGTGTTGACACAGTCTCCAGCC | Second- |
| | | (SEQ ID NO: 23) | strand |
| | | | synthesis |
| 24 | KV4 | GGGCCCAGGCGGCCGAGCTCGTGATGACCCAGACTCCACTCTC | Second- |
| | | (SEQ ID NO: 24) | strand |
| | | | synthesis |
| 25 | KV5 | GGGCCCAGGCGGCCGAGCTCGTGCTGACTCAGTCTCCAGAC | Second- |
| | | (SEQ ID NO: 25) | strand |
| | | | synthesis |
| 26 | KV6 | GGGCCCAGGCGGCCGAGCTCCAGATGACCCAGTCTCCATCTTC | Second- |
| | | (SEQ ID NO: 26) | strand |
| | | | synthesis |
| 27 | KV7 | GGGCCCAGGCGGCCGAGCTCCAGATGACCCAGTCTCCTTCCAC | Second- |
| | | (SEQ ID NO: 27) | strand |
| | | | synthesis |
| 28 | KV8 | GGGCCCAGGCGGCCGAGCTCTGGATGACCCAGTCTCCATCC | Second- |
| | | (SEQ ID NO: 28) | strand |
| | | | synthesis |
| 29 | KV9 | GGGCCCAGGCGGCCGAGCTCCAGATGACCCAGTCTCCATCTGC | Second- |
| | | (SEQ ID NO: 29) | strand |
| | | | synthesis |
| 30 | KV10 | GGGCCCAGGCGGCCGAGCTCGTGTTGACGCAGTCTCCAGG | Second- |
| | | (SEQ ID NO: 30) | strand |
| | | | synthesis |
| 31 | KV11 | GGGCCCAGGCGGCCGAGCTCGTAATGACACAGTCTCCACCCAC | Second- |
| | | (SEQ ID NO: 31) | strand |
| | | | synthesis |
| 32 | KV12 | GGGCCCAGGCGGCCGAGCTCACACTCACGCAGTCTCCAGC | Second- |
| | | (SEQ ID NO: 32) | strand |
| | | | synthesis |
| 33 | LV1 | GGGCCCAGGCGGCCGAGCTCGCCCTGACTCAGCCTGCC | Second- |
| | | (SEQ ID NO: 33) | strand |
| | | | synthesis |
| 34 | LV2 | GGGCCCAGGCGGCCGAGCTCGCCCTGACTCAGCCTCCC | Second- |
| | | (SEQ ID NO: 34) | strand |
| | | | synthesis |
| 35 | LV3 | GGGCCCAGGCGGCCGAGCTCGTGCTGACTCAGCCACCC | Second- |
| | | (SEQ ID NO: 35) | strand |
| | | | synthesis |
| 36 | LV4 | GGGCCCAGGCGGCCGAGCTCGAGCTGACACAGCCACCC | Second- |
| | | (SEQ ID NO: 36) | strand |
| | | | synthesis |
| 37 | LV5 | GGGCCCAGGCGGCCGAGCTCGTGCTGACTCAATCATCCTCTGC | Second- |
| | | (SEQ ID NO: 37) | strand |
| | | | synthesis |
| 38 | LV6 | GGGCCCAGGCGGCCGAGCTCGTGCTGACTCAGCCGTCTTC | Second- |
| | | (SEQ ID NO: 38) | strand |
| | | | synthesis |
| 39 | LV7 | GGGCCCAGGCGGCCGAGCTCGTGGTGACTCAGGAGCCCTC | Second- |
| | | (SEQ ID NO: 39) | strand |
| | | | synthesis |
| 40 | LV8 | GGGCCCAGGCGGCCGAGCTCGTGCTGACTCAGCCACCTTC | Second- |
| | | (SEQ ID NO: 40) | strand |
| | | | synthesis |
| 41 | LV9 | GGGCCCAGGCGGCCGAGCTCGTCGTGACGCAGCCGCC | Second- |
| | | (SEQ ID NO: 41) | strand |
| | | | synthesis |
| 42 | LV10 | GGGCCCAGGCGGCCGAGCTCGCCCTGACTCAGCCTCGC | Second- |
| | | (SEQ ID NO: 42) | strand |
| | | | synthesis |
| 43 | LV11 | GGGCCCAGGCGGCCGAGCTCGAGCTGACTCAGCCACACTC | Second- |
| | | (SEQ ID NO: 43) | strand |
| | | | synthesis |
| 44 | LV12 | GGGCCCAGGCGGCCGAGCTCGTGCTGACTCAGCCAACCTC | Second- |
| | | (SEQ ID NO: 44) | strand |
| | | | synthesis |
| 45 | LV13 | GGGCCCAGGCGGCCGAGCTCGTGGTGACCCAGGAGCCATC | Second- |
| | | (SEQ ID NO: 45) | strand |
| | | | synthesis |
| 46 | LV14 | GGGCCCAGGCGGCCGAGCTCGAGCTGACTCAGGACCCTGC | Second- |
| | | (SEQ ID NO: 46) | strand |
| | | | synthesis |
| 47 | LV15 | GGGCCCAGGCGGCCGAGCTCGAGCTGATGCAGCCACCC | Second- |
| | | (SEQ ID NO: 47) | strand |
| | | | synthesis |
| 48 | LV16 | GGGCCCAGGCGGCCGAGCTCGAGCTGACACAGCCATCCTC | Second- |
| | | (SEQ ID NO: 48) | strand |
| | | | synthesis |
| 49 | LV17 | GGGCCCAGGCGGCCGAGCTCGTGCTGACTCAGCCCCCG | Second- |
| | | (SEQ ID NO: 49) | strand |
| | | | synthesis |
| 50 | KJ1 | GGAAGATCTAGAGGAACCACCTTTGATCTCCAGCTTGGTCCC | Second- |
| | | (SEQ ID NO: 50) | strand |
| | | | synthesis |
| 51 | KJ2 | GGAAGATCTAGAGGAACCACCTTTGATTTCCACCTTGGTCCCTTG | Second- |
| | | (SEQ ID NO: 51) | strand |
| | | | synthesis |
| 52 | KJ3 | GGAAGATCTAGAGGAACCACCTTTGATATCCACTTTGGTCCCAGG | Second- |
| | | (SEQ ID NO: 52) | strand |
| | | | synthesis |
| 53 | KJ4 | GGAAGATCTAGAGGAACCACCTTTAATCTCCAGTCGTGTCCCTTG | Second- |
| | | (SEQ ID NO: 53) | strand |
| | | | synthesis |
| 54 | LJ1 | GGAAGATCTAGAGGAACCACCGCCTAGGACGGTCAGCTTGGTCC | Second- |
| | | (SEQ ID NO: 54) | strand |
| | | | synthesis |
| 55 | LJ2 | GGAAGATCTAGAGGAACCACCGCCTAGGACGGTGACCTTGGTCC | Second- |
| | | (SEQ ID NO: 55) | strand |
| | | | synthesis |
| 56 | LJ3 | GGAAGATCTAGAGGAACCACCGCCGAGGACGGTCACCTTGGTG | Second- |
| | | (SEQ ID NO: 56) | strand |
| | | | synthesis |
| 57 | LJ4 | GGAAGATCTAGAGGAACCACCGCCGAGGGCGGTCAGCTGGG | Second- |
| | | (SEQ ID NO: 57) | strand |
| | | | synthesis |
| 58 | AMP_H_ | GGTGGTTCCTCTAGATCTTCCTCCTCTGGTGGCGGTGGCTCGGGCGGTGGTGGG | First |
| | forward | (SEQ ID NO: 58) | round |
| | | | PCR |
| 59 | AMP_H_ | CCTGGCCGGCCTGGCCAC (SEQ ID NO: 59) | First |
| | reverse | | round |
| | | | PCR |
| 60 | AMP_K/L_ | GGGCCCAGGCGGCCGAG (SEQ ID NO: 60) | First |
| | forward | | round |
| | | | PCR |
| 61 | AMP_K/L_ | GGAAGATCTAGAGGAACCACC (SEQ ID NO: 61) | First |
| | reverse | | round |
| | | | PCR |
| 62 | EXT-fwd | GGCGGGGCCCAGGCGGCCGAGCTC (SEQ ID NO: 62) | Overlap |
| | | | extension |
| | | | PCR |
| 63 | EXT-rev | GAGCCTGGCCGGCCTGGCCACTAGT (SEQ ID NO: 63) | Overlap |
| | | | extension |
| | | | PCR |

[0089] Then, the raw NGS forward (R1) and reverse (R2) reads were merged, filtered based on Phred scores, and subclustered using UMI using paired-end read merger (PEAR), v0.9.10, and Clustal Omega, v1.2.4, with the default setting[18, 19]. The sequence annotation process used the IMGT (International Immunogenetics Information System) constant gene database[20] to obtain the isotype, and IgBLAST, v1.17.1 to obtain VJ genes, CDR1/2/3 sequences, and the number of mutations from the corresponding V genes as previously described[4]. To eliminate the possibility of contamination due to index swapping within Illumina flow cells between samples, reads with identical sequences including the UMI from different samples were excluded on the basis that such an event is highly unlikely without contamination[22]. The combined NGS throughput of each sample is listed in Tables 1 and 2. Sequencing reads that have survived through the entire process is considered to be a productive BCR sequence.

### Example 3—BCR Repertoire Sharing and Exclusion Analysis

[0090] First, shared BCR clonotypes are defined in this study as a unique combination of V gene, J gene, and CDR3 amino acid sequence which are present in 2 or more subjects within a cohort. The shared BCR sequences in this context refer to the collective BCR sequences that can be grouped into each shared BCR clonotype.

[0091] Clonotypes which consist only of naïve sequences in the NGS data obtained the above Example 2, those with the IgM or IgD isotype with 1 or less somatic mutations were excluded from further analysis to account only for shared clonotypes arising from shared antigenic stimuli[3]. Due to potential risk of molecular contamination during the NGS library preparation stage, an additional strict in silico filtering step was employed. Shared clonotypes that have patient specific sets of unique BCR nucleotide sequences that are completely eclipsed by another patient's set was considered as contamination due to the low likelihood of 2 different people sharing only the same exact somatic mutations in the nucleotide level.

[0092] The similarity score based on shared cohort specific BCR clonotypes was calculated as the cosine similarity of the two vectors each representing a subject's repertoire. The vectorization process involved utilizing one-hot encoding to create a vector with the length equal to the total number of cohort specific and shared BCR clonotypes.

[0093] The presence or absence of each clonotypes for the patient was encoded as either the value 1 or 0. The cosine similarity being calculated as the inner product divided by the product of the size of each vector can be interpreted as the number of shared cohort specific shared clonotypes both present in a patient pair divided by the square root of the product of the total number of cohort specific shared clonotypes for each patient.

### Example 4—Construction of scFv Phage Display Library and Bio-Panning

[0094] In BCR repertoire of the above Example 3, for the V_{H} gene, V3-7/J1 VRLAEYFQN clonotype which is the most shared among all patients was chosen to test the affinity to Aβ42 peptide. In total, 16 sequences are included in that of clonotype and 9 out of 16 were presented in TP2. And 4 out of 9 sequences were synthesized in gBlocks Gene Fragments (Integrated DNA Technologies) depending on their sequence diversity of the CDR1, 2 regions at the amino acid level and somatic hypermutation status. For the construction of V_{κ}/V_{λ} shuffled libraries, total RNA from patients who possess the V3-7/J1 VRLAEYFQN clonotype in TP2 (AD9, AD14 and AD34) was used to synthesize cDNA using SuperScript IV First-Strand Synthesis System (Invitrogen) with gene-specific primers amplifying the J_{H} and C_{κ/λ} genes (No. 17, 18-20), respectively. Patient 35 also had that of heavy chain, however, experiments were preceded before he joined the second blood drawing. It was purified with SPRI beads (Beckman Coulter AMPure XP Reagents) at a 1:1.8 ratio and the purified cDNA was used for the first round of PCR synthesis using V_{κ}/V_{λ} and J_{κ}/J_{λ} gene-specific primers (No. 21-57; 95° C. for 3 min. 4 cycles of 98° C. for 1 min, 60° C. for 1 min, 72° C. for 1 min, and 72° C. for 10 min). Likewise, it was purified with SPRI beads at a 1:1 ratio. After that, both 4 synthesized V_{H} gene and V_{κ}/V_{λ} genes from 3 patients' total RNA were amplified using a KAPA Biosystems kit (Roche) with following primers (No. 58-61; 95° C. for 3 min. 27 cycles of 98° C. for 30 s, 65° C. for 30 s, 72° C. for 1 min, and 72° C. for 10 min). Then, each gene fragment of V_{H} and V_{κ}/V_{λ} was subjected to electrophoresis on a 1.5% agarose gel and purified through the size of each DNA using QIAquick gel extraction kit (QIAGEN) following the manufacturer's instructions. The amplified 4 V_{H} and V_{κ}/V_{λ} gene fragments from 3 patients were mixed at equal ratio to make a single pool of V_{H} and V_{κ}/V_{λ} gene, respectively. From the equally mixing pool of V_{H} and V_{κ}/V_{λ}, same amount (100 ng) of each gene fragments were subjected to overlap extension PCR to generate final scFv genes by using a KAPA Biosystems kit (Roche) with overlap extension primers (No. 62, 63:95° C. for 3 min. 25 cycles of 98° C. for 30 s, 65° C. for 30 s, 72° C. for 1 min 30 s, and 72° C. for 10 min). After that, the amplified scFv genes were purified and cloned into a phagemid vector as described previously[23].

[0095] Phage display of the human scFv library with 1.1×10⁹ colony-forming units was generated using 4 types of synthesized V_{H} gene fragment and shuffled V_{κ}/V_{λ} gene which derived from the cDNA of patient No. 6, 14 and 34. Following library was subjected to four rounds of bio-panning against the human Aβ42 peptide (Tocris Bioscience Amyloid β-Peptide 1-42 human, 1428) as described previously[24, 25]. Phage-display experiments including reamplification, rescue and PEG precipitation of library were mainly carried out with the protocols described in Phage Display: A Laboratory Manual [26]. Briefly, 2 μg of the Aβ42 peptide was coated to the surface of the immunotube with high binding surface (SPL Life Sciences, 43015) at 4° C. for 16 hours and blocked with 5 ml of 3% bovine serum albumin (BSA) in PBS (w/v). Then, the scFv phage library (about 1013 phages) was incubated for 2 hours at room temperature. During the first round of panning, the tube was washed once with 5 ml of 0.05% (v/v) Tween 20 (Sigma-Aldrich, P1379) in phosphate-buffered saline (PBST). After each round of panning, remaining phages bound to the coated antigen were eluted and rescued for the next round of bio-panning as described above. For the other rounds of panning, the number of washes was increased to three. To select antigen reactive scFv phage clones, each phage clones from the titration plate of the last round of panning was subjected to phage ELISA, using the antigen-coated microtiter plates, as described previously[26]. Reactive scFv clones were analyzed through Sanger nucleotide sequencing using their phagemid DNA extracted from the individual phage clones as discussed before[4]. A recombinant scFv protein tagged with human IgG1 FC (hFc) was expressed in mammalian expression system and purified as describe previously[4].

### Example 5—Enzyme-Linked Immunosorbent Assay

[0096] The specificity and antigen affinity of individual phage scFv clones and recombinant scFv-hFc fusion proteins of the above Example 4 were assessed by ELISA. 100 nM of human Aβ42 peptides, dissolved in 50 μl of 0.1 M sodium bicarbonate coating buffer (pH 8.6), were added to each well of 96-well microtiter plates (Corning, 3690) as described earlier. Shortly, the plates were coated with the antigen by incubation at 4° C. for 16 hours and blocked with 3% BSA in PBS (w/v) at 37° C. for 1 hours. After shaking off the blocking solution, serially diluted phage supernatant (twofold) or scfv-hFc (fivefold, S dilutions, starting from 1 μM to 12.8 pM) in blocking buffer were added to the wells of microtiter plates and incubated at 37° C. for 2 hours. Then, plates were washed three times with 0.05% PBST (v/v). For ELISAs with phage clones, HRP-conjugated rabbit antihuman IgG Fc antibody (Invitrogen, 31423, 1:5,000) and HRP-conjugated anti-M13 antibody (Sino Biological, 11973-MM05T-H, 1:4,000) were diluted in blocking buffer as manufacturer's protocols, followed by adding to wells and incubated at 37° C. for 1 hours. It performed respectively in the duplicated batch to determine the amount of antigen-reactive antibody or M13 bacteriophage. In ELISA for the recombinant scFvhFc fusion proteins, HRP-conjugated rabbit anti-human IgG Fc antibody (Invitrogen, 31423, 1:5,000) was added to wells and incubated at 37° C. for 1 hours. After washing three times with 0.05% PBST, 2,2′-azino-bis-3-ethylbenzothiazoline-6-sulfonic acid solution (Invitrogen, 002024) was added to the wells as an HRP substrate. Absorbance was measured at 415 nm, respectively, using a microplate spectrophotometer (Thermo Fisher Scientific Inc., Multiskan GO). All assays were carried out in duplicate.

### Example 6—Selection of Stereotypic AD Patient-Specific Non-Naïve BCR Clonotypes

[0097] For a period of 75 weeks, peripheral blood (PB) samples were collected from 44 Alzheimer patients with a median age of 75 years (standard deviation; 7.04) and sex ratio of 34% and 66% (male vs female). Except for seven patients (Patient ID 3, 5, 8, 19, 28, 30, and 37), PB samples were collected twice with interval between 14 and 53 weeks (FIG. 1A). The duration for the first and second PB sampling was 61 and 34 weeks, respectively. From these 81 PB samples, cDNA was prepared and subjected to the amplification of a gene fragment encoding variable domain (VH) and Nterminal part of constant domain 1 (CH1) of B cell receptor (BCR) heavy chain using a specific primer set (Tables 1 and 2), which were analyzed in next generation sequencing with a median read of 245,033 (standard deviation of 184,462, Tables 4 and 5). For the analysis of BCR repertoire, we first removed naïve BCR sequences, which we define as those with IgM or ID isotype containing less than 1 somatic hypermutation (SHM). Then we grouped the remaining sequences into clonotypes, which was defined as a collection of sequences sharing the same CDR3 sequence at the amino acid level as well as encoded by identical IGHV and IGHJ genes[3]. Among these BCR clonotypes, AD patient-specific clonotypes were selected by excluding clonotypes found in a control group (CG) established in our prior studies, which was constituted with 55 vaccinees (285 PB samples obtained chronologically) injected three times with COVID-19 vaccine15 (FIG. 1B, Table 3). Control group specific non-naïve BCR clonotypes were also obtained following the same procedures. Before further analysis, we tried to remove any possibility of aerosol molecular contamination during NGS library preparation and index switching during sequencing[1]. For this, we excluded all the stereotypic clonotypes in which each patient or control did not show unique BCR sequences at the nucleotide level.

[0098] After all these selection processes we could select 3.983 and 83,821 BCR clonotypes specific to AD patient group or control group, respectively (FIG. 1C).

TABLE 3
Demographics of AD and CG group

| Characteristics | AD cohort | CG cohort |
|---|---|---|
| Number | 44 | 55 |
| Age (years) | 74.9 ± 6.9* | 33.2 ± 9.1 |
| Sex (M:F) | 15:29 | 26:29 |

AD, Alzheimers disease; approved under the recommendations of the Institutional Review Board (IRB) of the Seoul National University Bundang Hospital (SNUBH, IRB approval number, B-2102-664-305), South Korea.
CG, Vaccination control group; approved by the IRB of Seoul National University Hospital (SNUH, IRB approval number, 2102-032-1193), South Korea.
*Age based on time of first sampling (TP1)

TABLE 4
Vaccine cohort

| subject | TP1 | TP2 | TP3 | TP4 | TP5 | TP6 |
|---|---|---|---|---|---|---|
| 1 | 116846 | 74116 | N/A | 308607 | 503110 | 363352 |
| 2 | N/A | 412242 | 359933 | 637596 | N/A | N/A |
| 3 | N/A | 233382 | 386838 | 207509 | 200078 | 392932 |
| 4 | 297560 | 295471 | 288481 | 298874 | 225565 | 159801 |
| 5 | 277423 | 338856 | 276439 | 292434 | 100454 | 328502 |
| 6 | 117645 | 304697 | 281448 | 261449 | N/A | 90170 |
| 7 | 167730 | 447446 | 396370 | 425845 | N/A | 308297 |
| 8 | 201381 | 272153 | 238318 | 250530 | 98330 | N/A |
| 9 | 71061 | 312156 | 268349 | 146753 | 177497 | 166913 |
| 10 | 110138 | 328043 | 321325 | 225229 | 311158 | 426625 |
| 11 | 115745 | 304497 | 349801 | 219420 | 296670 | N/A |
| 12 | 83882 | 367630 | 386806 | 480477 | N/A | N/A |
| 13 | 94375 | 285776 | 365978 | 210716 | 540447 | 132993 |
| 14 | 136815 | 277598 | 73364 | 394457 | 452999 | 398426 |
| 15 | 257019 | 287627 | 352889 | 436163 | 292988 | 131853 |
| 16 | 69313 | 264901 | N/A | N/A | 380708 | N/A |
| 17 | 186003 | 254969 | 411110 | 155924 | 185741 | 433726 |
| 18 | 143543 | 89465 | 447991 | 352477 | 384304 | N/A |
| 19 | 188195 | N/A | 434379 | 411592 | 535408 | N/A |
| 20 | 79075 | 763067 | 332463 | 634987 | N/A | N/A |
| 21 | 130318 | 44297 | 251913 | 327060 | 236588 | 526006 |
| 22 | 108257 | 127565 | 611092 | 186488 | N/A | 239071 |
| 23 | 106012 | N/A | 622746 | 193718 | 343870 | 182295 |
| 24 | 86189 | 125168 | 381850 | N/A | 135668 | N/A |
| 25 | 217788 | 290448 | 307991 | 244198 | 386140 | N/A |
| 26 | 268423 | 269479 | 287259 | 527800 | 115860 | N/A |
| 27 | 276442 | 294510 | 397970 | 327793 | 470213 | 494132 |
| 28 | 73922 | 170608 | 229818 | 153453 | 298818 | 272185 |
| 29 | 106076 | 160933 | 284978 | 198595 | 210089 | N/A |
| 30 | 350181 | 137372 | 376001 | 93516 | 98233 | 172479 |
| 31 | 57928 | 156320 | 712424 | 209826 | 217594 | N/A |
| 32 | 520050 | 186185 | 506773 | 289453 | 353165 | 543473 |
| 33 | 139592 | 161044 | 272372 | 196285 | 327832 | 297902 |
| 34 | 111086 | 250341 | 283938 | 194308 | 59673 | N/A |
| 35 | 164995 | 234015 | 416674 | N/A | 371122 | 354917 |
| 36 | 108078 | 306270 | 266945 | 137483 | 274328 | 289645 |
| 37 | N/A | 915107 | 335969 | 391259 | 409694 | N/A |
| 38 | 205087 | 357783 | 379389 | 221707 | 668335 | 379577 |
| 39 | 180835 | 355525 | 121246 | N/A | 255377 | 208146 |
| 40 | 151495 | 223316 | 133059 | 178507 | 322811 | 112402 |
| 41 | 171548 | N/A | 389549 | 186037 | 243664 | 132788 |
| 42 | 135524 | 271827 | 295086 | 239576 | N/A | N/A |
| 43 | 166742 | 239590 | 128758 | 64537 | 123037 | 301277 |
| 44 | 137807 | 367324 | 494786 | 91489 | 661630 | 363467 |
| 45 | 92714 | 215559 | 523444 | 94863 | 253647 | 131049 |
| 46 | N/A | 301442 | 597236 | 219932 | N/A | N/A |
| 47 | 69303 | 279692 | 447821 | 116292 | 184017 | N/A |
| 48 | N/A | 274990 | 264335 | 277660 | 339829 | 103204 |
| 49 | 170408 | 253677 | 312839 | 146165 | 175187 | 435089 |
| 50 | 235553 | 310495 | 234564 | 153694 | 383540 | 395902 |
| 51 | 19505 | N/A | 290752 | 125531 | 280175 | N/A |
| 52 | 86072 | 389170 | 441317 | 201485 | 373482 | 276724 |
| 53 | 232760 | 345513 | 541998 | 109294 | 259369 | 302281 |
| 54 | 66017 | 300447 | 565089 | 125593 | 176918 | 92764 |
| 55 | N/A | 314304 | 276673 | 79930 | 277668 | 375069 |

TABLE 5
Alzheimer's disease

| subject | TP1 | TP2 |
|---|---|---|
| 1 | 278490 | 298543 |
| 2 | 482372 | 386775 |
| 3 | 375502 | N/A |
| 4 | 238549 | 255707 |
| 5 | 430371 | N/A |
| 6 | 216502 | 172377 |
| 7 | 163212 | 228539 |
| 8 | 357746 | N/A |
| 9 | 462337 | 264165 |
| 10 | 736856 | 190256 |
| 11 | 646467 | 376727 |
| 12 | 134150 | 177258 |
| 13 | 644200 | 126737 |
| 14 | 403475 | 334311 |
| 15 | 592160 | 139445 |
| 16 | 333471 | 367383 |
| 17 | 230042 | 235500 |
| 18 | 291166 | 301188 |
| 19 | 639201 | N/A |
| 20 | 168072 | 132959 |
| 21 | 193563 | 223286 |
| 22 | 263507 | 280624 |
| 23 | 252792 | 56821 |
| 24 | 383144 | 171485 |
| 25 | 457475 | 161323 |
| 26 | 82630 | 135646 |
| 27 | 138279 | 138835 |
| 28 | 116251 | N/A |
| 29 | 454885 | 245033 |
| 30 | 851831 | N/A |
| 31 | 317011 | 122818 |
| 32 | 506812 | 286435 |
| 33 | 724754 | 108953 |
| 34 | 919858 | 193478 |
| 35 | 225313 | 164490 |
| 36 | 235339 | 112636 |
| 37 | 658256 | N/A |
| 38 | 392077 | 205251 |
| 39 | 194282 | 178175 |
| 40 | 267038 | 177530 |
| 41 | 38294 | 63111 |
| 42 | 141594 | 172079 |
| 43 | 262308 | 192285 |
| 44 | 273453 | 331364 |

### Example 7 Stereotypic AD Patient-Specific Non-Naïve Clonotypes Showed Significantly Higher Degree of Overlap in Patient Pairs Compared to CG Pairs

[0099] Then, the present inventors analyzed the distribution of stereotypic AD patient-specific BCR clonotypes in 1,892 ((44 X 44)-44) or 1,332 ((37 X 37)-37) patient pairs in the first and the second PB samples, respectively. The present inventors calculated the degree of overlap for stereotypic BCR clonotypes in each pair as the cosine similarity of one-hot encoded vectors representing the presence or absence of each stereotypic clonotype in a patient's BCR repertoire. The present inventors also obtained the degree of overlap for the CG pairs in six PB sampling points. As expected, there was dramatic increase in the average cosine similarity at time point (TP) 3, the TP4 and TP6 PB samples obtained right after the second-, 1 month after the second-, and right after the third-injection of COVID-19 vaccine, respectively, due to the concerted BCR response toward the immunogen compared to the pre-vaccinated state (TP1) (FIG. 2A-C, p=4.92×10⁶, p=2.52×10⁻³⁰, p=2.26×10⁻¹¹²). AD patient pairs showed much higher average cosine similarity at both sampling points compared to CG TP1 with statistical significance (p=2.06×10⁻²¹, p=1.22×10⁻¹⁶⁹). The value was higher at the second PB samples and might be originated from shorter PB sampling duration (61 weeks vs 34 weeks), which would provide less diverse seasonal antigens to AD patients. It was quite astonishing that the average cosine similarity of the second PB samples was higher than that of TP6 PB samples of CG showing the highest value among CG PB samples with statistical significance (p=1.86×10⁻⁶). This observation was extra-ordinary when we consider that PB sampling duration was much longer in AD patients (34 weeks vs 6 weeks). As the present inventors do not aware of COVID-19 infection history or vaccination of AD patients, the present inventors performed the same analysis without excluding stereotypic BCR clonotype of AD patients from stereotypic clonotypes of CG. The cosine similarity value of AD patients' PB samples at both TP1 and TP2 were higher than those of CG's PB samples with statistical significance at all TPs except for TP6, which were similar (FIGS. 4A-C). These analysis clearly showed that AD patients shares stereotypic BCR clonotypes at an equivalent or higher degree compatible to vaccinees who received their third injection for the previous six weeks before PB sampling irrespective of AD patients much longer PB sampling period of 34 weeks.

[0100] Analysis of the present inventors showed that the degree of overlap on the stereotypic AD patient-specific BCR clonotypes significantly differs in patients pairs suggesting the existence of patient subgroups categorized by their BCR clonotypes. To find these patient subgroups, the stereotypic AD patient-specific BCR clonotypes at all TPs in each patient were combined and the cosine similarity of patient pairs were calculated. Twenty patient pairs with the highest cosine value were selected and displayed in Chord plot (FIG. 2D), in which the patients were divided to six subgroups. Among these pairs, one patient pair (patient ID 26 and 28) had an outlying degree of cosine similarity value of 0.961. And the number of BCR clonotypes was also extraordinarily high (FIG. 2E). Indeed, among 1,225 and 1,228 stereotypic BCR clonotypes in patient ID 26 and patient ID 28, respectively. 1,179 clonotypes were shared by these two patients. The presence of AD patient subgroups showing high degree of overlap in their BCR clonotypes strongly suggested the existence of common and possibly auto-antigens shared by the subgroup.

[0101] Results of the present inventors suggest that the antibodies encoded by stereotypic AD patient-specific BCR clonotypes are developed by chronic exposure to autoantigens through the progression of disease.

[0102] It can be confirmed that the presence of common immunogen among AD patients shaping their BCR repertoire to coordinated directions through this. It was also found that many of these stereotypic AD patient-specific BCR clonotypes or their very homologous clonotypes persisted over a period of 14 and 53 weeks (FIG. 3A). And when examining one group of long-lasting homologous BCR clonotypes at the individual sequence level, the present inventors could find not only the occurrence of CSR but also the accumulation of SHM at degree achievable only after the third injection of COVID-19 vaccine[1] (FIG. 3B). This finding revealed that the exposure to this common immunogen was not a single event in AD patients sharing these homologous clonotypes.

[0103] Collectively, the above results of the present inventors strongly suggested the existence of common autoantigens persisting inside AD patients provoking concerted humoral immunity.

### Example 8—a Highly Shared and Persistent AD Patient-Specific BCR Clonotype Encoded Antibody Reactive to Aβ42 Peptide

[0104] To identify the antigens to which these stereotypic AD patient-specific BCR clonotypes are reactive, we selected twenty most highly shared clonotypes present in four or higher number of patients (FIG. 3A). We also focused on the persistence of these clonotypes through the two TPs. One clonotype encoded by IGHV3-7/IGHJ1 genes with the CDR3 sequence of VRLAEYFQN were present at both TPs in three patients. And when we allow one amino acid mismatch in CDR3, one more patient (patient ID 34) with the similar clonotype (CDR3 sequence: VRLAEYFQH) at TP1 was found (FIG. 3A). In 285 PB samples of CG, we could not find any BCR clonotypes encoded by IGHV3-7/IGHJ1 genes and with CDR3 sequences homologous to VRLAEYFQN with amino acid mismatch allowance (FIG. 3B). The present inventors collected BCR sequences of all clonotypes encoded by IGHV3-7/IGHJ1 and with CDR3 sequences homologous to VRLAEYFQN with one amino acid mismatch allowance (FIG. 3C). The class switch recombination (CSR) to IgG1 and IgG3 was found in three patients. And the BCR sequences harbored somatic hypermutation (SHM) ranging from 4 to 19 in CDR1, CDR2 and the framework regions. As the occurrence of CSR and accumulation of SHM on these BCR sequences is the hallmark of chronic repeated exposure to antigen[4], there was a possibility for these clonotypes to develop by autoantigen.

[0105] Among these BCRs, the present inventors synthesized four BCR heavy chain genes (Table 6) and used them to construct a single-chain variable fragment (scFv) phage display library using the amplified light chain genes of AD patients (patient ID 6, 14, and 34) possessing IGHV3-7/IGHJ1 VRLAEYFQN clonotype. Then the present inventors performed biopanning of this library on Aβ42 peptide, a well-known autoantigen in AD [2], and could get antigen-reactive scFv clones. When the present inventors expressed these clones as recombinant scFv-human Fc fusion proteins and performed an ELISA, two scFv clones with different k light chains (FIGS. 3C, and 5) showed reactivity against the Aβ42 peptide, with half-maximal effective concentrations (EC50) of 48.37 nM and 58.27 nM, respectively (FIG. 3D).

TABLE 6
Synthesized BCR heavy chain sequences

| Se- | Con- | | | | | | Somatic |
|---|---|---|---|---|---|---|---|
| quence | verged | | V | J | C | | hyper- |
| ID | patients | Germline_alignment | gene | gene | gene | Sequence | mutation |
| SNUBH- | SNUBH- | TGCAGCCTCTGGATTCACCTTTAGTAG | IGHV3- | IGHJ1 | IGHM | GAGGTGCAGCTGGTGGAGTCTGGGG | 5 |
| 34-2- | 14- | ATATTGGATGAGCTGGGTCCGCCAGG | 7*01 | *01 | *04 | GAGGCTTGGTCCAGCCTGGGGGGTC | |
| 91969 | 2\|SNUBH- | CTCCAGGGAAGGGGCTGGAGTGGGT | | | | CCTGAGACTCTCCTGTGCAGCCTCTG | |
| | 34- | GGCCAACATAAAGCAAGATGGAAGT | | | | GATTCACCTTTAGTAGATATTGGATGA | |
| | 2\|SNUBH- | GACAAATACTATGTGGACTCTGTGAA | | | | GCTGGGTCCGCCAGGCTCCAGGGAA | |
| | 6-2 | GGGCCGAGTCACCATCTCCAGAGACA | | | | GGGGCTGGAGTGGGTGGCCAACATA | |
| | | ACGCCAAGAACTCACTGTATCTGCAA | | | | AAGCAAGATGGAAGTGACAAATACTA | |
| | | ATGAACAGCCTGAGAGCCGAGGACA | | | | TGTGGACTCTGTGAAGGGCCGAGTCA | |
| | | CGGCTGTATATTACTGTGTGAG---- | | | | CCATCTCCAGAGACAACGCCAAGAAC | |
| | | GCTGAATACTTCCAGCACTGGGGCCA | | | | TCACTGTATCTGCAAATGAACAGCCTG | |
| | | GGGCACCCTGGTCACCGTCTCCTCA | | | | AGAGCCGAGGACACGGCTGTATATTA | |
| | | (SEQ ID NO: 64) | | | | CTGTGTGAGACTCGCTGAATACTTCCA | |
| | | | | | | GAACTGGGGCCAGGGCACCCTGGTC | |
| | | | | | | ACCGTCTCCTCA | |
| | | | | | | (SEQ ID NO: 65) | |
| SNUBH- | SNUBH- | TGCAGCCACTGGATTCGTCTTTAGTCG | IGHV3- | IGHJ1 | IGHG3 | GAGGTGCAGCTGGTGGAGTCTGGGG | 17 |
| 14-2- | 14- | TTATTGGATGAGTTGGGTCCGCCAGG | 7*03 | *01 | *29 | GAGGCTTGGTCCAGCCTGGGGGGTC | |
| 24582 | 2\|SNUBH- | CTCCAGGGAAGGGGCTGGAGTGGGT | | | | CCTGAGACTCTCCTGTGCAGCCACTG | |
| | 34- | GGCCAATTTAAAATATGATGGAAGTG | | | | GATTCGTCTTTAGTCGTTATTGGATGA | |
| | 2\|SNUBH- | AGAAACACTATGTGGACTCTGTGAAG | | | | GTTGGGTCCGCCAGGCTCCAGGGAA | |
| | 6-2 | GGCCGATTCACCATCTCCAGAGACAA | | | | GGGGCTGGAGTGGGTGGCCAATTTA | |
| | | CGCCAAGAACTCAGTCTATCTGCAAAT | | | | AAATATGATGGAAGTGAGAAACACTA | |
| | | GAACAGCCTGAGAGCCGAGGACACG | | | | TGTGGACTCTGTGAAGGGCCGATTCA | |
| | | GCCGTGTATTTCTGTGTAAG---- | | | | CCATCTCCAGAGACAACGCCAAGAAC | |
| | | GCTGAATACTTCCAGCACTGGGGCCA | | | | TCAGTCTATCTGCAAATGAACAGCCTG | |
| | | GGGCACCCTGGTCACCGTCTCCTCA | | | | AGAGCCGAGGACACGGCCGTGTATTT | |
| | | (SEQ ID NO: 66) | | | | CTGTGTAAGACTCGCTGAATACTTTCA | |
| | | | | | | GAACTGGGGCCAGGGCACCCTAGTC | |
| | | | | | | ACCGTCTCCTCA | |
| | | | | | | (SEQ ID NO: 67) | |
| SNUBH- | SNUBH- | TGCAGCCTCTGGATTCACCTTTAGTAG | IGHV3- | IGHJ1 | IGHM | GAGGTGCAGCTGGTGGAGTCTGGGG | 7 |
| 14-2- | 14- | GTTTTGGATGAGTTGGGTCCGCCAGG | 7*03 | *01 | *04 | GAGGCTTGGTCCAGCCTGGGGGGTC | |
| 24702 | 2\|SNUBH- | CTCCAGGGAAGGGGCTGGAGTGGGT | | | | CCTGAGACTCTCCTGTGCAGCCTCTG | |
| | 34- | GGCCAACATAAACCAAGATGGAAGTG | | | | GATTCACCTTTAGTAGGTTTTGGATGA | |
| | 2\|SNUBH- | AGAAATACTATGTGGACTCTGTGAAG | | | | GTTGGGTCCGCCAGGCTCCAGGGAA | |
| | 6-2 | GGCCGATTCACCCTCTCCAGAGACAA | | | | GGGGCTGGAGTGGGTGGCCAACATA | |
| | | CGCCAAGAACTCACTGTATTTGCAAAT | | | | AACCAAGATGGAAGTGAGAAATACTA | |
| | | GAACAGTCTGAGAGCCGAGGACACG | | | | TGTGGACTCTGTGAAGGGCCGATTCA | |
| | | GCCGTGTATTACTGT--------- | | | | CCCTCTCCAGAGACAACGCCAAGAAC | |
| | | GCTGAATACTTCCAGCACTGGGGCCA | | | | TCACTGTATTTGCAAATGAACAGTCTG | |
| | | GGGCACCCTGGTCACCGTCTCCTCA | | | | AGAGCCGAGGACACGGCCGTGTATTA | |
| | | (SEQ ID NO: 68) | | | | CTGTGTAAGGCTCGCTGAATACTTCCA | |
| | | | | | | GAACTGGGGCCAGGGCACCCTGGTC | |
| | | | | | | ACCGTCTCCTCA | |
| | | | | | | (SEQ ID NO: 69) | |
| SNUBH- | SNUBH- | TGTAGCCTCTGGATTCACCTTTAGTAG | IGHV3- | IGHJ1 | IGHM | GAGGTGCAGCTGGTGGAGTCTGGGG | 11 |
| 6-2- | 14- | GTATTGGATGAGCTGGGTCCGCCAGG | 7*01 | *01 | *04 | GAGGCTTGGTCCAGCCTGGGGGGTC | |
| 27474 | 2\|SNUBH- | CTCCAGGGAAGGGGCTGGAGTGGGT | | | | CCTGAGACTCTCCTGTGTAGCCTCTGG | |
| | 34- | GGCCAACATAAAGCACGATGGCAGTG | | | | ATTCACCTTTAGTAGGTATTGGATGAG | |
| | 2\|SNUBH- | AGGAAGACTATGTGGACTCTGTGAAG | | | | CTGGGTCCGCCAGGCTCCAGGGAAG | |
| | 6-2 | GGCCGATTCACCCTCTCCAGAGACAG | | | | GGGCTGGAGTGGGTGGCCAACATAA | |
| | | CGCCAAGAACTCACTGTATCTGCAAAT | | | | AGCACGATGGCAGTGAGGAAGACTAT | |
| | | GAACAGCCTGAGAGTCGAGGACACG | | | | GTGGACTCTGTGAAGGGCCGATTCAC | |
| | | GCTATATATTACTGTG-- | | | | CCTCTCCAGAGACAGCGCCAAGAACT | |
| | | CGTTTGGCTGAATACTTCCAGCACTG | | | | CACTGTATCTGCAAATGAACAGCCTGA | |
| | | GGGCCAGGGCACCCTGGTCACCGTCT | | | | GAGTCGAGGACACGGCTATATATTACT | |
| | | CCTCA (SEQ ID NO: 70) | | | | GTGTTCGTTTGGCTGAATACTTCCAGA | |
| | | | | | | ACTGGGGCCAGGGCACCCTGGTCAC | |
| | | | | | | CGTCTCCTCA (SEQ ID NO: 71) | |

[0106] With this, the present inventors identified BCR clonotypes that are AD specific and convergent among multiple patients using a total of 81 repertoires from 44 patients. Despite the stringent filtering process, both distribution and clonotype cosine similarity of stereotypic group specific clonotypes among Alzheimer patients were significantly increased compared to the repertoires of VC. When it comes to individual clonotypes, among the top 20 highly shared in AD patients, the V3-7/J1 VRLAEYFQN clonotype showed distinct characteristics such as full persistence in all possessing patients, exclusion from VC repertoires even for the extended clonotype, class switching in multiple patients, and a highly diverse mutation profile. Therefore, it was chosen for phage library construction and subsequent bio-panning. As a result, two scFv clones showed binding affinity against the human Aβ42 peptide.

[0107] Through this, it was confirmed that the composition according to one aspect of the present invention has an excellent effect in predicting or diagnosing Alzheimer's disease by simply using peripheral blood mononuclear cells isolated from a subject, in addition to methods such as MRI and PET scans using radioactive substances, by comprising a detecting agent of a B cell receptor (BCR) clonotype specific to an Alzheimer's disease patient.

### REFERENCES

[0108] 1. Park, S., et al. An ancestral SARS-CoV-2 vaccine induces anti-Omicron variants antibodies by hypermutation. bioRxiv, 2023.2003.2015.S32728 (2023).
[0109] 2. Kronimus, Y., et al. Fc N-glycosylation of autoreactive Aβ antibodies as a blood-based biomarker for Alzheimers disease. Alzheimers Demen (2023).
[0110] 3. Ghraichy, M., et al. Maturation of the Human Immunoglobulin Heavy Chain Repertoire With Age. Frontiers in Immunology 11(2020).
[0111] 4. Kim, S. I. et al. Stereotypic neutralizing V(H) antibodies against SARS-CoV-2 spike protein receptor binding domain in patients with COVID-19 and healthy individuals. Sci Transl Med 13(2021).
[0112] 5. Laforce, R, Jr., et al. Molecular imaging in dementia: Past present and future. Alzheimers Dement 14, 1522-1552 (20181.
[0113] 6. Chandra, A., et al. Applications of amyloid, tau, and neuroinflammation PET imaging to Alzheimers disease and mild cognitive impairment. Hum Brain Mapp 40, 5424-5442 (2019).
[0114] 7. Jack, C. R., Jr, et al. Brain β-amyloid load approaches a plateau. Neurology 80, 890-896(2013).
[0115] 8. Jagust W. J. & Landau, S. M. Temporal Dynamics of β-Amyloid Accumulation in Aging and Alzheimer Disease. Neurology 96, e1347-e1357 (2021).
[0116] 9. Donohue, M. C., et al. Association Between Elevated Brain Amyloid and Subsequent Cognitive Decline Among Cognitively Normal Persons. Jama 317, 230S-2316 (2017).
[0117] 10. Leal, S., Lockhart, S. N., Mas, A. Bell, R. K. & Jagust, W. J. Subthreshold Amyloid Predicts Tau Deposition in Aging. J Neurosci 38, 4482-4489 (2018).
[0118] 11. Hansson, O., Blennow, K. Zetterberg H. & Dage J. Blood biomarkers for Alzheimer's disease in clinical practice and trials. Nature Aging 3, 506-519 (2023).
[0119] 12. Ossenkoppele, A, van der Kant, R. & Hansson O. Tau biomarkers in Alzheimer's disease: towards implementation in clinical practice and trials. Lancet Neurol 21, 726-734 (2022).
[0120] 13. Bernabeu-Zomoza, A., et al. Aβ42 Peptide Promotes Proliferation and Gliogenesis in Human Neural Stem Cells. Molecular Neurobiology 56, 4023-4036 (2019).
[0121] 14. Wang, Q., et al. Design and Production of Bispecific Antibodies, Antibodies 8, 43 (2019).
[0122] 15. Wu, J. & Li, L. Autoantibodies in Alzheimer's disease potential biomarkers, pathogenic roles, and therapeutic implications. J Biomed Res 30, 361-372 (2016).
[0123] 16. Han, J. W. et al. Overview of the Korean Longitudinal Study on Cognitive Aging and Dementia. Psychistry Investig 15, 767-774 (2018).
[0124] 17. Lee, H., et al. Optimization of peripheral blood volume for in silico reconstitution of the human B-cell receptor repertoire. FEBS Open Bio 12, 1634-1643 (2022)
[0125] 18. Stevers, F. & Higgins, D. G. Clustal Omega for making accurate alignments of many protein sequences. Protein Sci 27, 135-145 (2018).
[0126] 19. Zhang, J., Kobert, K., Flouri, T. & Stamatakis, A. PEAR: a fast and accurate illumina Paired-End reAd mergeR. Bioinformatics 30, 614-620 (2014).
[0127] 20. Lefranc, M. P. IMGT databases, web resources and tools for immunoglobulin and T cell receptor sequence analysis, http//imgt.cinesfr. Leukemia 17, 260-266 (2003)
[0128] 21. Ye, J., Ma, N., Madden, T. L. & Ostell, J. M. IgBLAST: an immunoglobin variable domain sequence analysts tool. Nucleic Acid Res 41, W34-40 (2013).
[0129] 22. Griffiths, J. A. Richard, A. C., Bach, K., Lun, A. T. L. & Marioni, J. C. Detection and removal of barcode swapping in single-cell RNA-seq data. Nat Commun 9, 2667 (2018).
[0130] 23. Andris-Widhopf, J. Steinberger, P., Fuller, R., Rader, C. & Barbas, C. F. 3rd. Generation of human scFv antibody libraries. PCR amplification and assembly of light- and heavy-chain coding sequences. Cold Spring Harb Protoc 2011(2011).
[0131] 24. Choi, J. R., et al. BLI-Based Functional Assay in Phage Display Benefits the Development of a PD-L1-Targeting Therapeutic Antibody Viruses 12(2020).
[0132] 25. Lee, Y., Kim, H. & Chung, J. An antibody reactive to the Gly63-Lys68 epitope of NT-proBNP exhibits O-glycosylation-independent binding. Exp Mol Med 46, e114 (2014).
[0133] 26. Barbas, C. F., Burton, D., Scott, J. & Silverman, G. Phage display. A Laboratory Manual (2001).

What is claimed is:

1. A composition for predicting or diagnosing Alzheimer's disease, comprising a detecting agent of a B cell receptor (BCR) clonotype specific to an Alzheimer's disease patient in a sample of a subject,
wherein the BCR clonotype comprises the V gene; and the J gene; and an amino acid sequence of complementary determining region 3 (CDR3) of the heavy chain of the BCR.

2. The composition according to claim 1,
wherein when the BCR clonotype detected from the sample of the subject is below i) to iii), the subject is predicted or diagnosed as having Alzheimer's disease:
i) the V gene is at least one selected from the group consisting of IGHV (Immunoglobulin Heavy Variable) 1-18, IGHV1-2, IGHV1-24, IGHV1-3, IGHV1-46, IGHV1-58, IGHV1-69, IGHV1-8, IGHV2-26, IGHV2-5, IGHV2-70, IGHV3-11, IGHV3-13, IGHV3-15, IGHV3-20, IGHV3-21, IGHV3-23, IGHV3-30, IGHV3-30-3, IGHV3-33, IGHV3-43, IGHV3-43D, IGHV3-48, IGHV3-49, IGHV3-53, IGHV3-64, IGHV3-64D, IGHV3-66, IGHV3-7, IGHV3-72, IGHV3-73, IGHV3-74, IGHV3-9, IGHV4-30-2, IGHV4-30-4, IGHV4-31, IGHV4-34, IGHV4-38-2, IGHV4-39, IGHV4-4, IGHV4-59, IGHV4-61, IGHV5-10-1, IGHV5-51, IGHV6-1, and IGHV7-4-1,
ii) the J gene in the BCR clonotype detected from a sample of the subject is at least one selected from the group consisting of IGHJ (Immunoglobulin Heavy Joining) 1, IGHJ2, IGHJ3, IGHJ4, IGHJ5, and IGHJ6, and
iii) the amino acid sequence of CDR3 in the BCR clonotype detected from a sample of the subject is 80 to 100% homologous to at least one selected from the group consisting of SEQ ID NOS: 72 to 4047, and 32396.

3. The composition according to claim 1,
wherein when the BCR clonotype detected from the sample of the subject is at least one of BCR clonotypes of the V gene; the J gene; and the amino acid sequence of CDR3, the subject is predicted or diagnosed as having Alzheimer's disease:

4. The composition according to claim 1,
wherein the detecting agent of a BCR clonotype is a detecting agent of the entire amino acid sequence of the BCR clonotype, comprising an amino acid sequence encoded from the V gene of the heavy chain of the BCR; an amino acid sequence encoded from the J gene of the heavy chain of the BCR; and an amino acid sequence of CDR3 of the heavy chain of the BCR, and
wherein the composition is a composition that when the entire amino acid sequence of the BCR clonotype detected from the sample of the subject is at least one of SEQ ID NOS: 18222 to 32395, the subject is predicted or diagnosed as having Alzheimer's disease.

5. The composition according to claim 1,
wherein the detecting agent of a BCR clonotype is a detecting agent of the entire nucleic acid sequence of the BCR clonotype, comprising a nucleic acid sequence of the V gene of the heavy chain of the BCR; a nucleic acid sequence of the J gene of the heavy chain of the BCR; and a nucleic acid sequence encoding CDR3 of the heavy chain of the BCR, and
wherein the composition is a composition that when the entire nucleic acid sequence of the BCR clonotype detected from the sample of the subject is at least one of SEQ ID NOS: 4048 to 18221, the subject is predicted or diagnosed as having Alzheimer's disease.

6. The composition according to claim 2,
wherein when the amino acid sequence of CDR3 in the BCR clonotype detected from the sample of the subject is 80 to 100% homologous to at least one selected from the group consisting of ARDLPATGAFDI (SEQ ID NO: 214), VRLAEYFQN (SEQ ID NO: 875), TRDRRGWD (SEQ ID NO: 1211), ALGRGMDV (SEQ ID NO: 1048), VLRGSAFDI (SEQ ID NO: 798), ARSGGLDP (SEQ ID NO: 668), AGGRSFDY (SEQ ID NO: 613), AGNLMDV (SEQ ID NO: 2257), ARRGEY (SEQ ID NO: 2070), ARDMFRGIPDYLDY (SEQ ID NO: 1988), AKSLGSGTYSFDY (SEQ ID NO: 1326), ARNAGLDY (SEQ ID NO: 1128), ARDDGYRSIDY (SEQ ID NO: 990), VRGGGSGWPFES (SEQ ID NO: 3709), SRGRDGIG (SEQ ID NO: 2815), ARSGGLDV (SEQ ID NO: 2415), ARSRSGSYYYGMDV (SEQ ID NO: 1198), AGDWNDDDIFDY (SEQ ID NO: 32396), ARKGEQLWHY (SEQ ID NO: 965), and ARDPIAVPGLFDY (SEQ ID NO: 347) the subject is predicted or diagnosed as having Alzheimer's disease.

7. The composition according to claim 1,
wherein the detecting agent comprises a detecting agent of a protein specific to the BCR clonotype or a detecting agent of a nucleic acid encoding the protein.

8. The composition according to claim 7,
wherein the detecting agent of a protein comprises an antibody or aptamer specific to the BCR clonotype.

9. The composition according to claim 7,
wherein the detecting agent of a nucleic acid comprises at least one selected from the group consisting of antisense oligonucleotide, primer pair, probe, and polynucleotide that specifically binds to a mRNA or DNA encoding the BCR clonotype.

10. A system for predicting or diagnosing Alzheimer's disease comprising the composition according to claim 1.

11. A method for providing information for predicting or diagnosing Alzheimer's disease comprising:
detecting a B cell receptor (BCR) clonotype specific to an Alzheimer's disease patient in a sample of a subject,
wherein the BCR clonotype comprises the V gene; and the J gene; and an amino acid sequence of complementary determining region 3 (CDR3) of the heavy chain of the BCR.

12. The method for providing information according to claim 11, further comprising predicting or diagnosing the subject as having Alzheimer's disease when the BCR clonotype detected from the sample of the subject is below i) to iii):
i) the V gene is at least one selected from the group consisting of IGHV (Immunoglobulin Heavy Variable) 1-18, IGHV1-2, IGHV1-24, IGHV1-3, IGHV1-46, IGHV1-58, IGHV1-69, IGHV1-8, IGHV2-26, IGHV2-5, IGHV2-70, IGHV3-11, IGHV3-13, IGHV3-15, IGHV3-20, IGHV3-21, IGHV3-23, IGHV3-30, IGHV3-30-3, IGHV3-33, IGHV3-43, IGHV3-43D, IGHV3-48, IGHV3-49, IGHV3-53, IGHV3-64, IGHV3-64D, IGHV3-66, IGHV3-7, IGHV3-72, IGHV3-73, IGHV3-74, IGHV3-9, IGHV4-30-2, IGHV4-30-4, IGHV4-31, IGHV4-34, IGHV4-38-2, IGHV4-39, IGHV4-4, IGHV4-59, IGHV4-61, IGHV5-10-1, IGHV5-51, IGHV6-1, and IGHV7-4-1,
ii) the J gene in the BCR clonotype detected from a sample of the subject is at least one selected from the group consisting of IGHJ (Immunoglobulin Heavy Joining) 1, IGHJ2, IGHJ3, IGHJ4, IGHJ5, and IGHJ6, and
iii) the amino acid sequence of CDR3 in the BCR clonotype detected from a sample of the subject is 80 to 100% homologous to at least one selected from the group consisting of SEQ ID NOs: 72 to 4047, and 32396.

13. The method for providing information according to claim 11, further comprising predicting or diagnosing the subject as having Alzheimer's disease when the BCR clonotype detected from the sample of the subject is at least one of BCR clonotypes of the V gene; the J gene; and the amino acid sequence of CDR3.

14. The method for providing information according to claim 11, further comprising predicting or diagnosing the subject as having Alzheimer's disease when the entire amino acid sequence of the BCR clonotype detected from the sample of the subject which comprises an amino acid sequence of the V gene of the heavy chain of the BCR; an amino acid sequence of the J gene of the heavy chain of the BCR; and an amino acid sequence of CDR3 of the heavy chain of the BCR is at least one of SEQ ID NOS: 18222 to 32395.

15. The method for providing information according to claim 11, further comprising predicting or diagnosing the subject as having Alzheimer's disease when the entire nucleic acid sequence of the BCR clonotype detected from the sample of the subject is at least one of SEQ ID NOS: 4048 to 18221 detected from the sample of the subject which comprises a nucleic acid sequence of the V gene of the heavy chain of the BCR; a nucleic acid sequence of the J gene of the heavy chain of the BCR; and a nucleic acid sequence encoding CDR3 of the heavy chain of the BCR.

16. The method for providing information according to claim 12, further comprising predicting or diagnosing the subject as having Alzheimer's disease when the amino acid sequence of CDR3 in the BCR clonotype detected from the sample of the subject is 80 to 100% homologous to at least one selected from the group consisting of ARDLPATGAFDI (SEQ ID NO: 214), VRLAEYFQN (SEQ ID NO: 875), TRDRRGWD (SEQ ID NO: 1211), ALGRGMDV (SEQ ID NO: 1048), VLRGSAFDI (SEQ ID NO: 798), ARSGGLDP (SEQ ID NO: 668), AGGRSFDY (SEQ ID NO: 613), AGNLMDV (SEQ ID NO: 2257), ARRGEY (SEQ ID NO: 2070), ARDMFRGIPDYLDY (SEQ ID NO: 1988), AKSLGSGTYSFDY (SEQ ID NO: 1326), ARNAGLDY (SEQ ID NO: 1128), ARDDGYRSIDY (SEQ ID NO: 990), VRGGGSGWPFES (SEQ ID NO: 3709), SRGRDGIG (SEQ ID NO: 2815), ARSGGLDV (SEQ ID NO: 2415), ARSRSGSYYYGMDV (SEQ ID NO: 1198), AGDWNDDDIFDY (SEQ ID NO: 32396), ARKGEQLWHY (SEQ ID NO: 965), and ARDPIAVPGLFDY (SEQ ID NO: 347).

The application's sequence listing, which the Patent Office published only in electronic form, follows.

SEQUENCE LISTING (32481 sequences)

SEQ ID NO: 1 - DNA, 65 bp, synthetic construct
  source 1..65: mol_type = other DNA
tgactggagttcagacgtgtgctcttccgatctnnnntnnnntnnnnagcccagggccgctgtgc

SEQ ID NO: 2 - DNA, 65 bp, synthetic construct
  source 1..65: mol_type = other DNA
tgactggagttcagacgtgtgctcttccgatctnnnntnnnntnnnnagcccagggctgctgtgc

SEQ ID NO: 3 - DNA, 65 bp, synthetic construct
  source 1..65: mol_type = other DNA
tgactggagttcagacgtgtgctcttccgatctnnnntnnnntnnnnagcccagggcggctgtgc

SEQ ID NO: 4 - DNA, 67 bp, synthetic construct
  source 1..67: mol_type = other DNA
tgactggagttcagacgtgtgctcttccgatctnnnntnnnntnnnngcaggcgatgaccacgttcc

SEQ ID NO: 5 - DNA, 67 bp, synthetic construct
  source 1..67: mol_type = other DNA
tgactggagttcagacgtgtgctcttccgatctnnnntnnnntnnnngcatgcgacgaccacgttcc

SEQ ID NO: 6 - DNA, 68 bp, synthetic construct
  source 1..68: mol_type = other DNA
tgactggagttcagacgtgtgctcttccgatctnnnntnnnntnnnngagtcacggaggtggcattgg

SEQ ID NO: 7 - DNA, 65 bp, synthetic construct
  source 1..65: mol_type = other DNA
tgactggagttcagacgtgtgctcttccgatctnnnntnnnntnnnncaacggccacgctgctcg

SEQ ID NO: 8 - DNA, 67 bp, synthetic construct
  source 1..67: mol_type = other DNA
tgactggagttcagacgtgtgctcttccgatctnnnntnnnntnnnnatgccaggaccacagggctg

SEQ ID NO: 9 - DNA, 58 bp, synthetic construct
  source 1..58: mol_type = other DNA
acactctttccctacacgacgctcttccgatctggcctcagtgaaggtctcctgcaag

SEQ ID NO: 10 - DNA, 58 bp, synthetic construct
  source 1..58: mol_type = other DNA
acactctttccctacacgacgctcttccgatctgtctggtcctacgctggtgaaaccc

SEQ ID NO: 11 - DNA, 58 bp, synthetic construct
  source 1..58: mol_type = other DNA
acactctttccctacacgacgctcttccgatctctggggggtccctgagactctcctg

SEQ ID NO: 12 - DNA, 58 bp, synthetic construct
  source 1..58: mol_type = other DNA
acactctttccctacacgacgctcttccgatctcttcggagaccctgtccctcacctg

SEQ ID NO: 13 - DNA, 58 bp, synthetic construct
  source 1..58: mol_type = other DNA
acactctttccctacacgacgctcttccgatctcggggagtctctgaagatctcctgt

SEQ ID NO: 14 - DNA, 58 bp, synthetic construct
  source 1..58: mol_type = other DNA
acactctttccctacacgacgctcttccgatcttcgcagaccctctcactcacctgtg

SEQ ID NO: 15 - skipped

SEQ ID NO: 16 - DNA, 54 bp, synthetic construct
  source 1..54: mol_type = other DNA
caagcagaagacggcatacgagatgtgactggagttcagacgtgtgctcttccg

SEQ ID NO: 17 - DNA, 22 bp, synthetic construct
  source 1..22: mol_type = other DNA
ggcacacaacagaggcagttcc

SEQ ID NO: 18 - DNA, 22 bp, synthetic construct
  source 1..22: mol_type = other DNA
gcttgaagctcctcagaggagg

SEQ ID NO: 19 - DNA, 22 bp, synthetic construct
  source 1..22: mol_type = other DNA
gcttggagctcctcagaggagg

SEQ ID NO: 20 - DNA, 19 bp, synthetic construct
  source 1..19: mol_type = other DNA
tggagctccctgcctctgg

SEQ ID NO: 21 - DNA, 43 bp, synthetic construct
  source 1..43: mol_type = other DNA
gggcccaggcggccgagctccagatgacccagtctccatcctc

SEQ ID NO: 22 - DNA, 44 bp, synthetic construct
  source 1..44: mol_type = other DNA
gggcccaggcggccgagctcgtgatgactcagtctccactctcc

SEQ ID NO: 23 - DNA, 41 bp, synthetic construct
  source 1..41: mol_type = other DNA
gggcccaggcggccgagctcgtgttgacacagtctccagcc

SEQ ID NO: 24 - DNA, 43 bp, synthetic construct
  source 1..43: mol_type = other DNA
gggcccaggcggccgagctcgtgatgacccagactccactctc

SEQ ID NO: 25 - DNA, 41 bp, synthetic construct
  source 1..41: mol_type = other DNA
gggcccaggcggccgagctcgtgctgactcagtctccagac

SEQ ID NO: 26 - DNA, 43 bp, synthetic construct
  source 1..43: mol_type = other DNA
gggcccaggcggccgagctccagatgacccagtctccatcttc

SEQ ID NO: 27 - DNA, 43 bp, synthetic construct
  source 1..43: mol_type = other DNA
gggcccaggcggccgagctccagatgacccagtctccttccac

SEQ ID NO: 28 - DNA, 41 bp, synthetic construct
  source 1..41: mol_type = other DNA
gggcccaggcggccgagctctggatgacccagtctccatcc

SEQ ID NO: 29 - DNA, 43 bp, synthetic construct
  source 1..43: mol_type = other DNA
gggcccaggcggccgagctccagatgacccagtctccatctgc

SEQ ID NO: 30 - DNA, 40 bp, synthetic construct
  source 1..40: mol_type = other DNA
gggcccaggcggccgagctcgtgttgacgcagtctccagg

SEQ ID NO: 31 - DNA, 43 bp, synthetic construct
  source 1..43: mol_type = other DNA
gggcccaggcggccgagctcgtaatgacacagtctccacccac

SEQ ID NO: 32 - DNA, 40 bp, synthetic construct
  source 1..40: mol_type = other DNA
gggcccaggcggccgagctcacactcacgcagtctccagc

SEQ ID NO: 33 - DNA, 38 bp, synthetic construct
  source 1..38: mol_type = other DNA
gggcccaggcggccgagctcgccctgactcagcctgcc

SEQ ID NO: 34 - DNA, 38 bp, synthetic construct
  source 1..38: mol_type = other DNA
gggcccaggcggccgagctcgccctgactcagcctccc

SEQ ID NO: 35 - DNA, 38 bp, synthetic construct
  source 1..38: mol_type = other DNA
gggcccaggcggccgagctcgtgctgactcagccaccc

SEQ ID NO: 36 - DNA, 38 bp, synthetic construct
  source 1..38: mol_type = other DNA
gggcccaggcggccgagctcgagctgacacagccaccc

SEQ ID NO: 37 - DNA, 43 bp, synthetic construct
  source 1..43: mol_type = other DNA
gggcccaggcggccgagctcgtgctgactcaatcatcctctgc

SEQ ID NO: 38 - DNA, 40 bp, synthetic construct
  source 1..40: mol_type = other DNA
gggcccaggcggccgagctcgtgctgactcagccgtcttc

SEQ ID NO: 39 - DNA, 40 bp, synthetic construct
  source 1..40: mol_type = other DNA
gggcccaggcggccgagctcgtggtgactcaggagccctc

SEQ ID NO: 40 - DNA, 40 bp, synthetic construct
  source 1..40: mol_type = other DNA
gggcccaggcggccgagctcgtgctgactcagccaccttc

SEQ ID NO: 41 - DNA, 37 bp, synthetic construct
  source 1..37: mol_type = other DNA
gggcccaggcggccgagctcgtcgtgacgcagccgcc

SEQ ID NO: 42 - DNA, 38 bp, synthetic construct
  source 1..38: mol_type = other DNA
gggcccaggcggccgagctcgccctgactcagcctcgc

SEQ ID NO: 43 - DNA, 40 bp, synthetic construct
  source 1..40: mol_type = other DNA
gggcccaggcggccgagctcgagctgactcagccacactc

SEQ ID NO: 44 - DNA, 40 bp, synthetic construct
  source 1..40: mol_type = other DNA
gggcccaggcggccgagctcgtgctgactcagccaacctc

SEQ ID NO: 45 - DNA, 40 bp, synthetic construct
  source 1..40: mol_type = other DNA
gggcccaggcggccgagctcgtggtgacccaggagccatc

SEQ ID NO: 46 - DNA, 40 bp, synthetic construct
  source 1..40: mol_type = other DNA
gggcccaggcggccgagctcgagctgactcaggaccctgc

SEQ ID NO: 47 - DNA, 38 bp, synthetic construct
  source 1..38: mol_type = other DNA
gggcccaggcggccgagctcgagctgatgcagccaccc

SEQ ID NO: 48 - DNA, 40 bp, synthetic construct
  source 1..40: mol_type = other DNA
gggcccaggcggccgagctcgagctgacacagccatcctc

SEQ ID NO: 49 - DNA, 38 bp, synthetic construct
  source 1..38: mol_type = other DNA
gggcccaggcggccgagctcgtgctgactcagcccccg

SEQ ID NO: 50 - DNA, 42 bp, synthetic construct
  source 1..42: mol_type = other DNA
ggaagatctagaggaaccacctttgatctccagcttggtccc

SEQ ID NO: 51 - DNA, 45 bp, synthetic construct
  source 1..45: mol_type = other DNA
ggaagatctagaggaaccacctttgatttccaccttggtcccttg

SEQ ID NO: 52 - DNA, 45 bp, synthetic construct
  source 1..45: mol_type = other DNA
ggaagatctagaggaaccacctttgatatccactttggtcccagg

SEQ ID NO: 53 - DNA, 45 bp, synthetic construct
  source 1..45: mol_type = other DNA
ggaagatctagaggaaccacctttaatctccagtcgtgtcccttg

SEQ ID NO: 54 - DNA, 44 bp, synthetic construct
  source 1..44: mol_type = other DNA
ggaagatctagaggaaccaccgcctaggacggtcagcttggtcc

SEQ ID NO: 55 - DNA, 44 bp, synthetic construct
  source 1..44: mol_type = other DNA
ggaagatctagaggaaccaccgcctaggacggtgaccttggtcc

SEQ ID NO: 56 - DNA, 43 bp, synthetic construct
  source 1..43: mol_type = other DNA
ggaagatctagaggaaccaccgccgaggacggtcaccttggtg

SEQ ID NO: 57 - DNA, 41 bp, synthetic construct
  source 1..41: mol_type = other DNA
ggaagatctagaggaaccaccgccgagggcggtcagctggg

SEQ ID NO: 58 - DNA, 54 bp, synthetic construct
  source 1..54: mol_type = other DNA
ggtggttcctctagatcttcctcctctggtggcggtggctcgggcggtggtggg

SEQ ID NO: 59 - DNA, 18 bp, synthetic construct
  source 1..18: mol_type = other DNA
cctggccggcctggccac

SEQ ID NO: 60 - DNA, 17 bp, synthetic construct
  source 1..17: mol_type = other DNA
gggcccaggcggccgag

SEQ ID NO: 61 - DNA, 21 bp, synthetic construct
  source 1..21: mol_type = other DNA
ggaagatctagaggaaccacc

SEQ ID NO: 62 - DNA, 24 bp, synthetic construct
  source 1..24: mol_type = other DNA
ggcggggcccaggcggccgagctc

SEQ ID NO: 63 - DNA, 25 bp, synthetic construct
  source 1..25: mol_type = other DNA
gagcctggccggcctggccactagt

SEQ ID NO: 64 - DNA, 279 bp, Homo sapiens
  source 1..279: mol_type = genomic DNA
tgcagcctctggattcacctttagtagatattggatgagctgggtccgccaggctccagggaaggggctggagtgggtggccaacataaagcaagatggaagtgacaaatactatgtggactctgtgaagggccgagtcaccatctccagagacaacgccaagaactcactgtatctgcaaatgaacagcctgagagccgaggacacggctgtatattactgtgtgaggctgaatacttccagcactggggccagggcaccctggtcaccgtctcctca

SEQ ID NO: 65 - DNA, 348 bp, Homo sapiens
  source 1..348: mol_type = genomic DNA
gaggtgcagctggtggagtctgggggaggcttggtccagcctggggggtccctgagactctcctgtgcagcctctggattcacctttagtagatattggatgagctgggtccgccaggctccagggaaggggctggagtgggtggccaacataaagcaagatggaagtgacaaatactatgtggactctgtgaagggccgagtcaccatctccagagacaacgccaagaactcactgtatctgcaaatgaacagcctgagagccgaggacacggctgtatattactgtgtgagactcgctgaatacttccagaactggggccagggcaccctggtcaccgtctcctca

SEQ ID NO: 66 - DNA, 279 bp, Homo sapiens
  source 1..279: mol_type = genomic DNA
tgcagccactggattcgtctttagtcgttattggatgagttgggtccgccaggctccagggaaggggctggagtgggtggccaatttaaaatatgatggaagtgagaaacactatgtggactctgtgaagggccgattcaccatctccagagacaacgccaagaactcagtctatctgcaaatgaacagcctgagagccgaggacacggccgtgtatttctgtgtaaggctgaatacttccagcactggggccagggcaccctggtcaccgtctcctca

SEQ ID NO: 67 - DNA, 348 bp, Homo sapiens
  source 1..348: mol_type = genomic DNA
gaggtgcagctggtggagtctgggggaggcttggtccagcctggggggtccctgagactctcctgtgcagccactggattcgtctttagtcgttattggatgagttgggtccgccaggctccagggaaggggctggagtgggtggccaatttaaaatatgatggaagtgagaaacactatgtggactctgtgaagggccgattcaccatctccagagacaacgccaagaactcagtctatctgcaaatgaacagcctgagagccgaggacacggccgtgtatttctgtgtaagactcgctgaatactttcagaactggggccagggcaccctagtcaccgtctcctca

SEQ ID NO: 68 - DNA, 274 bp, Homo sapiens
  source 1..274: mol_type = genomic DNA
tgcagcctctggattcacctttagtaggttttggatgagttgggtccgccaggctccagggaaggggctggagtgggtggccaacataaaccaagatggaagtgagaaatactatgtggactctgtgaagggccgattcaccctctccagagacaacgccaagaactcactgtatttgcaaatgaacagtctgagagccgaggacacggccgtgtattactgtgctgaatacttccagcactggggccagggcaccctggtcaccgtctcctca

SEQ ID NO: 69 - DNA, 348 bp, Homo sapiens
  source 1..348: mol_type = genomic DNA
gaggtgcagctggtggagtctgggggaggcttggtccagcctggggggtccctgagactctcctgtgcagcctctggattcacctttagtaggttttggatgagttgggtccgccaggctccagggaaggggctggagtgggtggccaacataaaccaagatggaagtgagaaatactatgtggactctgtgaagggccgattcaccctctccagagacaacgccaagaactcactgtatttgcaaatgaacagtctgagagccgaggacacggccgtgtattactgtgtaaggctcgctgaatacttccagaactggggccagggcaccctggtcaccgtctcctca

SEQ ID NO: 70 - DNA, 281 bp, Homo sapiens
  source 1..281: mol_type = genomic DNA
tgtagcctctggattcacctttagtaggtattggatgagctgggtccgccaggctccagggaaggggctggagtgggtggccaacataaagcacgatggcagtgaggaagactatgtggactctgtgaagggccgattcaccctctccagagacagcgccaagaactcactgtatctgcaaatgaacagcctgagagtcgaggacacggctatatattactgtgcgtttggctgaatacttccagcactggggccagggcaccctggtcaccgtctcctca

SEQ ID NO: 71 - DNA, 348 bp, Homo sapiens
  source 1..348: mol_type = genomic DNA
gaggtgcagctggtggagtctgggggaggcttggtccagcctggggggtccctgagactctcctgtgtagcctctggattcacctttagtaggtattggatgagctgggtccgccaggctccagggaaggggctggagtgggtggccaacataaagcacgatggcagtgaggaagactatgtggactctgtgaagggccgattcaccctctccagagacagcgccaagaactcactgtatctgcaaatgaacagcctgagagtcgaggacacggctatatattactgtgttcgtttggctgaatacttccagaactggggccagggcaccctggtcaccgtctcctca

SEQ ID NO: 72 - protein, 9 aa, Homo sapiens
GRSNGWVDY

SEQ ID NO: 73 - protein, 10 aa, Homo sapiens
ARDYRGWFDP

SEQ ID NO: 74 - protein, 9 aa, Homo sapiens
VKVYYYMDV

SEQ ID NO: 75 - protein, 10 aa, Homo sapiens
ARHGNWNWDY

SEQ ID NO: 76 - protein, 6 aa, Homo sapiens
VRSFDF

SEQ ID NO: 77 - protein, 10 aa, Homo sapiens
ARDNMGSIDY

SEQ ID NO: 78 - protein, 13 aa, Homo sapiens
ARQVGGGRWYFDL

SEQ ID NO: 79 - protein, 9 aa, Homo sapiens
VRADGGFDY

SEQ ID NO: 80 - protein, 11 aa, Homo sapiens
ALSGDGGYSHN

SEQ ID NO: 81 - protein, 9 aa, Homo sapiens
VRGTTGMDV

SEQ ID NO: 82 - protein, 12 aa, Homo sapiens
ARHMSVRAVFDY

SEQ ID NO: 83 - protein, 9 aa, Homo sapiens
ARDLGYFDS

SEQ ID NO: 84 - protein, 12 aa, Homo sapiens
ARDGYNDIPLDY

SEQ ID NO: 85 - protein, 13 aa, Homo sapiens
ARGGGSGQYYFDY

SEQ ID NO: 86 - protein, 14 aa, Homo sapiens
ARRAYSGSYYYFDY

SEQ ID NO: 87 - protein, 11 aa, Homo sapiens
ARDRGYSTYDY

SEQ ID NO: 88 - protein, 11 aa, Homo sapiens
GKANSYYYMDV

SEQ ID NO: 89 - protein, 9 aa, Homo sapiens
ARENWYFDF

SEQ ID NO: 90 - protein, 10 aa, Homo sapiens
ARDYYSSFDY

SEQ ID NO: 91 - protein, 13 aa, Homo sapiens
GREMRRAYGPFDY

SEQ ID NO: 92 - protein, 16 aa, Homo sapiens
ARHGHCRNNSCYGFDY

SEQ ID NO: 93 - protein, 7 aa, Homo sapiens
AREAGGY

SEQ ID NO: 94 - protein, 11 aa, Homo sapiens
AISGDGGYSHN

SEQ ID NO: 95 - protein, 12 aa, Homo sapiens
ARGYAGNYRVDY

SEQ ID NO: 96 - protein, 5 aa, Homo sapiens
AHTTI

SEQ ID NO: 97 - protein, 9 aa, Homo sapiens
VRGKEGFDF

SEQ ID NO: 98 - protein, 11 aa, Homo sapiens
ARGPYYYYMDV

SEQ ID NO: 99 - protein, 9 aa, Homo sapiens
ARDPAPLDY

SEQ ID NO: 100 - protein, 8 aa, Homo sapiens
ARARGLDY

SEQ ID NO: 101 - protein, 11 aa, Homo sapiens
AKSPGWWAFDY

SEQ ID NO: 102 - protein, 10 aa, Homo sapiens
ARRVEYAFDN

SEQ ID NO: 103 - protein, 9 aa, Homo sapiens
ARGFYYMDV

SEQ ID NO: 104 - protein, 9 aa, Homo sapiens
ARANRGFDY

SEQ ID NO: 105 - protein, 10 aa, Homo sapiens
ARRVEGAFDL

SEQ ID NO: 106 - protein, 12 aa, Homo sapiens
ARHRGGSSEFDY

SEQ ID NO: 107 - protein, 8 aa, Homo sapiens
ARPGDWVY

SEQ ID NO: 108 - protein, 14 aa, Homo sapiens
ARAGAAPPGNWFDS

SEQ ID NO: 109 - protein, 10 aa, Homo sapiens
ARDRSRLFDY

SEQ ID NO: 110 - protein, 8 aa, Homo sapiens
GRNKRGDY

SEQ ID NO: 111 - protein, 11 aa, Homo sapiens
ARWRPGGYFDY

SEQ ID NO: 112 - protein, 11 aa, Homo sapiens
VRGWRSNSFDF

SEQ ID NO: 113 - protein, 12 aa, Homo sapiens
ARDRAGNRAFDI

SEQ ID NO: 114 - protein, 13 aa, Homo sapiens
ARDVRGWYRWFDP

SEQ ID NO: 115 - protein, 6 aa, Homo sapiens
ARGVAS

SEQ ID NO: 116 - protein, 8 aa, Homo sapiens
ARTNGLDY

SEQ ID NO: 117 - protein, 13 aa, Homo sapiens
ARVGGFPLGAFDI

SEQ ID NO: 118 - protein, 9 aa, Homo sapiens
ARTYYYMDV

SEQ ID NO: 119 - protein, 10 aa, Homo sapiens
AKRTDYYFDY

SEQ ID NO: 120 - protein, 10 aa, Homo sapiens
ARTNGGAFDI

SEQ ID NO: 121 - protein, 6 aa, Homo sapiens
TRFLDV

SEQ ID NO: 122 - protein, 8 aa, Homo sapiens
SRGGRGDS

SEQ ID NO: 123 - protein, 8 aa, Homo sapiens
ARGRYGTY

SEQ ID NO: 124 - protein, 8 aa, Homo sapiens
ARGHAFDI

SEQ ID NO: 125 - protein, 10 aa, Homo sapiens
VRDDYGGLDY

SEQ ID NO: 126 - protein, 14 aa, Homo sapiens
AKDGRAGYYYYMDV

SEQ ID NO: 127 - protein, 12 aa, Homo sapiens
ARGSGSYEPLDY

SEQ ID NO: 128 - protein, 14 aa, Homo sapiens
ARDRGRVLPAAIGY

SEQ ID NO: 129 - protein, 12 aa, Homo sapiens
ARDRTQRHYMDV

SEQ ID NO: 130 - protein, 5 aa, Homo sapiens
ATHDY

SEQ ID NO: 131 - protein, 9 aa, Homo sapiens
ARDDGWFDP

SEQ ID NO: 132 - protein, 10 aa, Homo sapiens
ASDRDWAFDN

SEQ ID NO: 133 - protein, 10 aa, Homo sapiens
VRGAYPTFDI

SEQ ID NO: 134 - protein, 5 aa, Homo sapiens
AREYI

SEQ ID NO: 135 - protein, 10 aa, Homo sapiens
ARVWLDAFDI

SEQ ID NO: 136 - protein, 10 aa, Homo sapiens
ARDTLWAFDY

SEQ ID NO: 137 - protein, 8 aa, Homo sapiens
APSGWFDP

SEQ ID NO: 138 - protein, 9 aa, Homo sapiens
ARNLWGFDP

SEQ ID NO: 139 - protein, 13 aa, Homo sapiens
AIRTGTYPYYFDY

SEQ ID NO: 140 - protein, 10 aa, Homo sapiens
VRDRDWAFDL

SEQ ID NO: 141 - protein, 11 aa, Homo sapiens
ARRDSSSLADY

SEQ ID NO: 142 - protein, 10 aa, Homo sapiens
ARGALHAFDI

SEQ ID NO: 143 - protein, 7 aa, Homo sapiens
VKRGGDS

SEQ ID NO: 144 - protein, 6 aa, Homo sapiens
ARGLEY

SEQ ID NO: 145 - protein, 10 aa, Homo sapiens
ARDRGHGADY

SEQ ID NO: 146 - protein, 13 aa, Homo sapiens
ARDHVAPGLIFDY

SEQ ID NO: 147 - protein, 15 aa, Homo sapiens
AKDPGHSLGTDYGDY

SEQ ID NO: 148 - protein, 11 aa, Homo sapiens
AVSGDGGYSHD

SEQ ID NO: 149 - protein, 15 aa, Homo sapiens
ASHCSSTRCYAGFDS

SEQ ID NO: 150 - protein, 10 aa, Homo sapiens
VRDFAYAFDI

SEQ ID NO: 151 - protein, 14 aa, Homo sapiens
ARDPLGGAPDYFDY

SEQ ID NO: 152 - protein, 14 aa, Homo sapiens
ARVSSTAAAGTTDY

SEQ ID NO: 153 - protein, 8 aa, Homo sapiens
ARRQSFDI

SEQ ID NO: 154 - protein, 7 aa, Homo sapiens
ARGKGGL

SEQ ID NO: 155 - protein, 11 aa, Homo sapiens
ERDVRFGLFDY

SEQ ID NO: 156 - protein, 14 aa, Homo sapiens
AKDYVGTVPDAFDI

SEQ ID NO: 157 - protein, 17 aa, Homo sapiens
ARKKYYYDTSPMGWFDS

SEQ ID NO: 158 - protein, 10 aa, Homo sapiens
ATTADAPGND

SEQ ID NO: 159 - protein, 8 aa, Homo sapiens
ARKNIMDV

SEQ ID NO: 160 - protein, 10 aa, Homo sapiens
TNWNYARFEY

SEQ ID NO: 161 - protein, 15 aa, Homo sapiens
ARDPGYSSGWVEFDP

SEQ ID NO: 162 - protein, 17 aa, Homo sapiens
ARKLYYYDTSPAGWFDP

SEQ ID NO: 163 - protein, 8 aa, Homo sapiens
TTGGRVGY

SEQ ID NO: 164 - protein, 9 aa, Homo sapiens
GRGRADWGY

SEQ ID NO: 165 - protein, 10 aa, Homo sapiens
ARDAYNYGDY

SEQ ID NO: 166 - protein, 10 aa, Homo sapiens
VRETAWSFDS

SEQ ID NO: 167 - protein, 7 aa, Homo sapiens
VKDQWDV

SEQ ID NO: 168 - protein, 10 aa, Homo sapiens
ARELDGVLDY

SEQ ID NO: 169 - protein, 17 aa, Homo sapiens
ARNEVSASYYSTREFDC

SEQ ID NO: 170 - protein, 10 aa, Homo sapiens
ARGNFGGFDY

SEQ ID NO: 171 - protein, 7 aa, Homo sapiens
TRGENGL

SEQ ID NO: 172 - protein, 13 aa, Homo sapiens
ARLPTGHPNWFDP

SEQ ID NO: 173 - protein, 11 aa, Homo sapiens
ATSSGWWRIDS

SEQ ID NO: 174 - protein, 11 aa, Homo sapiens
AKMVPGNFFDS

SEQ ID NO: 175 - protein, 9 aa, Homo sapiens
TRENWGPDY

SEQ ID NO: 176 - protein, 9 aa, Homo sapiens
ATGSDWHYY

SEQ ID NO: 177 - protein, 11 aa, Homo sapiens
ARDPDHGAVDY

SEQ ID NO: 178 - protein, 12 aa, Homo sapiens
ARDGVGPTPLDY

SEQ ID NO: 179 - protein, 9 aa, Homo sapiens
VRGHKSFDF

SEQ ID NO: 180 - protein, 16 aa, Homo sapiens
ARHSQYYSDNSGYGDY

SEQ ID NO: 181 - protein, 8 aa, Homo sapiens
TTRAWLEF

SEQ ID NO: 182 - protein, 11 aa, Homo sapiens
ARDKGTYYFDQ

SEQ ID NO: 183 - protein, 11 aa, Homo sapiens
ARRGDGSRFDP

SEQ ID NO: 184 - protein, 8 aa, Homo sapiens
ARHDTFDI

SEQ ID NO: 185 - protein, 10 aa, Homo sapiens
APSGSGDFDY

SEQ ID NO: 186 - protein, 8 aa, Homo sapiens
TRDYNMDV

SEQ ID NO: 187 - protein, 11 aa, Homo sapiens
ARGPSSGSFDF

SEQ ID NO: 188 - protein, 11 aa, Homo sapiens
ARTPHRREFDY

SEQ ID NO: 189 - protein, 14 aa, Homo sapiens
ASPGGSGWSRPFDY

SEQ ID NO: 190 - protein, 11 aa, Homo sapiens
ASQGRAARPGY

SEQ ID NO: 191 - protein, 16 aa, Homo sapiens
ARDKGNGGRTPDAFDL

SEQ ID NO: 192 - protein, 8 aa, Homo sapiens
ARGNPADY

SEQ ID NO: 193 - protein, 14 aa, Homo sapiens
AKGPYFGSGRGMDV

SEQ ID NO: 194 - protein, 11 aa, Homo sapiens
ARQISPYGLDV

SEQ ID NO: 195 - protein, 9 aa, Homo sapiens
ARGLWGMDV

SEQ ID NO: 196 - protein, 10 aa, Homo sapiens
TRQTISCHDY

SEQ ID NO: 197 - protein, 7 aa, Homo sapiens
ARGHLAV

SEQ ID NO: 198 - protein, 12 aa, Homo sapiens
ARNVGGLRAFDI

SEQ ID NO: 199 - protein, 10 aa, Homo sapiens
ARHFDYSFDY

SEQ ID NO: 200 - protein, 12 aa, Homo sapiens
ARQGGGAVSLDY

SEQ ID NO: 201 - protein, 11 aa, Homo sapiens
TRVFSWGASDY

SEQ ID NO: 202 - protein, 13 aa, Homo sapiens
ARFSSGWWGYFDY

SEQ ID NO: 203 - protein, 11 aa, Homo sapiens
VAGLGKSDLDS

SEQ ID NO: 204 - protein, 18 aa, Homo sapiens
GKATHCSSISCSRGWFDP

SEQ ID NO: 205 - protein, 7 aa, Homo sapiens
ARETFEI

SEQ ID NO: 206 - protein, 6 aa, Homo sapiens
SPSLNY

SEQ ID NO: 207 - protein, 11 aa, Homo sapiens
VRTGMAHGGDY

SEQ ID NO: 208 - protein, 10 aa, Homo sapiens
ARDPNWAEGY

SEQ ID NO: 209 - protein, 13 aa, Homo sapiens
AKGWYPGSFRFDY

SEQ ID NO: 210 - protein, 13 aa, Homo sapiens
TTFKVGATRVFDY

SEQ ID NO: 211 - protein, 11 aa, Homo sapiens
ARHVSHTASDY

SEQ ID NO: 212 - protein, 6 aa, Homo sapiens
ARPWDI

SEQ ID NO: 213 - protein, 10 aa, Homo sapiens
ARRGGYSFDS

SEQ ID NO: 214 - protein, 12 aa, Homo sapiens
ARDLPATGAFDI

SEQ ID NO: 215 - protein, 13 aa, Homo sapiens
AREGYSYGYGFDY

SEQ ID NO: 216 - protein, 15 aa, Homo sapiens
ARSRIEALGTGAFDM

SEQ ID NO: 217 - protein, 13 aa, Homo sapiens
ARLRDGSGSYSDY

SEQ ID NO: 218 - protein, 15 aa, Homo sapiens
ARGGGCSGGGCYGDS

SEQ ID NO: 219 - protein, 10 aa, Homo sapiens
ATSRDWAFDY

SEQ ID NO: 220 - protein, 8 aa, Homo sapiens
ARGGWLDP

SEQ ID NO: 221 - protein, 16 aa, Homo sapiens
ARDGRGAAGPYNLFDP

SEQ ID NO: 222 - protein, 8 aa, Homo sapiens
ARGGAMDV

SEQ ID NO: 223 - protein, 10 aa, Homo sapiens
ARAYSSSWDS

SEQ ID NO: 224 - protein, 9 aa, Homo sapiens
VRGVREVPY

SEQ ID NO: 225 - protein, 8 aa, Homo sapiens
ARELASGY

SEQ ID NO: 226 - protein, 11 aa, Homo sapiens
TRGPAGSFYDY

SEQ ID NO: 227 - protein, 8 aa, Homo sapiens
ARHDTFDM

SEQ ID NO: 228 - protein, 11 aa, Homo sapiens
ATFTYYSGCDY

SEQ ID NO: 229 - protein, 12 aa, Homo sapiens
ARGRSGSYSVDY

SEQ ID NO: 230 - protein, 8 aa, Homo sapiens
ARIRGLDS

SEQ ID NO: 231 - protein, 14 aa, Homo sapiens
ARPLVRGGKDAFDI

SEQ ID NO: 232 - protein, 12 aa, Homo sapiens
AKGIAVAGTFDY

SEQ ID NO: 233 - protein, 8 aa, Homo sapiens
TGHGGYSY

SEQ ID NO: 234 - protein, 10 aa, Homo sapiens
ARGGDGRFDP

SEQ ID NO: 235 - protein, 8 aa, Homo sapiens
ARVRGFDS

SEQ ID NO: 236 - protein, 18 aa, Homo sapiens
VRAGYYDSRDYSTNGFDI

SEQ ID NO: 237 - protein, 12 aa, Homo sapiens
ARAGGWVGYMDV

SEQ ID NO: 238 - protein, 11 aa, Homo sapiens
ARDWGNYGLDV

SEQ ID NO: 239 - protein, 14 aa, Homo sapiens
AREDWNHFYHHMDV

SEQ ID NO: 240 - protein, 10 aa, Homo sapiens
ARGSAAGIDY

SEQ ID NO: 241 - protein, 11 aa, Homo sapiens
AKDELPYGMDV

SEQ ID NO: 242 - protein, 13 aa, Homo sapiens
ARGGRGTSFYWEY

SEQ ID NO: 243 - protein, 12 aa, Homo sapiens
ARDNRFYWYFDL

SEQ ID NO: 244 - protein, 12 aa, Homo sapiens
ARDLSGYAHFDY

SEQ ID NO: 245 - protein, 8 aa, Homo sapiens
TRRGFMDV

SEQ ID NO: 246 - protein, 9 aa, Homo sapiens
AKDRVRVAY

SEQ ID NO: 247 - protein, 11 aa, Homo sapiens
ARELSGGTFDY

SEQ ID NO: 248 - protein, 10 aa, Homo sapiens
ATHNNWAFEY

SEQ ID NO: 249 - protein, 7 aa, Homo sapiens
ARNRGDY

SEQ ID NO: 250 - protein, 16 aa, Homo sapiens
ARSGRGDVSTYYYFDY

SEQ ID NO: 251 - protein, 12 aa, Homo sapiens
VRDGDGELPIDY

SEQ ID NO: 252 - protein, 18 aa, Homo sapiens
ARDTGLLWFGELLRAPDY

SEQ ID NO: 253 - protein, 17 aa, Homo sapiens
AKAGYGSGSYYTLSFDS

SEQ ID NO: 254 - protein, 16 aa, Homo sapiens
VRDLRRDYHHYYGMDV

SEQ ID NO: 255 - protein, 12 aa, Homo sapiens
ARRAWDLSYFDY

SEQ ID NO: 256 - protein, 12 aa, Homo sapiens
ARGDIAAAGIDY

SEQ ID NO: 257 - protein, 9 aa, Homo sapiens
AKRGGTMNY

SEQ ID NO: 258 - protein, 17 aa, Homo sapiens
AKRGEVATALGHWYFDL

SEQ ID NO: 259 - protein, 9 aa, Homo sapiens
ARHLRYNDY

SEQ ID NO: 260 - protein, 9 aa, Homo sapiens
VRSGGWIDY

SEQ ID NO: 261 - protein, 16 aa, Homo sapiens
ARDRRAYSGYDYYFDY

SEQ ID NO: 262 - protein, 16 aa, Homo sapiens
ARDRRAYSGYDYYFDY

SEQ ID NO: 263 - protein, 10 aa, Homo sapiens
ARGERLGGDF

SEQ ID NO: 264 - protein, 14 aa, Homo sapiens
ARVGQWPLNWALDY

SEQ ID NO: 265 - protein, 7 aa, Homo sapiens
VSGLGDH

SEQ ID NO: 266 - protein, 11 aa, Homo sapiens
ARRPRGGSLDY

SEQ ID NO: 267 - protein, 13 aa, Homo sapiens
ARGQSSSWYYFDY

SEQ ID NO: 268 - protein, 18 aa, Homo sapiens
VRGRSITGRGGVYDAFDI

SEQ ID NO: 269 - protein, 11 aa, Homo sapiens
ARGYGGNPFDY

SEQ ID NO: 270 - protein, 13 aa, Homo sapiens
ARQAQYYYYGMDV

SEQ ID NO: 271 - protein, 13 aa, Homo sapiens
ARGGGYSYGAPDY

SEQ ID NO: 272 - protein, 13 aa, Homo sapiens
AKRGGSSSWTFDS

SEQ ID NO: 273 - protein, 9 aa, Homo sapiens
ARGNGWHPD

SEQ ID NO: 274 - protein, 9 aa, Homo sapiens
VKDNPVLHI

SEQ ID NO: 275 - protein, 14 aa, Homo sapiens
ARLCFRNSITCLYY

SEQ ID NO: 276 - protein, 12 aa, Homo sapiens
AVNCSGGTCWDY

SEQ ID NO: 277 - protein, 15 aa, Homo sapiens
ARHFYDRSDYFGFDF

SEQ ID NO: 278 - protein, 8 aa, Homo sapiens
ARGKGFDP

SEQ ID NO: 279 - protein, 12 aa, Homo sapiens
ARRAGDAEYFQH

SEQ ID NO: 280 - protein, 17 aa, Homo sapiens
ARGTTVTTQPPYYYMDV

SEQ ID NO: 281 - protein, 10 aa, Homo sapiens
GRDLSGSRDY

SEQ ID NO: 282 - protein, 14 aa, Homo sapiens
AKGVDYDSSGPFDY

SEQ ID NO: 283 - protein, 14 aa, Homo sapiens
ARAGTWGAYDAFDI

SEQ ID NO: 284 - protein, 11 aa, Homo sapiens
ARGGFSWSFDY

SEQ ID NO: 285 - protein, 16 aa, Homo sapiens
AREYYDILTGQIPLDY

SEQ ID NO: 286 - protein, 17 aa, Homo sapiens
ARGNYYDSSSYYYPFDY

SEQ ID NO: 287 - protein, 5 aa, Homo sapiens
VARPH

SEQ ID NO: 288 - protein, 17 aa, Homo sapiens
SRGCSGGSCYYYYGMDV

SEQ ID NO: 289 - protein, 9 aa, Homo sapiens
ARGRIRADY

SEQ ID NO: 290 - protein, 8 aa, Homo sapiens
ARSASLDY

SEQ ID NO: 291 - protein, 7 aa, Homo sapiens
ARDWLDY

SEQ ID NO: 292 - protein, 12 aa, Homo sapiens
ARGRSGWYFFDY

SEQ ID NO: 293 - protein, 15 aa, Homo sapiens
AHRRGDGNRGDAFDI

SEQ ID NO: 294 - protein, 8 aa, Homo sapiens
ARGRALSF

SEQ ID NO: 295 - protein, 16 aa, Homo sapiens
ARGFDCSSTSCYAFDL

SEQ ID NO: 296 - protein, 14 aa, Homo sapiens
ARAGTWGAFDAFDI

SEQ ID NO: 297 - protein, 10 aa, Homo sapiens
ARWSGTYYDH

SEQ ID NO: 298 - protein, 13 aa, Homo sapiens
ARRHSSSRNWFDP

SEQ ID NO: 299 - protein, 9 aa, Homo sapiens
ARRWDGLDV

SEQ ID NO: 300 - protein, 12 aa, Homo sapiens
ARGSSWSGWFDP

SEQ ID NO: 301 - protein, 11 aa, Homo sapiens
ARFGIEATTDY

SEQ ID NO: 302 - protein, 10 aa, Homo sapiens
ARLATIRSDY

SEQ ID NO: 303 - protein, 8 aa, Homo sapiens
AKTVANEF

SEQ ID NO: 304 - protein, 10 aa, Homo sapiens
ATHLNWAWDY

SEQ ID NO: 305 - protein, 13 aa, Homo sapiens
ARAPSNAWHNFDY

SEQ ID NO: 306 - protein, 9 aa, Homo sapiens
ARGPGSFDY

SEQ ID NO: 307 - protein, 8 aa, Homo sapiens
VGHGGSSY

SEQ ID NO: 308 - protein, 11 aa, Homo sapiens
AKGGHYSCFDP

SEQ ID NO: 309 - protein, 8 aa, Homo sapiens
ARKLYFDY

SEQ ID NO: 310 - protein, 12 aa, Homo sapiens
ARRAGGAEYFQH

SEQ ID NO: 311 - protein, 5 aa, Homo sapiens
AGIRF

SEQ ID NO: 312 - protein, 10 aa, Homo sapiens
AADPGLLTYY

SEQ ID NO: 313 - protein, 14 aa, Homo sapiens
ARGFQLLFGGWFDP

SEQ ID NO: 314 - protein, 15 aa, Homo sapiens
ARLPGYSSSWQYFDY

SEQ ID NO: 315 - protein, 11 aa, Homo sapiens
AKLGMVRGNDY

SEQ ID NO: 316 - protein, 10 aa, Homo sapiens
VKQIGGSGSY

SEQ ID NO: 317 - protein, 11 aa, Homo sapiens
AKGGVTTGFDP

SEQ ID NO: 318 - protein, 9 aa, Homo sapiens
TTGAPAFDI

SEQ ID NO: 319 - protein, 7 aa, Homo sapiens
GRDFGGY

SEQ ID NO: 320 - protein, 11 aa, Homo sapiens
ARSRSPGDFDY

SEQ ID NO: 321 - protein, 9 aa, Homo sapiens
AKPQWELLL

SEQ ID NO: 322 - protein, 13 aa, Homo sapiens
ARGRGFRPYYFDY

SEQ ID NO: 323 - protein, 14 aa, Homo sapiens
ARDPRGYSGYDLDS

SEQ ID NO: 324 - protein, 14 aa, Homo sapiens
ARDRDGDSNWYFDL

SEQ ID NO: 325 - protein, 14 aa, Homo sapiens
ARVDWNHFYKHMDV

SEQ ID NO: 326 - protein, 18 aa, Homo sapiens
AHRLSGIAGATTGLYFDY

SEQ ID NO: 327 - protein, 6 aa, Homo sapiens
ARGATS

SEQ ID NO: 328 - protein, 10 aa, Homo sapiens
AHRRGSSWYV

SEQ ID NO: 329 - protein, 14 aa, Homo sapiens
ARETEGCGGDCYDY

SEQ ID NO: 330 - protein, 8 aa, Homo sapiens
ARQVWLDY

SEQ ID NO: 331 - protein, 11 aa, Homo sapiens
ARGGYRSGLDY

SEQ ID NO: 332 - protein, 9 aa, Homo sapiens
ARGSDYGDY

SEQ ID NO: 333 - protein, 13 aa, Homo sapiens
ANVKDMSSWSLEY

SEQ ID NO: 334 - protein, 11 aa, Homo sapiens
AKSIGRNYFDY

SEQ ID NO: 335 - protein, 8 aa, Homo sapiens
ARADILRP

SEQ ID NO: 336 - protein, 14 aa, Homo sapiens
ARVYYYDSSGPFDY

SEQ ID NO: 337 - protein, 7 aa, Homo sapiens
TTGGLDF

SEQ ID NO: 338 - protein, 15 aa, Homo sapiens
ARAYMVRGVIFWFDP

SEQ ID NO: 339 - protein, 8 aa, Homo sapiens
TRDPVLTG

SEQ ID NO: 340 - protein, 14 aa, Homo sapiens
ARHNYYDSSGYLDY

SEQ ID NO: 341 - protein, 6 aa, Homo sapiens
ARKFNY

SEQ ID NO: 342 - protein, 14 aa, Homo sapiens
ARDFLGDSGFEFDY

SEQ ID NO: 343 - protein, 12 aa, Homo sapiens
AKGRGLVSPDDY

SEQ ID NO: 344 - protein, 7 aa, Homo sapiens
MRGNGDY

SEQ ID NO: 345 - protein, 12 aa, Homo sapiens
ITECSSTICNGG

SEQ ID NO: 346 - protein, 14 aa, Homo sapiens
VREQTALTIFGMDV

SEQ ID NO: 347 - protein, 13 aa, Homo sapiens
ARDPIAVPGLFDY

SEQ ID NO: 348 - protein, 10 aa, Homo sapiens
ARGGGSYSGY

SEQ ID NO: 349 - protein, 8 aa, Homo sapiens
VGHGSSSG

SEQ ID NO: 350 - protein, 10 aa, Homo sapiens
VRDHMYAFDI

SEQ ID NO: 351 - protein, 16 aa, Homo sapiens
AGAVVVTAMTYWYFDL

SEQ ID NO: 352 - protein, 9 aa, Homo sapiens
TTYRSYMDV

SEQ ID NO: 353 - protein, 11 aa, Homo sapiens
ARGWLRNGMDV

SEQ ID NO: 354 - protein, 12 aa, Homo sapiens
AKVQGWVDPFDY

SEQ ID NO: 355 - protein, 13 aa, Homo sapiens
ARRGRGGTTYFDY

SEQ ID NO: 356 - protein, 10 aa, Homo sapiens
GRVVGAAVDY

SEQ ID NO: 357 - protein, 8 aa, Homo sapiens
VRQVWSDY

SEQ ID NO: 358 - protein, 10 aa, Homo sapiens
ARESRNFFDP

SEQ ID NO: 359 - protein, 8 aa, Homo sapiens
ARGDVLDY

SEQ ID NO: 360 - protein, 6 aa, Homo sapiens
AGSWDY

SEQ ID NO: 361 - protein, 9 aa, Homo sapiens
TRDRYSGSY

SEQ ID NO: 362 - protein, 11 aa, Homo sapiens
TKGGPRYSVDV

SEQ ID NO: 363 - protein, 11 aa, Homo sapiens
VKDKGAIFGDY

SEQ ID NO: 364 - protein, 13 aa, Homo sapiens
VKDRGSLVRDFDS

SEQ ID NO: 365 - protein, 7 aa, Homo sapiens
ARDQGAY

SEQ ID NO: 366 - protein, 11 aa, Homo sapiens
VKDNGPIFGEY

SEQ ID NO: 367 - protein, 7 aa, Homo sapiens
ARGDLLD

SEQ ID NO: 368 - protein, 9 aa, Homo sapiens
ARKGNAFDI

SEQ ID NO: 369 - protein, 9 aa, Homo sapiens
TRDPPGGGY

SEQ ID NO: 370 - protein, 7 aa, Homo sapiens
ARERGTY

SEQ ID NO: 371 - protein, 11 aa, Homo sapiens
TGGVGTTDFDY

SEQ ID NO: 372 - protein, 13 aa, Homo sapiens
ARGYSSGWYFFDY

SEQ ID NO: 373 - protein, 9 aa, Homo sapiens
ARGAGSIDY

SEQ ID NO: 374 - protein, 7 aa, Homo sapiens
ARRAGTE

SEQ ID NO: 375 - protein, 9 aa, Homo sapiens
ARDNWNDRY

SEQ ID NO: 376 - protein, 14 aa, Homo sapiens
ARLQSVGPRADLDS

SEQ ID NO: 377 - protein, 6 aa, Homo sapiens
ARVVGD

SEQ ID NO: 378 - protein, 11 aa, Homo sapiens
ARDPQHGALDI

SEQ ID NO: 379 - protein, 11 aa, Homo sapiens
TRDRADVTFDI

SEQ ID NO: 380 - protein, 7 aa, Homo sapiens
ARLNGGS

SEQ ID NO: 381 - protein, 9 aa, Homo sapiens
ARDLVPDPY

SEQ ID NO: 382 - protein, 12 aa, Homo sapiens
ARGRVVTRDFDY

SEQ ID NO: 383 - protein, 5 aa, Homo sapiens
AGLWE

SEQ ID NO: 384 - protein, 8 aa, Homo sapiens
ARERAFDY

SEQ ID NO: 385 - protein, 16 aa, Homo sapiens
AREGPSSSWNDWYFDL

SEQ ID NO: 386 - protein, 11 aa, Homo sapiens
AREGTPGTNDY

SEQ ID NO: 387 - protein, 10 aa, Homo sapiens
TKAGSSWCDY

SEQ ID NO: 388 - protein, 12 aa, Homo sapiens
ARIGYSSSGIDY

SEQ ID NO: 389 - protein, 9 aa, Homo sapiens
ARGHLWLEN

SEQ ID NO: 390 - protein, 9 aa, Homo sapiens
AKETRPNDY

SEQ ID NO: 391 - protein, 13 aa, Homo sapiens
ARLLDVSGWPFDY

SEQ ID NO: 392 - protein, 14 aa, Homo sapiens
ARDQTGYSSSSSDY

SEQ ID NO: 393 - protein, 12 aa, Homo sapiens
ARDPFSSSGGGY

SEQ ID NO: 394 - protein, 12 aa, Homo sapiens
TALWYYSESSGH

SEQ ID NO: 395 - protein, 10 aa, Homo sapiens
AKAGSSWSDY

SEQ ID NO: 396 - protein, 8 aa, Homo sapiens
TKGGWCDN

SEQ ID NO: 397 - protein, 10 aa, Homo sapiens
VKGSKWGGDN

SEQ ID NO: 398 - protein, 9 aa, Homo sapiens
ARDKVPRDY

SEQ ID NO: 399 - protein, 14 aa, Homo sapiens
AKDPYESSGYYSDY

SEQ ID NO: 400 - protein, 8 aa, Homo sapiens
ATSNWGDY

SEQ ID NO: 401 - protein, 10 aa, Homo sapiens
ARDHPGSLDY

SEQ ID NO: 402 - protein, 12 aa, Homo sapiens
ARGGRDGYKFDY

SEQ ID NO: 403 - protein, 12 aa, Homo sapiens
ARLGGHGDHFDY

SEQ ID NO: 404 - protein, 11 aa, Homo sapiens
ARDGVAGARDY

SEQ ID NO: 405 - protein, 8 aa, Homo sapiens
ARRGRFDY

SEQ ID NO: 406 - protein, 14 aa, Homo sapiens
AKTNYYDSSGYFDY

SEQ ID NO: 407 - protein, 8 aa, Homo sapiens
ARGASGAY

SEQ ID NO: 408 - protein, 13 aa, Homo sapiens
ARLHFWRSEEFDP

SEQ ID NO: 409 - protein, 13 aa, Homo sapiens
AGDYYDSSGYLDY

SEQ ID NO: 410 - protein, 8 aa, Homo sapiens
ARQLGLDY

SEQ ID NO: 411 - protein, 11 aa, Homo sapiens
ARDPSGGGLDV

SEQ ID NO: 412 - protein, 10 aa, Homo sapiens
ARDEGGTYIY

SEQ ID NO: 413 - protein, 13 aa, Homo sapiens
ARAESSSWHNFDY

SEQ ID NO: 414 - protein, 12 aa, Homo sapiens
ARKRGYRSYFDS

SEQ ID NO: 415 - protein, 8 aa, Homo sapiens
ARGVVSDY

SEQ ID NO: 416 - protein, 8 aa, Homo sapiens
ARGNSMDV

SEQ ID NO: 417 - protein, 8 aa, Homo sapiens
ARGRGCGS

SEQ ID NO: 418 - protein, 11 aa, Homo sapiens
ARDSGWFRFDY

SEQ ID NO: 419 - protein, 11 aa, Homo sapiens
ARGQYSPPPDY

SEQ ID NO: 420 - protein, 8 aa, Homo sapiens
VKGFWGDN

SEQ ID NO: 421 - protein, 7 aa, Homo sapiens
TTGARDY

SEQ ID NO: 422 - protein, 16 aa, Homo sapiens
ARDLRRDYYHYYGMDV

SEQ ID NO: 423 - protein, 8 aa, Homo sapiens
AKTASFDY

SEQ ID NO: 424 - protein, 8 aa, Homo sapiens
ARDAFGDF

SEQ ID NO: 425 - protein, 8 aa, Homo sapiens
ARELRLSY

SEQ ID NO: 426 - protein, 8 aa, Homo sapiens
ARGWGIDS

SEQ ID NO: 427 - protein, 12 aa, Homo sapiens
AKDRITISAFDI

SEQ ID NO: 428 - protein, 17 aa, Homo sapiens
ASGDFWSGYDYYYYMDV

SEQ ID NO: 429 - protein, 7 aa, Homo sapiens
TRGRLDY

SEQ ID NO: 430 - protein, 11 aa, Homo sapiens
ARARSGYYMDV

SEQ ID NO: 431 - protein, 14 aa, Homo sapiens
ARVYYYDSSGPYDY

SEQ ID NO: 432 - protein, 9 aa, Homo sapiens
ARGKDAFDI

SEQ ID NO: 433 - protein, 10 aa, Homo sapiens
ARAGSSGFYY

SEQ ID NO: 434 - protein, 8 aa, Homo sapiens
ARGGGHRY

SEQ ID NO: 435 - protein, 11 aa, Homo sapiens
ARRDYRAWFDP

SEQ ID NO: 436 - protein, 15 aa, Homo sapiens
ARKDSSSWYGNWFDP

SEQ ID NO: 437 - protein, 16 aa, Homo sapiens
ARDGGIAVSGTDAFDI

SEQ ID NO: 438 - protein, 7 aa, Homo sapiens
ARALFDS

SEQ ID NO: 439 - protein, 19 aa, Homo sapiens
ARYCSGGSCPTHYFYGMDV

SEQ ID NO: 440 - protein, 7 aa, Homo sapiens
AKRQIDY

SEQ ID NO: 441 - protein, 7 aa, Homo sapiens
AKDTLDV

SEQ ID NO: 442 - protein, 7 aa, Homo sapiens
ATLVSDH

SEQ ID NO: 443 - protein, 9 aa, Homo sapiens
VRVAGSIDY

SEQ ID NO: 444 - protein, 12 aa, Homo sapiens
ARDAGRYGDFDY

SEQ ID NO: 445 - protein, 14 aa, Homo sapiens
AKDLTGDYRAYFDY

SEQ ID NO: 446 - protein, 20 aa, Homo sapiens
ARDKLGREFSDYETIPPFVY

SEQ ID NO: 447 - protein, 10 aa, Homo sapiens
TGDRGSLGDS

SEQ ID NO: 448 - protein, 14 aa, Homo sapiens
ARTSRGSYYYGMDV

SEQ ID NO: 449 - protein, 10 aa, Homo sapiens
ARGSHGEHDS

SEQ ID NO: 450 - protein, 21 aa, Homo sapiens
VGAPDCGGGSCFSHHYYGLDV

SEQ ID NO: 451 - protein, 12 aa, Homo sapiens
ARESPHTFYFDY

SEQ ID NO: 452 - protein, 10 aa, Homo sapiens
ARGGIYSFDY

SEQ ID NO: 453 - protein, 12 aa, Homo sapiens
ARDSGSAGADDY

SEQ ID NO: 454 - protein, 14 aa, Homo sapiens
ARVGRFPHNYAMDV

SEQ ID NO: 455 - protein, 18 aa, Homo sapiens
ARGDYYDSSGDYHDVFDI

SEQ ID NO: 456 - protein, 12 aa, Homo sapiens
ARAREGGWFFDY

SEQ ID NO: 457 - protein, 12 aa, Homo sapiens
ARHGDYGDYLYY

SEQ ID NO: 458 - protein, 8 aa, Homo sapiens
ARRGLLDY

SEQ ID NO: 459 - protein, 12 aa, Homo sapiens
ARDKGGYYPFDY

SEQ ID NO: 460 - protein, 14 aa, Homo sapiens
ARGETTNSWSTFDY

SEQ ID NO: 461 - protein, 15 aa, Homo sapiens
AKDRYCSSIRCPTDY

SEQ ID NO: 462 - protein, 8 aa, Homo sapiens
ARMASLDY

SEQ ID NO: 463 - protein, 15 aa, Homo sapiens
AKDGDDNRPPDAYDI

SEQ ID NO: 464 - protein, 11 aa, Homo sapiens
VRWGVSYGMDV

SEQ ID NO: 465 - protein, 15 aa, Homo sapiens
ATDGVGVVPGDVFDI

SEQ ID NO: 466 - protein, 10 aa, Homo sapiens
ARGQLRGFDY

SEQ ID NO: 467 - protein, 7 aa, Homo sapiens
ARGHMDV

SEQ ID NO: 468 - protein, 9 aa, Homo sapiens
AKTARVPVY

SEQ ID NO: 469 - protein, 15 aa, Homo sapiens
AKDRYCTSIRCPTDY

SEQ ID NO: 470 - protein, 12 aa, Homo sapiens
ARDSGTAGADDY

SEQ ID NO: 471 - protein, 10 aa, Homo sapiens
VRDHYWSFDY

SEQ ID NO: 472 - protein, 6 aa, Homo sapiens
ARNPIY

SEQ ID NO: 473 - protein, 10 aa, Homo sapiens
LRGGGWYPDY

SEQ ID NO: 474 - protein, 11 aa, Homo sapiens
ARDPYYYSSDP

SEQ ID NO: 475 - protein, 11 aa, Homo sapiens
ARDSTHWSSDY

SEQ ID NO: 476 - protein, 9 aa, Homo sapiens
ARKSAGMDV

SEQ ID NO: 477 - protein, 14 aa, Homo sapiens
ARDGQGGAPYAMDV

SEQ ID NO: 478 - protein, 9 aa, Homo sapiens
TSDPNWVDY

SEQ ID NO: 479 - protein, 6 aa, Homo sapiens
MINPGY

SEQ ID NO: 480 - protein, 14 aa, Homo sapiens
VKDRDDHGDFLFDS

SEQ ID NO: 481 - protein, 10 aa, Homo sapiens
ARGGYHYFDY

SEQ ID NO: 482 - protein, 12 aa, Homo sapiens
ARGSGDGYNSDY

SEQ ID NO: 483 - protein, 10 aa, Homo sapiens
ARDVGGTLDY

SEQ ID NO: 484 - protein, 13 aa, Homo sapiens
ARAGWFGESGMDV

SEQ ID NO: 485 - protein, 13 aa, Homo sapiens
ARQLGRGLWAFDI

SEQ ID NO: 486 - protein, 11 aa, Homo sapiens
ARNRGWQQFDN

SEQ ID NO: 487 - protein, 16 aa, Homo sapiens
AKNRGYCSGGTCYSDY

SEQ ID NO: 488 - protein, 9 aa, Homo sapiens
ARGGWTFGL

SEQ ID NO: 489 - protein, 14 aa, Homo sapiens
ARANQPTPIYYFDY

SEQ ID NO: 490 - protein, 9 aa, Homo sapiens
ARDSSWYDS

SEQ ID NO: 491 - protein, 9 aa, Homo sapiens
ARGGAWFDP

SEQ ID NO: 492 - protein, 12 aa, Homo sapiens
ARGGSGDLDFDY

SEQ ID NO: 493 - protein, 5 aa, Homo sapiens
ARVPH

SEQ ID NO: 494 - protein, 12 aa, Homo sapiens
ARGRDAYKCGNY

SEQ ID NO: 495 - protein, 13 aa, Homo sapiens
VKLIAAAGQDIAY

SEQ ID NO: 496 - protein, 16 aa, Homo sapiens
AKDHSQNGYDWGAFDH

SEQ ID NO: 497 - protein, 11 aa, Homo sapiens
AAGTGKSDFDH

SEQ ID NO: 498 - protein, 10 aa, Homo sapiens
AAFSGTYITY

SEQ ID NO: 499 - protein, 13 aa, Homo sapiens
ARDDLLPDNGFDI

SEQ ID NO: 500 - protein, 12 aa, Homo sapiens
AKDVRLLDAFDI

SEQ ID NO: 501 - protein, 19 aa, Homo sapiens
AKVAVPTTSALMFYYAVDV

SEQ ID NO: 502 - protein, 7 aa, Homo sapiens
ARASGSY

SEQ ID NO: 503 - protein, 19 aa, Homo sapiens
ARDKSLVYYASGSSNAFDI

SEQ ID NO: 504 - protein, 11 aa, Homo sapiens
ARGYNYGPFDY

SEQ ID NO: 505 - protein, 18 aa, Homo sapiens
AHRPSQRHSGWYPNWFDP

SEQ ID NO: 506 - protein, 14 aa, Homo sapiens
AKDGQQLVSDAFDI

SEQ ID NO: 507 - protein, 13 aa, Homo sapiens
ARDRFGGWFHMDV

SEQ ID NO: 508 - protein, 9 aa, Homo sapiens
ARVVSWFDP

SEQ ID NO: 509 - protein, 10 aa, Homo sapiens
ARGWSHGLDV

SEQ ID NO: 510 - protein, 15 aa, Homo sapiens
AKGYTSSWYHEPFDY

SEQ ID NO: 511 - protein, 10 aa, Homo sapiens
AKGPPLYFDS

SEQ ID NO: 512 - protein, 11 aa, Homo sapiens
AREFHGGHFDY

SEQ ID NO: 513 - protein, 16 aa, Homo sapiens
ARDPSNTSGFYAYFDY

SEQ ID NO: 514 - protein, 12 aa, Homo sapiens
VRGTIGWNGVDY

SEQ ID NO: 515 - protein, 10 aa, Homo sapiens
TTVTDGGLDY

SEQ ID NO: 516 - protein, 18 aa, Homo sapiens
ARYSSNWYGTGYYYGMDV

SEQ ID NO: 517 - protein, 15 aa, Homo sapiens
ARAPTSVSNPYHFDS

SEQ ID NO: 518 - protein, 11 aa, Homo sapiens
AREAVVGGFDY

SEQ ID NO: 519 - protein, 10 aa, Homo sapiens
STWLTGHFDY

SEQ ID NO: 520 - protein, 9 aa, Homo sapiens
VRDWYGFDS

SEQ ID NO: 521 - protein, 13 aa, Homo sapiens
ARHCYGGCGWFDP

SEQ ID NO: 522 - protein, 12 aa, Homo sapiens
AKDLYDFSGMDV

SEQ ID NO: 523 - protein, 19 aa, Homo sapiens
ARGLPYGSGVHHNFWTFDY

SEQ ID NO: 524 - protein, 11 aa, Homo sapiens
ARPYYFYAMDV

SEQ ID NO: 525 - protein, 11 aa, Homo sapiens
VKDILGWAFDF

SEQ ID NO: 526 - protein, 15 aa, Homo sapiens
ARVLGGVIARGGFDP

SEQ ID NO: 527 - protein, 17 aa, Homo sapiens
AKRRVVVTEDYSYGMDV

SEQ ID NO: 528 - protein, 16 aa, Homo sapiens
ARRVYYFDSSGYFFDY

SEQ ID NO: 529 - protein, 11 aa, Homo sapiens
ARGGSEGWLDP

SEQ ID NO: 530 - protein, 13 aa, Homo sapiens
AKNLVDGQALYEY

SEQ ID NO: 531 - protein, 9 aa, Homo sapiens
ASGAHYFGS

SEQ ID NO: 532 - protein, 13 aa, Homo sapiens
AKVRISAAGSFDY

SEQ ID NO: 533 - protein, 10 aa, Homo sapiens
ARDVSGRDDY

SEQ ID NO: 534 - protein, 11 aa, Homo sapiens
AKGSLGRYFDY

SEQ ID NO: 535 - protein, 12 aa, Homo sapiens
AREGYSAYDFAY

SEQ ID NO: 536 - protein, 7 aa, Homo sapiens
ARGPVDY

SEQ ID NO: 537 - protein, 15 aa, Homo sapiens
ARARLPYYYYYGMDV

SEQ ID NO: 538 - protein, 15 aa, Homo sapiens
ARDGGSGYYEGYFDL

SEQ ID NO: 539 - protein, 14 aa, Homo sapiens
AKRSLSGAPSPLDC

SEQ ID NO: 540 - protein, 8 aa, Homo sapiens
ARGEALGC

SEQ ID NO: 541 - protein, 7 aa, Homo sapiens
TGSFLAY

SEQ ID NO: 542 - protein, 15 aa, Homo sapiens
ARHGKSGSYNRYFDY

SEQ ID NO: 543 - protein, 11 aa, Homo sapiens
TTGLVATISDY

SEQ ID NO: 544 - protein, 11 aa, Homo sapiens
AISGDGAYSHD

SEQ ID NO: 545 - protein, 9 aa, Homo sapiens
ASGRTTSHY

SEQ ID NO: 546 - protein, 16 aa, Homo sapiens
ARAPGIEAVEGYYFDS

SEQ ID NO: 547 - protein, 7 aa, Homo sapiens
AKRDQHD

SEQ ID NO: 548 - protein, 8 aa, Homo sapiens
ARDSSSPY

SEQ ID NO: 549 - protein, 10 aa, Homo sapiens
ANDPRFGGSY

SEQ ID NO: 550 - protein, 15 aa, Homo sapiens
AKDRVVRGVMGALGY

SEQ ID NO: 551 - protein, 13 aa, Homo sapiens
AKDQRGYNRPVES

SEQ ID NO: 552 - protein, 14 aa, Homo sapiens
AKGPFGSGNNFNDF

SEQ ID NO: 553 - protein, 11 aa, Homo sapiens
VAAPNQYYFDY

SEQ ID NO: 554 - protein, 14 aa, Homo sapiens
AKPSCSSTSCPAGY

SEQ ID NO: 555 - protein, 12 aa, Homo sapiens
ARHGGWRSPFDY

SEQ ID NO: 556 - protein, 17 aa, Homo sapiens
AKDILRISEPGTRGLDY

SEQ ID NO: 557 - protein, 8 aa, Homo sapiens
GRVRGMDV

SEQ ID NO: 558 - protein, 14 aa, Homo sapiens
ARGNASESHYNSGY

SEQ ID NO: 559 - protein, 9 aa, Homo sapiens
ARGSGYNYY

SEQ ID NO: 560 - protein, 9 aa, Homo sapiens
ARTARGLDY

SEQ ID NO: 561 - protein, 17 aa, Homo sapiens
ARGFTVTTGYYYYGMDV

SEQ ID NO: 562 - protein, 11 aa, Homo sapiens
AKVWVKLGGDY

SEQ ID NO: 563 - protein, 12 aa, Homo sapiens
ARDFYGDYSFDY

SEQ ID NO: 564 - protein, 10 aa, Homo sapiens
ARFGHYVMDV

SEQ ID NO: 565 - protein, 13 aa, Homo sapiens
VGDPPNSGYAFDI

SEQ ID NO: 566 - protein, 8 aa, Homo sapiens
ARGNNLDY

SEQ ID NO: 567 - protein, 7 aa, Homo sapiens
AKGRLDS

SEQ ID NO: 568 - protein, 8 aa, Homo sapiens
ARGLQVDY

SEQ ID NO: 569 - protein, 12 aa, Homo sapiens
AKDSGGPYYFDS

SEQ ID NO: 570 - protein, 8 aa, Homo sapiens
AAGRGFDY

SEQ ID NO: 571 - protein, 14 aa, Homo sapiens
AKGSGDSRPYYFDY

SEQ ID NO: 572 - protein, 6 aa, Homo sapiens
ARVQDY

SEQ ID NO: 573 - protein, 12 aa, Homo sapiens
ARGAYSGYDFDY

SEQ ID NO: 574 - protein, 6 aa, Homo sapiens
AGELDV

SEQ ID NO: 575 - protein, 9 aa, Homo sapiens
AREWSAFDF

SEQ ID NO: 576 - protein, 17 aa, Homo sapiens
ARAYDFWSGYPGGAFDI

SEQ ID NO: 577 - protein, 14 aa, Homo sapiens
ARFYYGSGSPQTDY

SEQ ID NO: 578 - protein, 12 aa, Homo sapiens
ARHGGSAAGFDY

SEQ ID NO: 579 - protein, 10 aa, Homo sapiens
ARGRAGSLDY

SEQ ID NO: 580 - protein, 10 aa, Homo sapiens
TRPYYDNTGY

SEQ ID NO: 581 - protein, 14 aa, Homo sapiens
ARGGWELRSDYFQH

SEQ ID NO: 582 - protein, 13 aa, Homo sapiens
ARGTSDYYYGMDV

SEQ ID NO: 583 - protein, 15 aa, Homo sapiens
ARDLYSGYDSNWFDP

SEQ ID NO: 584 - protein, 14 aa, Homo sapiens
ARGSINMLRGVPDY

SEQ ID NO: 585 - protein, 17 aa, Homo sapiens
ARKLYYYDTSDSGWFDP

SEQ ID NO: 586 - protein, 6 aa, Homo sapiens
ARDWDY

SEQ ID NO: 587 - protein, 10 aa, Homo sapiens
ARDLSGKFDY

SEQ ID NO: 588 - protein, 8 aa, Homo sapiens
ARDRIMDV

SEQ ID NO: 589 - protein, 11 aa, Homo sapiens
ARRGTWELLDY

SEQ ID NO: 590 - protein, 18 aa, Homo sapiens
VRVNYFDRSGYSLDAFDI

SEQ ID NO: 591 - protein, 7 aa, Homo sapiens
TRIPYDY

SEQ ID NO: 592 - protein, 13 aa, Homo sapiens
ARDLGRSGDNFDY

SEQ ID NO: 593 - protein, 11 aa, Homo sapiens
ARDTSIGAPDY

SEQ ID NO: 594 - protein, 11 aa, Homo sapiens
VKETLRLAFDY

SEQ ID NO: 595 - protein, 15 aa, Homo sapiens
ARQSGIIGTTDWFDP

SEQ ID NO: 596 - protein, 15 aa, Homo sapiens
ARDGWGSTSYNWFDP

SEQ ID NO: 597 - protein, 11 aa, Homo sapiens
ARGPWTEYFQL

SEQ ID NO: 598 - protein, 10 aa, Homo sapiens
TRGVFHRFDP

SEQ ID NO: 599 - protein, 15 aa, Homo sapiens
ARHCSGGSCYSCSDY

SEQ ID NO: 600 - protein, 12 aa, Homo sapiens
VRVSSGGNYFDY

SEQ ID NO: 601 - protein, 11 aa, Homo sapiens
VKSMGAIDLDY

SEQ ID NO: 602 - protein, 9 aa, Homo sapiens
ARGDYYFDF

SEQ ID NO: 603 - protein, 10 aa, Homo sapiens
ARDFGGYSDY

SEQ ID NO: 604 - protein, 16 aa, Homo sapiens
ARGPLRYSSGWYYFDY

SEQ ID NO: 605 - protein, 13 aa, Homo sapiens
ARASGSYYSDFDY

SEQ ID NO: 606 - protein, 10 aa, Homo sapiens
AKYRGYAFDI

SEQ ID NO: 607 - protein, 12 aa, Homo sapiens
ARRTSSWYYFDY

SEQ ID NO: 608 - protein, 13 aa, Homo sapiens
TRRETTYYYGMDV

SEQ ID NO: 609 - protein, 16 aa, Homo sapiens
AKDRGYGSGSYRHLDY

SEQ ID NO: 610 - protein, 5 aa, Homo sapiens
STVRD

SEQ ID NO: 611 - protein, 10 aa, Homo sapiens
AREKGDAFDI

SEQ ID NO: 612 - protein, 15 aa, Homo sapiens
ARDPYYYDTSGYFDP

SEQ ID NO: 613 - protein, 8 aa, Homo sapiens
AGGRSFDY

SEQ ID NO: 614 - protein, 10 aa, Homo sapiens
ARVRGDPYDY

SEQ ID NO: 615 - protein, 11 aa, Homo sapiens
ARGGGTVTTDY

SEQ ID NO: 616 - protein, 14 aa, Homo sapiens
AKERWLGELLSIDY

SEQ ID NO: 617 - protein, 8 aa, Homo sapiens
ARDRQQGY

SEQ ID NO: 618 - protein, 12 aa, Homo sapiens
ARDVGDRAGFDP

SEQ ID NO: 619 - protein, 7 aa, Homo sapiens
TRGEYGV

SEQ ID NO: 620 - protein, 11 aa, Homo sapiens
ARRIPGGPFDY

SEQ ID NO: 621 - protein, 11 aa, Homo sapiens
VRHIGKWGFDY

SEQ ID NO: 622 - protein, 12 aa, Homo sapiens
AREMPHTYYFDY

SEQ ID NO: 623 - protein, 10 aa, Homo sapiens
ARSVQGAFDN

SEQ ID NO: 624 - protein, 10 aa, Homo sapiens
ARHVGYYFDY

SEQ ID NO: 625 - protein, 7 aa, Homo sapiens
ARGAFGV

SEQ ID NO: 626 - protein, 10 aa, Homo sapiens
ARDGGGSFDY

SEQ ID NO: 627 - protein, 15 aa, Homo sapiens
ARDCDTTSHYSRFDP

SEQ ID NO: 628 - protein, 11 aa, Homo sapiens
ATKYSGYDFGY

SEQ ID NO: 629 - protein, 11 aa, Homo sapiens
AKDIFWWAFDF

SEQ ID NO: 630 - protein, 11 aa, Homo sapiens
ARGGPYGDLDY

SEQ ID NO: 631 - protein, 14 aa, Homo sapiens
ITDRGYGDFGGEPN

SEQ ID NO: 632 - protein, 10 aa, Homo sapiens
ARRGRGYFDY

SEQ ID NO: 633 - protein, 10 aa, Homo sapiens
ARSTEGAFDY

SEQ ID NO: 634 - protein, 10 aa, Homo sapiens
ARGPGYYFDY

SEQ ID NO: 635 - protein, 13 aa, Homo sapiens
ARDGYGSGIDFDY

SEQ ID NO: 636 - protein, 12 aa, Homo sapiens
AREGGSGYSFDY

SEQ ID NO: 637 - protein, 10 aa, Homo sapiens
ARYQMGAPDY

SEQ ID NO: 638 - protein, 10 aa, Homo sapiens
ARDAFGVGSY

SEQ ID NO: 639 - protein, 9 aa, Homo sapiens
VRGWRELTH

SEQ ID NO: 640 - protein, 10 aa, Homo sapiens
ARRDAYRFDY

SEQ ID NO: 641 - protein, 11 aa, Homo sapiens
ARFAVAAPPDY

SEQ ID NO: 642 - protein, 9 aa, Homo sapiens
ARDFLTGGY

SEQ ID NO: 643 - protein, 6 aa, Homo sapiens
VRSLDS

SEQ ID NO: 644 - protein, 13 aa, Homo sapiens
AKGSGYDWRIFDY

SEQ ID NO: 645 - protein, 6 aa, Homo sapiens
ARGGED

SEQ ID NO: 646 - protein, 6 aa, Homo sapiens
VRSVDH

SEQ ID NO: 647 - protein, 13 aa, Homo sapiens
ARSSSGWYWYFDL

SEQ ID NO: 648 - protein, 12 aa, Homo sapiens
AREYPGRCWFDP

SEQ ID NO: 649 - protein, 6 aa, Homo sapiens
TRDQLW

SEQ ID NO: 650 - protein, 14 aa, Homo sapiens
TTDRGIAARPLFDS

SEQ ID NO: 651 - protein, 9 aa, Homo sapiens
ARRNGGFDI

SEQ ID NO: 652 - protein, 6 aa, Homo sapiens
VRAIDS

SEQ ID NO: 653 - protein, 9 aa, Homo sapiens
ARGNHGMDV

SEQ ID NO: 654 - protein, 6 aa, Homo sapiens
ARAYDF

SEQ ID NO: 655 - protein, 12 aa, Homo sapiens
ARQGPGGRAYDY

SEQ ID NO: 656 - protein, 8 aa, Homo sapiens
ARFEAFDI

SEQ ID NO: 657 - protein, 13 aa, Homo sapiens
ARDSGLTQGWFDP

SEQ ID NO: 658 - protein, 11 aa, Homo sapiens
AKDVWRWAFDY

SEQ ID NO: 659 - protein, 14 aa, Homo sapiens
AKEGDGSSWSSFDY

SEQ ID NO: 660 - protein, 13 aa, Homo sapiens
VRSGSYSVDWFDP

SEQ ID NO: 661 - protein, 12 aa, Homo sapiens
AREGGAGYSFDY

SEQ ID NO: 662 - protein, 8 aa, Homo sapiens
ARVLNLDY

SEQ ID NO: 663 - protein, 13 aa, Homo sapiens
ARGGSDSSWYWVH

SEQ ID NO: 664 - protein, 10 aa, Homo sapiens
ARGSSSSFGY

SEQ ID NO: 665 - protein, 9 aa, Homo sapiens
ARGLAGADY

SEQ ID NO: 666 - protein, 10 aa, Homo sapiens
ARGIASLGAY

SEQ ID NO: 667 - protein, 13 aa, Homo sapiens
ARRRSGDGWSVDY

SEQ ID NO: 668 - protein, 8 aa, Homo sapiens
ARSGGLDP

SEQ ID NO: 669 - protein, 13 aa, Homo sapiens
VRDGGLDGDAFDI

SEQ ID NO: 670 - protein, 14 aa, Homo sapiens
TTDRGIASRPLFDF

SEQ ID NO: 671 - protein, 11 aa, Homo sapiens
ARVGGTSAFDI

SEQ ID NO: 672 - protein, 14 aa, Homo sapiens
ARPYKSGWCNWFDP

SEQ ID NO: 673 - protein, 6 aa, Homo sapiens
ARRFNL

SEQ ID NO: 674 - protein, 12 aa, Homo sapiens
ARRASSENYFDY

SEQ ID NO: 675 - protein, 7 aa, Homo sapiens
ARGYNWN

SEQ ID NO: 676 - protein, 12 aa, Homo sapiens
TRDGNRGYDMDV

SEQ ID NO: 677 - protein, 10 aa, Homo sapiens
ARDRVRAFDI

SEQ ID NO: 678 - protein, 12 aa, Homo sapiens
ARRASAENYFDY

SEQ ID NO: 679 - protein, 10 aa, Homo sapiens
VRGSSSSFDY

SEQ ID NO: 680 - protein, 12 aa, Homo sapiens
ARGEGVAAISGY

SEQ ID NO: 681 - protein, 12 aa, Homo sapiens
ARVRSSGSPLDY

SEQ ID NO: 682 - protein, 12 aa, Homo sapiens
ARVRSSGSPLDY

SEQ ID NO: 683 - protein, 8 aa, Homo sapiens
AREGNLGS

SEQ ID NO: 684 - protein, 10 aa, Homo sapiens
ARDLHYAFDF

SEQ ID NO: 685 - protein, 11 aa, Homo sapiens
ASGAGTYSPDY

SEQ ID NO: 686 - protein, 11 aa, Homo sapiens
ARDRGQQLGDY

SEQ ID NO: 687 - protein, 15 aa, Homo sapiens
ARDRYSSGWYHGFDI

SEQ ID NO: 688 - protein, 5 aa, Homo sapiens
DGANY

SEQ ID NO: 689 - protein, 7 aa, Homo sapiens
GRGSGSL

SEQ ID NO: 690 - protein, 8 aa, Homo sapiens
ARRGGFDC

SEQ ID NO: 691 - protein, 8 aa, Homo sapiens
ARGPSFDY

SEQ ID NO: 692 - protein, 10 aa, Homo sapiens
AKEKSGCFDY

SEQ ID NO: 693 - protein, 8 aa, Homo sapiens
TRARGMDV

SEQ ID NO: 694 - protein, 8 aa, Homo sapiens
VRDRGSSY

SEQ ID NO: 695 - protein, 18 aa, Homo sapiens
TTEGCSSTRCYSPNAFDI

SEQ ID NO: 696 - protein, 18 aa, Homo sapiens
ARDRYCSRGSCFDWYFDL

SEQ ID NO: 697 - protein, 11 aa, Homo sapiens
ARQPGSGWFDP

SEQ ID NO: 698 - protein, 14 aa, Homo sapiens
ARGGDSSGYYAYDY

SEQ ID NO: 699 - protein, 11 aa, Homo sapiens
ARTLSANWFDP

SEQ ID NO: 700 - protein, 13 aa, Homo sapiens
AGRITVAGGWFDP

SEQ ID NO: 701 - protein, 7 aa, Homo sapiens
VRGSMDV

SEQ ID NO: 702 - protein, 11 aa, Homo sapiens
ARDRGGWSIDF

SEQ ID NO: 703 - protein, 12 aa, Homo sapiens
ARDVTGKYYFDY

SEQ ID NO: 704 - protein, 9 aa, Homo sapiens
ARAAGYLDY

SEQ ID NO: 705 - protein, 12 aa, Homo sapiens
VRDDRGSYLFDY

SEQ ID NO: 706 - protein, 18 aa, Homo sapiens
ARLGPGATTPTTGAAFDI

SEQ ID NO: 707 - protein, 9 aa, Homo sapiens
ARRGTSLDY

SEQ ID NO: 708 - protein, 8 aa, Homo sapiens
VRDSSATY

SEQ ID NO: 709 - protein, 8 aa, Homo sapiens
TNRAWLES

SEQ ID NO: 710 - protein, 13 aa, Homo sapiens
ARQDGAAEYYFDY

SEQ ID NO: 711 - protein, 11 aa, Homo sapiens
ARDRGYSTFDF

SEQ ID NO: 712 - protein, 10 aa, Homo sapiens
TRPYSYYMDV

SEQ ID NO: 713 - protein, 8 aa, Homo sapiens
ARGSSSSS

SEQ ID NO: 714 - protein, 11 aa, Homo sapiens
AHRLRADAFDV

SEQ ID NO: 715 - protein, 8 aa, Homo sapiens
ARGLPDPH

SEQ ID NO: 716 - protein, 12 aa, Homo sapiens
ARRASGENYFDY

SEQ ID NO: 717 - protein, 14 aa, Homo sapiens
AKELVSRQSLSFDF

SEQ ID NO: 718 - protein, 9 aa, Homo sapiens
ARGPGTTSD

SEQ ID NO: 719 - protein, 10 aa, Homo sapiens
ARDHNYGFDY

SEQ ID NO: 720 - protein, 11 aa, Homo sapiens
AHLYNYGRFDY

SEQ ID NO: 721 - protein, 12 aa, Homo sapiens
ARSIVGATPFDY

SEQ ID NO: 722 - protein, 10 aa, Homo sapiens
ARGASRYSGT

SEQ ID NO: 723 - protein, 8 aa, Homo sapiens
VGHGSGSY

SEQ ID NO: 724 - protein, 10 aa, Homo sapiens
ARLVAGPFDS

SEQ ID NO: 725 - protein, 13 aa, Homo sapiens
ARGGRYSYGAFDI

SEQ ID NO: 726 - protein, 9 aa, Homo sapiens
ARSREGFDI

SEQ ID NO: 727 - protein, 12 aa, Homo sapiens
ARRASAENYFDH

SEQ ID NO: 728 - protein, 9 aa, Homo sapiens
ARGTTYFDY

SEQ ID NO: 729 - protein, 10 aa, Homo sapiens
ARDLSWNFDY

SEQ ID NO: 730 - protein, 12 aa, Homo sapiens
ARGPPSPQYFQY

SEQ ID NO: 731 - protein, 10 aa, Homo sapiens
VAQTVSVSDY

SEQ ID NO: 732 - protein, 14 aa, Homo sapiens
AKGRLADYYYYMDV

SEQ ID NO: 733 - protein, 7 aa, Homo sapiens
ARDLGLY

SEQ ID NO: 734 - protein, 11 aa, Homo sapiens
ARVGSSGSLDY

SEQ ID NO: 735 - protein, 11 aa, Homo sapiens
ARGDRYSGWGY

SEQ ID NO: 736 - protein, 10 aa, Homo sapiens
VRTRADAFDI

SEQ ID NO: 737 - protein, 10 aa, Homo sapiens
TTDPPGGTDF

SEQ ID NO: 738 - protein, 11 aa, Homo sapiens
ARGGAVAGFDP

SEQ ID NO: 739 - protein, 19 aa, Homo sapiens
AKDPAKRQTTVVTILNFDY

SEQ ID NO: 740 - protein, 6 aa, Homo sapiens
ASLPKD

SEQ ID NO: 741 - protein, 12 aa, Homo sapiens
ARGAGFRELIDY

SEQ ID NO: 742 - protein, 13 aa, Homo sapiens
VRDGGLGGDAFDV

SEQ ID NO: 743 - protein, 11 aa, Homo sapiens
ARDRATVTFDF

SEQ ID NO: 744 - protein, 13 aa, Homo sapiens
AKEPPRSGWAFDY

SEQ ID NO: 745 - protein, 19 aa, Homo sapiens
AKEGVPTPAAHGYFYHMDI

SEQ ID NO: 746 - protein, 12 aa, Homo sapiens
ARLSGSSWDFDY

SEQ ID NO: 747 - protein, 9 aa, Homo sapiens
VRGGGNFAY

SEQ ID NO: 748 - protein, 10 aa, Homo sapiens
ASHSGWRLDY

SEQ ID NO: 749 - protein, 12 aa, Homo sapiens
ARDIDSSGYLDY

SEQ ID NO: 750 - protein, 7 aa, Homo sapiens
TRGLGGY

SEQ ID NO: 751 - protein, 12 aa, Homo sapiens
AKGLSRFGDFDY

SEQ ID NO: 752 - protein, 11 aa, Homo sapiens
VKDLKAGGADV

SEQ ID NO: 753 - protein, 15 aa, Homo sapiens
ARDLGGDNYAYLPDF

SEQ ID NO: 754 - protein, 15 aa, Homo sapiens
ARVPDSSGYLYYFDY

SEQ ID NO: 755 - protein, 15 aa, Homo sapiens
AGGGQMRTTEAAFDI

SEQ ID NO: 756 - protein, 13 aa, Homo sapiens
ARDIPAAGLFLDY

SEQ ID NO: 757 - protein, 11 aa, Homo sapiens
GKDLKPGGLDY

SEQ ID NO: 758 - protein, 9 aa, Homo sapiens
VRQASGFDY

SEQ ID NO: 759 - protein, 14 aa, Homo sapiens
ARGTSAAGTDWFDP

SEQ ID NO: 760 - protein, 8 aa, Homo sapiens
VTGRDSSH

SEQ ID NO: 761 - protein, 13 aa, Homo sapiens
ARGGGYTGYDIDY

SEQ ID NO: 762 - protein, 13 aa, Homo sapiens
ARLHSLYSEEFDP

SEQ ID NO: 763 - protein, 10 aa, Homo sapiens
ASLRGYRFDY

SEQ ID NO: 764 - protein, 11 aa, Homo sapiens
ARDPFYSAFDI

SEQ ID NO: 765 - protein, 15 aa, Homo sapiens
AKDRYCPGGICPVDY

SEQ ID NO: 766 - protein, 7 aa, Homo sapiens
AREGMAY

SEQ ID NO: 767 - protein, 14 aa, Homo sapiens
AREVTTIGAYYFDY

SEQ ID NO: 768 - protein, 13 aa, Homo sapiens
ARVGTAGTRWFDP

SEQ ID NO: 769 - protein, 9 aa, Homo sapiens
AKKGGGFDS

SEQ ID NO: 770 - protein, 10 aa, Homo sapiens
ARGREWELAN

SEQ ID NO: 771 - protein, 18 aa, Homo sapiens
TKGTLPYCTSGRCYPFDY

SEQ ID NO: 772 - protein, 10 aa, Homo sapiens
ARRSGLTVDY

SEQ ID NO: 773 - protein, 12 aa, Homo sapiens
AKEGYSSSPFDY

SEQ ID NO: 774 - protein, 14 aa, Homo sapiens
AKGGGSSYSYYMDV

SEQ ID NO: 775 - protein, 10 aa, Homo sapiens
ARDRGGGFDS

SEQ ID NO: 776 - protein, 14 aa, Homo sapiens
AKSSSSYGNDAFDV

SEQ ID NO: 777 - protein, 13 aa, Homo sapiens
AKPVIGTYWYFDL

SEQ ID NO: 778 - protein, 6 aa, Homo sapiens
VRDTGY

SEQ ID NO: 779 - protein, 9 aa, Homo sapiens
AKRGDWFDS

SEQ ID NO: 780 - protein, 12 aa, Homo sapiens
ARDRGDGYIFDY

SEQ ID NO: 781 - protein, 15 aa, Homo sapiens
ARDRDTSGHYGWLDP

SEQ ID NO: 782 - protein, 12 aa, Homo sapiens
ARVAGSSGCPGY

SEQ ID NO: 783 - protein, 9 aa, Homo sapiens
LRGGESYGY

SEQ ID NO: 784 - protein, 11 aa, Homo sapiens
ARRYGSGPFDY

SEQ ID NO: 785 - protein, 14 aa, Homo sapiens
ARLRGAYNHEDFDY

SEQ ID NO: 786 - protein, 14 aa, Homo sapiens
AKSGGSRHYYGLDV

SEQ ID NO: 787 - protein, 9 aa, Homo sapiens
ARDRTAFDI

SEQ ID NO: 788 - protein, 6 aa, Homo sapiens
SRGLDP

SEQ ID NO: 789 - protein, 15 aa, Homo sapiens
VRGGIQVSGIDEFDI

SEQ ID NO: 790 - protein, 10 aa, Homo sapiens
TRDIGGRYGF

SEQ ID NO: 791 - protein, 15 aa, Homo sapiens
VRDPGGDRHDWYFDL

SEQ ID NO: 792 - protein, 10 aa, Homo sapiens
VRGLGWFFDL

SEQ ID NO: 793 - protein, 12 aa, Homo sapiens
AKDRLTIDAFDI

SEQ ID NO: 794 - protein, 6 aa, Homo sapiens
TTVFEH

SEQ ID NO: 795 - protein, 9 aa, Homo sapiens
ARDSLGYDY

SEQ ID NO: 796 - protein, 11 aa, Homo sapiens
ARAPHRDWFDP

SEQ ID NO: 797 - protein, 10 aa, Homo sapiens
ATDLSGRYDY

SEQ ID NO: 798 - protein, 9 aa, Homo sapiens
VLRGSAFDI

SEQ ID NO: 799 - protein, 9 aa, Homo sapiens
ATRGQAPAD

SEQ ID NO: 800 - protein, 9 aa, Homo sapiens
VLRGSSFDV

SEQ ID NO: 801 - protein, 11 aa, Homo sapiens
ARDRHGGSFDY

SEQ ID NO: 802 - protein, 9 aa, Homo sapiens
ALRGSAFDI

SEQ ID NO: 803 - protein, 9 aa, Homo sapiens
ARGLIDFDY

SEQ ID NO: 804 - protein, 15 aa, Homo sapiens
AKAGVVGATIRYFDY

SEQ ID NO: 805 - protein, 9 aa, Homo sapiens
VLRGSSFDI

SEQ ID NO: 806 - protein, 13 aa, Homo sapiens
ARGFGRGSWSFDY

SEQ ID NO: 807 - protein, 15 aa, Homo sapiens
ARGPTGTTGYYGMDV

SEQ ID NO: 808 - protein, 11 aa, Homo sapiens
AAWCWSHWFDY

SEQ ID NO: 809 - protein, 10 aa, Homo sapiens
ARGENYAFEY

SEQ ID NO: 810 - protein, 10 aa, Homo sapiens
ARGGYNRFDF

SEQ ID NO: 811 - protein, 8 aa, Homo sapiens
IRGRPWDY

SEQ ID NO: 812 - protein, 12 aa, Homo sapiens
TTEPRGYRLFDY

SEQ ID NO: 813 - protein, 8 aa, Homo sapiens
VKDQYIDY

SEQ ID NO: 814 - protein, 12 aa, Homo sapiens
ARDGGRGGDLDY

SEQ ID NO: 815 - protein, 9 aa, Homo sapiens
ARDKHPPTY

SEQ ID NO: 816 - protein, 13 aa, Homo sapiens
ARGQAGATTLFDY

SEQ ID NO: 817 - protein, 13 aa, Homo sapiens
ARDGHGSGIDFDY

SEQ ID NO: 818 - protein, 14 aa, Homo sapiens
ASRPPDFDVGVLDY

SEQ ID NO: 819 - protein, 8 aa, Homo sapiens
VKDQYVDY

SEQ ID NO: 820 - protein, 13 aa, Homo sapiens
ARQPSLVRGHFDH

SEQ ID NO: 821 - protein, 13 aa, Homo sapiens
VRRPLRGQNWFDP

SEQ ID NO: 822 - protein, 17 aa, Homo sapiens
ARGPGCTSTTCPYYFDY

SEQ ID NO: 823 - protein, 7 aa, Homo sapiens
ASPRLDP

SEQ ID NO: 824 - protein, 9 aa, Homo sapiens
TTDQAIFDY

SEQ ID NO: 825 - protein, 11 aa, Homo sapiens
ARSGDGGYSHD

SEQ ID NO: 826 - protein, 7 aa, Homo sapiens
ARSHGTY

SEQ ID NO: 827 - protein, 12 aa, Homo sapiens
ARVRGAAAGADY

SEQ ID NO: 828 - protein, 15 aa, Homo sapiens
ARDKGTTLTSYGMDV

SEQ ID NO: 829 - protein, 6 aa, Homo sapiens
ASFSDP

SEQ ID NO: 830 - protein, 13 aa, Homo sapiens
ARDLPIAGAGFDY

SEQ ID NO: 831 - protein, 12 aa, Homo sapiens
ARDPGGGSGFDS

SEQ ID NO: 832 - protein, 11 aa, Homo sapiens
ALSGDGAYSHD

SEQ ID NO: 833 - protein, 8 aa, Homo sapiens
ARGRTCDN

SEQ ID NO: 834 - protein, 18 aa, Homo sapiens
ARDEKRSCSGSSCYYFDY

SEQ ID NO: 835 - protein, 13 aa, Homo sapiens
ARGVWDSSGYFHY

SEQ ID NO: 836 - protein, 12 aa, Homo sapiens
ARGHYYSSDFDY

SEQ ID NO: 837 - protein, 10 aa, Homo sapiens
VRGGWTAVDY

SEQ ID NO: 838 - protein, 12 aa, Homo sapiens
IHYGSGSYTTDY

SEQ ID NO: 839 - protein, 11 aa, Homo sapiens
VKDVSSGWYDY

SEQ ID NO: 840 - protein, 10 aa, Homo sapiens
AAEEVATGAY

SEQ ID NO: 841 - protein, 12 aa, Homo sapiens
ARDKSKGRYFDY

SEQ ID NO: 842 - protein, 12 aa, Homo sapiens
ARDRGGATTLDY

SEQ ID NO: 843 - protein, 9 aa, Homo sapiens
ILRGSAFDI

SEQ ID NO: 844 - protein, 14 aa, Homo sapiens
ARENRYSIGWDFDY

SEQ ID NO: 845 - protein, 9 aa, Homo sapiens
ARDKRPPTY

SEQ ID NO: 846 - protein, 8 aa, Homo sapiens
AKTGQFEN

SEQ ID NO: 847 - protein, 18 aa, Homo sapiens
ARGLYYYDSSGYYYYFDY

SEQ ID NO: 848 - protein, 9 aa, Homo sapiens
VLRGSSFDL

SEQ ID NO: 849 - protein, 10 aa, Homo sapiens
ASKITDDFDY

SEQ ID NO: 850 - protein, 12 aa, Homo sapiens
ARGGTSGWYVDY

SEQ ID NO: 851 - protein, 16 aa, Homo sapiens
ARGGNAVANWRYYFDY

SEQ ID NO: 852 - protein, 13 aa, Homo sapiens
ARAGRGAAAGYDY

SEQ ID NO: 853 - protein, 9 aa, Homo sapiens
TTRPTQGGY

SEQ ID NO: 854 - protein, 5 aa, Homo sapiens
ATHRD

SEQ ID NO: 855 - protein, 14 aa, Homo sapiens
AREAGAGGSSSFDY

SEQ ID NO: 856 - protein, 13 aa, Homo sapiens
ARHRSSSSGWLDP

SEQ ID NO: 857 - protein, 13 aa, Homo sapiens
AKLIPSSGWPFDY

SEQ ID NO: 858 - protein, 12 aa, Homo sapiens
ARDKSKGRYLDY

SEQ ID NO: 859 - skipped

SEQ ID NO: 860 - protein, 12 aa, Homo sapiens
ARDVVGGNTFDY

SEQ ID NO: 861 - protein, 9 aa, Homo sapiens
TTRATQGGY

SEQ ID NO: 862 - protein, 13 aa, Homo sapiens
ARHPALVVIHFDY

SEQ ID NO: 863 - protein, 16 aa, Homo sapiens
ATGYCSSTSCQYYSDY

SEQ ID NO: 864 - protein, 12 aa, Homo sapiens
ARDKGKGSYFDS

SEQ ID NO: 865 - protein, 10 aa, Homo sapiens
AREYYYKLDV

SEQ ID NO: 866 - protein, 9 aa, Homo sapiens
ARGYNSFDN

SEQ ID NO: 867 - protein, 9 aa, Homo sapiens
ARSIGGFDS

SEQ ID NO: 868 - protein, 11 aa, Homo sapiens
ARDPDSSAFDM

SEQ ID NO: 869 - protein, 14 aa, Homo sapiens
ARSPMVRGAGGMDV

SEQ ID NO: 870 - protein, 10 aa, Homo sapiens
ARMVAGGMDV

SEQ ID NO: 871 - protein, 16 aa, Homo sapiens
AKRGYHDTSAYYYFDC

SEQ ID NO: 872 - protein, 11 aa, Homo sapiens
LVVPDPYGMDV

SEQ ID NO: 873 - protein, 14 aa, Homo sapiens
ARDGQSGAPYGMDV

SEQ ID NO: 874 - protein, 13 aa, Homo sapiens
ASPNSGRMYYFDY

SEQ ID NO: 875 - protein, 9 aa, Homo sapiens
VRLAEYFQN

SEQ ID NO: 876 - protein, 14 aa, Homo sapiens
TRDRRGSGTHFFDY

SEQ ID NO: 877 - protein, 10 aa, Homo sapiens
VKGGTMDLDY

SEQ ID NO: 878 - protein, 10 aa, Homo sapiens
AGGSGWRIDS

SEQ ID NO: 879 - protein, 7 aa, Homo sapiens
AKGMGDS

SEQ ID NO: 880 - protein, 11 aa, Homo sapiens
AKYSSRWYEDY

SEQ ID NO: 881 - protein, 10 aa, Homo sapiens
AHTAGWLPDS

SEQ ID NO: 882 - protein, 9 aa, Homo sapiens
ATQGGFLDF

SEQ ID NO: 883 - protein, 11 aa, Homo sapiens
ARDLAHAAFDL

SEQ ID NO: 884 - protein, 9 aa, Homo sapiens
VRLAEYFQD

SEQ ID NO: 885 - protein, 9 aa, Homo sapiens
ATGRIGRDY

SEQ ID NO: 886 - protein, 16 aa, Homo sapiens
ARGFDCSSTSCYAFDI

SEQ ID NO: 887 - protein, 9 aa, Homo sapiens
ARGRGWSDY

SEQ ID NO: 888 - protein, 16 aa, Homo sapiens
ARGFDCSTTSCYAFDL

SEQ ID NO: 889 - protein, 10 aa, Homo sapiens
ARSTVLRGVH

SEQ ID NO: 890 - protein, 17 aa, Homo sapiens
ARDWRVEMATNYYGMDV

SEQ ID NO: 891 - protein, 10 aa, Homo sapiens
TRGPGWLPDY

SEQ ID NO: 892 - protein, 11 aa, Homo sapiens
ARGRIGSGLDV

SEQ ID NO: 893 - protein, 20 aa, Homo sapiens
AKDQYYGSGSPYYDYYGMDV

SEQ ID NO: 894 - protein, 11 aa, Homo sapiens
ARGGRTNAFDI

SEQ ID NO: 895 - protein, 11 aa, Homo sapiens
ARDSGWNYEDY

SEQ ID NO: 896 - protein, 15 aa, Homo sapiens
GRGLTVTGAKYYFDS

SEQ ID NO: 897 - protein, 15 aa, Homo sapiens
ARGGSNWYANNWFDP

SEQ ID NO: 898 - protein, 8 aa, Homo sapiens
AKGDWFDP

SEQ ID NO: 899 - protein, 12 aa, Homo sapiens
ARENVAVPAGDC

SEQ ID NO: 900 - protein, 8 aa, Homo sapiens
VKGPDFDY

SEQ ID NO: 901 - protein, 13 aa, Homo sapiens
VRDFSGGTDCFDP

SEQ ID NO: 902 - protein, 16 aa, Homo sapiens
TPTYDSSGYYPYYFDS

SEQ ID NO: 903 - protein, 6 aa, Homo sapiens
TTGWQV

SEQ ID NO: 904 - protein, 14 aa, Homo sapiens
ARDLDGYNPGPFDY

SEQ ID NO: 905 - protein, 16 aa, Homo sapiens
ARDLNFYGSGRGYFDP

SEQ ID NO: 906 - protein, 9 aa, Homo sapiens
VRNAYFFDS

SEQ ID NO: 907 - protein, 14 aa, Homo sapiens
AKDRDDAGDYCFDS

SEQ ID NO: 908 - protein, 10 aa, Homo sapiens
ARDDVYAFDI

SEQ ID NO: 909 - protein, 18 aa, Homo sapiens
ARDSYCSRGTCFDWYFDL

SEQ ID NO: 910 - protein, 11 aa, Homo sapiens
ARRGYYYAMDV

SEQ ID NO: 911 - protein, 5 aa, Homo sapiens
DSGDV

SEQ ID NO: 912 - protein, 8 aa, Homo sapiens
AGGYQFDY

SEQ ID NO: 913 - protein, 10 aa, Homo sapiens
TSRVLTTNDY

SEQ ID NO: 914 - protein, 14 aa, Homo sapiens
AKVVVVTVYWYLDL

SEQ ID NO: 915 - protein, 12 aa, Homo sapiens
ARDELGTYGMDV

SEQ ID NO: 916 - protein, 7 aa, Homo sapiens
ARAGGAY

SEQ ID NO: 917 - protein, 16 aa, Homo sapiens
ARGFDCSSASCYAFDL

SEQ ID NO: 918 - protein, 12 aa, Homo sapiens
ARAVRDQLLSDS

SEQ ID NO: 919 - protein, 9 aa, Homo sapiens
AKWSTGYDY

SEQ ID NO: 920 - protein, 11 aa, Homo sapiens
ARGWGSGWYPY

SEQ ID NO: 921 - protein, 6 aa, Homo sapiens
ARGIAV

SEQ ID NO: 922 - protein, 7 aa, Homo sapiens
VKDEWDV

SEQ ID NO: 923 - protein, 11 aa, Homo sapiens
VHRPYYEHFDS

SEQ ID NO: 924 - protein, 10 aa, Homo sapiens
TTDGYWGSDY

SEQ ID NO: 925 - protein, 11 aa, Homo sapiens
LGGRSGEPFDY

SEQ ID NO: 926 - protein, 12 aa, Homo sapiens
ARSRDGYNHGYT

SEQ ID NO: 927 - protein, 11 aa, Homo sapiens
ARYAYNNGMDV

SEQ ID NO: 928 - protein, 6 aa, Homo sapiens
VRGADV

SEQ ID NO: 929 - protein, 8 aa, Homo sapiens
ARGGRPAD

SEQ ID NO: 930 - protein, 12 aa, Homo sapiens
VRGSSGWSGVDY

SEQ ID NO: 931 - protein, 9 aa, Homo sapiens
VREAGAFDI

SEQ ID NO: 932 - protein, 9 aa, Homo sapiens
ARDPPWFHP

SEQ ID NO: 933 - protein, 7 aa, Homo sapiens
ARDYGDH

SEQ ID NO: 934 - protein, 5 aa, Homo sapiens
AREWV

SEQ ID NO: 935 - protein, 9 aa, Homo sapiens
VRDYYGMDV

SEQ ID NO: 936 - protein, 13 aa, Homo sapiens
ARATTGTFYYFDY

SEQ ID NO: 937 - protein, 10 aa, Homo sapiens
AKGQSGAFDI

SEQ ID NO: 938 - protein, 11 aa, Homo sapiens
ARNSGSYRFDP

SEQ ID NO: 939 - protein, 13 aa, Homo sapiens
ARDFPGTPNACDI

SEQ ID NO: 940 - protein, 5 aa, Homo sapiens
ARFDI

SEQ ID NO: 941 - protein, 13 aa, Homo sapiens
ARDARAYGGYFDY

SEQ ID NO: 942 - protein, 12 aa, Homo sapiens
ARDGTGAIDLDY

SEQ ID NO: 943 - protein, 12 aa, Homo sapiens
ARGGSGPNWFDP

SEQ ID NO: 944 - protein, 12 aa, Homo sapiens
ARLYSGDDFFDY

SEQ ID NO: 945 - protein, 11 aa, Homo sapiens
ARGGDGYNPDY

SEQ ID NO: 946 - protein, 10 aa, Homo sapiens
ARAPTGSCDY

SEQ ID NO: 947 - protein, 10 aa, Homo sapiens
ARWSGRYYDY

SEQ ID NO: 948 - protein, 4 aa, Homo sapiens
TSHY

SEQ ID NO: 949 - protein, 12 aa, Homo sapiens
ARERGPFDGFDV

SEQ ID NO: 950 - protein, 10 aa, Homo sapiens
ARGGHTSPDY

SEQ ID NO: 951 - protein, 10 aa, Homo sapiens
QGSSWNWFDP

SEQ ID NO: 952 - protein, 14 aa, Homo sapiens
ARSRDYYYYYGMDV

SEQ ID NO: 953 - protein, 16 aa, Homo sapiens
AKDGWGYSSGRGAFDI

SEQ ID NO: 954 - protein, 9 aa, Homo sapiens
ARDTYGHDY

SEQ ID NO: 955 - protein, 8 aa, Homo sapiens
AKGSGVDS

SEQ ID NO: 956 - protein, 17 aa, Homo sapiens
ARSVVVVPGAISNWFDP

SEQ ID NO: 957 - protein, 17 aa, Homo sapiens
ARHGDYYGSQSYYGMDV

SEQ ID NO: 958 - protein, 8 aa, Homo sapiens
ARGTSLGV

SEQ ID NO: 959 - protein, 9 aa, Homo sapiens
TTRSSQGGY

SEQ ID NO: 960 - protein, 14 aa, Homo sapiens
ARDSSGGDWRYFDY

SEQ ID NO: 961 - protein, 9 aa, Homo sapiens
VRQAGGFDY

SEQ ID NO: 962 - protein, 9 aa, Homo sapiens
ARDPRLFHY

SEQ ID NO: 963 - protein, 6 aa, Homo sapiens
ARGVAV

SEQ ID NO: 964 - protein, 12 aa, Homo sapiens
ARLYSGYDFFDY

SEQ ID NO: 965 - protein, 10 aa, Homo sapiens
ARKGEQLWHY

SEQ ID NO: 966 - protein, 9 aa, Homo sapiens
ATFGGYPDY

SEQ ID NO: 967 - protein, 8 aa, Homo sapiens
ARGLAPPY

SEQ ID NO: 968 - protein, 7 aa, Homo sapiens
VRGWMAD

SEQ ID NO: 969 - protein, 12 aa, Homo sapiens
ARDARNWNRIDY

SEQ ID NO: 970 - protein, 7 aa, Homo sapiens
ARGWFAN

SEQ ID NO: 971 - protein, 10 aa, Homo sapiens
VRDHEFAFDI

SEQ ID NO: 972 - protein, 6 aa, Homo sapiens
MRSFEY

SEQ ID NO: 973 - protein, 7 aa, Homo sapiens
VRGDGDD

SEQ ID NO: 974 - protein, 12 aa, Homo sapiens
ATGTSFGYTVSY

SEQ ID NO: 975 - protein, 14 aa, Homo sapiens
ATAPGFYSSSPFDY

SEQ ID NO: 976 - protein, 15 aa, Homo sapiens
ARVSVHNDYYMRLDY

SEQ ID NO: 977 - protein, 12 aa, Homo sapiens
ARGYSSGWYSDY

SEQ ID NO: 978 - protein, 6 aa, Homo sapiens
ARVWDL

SEQ ID NO: 979 - protein, 9 aa, Homo sapiens
VRGGWELDS

SEQ ID NO: 980 - protein, 7 aa, Homo sapiens
AREGFDY

SEQ ID NO: 981 - protein, 9 aa, Homo sapiens
AADDLLTGS

SEQ ID NO: 982 - protein, 11 aa, Homo sapiens
ARAATAGTVDY

SEQ ID NO: 983 - protein, 11 aa, Homo sapiens
ARGWRENSFDY

SEQ ID NO: 984 - protein, 21 aa, Homo sapiens
TGAPDCGGGTCNSYHYYGLDV

SEQ ID NO: 985 - protein, 11 aa, Homo sapiens
ASYGYYYGLDV

SEQ ID NO: 986 - protein, 5 aa, Homo sapiens
LGSDY

SEQ ID NO: 987 - protein, 11 aa, Homo sapiens
ARPGGGNAFDI

SEQ ID NO: 988 - protein, 9 aa, Homo sapiens
VRDTYGHDY

SEQ ID NO: 989 - protein, 11 aa, Homo sapiens
ARVGATLTFDY

SEQ ID NO: 990 - protein, 11 aa, Homo sapiens
ARDDGYRSIDY

SEQ ID NO: 991 - protein, 13 aa, Homo sapiens
AKDRSNSWYYFDY

SEQ ID NO: 992 - protein, 13 aa, Homo sapiens
AKDPPESGTTFDY

SEQ ID NO: 993 - protein, 12 aa, Homo sapiens
TADRLLTALFDS

SEQ ID NO: 994 - protein, 10 aa, Homo sapiens
VRDFNWGFDF

SEQ ID NO: 995 - protein, 12 aa, Homo sapiens
AREGGAGYSFDS

SEQ ID NO: 996 - protein, 9 aa, Homo sapiens
VKGGWELDS

SEQ ID NO: 997 - protein, 13 aa, Homo sapiens
AKYGEVPAAHFDY

SEQ ID NO: 998 - protein, 12 aa, Homo sapiens
AKNGRGWNYSDY

SEQ ID NO: 999 - protein, 14 aa, Homo sapiens
ARDVSPGSSSWYDY

SEQ ID NO: 1000 - protein, 10 aa, Homo sapiens
ARHGHHHFDY

SEQ ID NO: 1001 - protein, 8 aa, Homo sapiens
TVHSALDY

SEQ ID NO: 1002 - protein, 11 aa, Homo sapiens
ARGDGNGYPDY

SEQ ID NO: 1003 - protein, 13 aa, Homo sapiens
ISTVGYSGYDCGY

SEQ ID NO: 1004 - protein, 9 aa, Homo sapiens
STDDPRWPH

SEQ ID NO: 1005 - protein, 10 aa, Homo sapiens
ARDVRGPEDF

SEQ ID NO: 1006 - protein, 10 aa, Homo sapiens
ARDPFSTLDY

SEQ ID NO: 1007 - protein, 13 aa, Homo sapiens
ARDQDGYGYYFDY

SEQ ID NO: 1008 - protein, 14 aa, Homo sapiens
ATDRTDYGDYRFDY

SEQ ID NO: 1009 - protein, 12 aa, Homo sapiens
AKDPSLRVTLAY

SEQ ID NO: 1010 - protein, 11 aa, Homo sapiens
MRWGVVAGMDV

SEQ ID NO: 1011 - protein, 7 aa, Homo sapiens
ADLERGY

SEQ ID NO: 1012 - protein, 17 aa, Homo sapiens
ARFGGSMVRGLGGWFDP

SEQ ID NO: 1013 - protein, 6 aa, Homo sapiens
AKTLLS

SEQ ID NO: 1014 - protein, 9 aa, Homo sapiens
AREANAFDI

SEQ ID NO: 1015 - protein, 11 aa, Homo sapiens
ARGGFNHVFDI

SEQ ID NO: 1016 - protein, 6 aa, Homo sapiens
AAAFEY

SEQ ID NO: 1017 - protein, 15 aa, Homo sapiens
AKDGYSSSWQYYFDY

SEQ ID NO: 1018 - protein, 9 aa, Homo sapiens
ARGIGWFLD

SEQ ID NO: 1019 - protein, 9 aa, Homo sapiens
ARVKGAFDI

SEQ ID NO: 1020 - protein, 14 aa, Homo sapiens
AHRRGGIVGAPFDY

SEQ ID NO: 1021 - protein, 13 aa, Homo sapiens
ARGHYGDFYYFDY

SEQ ID NO: 1022 - protein, 12 aa, Homo sapiens
AHRRPTLDSFDI

SEQ ID NO: 1023 - protein, 12 aa, Homo sapiens
AREVAGTLGIDY

SEQ ID NO: 1024 - protein, 10 aa, Homo sapiens
ARDFSGWSDY

SEQ ID NO: 1025 - protein, 17 aa, Homo sapiens
AKATYTYGSFYYYGMDV

SEQ ID NO: 1026 - protein, 11 aa, Homo sapiens
VREKSGGFFDY

SEQ ID NO: 1027 - protein, 13 aa, Homo sapiens
AKDLSGSYDYFDY

SEQ ID NO: 1028 - protein, 10 aa, Homo sapiens
ARGGARRFDY

SEQ ID NO: 1029 - protein, 8 aa, Homo sapiens
ARTVVNDY

SEQ ID NO: 1030 - protein, 17 aa, Homo sapiens
AKKYSYGSGTYLYYFDY

SEQ ID NO: 1031 - protein, 20 aa, Homo sapiens
AKPPIAVMPAGRGPNYFFDL

SEQ ID NO: 1032 - protein, 12 aa, Homo sapiens
AREGRETDAFDI

SEQ ID NO: 1033 - protein, 10 aa, Homo sapiens
ARDVRGPEDY

SEQ ID NO: 1034 - protein, 11 aa, Homo sapiens
AKGIVGAALGY

SEQ ID NO: 1035 - protein, 11 aa, Homo sapiens
TTDFLRGFFGS

SEQ ID NO: 1036 - protein, 15 aa, Homo sapiens
ARLLYDSSGYYYFDC

SEQ ID NO: 1037 - protein, 12 aa, Homo sapiens
AKDVITLDAFDI

SEQ ID NO: 1038 - protein, 14 aa, Homo sapiens
ARPGSSTGWYYFDY

SEQ ID NO: 1039 - protein, 9 aa, Homo sapiens
ARGNIGFDY

SEQ ID NO: 1040 - protein, 7 aa, Homo sapiens
ARGYRDY

SEQ ID NO: 1041 - protein, 9 aa, Homo sapiens
TTDLNWESF

SEQ ID NO: 1042 - protein, 7 aa, Homo sapiens
AKLRGDV

SEQ ID NO: 1043 - protein, 11 aa, Homo sapiens
ARRGQEQALDY

SEQ ID NO: 1044 - protein, 12 aa, Homo sapiens
VRDGVGAPPFDS

SEQ ID NO: 1045 - protein, 13 aa, Homo sapiens
VRDHGDYFWYFDL

SEQ ID NO: 1046 - protein, 10 aa, Homo sapiens
AKAFGWYFDL

SEQ ID NO: 1047 - protein, 12 aa, Homo sapiens
AHRRGVAGYFDY

SEQ ID NO: 1048 - protein, 8 aa, Homo sapiens
ALGRGMDV

SEQ ID NO: 1049 - protein, 7 aa, Homo sapiens
ARWGLDV

SEQ ID NO: 1050 - protein, 11 aa, Homo sapiens
ARDGYYYAMDV

SEQ ID NO: 1051 - protein, 18 aa, Homo sapiens
ARGDYYDSSGDYIDAFDI

SEQ ID NO: 1052 - protein, 15 aa, Homo sapiens
AKEGGRRDGYNYFDY

SEQ ID NO: 1053 - protein, 15 aa, Homo sapiens
ARGRGMARVWYGFDI

SEQ ID NO: 1054 - protein, 11 aa, Homo sapiens
ARRYSNSWFDY

SEQ ID NO: 1055 - protein, 11 aa, Homo sapiens
ATSADAAAGPY

SEQ ID NO: 1056 - protein, 12 aa, Homo sapiens
ARHGGGYDPFDY

SEQ ID NO: 1057 - protein, 17 aa, Homo sapiens
ARRGYCSGSTCGGWFDP

SEQ ID NO: 1058 - protein, 11 aa, Homo sapiens
ARDLRSNGLDV

SEQ ID NO: 1059 - protein, 14 aa, Homo sapiens
ARPRGGSYYGAFDY

SEQ ID NO: 1060 - protein, 13 aa, Homo sapiens
ARGYDSSGYYYDY

SEQ ID NO: 1061 - protein, 10 aa, Homo sapiens
ARDVGGRAGY

SEQ ID NO: 1062 - protein, 13 aa, Homo sapiens
ARGFSYGTDYFDY

SEQ ID NO: 1063 - protein, 6 aa, Homo sapiens
GRRFDY

SEQ ID NO: 1064 - protein, 9 aa, Homo sapiens
TRDPRGMDV

SEQ ID NO: 1065 - protein, 6 aa, Homo sapiens
ANRFDY

SEQ ID NO: 1066 - protein, 15 aa, Homo sapiens
ARGPSYGSRTDYFDY

SEQ ID NO: 1067 - protein, 9 aa, Homo sapiens
AKGSGWYGY

SEQ ID NO: 1068 - protein, 8 aa, Homo sapiens
ARGVRSEG

SEQ ID NO: 1069 - protein, 9 aa, Homo sapiens
ARGGSSPDY

SEQ ID NO: 1070 - protein, 11 aa, Homo sapiens
ARNRGWEQLDY

SEQ ID NO: 1071 - protein, 11 aa, Homo sapiens
AKGVVDRGLDY

SEQ ID NO: 1072 - protein, 10 aa, Homo sapiens
AREAPDAFDL

SEQ ID NO: 1073 - protein, 10 aa, Homo sapiens
GRDRGYQIDY

SEQ ID NO: 1074 - protein, 13 aa, Homo sapiens
AKGYSSIWYYFDY

SEQ ID NO: 1075 - protein, 10 aa, Homo sapiens
VRDYDYAFDY

SEQ ID NO: 1076 - protein, 7 aa, Homo sapiens
GRGYFDY

SEQ ID NO: 1077 - protein, 10 aa, Homo sapiens
ARGSYDSSWC

SEQ ID NO: 1078 - protein, 11 aa, Homo sapiens
TRDILPGGVDV

SEQ ID NO: 1079 - protein, 18 aa, Homo sapiens
ARDGPGYCSGGSCYYFDY

SEQ ID NO: 1080 - protein, 13 aa, Homo sapiens
ARHFTPGGNWFDP

SEQ ID NO: 1081 - protein, 9 aa, Homo sapiens
VRLAEYFQH

SEQ ID NO: 1082 - protein, 7 aa, Homo sapiens
ARDGGDY

SEQ ID NO: 1083 - protein, 10 aa, Homo sapiens
SRPYYDNTGY

SEQ ID NO: 1084 - protein, 10 aa, Homo sapiens
VRGGALGFDF

SEQ ID NO: 1085 - protein, 12 aa, Homo sapiens
AHRLGRAIDFDY

SEQ ID NO: 1086 - protein, 8 aa, Homo sapiens
ARNWNVDY

SEQ ID NO: 1087 - protein, 14 aa, Homo sapiens
TRDGGSDGDYEFDY

SEQ ID NO: 1088 - protein, 10 aa, Homo sapiens
ARWTGTYYDY

SEQ ID NO: 1089 - protein, 5 aa, Homo sapiens
ARLDS

SEQ ID NO: 1090 - protein, 14 aa, Homo sapiens
ARDQTVRGPSTYDN

SEQ ID NO: 1091 - protein, 12 aa, Homo sapiens
VRDGYNFVPFDY

SEQ ID NO: 1092 - protein, 14 aa, Homo sapiens
ARDLWRDYYYGMDV

SEQ ID NO: 1093 - protein, 12 aa, Homo sapiens
ARVGSGSYYFDY

SEQ ID NO: 1094 - protein, 8 aa, Homo sapiens
VRSNFMDV

SEQ ID NO: 1095 - protein, 11 aa, Homo sapiens
ATTADAAAGPY

SEQ ID NO: 1096 - protein, 8 aa, Homo sapiens
AIGRGMDV

SEQ ID NO: 1097 - protein, 11 aa, Homo sapiens
ARGGFEHAFDV

SEQ ID NO: 1098 - protein, 10 aa, Homo sapiens
AKDLTVTPDY

SEQ ID NO: 1099 - protein, 11 aa, Homo sapiens
AKAGSGIFFDH

SEQ ID NO: 1100 - protein, 6 aa, Homo sapiens
VRDVIR

SEQ ID NO: 1101 - protein, 18 aa, Homo sapiens
TTDRYYDYIWGSYRYVDY

SEQ ID NO: 1102 - protein, 10 aa, Homo sapiens
ARGGTYSFDF

SEQ ID NO: 1103 - protein, 7 aa, Homo sapiens
ARGAFDF

SEQ ID NO: 1104 - protein, 10 aa, Homo sapiens
VIGIGWQPDY

SEQ ID NO: 1105 - protein, 13 aa, Homo sapiens
ARRRAAVGTAFDY

SEQ ID NO: 1106 - protein, 13 aa, Homo sapiens
VRYIVIDPSAIGY

SEQ ID NO: 1107 - protein, 13 aa, Homo sapiens
ARIGQVGATHFDY

SEQ ID NO: 1108 - protein, 14 aa, Homo sapiens
AKPYGDYARGGFDI

SEQ ID NO: 1109 - protein, 5 aa, Homo sapiens
ASRVV

SEQ ID NO: 1110 - protein, 13 aa, Homo sapiens
ARAYSSSWPNFDY

SEQ ID NO: 1111 - protein, 21 aa, Homo sapiens
AKTYSYDSSGYYDYYYYGMDV

SEQ ID NO: 1112 - protein, 11 aa, Homo sapiens
ARLNGWGWFGP

SEQ ID NO: 1113 - protein, 11 aa, Homo sapiens
ARVRGSYSIDY

SEQ ID NO: 1114 - protein, 14 aa, Homo sapiens
ASARGYSYGYYFDY

SEQ ID NO: 1115 - protein, 13 aa, Homo sapiens
VKDRLTEAYGMEV

SEQ ID NO: 1116 - protein, 9 aa, Homo sapiens
SRDPRHLDF

SEQ ID NO: 1117 - protein, 15 aa, Homo sapiens
ARVYCSGGSCYGMDV

SEQ ID NO: 1118 - protein, 9 aa, Homo sapiens
ARERGGFDH

SEQ ID NO: 1119 - protein, 15 aa, Homo sapiens
ARGPSYGSRTDYFDS

SEQ ID NO: 1120 - protein, 18 aa, Homo sapiens
AKGTLRYCSGGSCYPFDY

SEQ ID NO: 1121 - protein, 15 aa, Homo sapiens
ARGRRYSGRHDALDI

SEQ ID NO: 1122 - protein, 13 aa, Homo sapiens
ARGDSSGWYGLDY

SEQ ID NO: 1123 - protein, 9 aa, Homo sapiens
AKARFGLDY

SEQ ID NO: 1124 - protein, 17 aa, Homo sapiens
AKGPLGYCSGGTCYLDY

SEQ ID NO: 1125 - protein, 14 aa, Homo sapiens
ARGLKNTHYGGWAY

SEQ ID NO: 1126 - protein, 10 aa, Homo sapiens
ARHYGSASDY

SEQ ID NO: 1127 - protein, 12 aa, Homo sapiens
VRGTRDWSGIDY

SEQ ID NO: 1128 - protein, 8 aa, Homo sapiens
ARNAGLDY

SEQ ID NO: 1129 - protein, 19 aa, Homo sapiens
AIADVDWYESGWYVGLVSR

SEQ ID NO: 1130 - protein, 16 aa, Homo sapiens
AKDRDVIVATVHGMDV

SEQ ID NO: 1131 - protein, 11 aa, Homo sapiens
ARDPGWGAFDM

SEQ ID NO: 1132 - protein, 10 aa, Homo sapiens
ARDLIYAFDY

SEQ ID NO: 1133 - protein, 10 aa, Homo sapiens
SHGSGWLLDY

SEQ ID NO: 1134 - protein, 11 aa, Homo sapiens
TYYGSGSYLSY

SEQ ID NO: 1135 - protein, 19 aa, Homo sapiens
ARDRRDILTGYYYYYAMDV

SEQ ID NO: 1136 - protein, 17 aa, Homo sapiens
AREGPLAAPGVNDAFDI

SEQ ID NO: 1137 - protein, 10 aa, Homo sapiens
ARWLEIFYDY

SEQ ID NO: 1138 - protein, 11 aa, Homo sapiens
ARGRWSPTLDI

SEQ ID NO: 1139 - protein, 12 aa, Homo sapiens
TRDRGRDGGFDY

SEQ ID NO: 1140 - protein, 12 aa, Homo sapiens
AKERGFRGPFDI

SEQ ID NO: 1141 - protein, 16 aa, Homo sapiens
ARDGYSSSWYRDGMDV

SEQ ID NO: 1142 - protein, 10 aa, Homo sapiens
ASRGAVAGDY

SEQ ID NO: 1143 - protein, 9 aa, Homo sapiens
VRGYTGMDV

SEQ ID NO: 1144 - protein, 9 aa, Homo sapiens
VKGLTTFDY

SEQ ID NO: 1145 - protein, 14 aa, Homo sapiens
ARYFYGSGTPYFDY

SEQ ID NO: 1146 - protein, 7 aa, Homo sapiens
ARGKNGV

SEQ ID NO: 1147 - protein, 10 aa, Homo sapiens
AHLSTTVTTH

SEQ ID NO: 1148 - protein, 9 aa, Homo sapiens
AKDSPVGTY

SEQ ID NO: 1149 - protein, 10 aa, Homo sapiens
ARTWEGVFDI

SEQ ID NO: 1150 - protein, 13 aa, Homo sapiens
ARRMTGPGGWFDP

SEQ ID NO: 1151 - protein, 7 aa, Homo sapiens
ARGYQGE

SEQ ID NO: 1152 - protein, 11 aa, Homo sapiens
ARSGSYSAFDY

SEQ ID NO: 1153 - protein, 9 aa, Homo sapiens
VMGRAGFDS

SEQ ID NO: 1154 - protein, 8 aa, Homo sapiens
ARHDWLDP

SEQ ID NO: 1155 - protein, 9 aa, Homo sapiens
ARDHFYTDY

SEQ ID NO: 1156 - protein, 8 aa, Homo sapiens
GRSRAPGY

SEQ ID NO: 1157 - protein, 9 aa, Homo sapiens
ARGGWLDDY

SEQ ID NO: 1158 - protein, 13 aa, Homo sapiens
ARDDILGGYTIDY

SEQ ID NO: 1159 - protein, 11 aa, Homo sapiens
VKDVEAGGAAS

SEQ ID NO: 1160 - protein, 9 aa, Homo sapiens
ASSNGCLDY

SEQ ID NO: 1161 - protein, 11 aa, Homo sapiens
GRDKGVTSIDN

SEQ ID NO: 1162 - protein, 10 aa, Homo sapiens
ARGSLYGMDV

SEQ ID NO: 1163 - protein, 15 aa, Homo sapiens
ARSPTSVSNPYYSDY

SEQ ID NO: 1164 - protein, 13 aa, Homo sapiens
VKDRMTEAYGMEV

SEQ ID NO: 1165 - protein, 17 aa, Homo sapiens
AHRRFYGSGSYRCAFDI

SEQ ID NO: 1166 - protein, 11 aa, Homo sapiens
AGSSWNKWFDP

SEQ ID NO: 1167 - protein, 13 aa, Homo sapiens
ARVYSTSWYDFDY

SEQ ID NO: 1168 - protein, 13 aa, Homo sapiens
ARDGVAEGVYFDS

SEQ ID NO: 1169 - protein, 10 aa, Homo sapiens
ARGGYRYFDQ

SEQ ID NO: 1170 - protein, 12 aa, Homo sapiens
AKDGLRYYGMDV

SEQ ID NO: 1171 - protein, 13 aa, Homo sapiens
ARDKGGSPDTFDI

SEQ ID NO: 1172 - protein, 18 aa, Homo sapiens
AGDSSGYYYGYYYYGMDV

SEQ ID NO: 1173 - protein, 7 aa, Homo sapiens
AGGHFEF

SEQ ID NO: 1174 - protein, 11 aa, Homo sapiens
ARGGHNHALDV

SEQ ID NO: 1175 - protein, 19 aa, Homo sapiens
VRDMGFDVLTGSYVDAFDL

SEQ ID NO: 1176 - protein, 14 aa, Homo sapiens
ARGATSGTTRWFDP

SEQ ID NO: 1177 - protein, 12 aa, Homo sapiens
AKDHYTTSLGDY

SEQ ID NO: 1178 - protein, 10 aa, Homo sapiens
ARDIHPGFDY

SEQ ID NO: 1179 - protein, 12 aa, Homo sapiens
ARAGDGYNSFDY

SEQ ID NO: 1180 - protein, 9 aa, Homo sapiens
ARSSGYVDF

SEQ ID NO: 1181 - protein, 15 aa, Homo sapiens
ARDGRGYNYGYGMDV

SEQ ID NO: 1182 - protein, 8 aa, Homo sapiens
ARGGSYGH

SEQ ID NO: 1183 - protein, 10 aa, Homo sapiens
TRPYYDNSGY

SEQ ID NO: 1184 - protein, 9 aa, Homo sapiens
FSRDSSGGY

SEQ ID NO: 1185 - protein, 11 aa, Homo sapiens
LKDIKPGGLDV

SEQ ID NO: 1186 - protein, 6 aa, Homo sapiens
ARLPYD

SEQ ID NO: 1187 - protein, 14 aa, Homo sapiens
ATGDYGSGSYPLQH

SEQ ID NO: 1188 - protein, 17 aa, Homo sapiens
AKEMGSGWYYSYYGMDV

SEQ ID NO: 1189 - protein, 9 aa, Homo sapiens
ARMGWYFDL

SEQ ID NO: 1190 - protein, 9 aa, Homo sapiens
ARGASDSDY

SEQ ID NO: 1191 - protein, 12 aa, Homo sapiens
ARSGNYYPPLGY

SEQ ID NO: 1192 - protein, 11 aa, Homo sapiens
VRDRGWSTYDY

SEQ ID NO: 1193 - protein, 17 aa, Homo sapiens
ARHYCSGDTCYSNYFDY

SEQ ID NO: 1194 - protein, 16 aa, Homo sapiens
TRGGTETTGYYDPMDV

SEQ ID NO: 1195 - protein, 12 aa, Homo sapiens
VREGDDYKYFDY

SEQ ID NO: 1196 - protein, 10 aa, Homo sapiens
TRGGGWDQDY

SEQ ID NO: 1197 - protein, 11 aa, Homo sapiens
TADIVATIVDY

SEQ ID NO: 1198 - protein, 14 aa, Homo sapiens
ARSRSGSYYYGMDV

SEQ ID NO: 1199 - protein, 10 aa, Homo sapiens
ARGGDNTFDY

SEQ ID NO: 1200 - protein, 11 aa, Homo sapiens
AKDILWWSFDH

SEQ ID NO: 1201 - protein, 10 aa, Homo sapiens
AKHQVRTHDY

SEQ ID NO: 1202 - protein, 11 aa, Homo sapiens
AKDILWWSFDY

SEQ ID NO: 1203 - protein, 13 aa, Homo sapiens
ARGAVVTANWFDP

SEQ ID NO: 1204 - protein, 11 aa, Homo sapiens
IKDINPGGADV

SEQ ID NO: 1205 - protein, 11 aa, Homo sapiens
VRDPAWGAFDV

SEQ ID NO: 1206 - protein, 8 aa, Homo sapiens
TKDVRGSY

SEQ ID NO: 1207 - protein, 11 aa, Homo sapiens
ARGWIRFGFDY

SEQ ID NO: 1208 - protein, 11 aa, Homo sapiens
AREMRTSGFDY

SEQ ID NO: 1209 - protein, 8 aa, Homo sapiens
VRALPFDY

SEQ ID NO: 1210 - protein, 11 aa, Homo sapiens
ARSPSSTFYSY

SEQ ID NO: 1211 - protein, 8 aa, Homo sapiens
TRDRRGWD

SEQ ID NO: 1212 - protein, 15 aa, Homo sapiens
ARDPVGATSPRYFDY

SEQ ID NO: 1213 - protein, 12 aa, Homo sapiens
AKDTPDILGLDY

SEQ ID NO: 1214 - protein, 14 aa, Homo sapiens
ARSPYSTRYNWFGP

SEQ ID NO: 1215 - protein, 7 aa, Homo sapiens
TTLGYRP

SEQ ID NO: 1216 - protein, 11 aa, Homo sapiens
AKRGSGWYMDY

SEQ ID NO: 1217 - protein, 17 aa, Homo sapiens
ARVVRDGYNSGLYYFDY

SEQ ID NO: 1218 - protein, 10 aa, Homo sapiens
ARNSGYDFDY

SEQ ID NO: 1219 - protein, 8 aa, Homo sapiens
AKPFGMDV

SEQ ID NO: 1220 - protein, 10 aa, Homo sapiens
ARRAPAGIDY

SEQ ID NO: 1221 - protein, 7 aa, Homo sapiens
ASGWALQ

SEQ ID NO: 1222 - protein, 7 aa, Homo sapiens
ARSTTGY

SEQ ID NO: 1223 - protein, 7 aa, Homo sapiens
TRDPTGN

SEQ ID NO: 1224 - protein, 9 aa, Homo sapiens
GRGRQPIDY

SEQ ID NO: 1225 - protein, 7 aa, Homo sapiens
VTMPPGY

SEQ ID NO: 1226 - protein, 11 aa, Homo sapiens
AKGPVAVDFDY

SEQ ID NO: 1227 - protein, 14 aa, Homo sapiens
AKATGYDILTGLDY

SEQ ID NO: 1228 - protein, 9 aa, Homo sapiens
ARGGRVTAD

SEQ ID NO: 1229 - protein, 11 aa, Homo sapiens
ARDQGLYAFDI

SEQ ID NO: 1230 - protein, 12 aa, Homo sapiens
VHYGSGSYSTDY

SEQ ID NO: 1231 - protein, 16 aa, Homo sapiens
AKGGGTIAAPGHAFDF

SEQ ID NO: 1232 - protein, 7 aa, Homo sapiens
FGARLDY

SEQ ID NO: 1233 - protein, 15 aa, Homo sapiens
AKDQVVTAIQGRFGY

SEQ ID NO: 1234 - protein, 8 aa, Homo sapiens
ARHAWLEN

SEQ ID NO: 1235 - protein, 10 aa, Homo sapiens
ARGGWRRFDY

SEQ ID NO: 1236 - protein, 10 aa, Homo sapiens
VREGNWDLDY

SEQ ID NO: 1237 - protein, 8 aa, Homo sapiens
ARDRLLDS

SEQ ID NO: 1238 - protein, 9 aa, Homo sapiens
AADDILTAF

SEQ ID NO: 1239 - protein, 12 aa, Homo sapiens
SWETSPYYGMDV

SEQ ID NO: 1240 - protein, 8 aa, Homo sapiens
ARSHLYDY

SEQ ID NO: 1241 - protein, 13 aa, Homo sapiens
AHRRSNGWYDFDY

SEQ ID NO: 1242 - protein, 10 aa, Homo sapiens
AKGGAARPEY

SEQ ID NO: 1243 - protein, 8 aa, Homo sapiens
ATGTTTGA

SEQ ID NO: 1244 - protein, 10 aa, Homo sapiens
ATHHSSGLDY

SEQ ID NO: 1245 - protein, 8 aa, Homo sapiens
ARGRGFDV

SEQ ID NO: 1246 - protein, 12 aa, Homo sapiens
ARDWYTSSCLDY

SEQ ID NO: 1247 - protein, 11 aa, Homo sapiens
ARGSSSPGIDY

SEQ ID NO: 1248 - protein, 9 aa, Homo sapiens
ARKGGVADY

SEQ ID NO: 1249 - protein, 13 aa, Homo sapiens
GRSAVAGTDGVDY

SEQ ID NO: 1250 - protein, 6 aa, Homo sapiens
TSGMKY

SEQ ID NO: 1251 - protein, 14 aa, Homo sapiens
AREHDTLTGYAFDI

SEQ ID NO: 1252 - protein, 10 aa, Homo sapiens
AKREEYYFDY

SEQ ID NO: 1253 - protein, 11 aa, Homo sapiens
ARVPGTYRLDY

SEQ ID NO: 1254 - protein, 10 aa, Homo sapiens
VRDFTAWSDF

SEQ ID NO: 1255 - protein, 10 aa, Homo sapiens
ARGGRTRFDC

SEQ ID NO: 1256 - protein, 13 aa, Homo sapiens
ARHRLYDTDGFDI

SEQ ID NO: 1257 - protein, 13 aa, Homo sapiens
ARGPTGSGWSFDY

SEQ ID NO: 1258 - protein, 12 aa, Homo sapiens
ARDGYNWIPYDM

SEQ ID NO: 1259 - protein, 11 aa, Homo sapiens
ARIGGSGAYDI

SEQ ID NO: 1260 - protein, 8 aa, Homo sapiens
ATGTTVGA

SEQ ID NO: 1261 - protein, 9 aa, Homo sapiens
ARGNGWLPH

SEQ ID NO: 1262 - protein, 10 aa, Homo sapiens
VKDAYGSLDY

SEQ ID NO: 1263 - protein, 8 aa, Homo sapiens
VRHDWFDP

SEQ ID NO: 1264 - protein, 8 aa, Homo sapiens
ARGNPVPD

SEQ ID NO: 1265 - protein, 10 aa, Homo sapiens
ARHPGASFDF

SEQ ID NO: 1266 - protein, 8 aa, Homo sapiens
ARRTFFDY

SEQ ID NO: 1267 - protein, 11 aa, Homo sapiens
AREDGYNTCDY

SEQ ID NO: 1268 - protein, 6 aa, Homo sapiens
TKSSVD

SEQ ID NO: 1269 - protein, 12 aa, Homo sapiens
ARDGGRGWALDY

SEQ ID NO: 1270 - protein, 12 aa, Homo sapiens
ARSRGYSYAHDP

SEQ ID NO: 1271 - protein, 13 aa, Homo sapiens
ARAGPYGSGSFDY

SEQ ID NO: 1272 - protein, 13 aa, Homo sapiens
ARGGTTGGYGMDV

SEQ ID NO: 1273 - protein, 5 aa, Homo sapiens
ARRGY

SEQ ID NO: 1274 - protein, 10 aa, Homo sapiens
ARLRGSYLDY

SEQ ID NO: 1275 - protein, 7 aa, Homo sapiens
VRGLGEM

SEQ ID NO: 1276 - protein, 12 aa, Homo sapiens
ARGNDGYGNFDY

SEQ ID NO: 1277 - protein, 11 aa, Homo sapiens
AKDSSSWSIDY

SEQ ID NO: 1278 - protein, 8 aa, Homo sapiens
ARGHYDNY

SEQ ID NO: 1279 - protein, 7 aa, Homo sapiens
ARGMGDH

SEQ ID NO: 1280 - protein, 14 aa, Homo sapiens
ARDGSGTYFNWFDP

SEQ ID NO: 1281 - protein, 12 aa, Homo sapiens
AKEIGVADLFDY

SEQ ID NO: 1282 - protein, 10 aa, Homo sapiens
VRDVGYAFDI

SEQ ID NO: 1283 - protein, 10 aa, Homo sapiens
TTRTWSLVDY

SEQ ID NO: 1284 - protein, 8 aa, Homo sapiens
ARTVACEV

SEQ ID NO: 1285 - protein, 15 aa, Homo sapiens
ARRGDGSETFYTFDY

SEQ ID NO: 1286 - protein, 6 aa, Homo sapiens
GSVFEH

SEQ ID NO: 1287 - protein, 8 aa, Homo sapiens
AIDRWLSP

SEQ ID NO: 1288 - protein, 10 aa, Homo sapiens
ARDFSYAMDV

SEQ ID NO: 1289 - protein, 13 aa, Homo sapiens
ARTCPGASCYIIY

SEQ ID NO: 1290 - protein, 11 aa, Homo sapiens
AKGGYTTPFDY

SEQ ID NO: 1291 - protein, 12 aa, Homo sapiens
ARRLYGSGRIDY

SEQ ID NO: 1292 - protein, 8 aa, Homo sapiens
ARTTSGDY

SEQ ID NO: 1293 - protein, 15 aa, Homo sapiens
ARGGLVRGAVGWFDP

SEQ ID NO: 1294 - protein, 9 aa, Homo sapiens
ARGPNWFDP

SEQ ID NO: 1295 - protein, 9 aa, Homo sapiens
ARGGWSLDK

SEQ ID NO: 1296 - protein, 11 aa, Homo sapiens
ARGGGGRHFDY

SEQ ID NO: 1297 - protein, 10 aa, Homo sapiens
ARETVGAPDY

SEQ ID NO: 1298 - protein, 10 aa, Homo sapiens
ARSVAAAGDY

SEQ ID NO: 1299 - protein, 10 aa, Homo sapiens
TTETSSGYYY

SEQ ID NO: 1300 - protein, 12 aa, Homo sapiens
AKHLSGSYSFDY

SEQ ID NO: 1301 - protein, 14 aa, Homo sapiens
AREKAGCGGDCLDY

SEQ ID NO: 1302 - protein, 19 aa, Homo sapiens
AKGLLGYCTSTNCYAALDY

SEQ ID NO: 1303 - protein, 12 aa, Homo sapiens
ARDSNGDRSFDY

SEQ ID NO: 1304 - protein, 9 aa, Homo sapiens
ARSEGPFDY

SEQ ID NO: 1305 - protein, 14 aa, Homo sapiens
ARGPYCGGDCYFDS

SEQ ID NO: 1306 - protein, 14 aa, Homo sapiens
ARDLFRGAPDYLDY

SEQ ID NO: 1307 - protein, 17 aa, Homo sapiens
ARGGYYYDSSGYYYSDY

SEQ ID NO: 1308 - protein, 8 aa, Homo sapiens
ARSGGMDV

SEQ ID NO: 1309 - protein, 10 aa, Homo sapiens
ARDRSGAFDY

SEQ ID NO: 1310 - protein, 14 aa, Homo sapiens
ATYRGYSYAYYFDY

SEQ ID NO: 1311 - protein, 15 aa, Homo sapiens
ARGPPYGARTDYFDY

SEQ ID NO: 1312 - protein, 9 aa, Homo sapiens
ARGTPNFDY

SEQ ID NO: 1313 - protein, 11 aa, Homo sapiens
ARDAGWGAYDI

SEQ ID NO: 1314 - protein, 10 aa, Homo sapiens
ASGTGWLIDY

SEQ ID NO: 1315 - protein, 9 aa, Homo sapiens
ARANWYFDL

SEQ ID NO: 1316 - protein, 8 aa, Homo sapiens
TIGHYHDY

SEQ ID NO: 1317 - protein, 9 aa, Homo sapiens
ARNSSGYLY

SEQ ID NO: 1318 - protein, 17 aa, Homo sapiens
ARAEAAAGSHYYYGLDV

SEQ ID NO: 1319 - protein, 9 aa, Homo sapiens
ARVTPAIQY

SEQ ID NO: 1320 - protein, 8 aa, Homo sapiens
AKPNGMDV

SEQ ID NO: 1321 - protein, 10 aa, Homo sapiens
ARGVDEGLDY

SEQ ID NO: 1322 - protein, 10 aa, Homo sapiens
ARGPLAPFDY

SEQ ID NO: 1323 - protein, 10 aa, Homo sapiens
AKGNWGHLDY

SEQ ID NO: 1324 - protein, 13 aa, Homo sapiens
VKDDTTGFFYVDY

SEQ ID NO: 1325 - protein, 9 aa, Homo sapiens
AQGLKDLDY

SEQ ID NO: 1326 - protein, 13 aa, Homo sapiens
AKSLGSGTYSFDY

SEQ ID NO: 1327 - protein, 8 aa, Homo sapiens
GVSRTFDY

SEQ ID NO: 1328 - protein, 14 aa, Homo sapiens
AKGAGYNSGWYFDY

SEQ ID NO: 1329 - protein, 12 aa, Homo sapiens
AKGSSGYYYFDY

SEQ ID NO: 1330 - protein, 11 aa, Homo sapiens
ARDPHCGALDY

SEQ ID NO: 1331 - protein, 14 aa, Homo sapiens
ARDFRLGAPDYLDY

SEQ ID NO: 1332 - protein, 10 aa, Homo sapiens
ARDGISGIDY

SEQ ID NO: 1333 - protein, 10 aa, Homo sapiens
AGGTGWLMEF

SEQ ID NO: 1334 - protein, 8 aa, Homo sapiens
ARLRGGNN

SEQ ID NO: 1335 - protein, 11 aa, Homo sapiens
AREKKEMATDY

SEQ ID NO: 1336 - protein, 12 aa, Homo sapiens
ARRGGSLNFFDY

SEQ ID NO: 1337 - protein, 12 aa, Homo sapiens
AREGGSGSSPDY

SEQ ID NO: 1338 - protein, 15 aa, Homo sapiens
ARGRTVVGAKYYFDY

SEQ ID NO: 1339 - protein, 15 aa, Homo sapiens
GRGLTVTGSKYYFDN

SEQ ID NO: 1340 - protein, 14 aa, Homo sapiens
ARDPVPGVPDYFDY

SEQ ID NO: 1341 - protein, 12 aa, Homo sapiens
AKESDGHSEIDY

SEQ ID NO: 1342 - protein, 9 aa, Homo sapiens
ARGRLVGAY

SEQ ID NO: 1343 - protein, 13 aa, Homo sapiens
ARSYGSGSYYNDY

SEQ ID NO: 1344 - protein, 9 aa, Homo sapiens
VKTARLADV

SEQ ID NO: 1345 - protein, 11 aa, Homo sapiens
ARDGWADAFDI

SEQ ID NO: 1346 - protein, 10 aa, Homo sapiens
ARWTGTFYDY

SEQ ID NO: 1347 - protein, 11 aa, Homo sapiens
TRDISSRYFDY

SEQ ID NO: 1348 - protein, 11 aa, Homo sapiens
VRDGGNWLIDY

SEQ ID NO: 1349 - protein, 9 aa, Homo sapiens
ARALMTTAY

SEQ ID NO: 1350 - protein, 9 aa, Homo sapiens
TKESNSFDV

SEQ ID NO: 1351 - protein, 10 aa, Homo sapiens
ARLPWFSSDY

SEQ ID NO: 1352 - protein, 8 aa, Homo sapiens
VKGGWLDN

SEQ ID NO: 1353 - protein, 6 aa, Homo sapiens
SWTLAY

SEQ ID NO: 1354 - protein, 7 aa, Homo sapiens
VRGVGDY

SEQ ID NO: 1355 - protein, 6 aa, Homo sapiens
VRDWYN

SEQ ID NO: 1356 - protein, 11 aa, Homo sapiens
AKGGYSSPYDY

SEQ ID NO: 1357 - protein, 9 aa, Homo sapiens
AKGGSYFDY

SEQ ID NO: 1358 - protein, 13 aa, Homo sapiens
ARVGISVAATLWY

SEQ ID NO: 1359 - protein, 9 aa, Homo sapiens
ARVITYFDY

SEQ ID NO: 1360 - protein, 10 aa, Homo sapiens
ARPPGRALDF

SEQ ID NO: 1361 - protein, 24 aa, Homo sapiens
ARDGPACSTTSCYRVSYYYYGMDV

SEQ ID NO: 1362 - protein, 12 aa, Homo sapiens
ARELPGSFHFDY

SEQ ID NO: 1363 - protein, 8 aa, Homo sapiens
AAWGGSNY

SEQ ID NO: 1364 - protein, 10 aa, Homo sapiens
ARGHNYAHDF

SEQ ID NO: 1365 - protein, 9 aa, Homo sapiens
AREGAGLDY

SEQ ID NO: 1366 - protein, 13 aa, Homo sapiens
GRDPPQSGYAIDY

SEQ ID NO: 1367 - protein, 11 aa, Homo sapiens
ARLDYGGNPDY

SEQ ID NO: 1368 - protein, 10 aa, Homo sapiens
ARAVSGRIDY

SEQ ID NO: 1369 - protein, 7 aa, Homo sapiens
ARSYGDY

SEQ ID NO: 1370 - protein, 16 aa, Homo sapiens
ARGWGYSGFGNHAFDI

SEQ ID NO: 1371 - protein, 13 aa, Homo sapiens
ARDWDGRTNWFDP

SEQ ID NO: 1372 - protein, 9 aa, Homo sapiens
ARGTASPDS

SEQ ID NO: 1373 - protein, 5 aa, Homo sapiens
AREYR

SEQ ID NO: 1374 - protein, 8 aa, Homo sapiens
VRDSSASH

SEQ ID NO: 1375 - protein, 9 aa, Homo sapiens
AREARTPTY

SEQ ID NO: 1376 - protein, 10 aa, Homo sapiens
ARNHLWAIAF

SEQ ID NO: 1377 - protein, 11 aa, Homo sapiens
ARAAGPGTCDY

SEQ ID NO: 1378 - protein, 9 aa, Homo sapiens
ARENWYFDY

SEQ ID NO: 1379 - protein, 7 aa, Homo sapiens
VVEAWDY

SEQ ID NO: 1380 - protein, 11 aa, Homo sapiens
VAEVGAREFDS

SEQ ID NO: 1381 - protein, 10 aa, Homo sapiens
ARLGPYYSDY

SEQ ID NO: 1382 - protein, 9 aa, Homo sapiens
ARTYNYMDV

SEQ ID NO: 1383 - protein, 5 aa, Homo sapiens
SSLHY

SEQ ID NO: 1384 - protein, 11 aa, Homo sapiens
VRDLPHNWFDP

SEQ ID NO: 1385 - protein, 12 aa, Homo sapiens
AKTGGVTWAFDY

SEQ ID NO: 1386 - protein, 7 aa, Homo sapiens
ATAGFSN

SEQ ID NO: 1387 - protein, 11 aa, Homo sapiens
AKLVGNNPFDH

SEQ ID NO: 1388 - protein, 11 aa, Homo sapiens
ARIRSGTYFDY

SEQ ID NO: 1389 - protein, 16 aa, Homo sapiens
AKVWHSDGWYAGPFDY

SEQ ID NO: 1390 - protein, 18 aa, Homo sapiens
AKRGDFWSGLYYYYYMDV

SEQ ID NO: 1391 - protein, 12 aa, Homo sapiens
ASSGYDSDYFDY

SEQ ID NO: 1392 - protein, 11 aa, Homo sapiens
ARDDYADNFDY

SEQ ID NO: 1393 - protein, 12 aa, Homo sapiens
ARHYGQQLPPGY

SEQ ID NO: 1394 - protein, 9 aa, Homo sapiens
ATDLNWSAT

SEQ ID NO: 1395 - protein, 6 aa, Homo sapiens
LGRFDP

SEQ ID NO: 1396 - protein, 15 aa, Homo sapiens
ATGYSSIWHPYYFDC

SEQ ID NO: 1397 - protein, 10 aa, Homo sapiens
VRDYIYGFDY

SEQ ID NO: 1398 - protein, 9 aa, Homo sapiens
ATRGGAPAN

SEQ ID NO: 1399 - protein, 13 aa, Homo sapiens
ARQVGNGLWYFDL

SEQ ID NO: 1400 - protein, 9 aa, Homo sapiens
AREADGFDV

SEQ ID NO: 1401 - protein, 15 aa, Homo sapiens
ARKTVAHNWNPGFDY

SEQ ID NO: 1402 - protein, 10 aa, Homo sapiens
AKDEVRRHDY

SEQ ID NO: 1403 - protein, 6 aa, Homo sapiens
VKEWDH

SEQ ID NO: 1404 - protein, 9 aa, Homo sapiens
ARRGDYFNS

SEQ ID NO: 1405 - protein, 9 aa, Homo sapiens
ARDRPPFDP

SEQ ID NO: 1406 - protein, 10 aa, Homo sapiens
ARDGGSGFDP

SEQ ID NO: 1407 - protein, 9 aa, Homo sapiens
ARGGWYFDV

SEQ ID NO: 1408 - protein, 9 aa, Homo sapiens
ARGSSTFDF

SEQ ID NO: 1409 - protein, 12 aa, Homo sapiens
ARHRITGTGFDY

SEQ ID NO: 1410 - protein, 15 aa, Homo sapiens
ARDTHYSDSSGYPDY

SEQ ID NO: 1411 - protein, 13 aa, Homo sapiens
ARGDNWNDFDFDH

SEQ ID NO: 1412 - protein, 8 aa, Homo sapiens
ARGASGGY

SEQ ID NO: 1413 - protein, 8 aa, Homo sapiens
TIGHYGDY

SEQ ID NO: 1414 - protein, 10 aa, Homo sapiens
ARRVEGNFDY

SEQ ID NO: 1415 - protein, 11 aa, Homo sapiens
ARDYGDYAIDY

SEQ ID NO: 1416 - protein, 15 aa, Homo sapiens
ARGRKDATGSYGTDY

SEQ ID NO: 1417 - protein, 5 aa, Homo sapiens
VREWN

SEQ ID NO: 1418 - protein, 10 aa, Homo sapiens
ARDNFGSIDY

SEQ ID NO: 1419 - protein, 15 aa, Homo sapiens
ARGVLVGATQNWFDP

SEQ ID NO: 1420 - protein, 10 aa, Homo sapiens
ARGIAGGLDY

SEQ ID NO: 1421 - protein, 12 aa, Homo sapiens
VRGTNDWVGIDY

SEQ ID NO: 1422 - protein, 14 aa, Homo sapiens
ARGGKEVAGTPLWY

SEQ ID NO: 1423 - protein, 11 aa, Homo sapiens
ARDLSHWAMDV

SEQ ID NO: 1424 - protein, 15 aa, Homo sapiens
ARDPYCSSNTCLFDY

SEQ ID NO: 1425 - protein, 9 aa, Homo sapiens
ARDEEQLNV

SEQ ID NO: 1426 - protein, 9 aa, Homo sapiens
NTDSLVQNY

SEQ ID NO: 1427 - protein, 5 aa, Homo sapiens
ARYDF

SEQ ID NO: 1428 - protein, 8 aa, Homo sapiens
ARRNYCDY

SEQ ID NO: 1429 - protein, 12 aa, Homo sapiens
ARLWLGLRPPDY

SEQ ID NO: 1430 - protein, 11 aa, Homo sapiens
ARHWSSSWFGY

SEQ ID NO: 1431 - protein, 14 aa, Homo sapiens
AREDWKDGDDAFDI

SEQ ID NO: 1432 - protein, 13 aa, Homo sapiens
AKDPSRVISAFDI

SEQ ID NO: 1433 - protein, 14 aa, Homo sapiens
ARDRGRDGYNKVDY

SEQ ID NO: 1434 - protein, 16 aa, Homo sapiens
ARVYCSSTSCLYYLDY

SEQ ID NO: 1435 - protein, 7 aa, Homo sapiens
VRGMGDC

SEQ ID NO: 1436 - protein, 12 aa, Homo sapiens
AKDRGSGWTFDY

SEQ ID NO: 1437 - protein, 12 aa, Homo sapiens
ARLGGSGWSKDY

SEQ ID NO: 1438 - protein, 12 aa, Homo sapiens
ARWRWQQSEFDS

SEQ ID NO: 1439 - protein, 13 aa, Homo sapiens
AKDRGMVRGVGDS

SEQ ID NO: 1440 - protein, 13 aa, Homo sapiens
ARHAYTSAWYGGF

SEQ ID NO: 1441 - protein, 8 aa, Homo sapiens
ARDTILDF

SEQ ID NO: 1442 - protein, 7 aa, Homo sapiens
YYYGLDV

SEQ ID NO: 1443 - protein, 15 aa, Homo sapiens
ARLHSGYDWGDAFDI

SEQ ID NO: 1444 - protein, 16 aa, Homo sapiens
ARAGCSGGNCYRPPDF

SEQ ID NO: 1445 - protein, 10 aa, Homo sapiens
ARAIGAAESY

SEQ ID NO: 1446 - protein, 11 aa, Homo sapiens
ARRAPRNWFDP

SEQ ID NO: 1447 - protein, 11 aa, Homo sapiens
ARNTGTYSLDY

SEQ ID NO: 1448 - protein, 9 aa, Homo sapiens
AGGTGTFDY

SEQ ID NO: 1449 - protein, 11 aa, Homo sapiens
ARASLAGTPPH

SEQ ID NO: 1450 - protein, 7 aa, Homo sapiens
VKGMGDS

SEQ ID NO: 1451 - protein, 11 aa, Homo sapiens
ARNPDAGTADY

SEQ ID NO: 1452 - protein, 12 aa, Homo sapiens
ARRGSENYWIDS

SEQ ID NO: 1453 - protein, 18 aa, Homo sapiens
SRDFSGYCSMTSCYAFDY

SEQ ID NO: 1454 - protein, 12 aa, Homo sapiens
ARRDSSRWFLDY

SEQ ID NO: 1455 - protein, 14 aa, Homo sapiens
ARDFHDFWSGTLGY

SEQ ID NO: 1456 - protein, 12 aa, Homo sapiens
VRGTNGWYGIDY

SEQ ID NO: 1457 - protein, 12 aa, Homo sapiens
ARRGSENYWVDS

SEQ ID NO: 1458 - protein, 11 aa, Homo sapiens
VRERSGGFWDY

SEQ ID NO: 1459 - protein, 12 aa, Homo sapiens
ARGAAAGRALDY

SEQ ID NO: 1460 - protein, 12 aa, Homo sapiens
ASLSRDGYNSDY

SEQ ID NO: 1461 - protein, 13 aa, Homo sapiens
ARAYNNYVYYFDY

SEQ ID NO: 1462 - protein, 11 aa, Homo sapiens
TTQFNWNDGDH

SEQ ID NO: 1463 - protein, 11 aa, Homo sapiens
ARDKGVTSIDQ

SEQ ID NO: 1464 - protein, 16 aa, Homo sapiens
ARGKEYSGYQEYYFDY

SEQ ID NO: 1465 - protein, 12 aa, Homo sapiens
ARRGSENYWIDY

SEQ ID NO: 1466 - protein, 10 aa, Homo sapiens
VRSVAGAFDY

SEQ ID NO: 1467 - protein, 14 aa, Homo sapiens
ARGAAPGISGWVDP

SEQ ID NO: 1468 - protein, 10 aa, Homo sapiens
ARGTRGDFDY

SEQ ID NO: 1469 - protein, 14 aa, Homo sapiens
ARGTAVAGTDWLDP

SEQ ID NO: 1470 - protein, 9 aa, Homo sapiens
AREPRRLDY

SEQ ID NO: 1471 - protein, 15 aa, Homo sapiens
ARGAAYYDSSGHPDY

SEQ ID NO: 1472 - protein, 20 aa, Homo sapiens
ARDRVTMVRGEAYHYYGMDV

SEQ ID NO: 1473 - protein, 13 aa, Homo sapiens
ARGWRGYSYGFDY

SEQ ID NO: 1474 - protein, 11 aa, Homo sapiens
ASGIVGANGAY

SEQ ID NO: 1475 - protein, 7 aa, Homo sapiens
TRSLFDY

SEQ ID NO: 1476 - protein, 9 aa, Homo sapiens
TTDRGAAPD

SEQ ID NO: 1477 - protein, 15 aa, Homo sapiens
AKGVNTYSYYYGMDV

SEQ ID NO: 1478 - protein, 12 aa, Homo sapiens
ARGRSSSWDTDY

SEQ ID NO: 1479 - protein, 12 aa, Homo sapiens
ARDDDGRKPLDY

SEQ ID NO: 1480 - protein, 10 aa, Homo sapiens
ARDYYYSIES

SEQ ID NO: 1481 - protein, 9 aa, Homo sapiens
ARHGAGMDV

SEQ ID NO: 1482 - protein, 11 aa, Homo sapiens
ARGDIAARMGY

SEQ ID NO: 1483 - protein, 15 aa, Homo sapiens
ARDVDTTSHYGRFDP

SEQ ID NO: 1484 - protein, 11 aa, Homo sapiens
ARDPDTGTADY

SEQ ID NO: 1485 - protein, 6 aa, Homo sapiens
TTWSDY

SEQ ID NO: 1486 - protein, 12 aa, Homo sapiens
VRDRGGRSGMDV

SEQ ID NO: 1487 - protein, 15 aa, Homo sapiens
ATLYDFWSGYGGMDV

SEQ ID NO: 1488 - protein, 11 aa, Homo sapiens
AKGGVTAPFDY

SEQ ID NO: 1489 - protein, 14 aa, Homo sapiens
AREHDTLTGYGFDI

SEQ ID NO: 1490 - protein, 10 aa, Homo sapiens
ARDLSGRFDY

SEQ ID NO: 1491 - protein, 16 aa, Homo sapiens
ARASADLPYYYYGMDV

SEQ ID NO: 1492 - protein, 8 aa, Homo sapiens
ANGVRGGF

SEQ ID NO: 1493 - protein, 11 aa, Homo sapiens
AKDILGWTFDH

SEQ ID NO: 1494 - protein, 9 aa, Homo sapiens
ARDRGVSDY

SEQ ID NO: 1495 - protein, 14 aa, Homo sapiens
ARDASGGDWRYFDY

SEQ ID NO: 1496 - protein, 9 aa, Homo sapiens
ARGAIGFDH

SEQ ID NO: 1497 - protein, 14 aa, Homo sapiens
ARDRGRDGYNKFDY

SEQ ID NO: 1498 - protein, 6 aa, Homo sapiens
ARGGDS

SEQ ID NO: 1499 - protein, 9 aa, Homo sapiens
AGGNGYNLY

SEQ ID NO: 1500 - protein, 7 aa, Homo sapiens
ARPFGNY

SEQ ID NO: 1501 - protein, 12 aa, Homo sapiens
ARVKGGSDAFDI

SEQ ID NO: 1502 - protein, 12 aa, Homo sapiens
ARERPESYFFDY

SEQ ID NO: 1503 - protein, 10 aa, Homo sapiens
ARNSGWSFDY

SEQ ID NO: 1504 - protein, 7 aa, Homo sapiens
TNQYFDY

SEQ ID NO: 1505 - protein, 10 aa, Homo sapiens
ARDHHWAFDY

SEQ ID NO: 1506 - protein, 13 aa, Homo sapiens
VRDGDSNTWPLDY

SEQ ID NO: 1507 - protein, 7 aa, Homo sapiens
AKGYSSD

SEQ ID NO: 1508 - protein, 11 aa, Homo sapiens
AKHGSGWYVDY

SEQ ID NO: 1509 - protein, 10 aa, Homo sapiens
AKRQQLVFDY

SEQ ID NO: 1510 - protein, 11 aa, Homo sapiens
AREFLYSSGDY

SEQ ID NO: 1511 - protein, 14 aa, Homo sapiens
ARRHDYGDSPYFDF

SEQ ID NO: 1512 - protein, 12 aa, Homo sapiens
ARHKRGSNTFDI

SEQ ID NO: 1513 - protein, 11 aa, Homo sapiens
AKEGRTYYFDY

SEQ ID NO: 1514 - protein, 9 aa, Homo sapiens
ARGSGAPDN

SEQ ID NO: 1515 - protein, 7 aa, Homo sapiens
ARGRGVY

SEQ ID NO: 1516 - protein, 15 aa, Homo sapiens
ARDLAFTVTHPSFDY

SEQ ID NO: 1517 - protein, 9 aa, Homo sapiens
AKGTTDVDY

SEQ ID NO: 1518 - protein, 13 aa, Homo sapiens
VRDSHGGKVHLEY

SEQ ID NO: 1519 - protein, 10 aa, Homo sapiens
ARDLGGAAGG

SEQ ID NO: 1520 - protein, 11 aa, Homo sapiens
TEDLVPGGADV

SEQ ID NO: 1521 - protein, 13 aa, Homo sapiens
ARLHYYRSEEFDS

SEQ ID NO: 1522 - protein, 17 aa, Homo sapiens
ARGYYDSSGNSNWYFDL

SEQ ID NO: 1523 - protein, 14 aa, Homo sapiens
TTDLPRSDRYSHDY

SEQ ID NO: 1524 - protein, 12 aa, Homo sapiens
AKVPLGTWWFDP

SEQ ID NO: 1525 - protein, 13 aa, Homo sapiens
ARAVTNTAGAFDI

SEQ ID NO: 1526 - protein, 8 aa, Homo sapiens
AKGDAMDV

SEQ ID NO: 1527 - protein, 9 aa, Homo sapiens
ARRWDGMDV

SEQ ID NO: 1528 - protein, 9 aa, Homo sapiens
AKNRWLPDY

SEQ ID NO: 1529 - protein, 14 aa, Homo sapiens
AKGRNYYDSSGYYS

SEQ ID NO: 1530 - protein, 11 aa, Homo sapiens
AKDSRAYYFDY

SEQ ID NO: 1531 - protein, 7 aa, Homo sapiens
TTGAMDV

SEQ ID NO: 1532 - protein, 10 aa, Homo sapiens
ARSVEHGLDV

SEQ ID NO: 1533 - protein, 10 aa, Homo sapiens
ARGYRYGMDV

SEQ ID NO: 1534 - protein, 13 aa, Homo sapiens
TPDRVVPGAYFDY

SEQ ID NO: 1535 - protein, 10 aa, Homo sapiens
AKDSYSRGDY

SEQ ID NO: 1536 - protein, 9 aa, Homo sapiens
ARDKWIYDY

SEQ ID NO: 1537 - protein, 7 aa, Homo sapiens
ARGHGSI

SEQ ID NO: 1538 - protein, 6 aa, Homo sapiens
TKDFWL

SEQ ID NO: 1539 - protein, 8 aa, Homo sapiens
ARRGFLDY

SEQ ID NO: 1540 - protein, 14 aa, Homo sapiens
AKDFVGVVADAFDI

SEQ ID NO: 1541 - protein, 13 aa, Homo sapiens
TRVPYSSGWYGDY

SEQ ID NO: 1542 - protein, 8 aa, Homo sapiens
ARGSAAAF

SEQ ID NO: 1543 - protein, 17 aa, Homo sapiens
ARDPPDSSGYYHNAFDL

SEQ ID NO: 1544 - protein, 14 aa, Homo sapiens
ARRGPYGSGGWFDP

SEQ ID NO: 1545 - protein, 9 aa, Homo sapiens
ARRSGGVDV

SEQ ID NO: 1546 - protein, 10 aa, Homo sapiens
ARDEGYAFDI

SEQ ID NO: 1547 - protein, 11 aa, Homo sapiens
ARRGDYGDFDY

SEQ ID NO: 1548 - protein, 11 aa, Homo sapiens
GKDLVPGGLDV

SEQ ID NO: 1549 - protein, 10 aa, Homo sapiens
ARERQRLFDY

SEQ ID NO: 1550 - protein, 10 aa, Homo sapiens
VRQDSGSPGY

SEQ ID NO: 1551 - protein, 11 aa, Homo sapiens
ARLTSTWAFDI

SEQ ID NO: 1552 - protein, 10 aa, Homo sapiens
ARGLNYGMDV

SEQ ID NO: 1553 - protein, 5 aa, Homo sapiens
AGLWS

SEQ ID NO: 1554 - protein, 10 aa, Homo sapiens
AKDWNGSPEY

SEQ ID NO: 1555 - protein, 14 aa, Homo sapiens
ARDGQQLAAYAMDV

SEQ ID NO: 1556 - protein, 11 aa, Homo sapiens
ARDWLTSGFDY

SEQ ID NO: 1557 - protein, 11 aa, Homo sapiens
AKGWFGTVGDY

SEQ ID NO: 1558 - protein, 10 aa, Homo sapiens
TRGHHLAFAY

SEQ ID NO: 1559 - protein, 7 aa, Homo sapiens
ARDVGTG

SEQ ID NO: 1560 - protein, 11 aa, Homo sapiens
ATSSGWYRLDY

SEQ ID NO: 1561 - protein, 12 aa, Homo sapiens
ARDEEGDRDFDY

SEQ ID NO: 1562 - protein, 13 aa, Homo sapiens
ARLHYYASEEFDS

SEQ ID NO: 1563 - protein, 11 aa, Homo sapiens
AKEGTATTYYY

SEQ ID NO: 1564 - protein, 7 aa, Homo sapiens
VRGSGGI

SEQ ID NO: 1565 - protein, 6 aa, Homo sapiens
ARGLDH

SEQ ID NO: 1566 - protein, 10 aa, Homo sapiens
AAGMVRGVDY

SEQ ID NO: 1567 - protein, 12 aa, Homo sapiens
ANRRSDYRQFHF

SEQ ID NO: 1568 - protein, 13 aa, Homo sapiens
ATDGWELLGYFDY

SEQ ID NO: 1569 - protein, 12 aa, Homo sapiens
ARGPLLGDAYDV

SEQ ID NO: 1570 - protein, 15 aa, Homo sapiens
ARADSSGWYGGGMDV

SEQ ID NO: 1571 - protein, 7 aa, Homo sapiens
AKGWGSS

SEQ ID NO: 1572 - protein, 10 aa, Homo sapiens
VTDKDWAFDS

SEQ ID NO: 1573 - protein, 7 aa, Homo sapiens
VRGHMGL

SEQ ID NO: 1574 - protein, 8 aa, Homo sapiens
TRGRWSDP

SEQ ID NO: 1575 - protein, 10 aa, Homo sapiens
ARAWNYGMDV

SEQ ID NO: 1576 - protein, 11 aa, Homo sapiens
VRELDGGYFDY

SEQ ID NO: 1577 - protein, 6 aa, Homo sapiens
ARGVAF

SEQ ID NO: 1578 - protein, 9 aa, Homo sapiens
TCGYGRFDY

SEQ ID NO: 1579 - protein, 8 aa, Homo sapiens
ARAPDHDY

SEQ ID NO: 1580 - protein, 14 aa, Homo sapiens
ARGDYRGSGGHADY

SEQ ID NO: 1581 - protein, 12 aa, Homo sapiens
ARRGPYFYGFDV

SEQ ID NO: 1582 - protein, 9 aa, Homo sapiens
ASGAGWWQY

SEQ ID NO: 1583 - protein, 14 aa, Homo sapiens
AAERYDGSCCWFDP

SEQ ID NO: 1584 - protein, 11 aa, Homo sapiens
ARASSSWSIDY

SEQ ID NO: 1585 - protein, 12 aa, Homo sapiens
ARYRYSESYFDY

SEQ ID NO: 1586 - protein, 11 aa, Homo sapiens
ARAQGWGRFDS

SEQ ID NO: 1587 - protein, 8 aa, Homo sapiens
AGRWHFDL

SEQ ID NO: 1588 - protein, 11 aa, Homo sapiens
ARAGATGTTDY

SEQ ID NO: 1589 - protein, 6 aa, Homo sapiens
AASFDH

SEQ ID NO: 1590 - protein, 8 aa, Homo sapiens
VRDSSASC

SEQ ID NO: 1591 - protein, 14 aa, Homo sapiens
AKGSAPGDRYYFDY

SEQ ID NO: 1592 - protein, 14 aa, Homo sapiens
ARGDYRGAGGYSDY

SEQ ID NO: 1593 - protein, 7 aa, Homo sapiens
AVFQGDY

SEQ ID NO: 1594 - protein, 9 aa, Homo sapiens
ARDRGSGDY

SEQ ID NO: 1595 - protein, 12 aa, Homo sapiens
ARTSPRYGGFDY

SEQ ID NO: 1596 - protein, 11 aa, Homo sapiens
TTELTYGDKFH

SEQ ID NO: 1597 - protein, 15 aa, Homo sapiens
ARFGGNSGWYGGFDY

SEQ ID NO: 1598 - protein, 9 aa, Homo sapiens
ARGSRSFDY

SEQ ID NO: 1599 - protein, 10 aa, Homo sapiens
ARAGSGWFNY

SEQ ID NO: 1600 - protein, 14 aa, Homo sapiens
AKARSEVVAAANNY

SEQ ID NO: 1601 - protein, 7 aa, Homo sapiens
ARDRFAY

SEQ ID NO: 1602 - protein, 8 aa, Homo sapiens
AKGGWVDS

SEQ ID NO: 1603 - protein, 9 aa, Homo sapiens
AKEVPAFDL

SEQ ID NO: 1604 - protein, 10 aa, Homo sapiens
AGGRGWLIDF

SEQ ID NO: 1605 - protein, 8 aa, Homo sapiens
TRNAGLDY

SEQ ID NO: 1606 - protein, 6 aa, Homo sapiens
ASVRGH

SEQ ID NO: 1607 - protein, 9 aa, Homo sapiens
ARSRYGMDV

SEQ ID NO: 1608 - protein, 15 aa, Homo sapiens
AKDLDASGWYLYFQH

SEQ ID NO: 1609 - protein, 15 aa, Homo sapiens
AKDRYCPGGICPTDY

SEQ ID NO: 1610 - protein, 8 aa, Homo sapiens
VKDSSASY

SEQ ID NO: 1611 - protein, 12 aa, Homo sapiens
ARGHYDSSAVDY

SEQ ID NO: 1612 - protein, 17 aa, Homo sapiens
ARGGGYGGNPLYWYFDL

SEQ ID NO: 1613 - protein, 8 aa, Homo sapiens
ARKNVFDI

SEQ ID NO: 1614 - protein, 9 aa, Homo sapiens
ARGRFSFDS

SEQ ID NO: 1615 - protein, 16 aa, Homo sapiens
ARDLDRSDWYGGYFDS

SEQ ID NO: 1616 - protein, 14 aa, Homo sapiens
AKDQYSGYGGLFDY

SEQ ID NO: 1617 - protein, 13 aa, Homo sapiens
ARDHVGPGVYFDY

SEQ ID NO: 1618 - protein, 10 aa, Homo sapiens
ARGGPRGMDV

SEQ ID NO: 1619 - protein, 11 aa, Homo sapiens
ARGGLGLGIDY

SEQ ID NO: 1620 - protein, 10 aa, Homo sapiens
ARGGVHYFDY

SEQ ID NO: 1621 - protein, 8 aa, Homo sapiens
ARGRDPPH

SEQ ID NO: 1622 - protein, 16 aa, Homo sapiens
VKGNYGDHVSGDAFDI

SEQ ID NO: 1623 - protein, 12 aa, Homo sapiens
VRAGGPHNRFDY

SEQ ID NO: 1624 - protein, 13 aa, Homo sapiens
ARDKGGGPDTFDV

SEQ ID NO: 1625 - protein, 10 aa, Homo sapiens
AGDRGSVGGP

SEQ ID NO: 1626 - protein, 13 aa, Homo sapiens
AKSLTSDRDWFDP

SEQ ID NO: 1627 - protein, 12 aa, Homo sapiens
TRDRGTYLRIDY

SEQ ID NO: 1628 - protein, 11 aa, Homo sapiens
AKDRSGWQYDY

SEQ ID NO: 1629 - protein, 14 aa, Homo sapiens
AREGDGYNLYYFDY

SEQ ID NO: 1630 - protein, 6 aa, Homo sapiens
ASDLGY

SEQ ID NO: 1631 - protein, 18 aa, Homo sapiens
ARARYCSGGSCYYYGMDV

SEQ ID NO: 1632 - protein, 11 aa, Homo sapiens
AKGGHYSVFDP

SEQ ID NO: 1633 - protein, 12 aa, Homo sapiens
ARRSNSENYFDY

SEQ ID NO: 1634 - protein, 17 aa, Homo sapiens
ARRDCSSTSCSTNWFDP

SEQ ID NO: 1635 - protein, 14 aa, Homo sapiens
AKGKSGGLLDWFDP

SEQ ID NO: 1636 - protein, 8 aa, Homo sapiens
ARGKAGGY

SEQ ID NO: 1637 - protein, 10 aa, Homo sapiens
ARWRTGWFDP

SEQ ID NO: 1638 - protein, 18 aa, Homo sapiens
VRGGIGYCSSTTCYDLDY

SEQ ID NO: 1639 - protein, 10 aa, Homo sapiens
ARDSAWAFDS

SEQ ID NO: 1640 - protein, 14 aa, Homo sapiens
ARAQRGYSYGPFDY

SEQ ID NO: 1641 - protein, 7 aa, Homo sapiens
GGAAIGY

SEQ ID NO: 1642 - protein, 12 aa, Homo sapiens
VKEVGPFSGFDY

SEQ ID NO: 1643 - protein, 12 aa, Homo sapiens
ARYANGYYGMDV

SEQ ID NO: 1644 - protein, 14 aa, Homo sapiens
ARVGVIVAAGTYDY

SEQ ID NO: 1645 - protein, 6 aa, Homo sapiens
SWVGAA

SEQ ID NO: 1646 - protein, 9 aa, Homo sapiens
ARALGYSAY

SEQ ID NO: 1647 - protein, 7 aa, Homo sapiens
AIGSGSH

SEQ ID NO: 1648 - protein, 13 aa, Homo sapiens
ARVAWIQLWFFDY

SEQ ID NO: 1649 - protein, 14 aa, Homo sapiens
TRGGTGYSSSWYLY

SEQ ID NO: 1650 - protein, 9 aa, Homo sapiens
ARSNWGFDY

SEQ ID NO: 1651 - protein, 9 aa, Homo sapiens
VRATWYFDF

SEQ ID NO: 1652 - protein, 8 aa, Homo sapiens
ARGERTDY

SEQ ID NO: 1653 - protein, 17 aa, Homo sapiens
AKRGADGTALGHWYFDL

SEQ ID NO: 1654 - protein, 9 aa, Homo sapiens
ASHSSGYYV

SEQ ID NO: 1655 - protein, 11 aa, Homo sapiens
ARLPPGTGFDY

SEQ ID NO: 1656 - protein, 10 aa, Homo sapiens
ARSKNYAFDY

SEQ ID NO: 1657 - protein, 13 aa, Homo sapiens
ARDGTAPGIYFDR

SEQ ID NO: 1658 - protein, 13 aa, Homo sapiens
ASPFGVVSNWFDP

SEQ ID NO: 1659 - protein, 9 aa, Homo sapiens
ARGAGAVDY

SEQ ID NO: 1660 - protein, 11 aa, Homo sapiens
ARDVYSSSSAY

SEQ ID NO: 1661 - protein, 9 aa, Homo sapiens
ARGGRGFDV

SEQ ID NO: 1662 - protein, 9 aa, Homo sapiens
ARGYGWFDP

SEQ ID NO: 1663 - protein, 11 aa, Homo sapiens
AKDTTGWSRDY

SEQ ID NO: 1664 - protein, 8 aa, Homo sapiens
ARRGRVDY

SEQ ID NO: 1665 - protein, 11 aa, Homo sapiens
ARVGLWFGVDY

SEQ ID NO: 1666 - protein, 8 aa, Homo sapiens
ARNNSGYT

SEQ ID NO: 1667 - protein, 6 aa, Homo sapiens
ARFGII

SEQ ID NO: 1668 - protein, 11 aa, Homo sapiens
TRGPRGGFFDY

SEQ ID NO: 1669 - protein, 14 aa, Homo sapiens
ARALRGYTYGPFDY

SEQ ID NO: 1670 - protein, 9 aa, Homo sapiens
ARGATPLDY

SEQ ID NO: 1671 - protein, 8 aa, Homo sapiens
ARSRGLDS

SEQ ID NO: 1672 - protein, 12 aa, Homo sapiens
AKDRTHRDGFDI

SEQ ID NO: 1673 - protein, 11 aa, Homo sapiens
AKTGSGWFLDY

SEQ ID NO: 1674 - protein, 16 aa, Homo sapiens
AKDNLRYGSGSYLIDY

SEQ ID NO: 1675 - protein, 7 aa, Homo sapiens
ARGDSNY

SEQ ID NO: 1676 - protein, 11 aa, Homo sapiens
ARGGVVGAMDY

SEQ ID NO: 1677 - protein, 12 aa, Homo sapiens
ARYYDSGGYHDY

SEQ ID NO: 1678 - protein, 10 aa, Homo sapiens
ARGQNHAFDI

SEQ ID NO: 1679 - protein, 12 aa, Homo sapiens
ARDITGKYYFDY

SEQ ID NO: 1680 - protein, 9 aa, Homo sapiens
ARGFNWFDS

SEQ ID NO: 1681 - protein, 13 aa, Homo sapiens
AREDSGSSYYFDY

SEQ ID NO: 1682 - protein, 13 aa, Homo sapiens
VKDLDSSGYYPDY

SEQ ID NO: 1683 - protein, 15 aa, Homo sapiens
ARDRVVRGVMGAFDY

SEQ ID NO: 1684 - protein, 12 aa, Homo sapiens
ARDSRTSGEFDP

SEQ ID NO: 1685 - protein, 8 aa, Homo sapiens
ARGRFGPY

SEQ ID NO: 1686 - protein, 12 aa, Homo sapiens
ARGPYTGHWFDP

SEQ ID NO: 1687 - protein, 6 aa, Homo sapiens
ARGLAY

SEQ ID NO: 1688 - protein, 9 aa, Homo sapiens
ASHSSGYFC

SEQ ID NO: 1689 - protein, 10 aa, Homo sapiens
ARSVEGHFDL

SEQ ID NO: 1690 - protein, 11 aa, Homo sapiens
ARDRDRPYFDY

SEQ ID NO: 1691 - protein, 10 aa, Homo sapiens
ARWSGTFYDY

SEQ ID NO: 1692 - protein, 14 aa, Homo sapiens
ARDPRDGRESPPDY

SEQ ID NO: 1693 - protein, 7 aa, Homo sapiens
VKGRGDH

SEQ ID NO: 1694 - protein, 9 aa, Homo sapiens
VRGSAHLRY

SEQ ID NO: 1695 - protein, 11 aa, Homo sapiens
ARGAGSNRFDP

SEQ ID NO: 1696 - protein, 8 aa, Homo sapiens
ARHRGLAY

SEQ ID NO: 1697 - protein, 13 aa, Homo sapiens
ARRMTGPGGWFDS

SEQ ID NO: 1698 - protein, 14 aa, Homo sapiens
AKGLFGQLSNWIDP

SEQ ID NO: 1699 - protein, 13 aa, Homo sapiens
AREVKSGDDAFDV

SEQ ID NO: 1700 - protein, 9 aa, Homo sapiens
ASPPAYGGY

SEQ ID NO: 1701 - protein, 10 aa, Homo sapiens
ARDYYGSYDY

SEQ ID NO: 1702 - protein, 10 aa, Homo sapiens
AKGASSRLAV

SEQ ID NO: 1703 - protein, 7 aa, Homo sapiens
AKGELVG

SEQ ID NO: 1704 - protein, 11 aa, Homo sapiens
ARDGGSGSYFY

SEQ ID NO: 1705 - protein, 9 aa, Homo sapiens
ARDGRTGDY

SEQ ID NO: 1706 - protein, 6 aa, Homo sapiens
AGRGDY

SEQ ID NO: 1707 - protein, 10 aa, Homo sapiens
ARGRSYAFDI

SEQ ID NO: 1708 - protein, 17 aa, Homo sapiens
ARGIGERWLQLGGYFDY

SEQ ID NO: 1709 - protein, 11 aa, Homo sapiens
ARDSGGYYFDY

SEQ ID NO: 1710 - protein, 11 aa, Homo sapiens
ARDPGSGAYDV

SEQ ID NO: 1711 - protein, 9 aa, Homo sapiens
AKDWGSLDY

SEQ ID NO: 1712 - protein, 8 aa, Homo sapiens
AKSDWIDP

SEQ ID NO: 1713 - protein, 9 aa, Homo sapiens
VRGRSSMDV

SEQ ID NO: 1714 - protein, 12 aa, Homo sapiens
ARDMGSGWSFDY

SEQ ID NO: 1715 - protein, 11 aa, Homo sapiens
AKVRGETSPDY

SEQ ID NO: 1716 - protein, 13 aa, Homo sapiens
ARGDYSSGWYEDY

SEQ ID NO: 1717 - protein, 16 aa, Homo sapiens
AREVVPHSSGYDAFDI

SEQ ID NO: 1718 - protein, 13 aa, Homo sapiens
ARRATVTYYALDV

SEQ ID NO: 1719 - protein, 9 aa, Homo sapiens
ARGIYGMDV

SEQ ID NO: 1720 - protein, 12 aa, Homo sapiens
ARERGSGSPFDY

SEQ ID NO: 1721 - protein, 13 aa, Homo sapiens
ITTRGYTGYDLGY

SEQ ID NO: 1722 - protein, 8 aa, Homo sapiens
GRGRGIDV

SEQ ID NO: 1723 - protein, 11 aa, Homo sapiens
ARELRGGHFDY

SEQ ID NO: 1724 - protein, 9 aa, Homo sapiens
AKGVTSLDY

SEQ ID NO: 1725 - protein, 11 aa, Homo sapiens
ARGGPGTGMDY

SEQ ID NO: 1726 - protein, 10 aa, Homo sapiens
ARDLSGRYDY

SEQ ID NO: 1727 - protein, 16 aa, Homo sapiens
ARGRTGTTWYYYGMDV

SEQ ID NO: 1728 - protein, 10 aa, Homo sapiens
ARLRGAAAGY

SEQ ID NO: 1729 - protein, 13 aa, Homo sapiens
AKDLGTSGWYFDY

SEQ ID NO: 1730 - protein, 13 aa, Homo sapiens
AKRHYYGSGSLDV

SEQ ID NO: 1731 - protein, 15 aa, Homo sapiens
ARGNPYCSGGTCFDY

SEQ ID NO: 1732 - protein, 10 aa, Homo sapiens
ARSIENGMDV

SEQ ID NO: 1733 - protein, 13 aa, Homo sapiens
ARVNYGAGYYFDY

SEQ ID NO: 1734 - protein, 9 aa, Homo sapiens
VRDLGGSDN

SEQ ID NO: 1735 - protein, 10 aa, Homo sapiens
ARDRARAVDL

SEQ ID NO: 1736 - protein, 8 aa, Homo sapiens
VRAGNMEV

SEQ ID NO: 1737 - protein, 10 aa, Homo sapiens
VQKVYGDFPY

SEQ ID NO: 1738 - protein, 9 aa, Homo sapiens
ARDRAAFDI

SEQ ID NO: 1739 - protein, 11 aa, Homo sapiens
ARWGVIAGLDY

SEQ ID NO: 1740 - protein, 8 aa, Homo sapiens
ARHDTFDV

SEQ ID NO: 1741 - protein, 10 aa, Homo sapiens
VRDHNYGLDY

SEQ ID NO: 1742 - protein, 7 aa, Homo sapiens
VTDRLDY

SEQ ID NO: 1743 - protein, 12 aa, Homo sapiens
AREPPNSFYFDY

SEQ ID NO: 1744 - protein, 9 aa, Homo sapiens
ARVHLGERF

SEQ ID NO: 1745 - protein, 8 aa, Homo sapiens
ARKVPFDL

SEQ ID NO: 1746 - protein, 12 aa, Homo sapiens
AKRFGEGGHFDY

SEQ ID NO: 1747 - protein, 11 aa, Homo sapiens
ARDGGGWYFDY

SEQ ID NO: 1748 - protein, 9 aa, Homo sapiens
ARDHNGRDY

SEQ ID NO: 1749 - protein, 10 aa, Homo sapiens
ARGSGWLSDY

SEQ ID NO: 1750 - protein, 13 aa, Homo sapiens
ARGGCSNPSCLDY

SEQ ID NO: 1751 - protein, 8 aa, Homo sapiens
ARENYFQP

SEQ ID NO: 1752 - protein, 11 aa, Homo sapiens
ARDSYSSGVDY

SEQ ID NO: 1753 - protein, 10 aa, Homo sapiens
ARGDGGTYGY

SEQ ID NO: 1754 - protein, 10 aa, Homo sapiens
AKRYYGAVDY

SEQ ID NO: 1755 - protein, 7 aa, Homo sapiens
SRDKLDY

SEQ ID NO: 1756 - protein, 17 aa, Homo sapiens
ARDGREGYNFFYYAMDV

SEQ ID NO: 1757 - protein, 8 aa, Homo sapiens
AKNYGMEV

SEQ ID NO: 1758 - protein, 10 aa, Homo sapiens
ARATSNSWSY

SEQ ID NO: 1759 - protein, 9 aa, Homo sapiens
ARDRPPYDY

SEQ ID NO: 1760 - protein, 11 aa, Homo sapiens
AAWSSSHWFDY

SEQ ID NO: 1761 - protein, 12 aa, Homo sapiens
ARDDDRGAALDV

SEQ ID NO: 1762 - protein, 13 aa, Homo sapiens
ARQAVSGLNWFDP

SEQ ID NO: 1763 - protein, 13 aa, Homo sapiens
ARQVGSGKWYFDY

SEQ ID NO: 1764 - protein, 13 aa, Homo sapiens
ARRLNYGDYYFDY

SEQ ID NO: 1765 - protein, 9 aa, Homo sapiens
ARGPGSTSD

SEQ ID NO: 1766 - protein, 10 aa, Homo sapiens
ARDRNYGFDY

SEQ ID NO: 1767 - protein, 10 aa, Homo sapiens
ARGYSGSFDY

SEQ ID NO: 1768 - protein, 10 aa, Homo sapiens
ARSVAGHFDN

SEQ ID NO: 1769 - protein, 10 aa, Homo sapiens
ARGKSYAFDI

SEQ ID NO: 1770 - protein, 12 aa, Homo sapiens
AKDRGSSGFFDY

SEQ ID NO: 1771 - protein, 17 aa, Homo sapiens
ARRHIEATGTGSWYFDY

SEQ ID NO: 1772 - protein, 13 aa, Homo sapiens
AVGGSGRMNYFDL

SEQ ID NO: 1773 - protein, 13 aa, Homo sapiens
ARGRGYSYGYSDY

SEQ ID NO: 1774 - protein, 8 aa, Homo sapiens
ARGTNLDY

SEQ ID NO: 1775 - protein, 12 aa, Homo sapiens
AKTGGSHWGFDC

SEQ ID NO: 1776 - protein, 13 aa, Homo sapiens
ARGGCSSTSCLDH

SEQ ID NO: 1777 - protein, 6 aa, Homo sapiens
SREAAP

SEQ ID NO: 1778 - protein, 7 aa, Homo sapiens
TKGAFDY

SEQ ID NO: 1779 - protein, 11 aa, Homo sapiens
GRGWLQTGIDS

SEQ ID NO: 1780 - protein, 14 aa, Homo sapiens
AKVDYSNSRGYFDY

SEQ ID NO: 1781 - protein, 8 aa, Homo sapiens
ARDRQGSF

SEQ ID NO: 1782 - protein, 12 aa, Homo sapiens
ARTMVRGWGMDV

SEQ ID NO: 1783 - protein, 12 aa, Homo sapiens
VRGTSDWRGIDY

SEQ ID NO: 1784 - protein, 11 aa, Homo sapiens
ARGWLRTGFDP

SEQ ID NO: 1785 - protein, 11 aa, Homo sapiens
ARASSPGTTDY

SEQ ID NO: 1786 - protein, 15 aa, Homo sapiens
ARDEGVATTLRGFDY

SEQ ID NO: 1787 - protein, 14 aa, Homo sapiens
AKVVVVTVYWYFDL

SEQ ID NO: 1788 - protein, 9 aa, Homo sapiens
ARGATGLDV

SEQ ID NO: 1789 - protein, 15 aa, Homo sapiens
ARDFLGEIPRWYFDF

SEQ ID NO: 1790 - protein, 11 aa, Homo sapiens
AKSLYCGDDCP

SEQ ID NO: 1791 - protein, 18 aa, Homo sapiens
VRGGGVTTGSHYYYGLDV

SEQ ID NO: 1792 - protein, 18 aa, Homo sapiens
ARDSTLGSGGGPDWYFDL

SEQ ID NO: 1793 - protein, 9 aa, Homo sapiens
ARGAGPFDY

SEQ ID NO: 1794 - protein, 10 aa, Homo sapiens
ARRVEWAFDS

SEQ ID NO: 1795 - protein, 11 aa, Homo sapiens
ARGGVRYGFDL

SEQ ID NO: 1796 - protein, 5 aa, Homo sapiens
ARDVI

SEQ ID NO: 1797 - protein, 14 aa, Homo sapiens
AKGGLSFAGDYFDS

SEQ ID NO: 1798 - protein, 14 aa, Homo sapiens
TTAFPVYTSDSFDY

SEQ ID NO: 1799 - protein, 5 aa, Homo sapiens
GDFHY

SEQ ID NO: 1800 - protein, 10 aa, Homo sapiens
TRDIGGRYAY

SEQ ID NO: 1801 - protein, 13 aa, Homo sapiens
ARVVARDGYSFDS

SEQ ID NO: 1802 - protein, 11 aa, Homo sapiens
AKLVGRNTEDF

SEQ ID NO: 1803 - protein, 12 aa, Homo sapiens
AKRLAEGGHFDY

SEQ ID NO: 1804 - protein, 17 aa, Homo sapiens
AKGRYYGSGSYLNSFDS

SEQ ID NO: 1805 - protein, 9 aa, Homo sapiens
ASGLTVAYY

SEQ ID NO: 1806 - protein, 8 aa, Homo sapiens
TRGHIKDY

SEQ ID NO: 1807 - protein, 14 aa, Homo sapiens
ARDSCSGGSCYVDY

SEQ ID NO: 1808 - protein, 6 aa, Homo sapiens
VRGTDV

SEQ ID NO: 1809 - protein, 13 aa, Homo sapiens
AKGYSAYDLYFDY

SEQ ID NO: 1810 - protein, 6 aa, Homo sapiens
ARAMHV

SEQ ID NO: 1811 - protein, 14 aa, Homo sapiens
AKYYLSGSYYHFDS

SEQ ID NO: 1812 - protein, 10 aa, Homo sapiens
ARRVEGRFDY

SEQ ID NO: 1813 - protein, 8 aa, Homo sapiens
AKGSACDY

SEQ ID NO: 1814 - protein, 9 aa, Homo sapiens
VRDLRIYDF

SEQ ID NO: 1815 - protein, 7 aa, Homo sapiens
AKGWFDY

SEQ ID NO: 1816 - protein, 11 aa, Homo sapiens
AKGIAVAAFDY

SEQ ID NO: 1817 - protein, 15 aa, Homo sapiens
ARGLGIAAAGTLPDY

SEQ ID NO: 1818 - protein, 15 aa, Homo sapiens
ARFGGTSGWYSGFDY

SEQ ID NO: 1819 - protein, 8 aa, Homo sapiens
ARGNGWGV

SEQ ID NO: 1820 - protein, 13 aa, Homo sapiens
SRDRGYSYGYGDY

SEQ ID NO: 1821 - protein, 9 aa, Homo sapiens
ASGSGGHHY

SEQ ID NO: 1822 - protein, 9 aa, Homo sapiens
TRGDGWYYY

SEQ ID NO: 1823 - protein, 17 aa, Homo sapiens
ARKLYYYDTSELGWFDP

SEQ ID NO: 1824 - protein, 7 aa, Homo sapiens
VRDPVDH

SEQ ID NO: 1825 - protein, 13 aa, Homo sapiens
AKGRGSGSYAPDY

SEQ ID NO: 1826 - protein, 11 aa, Homo sapiens
ARDPFRSGFDY

SEQ ID NO: 1827 - protein, 16 aa, Homo sapiens
GRTHYDILTAHWNHDY

SEQ ID NO: 1828 - protein, 16 aa, Homo sapiens
AGAVVVTAMAYWYFDL

SEQ ID NO: 1829 - protein, 6 aa, Homo sapiens
VKDNDY

SEQ ID NO: 1830 - protein, 10 aa, Homo sapiens
VRYSSGRFDY

SEQ ID NO: 1831 - protein, 7 aa, Homo sapiens
ARGDMAV

SEQ ID NO: 1832 - protein, 12 aa, Homo sapiens
VRGSSDWTGIDY

SEQ ID NO: 1833 - protein, 8 aa, Homo sapiens
TKGGHADY

SEQ ID NO: 1834 - protein, 10 aa, Homo sapiens
AKGGSRYFQH

SEQ ID NO: 1835 - protein, 7 aa, Homo sapiens
VRGLGDK

SEQ ID NO: 1836 - protein, 14 aa, Homo sapiens
ATAPGFYSSAPFDY

SEQ ID NO: 1837 - protein, 9 aa, Homo sapiens
AKGGYYFAD

SEQ ID NO: 1838 - protein, 11 aa, Homo sapiens
VKDLEPGGADV

SEQ ID NO: 1839 - protein, 11 aa, Homo sapiens
ARSPREWGFDF

SEQ ID NO: 1840 - protein, 8 aa, Homo sapiens
VRFVSLGY

SEQ ID NO: 1841 - protein, 18 aa, Homo sapiens
ARAHYDILTGSSLNWFDP

SEQ ID NO: 1842 - protein, 10 aa, Homo sapiens
ARDLTGPVDY

SEQ ID NO: 1843 - protein, 7 aa, Homo sapiens
ARPGADY

SEQ ID NO: 1844 - protein, 8 aa, Homo sapiens
TRGHYDSY

SEQ ID NO: 1845 - protein, 9 aa, Homo sapiens
ARARDFAVY

SEQ ID NO: 1846 - protein, 10 aa, Homo sapiens
AKGDRGSGWY

SEQ ID NO: 1847 - protein, 8 aa, Homo sapiens
AKDRGCAY

SEQ ID NO: 1848 - protein, 13 aa, Homo sapiens
VRDGRAYGGYLDY

SEQ ID NO: 1849 - protein, 11 aa, Homo sapiens
ARERPTSGFDY

SEQ ID NO: 1850 - protein, 5 aa, Homo sapiens
ARGSS

SEQ ID NO: 1851 - protein, 8 aa, Homo sapiens
ATGGGFDY

SEQ ID NO: 1852 - protein, 12 aa, Homo sapiens
ARGGGDYYANDY

SEQ ID NO: 1853 - protein, 12 aa, Homo sapiens
ARWRGHQSEFDC

SEQ ID NO: 1854 - protein, 7 aa, Homo sapiens
ARDRGDY

SEQ ID NO: 1855 - protein, 11 aa, Homo sapiens
ARGWMRGAMDV

SEQ ID NO: 1856 - protein, 10 aa, Homo sapiens
AREIYGAFDY

SEQ ID NO: 1857 - protein, 13 aa, Homo sapiens
ARSRGSGWYYFDY

SEQ ID NO: 1858 - protein, 10 aa, Homo sapiens
VRDMTAFHEL

SEQ ID NO: 1859 - protein, 15 aa, Homo sapiens
ARGPRYDSSGYPFDY

SEQ ID NO: 1860 - protein, 13 aa, Homo sapiens
ARILVGGTRSFDY

SEQ ID NO: 1861 - protein, 13 aa, Homo sapiens
ARQGVPSINWYDP

SEQ ID NO: 1862 - protein, 8 aa, Homo sapiens
VRGQWLGH

SEQ ID NO: 1863 - protein, 8 aa, Homo sapiens
ARGGGIGY

SEQ ID NO: 1864 - protein, 16 aa, Homo sapiens
AKDRGDYGGNRRGFDY

SEQ ID NO: 1865 - protein, 13 aa, Homo sapiens
ARDDAVDGGYLDY

SEQ ID NO: 1866 - protein, 13 aa, Homo sapiens
ARDARSYGGYFDY

SEQ ID NO: 1867 - protein, 8 aa, Homo sapiens
TRSTDFDY

SEQ ID NO: 1868 - protein, 12 aa, Homo sapiens
ARGHYDSSLFDY

SEQ ID NO: 1869 - protein, 8 aa, Homo sapiens
TRGHYEAY

SEQ ID NO: 1870 - protein, 18 aa, Homo sapiens
ARGDDILTGYYYYYGMDV

SEQ ID NO: 1871 - protein, 6 aa, Homo sapiens
VRGGWN

SEQ ID NO: 1872 - protein, 11 aa, Homo sapiens
AKVKGNWYFDL

SEQ ID NO: 1873 - protein, 15 aa, Homo sapiens
AADRGFGDPYYGMDV

SEQ ID NO: 1874 - protein, 8 aa, Homo sapiens
ARGRGHDY

SEQ ID NO: 1875 - protein, 10 aa, Homo sapiens
ARDLSGANDY

SEQ ID NO: 1876 - protein, 8 aa, Homo sapiens
ARGRGADF

SEQ ID NO: 1877 - protein, 15 aa, Homo sapiens
ARQEYCSGGSCSFDY

SEQ ID NO: 1878 - protein, 10 aa, Homo sapiens
AKYRGNYFDS

SEQ ID NO: 1879 - protein, 9 aa, Homo sapiens
AADDLSSGY

SEQ ID NO: 1880 - protein, 11 aa, Homo sapiens
AGGSGIYSPDY

SEQ ID NO: 1881 - protein, 11 aa, Homo sapiens
TTDPFEAPLDY

SEQ ID NO: 1882 - protein, 13 aa, Homo sapiens
ARGAGPGSYRIDY

SEQ ID NO: 1883 - protein, 10 aa, Homo sapiens
VRDLHWAFDS

SEQ ID NO: 1884 - protein, 10 aa, Homo sapiens
ARDNYGLFDY

SEQ ID NO: 1885 - protein, 14 aa, Homo sapiens
AKPLRGFTTPYFDC

SEQ ID NO: 1886 - protein, 12 aa, Homo sapiens
ASHGYSYGYFDY

SEQ ID NO: 1887 - protein, 10 aa, Homo sapiens
ARDNRGSIDY

SEQ ID NO: 1888 - protein, 8 aa, Homo sapiens
AGLRLVDY

SEQ ID NO: 1889 - protein, 11 aa, Homo sapiens
ARESSSGWFDY

SEQ ID NO: 1890 - protein, 10 aa, Homo sapiens
TREDGGGTDY

SEQ ID NO: 1891 - protein, 11 aa, Homo sapiens
AKKLGDWSFDY

SEQ ID NO: 1892 - protein, 10 aa, Homo sapiens
VRGQHSAFDL

SEQ ID NO: 1893 - protein, 14 aa, Homo sapiens
ARDPAGDGYSLLDY

SEQ ID NO: 1894 - protein, 10 aa, Homo sapiens
ARDYYHTIDY

SEQ ID NO: 1895 - protein, 10 aa, Homo sapiens
TTEYWGSLNN

SEQ ID NO: 1896 - protein, 9 aa, Homo sapiens
ARAGAAFDY

SEQ ID NO: 1897 - protein, 9 aa, Homo sapiens
ARDQGPIDY

SEQ ID NO: 1898 - protein, 5 aa, Homo sapiens
TSRDY

SEQ ID NO: 1899 - protein, 11 aa, Homo sapiens
ARGGSGYPLDF

SEQ ID NO: 1900 - protein, 11 aa, Homo sapiens
ARDPRYSSGVY

SEQ ID NO: 1901 - protein, 11 aa, Homo sapiens
SRVPSGSPGDY

SEQ ID NO: 1902 - protein, 15 aa, Homo sapiens
ARDRTTVSYYYGMDV

SEQ ID NO: 1903 - protein, 9 aa, Homo sapiens
ARDAVAGDY

SEQ ID NO: 1904 - protein, 10 aa, Homo sapiens
VRDYDYGFDY

SEQ ID NO: 1905 - protein, 10 aa, Homo sapiens
ARFQTGGLDY

SEQ ID NO: 1906 - protein, 15 aa, Homo sapiens
TTDQGNSSHFYSFDY

SEQ ID NO: 1907 - protein, 11 aa, Homo sapiens
ARSPGTGTVDY

SEQ ID NO: 1908 - protein, 7 aa, Homo sapiens
ARGAGAI

SEQ ID NO: 1909 - protein, 8 aa, Homo sapiens
ARARYFDS

SEQ ID NO: 1910 - protein, 10 aa, Homo sapiens
AASIVATGAS

SEQ ID NO: 1911 - protein, 10 aa, Homo sapiens
ARDLNRNLDY

SEQ ID NO: 1912 - protein, 8 aa, Homo sapiens
AKEVTGTD

SEQ ID NO: 1913 - protein, 15 aa, Homo sapiens
ARDGDDNRPPDAYDM

SEQ ID NO: 1914 - protein, 12 aa, Homo sapiens
VRGGGSGWPFAY

SEQ ID NO: 1915 - protein, 14 aa, Homo sapiens
ARTIFGVVTDASDI

SEQ ID NO: 1916 - protein, 10 aa, Homo sapiens
ARDHGSTIDY

SEQ ID NO: 1917 - protein, 15 aa, Homo sapiens
AKGRSGGYDWYYFDY

SEQ ID NO: 1918 - protein, 11 aa, Homo sapiens
TTAVGHYGMDV

SEQ ID NO: 1919 - protein, 11 aa, Homo sapiens
ARDQGWLQFDY

SEQ ID NO: 1920 - protein, 13 aa, Homo sapiens
ARGGSAWYGGFDY

SEQ ID NO: 1921 - protein, 7 aa, Homo sapiens
ARGLLGD

SEQ ID NO: 1922 - protein, 14 aa, Homo sapiens
ARRGYSRSSDGMDV

SEQ ID NO: 1923 - protein, 9 aa, Homo sapiens
VRGAAGMDV

SEQ ID NO: 1924 - protein, 10 aa, Homo sapiens
TRGGGGHGDY

SEQ ID NO: 1925 - protein, 9 aa, Homo sapiens
ARGGELLNY

SEQ ID NO: 1926 - protein, 11 aa, Homo sapiens
ARAPILYYFDY

SEQ ID NO: 1927 - protein, 9 aa, Homo sapiens
VRDRRYFDL

SEQ ID NO: 1928 - protein, 12 aa, Homo sapiens
AGCGGDCYTVDH

SEQ ID NO: 1929 - protein, 9 aa, Homo sapiens
ARDPFREGC

SEQ ID NO: 1930 - protein, 13 aa, Homo sapiens
ARGSSGYDPNFDY

SEQ ID NO: 1931 - protein, 6 aa, Homo sapiens
ARNFEY

SEQ ID NO: 1932 - protein, 12 aa, Homo sapiens
ARGGDSRSVLHY

SEQ ID NO: 1933 - protein, 10 aa, Homo sapiens
ASGSGWLVDY

SEQ ID NO: 1934 - protein, 9 aa, Homo sapiens
ARLVHYFDY

SEQ ID NO: 1935 - protein, 12 aa, Homo sapiens
VRGTSGWSGIDY

SEQ ID NO: 1936 - protein, 5 aa, Homo sapiens
TNVDY

SEQ ID NO: 1937 - protein, 17 aa, Homo sapiens
AKKYHYGSGTYLYYFDY

SEQ ID NO: 1938 - protein, 12 aa, Homo sapiens
VRGGYGDSGRGY

SEQ ID NO: 1939 - protein, 8 aa, Homo sapiens
VGHGSSSA

SEQ ID NO: 1940 - protein, 8 aa, Homo sapiens
ARGGSLDF

SEQ ID NO: 1941 - protein, 10 aa, Homo sapiens
ARGRDSSLDF

SEQ ID NO: 1942 - protein, 10 aa, Homo sapiens
ARASSSSWSV

SEQ ID NO: 1943 - protein, 13 aa, Homo sapiens
ARGECTSTSCLDH

SEQ ID NO: 1944 - protein, 12 aa, Homo sapiens
ARGWSAGVHFEY

SEQ ID NO: 1945 - protein, 9 aa, Homo sapiens
ARDVGYMDV

SEQ ID NO: 1946 - protein, 12 aa, Homo sapiens
AKTHGSGWAFDY

SEQ ID NO: 1947 - protein, 8 aa, Homo sapiens
ARGDPFDF

SEQ ID NO: 1948 - protein, 7 aa, Homo sapiens
ADPPSGF

SEQ ID NO: 1949 - protein, 12 aa, Homo sapiens
ARDQGGPYYFDY

SEQ ID NO: 1950 - protein, 19 aa, Homo sapiens
ARDGGYCSGGGCYYYGMDV

SEQ ID NO: 1951 - protein, 14 aa, Homo sapiens
ARGTYSSGLNWFDP

SEQ ID NO: 1952 - protein, 6 aa, Homo sapiens
TDGMAV

SEQ ID NO: 1953 - protein, 13 aa, Homo sapiens
ARTDTSGREAFDI

SEQ ID NO: 1954 - protein, 19 aa, Homo sapiens
ARDCSGGSCYPQYYYGMDV

SEQ ID NO: 1955 - protein, 8 aa, Homo sapiens
ARENYFHP

SEQ ID NO: 1956 - protein, 14 aa, Homo sapiens
ARGPSSDWVNGLDV

SEQ ID NO: 1957 - protein, 8 aa, Homo sapiens
ARGQLLGY

SEQ ID NO: 1958 - protein, 17 aa, Homo sapiens
ARGPGCISTSCPYYFDY

SEQ ID NO: 1959 - protein, 9 aa, Homo sapiens
TRGHYSGPS

SEQ ID NO: 1960 - protein, 9 aa, Homo sapiens
ARGGWFFDL

SEQ ID NO: 1961 - protein, 15 aa, Homo sapiens
ARDVDTTSHYGWFDP

SEQ ID NO: 1962 - protein, 7 aa, Homo sapiens
ARGAGAY

SEQ ID NO: 1963 - protein, 12 aa, Homo sapiens
ARFGGSGWSLDY

SEQ ID NO: 1964 - protein, 8 aa, Homo sapiens
ANSRNFDY

SEQ ID NO: 1965 - protein, 14 aa, Homo sapiens
ARAIFGVVRDASDI

SEQ ID NO: 1966 - protein, 11 aa, Homo sapiens
ARDLVGATADY

SEQ ID NO: 1967 - protein, 10 aa, Homo sapiens
ARGSTNWYDP

SEQ ID NO: 1968 - protein, 12 aa, Homo sapiens
ARRRGGHDYFDS

SEQ ID NO: 1969 - protein, 8 aa, Homo sapiens
AKDRSFGY

SEQ ID NO: 1970 - protein, 8 aa, Homo sapiens
ARGVTSGF

SEQ ID NO: 1971 - protein, 10 aa, Homo sapiens
TTEYWGALNN

SEQ ID NO: 1972 - protein, 12 aa, Homo sapiens
ARGGMVQGDIDY

SEQ ID NO: 1973 - protein, 16 aa, Homo sapiens
AKDRGLGDDHGDYFDY

SEQ ID NO: 1974 - protein, 9 aa, Homo sapiens
ARLTNYFDY

SEQ ID NO: 1975 - protein, 12 aa, Homo sapiens
ARRGYSYGFFNY

SEQ ID NO: 1976 - protein, 11 aa, Homo sapiens
ARNLGWQQFDY

SEQ ID NO: 1977 - protein, 5 aa, Homo sapiens
TNYQY

SEQ ID NO: 1978 - protein, 10 aa, Homo sapiens
ARLGSGSCRD

SEQ ID NO: 1979 - protein, 5 aa, Homo sapiens
GRFDY

SEQ ID NO: 1980 - protein, 10 aa, Homo sapiens
HGSSWNWFDP

SEQ ID NO: 1981 - protein, 12 aa, Homo sapiens
ARGGGSGWPFAY

SEQ ID NO: 1982 - protein, 17 aa, Homo sapiens
AKDRYCSGGNCYSPFDY

SEQ ID NO: 1983 - protein, 10 aa, Homo sapiens
ARDDIGSYDC

SEQ ID NO: 1984 - protein, 10 aa, Homo sapiens
ARDPVGTPVY

SEQ ID NO: 1985 - protein, 8 aa, Homo sapiens
ARNRGISH

SEQ ID NO: 1986 - protein, 12 aa, Homo sapiens
VRGTNGWPGIDY

SEQ ID NO: 1987 - protein, 12 aa, Homo sapiens
ARDLRKGLYMDV

SEQ ID NO: 1988 - protein, 14 aa, Homo sapiens
ARDMFRGIPDYLDY

SEQ ID NO: 1989 - protein, 7 aa, Homo sapiens
ATGGLRN

SEQ ID NO: 1990 - protein, 11 aa, Homo sapiens
ARKLGNDAFDI

SEQ ID NO: 1991 - protein, 10 aa, Homo sapiens
ARSPYWYFDL

SEQ ID NO: 1992 - protein, 11 aa, Homo sapiens
ARRDQPGAFDI

SEQ ID NO: 1993 - protein, 10 aa, Homo sapiens
ARLVTHTSDY

SEQ ID NO: 1994 - protein, 14 aa, Homo sapiens
ARRGYSSSSDGMDV

SEQ ID NO: 1995 - protein, 7 aa, Homo sapiens
VRGHFAS

SEQ ID NO: 1996 - protein, 11 aa, Homo sapiens
ARVRGKGWFDP

SEQ ID NO: 1997 - protein, 7 aa, Homo sapiens
ARGRGDL

SEQ ID NO: 1998 - protein, 10 aa, Homo sapiens
ARDQGRGLDY

SEQ ID NO: 1999 - protein, 10 aa, Homo sapiens
ARGGLGAVDY

SEQ ID NO: 2000 - protein, 11 aa, Homo sapiens
ARDLSSGWFDP

SEQ ID NO: 2001 - protein, 6 aa, Homo sapiens
VRGVDL

SEQ ID NO: 2002 - protein, 10 aa, Homo sapiens
ARGRDYSFDY

SEQ ID NO: 2003 - protein, 8 aa, Homo sapiens
AKSGFMDV

SEQ ID NO: 2004 - protein, 14 aa, Homo sapiens
ARVRDSDGWFPFDY

SEQ ID NO: 2005 - protein, 12 aa, Homo sapiens
AHKSSAGGWFDP

SEQ ID NO: 2006 - protein, 15 aa, Homo sapiens
AREGHSSGRAGAFDV

SEQ ID NO: 2007 - protein, 19 aa, Homo sapiens
ARSYCSGGSCYTHYYGMDV

SEQ ID NO: 2008 - protein, 11 aa, Homo sapiens
ARDYYKGAFDI

SEQ ID NO: 2009 - protein, 7 aa, Homo sapiens
VKGHFAS

SEQ ID NO: 2010 - protein, 12 aa, Homo sapiens
ARDLYHFYGLDV

SEQ ID NO: 2011 - protein, 6 aa, Homo sapiens
LRDLFR

SEQ ID NO: 2012 - protein, 9 aa, Homo sapiens
ATGGGYPDY

SEQ ID NO: 2013 - protein, 8 aa, Homo sapiens
ARGGYFDY

SEQ ID NO: 2014 - protein, 9 aa, Homo sapiens
ARGVYHFDF

SEQ ID NO: 2015 - protein, 8 aa, Homo sapiens
VRGNIMDV

SEQ ID NO: 2016 - protein, 13 aa, Homo sapiens
ARDRGDGHSPPDY

SEQ ID NO: 2017 - protein, 8 aa, Homo sapiens
ARRIYMDV

SEQ ID NO: 2018 - protein, 11 aa, Homo sapiens
ARQGGTGAFDI

SEQ ID NO: 2019 - protein, 7 aa, Homo sapiens
ARGRGIS

SEQ ID NO: 2020 - protein, 9 aa, Homo sapiens
ARIDYPDDC

SEQ ID NO: 2021 - protein, 10 aa, Homo sapiens
ARGLAGAFDY

SEQ ID NO: 2022 - protein, 8 aa, Homo sapiens
VRGSAGSW

SEQ ID NO: 2023 - protein, 8 aa, Homo sapiens
ARGILFDY

SEQ ID NO: 2024 - protein, 8 aa, Homo sapiens
ARRNYGDY

SEQ ID NO: 2025 - protein, 11 aa, Homo sapiens
ARDLGWYGLDY

SEQ ID NO: 2026 - protein, 13 aa, Homo sapiens
AKDLRDLLQYFQH

SEQ ID NO: 2027 - protein, 8 aa, Homo sapiens
ARSALLDS

SEQ ID NO: 2028 - protein, 9 aa, Homo sapiens
ARGRSWVDS

SEQ ID NO: 2029 - protein, 14 aa, Homo sapiens
ARDMFQGVPDYFDL

SEQ ID NO: 2030 - protein, 13 aa, Homo sapiens
AKRGGDGWGAFDY

SEQ ID NO: 2031 - protein, 12 aa, Homo sapiens
ARRGDSHGMFDY

SEQ ID NO: 2032 - protein, 11 aa, Homo sapiens
ARDSMGGPFDY

SEQ ID NO: 2033 - protein, 13 aa, Homo sapiens
ARGGYFGSGPLDS

SEQ ID NO: 2034 - protein, 14 aa, Homo sapiens
ARHGDYYGSGRFDP

SEQ ID NO: 2035 - protein, 14 aa, Homo sapiens
VKGSSDGRPYYFDH

SEQ ID NO: 2036 - protein, 16 aa, Homo sapiens
ARDPSNTSGLYAYFDY

SEQ ID NO: 2037 - protein, 10 aa, Homo sapiens
ARELPKAFDI

SEQ ID NO: 2038 - protein, 11 aa, Homo sapiens
ARGPSGSYYDY

SEQ ID NO: 2039 - protein, 8 aa, Homo sapiens
ASGGDCDS

SEQ ID NO: 2040 - protein, 16 aa, Homo sapiens
AKAGCSGGNCYRPPDY

SEQ ID NO: 2041 - protein, 10 aa, Homo sapiens
ARDSRGAFDI

SEQ ID NO: 2042 - protein, 11 aa, Homo sapiens
AREGLMRATDY

SEQ ID NO: 2043 - protein, 18 aa, Homo sapiens
ARDGYCSGGRCYSGWFDP

SEQ ID NO: 2044 - protein, 13 aa, Homo sapiens
ARSRGYSAYEFDY

SEQ ID NO: 2045 - protein, 11 aa, Homo sapiens
ARGNGSYSLGY

SEQ ID NO: 2046 - protein, 11 aa, Homo sapiens
ATVLWPGGIDY

SEQ ID NO: 2047 - protein, 12 aa, Homo sapiens
ARRGGDSEWFDP

SEQ ID NO: 2048 - protein, 9 aa, Homo sapiens
ARGPTTFDY

SEQ ID NO: 2049 - protein, 10 aa, Homo sapiens
VRPRDHGFDD

SEQ ID NO: 2050 - protein, 13 aa, Homo sapiens
ARDPGTTYYYFDS

SEQ ID NO: 2051 - protein, 11 aa, Homo sapiens
ARSGYNWGFDY

SEQ ID NO: 2052 - protein, 11 aa, Homo sapiens
ARRLPYYGMDL

SEQ ID NO: 2053 - protein, 15 aa, Homo sapiens
AKDRWYSSGSDAFDI

SEQ ID NO: 2054 - protein, 13 aa, Homo sapiens
ARDHPVAGLYFDY

SEQ ID NO: 2055 - protein, 13 aa, Homo sapiens
AKGGATTRYYFDY

SEQ ID NO: 2056 - protein, 10 aa, Homo sapiens
AREGTNCFDY

SEQ ID NO: 2057 - protein, 8 aa, Homo sapiens
ARDLTYDY

SEQ ID NO: 2058 - protein, 9 aa, Homo sapiens
VRAGNAFDV

SEQ ID NO: 2059 - protein, 9 aa, Homo sapiens
AKQGREPDY

SEQ ID NO: 2060 - protein, 8 aa, Homo sapiens
ARHKGLEY

SEQ ID NO: 2061 - protein, 17 aa, Homo sapiens
ARGPTYCGGDCYYYFDY

SEQ ID NO: 2062 - protein, 9 aa, Homo sapiens
AKGGSYMDY

SEQ ID NO: 2063 - protein, 7 aa, Homo sapiens
AKGGGGS

SEQ ID NO: 2064 - protein, 6 aa, Homo sapiens
ARKGDH

SEQ ID NO: 2065 - protein, 10 aa, Homo sapiens
ATNINWCFDS

SEQ ID NO: 2066 - protein, 13 aa, Homo sapiens
AKGPGTGYSGMDV

SEQ ID NO: 2067 - protein, 8 aa, Homo sapiens
ARSARGDY

SEQ ID NO: 2068 - protein, 12 aa, Homo sapiens
ARGTVTTPGMDV

SEQ ID NO: 2069 - protein, 11 aa, Homo sapiens
ARHVSHTAMDY

SEQ ID NO: 2070 - protein, 6 aa, Homo sapiens
ARRGEY

SEQ ID NO: 2071 - protein, 15 aa, Homo sapiens
ASDGVGVVPGDVFDI

SEQ ID NO: 2072 - protein, 11 aa, Homo sapiens
TRGPSGSYFDY

SEQ ID NO: 2073 - protein, 15 aa, Homo sapiens
ARVPPIVGTTTVFDY

SEQ ID NO: 2074 - protein, 10 aa, Homo sapiens
ARGGWYYFDS

SEQ ID NO: 2075 - protein, 12 aa, Homo sapiens
AKEIAVADFFDY

SEQ ID NO: 2076 - protein, 13 aa, Homo sapiens
ARQDGDAKYYFDY

SEQ ID NO: 2077 - protein, 14 aa, Homo sapiens
ARESRQQLVSWFDP

SEQ ID NO: 2078 - protein, 12 aa, Homo sapiens
AREKPYGDCFDY

SEQ ID NO: 2079 - protein, 9 aa, Homo sapiens
ATRGSNFDY

SEQ ID NO: 2080 - protein, 13 aa, Homo sapiens
AGVDNSGWYCFDY

SEQ ID NO: 2081 - protein, 9 aa, Homo sapiens
ARYSSGYDY

SEQ ID NO: 2082 - protein, 10 aa, Homo sapiens
TTDPPGASDY

SEQ ID NO: 2083 - protein, 10 aa, Homo sapiens
ARDFQWAFDH

SEQ ID NO: 2084 - protein, 8 aa, Homo sapiens
ARDRGGSS

SEQ ID NO: 2085 - protein, 9 aa, Homo sapiens
VRDSYGLDY

SEQ ID NO: 2086 - protein, 9 aa, Homo sapiens
ARGSGKLDY

SEQ ID NO: 2087 - protein, 10 aa, Homo sapiens
ARDHQWGFDY

SEQ ID NO: 2088 - protein, 14 aa, Homo sapiens
ARELVVGPAEYFQH

SEQ ID NO: 2089 - protein, 10 aa, Homo sapiens
TTRVRTTNDH

SEQ ID NO: 2090 - protein, 14 aa, Homo sapiens
AKGRGSSSWYFFDY

SEQ ID NO: 2091 - protein, 11 aa, Homo sapiens
ARGPMLGWFDP

SEQ ID NO: 2092 - protein, 13 aa, Homo sapiens
ARDHVAPGIIFDN

SEQ ID NO: 2093 - protein, 12 aa, Homo sapiens
ARDLSYGSGSYE

SEQ ID NO: 2094 - protein, 8 aa, Homo sapiens
ARRHRPDY

SEQ ID NO: 2095 - protein, 14 aa, Homo sapiens
AKDISGSGSYYFDY

SEQ ID NO: 2096 - protein, 15 aa, Homo sapiens
AKDGAIAAAAYYFDY

SEQ ID NO: 2097 - protein, 9 aa, Homo sapiens
ARKDSSGYY

SEQ ID NO: 2098 - protein, 11 aa, Homo sapiens
ARRYTSGWYNY

SEQ ID NO: 2099 - protein, 9 aa, Homo sapiens
NTDSLVANY

SEQ ID NO: 2100 - protein, 14 aa, Homo sapiens
AKARTGSGWYYFDY

SEQ ID NO: 2101 - protein, 10 aa, Homo sapiens
ARGLQYAMDV

SEQ ID NO: 2102 - protein, 20 aa, Homo sapiens
ARDRYCSGGGCPDYYYGMDV

SEQ ID NO: 2103 - protein, 10 aa, Homo sapiens
AKGSGGSYDY

SEQ ID NO: 2104 - protein, 10 aa, Homo sapiens
VTGGAYFYEY

SEQ ID NO: 2105 - protein, 9 aa, Homo sapiens
ARGVTTFDY

SEQ ID NO: 2106 - protein, 13 aa, Homo sapiens
ARRATVTYYGMDV

SEQ ID NO: 2107 - protein, 13 aa, Homo sapiens
AKRAYDSSGYIDY

SEQ ID NO: 2108 - protein, 13 aa, Homo sapiens
ARVFTSGYGVFDY

SEQ ID NO: 2109 - protein, 12 aa, Homo sapiens
AKRGAAAGPFDY

SEQ ID NO: 2110 - protein, 7 aa, Homo sapiens
AAGRGGY

SEQ ID NO: 2111 - protein, 11 aa, Homo sapiens
AKDFHDAAADY

SEQ ID NO: 2112 - protein, 10 aa, Homo sapiens
TRWTHWYFDL

SEQ ID NO: 2113 - protein, 15 aa, Homo sapiens
ATVFYGDYARSGMDV

SEQ ID NO: 2114 - protein, 15 aa, Homo sapiens
ARHRGGSDWQNWFDP

SEQ ID NO: 2115 - protein, 12 aa, Homo sapiens
ARYTSSWSTFDY

SEQ ID NO: 2116 - protein, 25 aa, Homo sapiens
ARIPLGSCSSTICYHPTYYYSGMDV

SEQ ID NO: 2117 - protein, 15 aa, Homo sapiens
ARDLYGSGWYNYFDP

SEQ ID NO: 2118 - protein, 6 aa, Homo sapiens
ARSVDF

SEQ ID NO: 2119 - protein, 11 aa, Homo sapiens
AKGAGSDSGRY

SEQ ID NO: 2120 - protein, 11 aa, Homo sapiens
VRGGYYGSFDY

SEQ ID NO: 2121 - protein, 10 aa, Homo sapiens
VKSRNYYFDY

SEQ ID NO: 2122 - protein, 14 aa, Homo sapiens
ARPATVTTPNWFEP

SEQ ID NO: 2123 - protein, 15 aa, Homo sapiens
AKYCSGGGCYSGLDF

SEQ ID NO: 2124 - protein, 6 aa, Homo sapiens
ARRGDH

SEQ ID NO: 2125 - protein, 14 aa, Homo sapiens
AREPNIAVVTHFDY

SEQ ID NO: 2126 - protein, 11 aa, Homo sapiens
AKLITGWQFDS

SEQ ID NO: 2127 - protein, 9 aa, Homo sapiens
ARGNYWFDS

SEQ ID NO: 2128 - protein, 9 aa, Homo sapiens
SWFGELWYY

SEQ ID NO: 2129 - protein, 12 aa, Homo sapiens
VRRGDSYGIFDY

SEQ ID NO: 2130 - protein, 10 aa, Homo sapiens
ARDHFYAFDL

SEQ ID NO: 2131 - protein, 11 aa, Homo sapiens
AREVTSSWFDY

SEQ ID NO: 2132 - protein, 10 aa, Homo sapiens
ARKDYDGLDY

SEQ ID NO: 2133 - protein, 6 aa, Homo sapiens
ARGYDL

SEQ ID NO: 2134 - protein, 10 aa, Homo sapiens
ARYGGPDLDY

SEQ ID NO: 2135 - protein, 10 aa, Homo sapiens
ARAIYDAFDI

SEQ ID NO: 2136 - protein, 12 aa, Homo sapiens
ARGYGDYHPLDY

SEQ ID NO: 2137 - protein, 11 aa, Homo sapiens
GKDISAGGLDV

SEQ ID NO: 2138 - protein, 7 aa, Homo sapiens
MRDYGEP

SEQ ID NO: 2139 - protein, 8 aa, Homo sapiens
VRIYGSGT

SEQ ID NO: 2140 - protein, 12 aa, Homo sapiens
ARGSGYSYSYNY

SEQ ID NO: 2141 - protein, 15 aa, Homo sapiens
ARDRRYSSSWYAFDI

SEQ ID NO: 2142 - protein, 7 aa, Homo sapiens
ANRAFDY

SEQ ID NO: 2143 - protein, 8 aa, Homo sapiens
ARGRSFDQ

SEQ ID NO: 2144 - protein, 14 aa, Homo sapiens
ARRGNSSGWYGGDY

SEQ ID NO: 2145 - protein, 9 aa, Homo sapiens
ARHGGAPDY

SEQ ID NO: 2146 - protein, 9 aa, Homo sapiens
TKGGTTLGY

SEQ ID NO: 2147 - protein, 9 aa, Homo sapiens
AKGSGAMDV

SEQ ID NO: 2148 - protein, 16 aa, Homo sapiens
ARAGYCSSTSCGGFDY

SEQ ID NO: 2149 - protein, 11 aa, Homo sapiens
AKEYSSGLTDY

SEQ ID NO: 2150 - protein, 10 aa, Homo sapiens
ARDANSLFDY

SEQ ID NO: 2151 - protein, 11 aa, Homo sapiens
ARQPGSWYFDV

SEQ ID NO: 2152 - protein, 15 aa, Homo sapiens
ARIYDYGGRHYGMDV

SEQ ID NO: 2153 - protein, 8 aa, Homo sapiens
ARSMSFDY

SEQ ID NO: 2154 - protein, 8 aa, Homo sapiens
ARSRSCDY

SEQ ID NO: 2155 - protein, 9 aa, Homo sapiens
VRGSGYYIY

SEQ ID NO: 2156 - protein, 12 aa, Homo sapiens
TRPRGAGNWLDP

SEQ ID NO: 2157 - protein, 8 aa, Homo sapiens
ARGERLDT

SEQ ID NO: 2158 - protein, 8 aa, Homo sapiens
ANGSWFDP

SEQ ID NO: 2159 - protein, 11 aa, Homo sapiens
ARSGSGGSLDY

SEQ ID NO: 2160 - protein, 12 aa, Homo sapiens
ARDDGNTWLLDY

SEQ ID NO: 2161 - protein, 7 aa, Homo sapiens
ARHGGDY

SEQ ID NO: 2162 - protein, 16 aa, Homo sapiens
ARGGISSWTRPYFFDY

SEQ ID NO: 2163 - protein, 5 aa, Homo sapiens
AGLWQ

SEQ ID NO: 2164 - protein, 8 aa, Homo sapiens
VTDDDGAY

SEQ ID NO: 2165 - protein, 6 aa, Homo sapiens
ASGTAH

SEQ ID NO: 2166 - protein, 15 aa, Homo sapiens
ARHDVGYSTSWFLDS

SEQ ID NO: 2167 - protein, 10 aa, Homo sapiens
ARVAASGLDY

SEQ ID NO: 2168 - protein, 10 aa, Homo sapiens
VKGSSWGGDY

SEQ ID NO: 2169 - protein, 10 aa, Homo sapiens
ARRDGGWFDP

SEQ ID NO: 2170 - protein, 16 aa, Homo sapiens
ARGRLPSHYYYYGMDV

SEQ ID NO: 2171 - protein, 11 aa, Homo sapiens
ARPYSDHAFDI

SEQ ID NO: 2172 - protein, 11 aa, Homo sapiens
ARDWRVYYFDY

SEQ ID NO: 2173 - protein, 15 aa, Homo sapiens
ARDWGISGWYNWFDP

SEQ ID NO: 2174 - protein, 13 aa, Homo sapiens
ARHYASGTYPLDH

SEQ ID NO: 2175 - protein, 9 aa, Homo sapiens
ASSLNYYSW

SEQ ID NO: 2176 - protein, 6 aa, Homo sapiens
VADWAV

SEQ ID NO: 2177 - protein, 19 aa, Homo sapiens
ARETYGSGSYFDYYYGMDV

SEQ ID NO: 2178 - protein, 12 aa, Homo sapiens
ARFGVTGDGSDI

SEQ ID NO: 2179 - protein, 14 aa, Homo sapiens
ARERCSTNSCYLNY

SEQ ID NO: 2180 - protein, 12 aa, Homo sapiens
ARDGGYGTPFDY

SEQ ID NO: 2181 - protein, 12 aa, Homo sapiens
STNFYGSGPFDY

SEQ ID NO: 2182 - protein, 14 aa, Homo sapiens
ARAGYIYGADAFDI

SEQ ID NO: 2183 - protein, 7 aa, Homo sapiens
ARGDGLD

SEQ ID NO: 2184 - protein, 13 aa, Homo sapiens
ARHWSSGWDYFDY

SEQ ID NO: 2185 - protein, 12 aa, Homo sapiens
ARGWLRSGGFAY

SEQ ID NO: 2186 - protein, 10 aa, Homo sapiens
ARVLGNYLDY

SEQ ID NO: 2187 - protein, 9 aa, Homo sapiens
ARGGTSWGY

SEQ ID NO: 2188 - protein, 11 aa, Homo sapiens
AREGSGWTIDY

SEQ ID NO: 2189 - protein, 11 aa, Homo sapiens
ARLVGWGRFDA

SEQ ID NO: 2190 - protein, 13 aa, Homo sapiens
VRSNSSSWHYFDY

SEQ ID NO: 2191 - protein, 10 aa, Homo sapiens
ARDLSGRDDF

SEQ ID NO: 2192 - protein, 15 aa, Homo sapiens
ARGYRDSSGREYFQH

SEQ ID NO: 2193 - protein, 14 aa, Homo sapiens
VKGSGSSRPYYFDY

SEQ ID NO: 2194 - protein, 10 aa, Homo sapiens
ARERDRAFDI

SEQ ID NO: 2195 - protein, 12 aa, Homo sapiens
VRGSNDWNGVDY

SEQ ID NO: 2196 - protein, 13 aa, Homo sapiens
ARAGAEVTSHFDY

SEQ ID NO: 2197 - protein, 10 aa, Homo sapiens
ARDNVGALDY

SEQ ID NO: 2198 - protein, 13 aa, Homo sapiens
ATDLPIAGAGFDY

SEQ ID NO: 2199 - protein, 9 aa, Homo sapiens
TRGYNGLDV

SEQ ID NO: 2200 - protein, 8 aa, Homo sapiens
VGWGSSSD

SEQ ID NO: 2201 - protein, 9 aa, Homo sapiens
ARGWEYFDF

SEQ ID NO: 2202 - protein, 15 aa, Homo sapiens
ARGPNWNDGPYYFDY

SEQ ID NO: 2203 - protein, 9 aa, Homo sapiens
TRGTTPPDY

SEQ ID NO: 2204 - protein, 10 aa, Homo sapiens
ARRTGGQKDY

SEQ ID NO: 2205 - protein, 10 aa, Homo sapiens
ARSVEWGYDY

SEQ ID NO: 2206 - protein, 11 aa, Homo sapiens
ARDRGGSYPDY

SEQ ID NO: 2207 - protein, 10 aa, Homo sapiens
ARGGDYDLDP

SEQ ID NO: 2208 - protein, 14 aa, Homo sapiens
ARGDYDSSGYYPDY

SEQ ID NO: 2209 - protein, 9 aa, Homo sapiens
ARSHYGMDV

SEQ ID NO: 2210 - protein, 8 aa, Homo sapiens
ARGRGVNV

SEQ ID NO: 2211 - protein, 16 aa, Homo sapiens
AKPKSSDWDYHYGMDV

SEQ ID NO: 2212 - protein, 7 aa, Homo sapiens
ATLNFDY

SEQ ID NO: 2213 - protein, 14 aa, Homo sapiens
ARLGVIAAAGTCDY

SEQ ID NO: 2214 - protein, 11 aa, Homo sapiens
ARGLGSSWFYH

SEQ ID NO: 2215 - protein, 11 aa, Homo sapiens
ARHHGPTGPEY

SEQ ID NO: 2216 - protein, 14 aa, Homo sapiens
ARETVDCGGDCLDY

SEQ ID NO: 2217 - protein, 10 aa, Homo sapiens
ARDKGYSQDY

SEQ ID NO: 2218 - protein, 13 aa, Homo sapiens
ARGSDSYGYWGDY

SEQ ID NO: 2219 - protein, 12 aa, Homo sapiens
ARWRWQQSEFDF

SEQ ID NO: 2220 - protein, 11 aa, Homo sapiens
TTVGDFYGSGY

SEQ ID NO: 2221 - protein, 9 aa, Homo sapiens
ARGSGGPDY

SEQ ID NO: 2222 - protein, 15 aa, Homo sapiens
AKDRYCTGGICPVDY

SEQ ID NO: 2223 - protein, 17 aa, Homo sapiens
AKDRSPGFGELLYPFDY

SEQ ID NO: 2224 - protein, 10 aa, Homo sapiens
ARDRAWAMDV

SEQ ID NO: 2225 - protein, 10 aa, Homo sapiens
TRAIAAAGNY

SEQ ID NO: 2226 - protein, 9 aa, Homo sapiens
AREDAFFDY

SEQ ID NO: 2227 - protein, 9 aa, Homo sapiens
ARGRTSIDY

SEQ ID NO: 2228 - protein, 13 aa, Homo sapiens
ARDGGRSWGIFDY

SEQ ID NO: 2229 - protein, 15 aa, Homo sapiens
ARPIMTVPGTRWFDP

SEQ ID NO: 2230 - protein, 6 aa, Homo sapiens
ANARAY

SEQ ID NO: 2231 - protein, 15 aa, Homo sapiens
ARGRRYSGRHDAFDI

SEQ ID NO: 2232 - protein, 10 aa, Homo sapiens
ARDYAGSPHS

SEQ ID NO: 2233 - protein, 12 aa, Homo sapiens
ARDSGIAGADDH

SEQ ID NO: 2234 - protein, 8 aa, Homo sapiens
ASGDWFDY

SEQ ID NO: 2235 - protein, 8 aa, Homo sapiens
ARGQDIDY

SEQ ID NO: 2236 - protein, 14 aa, Homo sapiens
ASLWFGDFYYGMDV

SEQ ID NO: 2237 - protein, 10 aa, Homo sapiens
ARAWEQFFDY

SEQ ID NO: 2238 - protein, 12 aa, Homo sapiens
AKRDLGHGVIDY

SEQ ID NO: 2239 - protein, 10 aa, Homo sapiens
ARAVNWGYDY

SEQ ID NO: 2240 - protein, 11 aa, Homo sapiens
ARSYGEYYFDY

SEQ ID NO: 2241 - protein, 18 aa, Homo sapiens
ATGGGGVVVAGTGGWFDP

SEQ ID NO: 2242 - protein, 10 aa, Homo sapiens
VRDHGWAFDY

SEQ ID NO: 2243 - protein, 14 aa, Homo sapiens
AREEYSSGWYYFDY

SEQ ID NO: 2244 - protein, 8 aa, Homo sapiens
ASWVGRDH

SEQ ID NO: 2245 - protein, 11 aa, Homo sapiens
SRDPRNKGLDP

SEQ ID NO: 2246 - protein, 6 aa, Homo sapiens
VKFAGY

SEQ ID NO: 2247 - protein, 12 aa, Homo sapiens
AREGGYNNGLDV

SEQ ID NO: 2248 - protein, 9 aa, Homo sapiens
ARGQLVFDS

SEQ ID NO: 2249 - protein, 17 aa, Homo sapiens
ARGGKFYYDTSGYPEDF

SEQ ID NO: 2250 - protein, 10 aa, Homo sapiens
TSRITTTNDY

SEQ ID NO: 2251 - protein, 10 aa, Homo sapiens
ARGGGLPPGE

SEQ ID NO: 2252 - protein, 13 aa, Homo sapiens
ARGGRDSSWYWRD

SEQ ID NO: 2253 - protein, 11 aa, Homo sapiens
IIGPKHYGMDV

SEQ ID NO: 2254 - protein, 12 aa, Homo sapiens
TRRGVGATSPDY

SEQ ID NO: 2255 - protein, 11 aa, Homo sapiens
ARGRWSPTFDI

SEQ ID NO: 2256 - protein, 11 aa, Homo sapiens
VREFVGGHFDY

SEQ ID NO: 2257 - protein, 7 aa, Homo sapiens
AGNLMDV

SEQ ID NO: 2258 - protein, 11 aa, Homo sapiens
GRGDFYYGVDV

SEQ ID NO: 2259 - protein, 14 aa, Homo sapiens
ARDGQQATPYAMDV

SEQ ID NO: 2260 - protein, 12 aa, Homo sapiens
ARDAGASGPEDY

SEQ ID NO: 2261 - protein, 9 aa, Homo sapiens
ASGGHYFGS

SEQ ID NO: 2262 - protein, 12 aa, Homo sapiens
AREGAVAGDFDY

SEQ ID NO: 2263 - protein, 12 aa, Homo sapiens
ARNPAFTGDFDP

SEQ ID NO: 2264 - protein, 16 aa, Homo sapiens
ARDFGDDTTGYYGMDV

SEQ ID NO: 2265 - protein, 10 aa, Homo sapiens
ARDPFQPWGH

SEQ ID NO: 2266 - protein, 13 aa, Homo sapiens
AKAYSSSWYYFDF

SEQ ID NO: 2267 - protein, 10 aa, Homo sapiens
ARGTDRAMDV

SEQ ID NO: 2268 - protein, 12 aa, Homo sapiens
GRRLAAAGLFDY

SEQ ID NO: 2269 - protein, 14 aa, Homo sapiens
ARAGYGDYVGYFDY

SEQ ID NO: 2270 - protein, 10 aa, Homo sapiens
AREFRSSPDY

SEQ ID NO: 2271 - protein, 15 aa, Homo sapiens
ARIMDYGDRHYGMDV

SEQ ID NO: 2272 - protein, 14 aa, Homo sapiens
AREYCSGGSCHLDY

SEQ ID NO: 2273 - protein, 7 aa, Homo sapiens
ARDGFDI

SEQ ID NO: 2274 - protein, 19 aa, Homo sapiens
ARYGCTGGVCHSDYFGMDV

SEQ ID NO: 2275 - protein, 9 aa, Homo sapiens
VRSPRLSDY

SEQ ID NO: 2276 - protein, 16 aa, Homo sapiens
TKEVGATGLYYYGMDV

SEQ ID NO: 2277 - protein, 14 aa, Homo sapiens
ARIYGDTPPWYFDL

SEQ ID NO: 2278 - protein, 18 aa, Homo sapiens
ARDRYCSGGSCFDWYFDL

SEQ ID NO: 2279 - protein, 14 aa, Homo sapiens
AKDDYGDYFDAFEI

SEQ ID NO: 2280 - protein, 14 aa, Homo sapiens
VKDRYASGWGYFDY

SEQ ID NO: 2281 - protein, 15 aa, Homo sapiens
ARDVDTSSHFGRFDP

SEQ ID NO: 2282 - protein, 13 aa, Homo sapiens
AREATFTAYNFDY

SEQ ID NO: 2283 - protein, 16 aa, Homo sapiens
TTGGPLPHDSSWSFDF

SEQ ID NO: 2284 - protein, 11 aa, Homo sapiens
TTGSGLYSPDY

SEQ ID NO: 2285 - protein, 14 aa, Homo sapiens
ARSNDFGIYNLFDP

SEQ ID NO: 2286 - protein, 10 aa, Homo sapiens
ARLDSRGYSY

SEQ ID NO: 2287 - protein, 10 aa, Homo sapiens
ARSTRSSGDY

SEQ ID NO: 2288 - protein, 14 aa, Homo sapiens
ASLWFGDFYYGMGV

SEQ ID NO: 2289 - protein, 13 aa, Homo sapiens
ARVLDPRYNYFDP

SEQ ID NO: 2290 - protein, 14 aa, Homo sapiens
AKDLGLGYNATFDH

SEQ ID NO: 2291 - protein, 11 aa, Homo sapiens
ANGPYITYFDN

SEQ ID NO: 2292 - protein, 11 aa, Homo sapiens
ARAGYSNGFDY

SEQ ID NO: 2293 - protein, 10 aa, Homo sapiens
ARDFYRVFDS

SEQ ID NO: 2294 - protein, 14 aa, Homo sapiens
ARGVTMSTITPFGS

SEQ ID NO: 2295 - protein, 19 aa, Homo sapiens
ARVLGFYDRGYLLNYYFDY

SEQ ID NO: 2296 - protein, 12 aa, Homo sapiens
ARVGYTSSSWDY

SEQ ID NO: 2297 - protein, 9 aa, Homo sapiens
ARDQLPDPY

SEQ ID NO: 2298 - protein, 11 aa, Homo sapiens
ARRDYRTWFDP

SEQ ID NO: 2299 - protein, 9 aa, Homo sapiens
ARRGGGFAY

SEQ ID NO: 2300 - protein, 16 aa, Homo sapiens
AGAVVVTAMDYWYFDL

SEQ ID NO: 2301 - protein, 9 aa, Homo sapiens
VRATSGFDY

SEQ ID NO: 2302 - protein, 14 aa, Homo sapiens
AAETYSGSCCWFDP

SEQ ID NO: 2303 - protein, 10 aa, Homo sapiens
ARGGTYSFDY

SEQ ID NO: 2304 - protein, 10 aa, Homo sapiens
ARDSMGSYDY

SEQ ID NO: 2305 - protein, 9 aa, Homo sapiens
ATGRVGRDY

SEQ ID NO: 2306 - protein, 14 aa, Homo sapiens
ARDRGYSYGYWFDP

SEQ ID NO: 2307 - protein, 10 aa, Homo sapiens
ARDRDWTLDY

SEQ ID NO: 2308 - protein, 12 aa, Homo sapiens
ARSREGYNLLDY

SEQ ID NO: 2309 - protein, 11 aa, Homo sapiens
AGGYYYYGMDV

SEQ ID NO: 2310 - protein, 11 aa, Homo sapiens
ARYKAATGTDY

SEQ ID NO: 2311 - protein, 8 aa, Homo sapiens
TRTNNLDY

SEQ ID NO: 2312 - protein, 15 aa, Homo sapiens
VRHFRVGATLSWFDP

SEQ ID NO: 2313 - protein, 13 aa, Homo sapiens
VRRPLRGQDWFDP

SEQ ID NO: 2314 - protein, 12 aa, Homo sapiens
ARGHYDSSAFDY

SEQ ID NO: 2315 - protein, 13 aa, Homo sapiens
ARPRYFDLGYFDS

SEQ ID NO: 2316 - protein, 14 aa, Homo sapiens
AKGLGYYYYYGLDV

SEQ ID NO: 2317 - protein, 10 aa, Homo sapiens
ATHNSWRFDY

SEQ ID NO: 2318 - protein, 8 aa, Homo sapiens
TRGYHLDY

SEQ ID NO: 2319 - protein, 9 aa, Homo sapiens
ARGLRTVDY

SEQ ID NO: 2320 - protein, 22 aa, Homo sapiens
ARHGGGSYYDILTGYSLGAFDI

SEQ ID NO: 2321 - protein, 10 aa, Homo sapiens
ARDLYYGMDV

SEQ ID NO: 2322 - protein, 12 aa, Homo sapiens
ARERPGTYYFDY

SEQ ID NO: 2323 - protein, 14 aa, Homo sapiens
ARGSIAASGWYFDY

SEQ ID NO: 2324 - protein, 8 aa, Homo sapiens
ARGSAGDY

SEQ ID NO: 2325 - protein, 11 aa, Homo sapiens
ARRYTSGYYDY

SEQ ID NO: 2326 - protein, 12 aa, Homo sapiens
ARDLVATGAFDI

SEQ ID NO: 2327 - protein, 11 aa, Homo sapiens
ARRGSSGYYDY

SEQ ID NO: 2328 - protein, 8 aa, Homo sapiens
ARIGYDSG

SEQ ID NO: 2329 - protein, 14 aa, Homo sapiens
AKDRDDHGDYCFDY

SEQ ID NO: 2330 - protein, 16 aa, Homo sapiens
ATDWGSGTYYVRAFDL

SEQ ID NO: 2331 - protein, 15 aa, Homo sapiens
AKDEGQYSGYGNFDY

SEQ ID NO: 2332 - protein, 7 aa, Homo sapiens
VGASLDF

SEQ ID NO: 2333 - protein, 8 aa, Homo sapiens
ARLRYHDY

SEQ ID NO: 2334 - protein, 6 aa, Homo sapiens
AKTLRD

SEQ ID NO: 2335 - protein, 12 aa, Homo sapiens
AKDIITIDAFDI

SEQ ID NO: 2336 - protein, 11 aa, Homo sapiens
AGGKQWLAFDL

SEQ ID NO: 2337 - protein, 19 aa, Homo sapiens
ARVAYYYDSSGYYKYYFDY

SEQ ID NO: 2338 - protein, 13 aa, Homo sapiens
AKGDTAMVYYFDY

SEQ ID NO: 2339 - protein, 12 aa, Homo sapiens
AHNDYGDYVFDY

SEQ ID NO: 2340 - protein, 11 aa, Homo sapiens
VKDHGRAENDY

SEQ ID NO: 2341 - protein, 7 aa, Homo sapiens
ASRRYDY

SEQ ID NO: 2342 - protein, 9 aa, Homo sapiens
TTGHGYSPY

SEQ ID NO: 2343 - protein, 7 aa, Homo sapiens
ARGGLQH

SEQ ID NO: 2344 - protein, 9 aa, Homo sapiens
ARGRATFDP

SEQ ID NO: 2345 - protein, 6 aa, Homo sapiens
VRTFDS

SEQ ID NO: 2346 - protein, 8 aa, Homo sapiens
VKEGGFDP

SEQ ID NO: 2347 - protein, 8 aa, Homo sapiens
VRGGGMDV

SEQ ID NO: 2348 - protein, 11 aa, Homo sapiens
ARHQWRNWFDP

SEQ ID NO: 2349 - protein, 9 aa, Homo sapiens
VRDNSGLDY

SEQ ID NO: 2350 - protein, 10 aa, Homo sapiens
ARGGGHDHDY

SEQ ID NO: 2351 - protein, 13 aa, Homo sapiens
ARARGYSYGYSDF

SEQ ID NO: 2352 - protein, 10 aa, Homo sapiens
ARGSGSWYLY

SEQ ID NO: 2353 - protein, 8 aa, Homo sapiens
ARGRAHEY

SEQ ID NO: 2354 - protein, 12 aa, Homo sapiens
ARLNSGTYSFDY

SEQ ID NO: 2355 - protein, 13 aa, Homo sapiens
ARRLSSYYYGMDV

SEQ ID NO: 2356 - protein, 11 aa, Homo sapiens
ARVGGSWYFDL

SEQ ID NO: 2357 - protein, 13 aa, Homo sapiens
ARDKGGAPDTFDI

SEQ ID NO: 2358 - protein, 12 aa, Homo sapiens
ARHYTSGWDFDY

SEQ ID NO: 2359 - protein, 13 aa, Homo sapiens
TRGRRDYYYGMDV

SEQ ID NO: 2360 - protein, 12 aa, Homo sapiens
ARGWIQLWPLDN

SEQ ID NO: 2361 - protein, 12 aa, Homo sapiens
TTVSGYYGAFDH

SEQ ID NO: 2362 - protein, 14 aa, Homo sapiens
ARSRGGNYRDAFDI

SEQ ID NO: 2363 - protein, 7 aa, Homo sapiens
AWGWGAS

SEQ ID NO: 2364 - protein, 18 aa, Homo sapiens
ARGWVGSYIYYYYYGMDV

SEQ ID NO: 2365 - protein, 12 aa, Homo sapiens
ARGYGPGGCLEY

SEQ ID NO: 2366 - protein, 16 aa, Homo sapiens
VRDLRKDYYHYYGMDV

SEQ ID NO: 2367 - protein, 12 aa, Homo sapiens
ARGGYGGYDFDN

SEQ ID NO: 2368 - protein, 14 aa, Homo sapiens
ARQSCSGGSCPIDY

SEQ ID NO: 2369 - protein, 9 aa, Homo sapiens
VKGRDYGHY

SEQ ID NO: 2370 - protein, 12 aa, Homo sapiens
ARRYSSGWLFDF

SEQ ID NO: 2371 - protein, 8 aa, Homo sapiens
AKAAVPDY

SEQ ID NO: 2372 - protein, 8 aa, Homo sapiens
ARDHYMDV

SEQ ID NO: 2373 - protein, 7 aa, Homo sapiens
VRGHMDV

SEQ ID NO: 2374 - protein, 7 aa, Homo sapiens
VRGHMAV

SEQ ID NO: 2375 - protein, 11 aa, Homo sapiens
ARGTSMVRGVY

SEQ ID NO: 2376 - protein, 5 aa, Homo sapiens
STFNY

SEQ ID NO: 2377 - protein, 14 aa, Homo sapiens
AKCAFSNGNDALDI

SEQ ID NO: 2378 - protein, 10 aa, Homo sapiens
ARSVEWGLDY

SEQ ID NO: 2379 - protein, 11 aa, Homo sapiens
AKDRSGVAADY

SEQ ID NO: 2380 - protein, 9 aa, Homo sapiens
TRPTVATNS

SEQ ID NO: 2381 - protein, 7 aa, Homo sapiens
ARDSGGY

SEQ ID NO: 2382 - protein, 9 aa, Homo sapiens
ARMWNYEDY

SEQ ID NO: 2383 - protein, 11 aa, Homo sapiens
ARGGTYRPFDY

SEQ ID NO: 2384 - protein, 12 aa, Homo sapiens
ARDHSGYGYFDS

SEQ ID NO: 2385 - protein, 7 aa, Homo sapiens
ATGDCAS

SEQ ID NO: 2386 - protein, 8 aa, Homo sapiens
ATNWNYGY

SEQ ID NO: 2387 - protein, 13 aa, Homo sapiens
ARAATTTVGWFDP

SEQ ID NO: 2388 - protein, 13 aa, Homo sapiens
ARDRRYPDDVFDI

SEQ ID NO: 2389 - protein, 9 aa, Homo sapiens
ARGRGWHDY

SEQ ID NO: 2390 - protein, 11 aa, Homo sapiens
VRDRDGGAFDI

SEQ ID NO: 2391 - protein, 11 aa, Homo sapiens
ATTSITGTGDY

SEQ ID NO: 2392 - protein, 8 aa, Homo sapiens
ATGGDYDN

SEQ ID NO: 2393 - protein, 16 aa, Homo sapiens
AKESPYSRSREYYFDY

SEQ ID NO: 2394 - protein, 11 aa, Homo sapiens
VRDRAYSTFDY

SEQ ID NO: 2395 - protein, 11 aa, Homo sapiens
ARRVGNSKFDY

SEQ ID NO: 2396 - protein, 9 aa, Homo sapiens
ARDGTPIDY

SEQ ID NO: 2397 - protein, 14 aa, Homo sapiens
AKDPLSWGTIYFDY

SEQ ID NO: 2398 - protein, 12 aa, Homo sapiens
ARRGDGNSYYDY

SEQ ID NO: 2399 - protein, 14 aa, Homo sapiens
ARRDCTGSSCYFVY

SEQ ID NO: 2400 - protein, 14 aa, Homo sapiens
ARGTSGRYHAYFDY

SEQ ID NO: 2401 - protein, 12 aa, Homo sapiens
AHRLAAAGEFDY

SEQ ID NO: 2402 - protein, 12 aa, Homo sapiens
ARDSPGLRSFDY

SEQ ID NO: 2403 - protein, 12 aa, Homo sapiens
AKGGIEARLSDY

SEQ ID NO: 2404 - protein, 9 aa, Homo sapiens
VKGKYLVDC

SEQ ID NO: 2405 - protein, 9 aa, Homo sapiens
TTVAEGLGY

SEQ ID NO: 2406 - protein, 11 aa, Homo sapiens
ARAPRWNGFDY

SEQ ID NO: 2407 - protein, 8 aa, Homo sapiens
ARGGSYYF

SEQ ID NO: 2408 - protein, 12 aa, Homo sapiens
ARVSDWGKWFDP

SEQ ID NO: 2409 - protein, 9 aa, Homo sapiens
ARGRGWIDP

SEQ ID NO: 2410 - protein, 12 aa, Homo sapiens
ARGVYGYDAFDI

SEQ ID NO: 2411 - protein, 12 aa, Homo sapiens
ARDSPGRGGLDY

SEQ ID NO: 2412 - protein, 8 aa, Homo sapiens
VRENQMAY

SEQ ID NO: 2413 - protein, 11 aa, Homo sapiens
ARGGVKWTFDS

SEQ ID NO: 2414 - protein, 7 aa, Homo sapiens
TRDPPDV

SEQ ID NO: 2415 - protein, 8 aa, Homo sapiens
ARSGGLDV

SEQ ID NO: 2416 - protein, 5 aa, Homo sapiens
AGAWE

SEQ ID NO: 2417 - protein, 12 aa, Homo sapiens
ARGGASSKYLDY

SEQ ID NO: 2418 - protein, 13 aa, Homo sapiens
ARTIIGGGPPADY

SEQ ID NO: 2419 - protein, 10 aa, Homo sapiens
ARRVEWAFDV

SEQ ID NO: 2420 - protein, 15 aa, Homo sapiens
AKLVTYNWDWDAFDV

SEQ ID NO: 2421 - protein, 10 aa, Homo sapiens
VKDRLRNGDY

SEQ ID NO: 2422 - protein, 15 aa, Homo sapiens
AKKGGGSGSYDYFDY

SEQ ID NO: 2423 - protein, 13 aa, Homo sapiens
AKDVRGGGGGMDV

SEQ ID NO: 2424 - protein, 10 aa, Homo sapiens
AKSSSDSFDY

SEQ ID NO: 2425 - protein, 14 aa, Homo sapiens
ARHSLSQTSSWFDP

SEQ ID NO: 2426 - protein, 10 aa, Homo sapiens
ARKTEQLWQY

SEQ ID NO: 2427 - protein, 16 aa, Homo sapiens
AKNPTPDMTTSGWFDP

SEQ ID NO: 2428 - protein, 11 aa, Homo sapiens
ARGGRTGTFDI

SEQ ID NO: 2429 - protein, 24 aa, Homo sapiens
ARHEGIGDYDYVWGPTSRLGAFDI

SEQ ID NO: 2430 - protein, 16 aa, Homo sapiens
VKDHDSGSNYWHHLDF

SEQ ID NO: 2431 - protein, 10 aa, Homo sapiens
TTYSSGAVRD

SEQ ID NO: 2432 - protein, 13 aa, Homo sapiens
ARAEANRSPWFDP

SEQ ID NO: 2433 - protein, 15 aa, Homo sapiens
TRIPRSTGPFGWFDP

SEQ ID NO: 2434 - protein, 29 aa, Homo sapiens
ARSPHDYGDYGYYYDSSGFRSNYYYYMDV

SEQ ID NO: 2435 - protein, 15 aa, Homo sapiens
ARAIYGTGTYGVFDV

SEQ ID NO: 2436 - protein, 6 aa, Homo sapiens
VSRSGY

SEQ ID NO: 2437 - protein, 12 aa, Homo sapiens
VTDEAGIIDFDN

SEQ ID NO: 2438 - protein, 13 aa, Homo sapiens
ARDHEGWQAASDV

SEQ ID NO: 2439 - protein, 11 aa, Homo sapiens
AKLVGHTVYDY

SEQ ID NO: 2440 - protein, 8 aa, Homo sapiens
AKEGPDGY

SEQ ID NO: 2441 - protein, 15 aa, Homo sapiens
ARIPYHSSGWGWFDP

SEQ ID NO: 2442 - protein, 16 aa, Homo sapiens
ARSSCGSGSCNSDFDY

SEQ ID NO: 2443 - protein, 10 aa, Homo sapiens
ARHFDSVTGF

SEQ ID NO: 2444 - protein, 12 aa, Homo sapiens
ARGSGIAAPGDY

SEQ ID NO: 2445 - protein, 18 aa, Homo sapiens
ARPLGFGGNENHYYYMDV

SEQ ID NO: 2446 - protein, 11 aa, Homo sapiens
ARDDGWSRFEF

SEQ ID NO: 2447 - protein, 8 aa, Homo sapiens
ARRSVFDS

SEQ ID NO: 2448 - protein, 13 aa, Homo sapiens
ARDREEWAAASDV

SEQ ID NO: 2449 - protein, 18 aa, Homo sapiens
ARADFYTRRDYQGNAFDV

SEQ ID NO: 2450 - protein, 17 aa, Homo sapiens
VRARGRDGTTGKNCFDP

SEQ ID NO: 2451 - protein, 15 aa, Homo sapiens
ARLLYYDRSGYHLGD

SEQ ID NO: 2452 - protein, 7 aa, Homo sapiens
TTGILPL

SEQ ID NO: 2453 - protein, 11 aa, Homo sapiens
ARGGRTGALDF

SEQ ID NO: 2454 - protein, 15 aa, Homo sapiens
ARLPRVAGSFGWFDA

SEQ ID NO: 2455 - protein, 17 aa, Homo sapiens
ARERSSTTWGADDAFDI

SEQ ID NO: 2456 - protein, 13 aa, Homo sapiens
ARDREGWQAASDV

SEQ ID NO: 2457 - protein, 21 aa, Homo sapiens
ARDGADLGAPGPYQPHYYMDV

SEQ ID NO: 2458 - protein, 15 aa, Homo sapiens
ARLPRVAGSFGFFDP

SEQ ID NO: 2459 - protein, 15 aa, Homo sapiens
ARLPHVSGSFGWFDP

SEQ ID NO: 2460 - protein, 11 aa, Homo sapiens
ARGGRSGTFDI

SEQ ID NO: 2461 - protein, 15 aa, Homo sapiens
ARLPRVAGSFGWFDP

SEQ ID NO: 2462 - protein, 14 aa, Homo sapiens
ASHYDTRGYGAFEI

SEQ ID NO: 2463 - protein, 13 aa, Homo sapiens
AKARIRSSPSSDY

SEQ ID NO: 2464 - protein, 15 aa, Homo sapiens
ASGYYDTRGYYSQEY

SEQ ID NO: 2465 - protein, 13 aa, Homo sapiens
VKDRGSIVRDFDY

SEQ ID NO: 2466 - protein, 9 aa, Homo sapiens
TTGGVARDY

SEQ ID NO: 2467 - protein, 8 aa, Homo sapiens
AGGRGFDY

SEQ ID NO: 2468 - protein, 15 aa, Homo sapiens
AKDRTPYSYATHFDY

SEQ ID NO: 2469 - protein, 18 aa, Homo sapiens
GRVHSDSTSYRSNDALDI

SEQ ID NO: 2470 - protein, 11 aa, Homo sapiens
AREFEHADFDY

SEQ ID NO: 2471 - protein, 12 aa, Homo sapiens
ARGADGYGNFDS

SEQ ID NO: 2472 - protein, 15 aa, Homo sapiens
GRSDRRGTSFVEFDY

SEQ ID NO: 2473 - protein, 13 aa, Homo sapiens
ARLSSAWGGAFDI

SEQ ID NO: 2474 - protein, 10 aa, Homo sapiens
AKYEANRFAP

SEQ ID NO: 2475 - protein, 9 aa, Homo sapiens
ARYSSGWSL

SEQ ID NO: 2476 - protein, 12 aa, Homo sapiens
TRVGLRSSSWDC

SEQ ID NO: 2477 - protein, 12 aa, Homo sapiens
ARHLSGPPSHDH

SEQ ID NO: 2478 - protein, 26 aa, Homo sapiens
ARGGLGRRHYGDYPPPARRPPRWFDP

SEQ ID NO: 2479 - protein, 10 aa, Homo sapiens
AKWGPEPLAY

SEQ ID NO: 2480 - protein, 13 aa, Homo sapiens
VKEHASAWPNLDY

SEQ ID NO: 2481 - protein, 16 aa, Homo sapiens
GRDTVPFDAWTGGVQY

SEQ ID NO: 2482 - protein, 15 aa, Homo sapiens
ARDYRPVAASKYFDF

SEQ ID NO: 2483 - protein, 15 aa, Homo sapiens
GRSDRSGNSFVEFDY

SEQ ID NO: 2484 - protein, 10 aa, Homo sapiens
AKFPARGSVS

SEQ ID NO: 2485 - protein, 14 aa, Homo sapiens
ARDREYGGSHPIDY

SEQ ID NO: 2486 - protein, 15 aa, Homo sapiens
ARIPYYSSGWGWFDP

SEQ ID NO: 2487 - protein, 11 aa, Homo sapiens
ARDGGTYFLDS

SEQ ID NO: 2488 - protein, 16 aa, Homo sapiens
ARPLTDAKVSGGYADY

SEQ ID NO: 2489 - protein, 11 aa, Homo sapiens
ARHAGWSGPDS

SEQ ID NO: 2490 - protein, 11 aa, Homo sapiens
ARWTGQSYMDV

SEQ ID NO: 2491 - protein, 17 aa, Homo sapiens
ARVILTTSYMWPDAFDI

SEQ ID NO: 2492 - protein, 9 aa, Homo sapiens
STEPRLLAH

SEQ ID NO: 2493 - protein, 13 aa, Homo sapiens
AKSRDGWNHGLEY

SEQ ID NO: 2494 - protein, 17 aa, Homo sapiens
ARAGPLVGPFPGNYMAV

SEQ ID NO: 2495 - protein, 11 aa, Homo sapiens
SRDDHFYYMDV

SEQ ID NO: 2496 - protein, 17 aa, Homo sapiens
AKEKWREEDYGDASPVY

SEQ ID NO: 2497 - protein, 15 aa, Homo sapiens
TRGWGNSYGYGAFDY

SEQ ID NO: 2498 - protein, 15 aa, Homo sapiens
AREDVSLTGYYIFDY

SEQ ID NO: 2499 - protein, 11 aa, Homo sapiens
ARDSGSNALDI

SEQ ID NO: 2500 - protein, 15 aa, Homo sapiens
TKDRYCTTPRCPLDY

SEQ ID NO: 2501 - protein, 18 aa, Homo sapiens
ARPTKFYYDPDFGNYMGV

SEQ ID NO: 2502 - protein, 11 aa, Homo sapiens
AGAEAEGWFDP

SEQ ID NO: 2503 - protein, 13 aa, Homo sapiens
ARSRDHDIFGFGH

SEQ ID NO: 2504 - protein, 17 aa, Homo sapiens
GRVGHKGNLGISRFVDV

SEQ ID NO: 2505 - protein, 12 aa, Homo sapiens
TARHYYDNMFDV

SEQ ID NO: 2506 - protein, 15 aa, Homo sapiens
ARHLSYGYNTHTFDF

SEQ ID NO: 2507 - protein, 16 aa, Homo sapiens
ATGGYSGSYYERPPDV

SEQ ID NO: 2508 - protein, 12 aa, Homo sapiens
ARDDPNSGSIDS

SEQ ID NO: 2509 - protein, 12 aa, Homo sapiens
ARDSNTWSALEY

SEQ ID NO: 2510 - protein, 12 aa, Homo sapiens
AREPAGTYSFDY

SEQ ID NO: 2511 - protein, 13 aa, Homo sapiens
AKAGGNTIYWYDF

SEQ ID NO: 2512 - protein, 10 aa, Homo sapiens
VKDPGPLFVT

SEQ ID NO: 2513 - protein, 13 aa, Homo sapiens
AREAPVGASTTDY

SEQ ID NO: 2514 - protein, 12 aa, Homo sapiens
AKGETEPRPFDR

SEQ ID NO: 2515 - protein, 13 aa, Homo sapiens
ATSGGLTGRYFDH

SEQ ID NO: 2516 - protein, 13 aa, Homo sapiens
ARHGDYAAHAFDV

SEQ ID NO: 2517 - protein, 10 aa, Homo sapiens
ARHVGSGMDV

SEQ ID NO: 2518 - protein, 11 aa, Homo sapiens
AKERGLGVFDN

SEQ ID NO: 2519 - protein, 12 aa, Homo sapiens
ARELTRTGNLDY

SEQ ID NO: 2520 - protein, 15 aa, Homo sapiens
ARPGLTVAHTRWFDL

SEQ ID NO: 2521 - protein, 9 aa, Homo sapiens
ARGQTWAYY

SEQ ID NO: 2522 - protein, 15 aa, Homo sapiens
ARDCSITSCYGIFDY

SEQ ID NO: 2523 - protein, 12 aa, Homo sapiens
VRDWSGYSYFDY

SEQ ID NO: 2524 - protein, 15 aa, Homo sapiens
TNLLTNPHYYYNVDV

SEQ ID NO: 2525 - protein, 15 aa, Homo sapiens
TSDVYLRGSYFYMDV

SEQ ID NO: 2526 - protein, 13 aa, Homo sapiens
TRSDPAYYNAGSI

SEQ ID NO: 2527 - protein, 17 aa, Homo sapiens
ARDQSGGYFWNHGYFDY

SEQ ID NO: 2528 - protein, 15 aa, Homo sapiens
AKDRYCGRDRCPVDY

SEQ ID NO: 2529 - protein, 12 aa, Homo sapiens
GRDLVGGWSLDY

SEQ ID NO: 2530 - protein, 13 aa, Homo sapiens
ARGGWGRLGYFDY

SEQ ID NO: 2531 - protein, 14 aa, Homo sapiens
AKVGEAQQWRFFHH

SEQ ID NO: 2532 - protein, 23 aa, Homo sapiens
ARVSLSPDCGGSSCSSRYRWFDP

SEQ ID NO: 2533 - protein, 13 aa, Homo sapiens
ARSLPIFGVVFEY

SEQ ID NO: 2534 - protein, 11 aa, Homo sapiens
SREMWEAGFDY

SEQ ID NO: 2535 - protein, 14 aa, Homo sapiens
ATGPIDLWTAYFPF

SEQ ID NO: 2536 - protein, 16 aa, Homo sapiens
ATHHFWFQQKHNWFDP

SEQ ID NO: 2537 - protein, 18 aa, Homo sapiens
AKDLSNIVVVPALGDLDY

SEQ ID NO: 2538 - protein, 13 aa, Homo sapiens
AKDPQWLVRDFDH

SEQ ID NO: 2539 - protein, 13 aa, Homo sapiens
SKRGASGGHYFDA

SEQ ID NO: 2540 - protein, 14 aa, Homo sapiens
SRNPPDVGLGYMDA

SEQ ID NO: 2541 - protein, 18 aa, Homo sapiens
VKPSRGSGFDDRLGSFHV

SEQ ID NO: 2542 - protein, 6 aa, Homo sapiens
AKGITN

SEQ ID NO: 2543 - protein, 16 aa, Homo sapiens
ARGGYLGSFYIRPPLL

SEQ ID NO: 2544 - protein, 14 aa, Homo sapiens
ARSAAAGGQYYFDY

SEQ ID NO: 2545 - protein, 12 aa, Homo sapiens
ARALTATPYFDN

SEQ ID NO: 2546 - protein, 12 aa, Homo sapiens
ARERHLGELRDV

SEQ ID NO: 2547 - protein, 15 aa, Homo sapiens
ASGYYDTRGYYSQDS

SEQ ID NO: 2548 - protein, 12 aa, Homo sapiens
AMTKGLTGEIDL

SEQ ID NO: 2549 - protein, 12 aa, Homo sapiens
ARLVCGDCYSDN

SEQ ID NO: 2550 - protein, 16 aa, Homo sapiens
TKYCSTAVCSMGALDV

SEQ ID NO: 2551 - protein, 9 aa, Homo sapiens
ARDLGWFDL

SEQ ID NO: 2552 - protein, 9 aa, Homo sapiens
TRQYQFLDY

SEQ ID NO: 2553 - protein, 12 aa, Homo sapiens
ARLGGRSNRYDY

SEQ ID NO: 2554 - protein, 13 aa, Homo sapiens
ARVEGATGGNHDY

SEQ ID NO: 2555 - protein, 18 aa, Homo sapiens
VRGGGAYCGGDCLRTLDI

SEQ ID NO: 2556 - protein, 13 aa, Homo sapiens
VRGGPYYRSFGDF

SEQ ID NO: 2557 - protein, 11 aa, Homo sapiens
ARVPSRARVDV

SEQ ID NO: 2558 - protein, 11 aa, Homo sapiens
ACYPVNAGMDY

SEQ ID NO: 2559 - protein, 16 aa, Homo sapiens
ARVPLEGDFRGNCYAH

SEQ ID NO: 2560 - protein, 21 aa, Homo sapiens
ARIRGDQYDILTGYSPYYFDS

SEQ ID NO: 2561 - protein, 9 aa, Homo sapiens
ARDTTSLDY

SEQ ID NO: 2562 - protein, 13 aa, Homo sapiens
VRLNGGHGGDFDF

SEQ ID NO: 2563 - protein, 13 aa, Homo sapiens
VKDWGRDTGTRGY

SEQ ID NO: 2564 - protein, 12 aa, Homo sapiens
ARDRHSSIGFDP

SEQ ID NO: 2565 - protein, 12 aa, Homo sapiens
ARAGPSGGVFDI

SEQ ID NO: 2566 - protein, 10 aa, Homo sapiens
TRPGQTGGDI

SEQ ID NO: 2567 - protein, 14 aa, Homo sapiens
AKEVTPLIVVVPGH

SEQ ID NO: 2568 - protein, 12 aa, Homo sapiens
VTTFGEWSRFDY

SEQ ID NO: 2569 - protein, 11 aa, Homo sapiens
VKEDRGTTIYN

SEQ ID NO: 2570 - protein, 5 aa, Homo sapiens
VNFGT

SEQ ID NO: 2571 - protein, 15 aa, Homo sapiens
ARLPREAGSFGWFDP

SEQ ID NO: 2572 - protein, 10 aa, Homo sapiens
ARDHKLLPYY

SEQ ID NO: 2573 - protein, 16 aa, Homo sapiens
ARRYCDDTRCYVHIDF

SEQ ID NO: 2574 - protein, 16 aa, Homo sapiens
TRARYSSGWYSDGGDY

SEQ ID NO: 2575 - protein, 12 aa, Homo sapiens
AASPYDSSGYSY

SEQ ID NO: 2576 - protein, 17 aa, Homo sapiens
AKGRYPGPESNQNTFDS

SEQ ID NO: 2577 - protein, 9 aa, Homo sapiens
ATLWSSWGY

SEQ ID NO: 2578 - protein, 11 aa, Homo sapiens
AKLGLPEAFDI

SEQ ID NO: 2579 - protein, 13 aa, Homo sapiens
ARGITSLPPHADY

SEQ ID NO: 2580 - protein, 20 aa, Homo sapiens
ARHPYCSSTSCYPYYYYMDV

SEQ ID NO: 2581 - protein, 15 aa, Homo sapiens
GMSDRSGSSFVEFDY

SEQ ID NO: 2582 - protein, 8 aa, Homo sapiens
AREGPDGY

SEQ ID NO: 2583 - protein, 12 aa, Homo sapiens
ARTYSVVSPFDY

SEQ ID NO: 2584 - protein, 20 aa, Homo sapiens
VRLDLGNYDGSGTRFRQFAY

SEQ ID NO: 2585 - protein, 19 aa, Homo sapiens
AKGPMWFGGTSRPGWYLDV

SEQ ID NO: 2586 - protein, 18 aa, Homo sapiens
ARHWSFGDVDWFKGWFDP

SEQ ID NO: 2587 - protein, 13 aa, Homo sapiens
ARIGYSGFGCSDY

SEQ ID NO: 2588 - protein, 18 aa, Homo sapiens
ARVDCGSIGCQGRDGFDP

SEQ ID NO: 2589 - protein, 20 aa, Homo sapiens
ARGRPHFCSGTCYPDDAFSI

SEQ ID NO: 2590 - protein, 10 aa, Homo sapiens
AGLTPYYFDY

SEQ ID NO: 2591 - protein, 14 aa, Homo sapiens
ARDGWRGSYIFFDY

SEQ ID NO: 2592 - protein, 13 aa, Homo sapiens
ARVEGATGGNHDF

SEQ ID NO: 2593 - protein, 12 aa, Homo sapiens
AASPYDSSGYSL

SEQ ID NO: 2594 - protein, 18 aa, Homo sapiens
ARRMVRENHGNYYYYMDS

SEQ ID NO: 2595 - protein, 11 aa, Homo sapiens
VTDVSTFGRVW

SEQ ID NO: 2596 - protein, 13 aa, Homo sapiens
TKRRSSAGSYLDY

SEQ ID NO: 2597 - protein, 13 aa, Homo sapiens
TRGCTTTTCPADL

SEQ ID NO: 2598 - protein, 16 aa, Homo sapiens
AAVKGIIAAPTYSFDH

SEQ ID NO: 2599 - protein, 10 aa, Homo sapiens
VRDHQWALDY

SEQ ID NO: 2600 - protein, 14 aa, Homo sapiens
ARGGGWLQFSAFDI

SEQ ID NO: 2601 - protein, 10 aa, Homo sapiens
ARGGGGYMDV

SEQ ID NO: 2602 - protein, 24 aa, Homo sapiens
AKGGSKLFRGVTIRAKNYYYYMDV

SEQ ID NO: 2603 - protein, 8 aa, Homo sapiens
ARGGQTDY

SEQ ID NO: 2604 - protein, 13 aa, Homo sapiens
VKPPRGFNNASSA

SEQ ID NO: 2605 - protein, 14 aa, Homo sapiens
AKLNGDSCYSPIDY

SEQ ID NO: 2606 - protein, 8 aa, Homo sapiens
ASPGRDIG

SEQ ID NO: 2607 - protein, 18 aa, Homo sapiens
ARHGDFRFLEWLLPNFDI

SEQ ID NO: 2608 - protein, 13 aa, Homo sapiens
ARGGYAHAWHFDH

SEQ ID NO: 2609 - protein, 13 aa, Homo sapiens
VRHSSATHPNFDY

SEQ ID NO: 2610 - protein, 12 aa, Homo sapiens
TKRNTANTYDDY

SEQ ID NO: 2611 - protein, 17 aa, Homo sapiens
ARHSSQDDYGPGNAFDV

SEQ ID NO: 2612 - protein, 15 aa, Homo sapiens
ARGTEWLDASAVGDY

SEQ ID NO: 2613 - protein, 16 aa, Homo sapiens
ARDSYSNEPRRGGFDS

SEQ ID NO: 2614 - protein, 13 aa, Homo sapiens
VRVTHTERYSFDN

SEQ ID NO: 2615 - protein, 12 aa, Homo sapiens
ARGSLRRYYFDY

SEQ ID NO: 2616 - protein, 16 aa, Homo sapiens
AKGRFDCTSPSCNPDY

SEQ ID NO: 2617 - protein, 8 aa, Homo sapiens
FYGHYSDY

SEQ ID NO: 2618 - protein, 12 aa, Homo sapiens
AKRIQLNYFFDY

SEQ ID NO: 2619 - protein, 11 aa, Homo sapiens
VRALQWSYLDY

SEQ ID NO: 2620 - protein, 19 aa, Homo sapiens
ARGRIVTTNGDRIYQYMDI

SEQ ID NO: 2621 - protein, 14 aa, Homo sapiens
ARRLRYHSGGYFDL

SEQ ID NO: 2622 - protein, 6 aa, Homo sapiens
VRADDI

SEQ ID NO: 2623 - protein, 10 aa, Homo sapiens
VRDHWWAFDV

SEQ ID NO: 2624 - protein, 15 aa, Homo sapiens
GRSDRSGSSFVEFDY

SEQ ID NO: 2625 - protein, 15 aa, Homo sapiens
ARDVGFVNGYYYMDV

SEQ ID NO: 2626 - protein, 13 aa, Homo sapiens
VKGGPSGSYFCDY

SEQ ID NO: 2627 - protein, 14 aa, Homo sapiens
AKDLQPDGRYDLDY

SEQ ID NO: 2628 - protein, 16 aa, Homo sapiens
ARVRFARTYYSNYMDV

SEQ ID NO: 2629 - protein, 9 aa, Homo sapiens
ASRQDCGGY

SEQ ID NO: 2630 - protein, 12 aa, Homo sapiens
ARHDRSGWYSDY

SEQ ID NO: 2631 - protein, 18 aa, Homo sapiens
AKDPANWGPSYYYYYMDV

SEQ ID NO: 2632 - protein, 18 aa, Homo sapiens
VRDVCYSTGCRVPGAFEN

SEQ ID NO: 2633 - protein, 6 aa, Homo sapiens
VRGEDI

SEQ ID NO: 2634 - protein, 13 aa, Homo sapiens
VRDTSARGIYMDV

SEQ ID NO: 2635 - protein, 16 aa, Homo sapiens
AKGSLQPSRSYGLFES

SEQ ID NO: 2636 - protein, 10 aa, Homo sapiens
ARQFRGGMDV

SEQ ID NO: 2637 - protein, 16 aa, Homo sapiens
ARDTLPFDSWTGGSGY

SEQ ID NO: 2638 - protein, 13 aa, Homo sapiens
ARGYSFNFPYFDY

SEQ ID NO: 2639 - protein, 19 aa, Homo sapiens
ARDGYDYVWGSYRQGWFDP

SEQ ID NO: 2640 - protein, 17 aa, Homo sapiens
ARSAGRGYSGYAYYVDP

SEQ ID NO: 2641 - protein, 20 aa, Homo sapiens
ARDRRGSRSSSHSYYSYMDV

SEQ ID NO: 2642 - protein, 18 aa, Homo sapiens
ARDGIGVVPAALGNWFDP

SEQ ID NO: 2643 - protein, 12 aa, Homo sapiens
ARQRNSKSSFDS

SEQ ID NO: 2644 - protein, 14 aa, Homo sapiens
AKGAWRQLGSYFDY

SEQ ID NO: 2645 - protein, 9 aa, Homo sapiens
ANLWSSWGY

SEQ ID NO: 2646 - protein, 13 aa, Homo sapiens
ARKVYANFYYMDV

SEQ ID NO: 2647 - protein, 28 aa, Homo sapiens
ARGGAQFGPWVAGLGIHGYYHHYYYMDV

SEQ ID NO: 2648 - protein, 6 aa, Homo sapiens
TTDPYV

SEQ ID NO: 2649 - protein, 12 aa, Homo sapiens
ARHHSSDGWFGP

SEQ ID NO: 2650 - protein, 8 aa, Homo sapiens
ATYTGLGS

SEQ ID NO: 2651 - protein, 17 aa, Homo sapiens
ARVGSYYDSSEAEHFQN

SEQ ID NO: 2652 - protein, 11 aa, Homo sapiens
ARALLMGKFDS

SEQ ID NO: 2653 - protein, 8 aa, Homo sapiens
ASGAQSDF

SEQ ID NO: 2654 - protein, 11 aa, Homo sapiens
VRDVGGGYFDF

SEQ ID NO: 2655 - protein, 15 aa, Homo sapiens
GRSDTSGNSFVEFDY

SEQ ID NO: 2656 - protein, 11 aa, Homo sapiens
ARFVSSRCYDY

SEQ ID NO: 2657 - protein, 16 aa, Homo sapiens
AKAPYRDGFGNYYLDY

SEQ ID NO: 2658 - protein, 6 aa, Homo sapiens
SCAFTY

SEQ ID NO: 2659 - protein, 19 aa, Homo sapiens
AKDGCSGGSCYGGFRAFDI

SEQ ID NO: 2660 - protein, 15 aa, Homo sapiens
VREHLSLTGYYMFDY

SEQ ID NO: 2661 - protein, 13 aa, Homo sapiens
ARGRKPGRGAFDI

SEQ ID NO: 2662 - protein, 16 aa, Homo sapiens
ARDPEYDIGWHNWFDP

SEQ ID NO: 2663 - protein, 15 aa, Homo sapiens
GRSDRSGTSFVEFDY

SEQ ID NO: 2664 - protein, 15 aa, Homo sapiens
VRGALFLGDSSASIL

SEQ ID NO: 2665 - protein, 18 aa, Homo sapiens
ARDRGTHSELVARYYFDN

SEQ ID NO: 2666 - protein, 14 aa, Homo sapiens
AREIRIGGGMAFDY

SEQ ID NO: 2667 - protein, 16 aa, Homo sapiens
AREGYCSSTSCDGFDP

SEQ ID NO: 2668 - protein, 14 aa, Homo sapiens
AKAPQSTQRGYFDY

SEQ ID NO: 2669 - protein, 15 aa, Homo sapiens
ARDPLVLGATGACDV

SEQ ID NO: 2670 - protein, 12 aa, Homo sapiens
ARTHTNAWQLGS

SEQ ID NO: 2671 - protein, 12 aa, Homo sapiens
ARADTDGDRFDP

SEQ ID NO: 2672 - protein, 9 aa, Homo sapiens
ARKSVADDY

SEQ ID NO: 2673 - protein, 14 aa, Homo sapiens
ATAGGNWYLGLLVY

SEQ ID NO: 2674 - protein, 16 aa, Homo sapiens
AKGTSGYYDGSGHIDI

SEQ ID NO: 2675 - protein, 14 aa, Homo sapiens
AKNRHTSRDFYFDL

SEQ ID NO: 2676 - protein, 11 aa, Homo sapiens
VRDPWYGAVDY

SEQ ID NO: 2677 - protein, 14 aa, Homo sapiens
AREKSGCGGDCSDY

SEQ ID NO: 2678 - protein, 12 aa, Homo sapiens
ARHPRSGFYWDF

SEQ ID NO: 2679 - protein, 14 aa, Homo sapiens
ARRLRYNSGGYFDL

SEQ ID NO: 2680 - protein, 10 aa, Homo sapiens
AKDISWAMDV

SEQ ID NO: 2681 - protein, 11 aa, Homo sapiens
ARGGRTGALDI

SEQ ID NO: 2682 - protein, 15 aa, Homo sapiens
ARGTGSNGEVAWFDP

SEQ ID NO: 2683 - protein, 14 aa, Homo sapiens
ARSIWTVEAATWRE

SEQ ID NO: 2684 - protein, 5 aa, Homo sapiens
MSWGY

SEQ ID NO: 2685 - protein, 19 aa, Homo sapiens
ARSLGDYSKSGAHYWYFPL

SEQ ID NO: 2686 - protein, 15 aa, Homo sapiens
GRSDRSGPSFVEFDY

SEQ ID NO: 2687 - protein, 18 aa, Homo sapiens
ARVHCSRSSCYFPAWFDP

SEQ ID NO: 2688 - protein, 14 aa, Homo sapiens
SRNPPDIALGYMDA

SEQ ID NO: 2689 - protein, 12 aa, Homo sapiens
TRHEDYGDPFDY

SEQ ID NO: 2690 - protein, 12 aa, Homo sapiens
ATGSGATWYAQY

SEQ ID NO: 2691 - protein, 16 aa, Homo sapiens
VRGPGGGEMGTITFDF

SEQ ID NO: 2692 - protein, 18 aa, Homo sapiens
ARDGTQFYDSTGLYYMDV

SEQ ID NO: 2693 - protein, 14 aa, Homo sapiens
ARDREYSGSHPIDY

SEQ ID NO: 2694 - protein, 21 aa, Homo sapiens
ARATYVPDSSGYDYYYYYMDV

SEQ ID NO: 2695 - protein, 22 aa, Homo sapiens
ARGGYHSSRRHPPRKRDYYMDV

SEQ ID NO: 2696 - protein, 6 aa, Homo sapiens
GSLTSF

SEQ ID NO: 2697 - protein, 13 aa, Homo sapiens
AKHIRNANSQFDY

SEQ ID NO: 2698 - protein, 13 aa, Homo sapiens
ARDREGSGSYYAY

SEQ ID NO: 2699 - protein, 19 aa, Homo sapiens
ARQSHIVMATTPQYDPFDM

SEQ ID NO: 2700 - protein, 14 aa, Homo sapiens
ARDMFRGVPDYLDY

SEQ ID NO: 2701 - protein, 13 aa, Homo sapiens
ARQSTTSVALFDY

SEQ ID NO: 2702 - protein, 9 aa, Homo sapiens
ACLAPADIP

SEQ ID NO: 2703 - protein, 12 aa, Homo sapiens
VREGGSGYSFDS

SEQ ID NO: 2704 - protein, 11 aa, Homo sapiens
ARPLRGGEVDS

SEQ ID NO: 2705 - protein, 8 aa, Homo sapiens
SGGDYFDH

SEQ ID NO: 2706 - protein, 12 aa, Homo sapiens
ARLPWSAGGAQN

SEQ ID NO: 2707 - protein, 11 aa, Homo sapiens
VKGGRGDLLAY

SEQ ID NO: 2708 - protein, 9 aa, Homo sapiens
TRKPFPSDY

SEQ ID NO: 2709 - protein, 13 aa, Homo sapiens
ARDGQGGYGAFDI

SEQ ID NO: 2710 - protein, 15 aa, Homo sapiens
ARGTEWLDASAVGDC

SEQ ID NO: 2711 - protein, 9 aa, Homo sapiens
ARGNYGLDH

SEQ ID NO: 2712 - protein, 19 aa, Homo sapiens
AREPFSVVRGIIIQNPLDY

SEQ ID NO: 2713 - protein, 13 aa, Homo sapiens
VRITRQWGFYFDS

SEQ ID NO: 2714 - protein, 18 aa, Homo sapiens
ARLHGYWNGYGYYYYMDV

SEQ ID NO: 2715 - protein, 13 aa, Homo sapiens
ARRNYDANGPFDY

SEQ ID NO: 2716 - protein, 13 aa, Homo sapiens
AREAVGTGAAFDV

SEQ ID NO: 2717 - protein, 16 aa, Homo sapiens
VTRGSSGIYGGWFFEY

SEQ ID NO: 2718 - protein, 22 aa, Homo sapiens
ARGGYHSTRRHPPRKRDYYMDV

SEQ ID NO: 2719 - protein, 13 aa, Homo sapiens
VKRYTPTSGPLDF

SEQ ID NO: 2720 - protein, 11 aa, Homo sapiens
ARQIGHLPGDY

SEQ ID NO: 2721 - protein, 15 aa, Homo sapiens
TRLTPGTKGDYYMDV

SEQ ID NO: 2722 - protein, 7 aa, Homo sapiens
STSRGDY

SEQ ID NO: 2723 - protein, 10 aa, Homo sapiens
ANHNDAGDYN

SEQ ID NO: 2724 - protein, 11 aa, Homo sapiens
ARREIVNTIDY

SEQ ID NO: 2725 - protein, 11 aa, Homo sapiens
ARADRSGYYDL

SEQ ID NO: 2726 - protein, 18 aa, Homo sapiens
ARGGGAYCGSDCLRTIDI

SEQ ID NO: 2727 - protein, 22 aa, Homo sapiens
ARGSPYYDFWSAMEYYYYYMDV

SEQ ID NO: 2728 - protein, 13 aa, Homo sapiens
ARDGVGYGGVLDY

SEQ ID NO: 2729 - protein, 16 aa, Homo sapiens
ARQRRPLYTEPSRFDP

SEQ ID NO: 2730 - protein, 21 aa, Homo sapiens
AHRQDGSCSPTRCNTHWGFDY

SEQ ID NO: 2731 - protein, 16 aa, Homo sapiens
AREYGDYPSNYYYMDV

SEQ ID NO: 2732 - protein, 13 aa, Homo sapiens
AKGGATAGYAFDI

SEQ ID NO: 2733 - protein, 15 aa, Homo sapiens
ARDRGQYSNSWYIDY

SEQ ID NO: 2734 - protein, 16 aa, Homo sapiens
ARFGRGSDYFKNWFDS

SEQ ID NO: 2735 - protein, 12 aa, Homo sapiens
GRERRDYYYMDV

SEQ ID NO: 2736 - protein, 11 aa, Homo sapiens
LRAGYRGGFDI

SEQ ID NO: 2737 - protein, 23 aa, Homo sapiens
ARWDEDSSSWYRGSKYVFYYMDV

SEQ ID NO: 2738 - protein, 9 aa, Homo sapiens
ARGTTMANY

SEQ ID NO: 2739 - protein, 18 aa, Homo sapiens
AKGADGYSSGGSRGYFDY

SEQ ID NO: 2740 - protein, 9 aa, Homo sapiens
AGGSPDFVC

SEQ ID NO: 2741 - protein, 15 aa, Homo sapiens
ARTRLHCGGDCSPGH

SEQ ID NO: 2742 - protein, 11 aa, Homo sapiens
AKDKGNYYFDY

SEQ ID NO: 2743 - protein, 9 aa, Homo sapiens
TRGATWVDC

SEQ ID NO: 2744 - protein, 14 aa, Homo sapiens
VRDGIRGDDDAFDM

SEQ ID NO: 2745 - protein, 16 aa, Homo sapiens
AHRRGGHDWNAGWFAP

SEQ ID NO: 2746 - protein, 8 aa, Homo sapiens
ARDRYGDY

SEQ ID NO: 2747 - protein, 12 aa, Homo sapiens
VRSDQLAGAFDI

SEQ ID NO: 2748 - protein, 11 aa, Homo sapiens
AKVRGRWYFDA

SEQ ID NO: 2749 - protein, 15 aa, Homo sapiens
ARGSVQFSDYYYMDV

SEQ ID NO: 2750 - protein, 17 aa, Homo sapiens
ARHASSYSGSYRNYFDY

SEQ ID NO: 2751 - protein, 19 aa, Homo sapiens
ARVGGPVLRFLDWLGYMDV

SEQ ID NO: 2752 - protein, 17 aa, Homo sapiens
GRASERYCSRTSCYPDY

SEQ ID NO: 2753 - protein, 14 aa, Homo sapiens
ARDREYGGSHPIDH

SEQ ID NO: 2754 - protein, 18 aa, Homo sapiens
AHRLSGHSGGWDAGYLDF

SEQ ID NO: 2755 - protein, 21 aa, Homo sapiens
ARGGSGSSSSWNYYYYYYMDV

SEQ ID NO: 2756 - protein, 16 aa, Homo sapiens
AKDLSSYIPTAGSFDY

SEQ ID NO: 2757 - protein, 21 aa, Homo sapiens
AHRQDGSCTPTRCNTHWGFDY

SEQ ID NO: 2758 - protein, 20 aa, Homo sapiens
CTGDVDYGSGRHYPANYFDT

SEQ ID NO: 2759 - protein, 16 aa, Homo sapiens
AKDQHLVLYWWDAFDI

SEQ ID NO: 2760 - protein, 18 aa, Homo sapiens
AKQHYYDILTGYYYYFES

SEQ ID NO: 2761 - protein, 10 aa, Homo sapiens
VREDLYAFEI

SEQ ID NO: 2762 - protein, 15 aa, Homo sapiens
ARDFMIFGEIFRFDP

SEQ ID NO: 2763 - protein, 16 aa, Homo sapiens
ARPPTWNYFPNDAFDV

SEQ ID NO: 2764 - protein, 13 aa, Homo sapiens
AKDRGSGWYYFDD

SEQ ID NO: 2765 - protein, 9 aa, Homo sapiens
GRGHWGPDS

SEQ ID NO: 2766 - protein, 14 aa, Homo sapiens
ARRSTTGSTRWFDP

SEQ ID NO: 2767 - protein, 11 aa, Homo sapiens
ARGGFSHSFDS

SEQ ID NO: 2768 - protein, 21 aa, Homo sapiens
TTVEDFWSGYYYPTPHRPVDY

SEQ ID NO: 2769 - protein, 8 aa, Homo sapiens
FTDRSLGY

SEQ ID NO: 2770 - protein, 13 aa, Homo sapiens
ARWNSYENFYLDT

SEQ ID NO: 2771 - protein, 17 aa, Homo sapiens
ARDRLGATAGRGGWSDP

SEQ ID NO: 2772 - protein, 14 aa, Homo sapiens
ARDESTSGYYYMDV

SEQ ID NO: 2773 - protein, 18 aa, Homo sapiens
ATGGYCSGARCFTDWFDP

SEQ ID NO: 2774 - protein, 15 aa, Homo sapiens
ARHLAEALPAGAVEY

SEQ ID NO: 2775 - protein, 13 aa, Homo sapiens
VRGVHAGAWLVDY

SEQ ID NO: 2776 - protein, 12 aa, Homo sapiens
AKEIPVDVSFDY

SEQ ID NO: 2777 - protein, 11 aa, Homo sapiens
AREESGGRWDY

SEQ ID NO: 2778 - protein, 19 aa, Homo sapiens
ARTQERFLEWAMIPLHFDY

SEQ ID NO: 2779 - protein, 25 aa, Homo sapiens
AKIFSRDCTSTTCYLSRGYHYYMDV

SEQ ID NO: 2780 - protein, 24 aa, Homo sapiens
ARDLREKVEGLRRGYYYSHQHMDV

SEQ ID NO: 2781 - protein, 15 aa, Homo sapiens
TLILVTATPYYYMDV

SEQ ID NO: 2782 - protein, 13 aa, Homo sapiens
ATGVWNVQDWFDP

SEQ ID NO: 2783 - protein, 11 aa, Homo sapiens
VRDRGWGAFDY

SEQ ID NO: 2784 - protein, 12 aa, Homo sapiens
AILGGANAGVDY

SEQ ID NO: 2785 - protein, 11 aa, Homo sapiens
ASVFNSDGSDI

SEQ ID NO: 2786 - protein, 16 aa, Homo sapiens
AKVGVGLRFLEWFFDY

SEQ ID NO: 2787 - protein, 16 aa, Homo sapiens
TRERYFESSAFRWFDT

SEQ ID NO: 2788 - protein, 18 aa, Homo sapiens
AKDLTNIVVVPALGDLDY

SEQ ID NO: 2789 - protein, 18 aa, Homo sapiens
ARQDFVVVPTLIPNWLDP

SEQ ID NO: 2790 - protein, 15 aa, Homo sapiens
ARDRKYDGRYYEDDY

SEQ ID NO: 2791 - protein, 16 aa, Homo sapiens
VRGPGWVQSGYEGFDY

SEQ ID NO: 2792 - protein, 9 aa, Homo sapiens
ARDAGDSGH

SEQ ID NO: 2793 - protein, 14 aa, Homo sapiens
ARLSGNYLYNWFDP

SEQ ID NO: 2794 - protein, 8 aa, Homo sapiens
ARNRYFDL

SEQ ID NO: 2795 - protein, 11 aa, Homo sapiens
VKDGGAGGAEY

SEQ ID NO: 2796 - protein, 12 aa, Homo sapiens
AKPDGVEQERDY

SEQ ID NO: 2797 - protein, 23 aa, Homo sapiens
AKDPNPFSSISPPITDGDNYMDV

SEQ ID NO: 2798 - protein, 18 aa, Homo sapiens
ARVIRETSGWNHYSYMDV

SEQ ID NO: 2799 - protein, 15 aa, Homo sapiens
ARGYRGSDRDDYFQY

SEQ ID NO: 2800 - protein, 11 aa, Homo sapiens
ARGDVVTSTDY

SEQ ID NO: 2801 - protein, 19 aa, Homo sapiens
ARLLGTLEYSDYDPPLSDY

SEQ ID NO: 2802 - protein, 13 aa, Homo sapiens
AKELDSPGIYMNV

SEQ ID NO: 2803 - protein, 16 aa, Homo sapiens
ARHTAVAGESPPWLHY

SEQ ID NO: 2804 - protein, 14 aa, Homo sapiens
ARGVSAHPQYQFDY

SEQ ID NO: 2805 - protein, 9 aa, Homo sapiens
ANLPGTSGY

SEQ ID NO: 2806 - protein, 15 aa, Homo sapiens
GRSDRRGSSFVEFDY

SEQ ID NO: 2807 - protein, 23 aa, Homo sapiens
ARAQYSITLFGSTIIRNYYYMDV

SEQ ID NO: 2808 - protein, 14 aa, Homo sapiens
ARARHIVVVSLLDN

SEQ ID NO: 2809 - protein, 17 aa, Homo sapiens
AKDLGTTPVFGGSVIDY

SEQ ID NO: 2810 - protein, 16 aa, Homo sapiens
AKKWGAYTVTADYFDS

SEQ ID NO: 2811 - protein, 25 aa, Homo sapiens
AKINSRDCTSTTCYLTRGYYYYMDV

SEQ ID NO: 2812 - protein, 17 aa, Homo sapiens
ARETSRFLEWLRGGFNY

SEQ ID NO: 2813 - protein, 14 aa, Homo sapiens
ARGRSGTLQDAFHI

SEQ ID NO: 2814 - protein, 11 aa, Homo sapiens
TREAVPGWSDY

SEQ ID NO: 2815 - protein, 8 aa, Homo sapiens
SRGRDGIG

SEQ ID NO: 2816 - protein, 17 aa, Homo sapiens
ARKYDNRLDGLGGAFDI

SEQ ID NO: 2817 - protein, 11 aa, Homo sapiens
ARGSGPWGLDY

SEQ ID NO: 2818 - protein, 13 aa, Homo sapiens
AKYAMPGIPGLCD

SEQ ID NO: 2819 - protein, 10 aa, Homo sapiens
SRPQQWTVAD

SEQ ID NO: 2820 - protein, 15 aa, Homo sapiens
ARLPTPGRHHAYFDY

SEQ ID NO: 2821 - protein, 16 aa, Homo sapiens
ARQGRYCSGTTCYIAH

SEQ ID NO: 2822 - protein, 16 aa, Homo sapiens
ARNSAWSDGHYYYMDV

SEQ ID NO: 2823 - protein, 15 aa, Homo sapiens
AKDRYCIGGICPIDY

SEQ ID NO: 2824 - protein, 13 aa, Homo sapiens
AKYAVPGIPGLCD

SEQ ID NO: 2825 - protein, 17 aa, Homo sapiens
AKGGGTSYTVAGFLFEY

SEQ ID NO: 2826 - protein, 8 aa, Homo sapiens
AKNWNADN

SEQ ID NO: 2827 - protein, 11 aa, Homo sapiens
AGTLQYGDFVY

SEQ ID NO: 2828 - protein, 14 aa, Homo sapiens
ARDREYRGSHPIDY

SEQ ID NO: 2829 - protein, 10 aa, Homo sapiens
AREAFRGSEC

SEQ ID NO: 2830 - protein, 15 aa, Homo sapiens
GRSGTSGNSFVEFDY

SEQ ID NO: 2831 - protein, 18 aa, Homo sapiens
AHRLPGHSGGWDAGYLDF

SEQ ID NO: 2832 - protein, 10 aa, Homo sapiens
ARGVSLAIDS

SEQ ID NO: 2833 - protein, 9 aa, Homo sapiens
ARTPGFFDY

SEQ ID NO: 2834 - protein, 14 aa, Homo sapiens
ARGSGFGELGVFDY

SEQ ID NO: 2835 - protein, 13 aa, Homo sapiens
ARGGSDYNYAFDS

SEQ ID NO: 2836 - protein, 12 aa, Homo sapiens
ARDPTIKYYMDV

SEQ ID NO: 2837 - protein, 16 aa, Homo sapiens
VSRGSDPVDEVHWWDF

SEQ ID NO: 2838 - protein, 18 aa, Homo sapiens
IRGGDFWSGPYSENWFDT

SEQ ID NO: 2839 - protein, 11 aa, Homo sapiens
VVGMTEFTFDI

SEQ ID NO: 2840 - protein, 10 aa, Homo sapiens
TTDYLTAFDI

SEQ ID NO: 2841 - protein, 20 aa, Homo sapiens
ARDKGIMVYASIHYYYYMDV

SEQ ID NO: 2842 - protein, 15 aa, Homo sapiens
TRHVGNTVTKAKFES

SEQ ID NO: 2843 - protein, 14 aa, Homo sapiens
AKEIGLSGIFVFDH

SEQ ID NO: 2844 - protein, 17 aa, Homo sapiens
ARRFCGTPTTCSSYFDY

SEQ ID NO: 2845 - protein, 13 aa, Homo sapiens
ARGLGFGNAYMDV

SEQ ID NO: 2846 - protein, 19 aa, Homo sapiens
ARHMAGKWGVATIQSAFGI

SEQ ID NO: 2847 - protein, 10 aa, Homo sapiens
ARERAGTIDS

SEQ ID NO: 2848 - protein, 15 aa, Homo sapiens
GRSDRIGPSFVEFDY

SEQ ID NO: 2849 - protein, 10 aa, Homo sapiens
ARSDWNFLDF

SEQ ID NO: 2850 - protein, 22 aa, Homo sapiens
ASLVGDCSRISCYFPGVAYKDV

SEQ ID NO: 2851 - protein, 12 aa, Homo sapiens
AKRILLNYFFDY

SEQ ID NO: 2852 - protein, 9 aa, Homo sapiens
AEGTGTFDY

SEQ ID NO: 2853 - protein, 15 aa, Homo sapiens
ARERYGINIVDAFDI

SEQ ID NO: 2854 - protein, 16 aa, Homo sapiens
GRDPIDPNWNYLSFDP

SEQ ID NO: 2855 - protein, 16 aa, Homo sapiens
ARAGYCSSTSCYAFDI

SEQ ID NO: 2856 - protein, 17 aa, Homo sapiens
ARARWEYQLLSSDAFDL

SEQ ID NO: 2857 - protein, 10 aa, Homo sapiens
ARLGDYSLKD

SEQ ID NO: 2858 - protein, 11 aa, Homo sapiens
ASSPPGLYMDI

SEQ ID NO: 2859 - protein, 21 aa, Homo sapiens
ARHGGVINLIRGVMKFDAFDV

SEQ ID NO: 2860 - protein, 14 aa, Homo sapiens
ARHRRIAATDHFDN

SEQ ID NO: 2861 - protein, 16 aa, Homo sapiens
SRSAGSHNYYYYYMDV

SEQ ID NO: 2862 - protein, 13 aa, Homo sapiens
AKDQAKDWQAFAS

SEQ ID NO: 2863 - protein, 14 aa, Homo sapiens
ARQTSGSYYNDFDY

SEQ ID NO: 2864 - protein, 18 aa, Homo sapiens
AKIGPIIAAAGSTEYFQH

SEQ ID NO: 2865 - protein, 21 aa, Homo sapiens
ARESYPESAVGTTPLARYADY

SEQ ID NO: 2866 - protein, 13 aa, Homo sapiens
VSELSGDYSSLDS

SEQ ID NO: 2867 - protein, 12 aa, Homo sapiens
VRGTLVTGGTDY

SEQ ID NO: 2868 - protein, 19 aa, Homo sapiens
AKCVVGATGRWNYYYYMDV

SEQ ID NO: 2869 - protein, 16 aa, Homo sapiens
ARGYFDSSGYYWVFDD

SEQ ID NO: 2870 - protein, 10 aa, Homo sapiens
ARGYQYSFDM

SEQ ID NO: 2871 - protein, 16 aa, Homo sapiens
ARLANIPVAGRNWLDP

SEQ ID NO: 2872 - protein, 11 aa, Homo sapiens
ARAGDGQCMDV

SEQ ID NO: 2873 - protein, 10 aa, Homo sapiens
ARGSEYGLDS

SEQ ID NO: 2874 - protein, 10 aa, Homo sapiens
ATDVWGRGAY

SEQ ID NO: 2875 - protein, 16 aa, Homo sapiens
ARTTNYHNATAYYQDF

SEQ ID NO: 2876 - protein, 19 aa, Homo sapiens
AGSSRDTHSGFYLDDAFDI

SEQ ID NO: 2877 - protein, 10 aa, Homo sapiens
ARSVSFYFDL

SEQ ID NO: 2878 - protein, 15 aa, Homo sapiens
ARDSSREYSGYYFDY

SEQ ID NO: 2879 - protein, 16 aa, Homo sapiens
AKDQHGYAGGDDGFDF

SEQ ID NO: 2880 - protein, 16 aa, Homo sapiens
ARDPELHHYNYYYMDV

SEQ ID NO: 2881 - protein, 13 aa, Homo sapiens
ATTSARAAGALSY

SEQ ID NO: 2882 - protein, 15 aa, Homo sapiens
VRDLSWSGRKWHFDL

SEQ ID NO: 2883 - protein, 16 aa, Homo sapiens
GSGTRGVSGNYAYSDY

SEQ ID NO: 2884 - protein, 10 aa, Homo sapiens
ARETNNYYDY

SEQ ID NO: 2885 - protein, 17 aa, Homo sapiens
ARRSKIEPPGRAYYFDS

SEQ ID NO: 2886 - protein, 13 aa, Homo sapiens
TKGGMTSSWFWVD

SEQ ID NO: 2887 - protein, 22 aa, Homo sapiens
ARGRYYDVGGDSQMGRYYLFDR

SEQ ID NO: 2888 - protein, 18 aa, Homo sapiens
VKATGYKVGSFKFYYMDV

SEQ ID NO: 2889 - protein, 11 aa, Homo sapiens
ARQGVVWCPRN

SEQ ID NO: 2890 - protein, 10 aa, Homo sapiens
AREGVWALDF

SEQ ID NO: 2891 - protein, 14 aa, Homo sapiens
ARIVSGYYYYYMDV

SEQ ID NO: 2892 - protein, 15 aa, Homo sapiens
ARDPGLRGDYYYMDV

SEQ ID NO: 2893 - protein, 10 aa, Homo sapiens
TRGLQYSSDF

SEQ ID NO: 2894 - protein, 15 aa, Homo sapiens
TKDFTWVVASTGFDS

SEQ ID NO: 2895 - protein, 11 aa, Homo sapiens
ARDNGAAAADE

SEQ ID NO: 2896 - protein, 20 aa, Homo sapiens
ARVSRQSPVRGGYYYHYMDV

SEQ ID NO: 2897 - protein, 19 aa, Homo sapiens
AREFLHVSPDSGGYNWFDP

SEQ ID NO: 2898 - protein, 13 aa, Homo sapiens
ARMYISGEGYFDL

SEQ ID NO: 2899 - protein, 22 aa, Homo sapiens
ARGGYHSTRRHPPRKRDYYIDV

SEQ ID NO: 2900 - protein, 17 aa, Homo sapiens
VKGDYDRSHYFTPPMEI

SEQ ID NO: 2901 - protein, 13 aa, Homo sapiens
ARVVTGTEGYFDY

SEQ ID NO: 2902 - protein, 17 aa, Homo sapiens
AKDSLQNVVIVPTAIPV

SEQ ID NO: 2903 - protein, 15 aa, Homo sapiens
ARGRSAMGPYSVFDY

SEQ ID NO: 2904 - protein, 14 aa, Homo sapiens
ARGAGGTCRYYFDH

SEQ ID NO: 2905 - protein, 16 aa, Homo sapiens
ASQYCSGGSCSPARGN

SEQ ID NO: 2906 - protein, 15 aa, Homo sapiens
ARDLSGTGGGVHFQY

SEQ ID NO: 2907 - protein, 20 aa, Homo sapiens
ARQGCPSAPCYSFVYYYMDV

SEQ ID NO: 2908 - protein, 14 aa, Homo sapiens
ARLSSGRDYYYLDV

SEQ ID NO: 2909 - protein, 9 aa, Homo sapiens
AKKIGHFDY

SEQ ID NO: 2910 - protein, 11 aa, Homo sapiens
ARRGGGKAFDY

SEQ ID NO: 2911 - protein, 16 aa, Homo sapiens
ARGSRPITSPGRAFDV

SEQ ID NO: 2912 - protein, 20 aa, Homo sapiens
ARRGYSSGFIGVHYYYYMDV

SEQ ID NO: 2913 - protein, 15 aa, Homo sapiens
TKDRYCSGGICPTDY

SEQ ID NO: 2914 - protein, 15 aa, Homo sapiens
ARSPQDLGSGYSFDY

SEQ ID NO: 2915 - protein, 12 aa, Homo sapiens
AREAYGYYHLDV

SEQ ID NO: 2916 - protein, 18 aa, Homo sapiens
VRDVGVRCGSDWCKWFDP

SEQ ID NO: 2917 - protein, 14 aa, Homo sapiens
ARLYSSSSGDVFDY

SEQ ID NO: 2918 - protein, 18 aa, Homo sapiens
ARGFYDLNRGYRRFYMDV

SEQ ID NO: 2919 - protein, 21 aa, Homo sapiens
AQSIGEPFAFRVVRGIRPFDI

SEQ ID NO: 2920 - protein, 18 aa, Homo sapiens
ARDGNYFDTAGYSYYFDL

SEQ ID NO: 2921 - protein, 10 aa, Homo sapiens
ARNRNYYFDY

SEQ ID NO: 2922 - protein, 10 aa, Homo sapiens
ARGHGGASDY

SEQ ID NO: 2923 - protein, 11 aa, Homo sapiens
AKTSGYFYPDY

SEQ ID NO: 2924 - protein, 19 aa, Homo sapiens
ARGGNGYYDRSGYSYPFDY

SEQ ID NO: 2925 - protein, 13 aa, Homo sapiens
AKEMDSPGYYMNV

SEQ ID NO: 2926 - protein, 11 aa, Homo sapiens
VSMVWGGAFDA

SEQ ID NO: 2927 - protein, 16 aa, Homo sapiens
AKDAASGTYHYGYFDY

SEQ ID NO: 2928 - protein, 15 aa, Homo sapiens
VRDPHLYSSYYYFDY

SEQ ID NO: 2929 - protein, 16 aa, Homo sapiens
AKDKIRQIIVVGHNDF

SEQ ID NO: 2930 - protein, 11 aa, Homo sapiens
ARLHRNYALDS

SEQ ID NO: 2931 - protein, 8 aa, Homo sapiens
AKDSTPNY

SEQ ID NO: 2932 - protein, 13 aa, Homo sapiens
VRGPNDKSGGFDS

SEQ ID NO: 2933 - protein, 17 aa, Homo sapiens
AKGWSGNSGPYYYTMDV

SEQ ID NO: 2934 - protein, 13 aa, Homo sapiens
ARHSSLYHAPFDP

SEQ ID NO: 2935 - protein, 12 aa, Homo sapiens
AKRHMVFGVVDY

SEQ ID NO: 2936 - protein, 10 aa, Homo sapiens
ARESHARFDY

SEQ ID NO: 2937 - protein, 17 aa, Homo sapiens
ARGGAYCSKGVCYIFDY

SEQ ID NO: 2938 - protein, 13 aa, Homo sapiens
ARKEELRVLGLDL

SEQ ID NO: 2939 - protein, 13 aa, Homo sapiens
ANQPRDTDNILWD

SEQ ID NO: 2940 - protein, 17 aa, Homo sapiens
ARVARVGDLSLYRPLDY

SEQ ID NO: 2941 - protein, 6 aa, Homo sapiens
ARGHTV

SEQ ID NO: 2942 - protein, 15 aa, Homo sapiens
VRGYSDSRAYVFSGY

SEQ ID NO: 2943 - protein, 17 aa, Homo sapiens
AQDDHSKERNEYLYFDY

SEQ ID NO: 2944 - protein, 12 aa, Homo sapiens
ARHSPYSGSSDS

SEQ ID NO: 2945 - protein, 15 aa, Homo sapiens
ARNLNTAPGVGWFDP

SEQ ID NO: 2946 - protein, 13 aa, Homo sapiens
AKDRGFGVTQIDF

SEQ ID NO: 2947 - protein, 19 aa, Homo sapiens
ARDVHYCSGGSCHSVGWDY

SEQ ID NO: 2948 - protein, 13 aa, Homo sapiens
ARERTYGGRLLDY

SEQ ID NO: 2949 - protein, 20 aa, Homo sapiens
ARGGRASGSYFQRHEDAFDI

SEQ ID NO: 2950 - protein, 14 aa, Homo sapiens
AREGAPYYHYYVDV

SEQ ID NO: 2951 - protein, 14 aa, Homo sapiens
ARDGIQVRMEAFDI

SEQ ID NO: 2952 - protein, 16 aa, Homo sapiens
ARHGATYAAVGTSFDY

SEQ ID NO: 2953 - protein, 7 aa, Homo sapiens
ASDWFVY

SEQ ID NO: 2954 - protein, 18 aa, Homo sapiens
ARDGRANYYGPPANWFDP

SEQ ID NO: 2955 - protein, 12 aa, Homo sapiens
AREPAGTISFDY

SEQ ID NO: 2956 - protein, 19 aa, Homo sapiens
AHTGGYTYGSRFYYYYMDV

SEQ ID NO: 2957 - protein, 15 aa, Homo sapiens
ARGIYGDYVGGAFDI

SEQ ID NO: 2958 - protein, 16 aa, Homo sapiens
ARHCTITDCGARWFDP

SEQ ID NO: 2959 - protein, 11 aa, Homo sapiens
AHRRGYDPFGY

SEQ ID NO: 2960 - protein, 12 aa, Homo sapiens
ARLLTATSPLTY

SEQ ID NO: 2961 - protein, 15 aa, Homo sapiens
ARPAAGGITGTHVDY

SEQ ID NO: 2962 - protein, 14 aa, Homo sapiens
AREGQVGATKYFRH

SEQ ID NO: 2963 - protein, 7 aa, Homo sapiens
GNVQHDY

SEQ ID NO: 2964 - protein, 11 aa, Homo sapiens
ARGKPGLWFDF

SEQ ID NO: 2965 - protein, 29 aa, Homo sapiens
AKDGFSRDLWSGYWMGGADFYYYYSYMDV

SEQ ID NO: 2966 - protein, 11 aa, Homo sapiens
AKTEGVGMTDY

SEQ ID NO: 2967 - protein, 9 aa, Homo sapiens
ATRQDCGGY

SEQ ID NO: 2968 - protein, 7 aa, Homo sapiens
TSDWFVY

SEQ ID NO: 2969 - protein, 14 aa, Homo sapiens
ASSGDNYNYYGFDS

SEQ ID NO: 2970 - protein, 11 aa, Homo sapiens
AGATIAAPIDY

SEQ ID NO: 2971 - protein, 19 aa, Homo sapiens
ASKMKSAYDITGYSEAFDI

SEQ ID NO: 2972 - protein, 12 aa, Homo sapiens
TRLGGRSNRYDY

SEQ ID NO: 2973 - protein, 18 aa, Homo sapiens
ARDQHNWNPAELLGYMDV

SEQ ID NO: 2974 - protein, 16 aa, Homo sapiens
ARHNPQDYLGSGLLDP

SEQ ID NO: 2975 - protein, 22 aa, Homo sapiens
ARSPATSLEWLLSDPYYFYMDV

SEQ ID NO: 2976 - protein, 12 aa, Homo sapiens
ARSTSGKECGDY

SEQ ID NO: 2977 - protein, 10 aa, Homo sapiens
ARDQIYYMDV

SEQ ID NO: 2978 - protein, 9 aa, Homo sapiens
ARGLYQSDH

SEQ ID NO: 2979 - protein, 11 aa, Homo sapiens
GRDRGVATSDY

SEQ ID NO: 2980 - protein, 14 aa, Homo sapiens
ARLQQSSTHSYGDY

SEQ ID NO: 2981 - protein, 10 aa, Homo sapiens
ARGHSYLMDV

SEQ ID NO: 2982 - protein, 15 aa, Homo sapiens
ARLHLFGVIENYMDV

SEQ ID NO: 2983 - protein, 11 aa, Homo sapiens
ARVAYRAGFDI

SEQ ID NO: 2984 - protein, 19 aa, Homo sapiens
VRDPEWLSEHLWASNRFDP

SEQ ID NO: 2985 - protein, 13 aa, Homo sapiens
AKLRGPSSGCPDY

SEQ ID NO: 2986 - protein, 11 aa, Homo sapiens
ALTNFFWYFHL

SEQ ID NO: 2987 - protein, 12 aa, Homo sapiens
TRGDGHSKVFDY

SEQ ID NO: 2988 - protein, 14 aa, Homo sapiens
TKSRLSSSWDYMDV

SEQ ID NO: 2989 - protein, 13 aa, Homo sapiens
ARHLPTATATFDY

SEQ ID NO: 2990 - protein, 22 aa, Homo sapiens
ARLRSRSGDDEGDDFYSYYADV

SEQ ID NO: 2991 - protein, 10 aa, Homo sapiens
AKESGAAFDP

SEQ ID NO: 2992 - protein, 28 aa, Homo sapiens
ARASYHYYDSSGYYYHVSERGHTTAFDI

SEQ ID NO: 2993 - protein, 14 aa, Homo sapiens
TTVDGWGSSWYRVS

SEQ ID NO: 2994 - protein, 12 aa, Homo sapiens
ARLGGRANRYDY

SEQ ID NO: 2995 - protein, 14 aa, Homo sapiens
ARDLSGSYTHGFDY

SEQ ID NO: 2996 - protein, 14 aa, Homo sapiens
ARDGFIAASGQFDY

SEQ ID NO: 2997 - protein, 19 aa, Homo sapiens
ARGNWLYYDSSGYEDSGGY

SEQ ID NO: 2998 - protein, 17 aa, Homo sapiens
ARDLGVGPTDYYHYMDV

SEQ ID NO: 2999 - protein, 13 aa, Homo sapiens
VKSAVAAIPAWLN

SEQ ID NO: 3000 - protein, 17 aa, Homo sapiens
ARDVSTYDGHSVFAFDI

SEQ ID NO: 3001 - protein, 15 aa, Homo sapiens
ASNGYNDGYSLSLDQ

SEQ ID NO: 3002 - protein, 10 aa, Homo sapiens
AKLVGYSPNY

SEQ ID NO: 3003 - protein, 11 aa, Homo sapiens
ASGNNWNYFDL

SEQ ID NO: 3004 - protein, 16 aa, Homo sapiens
VTDRRRYSSSPDGFDS

SEQ ID NO: 3005 - protein, 12 aa, Homo sapiens
ARGTTVSPYFDY

SEQ ID NO: 3006 - protein, 14 aa, Homo sapiens
ARRGDRNFYYYIDV

SEQ ID NO: 3007 - protein, 12 aa, Homo sapiens
AKWDANKVALDY

SEQ ID NO: 3008 - protein, 20 aa, Homo sapiens
TREGVKWTVRMGRRSGAFDI

SEQ ID NO: 3009 - protein, 17 aa, Homo sapiens
ATRSLNKWLQLDDAFDT

SEQ ID NO: 3010 - protein, 15 aa, Homo sapiens
ARVYDFSSGYYYYDY

SEQ ID NO: 3011 - protein, 13 aa, Homo sapiens
AREDVSGSMYIEV

SEQ ID NO: 3012 - protein, 8 aa, Homo sapiens
VRAWPPGD

SEQ ID NO: 3013 - protein, 17 aa, Homo sapiens
VKWGLDQHSYDSSGYYS

SEQ ID NO: 3014 - protein, 9 aa, Homo sapiens
ARGYSWLDP

SEQ ID NO: 3015 - protein, 19 aa, Homo sapiens
ARDGPYCGGDCNPYYYFDL

SEQ ID NO: 3016 - protein, 13 aa, Homo sapiens
AKQYYDRSGGFDP

SEQ ID NO: 3017 - protein, 15 aa, Homo sapiens
ARGQRYTNAPYYMDV

SEQ ID NO: 3018 - protein, 16 aa, Homo sapiens
ARGDLPSSSWYWAFDI

SEQ ID NO: 3019 - protein, 11 aa, Homo sapiens
AASTVGATIAY

SEQ ID NO: 3020 - protein, 12 aa, Homo sapiens
ARIGSSSADFDS

SEQ ID NO: 3021 - protein, 14 aa, Homo sapiens
AREGGVGGPGWFDP

SEQ ID NO: 3022 - protein, 11 aa, Homo sapiens
ARGRGTWAFDA

SEQ ID NO: 3023 - protein, 24 aa, Homo sapiens
TRDIHYGFWSGRGRNWPRIALIDS

SEQ ID NO: 3024 - protein, 9 aa, Homo sapiens
TRRPFPSEY

SEQ ID NO: 3025 - protein, 10 aa, Homo sapiens
ARDGRGFSLN

SEQ ID NO: 3026 - protein, 17 aa, Homo sapiens
ARHGPDCTSTTCYQFDY

SEQ ID NO: 3027 - protein, 17 aa, Homo sapiens
ARDRRIGTMVTQSGMDV

SEQ ID NO: 3028 - protein, 12 aa, Homo sapiens
ARGWGLRYIFDY

SEQ ID NO: 3029 - protein, 14 aa, Homo sapiens
AKFQSVTGKATFDY

SEQ ID NO: 3030 - protein, 12 aa, Homo sapiens
VRSCSRTAPRDF

SEQ ID NO: 3031 - protein, 21 aa, Homo sapiens
ARRGDCSGGSCYYYYYSYMDV

SEQ ID NO: 3032 - protein, 17 aa, Homo sapiens
AREPLCSTKRCPPRFDP

SEQ ID NO: 3033 - protein, 13 aa, Homo sapiens
AKRDTVVTHGFDY

SEQ ID NO: 3034 - protein, 15 aa, Homo sapiens
VKGATNWNFLYYMDV

SEQ ID NO: 3035 - protein, 9 aa, Homo sapiens
AGPYNYFDY

SEQ ID NO: 3036 - protein, 12 aa, Homo sapiens
ARDPDTSDKVDY

SEQ ID NO: 3037 - protein, 10 aa, Homo sapiens
AREGNDWGDF

SEQ ID NO: 3038 - protein, 19 aa, Homo sapiens
VRGGYCSSTLCYNLNAFDI

SEQ ID NO: 3039 - protein, 24 aa, Homo sapiens
ARGSKGYISGWYGAVPNYYYHMDV

SEQ ID NO: 3040 - protein, 11 aa, Homo sapiens
ARPGRDAAFDY

SEQ ID NO: 3041 - protein, 12 aa, Homo sapiens
ARGVGGYGVWYT

SEQ ID NO: 3042 - protein, 18 aa, Homo sapiens
ARIGFWSGRYLYYYYMDV

SEQ ID NO: 3043 - protein, 13 aa, Homo sapiens
ARGARWLKNRFDF

SEQ ID NO: 3044 - protein, 11 aa, Homo sapiens
ARGGRNGALDI

SEQ ID NO: 3045 - protein, 17 aa, Homo sapiens
ARSGATIFGVVIPGFDS

SEQ ID NO: 3046 - protein, 14 aa, Homo sapiens
ATPLVRAYSYYMDV

SEQ ID NO: 3047 - protein, 13 aa, Homo sapiens
AREIQYQLLAIDS

SEQ ID NO: 3048 - protein, 9 aa, Homo sapiens
AKSLTEFDL

SEQ ID NO: 3049 - protein, 15 aa, Homo sapiens
ARELPRSAYSSGWNY

SEQ ID NO: 3050 - protein, 14 aa, Homo sapiens
ARAYSGSYFDWFDP

SEQ ID NO: 3051 - protein, 20 aa, Homo sapiens
AKDDKGGSRQEFYYYYYMDV

SEQ ID NO: 3052 - protein, 19 aa, Homo sapiens
ARHPLSITPRPDLRNWFDP

SEQ ID NO: 3053 - protein, 14 aa, Homo sapiens
ARWATTRGIDFFDQ

SEQ ID NO: 3054 - protein, 13 aa, Homo sapiens
ARGTWGSSWYNDY

SEQ ID NO: 3055 - protein, 16 aa, Homo sapiens
ARARSPMSTAGWGIGY

SEQ ID NO: 3056 - protein, 16 aa, Homo sapiens
ARSGAGGYYYYYYMDV

SEQ ID NO: 3057 - protein, 18 aa, Homo sapiens
ARPPGYCSSSSAGCYFDS

SEQ ID NO: 3058 - protein, 12 aa, Homo sapiens
TRGHPRFGEIVY

SEQ ID NO: 3059 - protein, 14 aa, Homo sapiens
ATPGVSSGYYVLDH

SEQ ID NO: 3060 - protein, 16 aa, Homo sapiens
AKINYWTKGGYDYFDY

SEQ ID NO: 3061 - protein, 12 aa, Homo sapiens
ARHPRSSSWFDP

SEQ ID NO: 3062 - protein, 10 aa, Homo sapiens
ATSLAADFDY

SEQ ID NO: 3063 - protein, 17 aa, Homo sapiens
ARVMLTTSSMLPDAFDI

SEQ ID NO: 3064 - protein, 20 aa, Homo sapiens
ARHGYPPCSGGPCSEKWFDP

SEQ ID NO: 3065 - protein, 14 aa, Homo sapiens
VKDVRKYNYKMMDV

SEQ ID NO: 3066 - protein, 14 aa, Homo sapiens
ACVRRGVGKGWFDP

SEQ ID NO: 3067 - protein, 12 aa, Homo sapiens
ARESGGSYLLDY

SEQ ID NO: 3068 - protein, 16 aa, Homo sapiens
AKTGIAVAVTNWYFDL

SEQ ID NO: 3069 - protein, 11 aa, Homo sapiens
VRDGGTYYFDS

SEQ ID NO: 3070 - protein, 9 aa, Homo sapiens
VRDSYGVDY

SEQ ID NO: 3071 - protein, 15 aa, Homo sapiens
ARGEVRLLGWSPLDS

SEQ ID NO: 3072 - protein, 19 aa, Homo sapiens
ARRGSSSLYLPTISYYMDI

SEQ ID NO: 3073 - protein, 8 aa, Homo sapiens
ARGSRAPV

SEQ ID NO: 3074 - protein, 13 aa, Homo sapiens
ARQFEVVQPSLNY

SEQ ID NO: 3075 - protein, 10 aa, Homo sapiens
VGARLGLPGY

SEQ ID NO: 3076 - protein, 12 aa, Homo sapiens
TTDQGGDVLTGS

SEQ ID NO: 3077 - protein, 13 aa, Homo sapiens
AKTAQGYWRPHDS

SEQ ID NO: 3078 - protein, 17 aa, Homo sapiens
ARHNYPQRWLQSFYFDS

SEQ ID NO: 3079 - protein, 19 aa, Homo sapiens
ARAPFVSSQYAVYYYYMDV

SEQ ID NO: 3080 - protein, 11 aa, Homo sapiens
ARDNGRAAADE

SEQ ID NO: 3081 - protein, 16 aa, Homo sapiens
ARGPYNWNDQRNWFDP

SEQ ID NO: 3082 - protein, 12 aa, Homo sapiens
ARGPCTTCYSDF

SEQ ID NO: 3083 - protein, 19 aa, Homo sapiens
AREGEGDYHDSAGYDYMDV

SEQ ID NO: 3084 - protein, 15 aa, Homo sapiens
AAEYPVGFGKVPLDY

SEQ ID NO: 3085 - protein, 14 aa, Homo sapiens
ARVGGRTYTDAFDI

SEQ ID NO: 3086 - protein, 11 aa, Homo sapiens
ANSPTSVDSDY

SEQ ID NO: 3087 - protein, 13 aa, Homo sapiens
ARTRIEGGYYFDR

SEQ ID NO: 3088 - protein, 15 aa, Homo sapiens
VTELDSSAMYPGGSY

SEQ ID NO: 3089 - protein, 17 aa, Homo sapiens
ARQGYCSGGPCHRYFDP

SEQ ID NO: 3090 - protein, 21 aa, Homo sapiens
ARDRPSYCSGTTCYPNDAFDV

SEQ ID NO: 3091 - protein, 17 aa, Homo sapiens
ARARGGATGYYLYYFDY

SEQ ID NO: 3092 - protein, 17 aa, Homo sapiens
AHRRVSGSPWDWGDFDF

SEQ ID NO: 3093 - protein, 12 aa, Homo sapiens
ARYRGRPVDFDY

SEQ ID NO: 3094 - protein, 17 aa, Homo sapiens
ARGNGVVSGWKSYYFDN

SEQ ID NO: 3095 - protein, 16 aa, Homo sapiens
ATDRYSSSPGRGAVDY

SEQ ID NO: 3096 - protein, 19 aa, Homo sapiens
AKDFFPFCSGGNCFVEFDL

SEQ ID NO: 3097 - protein, 13 aa, Homo sapiens
TKGGMSSSWFWVD

SEQ ID NO: 3098 - protein, 12 aa, Homo sapiens
ARHLSGPPSHDL

SEQ ID NO: 3099 - protein, 12 aa, Homo sapiens
ARRGTDSGWYRD

SEQ ID NO: 3100 - protein, 14 aa, Homo sapiens
ARNGGYDLGWYFDL

SEQ ID NO: 3101 - protein, 18 aa, Homo sapiens
AKEPNYVWGNYRYIPFDY

SEQ ID NO: 3102 - protein, 13 aa, Homo sapiens
ARQEGSGTTWIRV

SEQ ID NO: 3103 - protein, 12 aa, Homo sapiens
ARTGSYYYYMDV

SEQ ID NO: 3104 - protein, 22 aa, Homo sapiens
ARGDNDYWSGHYTSYYYYYMDV

SEQ ID NO: 3105 - protein, 15 aa, Homo sapiens
AKVCYGNNRRLGFDS

SEQ ID NO: 3106 - protein, 15 aa, Homo sapiens
ARHIEAGAGWDWFDP

SEQ ID NO: 3107 - protein, 8 aa, Homo sapiens
FYGHYSDR

SEQ ID NO: 3108 - protein, 7 aa, Homo sapiens
AKRLSGD

SEQ ID NO: 3109 - protein, 17 aa, Homo sapiens
AREGTIFGVVTTGAFDI

SEQ ID NO: 3110 - protein, 10 aa, Homo sapiens
VASRNWALEN

SEQ ID NO: 3111 - protein, 12 aa, Homo sapiens
ARHTFSSGSCDY

SEQ ID NO: 3112 - protein, 12 aa, Homo sapiens
ATDVPGALDFDD

SEQ ID NO: 3113 - protein, 13 aa, Homo sapiens
ARPYDSSGHYYMF

SEQ ID NO: 3114 - protein, 25 aa, Homo sapiens
ARVRTGIGIAAGGTPGQYYYYYMDV

SEQ ID NO: 3115 - protein, 16 aa, Homo sapiens
ATIALTGEGGRGWFDS

SEQ ID NO: 3116 - protein, 19 aa, Homo sapiens
ARVGSESYYTPYYYYYMDV

SEQ ID NO: 3117 - protein, 12 aa, Homo sapiens
ARETDIVATNDY

SEQ ID NO: 3118 - protein, 14 aa, Homo sapiens
ARDRGSGSYEYMDV

SEQ ID NO: 3119 - protein, 11 aa, Homo sapiens
VRDDGSWGLDY

SEQ ID NO: 3120 - protein, 13 aa, Homo sapiens
ARHSTVTSFPILV

SEQ ID NO: 3121 - protein, 19 aa, Homo sapiens
VRSRLFSDTRGYPHLGLDF

SEQ ID NO: 3122 - protein, 9 aa, Homo sapiens
ARDHGESGY

SEQ ID NO: 3123 - protein, 12 aa, Homo sapiens
ARDSDSGWSLSH

SEQ ID NO: 3124 - protein, 17 aa, Homo sapiens
VRHDKIQAVAGLRGVDF

SEQ ID NO: 3125 - protein, 19 aa, Homo sapiens
ARDGNTGIFSRSYYYYLDV

SEQ ID NO: 3126 - protein, 11 aa, Homo sapiens
ARGGRTGTFDV

SEQ ID NO: 3127 - protein, 17 aa, Homo sapiens
AKDRAYCSGGRCYDTDY

SEQ ID NO: 3128 - protein, 15 aa, Homo sapiens
AKDYNYDSSGWLFDS

SEQ ID NO: 3129 - protein, 17 aa, Homo sapiens
AKEATFCGGGCLSLNDY

SEQ ID NO: 3130 - protein, 10 aa, Homo sapiens
TRGYVDLGDF

SEQ ID NO: 3131 - protein, 16 aa, Homo sapiens
AKDHLTRNNVWDDFDI

SEQ ID NO: 3132 - protein, 14 aa, Homo sapiens
ASLTEYGGSLYVDV

SEQ ID NO: 3133 - protein, 14 aa, Homo sapiens
ARYYGSGSYSWFDP

SEQ ID NO: 3134 - protein, 18 aa, Homo sapiens
AKDHGRDGHSSRAREFDY

SEQ ID NO: 3135 - protein, 19 aa, Homo sapiens
AQSLGDRCDSDGCRYYFAN

SEQ ID NO: 3136 - protein, 14 aa, Homo sapiens
AAHTSPWYSGWFDP

SEQ ID NO: 3137 - protein, 14 aa, Homo sapiens
AREALHCGGDCLDY

SEQ ID NO: 3138 - protein, 18 aa, Homo sapiens
ARQSRAYCGADCPSPFDH

SEQ ID NO: 3139 - protein, 8 aa, Homo sapiens
ARGAAFDI

SEQ ID NO: 3140 - protein, 13 aa, Homo sapiens
ANQPRDSQNILWD

SEQ ID NO: 3141 - protein, 20 aa, Homo sapiens
ARRARNYYGFWSGFGNWLDP

SEQ ID NO: 3142 - protein, 11 aa, Homo sapiens
ARDWRNKGHDV

SEQ ID NO: 3143 - protein, 11 aa, Homo sapiens
ARAPQYNWFDP

SEQ ID NO: 3144 - protein, 12 aa, Homo sapiens
AREGTSHDAFDL

SEQ ID NO: 3145 - protein, 15 aa, Homo sapiens
ARTGSGGYTGYIFDY

SEQ ID NO: 3146 - protein, 12 aa, Homo sapiens
AGHNSASLPLLL

SEQ ID NO: 3147 - protein, 15 aa, Homo sapiens
GRSDMSGNSFVEFDY

SEQ ID NO: 3148 - protein, 13 aa, Homo sapiens
ARGGTTGWGQFDY

SEQ ID NO: 3149 - protein, 10 aa, Homo sapiens
VYFHTFMFDY

SEQ ID NO: 3150 - protein, 14 aa, Homo sapiens
AKDRRDDSSSFIDP

SEQ ID NO: 3151 - protein, 8 aa, Homo sapiens
ARNRGTSH

SEQ ID NO: 3152 - protein, 18 aa, Homo sapiens
ARTLSVSEGYSYYFHMDV

SEQ ID NO: 3153 - protein, 11 aa, Homo sapiens
AREKDGYHYDY

SEQ ID NO: 3154 - protein, 15 aa, Homo sapiens
ARARYSSGWGAEFDY

SEQ ID NO: 3155 - protein, 9 aa, Homo sapiens
ATGGLHSDY

SEQ ID NO: 3156 - protein, 14 aa, Homo sapiens
AKGGGSSLNNWFDP

SEQ ID NO: 3157 - protein, 19 aa, Homo sapiens
AGLPRTGSYGGNYYYYMDV

SEQ ID NO: 3158 - protein, 13 aa, Homo sapiens
AADPRDGYGHFSD

SEQ ID NO: 3159 - protein, 15 aa, Homo sapiens
ARDKDWNRQTWIFDP

SEQ ID NO: 3160 - protein, 14 aa, Homo sapiens
AKRPAAILAYYMGV

SEQ ID NO: 3161 - protein, 19 aa, Homo sapiens
ARHRTTLFGVVNIPEYFDL

SEQ ID NO: 3162 - protein, 20 aa, Homo sapiens
AQDLPSLKGAFVVVPVAEGY

SEQ ID NO: 3163 - protein, 13 aa, Homo sapiens
ARSLPIPGVVFEY

SEQ ID NO: 3164 - protein, 16 aa, Homo sapiens
TTVRYCGGGAVYCFDY

SEQ ID NO: 3165 - protein, 11 aa, Homo sapiens
ARDIGRTALGQ

SEQ ID NO: 3166 - protein, 8 aa, Homo sapiens
ARYRGAGD

SEQ ID NO: 3167 - protein, 13 aa, Homo sapiens
ARGAQVVPHYMDV

SEQ ID NO: 3168 - protein, 17 aa, Homo sapiens
ARRELAYCGAECYFFDY

SEQ ID NO: 3169 - protein, 15 aa, Homo sapiens
GRSDTRGNSFVEFDY

SEQ ID NO: 3170 - protein, 15 aa, Homo sapiens
ARHRGVFFDTFSFDF

SEQ ID NO: 3171 - protein, 14 aa, Homo sapiens
ATGSGDYRRTHFDY

SEQ ID NO: 3172 - protein, 11 aa, Homo sapiens
VRDDGNWGLDY

SEQ ID NO: 3173 - protein, 15 aa, Homo sapiens
ARRGDYGGAWNWFGP

SEQ ID NO: 3174 - protein, 28 aa, Homo sapiens
ARGGAQFGPWVAGLGIHGYYHHYFYMDV

SEQ ID NO: 3175 - protein, 11 aa, Homo sapiens
GKNLPGHTPEH

SEQ ID NO: 3176 - protein, 11 aa, Homo sapiens
TCKWNDVGSDY

SEQ ID NO: 3177 - protein, 18 aa, Homo sapiens
VREHLIGHHSDGPPHFDH

SEQ ID NO: 3178 - protein, 15 aa, Homo sapiens
ARDLGTGSGGGYFDD

SEQ ID NO: 3179 - protein, 12 aa, Homo sapiens
AKGALPGTFFDY

SEQ ID NO: 3180 - protein, 16 aa, Homo sapiens
ATSLSRLVVVGGYFLH

SEQ ID NO: 3181 - protein, 19 aa, Homo sapiens
ALERLLYSGNYFFNRRYDP

SEQ ID NO: 3182 - protein, 12 aa, Homo sapiens
GRGAAAARKVDY

SEQ ID NO: 3183 - protein, 14 aa, Homo sapiens
ARGMGGAYYQYMDV

SEQ ID NO: 3184 - protein, 17 aa, Homo sapiens
ARMGGVASRPGRDWFDP

SEQ ID NO: 3185 - protein, 17 aa, Homo sapiens
VKPGYCSIVNCYSWFAS

SEQ ID NO: 3186 - protein, 18 aa, Homo sapiens
ARPARVYNDPDFRNFMAV

SEQ ID NO: 3187 - protein, 17 aa, Homo sapiens
ARQSRYYNSETSYGFDV

SEQ ID NO: 3188 - protein, 19 aa, Homo sapiens
ARHRGTTVVWDYYYYYMDV

SEQ ID NO: 3189 - protein, 13 aa, Homo sapiens
FRRYCIGGGCSCD

SEQ ID NO: 3190 - protein, 15 aa, Homo sapiens
ARDGYRVAATVELDH

SEQ ID NO: 3191 - protein, 17 aa, Homo sapiens
ARDRSSSNCYVCGLHDY

SEQ ID NO: 3192 - protein, 17 aa, Homo sapiens
ARHDYNFWSGYYSRIDY

SEQ ID NO: 3193 - protein, 17 aa, Homo sapiens
ARVAMVRGLTIRWYFDL

SEQ ID NO: 3194 - protein, 13 aa, Homo sapiens
VKSMDRGLTPMDV

SEQ ID NO: 3195 - protein, 12 aa, Homo sapiens
ARLITGRGYFDQ

SEQ ID NO: 3196 - protein, 13 aa, Homo sapiens
VKDESASFRLAEY

SEQ ID NO: 3197 - protein, 23 aa, Homo sapiens
ARWDEGSSSWYRGTKFDYYYMDV

SEQ ID NO: 3198 - protein, 14 aa, Homo sapiens
ARARCSSSSCLFDS

SEQ ID NO: 3199 - protein, 17 aa, Homo sapiens
ARERGADNYGTAGAFDV

SEQ ID NO: 3200 - protein, 17 aa, Homo sapiens
AKDISCRDCTRTSCHDY

SEQ ID NO: 3201 - protein, 22 aa, Homo sapiens
ARLGYCTSGSCYGVHYYNYMDV

SEQ ID NO: 3202 - protein, 16 aa, Homo sapiens
ARVLAPVTTEYYYMDV

SEQ ID NO: 3203 - protein, 19 aa, Homo sapiens
ARPKEMARIRDPADWYFDL

SEQ ID NO: 3204 - protein, 13 aa, Homo sapiens
AKGGMTSSWFWVD

SEQ ID NO: 3205 - protein, 14 aa, Homo sapiens
ARDYYTLGAVLIAD

SEQ ID NO: 3206 - protein, 14 aa, Homo sapiens
ARDLGTGGSWPFDY

SEQ ID NO: 3207 - protein, 21 aa, Homo sapiens
ARDGAAHDLLTGYQPSYYMDV

SEQ ID NO: 3208 - protein, 12 aa, Homo sapiens
ARDDETGWYSPY

SEQ ID NO: 3209 - protein, 17 aa, Homo sapiens
ARVRAAAGRGRPGVFDS

SEQ ID NO: 3210 - protein, 18 aa, Homo sapiens
ARDASCGGTTNCHDYFDY

SEQ ID NO: 3211 - protein, 17 aa, Homo sapiens
ARGSGCRSGRCYFYFDT

SEQ ID NO: 3212 - protein, 17 aa, Homo sapiens
ARGYCSRTSCQYYFDDY

SEQ ID NO: 3213 - protein, 23 aa, Homo sapiens
VRQYCSSTSCYAKFFYRHYYMDV

SEQ ID NO: 3214 - protein, 15 aa, Homo sapiens
ARDRTLYDSSGYFDY

SEQ ID NO: 3215 - protein, 11 aa, Homo sapiens
ARGWELLVLEG

SEQ ID NO: 3216 - protein, 17 aa, Homo sapiens
ARRGSSGAGDFYSYMDV

SEQ ID NO: 3217 - protein, 14 aa, Homo sapiens
ARGDSSSGVGYFQH

SEQ ID NO: 3218 - protein, 17 aa, Homo sapiens
ARDRYSGSYYESPTLDY

SEQ ID NO: 3219 - protein, 15 aa, Homo sapiens
GRSDRRDTSFVEFDY

SEQ ID NO: 3220 - protein, 10 aa, Homo sapiens
VRVFLNGFDI

SEQ ID NO: 3221 - protein, 16 aa, Homo sapiens
ARGGDNSGSWNDAFDI

SEQ ID NO: 3222 - protein, 11 aa, Homo sapiens
ARRDYRAWIDP

SEQ ID NO: 3223 - protein, 17 aa, Homo sapiens
AKGSSSNYYGAGGLDDN

SEQ ID NO: 3224 - protein, 8 aa, Homo sapiens
ARRGFFDI

SEQ ID NO: 3225 - protein, 12 aa, Homo sapiens
ARGGASSQPFHH

SEQ ID NO: 3226 - protein, 19 aa, Homo sapiens
ARDKRQFAGELSSPHWFDP

SEQ ID NO: 3227 - protein, 21 aa, Homo sapiens
ARENYDGSAYYPSFSYYYMDV

SEQ ID NO: 3228 - protein, 11 aa, Homo sapiens
AKAGDHSYFDY

SEQ ID NO: 3229 - protein, 18 aa, Homo sapiens
ARFFGVVRFQATGGWFGP

SEQ ID NO: 3230 - protein, 16 aa, Homo sapiens
ARLHGPNSWTPYYFDR

SEQ ID NO: 3231 - protein, 22 aa, Homo sapiens
ARGARLTKVETSTMIQVEAFDI

SEQ ID NO: 3232 - protein, 17 aa, Homo sapiens
ARDLSTYGGNSVFAFDI

SEQ ID NO: 3233 - protein, 15 aa, Homo sapiens
ARVPSNWNYGGYFDY

SEQ ID NO: 3234 - protein, 19 aa, Homo sapiens
ARGGFCSPTLCYNLNAFDI

SEQ ID NO: 3235 - protein, 16 aa, Homo sapiens
TRDDRRPYSLQYYTDV

SEQ ID NO: 3236 - protein, 7 aa, Homo sapiens
MRGRGGR

SEQ ID NO: 3237 - protein, 14 aa, Homo sapiens
GRVPVARPGIGIDY

SEQ ID NO: 3238 - protein, 13 aa, Homo sapiens
VKGGDLPTRPFDH

SEQ ID NO: 3239 - protein, 14 aa, Homo sapiens
ARLQQSSPNSYGDS

SEQ ID NO: 3240 - protein, 13 aa, Homo sapiens
ARVGNNGWNVFDI

SEQ ID NO: 3241 - protein, 31 aa, Homo sapiens
ARRGIAENYDILSGYYWTRSRAAEYFYHMDV

SEQ ID NO: 3242 - protein, 17 aa, Homo sapiens
ARDQGIVEGILISIFDY

SEQ ID NO: 3243 - protein, 11 aa, Homo sapiens
ARRLRPYYFDS

SEQ ID NO: 3244 - protein, 13 aa, Homo sapiens
ARRSNSWYGGFDP

SEQ ID NO: 3245 - protein, 17 aa, Homo sapiens
AHRLTSRYDWNSGIYDP

SEQ ID NO: 3246 - protein, 12 aa, Homo sapiens
ASAPGIAVWFDP

SEQ ID NO: 3247 - protein, 14 aa, Homo sapiens
ARLSDYDSNRWFDA

SEQ ID NO: 3248 - protein, 15 aa, Homo sapiens
ARHVAPGAKPYFFDH

SEQ ID NO: 3249 - protein, 21 aa, Homo sapiens
TKTSRGSCSSVRCFLNWHFDV

SEQ ID NO: 3250 - protein, 10 aa, Homo sapiens
ARDFSWSWEY

SEQ ID NO: 3251 - protein, 14 aa, Homo sapiens
ARAPTYNSGTGCDY

SEQ ID NO: 3252 - protein, 16 aa, Homo sapiens
ARGFGDYWTQRHYFDY

SEQ ID NO: 3253 - protein, 15 aa, Homo sapiens
ARVHWVGGAWLRIDP

SEQ ID NO: 3254 - protein, 13 aa, Homo sapiens
AKDIASSYFYMDV

SEQ ID NO: 3255 - protein, 14 aa, Homo sapiens
SREVVPTSLDAFDV

SEQ ID NO: 3256 - protein, 12 aa, Homo sapiens
VSGYCSGSRCFY

SEQ ID NO: 3257 - protein, 12 aa, Homo sapiens
GAYSGSSQAIDI

SEQ ID NO: 3258 - protein, 8 aa, Homo sapiens
VNRGWLEF

SEQ ID NO: 3259 - protein, 12 aa, Homo sapiens
ARLRGRLGACDP

SEQ ID NO: 3260 - protein, 16 aa, Homo sapiens
ARGAGRIAAAGTLGGY

SEQ ID NO: 3261 - protein, 11 aa, Homo sapiens
TRGDYPNWLDS

SEQ ID NO: 3262 - protein, 11 aa, Homo sapiens
AGEYANTEHDY

SEQ ID NO: 3263 - protein, 11 aa, Homo sapiens
TRYGVTAGLDY

SEQ ID NO: 3264 - protein, 11 aa, Homo sapiens
ARGLGKRSLDY

SEQ ID NO: 3265 - protein, 16 aa, Homo sapiens
AKAPYRDGFGNYYFDY

SEQ ID NO: 3266 - protein, 14 aa, Homo sapiens
ARWAMMRGNDYFDY

SEQ ID NO: 3267 - protein, 20 aa, Homo sapiens
ARDHFYDRSGYGLATDPLDY

SEQ ID NO: 3268 - protein, 14 aa, Homo sapiens
AKDSRQYRHGIMDA

SEQ ID NO: 3269 - protein, 12 aa, Homo sapiens
ARDHGGYWYLDL

SEQ ID NO: 3270 - protein, 15 aa, Homo sapiens
ARVGGRATVVTPQDH

SEQ ID NO: 3271 - protein, 15 aa, Homo sapiens
ARGGVVVVTAAMVDY

SEQ ID NO: 3272 - protein, 13 aa, Homo sapiens
ARESRDWNGLFDY

SEQ ID NO: 3273 - protein, 20 aa, Homo sapiens
ARDVSEFSQYGGSYYYYMDV

SEQ ID NO: 3274 - protein, 16 aa, Homo sapiens
ARDFNTATTYYYYMDV

SEQ ID NO: 3275 - protein, 13 aa, Homo sapiens
AREGEYNSGHFDY

SEQ ID NO: 3276 - protein, 15 aa, Homo sapiens
AREDKRGHDSDWYDP

SEQ ID NO: 3277 - protein, 12 aa, Homo sapiens
ARGLGSDYSRDY

SEQ ID NO: 3278 - protein, 17 aa, Homo sapiens
ARAEVSASYHYYYYMDV

SEQ ID NO: 3279 - protein, 16 aa, Homo sapiens
ARVGDGYNKYYYYMDV

SEQ ID NO: 3280 - protein, 14 aa, Homo sapiens
AIRPAPIFVYYMGV

SEQ ID NO: 3281 - protein, 12 aa, Homo sapiens
ARGGSGSAYFDY

SEQ ID NO: 3282 - protein, 12 aa, Homo sapiens
VRDCGTSNCWAY

SEQ ID NO: 3283 - protein, 11 aa, Homo sapiens
ATRRKVFYMDV

SEQ ID NO: 3284 - protein, 8 aa, Homo sapiens
AHRTAFDF

SEQ ID NO: 3285 - protein, 13 aa, Homo sapiens
ARGPTLVLGYMDV

SEQ ID NO: 3286 - protein, 18 aa, Homo sapiens
ARVIRESSGWNHYSYMDV

SEQ ID NO: 3287 - protein, 8 aa, Homo sapiens
VRDHYFDY

SEQ ID NO: 3288 - protein, 12 aa, Homo sapiens
ARGRAIITGIDF

SEQ ID NO: 3289 - protein, 15 aa, Homo sapiens
ARAAVVAARRNWFDS

SEQ ID NO: 3290 - protein, 18 aa, Homo sapiens
VRGGGAYCGGDCLRTLDL

SEQ ID NO: 3291 - protein, 15 aa, Homo sapiens
AKKTVVGIGRGGLDY

SEQ ID NO: 3292 - protein, 17 aa, Homo sapiens
ASGGVPDGNYYYYYMDG

SEQ ID NO: 3293 - protein, 11 aa, Homo sapiens
ASGGQITTIEY

SEQ ID NO: 3294 - protein, 17 aa, Homo sapiens
ARKYDNRMDGLGGAFDI

SEQ ID NO: 3295 - protein, 18 aa, Homo sapiens
AKSQGSNSWSFYYDYMDV

SEQ ID NO: 3296 - protein, 18 aa, Homo sapiens
ARGGNDFWSGYTDEDFDP

SEQ ID NO: 3297 - protein, 13 aa, Homo sapiens
AKGRSGFYTAFDP

SEQ ID NO: 3298 - protein, 11 aa, Homo sapiens
VRALQWDYFDD

SEQ ID NO: 3299 - protein, 21 aa, Homo sapiens
ARAPGEGTYYDILTGLSYMDV

SEQ ID NO: 3300 - protein, 16 aa, Homo sapiens
ARDGGNGVSYYYYMDV

SEQ ID NO: 3301 - protein, 17 aa, Homo sapiens
ARESLCSSRRCPPRFDL

SEQ ID NO: 3302 - protein, 18 aa, Homo sapiens
ARDLRRGVGRNYYYYMDV

SEQ ID NO: 3303 - protein, 9 aa, Homo sapiens
AKNRFDLLL

SEQ ID NO: 3304 - protein, 9 aa, Homo sapiens
VRGGGTVEF

SEQ ID NO: 3305 - protein, 16 aa, Homo sapiens
AKVRGYSGYDLYYMDV

SEQ ID NO: 3306 - protein, 18 aa, Homo sapiens
VRARTMYDSVSYWNYMDV

SEQ ID NO: 3307 - protein, 15 aa, Homo sapiens
TTDRYGGTSGAQFDY

SEQ ID NO: 3308 - protein, 13 aa, Homo sapiens
ARQSSSVVALFDY

SEQ ID NO: 3309 - protein, 19 aa, Homo sapiens
AREKREPAGGLYYYYSMDV

SEQ ID NO: 3310 - protein, 13 aa, Homo sapiens
AREDKNNFAAFDV

SEQ ID NO: 3311 - protein, 12 aa, Homo sapiens
TTDPYHGYSFYY

SEQ ID NO: 3312 - protein, 12 aa, Homo sapiens
ARVVWYDGWFDS

SEQ ID NO: 3313 - protein, 9 aa, Homo sapiens
ARDHGDSGH

SEQ ID NO: 3314 - protein, 16 aa, Homo sapiens
ARLLFPVPAAMAYFDT

SEQ ID NO: 3315 - protein, 21 aa, Homo sapiens
AKSYCSGDSCSSVSYYYYMDV

SEQ ID NO: 3316 - protein, 15 aa, Homo sapiens
ARTKLHCGGDCSPGN

SEQ ID NO: 3317 - protein, 11 aa, Homo sapiens
VCDKNFSPSGV

SEQ ID NO: 3318 - protein, 9 aa, Homo sapiens
ARTFAALDY

SEQ ID NO: 3319 - protein, 9 aa, Homo sapiens
TKDWGYLTR

SEQ ID NO: 3320 - protein, 12 aa, Homo sapiens
ATTFGSWSRFDY

SEQ ID NO: 3321 - protein, 13 aa, Homo sapiens
ARALATSGYYFDY

SEQ ID NO: 3322 - protein, 16 aa, Homo sapiens
ARYCSSSSCYDATFDI

SEQ ID NO: 3323 - protein, 11 aa, Homo sapiens
ARDQFPLPFDP

SEQ ID NO: 3324 - protein, 9 aa, Homo sapiens
SPGEALFDY

SEQ ID NO: 3325 - protein, 15 aa, Homo sapiens
ARVRFDSSGYYLLDY

SEQ ID NO: 3326 - protein, 15 aa, Homo sapiens
AREGWGLRGNYYMDV

SEQ ID NO: 3327 - protein, 12 aa, Homo sapiens
ATDLYSSGRLDY

SEQ ID NO: 3328 - protein, 12 aa, Homo sapiens
ARVGGRAAPPLY

SEQ ID NO: 3329 - protein, 11 aa, Homo sapiens
AKDAGRSGGVS

SEQ ID NO: 3330 - protein, 11 aa, Homo sapiens
ASRSSRVSATT

SEQ ID NO: 3331 - protein, 15 aa, Homo sapiens
ARPPFPSDYYYYMDV

SEQ ID NO: 3332 - protein, 12 aa, Homo sapiens
ARNDGGNGAFDY

SEQ ID NO: 3333 - protein, 15 aa, Homo sapiens
ARVGDLSGYYYYMDV

SEQ ID NO: 3334 - protein, 12 aa, Homo sapiens
ARSLTLTSHMDV

SEQ ID NO: 3335 - protein, 14 aa, Homo sapiens
ARGDGGGTIGTLPY

SEQ ID NO: 3336 - protein, 15 aa, Homo sapiens
ATNGYNDGYSLSLDH

SEQ ID NO: 3337 - protein, 9 aa, Homo sapiens
TRDHGDSGY

SEQ ID NO: 3338 - protein, 15 aa, Homo sapiens
AKPLSPPLAHGGFDS

SEQ ID NO: 3339 - protein, 17 aa, Homo sapiens
ARRDSPMVRGVTNWFDP

SEQ ID NO: 3340 - protein, 12 aa, Homo sapiens
TRFESAGGFGDV

SEQ ID NO: 3341 - protein, 14 aa, Homo sapiens
ARSGYSYGYGYFDY

SEQ ID NO: 3342 - protein, 17 aa, Homo sapiens
ARHRISSGGIRSNWFDP

SEQ ID NO: 3343 - protein, 10 aa, Homo sapiens
ASGYTYGHDY

SEQ ID NO: 3344 - protein, 17 aa, Homo sapiens
AGSRNDFWGGYNNWFDP

SEQ ID NO: 3345 - protein, 11 aa, Homo sapiens
ARGDYWHYFDY

SEQ ID NO: 3346 - protein, 20 aa, Homo sapiens
ARDTPNCSSTICYPRYYFDY

SEQ ID NO: 3347 - protein, 16 aa, Homo sapiens
ARVLGHYVSGRSHCDY

SEQ ID NO: 3348 - protein, 18 aa, Homo sapiens
ARVTDIVAGRVSRFYFDS

SEQ ID NO: 3349 - protein, 8 aa, Homo sapiens
ARNNFMDV

SEQ ID NO: 3350 - protein, 6 aa, Homo sapiens
ARWTNI

SEQ ID NO: 3351 - protein, 7 aa, Homo sapiens
VRGRSAV

SEQ ID NO: 3352 - protein, 12 aa, Homo sapiens
ARVKDAVGGLDF

SEQ ID NO: 3353 - protein, 7 aa, Homo sapiens
TTGKLPL

SEQ ID NO: 3354 - protein, 14 aa, Homo sapiens
AGTTVPLRPDGCDL

SEQ ID NO: 3355 - protein, 14 aa, Homo sapiens
ATGNLMTTIRPFDY

SEQ ID NO: 3356 - protein, 16 aa, Homo sapiens
VRGGTITPGGIFGVDY

SEQ ID NO: 3357 - protein, 14 aa, Homo sapiens
TKWTLISLGNDGAY

SEQ ID NO: 3358 - protein, 14 aa, Homo sapiens
ARRLAGTYQADFDS

SEQ ID NO: 3359 - protein, 12 aa, Homo sapiens
APARGGYDYFDY

SEQ ID NO: 3360 - protein, 13 aa, Homo sapiens
ARGGWGKLGYFDF

SEQ ID NO: 3361 - protein, 17 aa, Homo sapiens
ARSVYGDSEGRGGALDP

SEQ ID NO: 3362 - protein, 13 aa, Homo sapiens
VRREAGATLTFDY

SEQ ID NO: 3363 - protein, 15 aa, Homo sapiens
ARRFSGNSWAMYFDY

SEQ ID NO: 3364 - protein, 15 aa, Homo sapiens
ARIVTETSGETFFDY

SEQ ID NO: 3365 - protein, 13 aa, Homo sapiens
ARGLMATKTDFDY

SEQ ID NO: 3366 - protein, 13 aa, Homo sapiens
ARLKGYSYGLFDY

SEQ ID NO: 3367 - protein, 10 aa, Homo sapiens
VRDRLGDSEY

SEQ ID NO: 3368 - protein, 16 aa, Homo sapiens
TRDPGYGTPSGDWFDP

SEQ ID NO: 3369 - protein, 15 aa, Homo sapiens
GRSDTSGNVFVEFDY

SEQ ID NO: 3370 - protein, 5 aa, Homo sapiens
TRGDS

SEQ ID NO: 3371 - protein, 15 aa, Homo sapiens
ARDEQKDDVRGWFDP

SEQ ID NO: 3372 - protein, 14 aa, Homo sapiens
GRLFKYNNYWTIDF

SEQ ID NO: 3373 - protein, 15 aa, Homo sapiens
AREGAVVPTSRALDY

SEQ ID NO: 3374 - protein, 8 aa, Homo sapiens
AKEGPDGN

SEQ ID NO: 3375 - protein, 15 aa, Homo sapiens
VRGREWLFIEYFFDF

SEQ ID NO: 3376 - protein, 17 aa, Homo sapiens
ARDVSTYGGMSVFAFDI

SEQ ID NO: 3377 - protein, 20 aa, Homo sapiens
ARNVRQRDRRPPSFAHHMDV

SEQ ID NO: 3378 - protein, 16 aa, Homo sapiens
EREEYCGSGTCYKSAH

SEQ ID NO: 3379 - protein, 14 aa, Homo sapiens
AKDRTPDGRTEIDY

SEQ ID NO: 3380 - protein, 22 aa, Homo sapiens
ARERVLRFSAPRYNFTRGFFDS

SEQ ID NO: 3381 - protein, 15 aa, Homo sapiens
ARDPRKSMVGRYFDR

SEQ ID NO: 3382 - protein, 10 aa, Homo sapiens
ADGGAVPLGF

SEQ ID NO: 3383 - protein, 14 aa, Homo sapiens
AKGGASPPGNWFDP

SEQ ID NO: 3384 - protein, 14 aa, Homo sapiens
AREGVSRLNWYFDL

SEQ ID NO: 3385 - protein, 12 aa, Homo sapiens
AKEGAFGDYFEN

SEQ ID NO: 3386 - protein, 12 aa, Homo sapiens
ARRDYGSSQFDY

SEQ ID NO: 3387 - protein, 17 aa, Homo sapiens
AKDVTVTTSYYFYYMDG

SEQ ID NO: 3388 - protein, 9 aa, Homo sapiens
ARGLAGARY

SEQ ID NO: 3389 - protein, 16 aa, Homo sapiens
SRRSCPTGSCYYAFDY

SEQ ID NO: 3390 - protein, 17 aa, Homo sapiens
ARDVHCAGGSCYMPPDY

SEQ ID NO: 3391 - protein, 14 aa, Homo sapiens
TRAAGWTFYYYMDV

SEQ ID NO: 3392 - protein, 10 aa, Homo sapiens
ASLGYGHSAF

SEQ ID NO: 3393 - protein, 14 aa, Homo sapiens
AKWVVAGDIEYFDY

SEQ ID NO: 3394 - protein, 14 aa, Homo sapiens
ARHVHRVYEYYFEY

SEQ ID NO: 3395 - protein, 16 aa, Homo sapiens
ARDIMTFGGRAGAFDS

SEQ ID NO: 3396 - protein, 15 aa, Homo sapiens
VRYGPETMRFTSIDL

SEQ ID NO: 3397 - protein, 10 aa, Homo sapiens
VRDQGWTFDI

SEQ ID NO: 3398 - protein, 12 aa, Homo sapiens
ARGLYHLPPFDF

SEQ ID NO: 3399 - protein, 15 aa, Homo sapiens
TRDTWVNWQQPCYDY

SEQ ID NO: 3400 - protein, 17 aa, Homo sapiens
ARDVNGHAAVVGTRMDV

SEQ ID NO: 3401 - protein, 14 aa, Homo sapiens
ARGGVGGEWLFSDY

SEQ ID NO: 3402 - protein, 16 aa, Homo sapiens
ARISALIAAPGGWFHP

SEQ ID NO: 3403 - protein, 10 aa, Homo sapiens
ARLDSNWFDP

SEQ ID NO: 3404 - protein, 14 aa, Homo sapiens
ARHLNFDSGGRLDF

SEQ ID NO: 3405 - protein, 11 aa, Homo sapiens
ARDPPGNAFDI

SEQ ID NO: 3406 - protein, 15 aa, Homo sapiens
ARGVGTVRAGGHMDV

SEQ ID NO: 3407 - protein, 7 aa, Homo sapiens
SFGFFEN

SEQ ID NO: 3408 - protein, 19 aa, Homo sapiens
ARGRREYKGYDYGVTWFDP

SEQ ID NO: 3409 - protein, 11 aa, Homo sapiens
ARLDRTYGFDR

SEQ ID NO: 3410 - protein, 14 aa, Homo sapiens
VRDKGSGSWYAIDY

SEQ ID NO: 3411 - protein, 16 aa, Homo sapiens
ARDGQGYCSSTSCYDS

SEQ ID NO: 3412 - protein, 16 aa, Homo sapiens
ARFGSGVATYLNVFDI

SEQ ID NO: 3413 - protein, 13 aa, Homo sapiens
ATSGPGVFYYMDA

SEQ ID NO: 3414 - protein, 15 aa, Homo sapiens
ARVGRDVVVYGAFDL

SEQ ID NO: 3415 - protein, 21 aa, Homo sapiens
ARDFNSGGAGKYATYFYYMDV

SEQ ID NO: 3416 - protein, 16 aa, Homo sapiens
ATVIFMVRGTENWFDP

SEQ ID NO: 3417 - protein, 9 aa, Homo sapiens
IRSQYYDFY

SEQ ID NO: 3418 - protein, 8 aa, Homo sapiens
LGAGGGSS

SEQ ID NO: 3419 - protein, 16 aa, Homo sapiens
THDIYDFSSNFGAFST

SEQ ID NO: 3420 - protein, 11 aa, Homo sapiens
ARGEVTFGLDY

SEQ ID NO: 3421 - protein, 16 aa, Homo sapiens
AGGRSGYYLGGRAFDM

SEQ ID NO: 3422 - protein, 18 aa, Homo sapiens
ARDGKFCQSSNCYSWNDF

SEQ ID NO: 3423 - protein, 21 aa, Homo sapiens
ARGLDVEMATISYHYSYYMDV

SEQ ID NO: 3424 - protein, 12 aa, Homo sapiens
ARGLALGRYMDV

SEQ ID NO: 3425 - protein, 15 aa, Homo sapiens
ARQDSDFWSGYLFDL

SEQ ID NO: 3426 - protein, 14 aa, Homo sapiens
ARAIVPVHRGWFDP

SEQ ID NO: 3427 - protein, 17 aa, Homo sapiens
ARVLGNWYYEDYYYMDV

SEQ ID NO: 3428 - protein, 14 aa, Homo sapiens
AREAINCGGDCLDY

SEQ ID NO: 3429 - protein, 14 aa, Homo sapiens
VRDRVSSSAYHMDV

SEQ ID NO: 3430 - protein, 13 aa, Homo sapiens
ARIVDYFDNRDAI

SEQ ID NO: 3431 - protein, 10 aa, Homo sapiens
LRDTAWIRDL

SEQ ID NO: 3432 - protein, 18 aa, Homo sapiens
ARFLSSAEGYDYYFYMDV

SEQ ID NO: 3433 - protein, 18 aa, Homo sapiens
VRGGGAYCGSDCLRTFDI

SEQ ID NO: 3434 - protein, 16 aa, Homo sapiens
AREFEGPGGRSWYFDP

SEQ ID NO: 3435 - protein, 10 aa, Homo sapiens
ARDRAYSLDE

SEQ ID NO: 3436 - protein, 28 aa, Homo sapiens
ARRLRASAAYHNYDFWSGYGDSYYYMDV

SEQ ID NO: 3437 - protein, 14 aa, Homo sapiens
ARGPVKGGHWSGDS

SEQ ID NO: 3438 - protein, 12 aa, Homo sapiens
ARGVSGHYYMDV

SEQ ID NO: 3439 - protein, 17 aa, Homo sapiens
ARDPNRRAMTMIDNFDY

SEQ ID NO: 3440 - protein, 17 aa, Homo sapiens
ARGHPTYSDYDPLLIDY

SEQ ID NO: 3441 - protein, 7 aa, Homo sapiens
ANVQHDF

SEQ ID NO: 3442 - protein, 10 aa, Homo sapiens
ARVWSRSYDY

SEQ ID NO: 3443 - protein, 14 aa, Homo sapiens
AKGWGATPRDYFDY

SEQ ID NO: 3444 - protein, 12 aa, Homo sapiens
ARGGASSRPFHH

SEQ ID NO: 3445 - protein, 14 aa, Homo sapiens
ARDRSPSDGWEPDN

SEQ ID NO: 3446 - protein, 10 aa, Homo sapiens
AREQQMKLDH

SEQ ID NO: 3447 - protein, 13 aa, Homo sapiens
ARRGVAKKGWFDP

SEQ ID NO: 3448 - protein, 17 aa, Homo sapiens
VRHEASYGTFGYHFLDS

SEQ ID NO: 3449 - protein, 12 aa, Homo sapiens
AKRTWRNYYMDV

SEQ ID NO: 3450 - protein, 6 aa, Homo sapiens
SPSLNS

SEQ ID NO: 3451 - protein, 10 aa, Homo sapiens
AHSSGWVSDY

SEQ ID NO: 3452 - protein, 9 aa, Homo sapiens
ARAVDVGDY

SEQ ID NO: 3453 - protein, 7 aa, Homo sapiens
ATSGGGH

SEQ ID NO: 3454 - protein, 8 aa, Homo sapiens
ARRGGLDY

SEQ ID NO: 3455 - protein, 12 aa, Homo sapiens
ARPGPGYDAFDI

SEQ ID NO: 3456 - protein, 15 aa, Homo sapiens
ARARIAVAGTDYFEY

SEQ ID NO: 3457 - protein, 15 aa, Homo sapiens
ARGGEGGYSYGCFDY

SEQ ID NO: 3458 - protein, 8 aa, Homo sapiens
ARAPSSDY

SEQ ID NO: 3459 - protein, 6 aa, Homo sapiens
TTDHFT

SEQ ID NO: 3460 - protein, 6 aa, Homo sapiens
TRGLDV

SEQ ID NO: 3461 - protein, 12 aa, Homo sapiens
ARLGYYSYAMDV

SEQ ID NO: 3462 - protein, 15 aa, Homo sapiens
ARRAILGPGSSRFDS

SEQ ID NO: 3463 - protein, 18 aa, Homo sapiens
ARETYYYDSSGYYNWFDP

SEQ ID NO: 3464 - protein, 18 aa, Homo sapiens
ARVGRDYYDSSGYYPIDY

SEQ ID NO: 3465 - protein, 13 aa, Homo sapiens
ARGGGGDRDAFDI

SEQ ID NO: 3466 - protein, 12 aa, Homo sapiens
AKDRLTISAFDI

SEQ ID NO: 3467 - protein, 14 aa, Homo sapiens
AKNRGYSGYDPLDY

SEQ ID NO: 3468 - protein, 12 aa, Homo sapiens
ARSAYYKEWLDP

SEQ ID NO: 3469 - protein, 6 aa, Homo sapiens
VRGVDH

SEQ ID NO: 3470 - protein, 9 aa, Homo sapiens
AKGWQAPDY

SEQ ID NO: 3471 - protein, 7 aa, Homo sapiens
AISVGED

SEQ ID NO: 3472 - protein, 9 aa, Homo sapiens
ATDRGSFDY

SEQ ID NO: 3473 - protein, 10 aa, Homo sapiens
ARGSSSGFGY

SEQ ID NO: 3474 - protein, 10 aa, Homo sapiens
AGGSGWLIDC

SEQ ID NO: 3475 - protein, 6 aa, Homo sapiens
ASRWHD

SEQ ID NO: 3476 - protein, 10 aa, Homo sapiens
ARDWRGDFDY

SEQ ID NO: 3477 - protein, 5 aa, Homo sapiens
STYEY

SEQ ID NO: 3478 - protein, 12 aa, Homo sapiens
VNYYGSGSYGHY

SEQ ID NO: 3479 - protein, 11 aa, Homo sapiens
ARGYSTTYLDY

SEQ ID NO: 3480 - protein, 7 aa, Homo sapiens
MTVFGGD

SEQ ID NO: 3481 - protein, 8 aa, Homo sapiens
ATGGWDGY

SEQ ID NO: 3482 - protein, 5 aa, Homo sapiens
GGAWS

SEQ ID NO: 3483 - protein, 20 aa, Homo sapiens
ARERNYVVVVTATPTRYFDY

SEQ ID NO: 3484 - protein, 13 aa, Homo sapiens
ARDPPELHSAFDI

SEQ ID NO: 3485 - protein, 9 aa, Homo sapiens
ARGIWGSDY

SEQ ID NO: 3486 - protein, 8 aa, Homo sapiens
AKDHPFDY

SEQ ID NO: 3487 - protein, 12 aa, Homo sapiens
AKHLSGTYSFDS

SEQ ID NO: 3488 - protein, 12 aa, Homo sapiens
ARGGASSLPFDL

SEQ ID NO: 3489 - protein, 10 aa, Homo sapiens
ARDWGGNLDY

SEQ ID NO: 3490 - protein, 16 aa, Homo sapiens
ARGIPVVRGVISPLDY

SEQ ID NO: 3491 - protein, 18 aa, Homo sapiens
ATGGGGIAVAGTGGWFDP

SEQ ID NO: 3492 - protein, 12 aa, Homo sapiens
ATNLPYGDSSDH

SEQ ID NO: 3493 - protein, 14 aa, Homo sapiens
ARHCGGDCSHAFDI

SEQ ID NO: 3494 - protein, 8 aa, Homo sapiens
ASGEWFDY

SEQ ID NO: 3495 - protein, 11 aa, Homo sapiens
VKDILGWAFDY

SEQ ID NO: 3496 - protein, 11 aa, Homo sapiens
ARDRPGDGIDY

SEQ ID NO: 3497 - protein, 7 aa, Homo sapiens
ARDNFDI

SEQ ID NO: 3498 - protein, 11 aa, Homo sapiens
ARLGAAAGTDY

SEQ ID NO: 3499 - protein, 20 aa, Homo sapiens
ARAPGYCSGDTCYSAYYFDY

SEQ ID NO: 3500 - protein, 13 aa, Homo sapiens
ARGIHSGSYLFDY

SEQ ID NO: 3501 - protein, 12 aa, Homo sapiens
VKVLERYGNFDY

SEQ ID NO: 3502 - protein, 15 aa, Homo sapiens
ARDGGRYSGTYLNDY

SEQ ID NO: 3503 - protein, 11 aa, Homo sapiens
ARHSSDWSFDY

SEQ ID NO: 3504 - protein, 10 aa, Homo sapiens
VRAVGSSDCY

SEQ ID NO: 3505 - protein, 12 aa, Homo sapiens
AGCGGDCYTIDH

SEQ ID NO: 3506 - protein, 15 aa, Homo sapiens
ARFSGPRLAYNWFDP

SEQ ID NO: 3507 - protein, 9 aa, Homo sapiens
ARWWNYFDY

SEQ ID NO: 3508 - protein, 8 aa, Homo sapiens
ARLRGFDY

SEQ ID NO: 3509 - protein, 11 aa, Homo sapiens
TRDPYYYGMDV

SEQ ID NO: 3510 - protein, 6 aa, Homo sapiens
TASDDY

SEQ ID NO: 3511 - protein, 11 aa, Homo sapiens
ARDGSQRSFQH

SEQ ID NO: 3512 - protein, 13 aa, Homo sapiens
ARDRTNGWGAFDI

SEQ ID NO: 3513 - protein, 11 aa, Homo sapiens
ARDGSEWSRDY

SEQ ID NO: 3514 - protein, 12 aa, Homo sapiens
ASRGHTLGYFDY

SEQ ID NO: 3515 - protein, 9 aa, Homo sapiens
ARDARYSDF

SEQ ID NO: 3516 - protein, 13 aa, Homo sapiens
ARGGGDLQPDFDY

SEQ ID NO: 3517 - protein, 11 aa, Homo sapiens
ARGGFGELLNF

SEQ ID NO: 3518 - protein, 6 aa, Homo sapiens
TTIFDF

SEQ ID NO: 3519 - protein, 13 aa, Homo sapiens
ARLSIAVSGDFDF

SEQ ID NO: 3520 - protein, 9 aa, Homo sapiens
AREANSFDI

SEQ ID NO: 3521 - protein, 13 aa, Homo sapiens
ATRPNGDYPYFDY

SEQ ID NO: 3522 - protein, 10 aa, Homo sapiens
AQRVEGAFHE

SEQ ID NO: 3523 - protein, 13 aa, Homo sapiens
TRDLVLGSGSSDY

SEQ ID NO: 3524 - protein, 11 aa, Homo sapiens
TRQAYTVTPDY

SEQ ID NO: 3525 - protein, 14 aa, Homo sapiens
ARDRRPSIYNGLDV

SEQ ID NO: 3526 - protein, 15 aa, Homo sapiens
ARPLESSSWKEWFDP

SEQ ID NO: 3527 - protein, 11 aa, Homo sapiens
ATTGITGTGDY

SEQ ID NO: 3528 - protein, 10 aa, Homo sapiens
ARGGGNTLAY

SEQ ID NO: 3529 - protein, 8 aa, Homo sapiens
ARGRHLAY

SEQ ID NO: 3530 - protein, 9 aa, Homo sapiens
TREADGFDI

SEQ ID NO: 3531 - protein, 8 aa, Homo sapiens
TKGSWGDN

SEQ ID NO: 3532 - protein, 11 aa, Homo sapiens
ARDERGGGIDY

SEQ ID NO: 3533 - protein, 13 aa, Homo sapiens
ARLHYYGSEEFDS

SEQ ID NO: 3534 - protein, 13 aa, Homo sapiens
ARDLSGYDPPFGY

SEQ ID NO: 3535 - protein, 18 aa, Homo sapiens
VRDYGYDRSGYWQKYFDY

SEQ ID NO: 3536 - protein, 9 aa, Homo sapiens
ARAPGGMDV

SEQ ID NO: 3537 - protein, 10 aa, Homo sapiens
TRDNGDPFDY

SEQ ID NO: 3538 - protein, 10 aa, Homo sapiens
VGGYGWLPDS

SEQ ID NO: 3539 - protein, 13 aa, Homo sapiens
VKDPGPNPRGMDA

SEQ ID NO: 3540 - protein, 10 aa, Homo sapiens
ARGYGSGPHY

SEQ ID NO: 3541 - protein, 14 aa, Homo sapiens
ARRRGSTDNNWLDP

SEQ ID NO: 3542 - protein, 14 aa, Homo sapiens
ARDRHSSGWRLFDY

SEQ ID NO: 3543 - protein, 11 aa, Homo sapiens
AKDGGGYSFDH

SEQ ID NO: 3544 - protein, 15 aa, Homo sapiens
ARDISYDDKSWWLDP

SEQ ID NO: 3545 - protein, 10 aa, Homo sapiens
VRDEPGSFDY

SEQ ID NO: 3546 - protein, 10 aa, Homo sapiens
ARVTRGYFDY

SEQ ID NO: 3547 - protein, 8 aa, Homo sapiens
TRDDYIDS

SEQ ID NO: 3548 - protein, 10 aa, Homo sapiens
TTRSRGTLDY

SEQ ID NO: 3549 - protein, 14 aa, Homo sapiens
ARHLMITFGGLPDY

SEQ ID NO: 3550 - protein, 9 aa, Homo sapiens
ARYVRAFDY

SEQ ID NO: 3551 - protein, 12 aa, Homo sapiens
ARHGDGYNPLNY

SEQ ID NO: 3552 - protein, 9 aa, Homo sapiens
ARGSGAGDY

SEQ ID NO: 3553 - protein, 14 aa, Homo sapiens
ARASYSSGTYYNDY

SEQ ID NO: 3554 - protein, 17 aa, Homo sapiens
ARGEGEGKYYYYYGMDV

SEQ ID NO: 3555 - protein, 11 aa, Homo sapiens
VREFRGGTFDY

SEQ ID NO: 3556 - protein, 6 aa, Homo sapiens
AQNGGY

SEQ ID NO: 3557 - protein, 15 aa, Homo sapiens
ASGTGDHASIWSMDV

SEQ ID NO: 3558 - protein, 9 aa, Homo sapiens
VRGFRGLDV

SEQ ID NO: 3559 - protein, 5 aa, Homo sapiens
ARGYL

SEQ ID NO: 3560 - protein, 14 aa, Homo sapiens
ARGGVPGQQLPRDY

SEQ ID NO: 3561 - protein, 12 aa, Homo sapiens
ARGTRWSWYFDL

SEQ ID NO: 3562 - protein, 8 aa, Homo sapiens
ARGYSGSH

SEQ ID NO: 3563 - protein, 14 aa, Homo sapiens
ARERENCGGDCLDY

SEQ ID NO: 3564 - protein, 13 aa, Homo sapiens
VRDGGGGYNQIDY

SEQ ID NO: 3565 - protein, 13 aa, Homo sapiens
ARGNYHGSGSLDY

SEQ ID NO: 3566 - protein, 5 aa, Homo sapiens
ARDVH

SEQ ID NO: 3567 - protein, 8 aa, Homo sapiens
ARRSFLDV

SEQ ID NO: 3568 - protein, 16 aa, Homo sapiens
ARPPETSGWYRNCFDP

SEQ ID NO: 3569 - protein, 6 aa, Homo sapiens
LRSFDT

SEQ ID NO: 3570 - protein, 15 aa, Homo sapiens
ARGSVELRDYYYMDV

SEQ ID NO: 3571 - protein, 8 aa, Homo sapiens
ARERGPNL

SEQ ID NO: 3572 - protein, 9 aa, Homo sapiens
AKGHTILDP

SEQ ID NO: 3573 - protein, 14 aa, Homo sapiens
ARDRRGYSGYDLDY

SEQ ID NO: 3574 - protein, 11 aa, Homo sapiens
ATGYSYGNFDY

SEQ ID NO: 3575 - protein, 9 aa, Homo sapiens
AKNSGSYDY

SEQ ID NO: 3576 - protein, 6 aa, Homo sapiens
ARGTSP

SEQ ID NO: 3577 - protein, 11 aa, Homo sapiens
AKVHGGYYFDL

SEQ ID NO: 3578 - protein, 14 aa, Homo sapiens
IRHHYDSSGYYYGY

SEQ ID NO: 3579 - protein, 9 aa, Homo sapiens
ARGGSYFDS

SEQ ID NO: 3580 - protein, 14 aa, Homo sapiens
ARRIAVAGHWYFDL

SEQ ID NO: 3581 - protein, 14 aa, Homo sapiens
AREIPDCGGDCLDY

SEQ ID NO: 3582 - protein, 9 aa, Homo sapiens
ARGNGYHLF

SEQ ID NO: 3583 - protein, 9 aa, Homo sapiens
ARGNGYIRY

SEQ ID NO: 3584 - protein, 11 aa, Homo sapiens
VREWSGGHFDY

SEQ ID NO: 3585 - protein, 14 aa, Homo sapiens
ARAGTWGPYDAFDI

SEQ ID NO: 3586 - protein, 9 aa, Homo sapiens
TRGLNSFDI

SEQ ID NO: 3587 - protein, 10 aa, Homo sapiens
ARGYNYAFDF

SEQ ID NO: 3588 - protein, 10 aa, Homo sapiens
VSGLGWLPDY

SEQ ID NO: 3589 - protein, 8 aa, Homo sapiens
TRDTRFYY

SEQ ID NO: 3590 - protein, 11 aa, Homo sapiens
AREVPTTASDF

SEQ ID NO: 3591 - protein, 10 aa, Homo sapiens
ARDRGDYFDY

SEQ ID NO: 3592 - protein, 6 aa, Homo sapiens
ATARDY

SEQ ID NO: 3593 - protein, 6 aa, Homo sapiens
ARHPDS

SEQ ID NO: 3594 - protein, 14 aa, Homo sapiens
ARGDSSGWANAFDI

SEQ ID NO: 3595 - protein, 10 aa, Homo sapiens
AKLVPDYFDY

SEQ ID NO: 3596 - protein, 13 aa, Homo sapiens
ARVGSGARTWFDP

SEQ ID NO: 3597 - protein, 9 aa, Homo sapiens
AKDGRTWPF

SEQ ID NO: 3598 - protein, 16 aa, Homo sapiens
AREVMDSISRGWYFDL

SEQ ID NO: 3599 - protein, 8 aa, Homo sapiens
ARGRGVDG

SEQ ID NO: 3600 - protein, 16 aa, Homo sapiens
AKETYYYDSSGYPFDY

SEQ ID NO: 3601 - protein, 12 aa, Homo sapiens
ARYGRGWPDLDY

SEQ ID NO: 3602 - protein, 12 aa, Homo sapiens
ERERSGYSYVDY

SEQ ID NO: 3603 - protein, 11 aa, Homo sapiens
ARDKGVASLDY

SEQ ID NO: 3604 - protein, 11 aa, Homo sapiens
ARGHSSGHFDY

SEQ ID NO: 3605 - protein, 13 aa, Homo sapiens
VGDPPRSGYAFDI

SEQ ID NO: 3606 - protein, 9 aa, Homo sapiens
ARASKGMDV

SEQ ID NO: 3607 - protein, 9 aa, Homo sapiens
ASRSDGFDH

SEQ ID NO: 3608 - protein, 8 aa, Homo sapiens
ARHKGLDL

SEQ ID NO: 3609 - protein, 12 aa, Homo sapiens
ARRGRENYWVDY

SEQ ID NO: 3610 - protein, 14 aa, Homo sapiens
AKAGAAPPGNWFDS

SEQ ID NO: 3611 - protein, 13 aa, Homo sapiens
ATHMTAVTTALDY

SEQ ID NO: 3612 - protein, 16 aa, Homo sapiens
ARGAYSSGWYPDYFDY

SEQ ID NO: 3613 - skipped

SEQ ID NO: 3614 - protein, 10 aa, Homo sapiens
AKGGINAFDI

SEQ ID NO: 3615 - protein, 11 aa, Homo sapiens
AREFKPSAMDV

SEQ ID NO: 3616 - protein, 8 aa, Homo sapiens
RGSGEFDY

SEQ ID NO: 3617 - protein, 9 aa, Homo sapiens
ARTSGWSDY

SEQ ID NO: 3618 - protein, 14 aa, Homo sapiens
ARSHTGNYYYGMDV

SEQ ID NO: 3619 - protein, 11 aa, Homo sapiens
ARVGYSGSEDY

SEQ ID NO: 3620 - protein, 7 aa, Homo sapiens
ALRRGDY

SEQ ID NO: 3621 - protein, 9 aa, Homo sapiens
ARGSYGPDV

SEQ ID NO: 3622 - protein, 10 aa, Homo sapiens
ARDNNDLFDY

SEQ ID NO: 3623 - protein, 11 aa, Homo sapiens
ARLRSGGYADY

SEQ ID NO: 3624 - protein, 10 aa, Homo sapiens
ARDWWGSLEY

SEQ ID NO: 3625 - protein, 10 aa, Homo sapiens
ARDDYYYFDY

SEQ ID NO: 3626 - protein, 9 aa, Homo sapiens
ARGGAKFDY

SEQ ID NO: 3627 - protein, 11 aa, Homo sapiens
ARDPDGHYFDY

SEQ ID NO: 3628 - protein, 10 aa, Homo sapiens
ARGSSGALDI

SEQ ID NO: 3629 - protein, 10 aa, Homo sapiens
ARGADRSLDY

SEQ ID NO: 3630 - protein, 8 aa, Homo sapiens
ARAISMDV

SEQ ID NO: 3631 - protein, 9 aa, Homo sapiens
AKDNDGFDI

SEQ ID NO: 3632 - protein, 12 aa, Homo sapiens
GVTTYYYYGMDV

SEQ ID NO: 3633 - protein, 13 aa, Homo sapiens
ARGGRGGLYYIDY

SEQ ID NO: 3634 - protein, 10 aa, Homo sapiens
ARGGQWLIRN

SEQ ID NO: 3635 - protein, 12 aa, Homo sapiens
ARGIGTYALFAY

SEQ ID NO: 3636 - protein, 8 aa, Homo sapiens
AKDRMAAN

SEQ ID NO: 3637 - protein, 9 aa, Homo sapiens
ARGGRYFDL

SEQ ID NO: 3638 - protein, 11 aa, Homo sapiens
ARHIVVVTAPP

SEQ ID NO: 3639 - protein, 7 aa, Homo sapiens
TRGLGDH

SEQ ID NO: 3640 - protein, 9 aa, Homo sapiens
AKGGGWMDV

SEQ ID NO: 3641 - protein, 15 aa, Homo sapiens
AKDRGAMIVVVIWDY

SEQ ID NO: 3642 - protein, 14 aa, Homo sapiens
AKDRVVDGLFEIDF

SEQ ID NO: 3643 - protein, 13 aa, Homo sapiens
ARDPVDGYAHFDH

SEQ ID NO: 3644 - protein, 17 aa, Homo sapiens
AHLFYYDTNGYYRYFDY

SEQ ID NO: 3645 - protein, 11 aa, Homo sapiens
ARERTNYGMDV

SEQ ID NO: 3646 - protein, 14 aa, Homo sapiens
ARDLLSDSGFEFDY

SEQ ID NO: 3647 - protein, 11 aa, Homo sapiens
ARGPNTGCFDY

SEQ ID NO: 3648 - protein, 10 aa, Homo sapiens
ARDRGWYEDY

SEQ ID NO: 3649 - protein, 6 aa, Homo sapiens
TTVGRF

SEQ ID NO: 3650 - protein, 8 aa, Homo sapiens
AKGSYSDY

SEQ ID NO: 3651 - protein, 7 aa, Homo sapiens
VASWLDP

SEQ ID NO: 3652 - protein, 8 aa, Homo sapiens
VRYPTFDY

SEQ ID NO: 3653 - protein, 8 aa, Homo sapiens
VKGTWAEN

SEQ ID NO: 3654 - protein, 18 aa, Homo sapiens
AKGTLPSCRGASCYPLDY

SEQ ID NO: 3655 - protein, 11 aa, Homo sapiens
ARDDGYSRFEY

SEQ ID NO: 3656 - protein, 8 aa, Homo sapiens
AGSGWFAY

SEQ ID NO: 3657 - protein, 11 aa, Homo sapiens
VAGLGTSDVDF

SEQ ID NO: 3658 - protein, 12 aa, Homo sapiens
ARLPYFYYYMDV

SEQ ID NO: 3659 - protein, 11 aa, Homo sapiens
ATDLRGGYFDY

SEQ ID NO: 3660 - protein, 10 aa, Homo sapiens
AREPGYRFDY

SEQ ID NO: 3661 - protein, 13 aa, Homo sapiens
ARNTLLDGIKIDN

SEQ ID NO: 3662 - protein, 15 aa, Homo sapiens
AKCGSGGVCYWYFDL

SEQ ID NO: 3663 - protein, 12 aa, Homo sapiens
ARELPDTLYFDY

SEQ ID NO: 3664 - protein, 15 aa, Homo sapiens
ARAGWPQPPGNWFDP

SEQ ID NO: 3665 - protein, 7 aa, Homo sapiens
TRGWLAD

SEQ ID NO: 3666 - protein, 15 aa, Homo sapiens
ARPATGRGGGSRFDP

SEQ ID NO: 3667 - protein, 10 aa, Homo sapiens
ARGNRRAFDI

SEQ ID NO: 3668 - protein, 14 aa, Homo sapiens
AKSGASPPGNWFDT

SEQ ID NO: 3669 - protein, 18 aa, Homo sapiens
ARGDYFDSSGYYHDAFDV

SEQ ID NO: 3670 - protein, 16 aa, Homo sapiens
ARGTDCYGGSCQIFDN

SEQ ID NO: 3671 - protein, 15 aa, Homo sapiens
ARDRGGKGRLDGFDI

SEQ ID NO: 3672 - protein, 15 aa, Homo sapiens
AKDGDDNRPPDCYDM

SEQ ID NO: 3673 - protein, 14 aa, Homo sapiens
ARGTAAAGTDWLDP

SEQ ID NO: 3674 - protein, 6 aa, Homo sapiens
VTDVRY

SEQ ID NO: 3675 - protein, 14 aa, Homo sapiens
TTVFRYNSGSYSDY

SEQ ID NO: 3676 - protein, 13 aa, Homo sapiens
ARGSGNYYGPLDY

SEQ ID NO: 3677 - protein, 9 aa, Homo sapiens
AHGGWPFDY

SEQ ID NO: 3678 - protein, 9 aa, Homo sapiens
ARDKLGWTY

SEQ ID NO: 3679 - protein, 10 aa, Homo sapiens
ARGGAPRPGY

SEQ ID NO: 3680 - protein, 13 aa, Homo sapiens
GREPSGYGYGMDV

SEQ ID NO: 3681 - protein, 21 aa, Homo sapiens
ARGLWEGHCSSTLCHPNWFDP

SEQ ID NO: 3682 - protein, 10 aa, Homo sapiens
ARGNSGYLDY

SEQ ID NO: 3683 - protein, 9 aa, Homo sapiens
ARGPLDGDY

SEQ ID NO: 3684 - protein, 11 aa, Homo sapiens
VRGATSGSLDY

SEQ ID NO: 3685 - protein, 13 aa, Homo sapiens
AHSRIAAPGLFDY

SEQ ID NO: 3686 - protein, 10 aa, Homo sapiens
ARLGHYYMDV

SEQ ID NO: 3687 - protein, 14 aa, Homo sapiens
AHRRGYSSGRGVDY

SEQ ID NO: 3688 - protein, 7 aa, Homo sapiens
ARGPLDF

SEQ ID NO: 3689 - protein, 7 aa, Homo sapiens
AKDQLLG

SEQ ID NO: 3690 - protein, 9 aa, Homo sapiens
ARDYGDSGY

SEQ ID NO: 3691 - protein, 7 aa, Homo sapiens
AALWFDP

SEQ ID NO: 3692 - protein, 8 aa, Homo sapiens
ARGVGADY

SEQ ID NO: 3693 - protein, 8 aa, Homo sapiens
AGHGGSSY

SEQ ID NO: 3694 - protein, 11 aa, Homo sapiens
VRDTDYYGMDV

SEQ ID NO: 3695 - protein, 10 aa, Homo sapiens
VRGSGWFFDY

SEQ ID NO: 3696 - protein, 10 aa, Homo sapiens
ARDRGFCFDP

SEQ ID NO: 3697 - protein, 6 aa, Homo sapiens
AERIDY

SEQ ID NO: 3698 - protein, 13 aa, Homo sapiens
VRQDGSGLFYFDY

SEQ ID NO: 3699 - protein, 8 aa, Homo sapiens
ARGREGDY

SEQ ID NO: 3700 - protein, 18 aa, Homo sapiens
ARTYCTSATCYYYYGMDV

SEQ ID NO: 3701 - protein, 8 aa, Homo sapiens
ANWGGLGH

SEQ ID NO: 3702 - protein, 14 aa, Homo sapiens
ARLRSSSWKDASDI

SEQ ID NO: 3703 - protein, 16 aa, Homo sapiens
AKGPRYYGSGSYYFDY

SEQ ID NO: 3704 - protein, 11 aa, Homo sapiens
TRATGGYDMDV

SEQ ID NO: 3705 - protein, 13 aa, Homo sapiens
ARAYGDYGYYFDY

SEQ ID NO: 3706 - protein, 12 aa, Homo sapiens
ARGGSSGNWFDP

SEQ ID NO: 3707 - protein, 5 aa, Homo sapiens
TSGSN

SEQ ID NO: 3708 - protein, 12 aa, Homo sapiens
ARGPPTSQYFQH

SEQ ID NO: 3709 - protein, 12 aa, Homo sapiens
VRGGGSGWPFES

SEQ ID NO: 3710 - protein, 10 aa, Homo sapiens
ARDGGRRLDS

SEQ ID NO: 3711 - protein, 11 aa, Homo sapiens
ATGSGYYSPDY

SEQ ID NO: 3712 - protein, 11 aa, Homo sapiens
ARGGAGGAFDI

SEQ ID NO: 3713 - protein, 10 aa, Homo sapiens
ARDLGLARGY

SEQ ID NO: 3714 - protein, 15 aa, Homo sapiens
ARYGSGRDLRDPFDY

SEQ ID NO: 3715 - protein, 11 aa, Homo sapiens
ARDPGYSEFDI

SEQ ID NO: 3716 - protein, 11 aa, Homo sapiens
ARDFGLYGMDV

SEQ ID NO: 3717 - protein, 12 aa, Homo sapiens
ARDPYTADQFDY

SEQ ID NO: 3718 - protein, 10 aa, Homo sapiens
ANGGRYYFDY

SEQ ID NO: 3719 - protein, 13 aa, Homo sapiens
ARDLRESWAFFDY

SEQ ID NO: 3720 - protein, 13 aa, Homo sapiens
ARDIVAGSGSLDY

SEQ ID NO: 3721 - protein, 8 aa, Homo sapiens
TPDDAFDI

SEQ ID NO: 3722 - protein, 10 aa, Homo sapiens
ARGTLRTFDI

SEQ ID NO: 3723 - protein, 5 aa, Homo sapiens
TNFAY

SEQ ID NO: 3724 - protein, 17 aa, Homo sapiens
ARGGRGYCTSTTCYFDY

SEQ ID NO: 3725 - protein, 7 aa, Homo sapiens
ASTKGGY

SEQ ID NO: 3726 - protein, 15 aa, Homo sapiens
VRSPIAAAVPYYFDY

SEQ ID NO: 3727 - protein, 14 aa, Homo sapiens
AKGSDTGRPYYFDY

SEQ ID NO: 3728 - protein, 11 aa, Homo sapiens
AHSNSSSPHDY

SEQ ID NO: 3729 - protein, 17 aa, Homo sapiens
ARKMYYYDTGDLGWFDP

SEQ ID NO: 3730 - protein, 8 aa, Homo sapiens
ATRGAFDF

SEQ ID NO: 3731 - protein, 12 aa, Homo sapiens
AGGYSSSWYFDY

SEQ ID NO: 3732 - protein, 18 aa, Homo sapiens
ARDTYCSGGTCFDWYFDL

SEQ ID NO: 3733 - protein, 6 aa, Homo sapiens
TSGTES

SEQ ID NO: 3734 - protein, 7 aa, Homo sapiens
ASKQGDY

SEQ ID NO: 3735 - protein, 9 aa, Homo sapiens
ARGRYQFDF

SEQ ID NO: 3736 - protein, 13 aa, Homo sapiens
ARESGEEMATIDY

SEQ ID NO: 3737 - protein, 10 aa, Homo sapiens
ARLITTRPDY

SEQ ID NO: 3738 - protein, 6 aa, Homo sapiens
ARKGDL

SEQ ID NO: 3739 - protein, 8 aa, Homo sapiens
ARARGAEY

SEQ ID NO: 3740 - protein, 18 aa, Homo sapiens
ARDRYCSGGTCFDWYFDL

SEQ ID NO: 3741 - protein, 12 aa, Homo sapiens
TRAVRHQLLSDY

SEQ ID NO: 3742 - protein, 11 aa, Homo sapiens
VKGGWGSVVDY

SEQ ID NO: 3743 - protein, 8 aa, Homo sapiens
ARDAYSDY

SEQ ID NO: 3744 - protein, 14 aa, Homo sapiens
ARGDRPMIYFGMDV

SEQ ID NO: 3745 - protein, 9 aa, Homo sapiens
ARARGDLDY

SEQ ID NO: 3746 - protein, 11 aa, Homo sapiens
ARIYDPRGFDP

SEQ ID NO: 3747 - protein, 12 aa, Homo sapiens
ARAGTTTWVQDF

SEQ ID NO: 3748 - protein, 7 aa, Homo sapiens
VRGWGAH

SEQ ID NO: 3749 - protein, 10 aa, Homo sapiens
ARVVSDAFDV

SEQ ID NO: 3750 - protein, 15 aa, Homo sapiens
ARDRGGREDYYYMDV

SEQ ID NO: 3751 - protein, 6 aa, Homo sapiens
ATDLAY

SEQ ID NO: 3752 - protein, 11 aa, Homo sapiens
ARAGILSASDY

SEQ ID NO: 3753 - protein, 18 aa, Homo sapiens
ARDVRAVPGNYFYSGLDV

SEQ ID NO: 3754 - protein, 13 aa, Homo sapiens
ANRGLRGAGGMDV

SEQ ID NO: 3755 - protein, 10 aa, Homo sapiens
ARGHNSAFDY

SEQ ID NO: 3756 - protein, 13 aa, Homo sapiens
ARGRDGYNSSFDY

SEQ ID NO: 3757 - protein, 13 aa, Homo sapiens
AARPGIVVAGLDY

SEQ ID NO: 3758 - protein, 9 aa, Homo sapiens
ARGWYSSDY

SEQ ID NO: 3759 - protein, 9 aa, Homo sapiens
ARGNGYIYY

SEQ ID NO: 3760 - protein, 14 aa, Homo sapiens
AKDRGDSGYEIFDY

SEQ ID NO: 3761 - protein, 12 aa, Homo sapiens
AREKEGTTYFDY

SEQ ID NO: 3762 - protein, 6 aa, Homo sapiens
ARSTDY

SEQ ID NO: 3763 - protein, 10 aa, Homo sapiens
TTLSSSSIAY

SEQ ID NO: 3764 - protein, 8 aa, Homo sapiens
AGGRNSAY

SEQ ID NO: 3765 - protein, 7 aa, Homo sapiens
SRRGFDY

SEQ ID NO: 3766 - protein, 8 aa, Homo sapiens
ARSGAFDI

SEQ ID NO: 3767 - protein, 11 aa, Homo sapiens
AREGPANWFDP

SEQ ID NO: 3768 - protein, 8 aa, Homo sapiens
ARGLAAAG

SEQ ID NO: 3769 - protein, 8 aa, Homo sapiens
ARGRTTDV

SEQ ID NO: 3770 - protein, 11 aa, Homo sapiens
ARHVSHTATDY

SEQ ID NO: 3771 - protein, 9 aa, Homo sapiens
ARSNNGFDY

SEQ ID NO: 3772 - protein, 8 aa, Homo sapiens
AKGLTIDY

SEQ ID NO: 3773 - protein, 11 aa, Homo sapiens
ARGGYSYGLDP

SEQ ID NO: 3774 - protein, 14 aa, Homo sapiens
AKELSPAGYSPLDY

SEQ ID NO: 3775 - protein, 9 aa, Homo sapiens
ARGPGHFQH

SEQ ID NO: 3776 - protein, 9 aa, Homo sapiens
ARGRSAFDI

SEQ ID NO: 3777 - protein, 8 aa, Homo sapiens
ADVGSYLP

SEQ ID NO: 3778 - protein, 7 aa, Homo sapiens
ARGRGAS

SEQ ID NO: 3779 - protein, 12 aa, Homo sapiens
ARDSVAVAGTDY

SEQ ID NO: 3780 - protein, 12 aa, Homo sapiens
ARRGDSHGLFDY

SEQ ID NO: 3781 - protein, 7 aa, Homo sapiens
ARGWGAN

SEQ ID NO: 3782 - protein, 16 aa, Homo sapiens
ARDYYASGTYYLPSDY

SEQ ID NO: 3783 - protein, 15 aa, Homo sapiens
VREGRSSGRAGCFDY

SEQ ID NO: 3784 - protein, 8 aa, Homo sapiens
TTPAAFNI

SEQ ID NO: 3785 - protein, 11 aa, Homo sapiens
ARAGSAWSIDY

SEQ ID NO: 3786 - protein, 11 aa, Homo sapiens
ARDDMRNTVDY

SEQ ID NO: 3787 - protein, 14 aa, Homo sapiens
TTDGGLAPRPLFDY

SEQ ID NO: 3788 - protein, 11 aa, Homo sapiens
ARRPWGSGFDY

SEQ ID NO: 3789 - protein, 12 aa, Homo sapiens
ARLVGSSGSFDY

SEQ ID NO: 3790 - protein, 9 aa, Homo sapiens
ARGSMQVDY

SEQ ID NO: 3791 - protein, 12 aa, Homo sapiens
ARGDHYYNYMDV

SEQ ID NO: 3792 - protein, 14 aa, Homo sapiens
SRDEYGSGIPHMDV

SEQ ID NO: 3793 - protein, 11 aa, Homo sapiens
AREYRGGYFDY

SEQ ID NO: 3794 - protein, 11 aa, Homo sapiens
TRDSSTSEFDY

SEQ ID NO: 3795 - protein, 12 aa, Homo sapiens
ARRSPLENFFDY

SEQ ID NO: 3796 - protein, 13 aa, Homo sapiens
VRNPAEGYYGMDV

SEQ ID NO: 3797 - protein, 18 aa, Homo sapiens
ATHPPRWGSWYTGYGVDV

SEQ ID NO: 3798 - protein, 11 aa, Homo sapiens
AKLVGTNTEDF

SEQ ID NO: 3799 - protein, 12 aa, Homo sapiens
ARGRMVTRDFDF

SEQ ID NO: 3800 - protein, 8 aa, Homo sapiens
ARTGSLDN

SEQ ID NO: 3801 - protein, 12 aa, Homo sapiens
AKRESSSWTFDY

SEQ ID NO: 3802 - protein, 15 aa, Homo sapiens
AKDGDHRYYYNGFDV

SEQ ID NO: 3803 - protein, 9 aa, Homo sapiens
TRGDNGFDP

SEQ ID NO: 3804 - protein, 5 aa, Homo sapiens
AKPGG

SEQ ID NO: 3805 - protein, 10 aa, Homo sapiens
TRSVENGMDV

SEQ ID NO: 3806 - protein, 11 aa, Homo sapiens
TRGPDSRKHGY

SEQ ID NO: 3807 - protein, 7 aa, Homo sapiens
ARGRAAI

SEQ ID NO: 3808 - protein, 9 aa, Homo sapiens
ATIWFGEQD

SEQ ID NO: 3809 - protein, 13 aa, Homo sapiens
ARGNGNYRYYFDY

SEQ ID NO: 3810 - protein, 9 aa, Homo sapiens
ARGRVGATH

SEQ ID NO: 3811 - protein, 10 aa, Homo sapiens
ARDHIGREGY

SEQ ID NO: 3812 - protein, 9 aa, Homo sapiens
ARDRERMDV

SEQ ID NO: 3813 - protein, 12 aa, Homo sapiens
AMDTHSNSRFDH

SEQ ID NO: 3814 - protein, 11 aa, Homo sapiens
IKDVSPGGADY

SEQ ID NO: 3815 - protein, 11 aa, Homo sapiens
AREMVGGYFDY

SEQ ID NO: 3816 - protein, 12 aa, Homo sapiens
ARDPPYSSGWSD

SEQ ID NO: 3817 - protein, 17 aa, Homo sapiens
AKFYTRSSVDYYYFMDV

SEQ ID NO: 3818 - protein, 7 aa, Homo sapiens
ARRTIDY

SEQ ID NO: 3819 - protein, 11 aa, Homo sapiens
ARRRSYGYLDY

SEQ ID NO: 3820 - protein, 11 aa, Homo sapiens
ARDLSGYGMDV

SEQ ID NO: 3821 - protein, 12 aa, Homo sapiens
ARGLGLGHYFES

SEQ ID NO: 3822 - protein, 12 aa, Homo sapiens
ARDLRKLRYFDW

SEQ ID NO: 3823 - protein, 11 aa, Homo sapiens
GSGSYASGFEY

SEQ ID NO: 3824 - protein, 13 aa, Homo sapiens
ARVSAITLAGFDY

SEQ ID NO: 3825 - protein, 18 aa, Homo sapiens
AREDQHYYGSGYYYAMDV

SEQ ID NO: 3826 - protein, 12 aa, Homo sapiens
ARQGERGGPPDY

SEQ ID NO: 3827 - protein, 12 aa, Homo sapiens
AKPRNTDDAFDI

SEQ ID NO: 3828 - protein, 11 aa, Homo sapiens
ARERPGRYFDY

SEQ ID NO: 3829 - protein, 10 aa, Homo sapiens
ARDYFRSYDY

SEQ ID NO: 3830 - protein, 7 aa, Homo sapiens
ARSKFDY

SEQ ID NO: 3831 - protein, 10 aa, Homo sapiens
ARAAWSSVDY

SEQ ID NO: 3832 - protein, 12 aa, Homo sapiens
ARSVGLGNYFDY

SEQ ID NO: 3833 - protein, 11 aa, Homo sapiens
ARSFDEKAFDI

SEQ ID NO: 3834 - protein, 11 aa, Homo sapiens
ARAVAGWYFDL

SEQ ID NO: 3835 - protein, 12 aa, Homo sapiens
TTDGVVEAPFDY

SEQ ID NO: 3836 - protein, 9 aa, Homo sapiens
ARGTINLDY

SEQ ID NO: 3837 - protein, 9 aa, Homo sapiens
ARGSSYWPN

SEQ ID NO: 3838 - protein, 15 aa, Homo sapiens
ASHCSGGNCYFGFHI

SEQ ID NO: 3839 - protein, 6 aa, Homo sapiens
VQMAGF

SEQ ID NO: 3840 - protein, 10 aa, Homo sapiens
TSRIRTTNDN

SEQ ID NO: 3841 - protein, 11 aa, Homo sapiens
TRDAPGGRGDY

SEQ ID NO: 3842 - protein, 15 aa, Homo sapiens
AREYDTLTSYYHFDY

SEQ ID NO: 3843 - protein, 8 aa, Homo sapiens
ARGISCAN

SEQ ID NO: 3844 - protein, 11 aa, Homo sapiens
ARHNNVYDWDY

SEQ ID NO: 3845 - protein, 11 aa, Homo sapiens
ARDYGDYNFDS

SEQ ID NO: 3846 - protein, 10 aa, Homo sapiens
ARHQSGYGDY

SEQ ID NO: 3847 - protein, 7 aa, Homo sapiens
ASGAFDY

SEQ ID NO: 3848 - protein, 9 aa, Homo sapiens
ATVDYRDDY

SEQ ID NO: 3849 - protein, 9 aa, Homo sapiens
LSRDSAGGY

SEQ ID NO: 3850 - protein, 16 aa, Homo sapiens
ARGYTSGLRVSHWFDP

SEQ ID NO: 3851 - protein, 9 aa, Homo sapiens
AKGEMGVDY

SEQ ID NO: 3852 - protein, 10 aa, Homo sapiens
ARDYYYYIDV

SEQ ID NO: 3853 - protein, 10 aa, Homo sapiens
ARGGWSNFDY

SEQ ID NO: 3854 - protein, 18 aa, Homo sapiens
AKHIVAAGRSYYYYGMDV

SEQ ID NO: 3855 - protein, 8 aa, Homo sapiens
ARSYRMDV

SEQ ID NO: 3856 - protein, 15 aa, Homo sapiens
ARVGGTYFYYYGMDV

SEQ ID NO: 3857 - protein, 13 aa, Homo sapiens
ARGLSGHGPSFEH

SEQ ID NO: 3858 - protein, 7 aa, Homo sapiens
VRGLGDG

SEQ ID NO: 3859 - protein, 11 aa, Homo sapiens
ARVIAWGWFDP

SEQ ID NO: 3860 - protein, 11 aa, Homo sapiens
ARRGEGYKYDY

SEQ ID NO: 3861 - protein, 8 aa, Homo sapiens
ARGNWFAG

SEQ ID NO: 3862 - protein, 10 aa, Homo sapiens
ARGGIWSFDY

SEQ ID NO: 3863 - protein, 11 aa, Homo sapiens
AKHYSYYYMDV

SEQ ID NO: 3864 - protein, 8 aa, Homo sapiens
ARGRSMDV

SEQ ID NO: 3865 - protein, 9 aa, Homo sapiens
AKGGAWLDP

SEQ ID NO: 3866 - protein, 14 aa, Homo sapiens
AKDREPDYRFDIDY

SEQ ID NO: 3867 - protein, 11 aa, Homo sapiens
AKFGSGWSLDY

SEQ ID NO: 3868 - protein, 9 aa, Homo sapiens
ARGGGYNAY

SEQ ID NO: 3869 - protein, 11 aa, Homo sapiens
ARDSGISSAAY

SEQ ID NO: 3870 - protein, 9 aa, Homo sapiens
ARGKNSFDS

SEQ ID NO: 3871 - protein, 11 aa, Homo sapiens
AKGGLWGGMDV

SEQ ID NO: 3872 - protein, 15 aa, Homo sapiens
AKEGRSSGRAGACNV

SEQ ID NO: 3873 - protein, 16 aa, Homo sapiens
ARASYCGGDCYSWFDP

SEQ ID NO: 3874 - protein, 5 aa, Homo sapiens
TTLGT

SEQ ID NO: 3875 - protein, 9 aa, Homo sapiens
ARGQRGMDV

SEQ ID NO: 3876 - protein, 9 aa, Homo sapiens
ARGGYRVDV

SEQ ID NO: 3877 - protein, 7 aa, Homo sapiens
ARVGLAY

SEQ ID NO: 3878 - protein, 5 aa, Homo sapiens
SCFEY

SEQ ID NO: 3879 - protein, 9 aa, Homo sapiens
ARGTGWYFY

SEQ ID NO: 3880 - protein, 6 aa, Homo sapiens
ARKFDV

SEQ ID NO: 3881 - protein, 10 aa, Homo sapiens
ARATGGIFDY

SEQ ID NO: 3882 - protein, 11 aa, Homo sapiens
ARVPSGSYFDY

SEQ ID NO: 3883 - protein, 9 aa, Homo sapiens
AKRGDYFDS

SEQ ID NO: 3884 - protein, 10 aa, Homo sapiens
ARLVAAAFDY

SEQ ID NO: 3885 - protein, 5 aa, Homo sapiens
STFDY

SEQ ID NO: 3886 - protein, 14 aa, Homo sapiens
ARGAATGSGNWFDP

SEQ ID NO: 3887 - protein, 17 aa, Homo sapiens
ARADPTRGIPYYYGMDV

SEQ ID NO: 3888 - protein, 13 aa, Homo sapiens
VKDRVTEAYGMEV

SEQ ID NO: 3889 - protein, 15 aa, Homo sapiens
ATDDYYASGTYFFDF

SEQ ID NO: 3890 - protein, 15 aa, Homo sapiens
AKDLYDNGWYNYFDP

SEQ ID NO: 3891 - protein, 14 aa, Homo sapiens
ARGLRYGSGSYYDY

SEQ ID NO: 3892 - protein, 11 aa, Homo sapiens
ASGGSGSHIDY

SEQ ID NO: 3893 - protein, 14 aa, Homo sapiens
ARDGGFSGYAYFDY

SEQ ID NO: 3894 - protein, 24 aa, Homo sapiens
AKVWGGYCSGITCYSPYYYYGMDV

SEQ ID NO: 3895 - protein, 8 aa, Homo sapiens
ARSDGLDV

SEQ ID NO: 3896 - protein, 11 aa, Homo sapiens
ARALGLPDFDF

SEQ ID NO: 3897 - protein, 6 aa, Homo sapiens
AAGLGY

SEQ ID NO: 3898 - protein, 8 aa, Homo sapiens
VKGSWIDY

SEQ ID NO: 3899 - protein, 12 aa, Homo sapiens
ATYYEGVGGRGD

SEQ ID NO: 3900 - protein, 11 aa, Homo sapiens
AKDIYRWSFDY

SEQ ID NO: 3901 - protein, 9 aa, Homo sapiens
ARGRYGDNY

SEQ ID NO: 3902 - protein, 11 aa, Homo sapiens
ARDVGGGFFDY

SEQ ID NO: 3903 - protein, 14 aa, Homo sapiens
AREGIVGTTTGLDS

SEQ ID NO: 3904 - protein, 13 aa, Homo sapiens
ARGYSSGLYYFDY

SEQ ID NO: 3905 - protein, 12 aa, Homo sapiens
VRGTRGTSGVDY

SEQ ID NO: 3906 - protein, 5 aa, Homo sapiens
SRMDV

SEQ ID NO: 3907 - protein, 11 aa, Homo sapiens
AKDYGGIPFDH

SEQ ID NO: 3908 - protein, 8 aa, Homo sapiens
ARDRGSGY

SEQ ID NO: 3909 - protein, 10 aa, Homo sapiens
VRGSGWVFDY

SEQ ID NO: 3910 - protein, 5 aa, Homo sapiens
SNYEY

SEQ ID NO: 3911 - protein, 11 aa, Homo sapiens
AKEGGTIFFDS

SEQ ID NO: 3912 - protein, 10 aa, Homo sapiens
TREVGGVSDY

SEQ ID NO: 3913 - protein, 10 aa, Homo sapiens
ARDFGGYFQH

SEQ ID NO: 3914 - protein, 8 aa, Homo sapiens
ARNWAFDY

SEQ ID NO: 3915 - protein, 12 aa, Homo sapiens
VRGTSDWAGTDY

SEQ ID NO: 3916 - protein, 6 aa, Homo sapiens
AGGLGY

SEQ ID NO: 3917 - protein, 7 aa, Homo sapiens
VTDGGAL

SEQ ID NO: 3918 - protein, 14 aa, Homo sapiens
ARDPDSGGYSWFDP

SEQ ID NO: 3919 - protein, 17 aa, Homo sapiens
SRGCSGGSCYYYFGMDV

SEQ ID NO: 3920 - protein, 13 aa, Homo sapiens
AREPYGGNSHFDF

SEQ ID NO: 3921 - protein, 8 aa, Homo sapiens
VTGGWGDY

SEQ ID NO: 3922 - protein, 7 aa, Homo sapiens
AKGVGAY

SEQ ID NO: 3923 - protein, 16 aa, Homo sapiens
AAPNCNRTSCYDGFDI

SEQ ID NO: 3924 - protein, 11 aa, Homo sapiens
AKDLPHASFDY

SEQ ID NO: 3925 - protein, 10 aa, Homo sapiens
ARSTLLRGVH

SEQ ID NO: 3926 - protein, 12 aa, Homo sapiens
ARGYDILTGLDY

SEQ ID NO: 3927 - protein, 8 aa, Homo sapiens
ARGKAFGP

SEQ ID NO: 3928 - protein, 14 aa, Homo sapiens
ARVWEQGYSRGYLY

SEQ ID NO: 3929 - protein, 10 aa, Homo sapiens
TRGIGVAGDY

SEQ ID NO: 3930 - protein, 14 aa, Homo sapiens
AKGSAAGRPYYFDS

SEQ ID NO: 3931 - protein, 12 aa, Homo sapiens
ARLYSGYDFFDH

SEQ ID NO: 3932 - protein, 10 aa, Homo sapiens
ARGVGNVGDY

SEQ ID NO: 3933 - protein, 13 aa, Homo sapiens
ARRYSSDWYYFDY

SEQ ID NO: 3934 - protein, 15 aa, Homo sapiens
ARRFYDFWSGYYTDY

SEQ ID NO: 3935 - protein, 7 aa, Homo sapiens
ARDEGTF

SEQ ID NO: 3936 - protein, 11 aa, Homo sapiens
ARDWAGRRCDH

SEQ ID NO: 3937 - protein, 7 aa, Homo sapiens
TNLYFDY

SEQ ID NO: 3938 - protein, 14 aa, Homo sapiens
ARDGGRDGYNYLDY

SEQ ID NO: 3939 - protein, 9 aa, Homo sapiens
ARTARLVDY

SEQ ID NO: 3940 - protein, 12 aa, Homo sapiens
VKDRTNTWSFDY

SEQ ID NO: 3941 - protein, 11 aa, Homo sapiens
ARGYGTSWFYQ

SEQ ID NO: 3942 - protein, 9 aa, Homo sapiens
TRDAHGMDV

SEQ ID NO: 3943 - protein, 11 aa, Homo sapiens
ARGDVGSYFPY

SEQ ID NO: 3944 - protein, 13 aa, Homo sapiens
ARDHGNGWSYFDY

SEQ ID NO: 3945 - protein, 15 aa, Homo sapiens
VRDITAPGSTEYFHY

SEQ ID NO: 3946 - protein, 8 aa, Homo sapiens
ARDSHFDY

SEQ ID NO: 3947 - protein, 10 aa, Homo sapiens
TRNGYYSLDY

SEQ ID NO: 3948 - protein, 13 aa, Homo sapiens
AKASSGTRGWFDP

SEQ ID NO: 3949 - protein, 5 aa, Homo sapiens
TSGSV

SEQ ID NO: 3950 - protein, 14 aa, Homo sapiens
TKGSSSSRPYYFDF

SEQ ID NO: 3951 - protein, 13 aa, Homo sapiens
ARVYSSSWYYLDY

SEQ ID NO: 3952 - protein, 13 aa, Homo sapiens
AKASGSPKGWFDP

SEQ ID NO: 3953 - protein, 15 aa, Homo sapiens
AKDMWLQQWANAFDI

SEQ ID NO: 3954 - protein, 14 aa, Homo sapiens
ARDHYTSGSFYFDY

SEQ ID NO: 3955 - protein, 6 aa, Homo sapiens
AKMGDY

SEQ ID NO: 3956 - protein, 5 aa, Homo sapiens
ARAEM

SEQ ID NO: 3957 - protein, 11 aa, Homo sapiens
VKDVSAGGADV

SEQ ID NO: 3958 - protein, 20 aa, Homo sapiens
ARERVTMVREIVITAYGLDV

SEQ ID NO: 3959 - protein, 14 aa, Homo sapiens
ARPNSSGWSGAFDI

SEQ ID NO: 3960 - protein, 12 aa, Homo sapiens
AGGDRNGWYFDR

SEQ ID NO: 3961 - protein, 11 aa, Homo sapiens
ARDWVTSGFDY

SEQ ID NO: 3962 - protein, 11 aa, Homo sapiens
ARDVSFGRFDY

SEQ ID NO: 3963 - protein, 11 aa, Homo sapiens
ARGGDSGAFDI

SEQ ID NO: 3964 - protein, 11 aa, Homo sapiens
ARGRWSPALDY

SEQ ID NO: 3965 - protein, 10 aa, Homo sapiens
ARDPPRRSDY

SEQ ID NO: 3966 - protein, 14 aa, Homo sapiens
AKDLPGIAAAYFDY

SEQ ID NO: 3967 - protein, 8 aa, Homo sapiens
ARGAGSSD

SEQ ID NO: 3968 - protein, 13 aa, Homo sapiens
ARAYCGGDCYPDY

SEQ ID NO: 3969 - protein, 12 aa, Homo sapiens
ARLWGGLRPPDY

SEQ ID NO: 3970 - protein, 11 aa, Homo sapiens
ARVRSGNYFDY

SEQ ID NO: 3971 - protein, 9 aa, Homo sapiens
ARVDSGLDY

SEQ ID NO: 3972 - protein, 12 aa, Homo sapiens
VKYSSAWYALDY

SEQ ID NO: 3973 - protein, 5 aa, Homo sapiens
TGLWK

SEQ ID NO: 3974 - protein, 11 aa, Homo sapiens
AKGGTVTPLDY

SEQ ID NO: 3975 - protein, 9 aa, Homo sapiens
AKPNSLFDY

SEQ ID NO: 3976 - protein, 11 aa, Homo sapiens
ARGYNHGRLDY

SEQ ID NO: 3977 - protein, 6 aa, Homo sapiens
VRQFDY

SEQ ID NO: 3978 - protein, 13 aa, Homo sapiens
ARHPAAGGDWFDP

SEQ ID NO: 3979 - protein, 13 aa, Homo sapiens
ARDGPYYYYGLDV

SEQ ID NO: 3980 - protein, 11 aa, Homo sapiens
ARDLPRGLFDY

SEQ ID NO: 3981 - protein, 16 aa, Homo sapiens
ARDGSRGSSQYNWFDP

SEQ ID NO: 3982 - protein, 16 aa, Homo sapiens
ARHRGYSGYDLNWFDP

SEQ ID NO: 3983 - protein, 15 aa, Homo sapiens
ARLSGSSYYYYGMDV

SEQ ID NO: 3984 - protein, 9 aa, Homo sapiens
VRDNWGVHH

SEQ ID NO: 3985 - protein, 16 aa, Homo sapiens
ARQLSVRGVNYNWFDP

SEQ ID NO: 3986 - protein, 8 aa, Homo sapiens
ARGRGVEC

SEQ ID NO: 3987 - protein, 9 aa, Homo sapiens
ARGARYLDY

SEQ ID NO: 3988 - protein, 18 aa, Homo sapiens
ARQGYYYGSGSEYNWFDP

SEQ ID NO: 3989 - protein, 12 aa, Homo sapiens
ARDACSGACYDY

SEQ ID NO: 3990 - protein, 9 aa, Homo sapiens
ARGSGFFYY

SEQ ID NO: 3991 - protein, 9 aa, Homo sapiens
AKDRIGDGY

SEQ ID NO: 3992 - protein, 12 aa, Homo sapiens
ARDSGHGYSVDY

SEQ ID NO: 3993 - protein, 15 aa, Homo sapiens
AKDYSSSLRYYGMDV

SEQ ID NO: 3994 - protein, 11 aa, Homo sapiens
VKDINPGGADV

SEQ ID NO: 3995 - protein, 13 aa, Homo sapiens
ARDFPGEHNAFDV

SEQ ID NO: 3996 - protein, 10 aa, Homo sapiens
ARDYAGSPDY

SEQ ID NO: 3997 - protein, 10 aa, Homo sapiens
AHRRGGVFDY

SEQ ID NO: 3998 - protein, 10 aa, Homo sapiens
AREERDGMDV

SEQ ID NO: 3999 - protein, 16 aa, Homo sapiens
VKDRSSTLYYYYGMDV

SEQ ID NO: 4000 - protein, 12 aa, Homo sapiens
ARRGWEFAYFDY

SEQ ID NO: 4001 - protein, 10 aa, Homo sapiens
ARRTSGYKDY

SEQ ID NO: 4002 - protein, 18 aa, Homo sapiens
ARDRYSGYDSNYYYGMDV

SEQ ID NO: 4003 - protein, 12 aa, Homo sapiens
AHKGDRGDPFDY

SEQ ID NO: 4004 - protein, 12 aa, Homo sapiens
GRDGMRGGDFDY

SEQ ID NO: 4005 - protein, 10 aa, Homo sapiens
AKDIRRPFDY

SEQ ID NO: 4006 - protein, 10 aa, Homo sapiens
GSLNWNSIDY

SEQ ID NO: 4007 - protein, 13 aa, Homo sapiens
ARDPADYYYGMDV

SEQ ID NO: 4008 - protein, 17 aa, Homo sapiens
ARDPGIASAGTVGYFDS

SEQ ID NO: 4009 - protein, 11 aa, Homo sapiens
ARGQGSSWFAY

SEQ ID NO: 4010 - protein, 15 aa, Homo sapiens
ARGLLWFGELSTLGY

SEQ ID NO: 4011 - protein, 12 aa, Homo sapiens
ARDSGSVGADDY

SEQ ID NO: 4012 - protein, 11 aa, Homo sapiens
ARDRGGATLDY

SEQ ID NO: 4013 - protein, 14 aa, Homo sapiens
TTDRGITSRPLFDF

SEQ ID NO: 4014 - protein, 12 aa, Homo sapiens
TTDIYDRGDFDY

SEQ ID NO: 4015 - protein, 11 aa, Homo sapiens
ARGTWKDGLDV

SEQ ID NO: 4016 - protein, 8 aa, Homo sapiens
AKEPLFDY

SEQ ID NO: 4017 - protein, 9 aa, Homo sapiens
ARRSSGYDD

SEQ ID NO: 4018 - protein, 8 aa, Homo sapiens
VKGGWCDS

SEQ ID NO: 4019 - protein, 11 aa, Homo sapiens
VRELRGGFFDY

SEQ ID NO: 4020 - protein, 10 aa, Homo sapiens
ARGVRGGMDV

SEQ ID NO: 4021 - protein, 14 aa, Homo sapiens
ARGAIWFGAYGMDV

SEQ ID NO: 4022 - protein, 10 aa, Homo sapiens
AREKLVDLDY

SEQ ID NO: 4023 - protein, 10 aa, Homo sapiens
ARHGYYYFDY

SEQ ID NO: 4024 - protein, 8 aa, Homo sapiens
ARKGGAGS

SEQ ID NO: 4025 - protein, 8 aa, Homo sapiens
ARALGADY

SEQ ID NO: 4026 - protein, 12 aa, Homo sapiens
MRGHYDSSAPDY

SEQ ID NO: 4027 - protein, 9 aa, Homo sapiens
ARAAGWIDP

SEQ ID NO: 4028 - protein, 8 aa, Homo sapiens
ARGLSLDV

SEQ ID NO: 4029 - protein, 15 aa, Homo sapiens
VRVRGSSWSDHYFDY

SEQ ID NO: 4030 - protein, 10 aa, Homo sapiens
ARDLRGSPDY

SEQ ID NO: 4031 - protein, 16 aa, Homo sapiens
AREGGGFNYYYYGMDV

SEQ ID NO: 4032 - protein, 10 aa, Homo sapiens
ARAIAAPGSL

SEQ ID NO: 4033 - protein, 5 aa, Homo sapiens
TRRDY

SEQ ID NO: 4034 - protein, 12 aa, Homo sapiens
ARNLAYTGDFDY

SEQ ID NO: 4035 - protein, 17 aa, Homo sapiens
ARVPTYYYDSSGYYYDY

SEQ ID NO: 4036 - protein, 10 aa, Homo sapiens
ARAIDHATDY

SEQ ID NO: 4037 - protein, 11 aa, Homo sapiens
ARHYRPYGMDV

SEQ ID NO: 4038 - protein, 6 aa, Homo sapiens
LRPWDY

SEQ ID NO: 4039 - protein, 15 aa, Homo sapiens
AKHTRAGYYYYGMDV

SEQ ID NO: 4040 - protein, 8 aa, Homo sapiens
AREPDFDY

SEQ ID NO: 4041 - protein, 9 aa, Homo sapiens
ARGGAFLDY

SEQ ID NO: 4042 - protein, 18 aa, Homo sapiens
AREGRCGEPKCYSGLPDY

SEQ ID NO: 4043 - protein, 9 aa, Homo sapiens
ARGTGSHIH

SEQ ID NO: 4044 - protein, 8 aa, Homo sapiens
ARGGWLAN

SEQ ID NO: 4045 - protein, 14 aa, Homo sapiens
TTRSIPYYYYGMDV

SEQ ID NO: 4046 - protein, 13 aa, Homo sapiens
ARDRSSGWYSFDY

SEQ ID NO: 4047 - protein, 10 aa, Homo sapiens
VAGRGWQPDY

SEQ ID NO: 4048 - DNA, 283 bp, Homo sapiens
  source 1..283: mol_type = other DNA
tgcagcctctggattcaccttcagtaactactggatgcactgggtccgccaagttccagggaaggggctggtgtgggtctcacatattaatattgatgggagtacaacaaactacgcggactccgtgaggggccgattcaccatctccagagacaacgccaagaacacgctgtatctgcaaatgaacagtctgagtgccgaggacacggctgtgtattactgtggaaggagcaatggctgggttgactactggggccagggaaccctggtcaccgtctcctca

SEQ ID NO: 4049 - DNA, 283 bp, Homo sapiens
  source 1..283: mol_type = other DNA
tgcagcctctggattcaccttcagtaactactggatgcactgggtccgccaagttccagggaaggggctggtgtgggtctcacatattaatattgatgggagtacaacaaactacgcggactccgtgaggggccgattcaccatctccagagacaacgccaagaacacgctgtatctgcaaatgaacagtctgagtgccgaggacacggctgtgtattactgtggaaggagcaatggttgggttgactactggggccagggaaccctggtcaccgtctcctca

SEQ ID NO: 4050 - DNA, 281 bp, Homo sapiens
  source 1..281: mol_type = other DNA
cagcctctggattcaccttcagtaactactggatgcactgggtccgccaagttccagggaaggggctggtgtgggtctcacatattaatattgatgggagtacaacaaactacgcggactccgtgaggggccgattcaccatctccagagacaacgccaagaacacgctgtatctgcaaatgaacagtctgagtgccgaggacacggctgtgtattactgtggaaggagcaatggctgggttgactactggggccagggaaccctggtcaccgtctcctca

SEQ ID NO: 4051 - DNA, 283 bp, Homo sapiens
  source 1..283: mol_type = other DNA
tgcagcctctggattcagtttcagcagctactggatgcactgggtccgccaagttccagggaaggggctggtgtgggtctcacatattcatattgatgggagtctcacaaactacgcggactccgtgaggggccgattcaccatctccagagacaacgccaagagcacagtatttttgcagatgaataatctgagagccgaggacacgggtgtctactactgtggaaggagcaatggctgggttgactactggggccagggaaccgtggtcatcgtctcctca

SEQ ID NO: 4052 - DNA, 283 bp, Homo sapiens
  source 1..283: mol_type = other DNA
tgcagcctctggattcagtttcagcagctactggatgcactgggtccgccaagttccagggaaggggctggtgtgggtctcacatattcatattgatgggagtctcacaaactacgcggactccgtgaggggccgattcaccatctccagagacaacgccaagagcacagtatttttgcagatgaataatctgagagccgaggacacgggtgcctactactgtggaaggagcaatggctgggttgactactggggccagggaaccgtggtcatcgtctcctca

SEQ ID NO: 4053 - DNA, 283 bp, Homo sapiens
  source 1..283: mol_type = other DNA
tgaagcctctggattcagctttagtaactactggatgcactgggtccgccaagctccagggaaggggctggtgtgggtctcacatattcatagtgatgggagtctcacaaactacgcggactccgtgaggggccgattcaccatctccagagacaacgccaagaacacgctgtttctggaaatgaacagtctgagagccgaagatacgggtgtgtattactgtggaaggagcaatggctgggttgactactggggccagggatccctggtcatcgtctcctca

SEQ ID NO: 4054 - DNA, 286 bp, Homo sapiens
  source 1..286: mol_type = other DNA
tgcagcctctggattaacctttagtaactattggatgagctgggtccgccaggctccagggaaggggctggagtgggtggccaacataaaccaagatggaagtgagaaaaagtacgtggactctgtgaagggccgattcaccatctccagagacaacgccaagaactcattgtctctgcaaatgaacagcctgagagccgaggacacggctgtgtattattgtgcgagagattataggggctggttcgacccctggggccagggaaccctggtcaccgtctcctca

SEQ ID NO: 4055 - DNA, 284 bp, Homo sapiens
  source 1..284: mol_type = other DNA
cagcctctggattaacctttagtaactattggatgagctgggtccgccaggctccagggaaggggctggagtgggtggccaacataaaccaagatggaagtgagaaaaagtacgtggactctgtgaagggccgattcaccatctccagagacaacgccaagaactcattgtctctgcaaatgaacagcctgagagccgaggacacggctgtgtattattgtgcgagagattataggggctggttcgacccctggggccagggaaccctggtcaccgtctcctca

SEQ ID NO: 4056 - DNA, 310 bp, Homo sapiens
  source 1..310: mol_type = other DNA
tgcagcctctggattaacctttagtaactattggatgagctgggtccgccaggctccagggaaggggctggagtgggtggccaacataaaccaagatggaagtgagaaaaagtacgtggactctgtgaagggccgattcaccatctccagagacaacgccaagaactcattgtctctgcaaatgaacagcctgagagccgaggacacggctgtgtattattgtgcgagagattataggggctggttcgacccctggggccagggaaccctggtcaccgtctcctcagggaccacggtcaccgtctcctca

SEQ ID NO: 4057 - DNA, 286 bp, Homo sapiens
  source 1..286: mol_type = other DNA
tgcagcctctggattaacctttagtaactattggatgagctgggtccgccaggctccagggaaggggctggagtgggtggccaacataaaccaagatggaagtgagaaaaagtacgtggactctgtgaagggccgattcaccatctccagagacaacgccaagaactcattgtctctgcaaatgaacagcctgagagccgaggacacggctgtgtattattgtgcgagagattataggggctggttcgacccctggggccaggaaaccctggtcaccgtctcctca

SEQ ID NO: 4058 - DNA, 286 bp, Homo sapiens
  source 1..286: mol_type = other DNA
cgcagactctggattcacctttaggagcaattggatgacctgggtccgccaggctccagggaaggggctggagtgggtggccaacatgaaccaagatggaagtgagaaatactatgtggactctgtgaagggccgattcaccatctccagagacaacgccaagaactcagtgtatctacaaatgaacagcctgagagccgaggacacggccgtgtattactgtgcgagagattacagaggctggttcgacccctggggccagggaaccctggtcaccgtctcctca

SEQ ID NO: 4059 - DNA, 286 bp, Homo sapiens
  source 1..286: mol_type = other DNA
tgcggcctctggattcacctttagtagctattggatgaactgggtccgccaggctccagggaaggggctggagtgggtggccctcataaagttagatggaaatgataaagactatgtggactctgtgaggggccgattcaccatctccagagacaacgccaggaactcactgtatctgcaaatgaacagcctgagagtcgaggacacggctgtgtattattgtgcgagggactacaggggctggttcgacccctggggccagggaacccgggtcaccgtctcctca

SEQ ID NO: 4060 - DNA, 286 bp, Homo sapiens
  source 1..286: mol_type = other DNA
tgcggcctctggattcacctttagtagctattggatgaactgggtccgccaggctccagggaaggggctggagtgggtggccctcataaagttagatggaaatgataaagactatgtggactctgtgaggggccgattcaccatctccagagacaacgccaggaactcactgtatctgcaaatgaacagcctgagagtcgaggacacggctgtgtattattgtgcgagggactacaggggctggttcgacccctggggccagggaaccctggtcaccgtctcctca

SEQ ID NO: 4061 - DNA, 283 bp, Homo sapiens
  source 1..283: mol_type = other DNA
tgcagcctctggattcacctttagcagctattccatgagctgggtccgccaggctccagggacggggctggagtgggtctcaactattagtggtagcggtgataccatagtctacgcagactccgtgaagggccggttcaccatctccagagacaattccaagaacacggtgtatctgcaaatgaacagcctgagagccgaggacacggccgtatattactgtgtgaaggtctactactacatggacgtctggggcaaggggacctcggtcaccgtctcctca

SEQ ID NO: 4062 - DNA, 283 bp, Homo sapiens
  source 1..283: mol_type = other DNA
tgcagcctctggattcacctttactagttatgagatgagctgggtccgccaggctccagggaaggggctggagtgggtctcatcaattagcggcagtgctgataccgcatactacgcagactctgtgaggggccgcttcaccatctccagagacaattccatgaatactttgtctttacaaatgaacagcctgagagccgaggacacggccctatatcactgtgtgaaagtctactattacatggacgtctggggcgaagggaccacggtcaccgtctcctca

SEQ ID NO: 4063 - DNA, 286 bp, Homo sapiens
  source 1..286: mol_type = other DNA
tgcagcctctggattcacctttagtacctattggatgacctggctccgccaggctccagggaaggggctggagtgggtggtcaatataaacacagatggaagtcagagacactatgtggactctgtgaagggccgattcatcatctccagagacaacgccaagaactcactgtttcttcagatgaacaacctgagaaccgaggacacggctgtttattactgtgcgagacacgggaactggaactgggactactggggccagggaaccctggtcaccgtctcctca

SEQ ID NO: 4064 - DNA, 286 bp, Homo sapiens
  source 1..286: mol_type = other DNA
tgcagcctctggactcacctttagtccctattggatgacctggctccgccaggctccaggaaaggggctggagtgggtggccaatataaacacagatggaagtcagagacactatgtggactctgtgaagggccgattcatcatctccagagacaacgccaagaactcactgtatctgcagatgaacaacctgagagccgaggacacggctgtgtattattgtgcgagacacgggaactggaactgggactactggggccagggaaccctggtcaccgtctcctca

SEQ ID NO: 4065 - DNA, 286 bp, Homo sapiens
  source 1..286: mol_type = other DNA
tgcagcctccggattcacctttagtgacttttggatgacgtggctccgccagcctccagggaaggggctggagtgggtggccaacataaaggaagatggaactaagcaacactatgcggactctgtgaagggccgattcaccatctccagagacaaccccaagaactcactgtatctgcaaatgaacagtctgagagccgacgattcggctatgtattactgtgcgagacacgggaactggaactgggactactggggccagggaaccctggtcagtgtctcctca

SEQ ID NO: 4066 - DNA, 286 bp, Homo sapiens
  source 1..286: mol_type = other DNA
tgcagcctctggattcacctttagtacctattggatgacgtgggtccgccaggctccagggaagggactggagtgggtggccaacataaaggcagatggaagtgcgagtcactatgtggactctgtgaagggccgattcaccatgtccagagacaacgccaagaactcattgtatctgcagatgaacaatctgagagccgaggacacggctgtgtactactgtgcgagacacgggaactggaactgggactactggggccagggaaccctggtcaccgtctcctca

SEQ ID NO: 4067 - DNA, 286 bp, Homo sapiens
  source 1..286: mol_type = other DNA
tgcagcctctggactcacctttagtccctattgggtgacctggctccgccaggctccaggaaaggggctggagtgggtggccaatataaacacagatggaagtcagagacactatgtggactctgtgaagggccgattcatcatctccagagacaacgccaagaactcactgtatctgcagatgaacaacctgagagccgaggacacggctgtgtattattgtgcgagacacgggaactggaactgggactactggggccagggaaccctggtcaccgtctcctca

SEQ ID NO: 4068 - DNA, 284 bp, Homo sapiens
  source 1..284: mol_type = other DNA
cagcctctggattcacctttagtacctattggatgacctggctccgccaggctccagggaaggggctggagtgggtggtcaatataaacacagatggaagtcagagacactatgtggactctgtgaagggccgattcatcatctccagagacaacgccaagaactcactgtttcttcagatgaacaacctgagaaccgaggacacggctgtttattactgtgcgagacacgggaactggaactgggactactggggccagggaaccctggtcaccgtctcctca

SEQ ID NO: 4069 - DNA, 286 bp, Homo sapiens; identical to SEQ ID NO: 4063
  source 1..286: mol_type = other DNA

SEQ ID NO: 4070 - DNA, 286 bp, Homo sapiens
  source 1..286: mol_type = other DNA
tactgcctctggattcaccttcaataggaattggatgagttgggtccgccaggctccagggaaggggctggagtgggtggccaacataaaccaagatggaagtgagaaaaactatttggactatgtgaagggccgattcatcatctccagagacaacgccaagaactcactgtatctacaaatgaacagcctgagagccgaggacacggccctgtattactgtgcgagacatggtaactggaactgggactattggggccagggaaccctggtcaccgtctcctca

SEQ ID NO: 4071 - DNA, 274 bp, Homo sapiens
  source 1..274: mol_type = other DNA
tgcggcctctggattcagtttcagtgattaccacatgcactgggtccgccaagttccagggaaggggctggtgtgggtctcacgtgttaaaaatgatggaagcagtccaatctacgcggactccgtgaagggccgattcaccatctccagagacaacgccaagaacagtctgtatctgcagatgaacagtctgagagccgaggacaccgctgtctattactgtgtgagaagttttgatttctggggccaagggacaatggtcaccgtctcttca

SEQ ID NO: 4072 - DNA, 274 bp, Homo sapiens
  source 1..274: mol_type = other DNA
tgcagcctctggattccccttcactccctactggatgcactgggtccgccaagctccagggaaggggctggtgtgggtctcacgtattaatagtgatggaagtagtacaatttacgcggactccgtgaagggccgattcaccatctccagagacaacgccaagaacacggtgtatctgcaaatgaacagcctgagagccgaggacacggctgtctattactgtgtccgttcttttgatttctggggccaagggacaatggtcaccgtctcttca

SEQ ID NO: 4073 - DNA, 274 bp, Homo sapiens
  source 1..274: mol_type = other DNA
tgcggcctctggattcagtttcagtgattaccacatgcactgggtccgccaagttccagggaaggggctggtgtgggtctcacgtgttaaaaatgatggaagcagtccaatctacgcggactccgtgaggggccgattcaccatctccagagacaacgccaagaacagtctgtatctgcagatgaacagtctgagagccgaggacaccgctgtctattactgtgtgagaagttttgatttctggggccaagggacaatggtcaccgtctcttca

SEQ ID NO: 4074 - DNA, 274 bp, Homo sapiens
  source 1..274: mol_type = other DNA
tgcagcctctggattccccttcactccctactggatgcactgggtccgccaagctccagggaaggggctggtgtgggtctcacgtataaatagtgatggaagtagtataatttacgcggactccgtgaagggccgattcaccatctccagagacaacgccaagaacacggtgtatctgcaaatgaacagcctgagagccgaggacacggctgtctattactgtgtccgttcttttgatttctggggccaagggacaatggtcaccgtctcttca

SEQ ID NO: 4075 - DNA, 286 bp, Homo sapiens
  source 1..286: mol_type = other DNA
tgcagcctctggattcaccttcagcagcgcctggatgacttgggtccgccaagttccagggaaggggctggtgtgggtctctcttattagtagtgatgggaacaccacaccctacgcggactccgtgaagggccgattcaccatctccagagacaacgccaggaacacgttatacctgcaaatgaacagtctgagagccgaggacacggctgtctattactgtgcaagagataatatgggctccattgactactggggtcagggaaccctggtcaccgtctcctca

SEQ ID NO: 4076 - DNA, 286 bp, Homo sapiens
  source 1..286: mol_type = other DNA
tgcagcctctggattcaccttcagcagcgcctggatgacttgggtccgccaagttccagggaaggggctggtgtgggtctctcttattagtagtgatgggaataccacaccctacgcggactccgtgaagggccgattcaccatctccagagacaacgccaggaacacgttatacctgcaaatgaacagtctgagagccgaggacacggctgtctattactgtgcaagagataatatgggctccattgactactggggtcagggaaccctggtcaccgtctcctca

SEQ ID NO: 4077 - DNA, 283 bp, Homo sapiens
  source 1..283: mol_type = other DNA
tgcggcctctggattcaccttcagtacgtccttcatgcactgggtccgccaggctccagggacgggcctggtggcggtctcacttattgacaatcatggggccacaacttacgcggagtccgtgaaggggcgattcaccatctccagagacaacgccaagaacacactgtttctgcaaatgaacagtctgcgagccgaggacacgggtatatattactgtgcgagagataatatgggttcaatagactactggggccagggaaccctggtcaccgtctcctca

SEQ ID NO: 4078 - DNA, 283 bp, Homo sapiens
  source 1..283: mol_type = other DNA
tgcggcatctggattcaccttcagtacgtccttcatgcactgggtccgccaggctccagggacgggcctggtggcggtctcacttattgacaatcatggggccacaacttacgcggagtccgtgaaggggcgattcaccatctccagagacaacgccaagaacacactgtttctgcaaatgaacagtctgcgagccgaggacacgggtatatattactgtgcgagagataatatgggttcaatagactactggggccagggaaccctggtcaccgtctcctca

SEQ ID NO: 4079 - DNA, 281 bp, Homo sapiens
  source 1..281: mol_type = other DNA
cggcctctggattcaccttcagtacgtccttcatgcactgggtccgccaggctccagggacgggcctggtggcggtctcacttattgacaatcatggggccacaacttacgcggagtccgtgaaggggcgattcaccatctccagagacaacgccaagaacacactgtttctgcaaatgaacagtctgcgagccgaggacacgggtatatattactgtgcgagagataatatgggttcaatagactactggggccagggaaccctggtcaccgtctcctca

SEQ ID NO: 4080 - DNA, 298 bp, Homo sapiens
  source 1..298: mol_type = other DNA
cactgtctctggtgactccatcaccaatcgtgactactactggggctggatccgccagcccccagggaaggggctggagtggattgggactatctattatagtgggaaaacctattacgacccgtccctcaagagtcgagtcaccatgtccgtagacacgcccaagaacgaattctccctgaaggtgacgtccgtgaccgccacagactcggctgtgtattactgtgcgagacaagtgggcgggggccgctggtacttcgatctctggggccgtggcaccctggtctctgtctcctca

SEQ ID NO: 4081 - DNA, 298 bp, Homo sapiens
  source 1..298: mol_type = other DNA
cactgtctctggtgactccatcagcagtagtggttacttctgggcctggatccgccagcccccagggaagggactggagtggattgcgactatctattatagtgggagaacctactacaacccgtccctcaagagtcgagttaccatatccgtagacacgtccaagaatgagttctccctgaagctgagctctgtgaccgccgcagacacggctgtctattactgtgcgagacaagtgggcgggggccgctggtacttcgatctctggggccgtggcaccctggtcactgtctcctca

SEQ ID NO: 4082 - DNA, 298 bp, Homo sapiens; identical to SEQ ID NO: 4081
  source 1..298: mol_type = other DNA

SEQ ID NO: 4083 - DNA, 298 bp, Homo sapiens; identical to SEQ ID NO: 4080
  source 1..298: mol_type = other DNA

SEQ ID NO: 4084 - DNA, 298 bp, Homo sapiens
  source 1..298: mol_type = other DNA
cactgtctctggtggctccatcagcaatactgattacttctggggctgggtccgccagcccccagggaaggggctggagtggattgggactatctattatactgggaaaacctactacagcccgtccctcaagagtcgactcaccatatccgttgacacgtccaggagccagttctccctgaagttgacctctgtgaccgccgcagacacggctgtctatcactgtgcgagacaagtgggcgggggccgctggtacttcgatctctggggccgtgccaccctggtcactgtctcctcg

SEQ ID NO: 4085 - DNA, 298 bp, Homo sapiens
  source 1..298: mol_type = other DNA
cactgtctctggtggctccatcggcagtagttctcactactggggctgggtccgccagcccccagggaaggggctggagtggattgagattaccaaatatactgggaccacctactacaacccgtccctcaagagtcgagtcaccatatccgtggacacgtacacgaaccagttctccctgaagctgagttctgtgaccgccgcagacacggctgtgtatttctgtgcgagacaggtaggaggaggacgctggtacttcgatctctggggccgcggcaccctggtcactgtctcctca

SEQ ID NO: 4086 - DNA, 298 bp, Homo sapiens
  source 1..298: mol_type = other DNA
cactgtctctggtggctccatcggcagtagttctcactactggggctgggtccgccagcccccagggaaggggctggagtggattgagattaccaaatatactgggaccacctactacaacccgtccctcaagagtcgagtcaccgtgtccgtggacacgtacacgaaccagttctccctgaagctgagttctgtgaccgccgcagacacggctgtgtatttctgtgcgagacaggtaggaggaggacgctggtacttcgatctctggggccgcggcaccctggtcactgtctcctca

SEQ ID NO: 4087 - DNA, 298 bp, Homo sapiens
  source 1..298: mol_type = other DNA
cattgtctctggtggctccatcgacactacttctcactactggggctgggtccgccagcccccagggaaggggctggagtggattgaaattaccaaatatactgggaccacctactacaacccctccctcaagagtcgagtcaccgtgtccgtggacacgtacacgaaccagttctccctgaagctgagttctgtgaccgccgcagacacggctgtttatttctgtgcgagacaagtaggaggaggacgctggtacttcgatctctggggccgcggcaccctggtcactgtctcctca

SEQ ID NO: 4088 - DNA, 298 bp, Homo sapiens; identical to SEQ ID NO: 4084
  source 1..298: mol_type = other DNA

SEQ ID NO: 4089 - DNA, 283 bp, Homo sapiens
  source 1..283: mol_type = other DNA
tgcagcctctggattcaccttcagtagctactggatgcactgggtccgccaagctccagggaaggggccggtgtgggtcgcacatattaataatgatggaagtggcgcaagttatatggactccgtgaagggccgattcaccatctccagagacaacgccaagaacacactgtatctacaaatgaacagtctgagagccgaggacacggctctgtattactgtgtaagagccgatggtgggtttgactactggggccagggaaccctggtcaccgtctcctca

SEQ ID NO: 4090 - DNA, 283 bp, Homo sapiens
  source 1..283: mol_type = other DNA
tgcagcctctggattcaccttcagtagctactggatacactgggtccgccaggctccagggaagggactactgtgggtctcatttataaataatgatggaagtgtcacaaactacgcgggctccgtgaagggccgattcaccatgtccagagacaacgccaagaacacgttgtatctgcaaatgaacagtctgagagtcgaggacacgggtctttattattgtgtaagagcggacgggggatttgactactggggccagggaaccctggtcaccgtctcctca

SEQ ID NO: 4091 - DNA, 285 bp, Homo sapiens
  source 1..285: mol_type = other DNA
gcctctggttacacctttaccgactatggtgtcacctgggtgcggcaggcccctggaaaaggacttgagtggatgggatggatcagcactaggaatggaaacacaatctatggtcagaggttccagggcagagtcaccatgacaagagacacatccacgagcacagcctacatggagctgaggagcctgcgatctgacgacacggccatgttttactgcgcgctctccggcgatgggggctactcacacaactggggccagggaaccctggtcacggtctcctca

SEQ ID NO: 4092 - DNA, 285 bp, Homo sapiens
  source 1..285: mol_type = other DNA
acttctggatataggtttaccacttatggtctcacctgggtgcgacaggcccctggacaagggcttgagtggctgggatggatcaacactgagtctggtcacacactctatggccagatgctccagggcagaggcaccctgaccgctgacgcatccacggccacaggccacttggaactgacgagcctgacatctgacgacacggccacatattactgtgccctgtccggggacgggggctacagtcacaactggggccggggaaccctggtcatcgtctcctca

SEQ ID NO: 4093 - DNA, 285 bp, Homo sapiens
  source 1..285: mol_type = other DNA
gccggtggttacacgtctatcaactttggtatcacctgggtgcgacaggcccctggacaaggacttgagtggatgggatggatcagccttgagcatggaaacacacactacgctcagagtttccagggcagagtcacgatgaccgctgacacatccgcgtacacagcctacatggagatgaggagcctgagatctgacgacacggccatgtattattgcgcgctatccggtgatgggggctattcacacaactggggccagggaaccctggtcaccgtctcctca

SEQ ID NO: 4094 - DNA, 283 bp, Homo sapiens
  source 1..283: mol_type = other DNA
tgcagcctctggattcacctttagcaactatggcatgacctgggtccgccaggctccaggaaaggggctggagtgggtctcaggtttcactggtggcagtggtaacacacactacacagactccgtgaagggccggttcaccatctccagagacaactccaagaacacgctgtatttgcaaatgaacagcctgagagccgaggacacggccttatattactgtgtgagagggaccacaggcatggacgtctggggcaaagggaccacggtcatcgtctcctca

SEQ ID NO: 4095 - DNA, 283 bp, Homo sapiens
  source 1..283: mol_type = other DNA
tgcagcctctggattcacctttagcaactatggcatgacctgggtccgccaggctccaggaaaggggctggagtgggtctcaggtttcactggtggcagtggtaacacacactacacagactctgtgaagggccggttcaccatctccagagacaactccaagaacacgctgtatttgcaaatgaacagcctgagagccgaggacacggccttatattactgtgtgagagggaccacaggcatggacgtctggggcaaagggaccacggtcatcgtctcctca

SEQ ID NO: 4096 - DNA, 281 bp, Homo sapiens
  source 1..281: mol_type = other DNA
cagcctctggattcacctttagcaactatggcatgacctgggtccgccaggctccaggaaaggggctggagtgggtctcaggtttcactggtggcagtggtaacacacactacacagactccgtgaagggccggttcaccatctccagagacaactccaagaacacgctgtatttgcaaatgaacagcctgagagccgaggacacggccttatattactgtgtgagagggaccacaggcatggacgtctggggcaaagggaccacggtcatcgtctcctca

SEQ ID NO: 4097 - DNA, 283 bp, Homo sapiens
  source 1..283: mol_type = other DNA
tgcagcctctggcctcacctttaggaaccatcccatgagctgggtccgccaggctccagggaaggggctggagtgcgtctcaagtattagtagtagtggtgatagcacatactacggagactccgtgaagggccggttcaccatctccagagacaattccaagaacacgctgtatctgcaaatgaatagcctgagagccgacgacacggccgtatattactgtgtgagaggaactaccggtatggacgtctggggccaagggaccacggtcaccgtctcctca

SEQ ID NO: 4098 - DNA, 295 bp, Homo sapiens
  source 1..295: mol_type = other DNA
cactatctctggtgactccatcaccaataataacttctactggggctggatccgccagtccccagggaagggactggagtggattggcacaacctattctagtgggagcaccttctacaccccgtccctcaggggtcgagtcgccatatccgttgacacgtccaagaaccagttctccctgaaggtctactctgtcagcgccgcggactcggctttgtatttctgtgcgagacatatgtcagttcgggcggtttttgactactggggccagggacaccgggtcaccgtctcctca

SEQ ID NO: 4099 - DNA, 295 bp, Homo sapiens
  source 1..295: mol_type = other DNA
cactgtctctggtgactccatcaccagtaataacttctactgggggtggctccgccagccccctgggaaggggctggagtggattgggagttcctattccagtgggagcgccttctccgacccgtccctcaagggtcgagtcatcctctcggtggacacctccaagaaccagttctccctgcagctgaactctgtgaccgccgcagacacggctgtctattactgtgcgagacatatgtctgtccgggccgttttcgactactggggccggggagccctggtcaccgtctcttca

SEQ ID NO: 4100 - DNA, 290 bp, Homo sapiens
  source 1..290: mol_type = other DNA
acatctccggggacagtgtctctagcaacagtgctgcttggaactggatcaggcagtccccatcgagaggccttgagtggctgggcaggacacgctacaggtccacttggtttcatgattatgcaatatctgtgaagagtcgcataactatcagtcccgacacatccaagaaccagttctccctgcacctgaactctgtgacccccgaggacacggctatgtatttctgtgcaagagacctgggatactttgactcttggggccagggaatcctggtcaccgtctcctca

SEQ ID NO: 4101 - DNA, 290 bp, Homo sapiens; identical to SEQ ID NO: 4100
  source 1..290: mol_type = other DNA

SEQ ID NO: 4102 - DNA, 290 bp, Homo sapiens
  source 1..290: mol_type = other DNA
tcatctccggggacagtgtctctagcaacaatgctggttggaactggatcaggcagtccccatcgagaggccttgagtggctgggaaggacatactacaggtccaggtggtataattattatgcagaatctgtgaaaagtcgaataaccatcaacccagacacatccaagaaccagttctccatgcagatgaactctatgactcccgaggacacggctgtgtattactgtgcaagagatttgggctactttgactcctggggccggggaaccctggtcaccgtctcctca

SEQ ID NO: 4103 - DNA, 290 bp, Homo sapiens
  source 1..290: mol_type = other DNA
ccatctccggggacagtgtctctagcaacagtgctggttggaactggatcaggcagtccccatcgagaggccttgagtggctgggaaggacatactacaggtccaactggaataatttttatgccgtgtctgtgaaaagtcgaataatcatcagcccagacacatccaagaaccagttctccctgcaactgaactctgtgactcccgaggacacggctctttattactgtgcaagagacctggggtactttgactcctggggccagggaaccctggtcaccgtctcctca

SEQ ID NO: 4104 - DNA, 290 bp, Homo sapiens
  source 1..290: mol_type = other DNA
tcatccccggggacagtgtctctagcaacaatgctggttggaactggatcaggcagtccccatcgagaggccttgagtggctgggaaggacatactacaggtccaggtggtataattattatgcagaatctgtgaaaagtcgaataaccatcaacccagacacatccaagaaccagttctccatgcagatgaactctatgactcccgaggacacggctgtgtattactgtgcaagagatttgggctactttgactcctggggccggggaaccctggtcaccgtctcctca

SEQ ID NO: 4105 - DNA, 290 bp, Homo sapiens
  source 1..290: mol_type = other DNA
ccatctccggggacagtgtctctagcaacagtgctggttggaattggatcaggcagtccccatcgagaggccttgagtggctgggaaggacatattacaggtccaactggaataattattatgccgtgtctgtgaaaagtcgaataatcatcagcccagacacatccaagaaccagttctccctgcaactgaactctgtgactcccgaggacacggctgtttattactgtgcaagagacctggggtactttgactcctggggccagggaaccctggtcaccgtctcctca

SEQ ID NO: 4106 - DNA, 290 bp, Homo sapiens
  source 1..290: mol_type = other DNA
ccatctccggggacagtgtctctagcaacagtgctggttggaattggatcaggcagtccccatcgagaggccttgagtggctgggaaggacatactacaggtccaactggaataattattatgccgtgtctgtgaaaagtcgaataatcatcagcccagacacatccaagaaccagttctccctgcaactgaactctgtgactcccgaggacacggctgtttattactgtgcaagagacctggggtactttgactcctggggccagggaaccctggtcaccgtctcctca

SEQ ID NO: 4107 - DNA, 292 bp, Homo sapiens
  source 1..292: mol_type = other DNA
tgcggcctctggattcacgttgagcagctatgccatgagctgggtccgccaggctccagggaaggggctggagtgggtctcaggtgttagtggaactggcgcgaccacacattatgcaggctccgtgatgggccggttcaccgtctccagagacaattccaagaacacgctgtttctgcaaatgaacaacctcagagccgacgacacggccgtctatttctgtgcgagagatggctacaatgacattcccttagactactggggccagggagtcctggtcaccgtctcctca

SEQ ID NO: 4108 - DNA, 292 bp, Homo sapiens
  source 1..292: mol_type = other DNA
tgcggcctctggattcacgttgagcacctatgccatgagctgggtccgccaggctccagggaaggggctggagtgggtctcaagtattagtggaactggcgccaccacccattatgcaggctccgtgatgggccggttcaccgtctccagagacaattccaagaacaccctatatctgcaaatggacaacctcagagccgacgacacggccgtctatttttgtgcgagagatggctacaatgacatacccttagactactggggccagggagtccgggtcaccgtctcctct

SEQ ID NO: 4109 - DNA, 292 bp, Homo sapiens
  source 1..292: mol_type = other DNA
tgcggcctctggattcacgttgagcacctatgccatgagctgggtccgccaggctccagggaaggggctggagtgggtctcaagtattagtggaactggcgccaccacccattatgcaggctccgtgatgggccggttcaccgtctccagagacaattccaagaacaccctatatctgcaaatggacaacctcagagccgacgacacggccgtctatttttgtgcgagagacggctacaatgacatacccttagactactggggccagggagtccgggtcaccgtctcctct

SEQ ID NO: 4110 - DNA, 292 bp, Homo sapiens
  source 1..292: mol_type = other DNA
tgcagcctctggattcacctctaacagctatgccatgacctgggtccgccaggctccagggaaggggctggagtgggtctcaactattactggtactggttttgacacatactacgcaaactccctgaagggccggattatcgtctccagagacaattctatgaacatgttgtttctgcaaatcaacagcctgagagccgaggacacggccgtttattactgtgcgagagatggctacaatgatatcccccttgactactggggccagggagccctggtcatcgtctcctca

SEQ ID NO: 4111 - DNA, 292 bp, Homo sapiens
  source 1..292: mol_type = other DNA
tgcagcctccggattcaccgctagcaactatgccatgacctgggtccgccagactccagggaaggggctgcagtgggtcgcaactattactgggactggtggtaacacctactacgcagactccctgaagggccgctttgtcatctccagagacaattacatgaatacattgtctctgcaaatgaacagcctgattcccgaggacacggccgtctacttctgtgccagagatggctacaacgacatcccccttgactactggggccagggaaccctggtcgccgtctcctcg

SEQ ID NO: 4112 - DNA, 301 bp, Homo sapiens
  source 1..301: mol_type = other DNA
tacaacttctggattcacctttagtgcttatgctgtgagctgggtccgccaggctccagggaaggggctggagtgggtaagtttcattagagacaaagtttatggtgggacaacagaatacgccgcgtctgtgaaaggcagattcaccatctcaagagatgattccaaagacatcgcctatctgcaaatgaacagcctgaaaaccgaggacacagccatttattactgcgctagaggagggggcagcgggcagtattactttgactactggggccagggaaccctggtcaccgtctcctca

SEQ ID NO: 4113 - DNA, 301 bp, Homo sapiens
  source 1..301: mol_type = other DNA
cacagcttctggattcacctttggtgcttatgctgtgagctgggtccgccaggctccagggaaggggctggagtgggtaagtttcattagagacaaagtttatggtgggacaacagaatacgccgcgtctgtgaaaggcagattcaccatctcaagagatgattccaaagacatcgcctatctgcaaatgaacagcctgaaaaccgaggacacagccatttattactgcgctagaggagggggcagcgggcagtattactttgactactggggccagggaaccctggtcaccgtctcctca

SEQ ID NO: 4114 - DNA, 301 bp, Homo sapiens
  source 1..301: mol_type = other DNA
tacagggtctggattcagctttggtgattatgctgtgagctgggtccgccaggctccagggaaggggctggagtggataagtttcattagaaacaaggcttatggtgagacaacagaatacgccgcgtctgtgaagggcagattcaccatctcaagagataattacaacagcatcgcctatctgcaactgaataacctggaaaccgaggacacagccgtctattactgtgctagagggggggggagcggccagtattattttgactactggggccagggaaccctggtcaccgtctcctca

SEQ ID NO: 4115 - DNA, 298 bp, Homo sapiens
  source 1..298: mol_type = other DNA
tgcagcctctggattcaccttcagcagctactggatgcactgggtccgccaagctccagggaaggggctggtgtgggtctcacgtattaatagtgatgggagtaacacatactacgcggactccgtgaagggccgattcaccatctccagagacaacgccaagaacacgctgtatctgcaaatgaacagtctgagagccgaggacacggctgtgtattactgtgcaagaagggcgtatagtggcagctactactactttgactactggggccagggaaccctggtcaccgtctcctca

SEQ ID NO: 4116 - DNA, 298 bp, Homo sapiens
  source 1..298: mol_type = other DNA
tgcagcctctggattcaccctcagtagcttctggatgcactgggtccgccaagctccaggggaggggctggtgtgggtctcacgtattaatggtgatgggcgtaccataaactacgcggactccgtgaagggccgattcaccatctccagagacaacgccaagaacaccctatatttgcaaatgaacagtctgagagccgaggacacggctgtctattactgtgccagaagagcgtatagtgggagctactactactttgactactggggccagggaaccctggtcaccgtctcctca

SEQ ID NO: 4117 - DNA, 298 bp, Homo sapiens
  source 1..298: mol_type = other DNA
tgcagcctctggattcaccctcagtagcttctggatgcactgggtccgccaagctccaggggaggggctggtgtgggtctcacgtattaatggtgatgggcgtaccataaactacgcggactccgtgaagggccgattcaccacctccagagacaacgccaagaacaccctatatttgcaaatgaacagtctgagagccgaggacacggctgtctattactgtgccagaagagcgtatagtgggagctactactactttgactactggggccagggaaccctggtcaccgtctcctca

SEQ ID NO: 4118 - DNA, 296 bp, Homo sapiens
  source 1..296: mol_type = other DNA
cagcctctggattcaccctcagtagcttctggatgcactgggtccgccaagctccaggggaggggctggtgtgggtctcacgtattaatggtgatgggcgtaccataaactacgcggactccgtgaagggccgattcaccatctccagagacaacgccaagaacaccctatatttgcaaatgaacagtctgagagccgaggacacggctgtctattactgtgccagaagagcgtatagtgggagctactactactttgactactggggccagggaaccctggtcaccgtctcctca

SEQ ID NO: 4119 - DNA, 289 bp, Homo sapiens
  source 1..289: mol_type = other DNA
tgcagcctctggattcacctttagtagttattggatgagctgggtccgccaggctccagggaaggggctggagtgggtggccaatttaaaccaagatggaaataagaaaaactatgtggactctgtgaagggccgattcaccatctccagagacaatgccgagaactcactgtttctgcaactgaacagcctgagagccgaggacacggctgtgtattattgtgcgagagatcgcgggtatagcacctatgactactggggccagggaaccctggtcaccgtctcctcc

SEQ ID NO: 4120 - DNA, 289 bp, Homo sapiens
  source 1..289: mol_type = other DNA
tgaagcctctggattcacatttgcgaactcctggatgacctggctccgccaggctccagggaaggggccgtattgcgtggccgacatgagcgcagatggaggtcagataacctatgcggactctgtcaggggccgattcagcatctccagagacaacgccaagaattcactttatctgcaaatgaatggcctcagacccgaagacacggctgtctactactgtgcgagagatcgggggtactctacctacgactactggggccagggaatcctgatcaccgtctcctca

SEQ ID NO: 4121 - DNA, 289 bp, Homo sapiens
  source 1..289: mol_type = other DNA
tgcagcctctggattcacctttgccacctatcccatgacctgggtccgccaggctccagggaaggggctggagtgggtcgcagcgattactggcagtggtagtatcacatactacgcagactccgtgaagggccggttcaccatctccagagacaattccaagaacatgatgtatgtgcaaatgaacagcctgagagccgaggacacggccgtatattactgtgggaaggccaactcctactattatatggacgtctggggcaaagggaccacggtcatcgtctcctca

SEQ ID NO: 4122 - DNA, 289 bp, Homo sapiens
  source 1..289: mol_type = other DNA
tgcagcctctggattcacctttagtggctatggcatgacgtgggtccgccaggctccaggtaaggggctggagtgggtctcagctatcagcgctagtggtgatatcacgtactacgcagactccgtgaagggccggttcaccatctccagagacaattccaagaatacgctgtttctgcaaatgaacagcctgagagccgaggatgcggccgtttattactgtgggaaggcaaactcgtactactacatggacgtctggggcaaagtgtccacggtcaccgtctcttca

SEQ ID NO: 4123 - DNA, 280 bp, Homo sapiens
  source 1..280: mol_type = other DNA
cactgtctctggtgcctccatcaatcgttactattggacctggatccggcagcccgccgggaggggactggagtggattgggcgtatccatggtactggaagcaccaactatgacccctccctcaagagtcgagtcaccatgtcagtagacacgtccaagaaccaggtctccctgaacctgagctctgtgaccgccgcggacacggccgtgtattactgtgcgagagagaactggtacttcgatttctggggccgtggcaccctggtcactgtctcctca

SEQ ID NO: 4124 - DNA, 280 bp, Homo sapiens
  source 1..280: mol_type = other DNA
cactgtctctggtgcctccgtcagtagaaactactggacctggatccggcaacccgccgggaagggactggagtggattgggcgtgtctctgccagtgggtacaccaacaacaacccctccctcaagagtcgagtcaccatgtcagtagacacgtccaagaaccagttctccctgaaactgacctctgtgaccgccgcggacacggccgtttattactgtgcgagggagaactggtacttcgatttctggggccgtggcaccgtggtcactgtctcctca

SEQ ID NO: 4125 - DNA, 286 bp, Homo sapiens
  source 1..286: mol_type = other DNA
tgcagcctctggattcaccttcagtagctactggatgcactgggtccgccaagctccagggaaggggctggtgtgggtctcacgtattcttagtgatgggagtagcacaagttacgcggactccgtgaagggccgattcaccatctccagagacaacgccaagaacacgctgtatctgcaaatgaacagtctgagagccgaggacacggctgtgtattactgtgcaagagattattacagctcatttgactactggggccagggagccctggtcaccgtctcctca

SEQ ID NO: 4126 - DNA, 286 bp, Homo sapiens
  source 1..286: mol_type = other DNA
tgtagtctctggattcacatttagtaactattggatgcactgggtccgccaaactcctgggcaggggctggagtcggtcgcacaagttaatcataatggggatcccacatactacgcggactccgtgaagggccgattcaccatctccagagacaacgccaagaacacactgtatttacaaatgaacagtctgagagacgaggacacggctatttattactgtgcaagagactactatagttcgtttgactactggggccagggaatcctggtcaccgtctcctca

SEQ ID NO: 4127 - DNA, 295 bp, Homo sapiens
  source 1..295: mol_type = other DNA
tgcagcctctggattcacctttagtgactattggatgggctgggtccgccaggctccagggaaggggctggagtgggtggccaacataaaccaagatggaggtgaagaacgctatgtggactctgtgaagggccgattcaccatctccagagacaacgccaagaactcactgtatctgcaaatgaacagcctgagagccgaggacacggctgtctattactgtgggagggaaatgagacgcgcctacggcccttttgactactggggccagggaaccctggtcaccgtctcctca

SEQ ID NO: 4128 - DNA, 295 bp, Homo sapiens
  source 1..295: mol_type = other DNA
tgtagcctctgaattcacctttagagactattggatgggctgggtccgccaggctccagggaaggggctggagtgggtggccaacataaaccaaggtggaactgagacccagtatatggattctgtgaagggtcgattcaccatttccagagacgacgccaagaactctctgtatctgcaaatgaacagcctgagaggcgaggacacggctatatattactgtgggagggagatgcgtcgtgcctacggcccttttgactactggggccagggaaccccggtcaccgtctcctca

SEQ ID NO: 4129 - DNA, 295 bp, Homo sapiens
  source 1..295: mol_type = other DNA
tgcagcctctgaattcacctttagagactattggatgggctgggcccgccaggctccagggaaggggctggagtgggtggccaacataaaccaaggtggaagtgagacccaatatatggattctgtgaagggtcgattcaccatttccagagacaacgccaagaactctctctatctgcaaatgaacagcctgagaggcgaggacacggctatatattactgtgggagggagatgcgtcgtgcctacggcccttttgactactggggccagggaaccccggtcaccgtctcctca

SEQ ID NO: 4130 - DNA, 295 bp, Homo sapiens
  source 1..295: mol_type = other DNA
tgcagcctctgaattcacctttagagactattggatgggctgggtccgccaggctccagggaaggggctggagtgggtggccaacataaaccaaggtggaagtgagacccaatatatggattctgtgaagggtcgattcaccatttccagagacaacgccaagaactctctctatctgcaaatgaacagcctgagaggcgaggacacggctatatattactgtgggagggagatgcgtcgtgcctacggcccttttgactactggggccagggaaccccggtcaccgtctcctca

SEQ ID NO: 4131 - DNA, 295 bp, Homo sapiens
  source 1..295: mol_type = other DNA
tgtagcctctgaattcacctttagagactattggatgggctgggtccgccaggctccagggaaggggctggagtgggtggccaacataaaccaaggtggaactgagacccagtatatggattctgtgaagggtcgattcaccatttccagagacgacgccaagaactctctgtatctgcaaatgaacagcctgagaggcgaggacacggctatatattactgtgggagggagatgcgtcgtgcctacggcccctttgactactggggccagggaaccccggtcaccgtctcctca

SEQ ID NO: 4132 - DNA, 303 bp, Homo sapiens
  source 1..303: mol_type = other DNA
aagggttatggatacagttttaccaactactggatcggctgggtgcgccagatgcccgggaaaggcctggagtggatggggatcatctatcctggtgactctgataccaaatacagcccgtccttccaaggccaggtcaccatctcaaccgacaagtccataagtaccgcctacctgcagtggaacagcctgaaggcctcggacaccgccatgtattattgtgcgagacatgggcattgcagaaataacagctgctatgggtttgactactggggccagggaaccctggtcaccgtctcctca

SEQ ID NO: 4133 - DNA, 303 bp, Homo sapiens
  source 1..303: mol_type = other DNA
aagggttatggatacagttttaccaactactggatcggctgggtacgccagatgcccgggaaaggcctggagtggatggggatcatctatcctggtgactctgataccaaatacagcccgtccttccaaggccaggtcaccatctcaaccgacaagtccataagtaccgcctacctgcagtggaacagcctgaaggcctcggacaccgccatgtattattgtgcgagacatgggcattgcagaaataacagctgctatgggtttgactactggggccagggaaccctggtcaccgtctcctca

SEQ ID NO: 4134 - DNA, 273 bp, Homo sapiens
  source 1..273: mol_type = other DNA
gcttctggatacaccttcactagctatgctgtgcattgggtgcgccaggcccccggacaaaggcttgagtggatgggatggatcaacgctggcaatggtaacacaaaatattcacagaagttccagggcagagtcaccattaccagggacacatccgcgagcacagcctatatggagctgagcagcctgagatctgaagacacggctgtgtattactgtgcgagagaagccgggggctactggggccagggaaccctggtcaccgtctcctca

SEQ ID NO: 4135 - DNA, 273 bp, Homo sapiens
  source 1..273: mol_type = other DNA
gcttctggatacaccttcactagctatgctatgcattgggtgcgccaggcccccggacaaaggcttgagtggatgggatggatcaacgctggcaatggagacacaaaatattcacagaacttccagggcagagtcacctttaccagggacacatccgcgagcacagcctacatggaactgagcagcctgacatctgaagacacggctatctattactgtgcgagagaggccggaggctactggggccagggaaccctggtcaccgtctcctca

SEQ ID NO: 4136 - DNA, 285 bp, Homo sapiens
  source 1..285: mol_type = other DNA
gcctctggatacacctttaccaagtttgggatcacctgggtgcgacaggcccctggacaaggacttgagtggatgggatggatcagcactaacaatggaaacacaaactatgctcagaggttccagggcagagtcaccatgaccacagacacatccacgagcacagcctacttggaggtgaggagcctgagatctgacgacacggccatgtattactgcgcgatatccggtgatgggggctactcacacaactggggccagggaaccctggtcaccgtctcctca

SEQ ID NO: 4137 - DNA, 285 bp, Homo sapiens
  source 1..285: mol_type = other DNA
ggttttggttacaactttgccacctttggtatgacttgggcgcgacaggcccctggacaaggacttgagtggatgggatggatcagcgcctacaatggtaacacaaactatgcacgcggcctccaaagcagagtcaccctgaccacagacacatccacgaacacagccttcatggaactgacgagcctgcattctgacgacacggccgtttattactgtgcgatatctggagatgggggctactcccacaactggggccagggaaccctggtcaccgtctcctca

SEQ ID NO: 4138 - DNA, 285 bp, Homo sapiens
  source 1..285: mol_type = other DNA
gcttctggttacagctttaccacctttggaatcacctgggtgcgacaggcccctggacaaggacttgagtggatgggatggatcagcacttacagtggtaacgcaaactatgcacacaagctccaggacagagtcaccctgaccacagacacatccacgaacacagcctacatggaactgaggagcctgaattctgacgacacggccgtatattactgtgcgatatctggagatgggggctactcccacaactggggccagggaaccctgctcaccgtctcctca

SEQ ID NO: 4139 - DNA, 292 bp, Homo sapiens
  source 1..292: mol_type = other DNA
tgcagcctctggattcaccttcagcagctactggatgcactgggtccgccacgctccagggaaggggctggtgtgggtctcacgtattaatagtgatgggagtagtacaagctacgcggactccgtggagggccgattcaccatctccagagacaacgccaagaacacgttgtatctgcaaatgaacactctgagagccgaggacacggctgtgtattactgtgcaagaggctatgctgggaactacagggttgactactggggccagggaatcctggtcaccgtctcctca

SEQ ID NO: 4140 - DNA, 292 bp, Homo sapiens
  source 1..292: mol_type = other DNA
tgcagcctctggattcaccttcagtaactactggatgcactgggtccgccaagctccagggaaggggctggtgtgggtctcacatattagtgctgatgggactaccacaacctacgcggactccgtgaagggccgattcaccatctccagagacaacgccaagaacaccctgtatctgcaaatgagcagtctgagcgccgaggacacggctttttattactgtgcaaggggatatgctgggaactatcgggttgactactggggccagggaaccctggtcaccgtctcctca

SEQ ID NO: 4141 - DNA, 271 bp, Homo sapiens
  source 1..271: mol_type = other DNA
tgcagcctctggattcacctttagtaactattggatgagctgggtccgccaggctccagggaaggggctggagtgggtggccagcataaagcaagatggaagtgagaaatactatgtggactctgtgaagggccgattcaccatctccagagacaacgccaagaactcactgtatctgcaaatgaacagcctgagagccgaggacacggctgtgtattactgtgcacatacaactatctggggccagggaaccctggtcaccgtctcctca

SEQ ID NO: 4142 - DNA, 271 bp, Homo sapiens
  source 1..271: mol_type = other DNA
tgcagcctctgaattcagttttagtaactattggatgtactgggtccgccaggctccagggaaggggctggagtgggtggccaatataaatcaagatggaagtgagaaaaactatgtggactctgtgaagggccgattcaccatctccagagacaacaccatgaactcagtgtatctgcaaatgaacagcctgagagccgaggacactgccgtatattactgtgcgcacacgacgatccggggccagggaaccctggtcaccgtctcttca

SEQ ID NO: 4143 - DNA, 279 bp, Homo sapiens
  source 1..279: mol_type = other DNA
gcctctggatacgccttcaggctttatactatcaactgggtgcgccaggcccccggacaagcgtttgagtggatggggtggatctatcctgacagtggtggcacaaaatattcgcagaagttgcagggcagaatcaccattaccggagacacatccgcgaacacagtctacatggagatgaggagcctgagatctgaggacacggctgtgtattattgtgtcagagggaaggaggggtttgacttctggggccagggaaccgcagtcaccgtctcttca

SEQ ID NO: 4144 - DNA, 279 bp, Homo sapiens
  source 1..279: mol_type = other DNA
gcttctggatacaccttcactgactatactatacaatgggtgcgccaggcccccggacaaaggcctgagtggatgggttggatgtacgctggcgatggtggcggaaaattctctcagcacttccgagacagagtcacctttaccagggacacatccgcgaccacagcctacatggagctgaggagcctgagatctgaggacacggctgtgtattactgtgtgagaggaaaggagggctttgacttctggggccagggaacccaggtcaccgtctcctca

SEQ ID NO: 4145 - DNA, 289 bp, Homo sapiens
  source 1..289: mol_type = other DNA
tgcagcctctggattcacctttagtagctattggatgtactgggtccgccaggctccagggaaggggctggagtgggtggccaacataaagcaagatggaagtgagaaatactatgtggactctgtgaagggccgattcaccatctccagagacaacgccaagaactcactgtatctgcacatgaacagcctgagagccgaggacacggctttttattactgtgcgagaggaccctactactactacatggacgtctggggcaaagggaccacggtcaccgtctcctca

SEQ ID NO: 4146 - DNA, 289 bp, Homo sapiens
  source 1..289: mol_type = other DNA
tgcagcctctggattcacctttagtacttattggatgaactgggtccgccaggctccaggaaaggggctggagtgggtggccaacataaagcaagatggaagtgagaaatactttgtggactctgtgaagggccgattcaccatctccagagacaacgccgagaactcagtgtatctgcaaatcaacaccctgagagccgaggacacggctgtatatttctgtgcgaggggcccctattactattacatggacgtctggggcaaagggaccacggtcaccgtctcctcg

SEQ ID NO: 4147 - DNA, 289 bp, Homo sapiens
  source 1..289: mol_type = other DNA
tgcagcctctggattcacctttagtagctattggatgtactgggtccgccaggctccagggaaggggctggagtgggtggccaacataaagcaagatggaagtgacaaatactatgtggactctgtgaagggccgattcaccatctccagagacaacgccaagaactcactgtatctgcacatgaacagcctgagagccgaggacacggctttttattactgtgcgagaggaccctactactactacatggacgtctggggcaaagggaccacggtcaccgtctcctca

SEQ ID NO: 4148 - DNA, 279 bp, Homo sapiens
  source 1..279: mol_type = other DNA
gcacctggagacaccttcaccagctactatatgcactgggtgcgacaggcccctggacaagggcttgagtggatgggaataatcaaccctagtggtgataccacaagttacgcacagaagttccagggcagagtcaccatgaccagggacacgtccacgagcacagtctacatggaggtgagcagcctgagatctgaggacacggccgtgtattactgtgcgagagatccagctccccttgactactggggccagggaaccctggtcaccgtctcctca

SEQ ID NO: 4149 - DNA, 279 bp, Homo sapiens
  source 1..279: mol_type = other DNA
gcatctggatacaccttcaccaagtactatatgcactgggtgcgacaggcccctggacaagggcttgagtggatgggaataatcaaccctagtggtggtcgcacaacctacggacagaagttccagggcagggtcaccatgaccagggacacgtccacgagcacagtctacatggaactgaccagcctgacatctgaggacacggccgtatattactgtgcgcgagatccagcgcccttggactactggggccagggaaccctggtcaccgtctcctca

SEQ ID NO: 4150 - DNA, 280 bp, Homo sapiens
  source 1..280: mol_type = other DNA
tgcagcctctggattcagcttcagtaactatcacatgagctgggtccgccaggctccagggaaggggctggagtgggtttcatacattagtggtagtggtaatgccatagactacgcagactctgtgaagggccgattcaccatctccagagacaatgccaagaagtcgctctatctgcaaatgaacggcctgaaagacggggacacggctgtgtattactgtgcgagagccagaggacttgactactggggccagggaaccctggtcaccgtctcctca

SEQ ID NO: 4151 - DNA, 280 bp, Homo sapiens
  source 1..280: mol_type = other DNA
tgcagcctctggattcaccttcagtaataataatatgaactgggtccgccaggctccagggaaggggctggagtgggtttcattcattagtcctagtactactaccatatactacgcagactctgtgaagggccgattcaccatctccagagacaatgccaggaactcactgtatttgcaaatgaacagtctgagagacgaagatacggctgtgtattactgtgcgagagcgaggggtctggactactggggccagggaaccccagtcaccgtctcctca

SEQ ID NO: 4152 - DNA, 289 bp, Homo sapiens
  source 1..289: mol_type = other DNA
tgcagcctccggcctcaccctcaataactatggcatggtctgggtccgccaggccccaggcaaggggctggagtgggtggcagtcatctcctctgatggaattaataaaaactatgcagactccgtgaagggccgattcaccatctccagagacagttccaacaacgcgctgcatctggaaatgaacagcctgagagctgaggacacggctgtgtattactgtgcgaaaagtcccggttggtgggcctttgactactggggccaggggaccctggtcaccgtctcctca

SEQ ID NO: 4153 - DNA, 289 bp, Homo sapiens
  source 1..289: mol_type = other DNA
tgcagcctctggattcaccttcactaagtttggcatgcactgggtccgccaggctccaggcaaggggctggagtgggtggcagttatattctcggatggatttaataaatactatgtagactccgtgaagggccgattcaccatctccagagacaattccaacaacacgctgcatctggacatgaacagcctgagacctgaggacacgggtgtgtattactgtgcgaaaagccccggttggtgggcctttgactactggggccaggggaccctggtcaccgtctcctca

SEQ ID NO: 4154 - DNA, 289 bp, Homo sapiens
  source 1..289: mol_type = other DNA
tgtagcctctggattcaccttcaggcactatgacatacactgggtccgccaggctccaggcaaggggctggagtgggtggcagttatatcagttgatggaagtgatgcttactatgtaaactccgtgaagggccgattcaccatctccagcgacaattccaagaacacgctgtatctgcaaatgaacagcctgagagctgaggacacggctgtgtattactgtgcgaaatcccccgggtggtgggcatttgactactggggccagggaaccctggtcaccgtctcctca

SEQ ID NO: 4155 - DNA, 286 bp, Homo sapiens
  source 1..286: mol_type = other DNA
tgcagcctctggattcacctttcctcgctataccatgggctgggtccgccaggctccagagaagggtctggagtgggtctcagctattcttagtgatgctgctaagacattctatacagactccgtgaggggccggttcaccatctccagagacaattctaagaccatggtgtatctacaaatgaacagcctgagagccgaggacacggccatctattactgtgcgaggcgcgtcgaatacgcctttgacaactggagccagggaaccctggtcaccgtctcctca

SEQ ID NO: 4156 - DNA, 286 bp, Homo sapiens
  source 1..286: mol_type = other DNA
tgcagcctctggattcgactttccccgctataccatgggctgggtccgccaggctccagggaagggtctggagtggctctcagctattcttagtgctggtgaaaagtcatactacgcagactccgtgaagggccggttcaccatctccagagacaattccatgcacacggtgtatttgcaattgaacagcctgagagtcgaggacacggccatatattactgtgcgaggcgcgtcgagtatgcctttgacaactggggccagggaaccctggtcaccgtctcctca

SEQ ID NO: 4157 - DNA, 286 bp, Homo sapiens
  source 1..286: mol_type = other DNA
tgcagcctctggattcacctttcctcgctataccatgggctgggtccgccaggctccagggaagggtctggagtgggtctcagctattcttagtgatgctgctaagacattctatacagactccgtgaggggccggttcaccatctccagagacaattctaagaccatggtgtatctacaaatgaacagcctgagagccgaggacacggccatctattactgtgcgaggcgcgtcgaatacgcctttgacaactggagccagggaaccctggtcaccgtctcctca

SEQ ID NO: 4158 - DNA, 283 bp, Homo sapiens
  source 1..283: mol_type = other DNA
tgccgcctctggattccggtttagcgactatacaatgggctgggtccgccagtttccagggaggggactggagtgggtctcggccattctcagtaatcgtcaaacattttatggagagcccgtgaggggccgattctccgtctccagagacaattccaagaatatgttgtttctggagatgagaagcctgagacccgaggacacgggccgatactactgcgcgaggagagtggagtacgcctttgacaactggggccagggacttccagtcaccgtccgctca

SEQ ID NO: 4159 - DNA, 283 bp, Homo sapiens
  source 1..283: mol_type = other DNA
tgcagcctctggattcaccttcagtgcctatgatttccactgggtccgccgggctccagggcagggactgcaatatgtttcagctattactaaaaatggggatagcacatattatgcagactctgtgaagggcagattcaccatctccagagacaattccaagaacacactgtatcttcatatgggcagcctgagacctgaggacatggatgtgtactactgtgcgagaggtttctactacatggacgtctggggcaaagggaccacggtcaccgtctcctca

SEQ ID NO: 4160 - DNA, 283 bp, Homo sapiens
  source 1..283: mol_type = other DNA
tgtagcctctggattcaccttcagtagctatggtatgcactgggtccgccaggctccagggaagggactggaatatgtttcagctattagtagtgatgggggtagcacatattatgcagactctgtgaagggcagattcaccatctccagagacaattccaagaacacgctgtatcttcaaatgggcagcctgagagctgaggacatggctgtgtattactgtgcgagaggcttctactacatggacgtctggggcaaagggacgacggtcaccgtctcctca

SEQ ID NO: 4161 - DNA, 283 bp, Homo sapiens
  source 1..283: mol_type = other DNA
tgcagcctctggattcacctttagtagctattgggtgggctgggtccgccaggctccagggaaggggctggagtgggtggccaacataaagcaagatggaagtgagaggtactatgtggactctgtgaagggccgattcaccatctccagagacaacgccaagaattcactgcatctgcaaatgaacagcctgagagacgaggacacggctgtgtattactgtgcgagagcgaatcggggctttgactactggggccagggaacgctggtcaccgtctcctca

SEQ ID NO: 4162 - DNA, 283 bp, Homo sapiens
  source 1..283: mol_type = other DNA
tgcagcctctggattcacctttagtagctattggatgagctgggtccgccaggctccagggaaggggctggagtgggtggccaacataaagcaagatggaagtgagaaatactatgtggactctgtgaagggccgattcaccatctccagagacaacgccaagaactcactgtatctgcaaatgaacagcctgagagccgaggacacggctgtgtattactgtgcgagggcgaaccgggggtttgactactggggccagggaaccctggtcaccgtctcctca

SEQ ID NO: 4163 - DNA, 283 bp, Homo sapiens
  source 1..283: mol_type = other DNA
tgcagcctctggattcacctttagtagctattggatgagctgggtccgccaggctccagggaaggggctggagtgggtggcaaacataaagcaagatggaagtgagaaatactatgtggactctgtgaagggccgattcaccatctccagagacaacgccaagaactcactgtatctgcaaatgaacagcctgagagccgaggacacggctgtgtattactgtgcgagggcgaaccgggggtttgactactggggccagggaaccctggtcaccgtctcctca

SEQ ID NO: 4164 - DNA, 283 bp, Homo sapiens
  source 1..283: mol_type = other DNA
tgcagcctctggattcacctttagtagctattggatgagctgggtccgccaggctccagggaaggggctggagtgggtggccaacataaagcaagatggaagtgaaaaatactatgtggactctgtgaagggccgattcaccatctccagagacaacgccaagaactcactgtatctgcaaatgaacagcctgagagccgaggacacggctgtgtattactgtgcgagggcgaaccgggggtttgactactggggccagggaaccctggtcaccgtctcctca

SEQ ID NO: 4165 - DNA, 289 bp, Homo sapiens
  source 1..289: mol_type = other DNA
cacagcctctggattcccctttagccgctattccatgggctgggcccgccaggctccagggaaggggctggagtgggtctcggcttttactgttggtgatggaggaaacacatattacgcagactccgtgaggggccgcttcaccctctccagagacacttccaaggacacactgcatctacaaatggacaccctgacagccgaggacacggccacttactactgtgcgagaagagtcgagggggcttttgatttgtggggccaggggacagtggtcaccgtctcgcca

SEQ ID NO: 4166 - DNA, 277 bp, Homo sapiens
  source 1..277: mol_type = other DNA
tgcagcctctggattcgtctttggcccctataccatgggctgggtccgccaggctccaggaaaggggctggaatgcgtctcaacaatttctgataccagaaactacgcagacaccgtgaagggccggttcaccatctccagagacaattccatgaacaccctatatctggagatgagcaccctgagagtcgacgacacggccatgtattactgtgcgcgaagggtcgaaggggcttttgatctctggggccaggggacactggtcaccgtctctccg

SEQ ID NO: 4167 - DNA, 283 bp, Homo sapiens
  source 1..283: mol_type = other DNA
tgcagtctctggattcccctttaacatatataccatgggctgggtccgccaggctccaggaaaggggctggagtgggtctcagctattactagcgattctaccatagcctacgcggacatcgtgaagggccggttcaccatctccagagacaattccatcaacacgctgcgtctgcagatgaacaacctgagagtcgacgacacggccacatattactgtgcgagaagggtcgaaggggcttttgatctctggggccaagggacactggtcaccgtctctccg

SEQ ID NO: 4168 - DNA, 277 bp, Homo sapiens; identical to SEQ ID NO: 4166
  source 1..277: mol_type = other DNA

SEQ ID NO: 4169 - DNA, 277 bp, Homo sapiens
  source 1..277: mol_type = other DNA
tgcagcctctggattcacctttggcaggtataccatgggctgggtccgccaggctccagggaaggggctggagtgcgtctcaactattactagtaccatagactacgcagacaccgtgaagggccggttcaccatctccagagacaattccatgaacacgctgtatctgcagatgaacaccctgagagtcgacgacacggccatctattactgtgcgcgaagggtcgaaggggcttttgatctctggggccaagggacactggtcaccgtctctccg

SEQ ID NO: 4170 - DNA, 277 bp, Homo sapiens
  source 1..277: mol_type = other DNA
tgcagcctctggattcgtctttggcccctataccatgggctgggtccgccaggctccaggaaaggggctggagtgcgtctctactatttctaataccttaaactacgcagacaccgtgaagggccggttcaccatctccagagacaattccatgaacaccctatatctggagatgaacaccctgagagtcggcgacacggccatctattactgtgcgcgaagggtcgaaggggcttttgatctctggggccaggggacactggtcaccgtctctccg

SEQ ID NO: 4171 - DNA, 295 bp, Homo sapiens
  source 1..295: mol_type = other DNA
cactgtctctggtggctccatcagcagtagtggttactactgggtctggatccgccagcccccagggaaggggctggagtacattgggggtctgtattatagtgggagcacctactacaacccgtcccttaagagtcgagtcaccatgtccgtggacacgtccaagaacgagttctccctgaagctgagctctgtgaccgccgcagacacggctgtgtattattgtgcgagacataggggtggcagcagcgaatttgactactggggccagggaaccctggtcaccgtctcctca

SEQ ID NO: 4172 - DNA, 295 bp, Homo sapiens
  source 1..295: mol_type = other DNA
cactgtctctggtggctccatcagcagtggtggttacaagtgggactggatccgccagaccccagggaaggggctggagtgggttgcgagtatctactatggtgggagcagctactacagcccgtccctcaagagtcgagtcaccatctccgtagacacgtccgggaatcagttctccttgaagctgagttctgtgaccgccgcagacacggctgtgtattattgtgcgagacatcggggcggtagctcggaatttgactactggggccagggaatcctggtcaccgtctcctca

SEQ ID NO: 4173 - DNA, 276 bp, Homo sapiens
  source 1..276: mol_type = other DNA
gcttctggatacaccttcactgcccatcttatccattgggtgcgccaggcccccggacaaaggcttgagtggatggggttgatcaacgctggcaatggtaacacaaaatattcacagaagttccagggcagagtctccattaccagggacacatccgcgagcacagcctacatggaactgagcagcctcgaatctgaagacacggctgtatattactgtgcgagaccgggggattgggtgtactggggccagggaaccctgctcaccgtctcctca

SEQ ID NO: 4174 - DNA, 276 bp, Homo sapiens
  source 1..276: mol_type = other DNA
gcttctggatacaccttcactagttattctgtacattgggtgcgccaggcccccggactaaggcctgagtggatggggagcatcaacgctggcagtggcaacacaaaatattcacagaacttccagggcagagtctccattgccacggacacatccgcgaccactgcctacatggaactgaacagcctgagatctgaagacacggctgtctattattgtgcgagacctggggattgggtctactggggccagggaaccctggtcaccgtctcctca

SEQ ID NO: 4175 - DNA, 294 bp, Homo sapiens
  source 1..294: mol_type = other DNA
gcgtctggatacaccctcactaaatatgctatgcattgggtgcgccaggcccccggacaaaggcttgagtggatgggatggatcaaggataactctggtaacacaaaatattcacagaagttccagggcagagtcacctttacctgggacacatccgcgagcacagcctacatggaactgagcagcctaaaatctgaagacacggctctatattactgtgcgagggccggagcggctcccccgggcaattggttcgactcctggggccagggaaccctggtcaccgtctcctca

SEQ ID NO: 4176 - DNA, 294 bp, Homo sapiens
  source 1..294: mol_type = other DNA
gcttctggatacaccctcactaaatatgctatgcattgggtgcgccaggcccccggacaaaggcttgagtggatgggatggatcaaggataattctggtcacacaaaatattcacaaaagttccagggcagagtcacctttacctgggacacatccgcgagcacagcctacatggaactgagcagcctaaaatctgaagacacggctctatattactgtgcgagggccggagcggctcccccgggcaactggttcgactcctggggccagggaaccctggtcaccgtctcctca

SEQ ID NO: 4177 - DNA, 294 bp, Homo sapiens
  source 1..294: mol_type = other DNA
gcttctggatacaccttcaataaacatgctatacattgggtgcgccaggcccccggacaaaggcttgagtggatgggatggatcaacgctggctatgctaacacagaatattcacagaacttccagggcagagtcaccattaccagggacacatccgcgagcacagcctacatggagctgagcggcctgacaaatgaagacacggctgtttattattgtgcgagagcgggggctgctcctcccggaaactggttcgactcctggggccagggaaccctggtcaccgtctcctca

SEQ ID NO: 4178 - DNA, 293 bp, Homo sapiens
  source 1..293: mol_type = other DNA
ccatctccggggacagtgtctctagcaacagtgttgcttggaactggatcaggcagtccccatcgagaggccttgagtggctgggaaggacatactacaggtccaagtggtataatgattatgcaccatctgtgaaaagtcgaacaatcatcaacccagacacatccaagaaccagttctccctgcagctgacctctgtgactcccgaggacacggctgtgtattactgtgcaagagatcgtagcaggctgtttgactactggggccagggaaccccgatcaccgtctcctca

SEQ ID NO: 4179 - DNA, 293 bp, Homo sapiens; identical to SEQ ID NO: 4178
  source 1..293: mol_type = other DNA

SEQ ID NO: 4180 - DNA, 293 bp, Homo sapiens
  source 1..293: mol_type = other DNA
ccatctccggggacagtgtctctagcaacagtgttgcttggaactggatcaggcagtccccatcgagaggccttgagtggctgggaaggacatactacaggtccaagtggtctaatgattatgcactatctgtgagaagtcgaataatcatcaacccagacacatccaacaaccagttctccctgcaactgaactctgtgactcccgaggacacggctgtgtattattgtgcaagagatcgcagcagactctttgactactggggccagggaaccctggtcaccgtctcctca

SEQ ID NO: 4181 - DNA, 280 bp, Homo sapiens
  source 1..280: mol_type = other DNA
tgcagcctctggattcacctttagtagctattggatgagctgggtccgccaggctccagggaaggggctggagtgggtggccaacacaaaaccagatggaagtgagaaatactatgtggactctgtgaagggccgattcaccatctccagagacaacgccaagaactcactgtatctgcaaatggacagcctgagagccgaggacacggctgtgtattactgtgggagaaataaaaggggtgactactggggccagggaaccctggtcaccgtctcctca

SEQ ID NO: 4182 - DNA, 280 bp, Homo sapiens
  source 1..280: mol_type = other DNA
tgtagcctctggattcacgtttagtgactattggatgagttgggtccgccaggctccagggaaggggctggagtgggtggccaacataaagcaagatggaagtgagacatactatgtggactctgtgaagggccgattctccatctccagagacaacgccaagaactcagtgtatctgcaaatgaacagcctgggaggcgaggacacggctatgtattactgtgggagaaataaaagaggggactactggggccagggaaccctggtcaccgtctcctca

SEQ ID NO: 4183 - DNA, 286 bp, Homo sapiens
  source 1..286: mol_type = other DNA
cactgtctctggtggctccatcactagcaactactggagttggatccggcagtccgccgggaagggactggagtggattgggcttatccaaaccactgggggcaccaactacaacccctccctcaagagtcgagtcaccatatcaggagacaagtccaagaaccagttctccctgaagctgagctctgtgaccgccgcggacacggccgtgtattactgtgcgagatggcgacccggggggtactttgactactggggccagggaaccctggtcaccgtctcctca

SEQ ID NO: 4184 - DNA, 286 bp, Homo sapiens
  source 1..286: mol_type = other DNA
cactgtctctggtggctccgtcagtagttactactggagctggatccggcagtccgccgggaagggactggagtggattgggcgtatgtacaccagtgggagcaccatttacaacccctccctcaagagtcgagtcaccatgtcagaagacacgtccaagaatcagttctccctgaagctgacctctgtgaccgccgcggacacggccgtgtattactgtgcgagatggcgtcccggaggatactttgactactggggccagggaaccctggtcaccgtctcctca

SEQ ID NO: 4185 - DNA, 289 bp, Homo sapiens
  source 1..289: mol_type = other DNA
tgcagcctctggattcaccatcacgaactatggcatgggctgggtccgccagagtccagagaaggggctggagtgggtttccttcattactcctgatggtcgttccatccactacgcagactctttttggggccgattcaccatctctagagacactaccaagaacacggtgtcgctgcagatgagcagcctcggagacggagacacggctacttattattgtgtcagaggatggcggagtaactcctttgacttctggggccagggaaccctggtcaccgtctcctca

SEQ ID NO: 4186 - DNA, 289 bp, Homo sapiens
  source 1..289: mol_type = other DNA
tataggctctggattcacattcactacttatagcatggactgggtccgccaggctccagggaaggggctggagtgggtttcatacattggtacaagttatagtcccatatactacgcagactctgtgaagggccgattcaccatttctcgagacaatgccaggaattcaatatatctgcaaatgaacaacctgagagacgaggacacggctgtgtattactgtgtgagaggctggcgctcgaattcatttgacttttggggccagggaattttggtcaccgtctcctca

SEQ ID NO: 4187 - DNA, 289 bp, Homo sapiens
  source 1..289: mol_type = other DNA
tataggctctggattcacgttcactacttatagcatggactgggtccgccaggctccagggaaggggctggagtgggtttcatacattggtacaagtaatagtcccatatattacgcagactctgtgaagggccgattcaccatttctagagacaatgccgggaattcaatatatctggaaatgaacaacctgagagacgaggacacggctgtgtattactgtgtgagaggctggcgctcgaattcatttgacttttggggccagggaattttggtcaccgtctcctca

SEQ ID NO: 4188 - DNA, 289 bp, Homo sapiens
  source 1..289: mol_type = other DNA
tttaggctctggattcacctttactacttatagcatggactgggtccgccaggctccagggaaggggctggagtggatttcatatattggtacaagtaatagtcccatatactacgcagactctgtgaagggccgattcaccatttctcgagacaatgccatgaattcgatatatctggagatgaacaacctgcgagacgaggacacggctgtctattattgtgtgagagggtggcgctcgaattcgtttgacttttggggccagggagtattggtcaccgtctcctca

SEQ ID NO: 4189 - DNA, 299 bp, Homo sapiens
  source 1..299: mol_type = other DNA
ccatctccggggacagtgtctctagcagcagtgctacttggaactggatcaggcagtccccatcgagaggccttgagtggctgggaaggacatactacaggtccaagtggtataatgattttgcaatatctgtgaaaagtcgaatatccatcaacccagacacatccgagaaccagttctccctgcagcttaactctgtgactcccgaggacacggctctctattactgtgcaagagatagggctggcaaccgagcttttgatatctggggccaagggacaaaggtcaccgtctcctca

SEQ ID NO: 4190 - DNA, 299 bp, Homo sapiens
  source 1..299: mol_type = other DNA
ccatctccggggacagtgtctctagcaacaatgctgcttggaactggatcaggcagtccccatcgagaggccttgagtggctgggaaggacatactacaggtccaagtactatagtgattatgcagtatctctgaagagtcgaataacaatcaacgcagacacatccaagaaccagttctccctgcagctgaactctgtgactctcgatgacacggctgtgtattactgtgcaagagatagggctggcaaccgagcttttgatatctggggccaagggacactggtcaccgtctcttca

SEQ ID NO: 4191 - DNA, 299 bp, Homo sapiens
  source 1..299: mol_type = other DNA
ccatctccggggacagtgtctctagcaacagtgatgcttggaactggatcaggcagtccccgtcgagaggccttgagtggctgggaaggacatactacaggtccaagtggtataatgattattcagtctctatgaaaagtcgaataaccatcaacccagacacatccaagaaccagttctccctgcagctgaactctgtgactcccgaggacacggctgtgtattactgtgcaagagatcgggctggaaatcgtgcttttgatatctggggccaagggacaatggtcaccgtctcttca

SEQ ID NO: 4192 - DNA, 299 bp, Homo sapiens
  source 1..299: mol_type = other DNA
ccatctccggggacagtgtctctagcaacagtgctgcttggaactggctcaggcagtccccttcgagaggccttgactggctggggaggacatactacaggtccaagtggtattatgattatgcagtatctgtgacaagtcgaataaccatcgacccagacacatccaagaaccagttctccctgcagctgaactctgtgactcccgaggacacggctgtgtattactgtgcaagagatagggctggcaaccgagcttttgatatctggggccaagggacaatggtcaccgtctcttca

SEQ ID NO: 4193 - DNA, 295 bp, Homo sapiens
  source 1..295: mol_type = other DNA
tgcagcctctggattcacgctcagtggttatgaaatgaactgggtccgccaggctccagggaaggggctggagtggctttcatatattagtcacagtggtgctaccaaatactacgcagactctgttaagggccgattcaccatctccagagacaacgccgagaactcactgtatctgcaaatgaacagcctgagagtcgaggacacggctgtttattactgtgcgagagatgtcagaggctggtatcgatggttcgacccctggggccagggaaccctggtcaccgtctcctca

SEQ ID NO: 4194 - DNA, 295 bp, Homo sapiens
  source 1..295: mol_type = other DNA
tgcagcctctggattcaccttcagtagttatgaaatgaactgggtccgccaggctccagggaaggggctggagtgggtctcgtacattagtggaagtagtgatagcatacactacgcagactctgtgaagggccgattcaccatctccagagacaacgccaagaagtcattgtatctgcaaatgaacagcctgagagtcgaggacacggctgtttattactgtgcgagagatgtccgtggctggtaccgatggttcgacccctggggccagggaaccctggtcaccgtctcctca

SEQ ID NO: 4195 - DNA, 274 bp, Homo sapiens
  source 1..274: mol_type = other DNA
tgcagcctctggattcgccctcagtagctttgaaatgaattgggtccgtcaggctccagggaaggggccggagtgggtcgcatacattagtgacagtggtagtttcacacactacgcagactctgtgaagggccgattcaccatctccagagacaacgccaggaactcagtgtatctgcaaatgagaagcctgagagccgaggacacggctgtttatttttgtgcgagaggagttgcttcttggggcccgggaaccctggtcatcgtctcctca

SEQ ID NO: 4196 - DNA, 274 bp, Homo sapiens
  source 1..274: mol_type = other DNA
tgtagtctctggattcaccttcagtagttttggcatgaactgggtccgccaggctccagggaaggggctggagtggctttcatacattagtccttctggtggtgccatcaactacgcagactctgtgaagggccgattcaccatctccagagacaacgccaagaactcactgtatctgcaaatgaacagcctgagagtcgaggacacggctatatattactgtgcgagaggggtcgcatcttggggccagggaaccctggtcaccgtctcctca

SEQ ID NO: 4197 - DNA, 280 bp, Homo sapiens
  source 1..280: mol_type = other DNA
tgcagcctctggattcatctttagtaaatattggatgaactgggtccgccaggctccagggaaggggctggagtgggtggccaggataaaggaagatggaagtgacaaaagctatgtgggctctctgaagggccgattcaccatctccagagacaacgccaacaactcactgtatctgcaaatgaacagcctgagagtcgaggacacggctgtgtattactgtgcgaggactaatggccttgactattggggccagggaaccctggtcaccgtctcctca

SEQ ID NO: 4198 - DNA, 280 bp, Homo sapiens
  source 1..280: mol_type = other DNA
tgtagcctctggattcacctttagcatttattggatgagttgggtccgccaggctccagggaaggggctggagtgggtggccaacataaaggaagatggaagtgcgaaaaactatgtggactctgtgaagggccgattcaccatctccagagacaacgccaagaactcactgtatctgcaaatgaacagcctgagagccgaggacacggccgtgtattactgtgcgagaacgaacggacttgactactggggccagggaaccctggtcaccgtctcctca

SEQ ID NO: 4199 - DNA, 280 bp, Homo sapiens
  source 1..280: mol_type = other DNA
tgtagcctctggattcacctttagtatttcttggatgacttgggtccgccaggctccagggaaggggctggagtgggtggccaacataaaggaagatggaagcgcgagaaattatgtggactctgtgaagggccgattcaccatctccagagacaacgccaagaactcactgtatctgcaaatgaacagcctgagagccgacgacacggccgtctattattgtgcgagaacgaatggacttgactactggggccagggaaccctggtcaccgtctcctca

SEQ ID NO: 4200 - DNA, 280 bp, Homo sapiens
  source 1..280: mol_type = other DNA
tgtagcctctggattcacctttagtatttcttggatgacttgggtccgccaggctccagggaaggggctggagtgggtggccaacataaaggaagatggaagcgcgagaaattatgtggactctgtgaagggccgattcaccatctccagagacaacgccaagaactcactgtatctgcaaatgaacagcctgagagtcgacgacacggccgtctattattgtgcgagaacgaatggacttgactactggggccagggaaccctggtcaccgtctcctca

SEQ ID NO: 4201 - DNA, 292 bp, Homo sapiens
  source 1..292: mol_type = other DNA
cactgtctctggtggctccatcaatagttactactggacctggacccggcaggccgccgggaagggactggagtggattggtcagatttataccagggggaacatcaattacaacccctccctcaagagtcgaatcaccctgtcagcagacacgtccaagaaccagttctccctgaagctgacctctgtcaccgccgcagacacggccgtatattactgtgcgagagtggggggttttcccttgggtgcttttgatatctggggccaagggacaatggtcaccgtctcttcc

SEQ ID NO: 4202 - DNA, 292 bp, Homo sapiens
  source 1..292: mol_type = other DNA
cactgtctctggtggctccatcagtgattactactggagctggatccggcagcccgccgggaagggactggagtggattgggcgtatttataccagtgaaggcaccaactacaacccctccctcaagagtcgactcatcatgtcagtggacacgtccaagaatcagttctccctgaagctgacctctgtgaccgccgctgacacggccgtctattactgtgcgagagttggaggttttccccttggagcttttgatatctggggccaagggacaaaggtcaccgtctcttca

SEQ ID NO: 4203 - DNA, 283 bp, Homo sapiens
  source 1..283: mol_type = other DNA
tgcagcctctggattcacctttagcagctatgccctgggctgggtccgccaggctccagggaaggggctggagtgggtctcaactattagtactagtgctggtagcacatatcacgcagactccgtggagggccggttcaccatctccagagacaatttcaagaacacgctgtatctgcaaatgaacagcctgggagtcgaggacacagccgtatatttctgtgcgagaacatactactacatggacgtctggggcaaagggaccacggtcaccgtctcctca

SEQ ID NO: 4204 - DNA, 283 bp, Homo sapiens
  source 1..283: mol_type = other DNA
tgcagcctctggattcacgtttagcagctatgccatgagctgggtccgccaggctccaggggaggggctggagtgggtctcaactattagtattagtggtggtggcacatactacgcagactccgtgaagggccggttcaccatctccagagacaattccaagtatacgttgtatctgcaaatgaacagcctgggagccgacgacacggccgtatatttctgtgcgaggacctactactacatggacgtctggggcagagggaccacggtcaccgtctcctca

SEQ ID NO: 4205 - DNA, 283 bp, Homo sapiens; identical to SEQ ID NO: 4204
  source 1..283: mol_type = other DNA

SEQ ID NO: 4206 - DNA, 286 bp, Homo sapiens
  source 1..286: mol_type = other DNA
tgcagcctctggattcacctttagcagctatgccatgagctgggtccgccaggctccagggcaggggctggagtgggtctcagctattagtgggagtggtggtaacacatactacgcagactccgtgaagggccggttcaccatctccagagacaattccaagaacacgctgtatttgcaaatgaacagcctgagagccgaggacacggccgtatattactgtgcgaaacgtacggactactactttgactactggggccagggaaccctggtcaccgtctcctca

SEQ ID NO: 4207 - DNA, 286 bp, Homo sapiens
  source 1..286: mol_type = other DNA
tgcagcctctggattcgcctttagtgactatgccatgagctgggtccgccaggctccagggaaggggctggagtgggtctcaactattagtagtgatggtgctggcacataccacgcagactccgtgaagggccggttcaccatctccagagacaattccaagaacacgctatatctgcaagtgaacagcctgagagccgaggacacggccctatatttctgtgcgaaaagaacggactactactttgactactggggccagggaaccctggtcaccgtctcctca

SEQ ID NO: 4208 - DNA, 286 bp, Homo sapiens; identical to SEQ ID NO: 4207
  source 1..286: mol_type = other DNA

SEQ ID NO: 4209 - DNA, 286 bp, Homo sapiens
  source 1..286: mol_type = other DNA
tgcagcctctggattcaccttcagtacctactggatgcactgggtccgccaagctccagggaaggggctggtgtgggtctcacctattaatagtgatgggactaatatagcctacgcggactccgtgaagggccgattcaccatctccagggacaacgccaagaacacgctgtatctgcaaatgaacagtctgagagccgaggacacggctgtgtattactgtgcaagaacgaatgggggggcttttgatatctggggccaagggacaatggtcaccgtctcttca

SEQ ID NO: 4210 - DNA, 284 bp, Homo sapiens
  source 1..284: mol_type = other DNA
cagcctctggattcaccttcagtacccactggatgcactgggtccgccaagctccagggaaggggctggtgtgggtctcacgaattaatagtgatgggaggagcacaaagtacgcggactccgtgaagggccgattcaccatctccagagacaacgcccagaacacgctgtatctgcaaatgaacagtctgagagccgaggacacggctgtgtattactgtgcaaggacgaacgggggtgcttttgatatctggggccaagggacaatggtcaccgtctcttca

SEQ ID NO: 4211 - DNA, 286 bp, Homo sapiens
  source 1..286: mol_type = other DNA
tgcagcctctggattcaccttcagtacccactggatgcactgggtccgccaagctccagggaaggggctggtgtgggtctcacgaattaatagtgatgggaggagcacaaagtacgcggactccgtgaagggccgattcaccatctccagagacaacgcccagaacacgctgtatctgcaaatgaacagtctgagagccgaggacacggctgtgtattactgtgcaaggacgaacgggggtgcttttgatatctggggccaagggacaatggtcaccgtctcttca

SEQ ID NO: 4212 - DNA, 280 bp, Homo sapiens
  source 1..280: mol_type = other DNA
tgcagcctctgggttcaccttcagtgactctataatacactgggtccgccagccttccgggaaagggctggagtgggttggccgtgttagcagcaaagcttacaattacgcgacagcatatgctgcgtcggtgaaaggcaggttcaccatctccagagatgattcaaagaacacggcgtatctgcaaatgagcagcctgaaaaccgaggacacggccgtgtattactgtactagatttttggacgtctggggcaaagggaccacggtcaccgtctcctca

SEQ ID NO: 4213 - DNA, 280 bp, Homo sapiens
  source 1..280: mol_type = other DNA
tgcagcctctgggttcaccttcagcggctctggtatacactgggtccgccaggcttccgggaaagggctggagtgggttggccgtattaaaaacaaagctaacagttacgcgacagcatatgctgtgtcggtgaaaggcaggttcaccatctccagagatgattcaaagaacacggcatatctgcaaatgaacagcctgaaaaccgaggacacggccgtgtattattgtactagatttctagatgtctggggccaagggaccacggtcaccgtctcctca

SEQ ID NO: 4214 - DNA, 280 bp, Homo sapiens
  source 1..280: mol_type = other DNA
tgcagcctctggattcacctttagtagctattggatgagctgggtccgccaggctccagggaaggggctggagtgggtggccaatataaagcaagatggaagtgagaagtactatgtggactctgtgaagggccgatttaccatctccagagacaacgccaagaactcactgtatctgcaaatgaacagcctgagaggcgaggacacggctgtgtattactgttcgcgaggaggtcgcggtgactcctggggccagggaaccctggtcaccatctcctca

SEQ ID NO: 4215 - DNA, 280 bp, Homo sapiens
  source 1..280: mol_type = other DNA
tgcagcctctggattcacctttagtaacaattggatgagctggatccgccaggctccagggaaggggctggagtgggtggccaacataaacgaaaatggatacaacaaatactatgtggactctgtgaagggccgattcaccatctccagagacaacgccaagaactcactatatctgcaaattaacagcctgagagacgaggacacggctgtatattattgttcgagaggggggcggggagactcctggggccagggaaccctggtcaccgtctcctca

SEQ ID NO: 4216 - DNA, 280 bp, Homo sapiens
  source 1..280: mol_type = other DNA
tgcagcctctggattcacctttagtaacaattggatgagctgggtccgccaggctccagggaaggggctggagtgggtggccaacataaacgaaaatggaaacaacgaatactatgtggactctgtgaagggccgattcaccatctccagagacaacgccaagaacttactatatctgcaaattaacaacgtgagagacgaggacacggctgtgtattattgttcgagaggggggcggggagactcctggggccagggaaccctggtcaccgtctcctca

SEQ ID NO: 4217 - DNA, 280 bp, Homo sapiens
  source 1..280: mol_type = other DNA
tgcagcctctggattcacctttagtaacaattggatgagctgggtccgccaggctccagggaaggggctggagtgggtggccaacataaacgaaaatggaaacaacgaatactatgtggactctgtgaagggccgattcaccatctccagagacaacgccaagaactcactatatctgcaaattaacagcctgagagacgaggacacggctgtgtattattgttcgagaggggggcggggagactcctggggccagggaaccctggtcaccgtctcctca

SEQ ID NO: 4218 - DNA, 280 bp, Homo sapiens
  source 1..280: mol_type = other DNA
tgcggcctctggattcgccttcagtgacttctacatgagctgggtccgccaggctccagggaaggggctggagtgggtttcatacattgatggttttggtggtatagtatactacgcagactctgtgaagggccgattcaccatctccagggacaacgccaagaactcactgtatctgcaaatgatcagtctgagagccgaggacacggccctatattactgtgcgagagggagatacggaacctactggggccagggaaccctcgtcaccgtctcctca

SEQ ID NO: 4219 - DNA, 280 bp, Homo sapiens
  source 1..280: mol_type = other DNA
tgcagcctctggattcagtttcagtgactactacatgacctggatccgccaggctccagggaagggactggagtgggtttcctacattaaatcttatggtagcgccacaggatacgctgactctgtgaagggccgattcaccatctccagagacgacggcaagaagttcctgtttctgcaaatggacagtctgagagtcgaggacacggccatatattactgtgcgagagggcgctacggaacctacttgggccagggggtcctggtcaccgtctcctca

SEQ ID NO: 4220 - DNA, 280 bp, Homo sapiens
  source 1..280: mol_type = other DNA
tgcagcctctggattcagtttcagtgactactacatgacctggatccgccaggctccagggaagggactggagtgggtttcctacattaaatcttgtggtagcgccacaggatacgctgactctgtgaagggccgattcaccatctccagagacgacggcaagaagttcctgtttctgcaaatggacagtctgagagtcgaggacacggccatatattactgtgcgagagggcgctacggaacctacttgggccagggggtcctggtcaccgtctcctca

SEQ ID NO: 4221 - DNA, 277 bp, Homo sapiens
  source 1..277: mol_type = other DNA
cactgtctctggtggctccatcagtagttactactggagctggatccggcagcccgccgggaagggactggagtggattgggcgtatctataccagtgggagcaccaactacaacccctccctcaagagtcgagtcaccatatcagtagacaagtccaagaaccagttctccctgaagctgagctctgtgaccgccgcggacacggccgtgtattactgtgcgagaggacatgcttttgatatctggggccaagggacaatggtcaccgtctcttca

SEQ ID NO: 4222 - DNA, 277 bp, Homo sapiens
  source 1..277: mol_type = other DNA
cattgtctctggtggctccatcagtagttactactggaactggatccggcagcccgccgggaagggactggagtggcttgggcgtatctataccagtgggagcaccaactacaacccctccctcaagagtcgagtcaccatgtcagtagacacgtccaagaaccagttctccctgaagctgagctctgtgaccgccgcggacacggccgtgtattattgtgcgagaggtcatgcttttgatatctggggccaagggacaatggtcaccgtctcttca

SEQ ID NO: 4223 - DNA, 286 bp, Homo sapiens
  source 1..286: mol_type = other DNA
ttcagcctctggattcaccttcagtacctacgctatgcactgggtccgccaggctccaggcgaggggctggagtgggtggcagttatctggcatgatggaacaaatgaaaattatgtaagttccgtgaaaggccgattcaccatctccagagacaacgccaagaacacgctgtatttgcaaatgaacagcctgagaactgaggacacggctgtctattactgtgtgagagatgactacggtggtcttgactactggggccagggagccctggtcaccgtgtcctca

SEQ ID NO: 4224 - DNA, 286 bp, Homo sapiens
  source 1..286: mol_type = other DNA
tgcagcctctggattcaccttcagtgcctatgctatgcactgggtccgccaggctccaggcaaggggctggactgggtggcaattatatcatatgatggaagtattaaatactacgcagactccgtgaagggccgattcaccatctccagagacgattccaagaacactctgtatctgcaaatgaacagcctgagagctgaagacacggctgtctattactgtgtgagagatgactacggtggccttgactactggggccagggaaccctggtcaccgtctcctca

SEQ ID NO: 4225 - DNA, 298 bp, Homo sapiens
  source 1..298: mol_type = other DNA
tgcagcctctggattcaccttcagtagctatggcatgcactgggtccgccaggctccaggcaaggggctggagtgggtggcaattatatcatatgatggaagtaataattactatgcagactccgtgaagggccgattcaccatctccagagacaattccaagaacacgctgtatctgaaaatgaacagcctgagagctgaggacacggctgtgtattactgtgcgaaagatgggcgggcgggttactactactacatggacgtctggggcaaagggaccacggtcaccgtctcctca

SEQ ID NO: 4226 - DNA, 298 bp, Homo sapiens
  source 1..298: mol_type = other DNA
tgcagcctctggattcagcttcagtagctttggcatgcactgggtccgccaggctccaggcaaggggctggagtgggtggcagttatatcatatgatggaagtaataaatactatgcagactccgtgaagggccgattcaccatctccagagacaaatccaagaacacactgtatctgcaaatgaacagtctgagagctgaggacacggctgtttattactgtgcgaaagatggaagggcagggtactactactacatggacgtctggggcaaagggaccacggtcaccgtctcctca

SEQ ID NO: 4227 - DNA, 298 bp, Homo sapiens
  source 1..298: mol_type = other DNA
tgcagcctctggattcagcttcagtagctatggcatgcactgggtccgccaggctccaggcaaggggctggagtgggtggcagttatatcatatgatggaagtaataaatactatgcagactccgtgaagggccgattcaccatctccagagacaaatccaagaacacactgtatctgcaaatgaacagtctgagagctgaggacacggctgtttattactgtgcgaaagatggaagggcagggtactactactacatggacgtctggggcaaagggaccacggtcaccgtctcttca

SEQ ID NO: 4228 - DNA, 292 bp, Homo sapiens
  source 1..292: mol_type = other DNA
tgtagcctctggattcaccttcggtgaccacttcatgacctggattcgccaggctccggggaaggggctggagtgggtctcatacattggtactagtggaactaccatatactccgcagactctgtgcagggccgattcaccatctccagggacaacgccaagaactcgctatatctgcaaatgaccagcctgagaggcgacgacacggccgtctattactgtgcgagggggagtgggagctacgaaccacttgactactggggccagggaaccctggtcaccgtctcgtca

SEQ ID NO: 4229 - DNA, 292 bp, Homo sapiens
  source 1..292: mol_type = other DNA
tgcagcctctggattcaccttcagtgactccttcatgagctggatccgccaggctccagggaggggcctggagtgggtgtcatacattggtaccagtggttctaccatttactatgccgactccgtgaagggccgcttcttcgtctccagggacaacgccaaaaactcactatatctgcaaattaacagcctgcgagtcgaggacacggccgtttattactgtgcgagaggaagtgggagttacgagccgcttgactactggggccagggaaccctggtcaccgtctcctca

SEQ ID NO: 4230 - DNA, 298 bp, Homo sapiens
  source 1..298: mol_type = other DNA
tgcagcctctggattcaccttcagtagctatagcatgaactgggtccgccaggctccagggaaggggctggagtgggtctcatccattagtagtagtagtagttacatatactacgcagactcagtgaagggccgattcaccatctccagagacaacgccaacaactcactgtttctgcaaatgaacagcctgagagccgacgacacggctgtgtattactgtgcgagagataggggacgagtactacctgctgctatcggctactggggccagggaaccctggtcaccgtctcctca

SEQ ID NO: 4231 - DNA, 298 bp, Homo sapiens
  source 1..298: mol_type = other DNA
tgcagcctctggattcagcttcagtgactataacatgaactgggtccgccaggctccagggaaggggctggagtgggtctcatccattagtagaagtagtacttacatatattacgcagactcagtgaagggccgattcaccatttccagagacgacgccacgaagtcactgtatctgcaaatgaacagcctgagagccgacgacacggctgtatattactgtgcgagagatcgaggacgggtattaccagctgctattggctactggggccagggaaccctggtcaccgtctcctca

SEQ ID NO: 4232 - DNA, 298 bp, Homo sapiens
  source 1..298: mol_type = other DNA
tgcagcctctggattcagcttcagtgactataacatgaactgggtccgccaggctccagggaaggggctggagtgggtctcatccattagtagaagtagtacttacatatattacgcagactcagtgaagggccgattcaccatttccagagacgacgccacgaagtcactgtatctgcaaatgaacagcctgagagccgacgacacggctgtatattactgtgcgagagatcgaggacgggtactaccagctgctattggctactggggccagggaaccctggtcaccgtctcctca

SEQ ID NO: 4233 - DNA, 292 bp, Homo sapiens
  source 1..292: mol_type = other DNA
tgcagcgtctggattcaccttcagtacctttggcatgcactgggtccgccaggctcaaggcaaggggctggagtgggtggcagttatatggtctgatggaagcaataaaaaccatgcagactccgtgaagggccgattcaccatctccagagacaattccaagaacacgctgtatttgcaaatgaacagcctgagagccgaggacacggctgtgtattactgtgcgagagatcgcacccagaggcactacatggacgtctggggcaaagggactacggtcaccgtctcctca

SEQ ID NO: 4234 - DNA, 292 bp, Homo sapiens
  source 1..292: mol_type = other DNA
tgtagcgtctggattcaccctcagtagttacggcatgcactgggtccgccaggctccaggcaaggggctggagtcggtggcaattatatggaatgatggaaatactaaatacaatgcagactccgtgaagggccgattcaccatctccagagacaattccaagaacacactgtatctgcaaatgaacagcctgagagccgaagacacggctgtgtatcactgtgcgagagaccgaacccagaggcactacatggacgtctggggcaaagggaccacactcaccgtctcctca

SEQ ID NO: 4235 - DNA, 271 bp, Homo sapiens
  source 1..271: mol_type = other DNA
tgcagcctctggattcacctttagtagctattggatgaactgggtccgccaggctccagggaaggggctggagtgggtggccaacataaagcaagatggaagtgagaagtactatgtggactctgtgaagggccgattcaccatctccagagacaacgccaagaactcactgtatctgcaaatgaacagcctgagagtcgaggacacggctgtgtattactgtgctacccatgactactggggccagggaaccctggtcaccgtctcctca

SEQ ID NO: 4236 - DNA, 271 bp, Homo sapiens
  source 1..271: mol_type = other DNA
tgcagcctctggattcacctttagtagctattggatgagctgggtccgccaggctccagggaaggggctggagtgggtggccaacataaagcaagatggaagtgagaaatactgtgtggactctgtgatgggccgattcaccatctccagagacaacgccaagaactcactgtatctgcaaatgagcagcctgagagccgaggacacggctgtgtattactgtgcgacccatgactactggggccagggaaccctggtcaccgtctcctca

SEQ ID NO: 4237 - DNA, 280 bp, Homo sapiens
  source 1..280: mol_type = other DNA
cactgtctctggtggctccatcagtagttactactggagctggatccggcagcccgccggggagggactggagtggattgggcgtatctataccagtgggagcaccagctacaacccctccctcaagagtcgagtcaccatgtcagtagacacgtccaagaaccagttctccctgaagctgagctctgtgaccgccgcggacacggccgtgtattactgtgcgagagatgatgggtggttcgacccctggggccagggaaccctggtcaccgtctcctca

SEQ ID NO: 4238 - DNA, 283 bp, Homo sapiens
  source 1..283: mol_type = other DNA
cagtgtctctagtggctccatcaacggtttctattgggcctggatccgacagcccgccgggcagggactggagtggataggacgcatttacaccaccagtgggagtacttcgtacaggcccagcctcaggagtcgagtcaccatttcagcagacacgtccaagaaccagatctccctgaccatgacctctgtgaccgtcgcggacacggccatttattattgtgcgagagacgatgggtggttcgacccttggggcccgggaacccgggtcatcgtctcctca

SEQ ID NO: 4239 - DNA, 283 bp, Homo sapiens
  source 1..283: mol_type = other DNA
tgcagcctctggatccaccttcagtacctctcacatgaactggatccgccaggctccagggaaggggctggagtgggtttcatatatgagttatactggagacatcttttacgcggagtctgtgaagggccgattcttcatctccagagacaacgccatcaactcactttatctgcagatgaacaacctgagagacgaggacacggctgtctattactgtgcgagtgatcgagactgggcctttgacaactggggccagggaatcctggtcaccgtctcctca

SEQ ID NO: 4240 - DNA, 286 bp, Homo sapiens
  source 1..286: mol_type = other DNA
tgcagcctctggaatcaccttcagtacctataacatgaactgggtccgccaggctccagggaaggggctagagtgggtttcatacattacatatacgactagaaccatctcctacgcagactctgtgaggggccgattcaccatctccagagacaacgccaagaactcactgtatctgcaaatgaacagcctgagagccgaggacacggctgtgtattactgtgcgagcgatcgtgactgggcctttgacaactggggccagggaaccctggtcaccgtctcctca

SEQ ID NO: 4241 - DNA, 286 bp, Homo sapiens
  source 1..286: mol_type = other DNA
tgcagcctctggattcaccttcagtagcttctggatgcactgggtccgccaagctccaaggaaggggctggtgtgggtctcgcgtattaatggtgatgggagtagcatagcctacgcggactccgtgaagggccgattcaccatctccagagacaacgccaagaacacgctgtatctgcaaatgaacagtctgagagccgaggacacggctctatattactgtgtaagaggcgcgtatcctacttttgatatctggggccaagggacaatggtcaccgtctcttca

SEQ ID NO: 4242 - DNA, 286 bp, Homo sapiens
  source 1..286: mol_type = other DNA
tgcagcctctggattcaccttcagtacctactggatgcactgggtccgccaagatccagggaaggggctggtgtgggtctcacgtattaatagtgatgcgaatagtatagcctacgcggactccgtgaagggccgattcaccatctccagagacaacgccaagaacacgctgtatctacaaatgaacagtctgagagccgaggacacggctgtttattactgtgtaagaggggcctaccctacttttgatatctggggccaaggggcaatggtcaccgtctcttca

SEQ ID NO: 4243 - DNA, 271 bp, Homo sapiens
  source 1..271: mol_type = other DNA
tgcaggctctggattcacgtttagtcgtaactggatgagttgggtccgccaggctccagggaaggggccggagtgggtggccagtattaaacaagatggaagtgagaagcactatgtggactctgtgaagggccgattcaccatctccagagacaacgccaagaattcactgtatctgcaaatgaacagcctgagagccgacgacacggctgtttattactgtgcgagagaatacatctggggccaagggacagtggtcaccgtctctcca

SEQ ID NO: 4244 - DNA, 271 bp, Homo sapiens
  source 1..271: mol_type = other DNA
tgcaggctctggattcacgtttagtcgttactggatgagttgggtccgccaggctccagggaaggggccggagtgggtggccagtattaacgaagatggaagtgagaagaactatgtggactctgtgaagggccgattcaccatctccagagacaacgccaaaaattcactgtatctgcaaatgaatagactgagagccgacgacacggctgtctattactgtgcgagagaatacatctggggccaagggacagtggtcaccgtctctcca

SEQ ID NO: 4245 - DNA, 271 bp, Homo sapiens
  source 1..271: mol_type = other DNA
tgcaggctctggattcacgtttagtcgtaactggatgagttgggtccgccaggctccagggaaggggccggagtgggtggccagtattaaagaagatggaagtgtcaagcactatgcggactctgtgaagggccgattcaccatctccagagacaacgccaagaattcactgtatctgcaaatgaacagcctgagagccgacgacacggctgtttattactgtgcgagagaatacatctggggccaagggacagtggtcaccgtctctcca

SEQ ID NO: 4246 - DNA, 271 bp, Homo sapiens
  source 1..271: mol_type = other DNA
tgcagcctctggattcagttttagtaaatattggatgagttgggtccgccaggctccagggaaggggctggagtgggtggccaacataaggcaagatggaagtgagatatactatctggactctgtgaagggccggttcaccatctccagagataacgccaagaactcactgtatctgcaaatgaacaacctgagagtcgaggacacggctgtttattactgtgcgagagaatacatctggggccaagggacaatggtcagcgtctcttca

SEQ ID NO: 4247 - DNA, 271 bp, Homo sapiens
  source 1..271: mol_type = other DNA
tgcagcctctggatttacctttagtaataattggatgagttgggtccgccagtctccagggaaggggctggagtgggtggccaatataaacaaagacggaagtgagaaatattatgtggactctgtgaagggccgattcaccatctccagagacaacgccaagaactcactgtatctgcaaatgaacagcctgagagatgaggacacggctgtctatcactgtgcgagagagtatatctggggccaagggacagtggtcaccgtctcttca

SEQ ID NO: 4248 - DNA, 283 bp, Homo sapiens
  source 1..283: mol_type = other DNA
cactgtctctggtggctccatcagtagttactactggagctggatccggcagcccccagggaagggactggagtggattgggtatatctattacagtgggagcaccaactacaatccctccctcaagagtcgagtcaccatctcagtagacacgtccaagaaccagttctccctgaagctgagctctgtgaccgctgcggacacggccgtgtattactgtgcgagagtatggctggatgcttttgatatctggggccaagggacaatggtcaccgtctcttca

SEQ ID NO: 4249 - DNA, 283 bp, Homo sapiens
  source 1..283: mol_type = other DNA
cactgtgtctggagcctccatcagcagttactactggagctggatccggcagcccccagggaagggactggagtggattgggtatatgtattatagtgggagcaccaactacaacccctccctcaagagtcgagtcaccatgtccggagacacgtccaagaaccagttctccctgaagctgaactctgtgatcgctgcggacacggccgtatattactgtgcgagagtttggctggatgcttttgatatctggggccaagggacagtggtcaccgtctcttca

SEQ ID NO: 4250 - DNA, 283 bp, Homo sapiens; identical to SEQ ID NO: 4249
  source 1..283: mol_type = other DNA

SEQ ID NO: 4251 - DNA, 283 bp, Homo sapiens
  source 1..283: mol_type = other DNA
cactgtgtctggagcctccatcagcagttactactggagctggatccggcagcccccagggaagggactggagtggattgggtatatgtattatagtgggagcaccaactacaacccctccctcaagagtcgagtcaccatgtccggagacacgtccaagaaccagttctccctgaagctgaactctgtgatcgctgcggacacggccgtatattactgtgcgagagtttggctggatgcttttgatatctggggccaagggacagtggtcactgtctcctca

SEQ ID NO: 4252 - DNA, 286 bp, Homo sapiens
  source 1..286: mol_type = other DNA
tgcagcctctggattcaccttcagtaggtatagcatgaactgggtccgccaggctccagggaaggggctggagtgggtttcatacatcagtagtagtagtagtagaatatactatgcagactctgtgaagggccgattcaccatctccagcgacaatgccaaaaactcactgtatctgcaaatgaacagcctgagagacgaggacacggctgtgtattactgtgcgagagatacattgtgggcctttgactactggggccagggaaccctggtcgccgtctcctca

SEQ ID NO: 4253 - DNA, 286 bp, Homo sapiens
  source 1..286: mol_type = other DNA
tgcagcctctggattcatctttgggaatgaacccatgaactgggtccgccaggctccaggaaagggactggagtggattgcaaatattagggataatggtgaaatcacagactacgcagactctgtgaagggccgattcaccgtctccagagacaatgtcaagagttccttgtttctgcaattgaacagcctgagagacgaggacacggctgtctattactgtgcaagagacactctgtgggcctttgactactggggccagggatccctggttatcgtctcctca

SEQ ID NO: 4254 - DNA, 280 bp, Homo sapiens
  source 1..280: mol_type = other DNA
tgtagcctctggattcatctttagcaactttgccatgagctgggtccgccaggctccagggaaggggctggagtgggtctcacacatcagtgaaggtggagataccacattttacgcagactccgtgaagggccggttcaccatctccagagacaattccaagaacaccctgtatcttcaaatgagcagcctgacggtcgaggacacggccgtgtattactgtgcgccaagcgggtggttcgacccctggggccagggaaccctggtcaccgtctcctca

SEQ ID NO: 4255 - DNA, 278 bp, Homo sapiens
  source 1..278: mol_type = other DNA
tagcctctggattcatctttagcaactttgccatgagctgggtccgccaggctccagggaaggggctggagtgggtctcacacatcagtgaaggtggagataccacattttacgcagactccgtgaagggccggttcaccatctccagagacaattccaagaacaccctgtatcttcaaatgagcagcctgacggtcgaggacacggccgtgtattactgtgcgccaagcgggtggttcgacccctggggccagggaaccctggtcaccgtctcctca

SEQ ID NO: 4256 - DNA, 280 bp, Homo sapiens
  source 1..280: mol_type = other DNA
tacagcctctggattcacctttaagaattatgccatgagttgggtccgccagcctccagggaagggcctggagtgggtctcacacattagtgatagtggtggagagacattctacgcagactccgtgaagggccgattctccgtctccagagacaattccaaggacactctttatttgcaaatggacagcctgagagccgacgacacggccatgtattactgtgcgccctcgggctggttcgacccctggggccagggaaccctggtcagcgtctcctca

SEQ ID NO: 4257 - DNA, 280 bp, Homo sapiens
  source 1..280: mol_type = other DNA
cactgtctctggtgactccatcagtagtcactactggagctggatccggcagcccccagggaagggactggagtggattgggtatatctattacagtgggagcaccaactacaacccctccctcaagagtcgagtcaccatatcagtagacacgtccaagaaccagttctccctgaagctgagctctgtgaccgccgcagacacggccgtgtattactgtgcgagaaacctctggggatttgacccctggggccagggaaccctggtcatcgtctcctca

SEQ ID NO: 4258 - DNA, 280 bp, Homo sapiens
  source 1..280: mol_type = other DNA
cactgtctctggtggctccatcagtagttactactggacctggatccggcagcccccagggaagggactggagtggattgggtatatctatgacagtgggagcaccaactacaaaccctccctcaagagtcgagtcatcatatcagtagacacgtccaagaaccagttctccctgaagctgagctctgtgacggccgcagacacggccgtgtattactgtgcgagaaatttatgggggttcgacccctggggccagggaaccctggtcaccgtctcctca

SEQ ID NO: 4259 - DNA, 280 bp, Homo sapiens
  source 1..280: mol_type = other DNA
cactgtctctggtggctccatcagtagttactactggagctggatccggcagccccccgggaagggactggagtggattgggtatatctattacagtgggagtaccaactacaacccctccctcaagagtcgagtcaccatttcagtagacacgtccaagaaccagttctccctgaagttgagttctgtgaccgccgcagacacggccgtctattactgtgcgagaaatttatgggggttcgacccctggggccagggaaccctggtcaccgtctcctca

SEQ ID NO: 4260 - DNA, 291 bp, Homo sapiens
  source 1..291: mol_type = other DNA
gcttctggttacacctttagcagctatggtctcagctggctgcgacaggcccctggacaacgacttgagtatatgggatggatcaccactaagaatggtaacacaaactatgcacagagactccagggcagggtcaccatgaccacagacacatccacgagcacagcctacatggagctgaagagcctgatatctgacgacacggccatatattactgtgctatacggactgggacgtacccctactactttgactactggggccagggaaccctggtcaccgtctcctca

SEQ ID NO: 4261 - DNA, 291 bp, Homo sapiens
  source 1..291: mol_type = other DNA
gcttctggttacacctttaccagctatggtatcagctgggtgcgacaggcccctggacaagggcttgagtggatgggatggatcagcgctcacaaaggtaacacaaactatgcacagaagctccagggcagagtcaccatgaccacagacacatccacgagcacagcctacatggagctgaggagcctgagatctgacgacacggccgtgtattactgtgcgatccgaacggggacttatccgtactactttgactactggggccagggaaccctggtcaccgtatcctca

SEQ ID NO: 4262 - DNA, 286 bp, Homo sapiens
  source 1..286: mol_type = other DNA
ttcaaccgctgggttcaccttcgctgcttttagcatgacctgggtccgccagtccccggggaaggggctggagtcggtttcatacattactcctagtagtgttcccgtctactacgcagactctgtgaagggccgattcaccatctccagagacaatgccaagaacttactgtatctgcagatgaacagcctgagagacgaagacacggctgtctattactgtgtgagagatagggactgggcttttgatctttggggccaagggacaaaggtcaccgtcgcttca

SEQ ID NO: 4263 - DNA, 283 bp, Homo sapiens
  source 1..283: mol_type = other DNA
tgtagcctctggattcagcttcaggacctataacatgaattggttccgccaggcgccagggaagggactggagtggatttcatatattagtattactgatgccatatcctatccagagtctcttaggggccgcttcaccgtctccagagacgagtccgaggactcactatatctgcaattgaacagcctgagagccgaggacacggctgtctattactgtgtgagggatcgagattgggcttttgatctgtggggccaagggacagttgtcaccgtctcttcc

SEQ ID NO: 4264 - DNA, 283 bp, Homo sapiens
  source 1..283: mol_type = other DNA
tgtagcctctggattcaccttcaggacctataacatgaattggttccgccaggcgccagggaagggactggagtggatttcatatattagtattactgatttcatatcctatccagagtctcttaggggccgcttcaccgtctccagagacgagtccgaggactcactatatctgcaattgaacagcctgagagccgaggacacggctgtctattactgtgtgagggatcgagattgggcttttgatctgtggggccaagggacagttgtcaccgtctcttcc

SEQ ID NO: 4265 - DNA, 283 bp, Homo sapiens
  source 1..283: mol_type = other DNA
tgtagcctctggattcagcttcaggacccatcacatgaattggatccgccaggcgccagggaagggactggagtggatttcatatattagtattactgatgccatttcctatccagactctcttaagggccggttcaccgtctccagagacgagtccgaggactcactgtatctgcaattgaacagcctgagagtcgaggacacggctgtctattactgtgtgagggatcgagattgggcttttgatctctggggccaagggacagttgtcaccgtctcttcc

SEQ ID NO: 4266 - DNA, 282 bp, Homo sapiens
  source 1..282: mol_type = other DNA
tgtagcctctggattcaccttcaggacctataacatgaattggatccgccaggcgccagggaagggactggagtggatttcatacattagtatcactgatgccatatactatccagactctcttaggggccggttcatcgtctccagagacgagtccgaggactcactgtatctacaattgaacaacctgagagccgaggacacggctgtctattactgtgtgcgagatcgagattgggcttttgatctctgggccaagggacaattgtcaccgtctcttcc

SEQ ID NO: 4267 - DNA, 283 bp, Homo sapiens
  source 1..283: mol_type = other DNA
tgtagcctctggattcagcttcaggacctataacatgaattggttccgccaggcgccagggaagggactggagtggatttcatatattagtattactgatgccatatcctatccagagtctcttaagggccgcttcaccgtctccagagacgagtccgaggactcactatatctgcaattgaacagcctgagagccgaggacacggctgtctattactgtgtgagggatcgagattgggcttttgatctgtggggccaagggacagttgtcaccgtctcttcc

SEQ ID NO: 4268 - DNA, 283 bp, Homo sapiens
  source 1..283: mol_type = other DNA
tgtagcctctggattcagcttcaggacccatcacatgaattggatccgccgggcgccagggaagggactggagtggatttcatatattagtattactgatgccatttcctatccagactctcttaagggccggttcaccgtctccagagacgagtccgaggactcactgtatctgcaattgaacagcctgagagtcgaggacacggctgtctattactgtgtgagggatcgagattgggcttttgatctctggggccaagggacagttgtcaccgtctcttcc

SEQ ID NO: 4269 - DNA, 283 bp, Homo sapiens
  source 1..283: mol_type = other DNA
tgtagcctctggattcaccttcaggacctataacatgaattggttccgtcaggcgccagggaagggactggagtggatctcatatattagtattactgatgccatttcctatccagactctcttaggggccggttcaccgtctccagagacgagtccgaggactcactatatctgcaattgaacaacctgagagccgacgacacggctgtctattactgtgtgagagatcgagattgggcttttgatctctggggccaagggacagttgtcaccgtctcttcc

SEQ ID NO: 4270 - DNA, 288 bp, Homo sapiens
  source 1..288: mol_type = other DNA
aagggttctggatacagctttaccagctactggatcggctgggtgcgccagatgcccgggaaaggcctggagtggatggggatcatctttcctggtgactctgataccagatatagcccgtccttccaaggccaggtcaccatctcagccgacaagtccatcagcaccgcctacctgcagtggagcagcctgaaggcctcggacaccgccatgtattactgtgcgagacgggatagcagcagtttggctgactactggggccagggaaccctggtcaccgtctcctca

SEQ ID NO: 4271 - DNA, 288 bp, Homo sapiens
  source 1..288: mol_type = other DNA
acgggttctggatacagctttgccagcttctggatcggctgggcgcgccagatgcccgggaaaggcctggagtggatggggatcatctatcctggtgactctgataccagatacagtccgtccttccaaggccaggtcaccatctcagccgacaagtccgtcagcaccgcctacctgcagtggagcagtctgaaggcctcggacaccgccatatattactgtgcgagacgggacagcagcagcttggctgactactggggccagggaaccctggtcaccgtctcctca

SEQ ID NO: 4272 - DNA, 286 bp, Homo sapiens
  source 1..286: mol_type = other DNA
tgcagcctctggattcaccttcagtagctttagcatgaactgggtccgccaggctccagggaaggggctggagtggattgcacacattggtggtatttccggtaacatgtactacgcagactctgtgaagggccggttcaccatctccagagacaatgccaagaactcactgtatctgcaaatgaacagcctgagagacgaggacacggctgtgtattactgtgcgagaggagctcttcatgcttttgatatctggggccaagggacaatggtcaccgtctcttca

SEQ ID NO: 4273 - DNA, 286 bp, Homo sapiens
  source 1..286: mol_type = other DNA
tgtagcctctggattcaccttcagtagtaatggcatgaactgggtccgccaggctccagggaaggggctggagtgcatttcatacattagtggtactagtgataccatattctacgcggactctctgaagggccgaatcaccatctccagagacaatgccaagaactcactgtatctgcaaatgaacagcctgagagacgaggacacggctgtgtattactgtgcgaggggagcccttcatgcttttgatatctggggccaagggacaatggtcaccgtctcttca

SEQ ID NO: 4274 - DNA, 286 bp, Homo sapiens
  source 1..286: mol_type = other DNA
tgcagcctctggattcaccttcagtagctatggaatgaactgggtccgccaggctccagggaaggggctggagtcggtttcatacatttttgatagtagtgatagcattaactacgcagactctgtgaagggccgattcaccatctccagagacaatgccaagaactcactgtatctgcaaatgaacagcctgagagacgaagacacggctatgtattactgtgcgagaggggccctacatgcttttgatatctggggccaagggacaatggtcaccgtctcttca

SEQ ID NO: 4275 - DNA, 274 bp, Homo sapiens
  source 1..274: mol_type = other DNA
tgcagcctctgggttcagcgtcagtaacaattacataacctgggtccgccaggctccagggaaggggctggactgggtctcagtgatttatagcggtggtactacattctacacagactccgtgaagggccgattcaccatctccagagacatttccaagaacacggtgtatcttcagatggacagtctgagagccgaggacacggccgtctattattgtgtgaaaagggggggtgactcctggggccagggaaccctggtcaccgtctcccca

SEQ ID NO: 4276 - DNA, 277 bp, Homo sapiens
  source 1..277: mol_type = other DNA
tgcagcctctggcttcagcgtcagcagcaactacatgagttgggtccgccaggctccagggaagggactggagtggttctcagttctttataccggtacaagtagtgtatactacacagactccgtgaagggccgattcaccatatatagagacaattccaagaacacggtgtatcttcaaatgaacaacctgagagacgacgacacggccgtctattattgtgtgaaaagaggtggggactcctggggccagggaaccctggtcaccgtctcctca

SEQ ID NO: 4277 - DNA, 272 bp, Homo sapiens
  source 1..272: mol_type = other DNA
cagcctctgggctcacctttagtgcccaatggtggcactgggtccgccaggctccagggaaggggctggagtgggtggccaatataaagccagacggaagtgagagattctatgtggagtctgtgaagggccgattcaccatctccagagacaacgccaaaaactcactgtatctgcaaatgaacagcctgagagacgaggacacggctgtctattactgtgcgagaggcctcgagtactggggccagggaaccctggtcaccgtctcctca

SEQ ID NO: 4278 - DNA, 274 bp, Homo sapiens
  source 1..274: mol_type = other DNA
tgcagcctctggattcacctttagtacctcttcgatgaggtgggtccgccaggctccagggaaggggctggagtcggtggccagcattaaccaagacggaagtgacaaatactatgtggactctgtgaagggccgattcaccatctccagagacaacgccaagaactcactgtatctgcaaatgaacagcctgagagccgaggatatggctgtttattactgtgcgagaggtcttgagtactggggccagggaaccctggtcaccgtctcctca

SEQ ID NO: 4279 - DNA, 286 bp, Homo sapiens
  source 1..286: mol_type = other DNA
tgcagcgtctggattcatcttcggtggctacggcatgcactggatccgccaggctccagacaaggggttggagtgggtggcctctatttggtataacggaacgaacgagtattacgcagactccgtgaaggggcgattcaccatttccagagacaactccaggaatactttgtatctacaattgaacagcctgagagccgaggacacggctgtgtattactgtgcgagagatcgtggccacggggctgactactggggccagggaaccctggtcaccgtctcctca

SEQ ID NO: 4280 - DNA, 286 bp, Homo sapiens
  source 1..286: mol_type = other DNA
tgcagcgtctggattcaccttcagtggctatggcatgcactgggtccgccaggctccaggcaaggggctggagtgggtggcatctatttggtatgatggaagtaacagatactatgccgactccgtgaagggccgattcaccatctccagagacaattcgaagaacacgctgaatctgcaaatgaatggcctgagagccgaggacacggctatgtattactgtgcgagagacagaggtcacggcgcagactactggggccagggaagcctggtcaccgtctcctca

SEQ ID NO: 4281 - DNA, 295 bp, Homo sapiens
  source 1..295: mol_type = other DNA
tgtagcctctgggttcacctttagtagtcattggatgatctgggtccgccaggctccagggaaggggctggagtgggtggccagcataaaccaagatggaagtgagaaatactatgtggactctgcgaagggccgattcaccatctccagagacaacgccaagaactcactgtatctacaaatgaacagcctgagagccgaggacacggctatgtattactgtgcgagagaccatgttgcacctggacttatctttgactactggggccagggaaccctggtcaccgtctcctca

SEQ ID NO: 4282 - DNA, 295 bp, Homo sapiens
  source 1..295: mol_type = other DNA
tgcagcctctggattcgtctttaatgatcattggatgagttgggtccgccaggctccagggaaggggctggagtgggtggcctccataaaccaagatggaagtgagaaacactatgtggactctgtgaagggccgtttcaccgtgtccagagacagaggctacaattcactgtttctgcaaatgaacagcctgagacccgaggacacggccgtctattactgtgcgagagatcatgtagcacctggtctcatatttgactactggggccagggagcccaggtcaccgtgtcctca

SEQ ID NO: 4283 - DNA, 298 bp, Homo sapiens
  source 1..298: mol_type = other DNA
tgcagcctctggactttccgtcagtaccaactacttgagctgggtccgccaggctccagggaaggggctggagtggctctcagttgtgtggcgcgatggaaccacacactacgcggactccgtgaagggcagattcaccatctccagagacaattccaagaacacactgtctcttcaaatgaacgacctgagagccgaggacacggccgtctatcactgcgcgaaagatccgggccatagtttggggactgattacggtgactactggggccagggaaccctggtcaccgtctcctca

SEQ ID NO: 4284 - DNA, 298 bp, Homo sapiens
  source 1..298: mol_type = other DNA
tgcagcctctggattcagcgtcagaactaactacatgagctgggtccgccgggctccagggaaggggctggagtgggtctcagttatctccaacgctggaaccacattctacgcagactccgtgaagggcagattcaccatctccagagacacttccaacaacatgctgtttcttcaaatgaacagcctgagcgccgaggacacggctgtgtattactgtgcgaaagatccgggccatagtttggggactgattacggagactactggggccagggaaccctggtcaccgtctccgca

SEQ ID NO: 4285 - DNA, 298 bp, Homo sapiens
  source 1..298: mol_type = other DNA
tgcagcctctggattcaccgtcagcagcaactacatgagctgggtccgccaggctccagggaaggggctggaatggctctcagttatttttgccgatgattccacatactacgcagactccgtgaagggcagattcacaatctccagagacagttccaagaacgcggtgtttcttcaaatgaacagcctgggagtcgaggacacggctgtttaccactgtgcgaaagatccggggcatagtttggggactgattacggagactactggggccagggaaccctggtcaccgtctccgca

SEQ ID NO: 4286 - DNA, 298 bp, Homo sapiens
  source 1..298: mol_type = other DNA
tgcagtctctggattctccgtcagtgacaactacatgagctgggtccgccaggctccagggaaggggctggagtgggtctcagcaattcacagcggtggtactacctactacgcagactccgtgaagggcagattcaccatctccagggacaattccaagaacacagtgtatcttcacatgaacagcctgagagccgacgacacggctgtttatcactgtgcgaaagatccaggccatagtttgggaactgattatggtgactactggggccggggaatcctggtcaccgtctcctca

SEQ ID NO: 4287 - DNA, 288 bp, Homo sapiens
  source 1..288: mol_type = other DNA
tgcagtctctggattctccgtcagtgacaactacatgagctgggtccgccaggctccagggaaggggctggagtgggtctcagcaattcacagcggtggtactacctactacgcagactccgtgaagggcagattcaccatctccagggacaattccaagaacacagtgtatcttcacatgaacagcctgagagccgacgacacggctgtttatcactgtgcgaaagatccaggccatagtttgggaactgattatggtgactactggggccggggaatcctggtcac

SEQ ID NO: 4288 - DNA, 285 bp, Homo sapiens
  source 1..285: mol_type = other DNA
gcctctggttacacctttaccaactttggtattacctgggtgcgacaggcccctggaaaaggacttgagtggatgggatggatcagcgctaacgatggaaacacaaagtttgctcagaggttccagggcagagtcaccatgaccacagacacatccacgagcacagcctacatggagctgaggagcctgagatctgacgacacggccatgtattactgcgcggtgtccggtgatgggggctactcacacgactggggccagggaaccctggtcaccgtctcctca

SEQ ID NO: 4289 - DNA, 285 bp, Homo sapiens
  source 1..285: mol_type = other DNA
gcttctggttacacgtttaccacctttggtatcacctgggtgcgacaggcccctggacaaggacttgagtggatgggatggctcagcaattacaatggtaacacaaattatggacacaagttccaggacagaatcaccctgaccacagacacatccacaaacacagcctacatggaactgaggagcctgaattctgacgacacggccgtgtattactgtgcggtgtctggggatgggggctactcccacgactggggccagggaaccctagtcaccgtctcctca

SEQ ID NO: 4290 - DNA, 285 bp, Homo sapiens
  source 1..285: mol_type = other DNA
gcttctggttacacctttaccaatttcggcatcacctgggtgcgacaggcccctggacaagggcttgagtggatggggtgggtcagcccttacaatgaaaacacaaactatgcacagaggctccagggcagagtcaccatgaccacagacgcatccacgagcacagcctacatggagctgaggagcctgatatctgacgacacggccgtgtattactgtgcggtcagtggagatgggggctacagtcatgactggggccagggaaccctggtcaccgtctcctca

SEQ ID NO: 4291 - DNA, 298 bp, Homo sapiens
  source 1..298: mol_type = other DNA
cgctgtctatggtgggtccttcagtgtttcctactggagttggatccgccagcccccagggagggggctggagtggattgggcaaatcgatcatagtggaaggaccgactacaacccgtccctcaagagtcgagtcgccatgtccttagacacgtccaagaaccagttctccctgaagctgagctctgtgaccgccgaggacacggctatttattactgtgcgagccactgtagtagtaccagatgctatgcggggtttgactcctggggccagggaaccctggtcaccgtctcctca

SEQ ID NO: 4292 - DNA, 298 bp, Homo sapiens
  source 1..298: mol_type = other DNA
cgctgtgtatggtgggtccttcagtgattcctactggagctggatccgccagcccccagggaagggactggagtggattggggaaatcagtcatagtggaagaaccagttacagcccgcccctcacgagtcgagtcaccatatcactagacacgtccatgaaccagttctccctgaagttgacctctgcgaccgccgcggacacggctatatattactgtgcgagccattgttctagtaccaggtgctatgctgggtttgactcctggggccagggaaccctggtcaccgtctcctca

SEQ ID NO: 4293 - DNA, 286 bp, Homo sapiens
  source 1..286: mol_type = other DNA
tgcagcctctggattcaccttcagtaactacagcttaaactgggtccgccaggctccagggaaggggctggagtggatctcgtacatatggagtagtagcaataacatatggtacgcagactctgtgaagggccgattcaccatctccagcgacaatgccaagaattcagtgtatctgcaaatgaacagcctgagagacgaggacacggctgtctattattgtgtgagagattttgcctacgcttttgatatctggggtcaaggggcaacggtcaccgtctcttca

SEQ ID NO: 4294 - DNA, 283 bp, Homo sapiens
  source 1..283: mol_type = other DNA
tgcagcctctggattcaccttcagtacctataccatgaactgggtccgccaggctccagggaaggggctggagtggatttcatacattactactagtagtaccatgtactacgcagactctgtgaagggccgattcaccatctccagagacaatgccaagaactcactgtatctgcaaatgaacagcctgagagacgaggacacggctatgtattactgtgtgagagattttgcatatgcttttgatatctggggccaagggacaatggtcaccgtctcttca

SEQ ID NO: 4295 - DNA, 286 bp, Homo sapiens
  source 1..286: mol_type = other DNA
tgcagcctctggattcaccttcagtagttataacatgaactggttccgccaggctccagggaaggggccggagtggatctcatacattactactatggatactaccatacgctacgcagactctgtgaggggccgattcaccgtctccagagacaatgccaagagctcattgtatctgcaaatgaaccgcctgagagacgaggacacggctgtgtattactgtgtgagagattttgcatatgcttttgatatctggggccaagggacaatggtcaccgtctcttca

SEQ ID NO: 4296 - DNA, 286 bp, Homo sapiens
  source 1..286: mol_type = other DNA
tgcagcctctggattcaccttcactagttataccatgaactgggtccgccaggctccagggacggggctggagtggctttcatacatcgatattgctagtagaatcaaatcctacgcagactctgtgaagggccgattcaccatctccagagacaacgccaagaactcactgtatctgcaaatgaacagcctgagagacgaggacacggctgtgtattactgtgtgagagattttgcctacgcttttgatatctggggccaagggacaatggtcaccgtctcttca

SEQ ID NO: 4297 - DNA, 286 bp, Homo sapiens
  source 1..286: mol_type = other DNA
tgcagcctctggattcaccttcactagttataccatgaactgggtccgccaggctccagggaaggggctggagtgggtttcatacatccatattgctagtagtatcaaatcctacgcagactctctgaagggccgattcaccatctccagagacaacgccaggaactcactgtatctgcaaatggacagcctgagagacgaggacacggctgtgtattactgtgtgagagattttgcctacgcttttgatatctggggccaagggacagtggtcaccgtctcttca

SEQ ID NO: 4298 - DNA, 286 bp, Homo sapiens; identical to SEQ ID NO: 4296
  source 1..286: mol_type = other DNA

SEQ ID NO: 4299 - DNA, 298 bp, Homo sapiens
  source 1..298: mol_type = other DNA
tgtaggctctggattcaccttcagtacatatgttgtgcactgggtccgccaggctccaggcagggggctggagtgggtggcagttatgtcagctggtggccgctttcagtactacgcagactccgtgaagggccgattcaccatcgccagagacaattccaagaacactctatatctgcaaatgaattccctgacagaggaggacacggctctatatcactgtgcgcgagatccactaggaggggccccggactactttgactactggggccagggaactctcgtcaccgtctcctca

SEQ ID NO: 4300 - DNA, 298 bp, Homo sapiens
  source 1..298: mol_type = other DNA
tgtagcctctgaattcaccttcagtacctttgctatgcactgggtccgccaggcgccaggcaggggtctggagtgggtggcagttatctcagctagtggaggcactacagtgtacccagactccgtgaggggccgcttcaccatctccagagacaattccaagaacaccctctatctccaaatgaacagtctgagacctgaggacacggccctttattactgtgcgagagaccccctagggggagcgcctgattattttgactactggggccagggaaccccggtcaccgtctcctca

SEQ ID NO: 4301 - DNA, 298 bp, Homo sapiens
  source 1..298: mol_type = other DNA
tgcagcctctggattcaccttcagtgactactacatgagctggatccgccaggctccagggaaggggctggagtgggtttcatacattagtagtagtggtagtagcatgtactacgcagactctgtgaagggccgcttcaccatctccagggacaacgccaagaactcactgtatctgcaaatgaacagcctgagagccgaggacacggccgtgtattattgcgcgagagtttccagtacagcagcagctggtacgactgactactggggccagggaaccctggtcaccgtctcctca

SEQ ID NO: 4302 - DNA, 298 bp, Homo sapiens
  source 1..298: mol_type = other DNA
tgcagcctctggattcaccttcagtgactactacatgacttggatccgccaggctccagggaaggggctggagtggctctcatacattagtagtagtggtagtcacacaccctacgcagactctgtgaagggccgattcatcatctccagggacaacgccgagaactccctgtttctgcaaatgaacagcctgagagacgaagacacggctgtgtattactgtgcgcgagtttcgagcacagcagcggctggtaccactgactattggggccagggaaccctggtcaccgtctcctca

SEQ ID NO: 4303 - DNA, 279 bp, Homo sapiens
  source 1..279: mol_type = other DNA
aagggttctggatacagctttaccaactactggatcggctgggtgcgccagatgcccgggaaaggcctggagtggatggggatcatctatcctggtgactctgataccagatacagcccgtccctccaaggccaggtcaccatctcagtcgacaagtccatcagcaccgcctacctgcagtggagcagcctgaaggcctcggacaccgccatgtattactgtgcgagacgacagtcttttgatatttggggccaagggacaatggtcaccgtctcttca

SEQ ID NO: 4304 - DNA, 279 bp, Homo sapiens
  source 1..279: mol_type = other DNA
aagggttctggatacaggtttaccagcttttggatcggctgggtgcgccagatgcccgggaaaggcctggagtggatggggatcatctctcctggtgactctaataccagatacagcccgtccttccaaggccaggtcaccatctcagccgacaagtccatcaacaccgcctaccttcagtggggcagcctgaaggcctcggacaccgccatgtattactgtgcgagacgtcagtcttttgatatctggggccaagggacaatggtcaccgtctcttca

SEQ ID NO: 4305 - DNA, 274 bp, Homo sapiens
  source 1..274: mol_type = other DNA
tgcagcctctggattcaccctcagtagtttctggatgaactgggtccgccaggctccagggaaggggctggagtgggtggccaacataaaggaagatggaagtgagaaatatgtggactctgtgaagggccggttcaccatctccagagacaacgcgaagaactcactgtatctgcaaatgaacagcctgagagccgaggacacggctgtgtattactgtgcgagagggaaaggcggtctctggggccagggaaccctggtcaccgtctcctca

SEQ ID NO: 4306 - DNA, 277 bp, Homo sapiens
  source 1..277: mol_type = other DNA
tgcagcctctggattcacctttagtagctattggatgaactgggtccgccaggctccagggaaggggctggagtgggtggccaacataaagcaagatggaagtgagaagtactatgtggactctgtgaagggccgattcaccatctccagagacaacgccaagaactcactgtatctgcaaatgaacagcctgagagccgaggacacggctgtgtattactgtgcgagaggcaagggtggcctctggggccagggaaccctggtcaccgtctcctca

SEQ ID NO: 4307 - DNA, 289 bp, Homo sapiens
  source 1..289: mol_type = other DNA
ttcagcctctggattcacctttagtaactattggatgagctgggtccgccgggctccagggagggggctggagtgggtggccaacataaacgcagatggaagtgccaaatactatgtggactctatgaagggccgattcaccatctccagagacaacaccaagaactcgctttatctgcaaatagacagcctgagagccgaggacacggctgtgtattattgtgagagagacgtaaggttcggtctctttgactattggggccagggaaccctggtcaccgtcacctca

SEQ ID NO: 4308 - DNA, 289 bp, Homo sapiens
  source 1..289: mol_type = other DNA
ttcagcctctggattcacctttagtaactattggatgagctgggtccgccgggctccagggagggggctggagtgggtggccaacataaacgcagatggaagtgccaaatactatgtggactctatgaagggccgattcgccatctccagagacaacaccaagaactcgctttatctgcaaatagacagcctgagagccgaggacacggctgtgtattattgtgagagagacgtaaggttcggtctctttgactattggggccagggaaccctggtcaccgtcacctca

SEQ ID NO: 4309 - DNA, 289 bp, Homo sapiens
  source 1..289: mol_type = other DNA
ttcagcctctggattcacctttagtaactattggatgagctgggtccgccgggctccagggagggggctggagtgggtggccaacataaacgcagatggaagtgccaaatactatgtggactctatgaagggccgattcaccatctccagagacaacaccaagaactcgctttatctgcaaatagacagcctgagagccgaggacacggctgtgtattattgtgagagagacgtaaggttcggtctctttgactattggggcccgggaaccctggtcaccgtcacctca

SEQ ID NO: 4310 - DNA, 289 bp, Homo sapiens
  source 1..289: mol_type = other DNA
ttcagcctctggattcacctttagtaactattggatgagctgggtccgccgggctccagggagggggctggagtgggtggccaacataaacgcagatggaagtgccaaatactatgtggactctatgaagggccgattcaccatctccagagacaacaccaagaactcgctttatctgcaaatagacagcctgagagccgaggacacggctgtgtattattgtgagagagacgtaaggttcggtctctttgactattggggccagggaaccctggtcactgtctcctca

SEQ ID NO: 4311 - DNA, 289 bp, Homo sapiens
  source 1..289: mol_type = other DNA
ttcagcctctggattcacctttagtaactattggatgagctgggtccgccgggctccagggagggggctggagtgggtggccaacataaacgcagatggaagtgccaaatactatgtggactctatgaagggccgattcaccatctccagagacaacaccaagaactcgctttatctgcaaatagacagcctgagagccgaggacacggctgtgtattattgtgagagagacgtaaggttcggtctctttgactattggggtcagggaaccctggtcaccgtcacctca

SEQ ID NO: 4312 - DNA, 289 bp, Homo sapiens
  source 1..289: mol_type = other DNA
ttcagcctctggattcacctttagtaactattggatgagctgggtccgccgggctccagggagggggctggagtgggtggccaacataaacgcagatggaagtgccaaatactatgtggactctatgaagggccgattcaccatctccagagacaacacccagaactcgctttatctgcaaatagacagcctgagagccgaggacacggctgtgtattattgtgagagagacgtaaggttcggtctctttgactattggggccagggaaccctggtcaccgtcacctca

SEQ ID NO: 4313 - DNA, 289 bp, Homo sapiens
  source 1..289: mol_type = other DNA
ttcagcctctggattcacctttagtaactattggatgagctgggtccgccgggctccagggagggggctggagtgggtggccaacataaacgcagatggaagtgccaaatactatgtggactctatgaagggccgattcaccatctccagagacaacaccaagaactcgctttatctgcaaatagacagcctgagagccgaggacacggctgtgtattattgtgagagagacgtaaggttcggtctctttgactattggggccagggaaccgtggtcaccgtctcctca

SEQ ID NO: 4314 - DNA, 289 bp, Homo sapiens
  source 1..289: mol_type = other DNA
tgcagcctctggattcacttttagtaactattggatggactgggtccgccaggctccagggaaggggctggagtggttggccacaattaaccaagatggaagtgcgcaatattatgtcgactctgtgaagggccgattcaccatctccagagacaacacaaagaattccctgtatctgcaactgaacagcctgagaggcgaggacacggctgtgtattactgtgagagagatgtaaggtttggcctctttgactactggggcctgggaaccctggtcaccgtctcctca

SEQ ID NO: 4315 - DNA, 298 bp, Homo sapiens
  source 1..298: mol_type = other DNA
tgcagcctctggattcacgtttgccaggcatgccatgacctgggtccgccaggctccagggaaggggctggagtgggtctcatctctaagtggtggtggtactgacacatactacacagactccgtgaagggccggttcaccatctccagagacaattccaagaacactctgtatttgcaaatgaacagcctgcgagccgaagactcggccgtatattactgtgcgaaggattatgtggggaccgtccctgatgcttttgatatctggggccaagggacaatggtcatcgtctcttca

SEQ ID NO: 4316 - DNA, 298 bp, Homo sapiens
  source 1..298: mol_type = other DNA
tgcagcctctggattcacgtttgccaggaatgccatgacctgggtccgccaggctccagggaaggggctggagtgggtctcatctctaagtggtggtggtggtgacacagcctacacagactccgtgaagggccggttcaccatctccagagacaactccaagaacactctgtatttgcaaatggacagcctgcgagccgaggacacggccgtatattactgtgcgaaggattatgtggggaccgtccctgatgcttttgatatctggggccaagggacaatggtcatcgtctcttca

SEQ ID NO: 4317 - DNA, 298 bp, Homo sapiens
  source 1..298: mol_type = other DNA
tgcagcctctggattcacgtttgccaggaatgccatgacctgggtccgccaggctccagggaaggggctggagtgggtctcatctctaagtggtggtggtggtgacagatactacacagactccgtgaagggccggttcaccgtctccagagacaattccatgaacactctgtatttgcaaatgaacagcctgcgagccgaagacacggccgtatattactgtgcgaaggattatgtggggaccgtccctgatgcttttgatatctggggccaagggacaatggtcatcgtctcttca

SEQ ID NO: 4318 - DNA, 298 bp, Homo sapiens
  source 1..298: mol_type = other DNA
tgcagcctctggattcacgtttgccaggaatgccatgacctgggtccgccaggctccagggaaggggctggagtgggtctcatctctaagtggtggtggtggtgacacagcctacacagactccgtgaagggccggttcaccatctccagagacaactccaagaacactctgtatttgcaaatgaacagcctgcgagccgaggacacggccgtatattactgtgcgaaggattatgtggggaccgtccctgatgcttttgatatctggggccaagggacaatggtcatcgtctcttca

SEQ ID NO: 4319 - DNA, 298 bp, Homo sapiens
  source 1..298: mol_type = other DNA
tgcagcctctggattcacgtttgccaggaatgccatgacctgggtccgccaggctccagggaaggggctggagtgggtctcatctctaagtggtggtggtggtgacacagcctacacagactccgtgaagggccggttcaccatctccagagacaactccgagaacactctgtatttgcaaatgaacagcctgcgagccgaggacacggccgtatattactgtgcgaaggattatgtggggaccgtccctgatgcttttgatatctggggccaagggacaatggtcatcgtctcttca

SEQ ID NO: 4320 - DNA, 298 bp, Homo sapiens
  source 1..298: mol_type = other DNA
tgcagcctctggattcacgtttgccaggcatgccatgacctgggtccgccaggctccagggaaggggctggagtgggtctcatctctaagtggtggtggtactgacacatactacacagactccgtgaagggccggttcaccatctccagagacaattccaagaacactctgtatttgcaaatgaacagcctgcgagccgaagactcggccgtatattactgtgcgaaggattatgtggggaccgtccctgatgcctttgatatctggggccaagggacaatggtcatcgtctcttca

SEQ ID NO: 4321 - DNA, 298 bp, Homo sapiens
  source 1..298: mol_type = other DNA
tgcagcctctggattcacgtttgccaggaatgccatgacctgggtccgccaggctccagggaaggggctggagtgggtctcatctctaagtggtggtggtggtgacacagcctacacagactccgtgaagggctggttcaccatctccagagacaactccaagaacactctgtatttgcaaatggacagcctgcgagccgaggacacggccgtatattactgtgcgaaggattatgtggggaccgtccctgatgcttttgatatctggggccaagggacaatggtcatcgtctcttca

SEQ ID NO: 4322 - DNA, 298 bp, Homo sapiens
  source 1..298: mol_type = other DNA
tgcagcctctggattcacgtttgccaggaatgccatgacctgggtccgccaggctccagggaaggggctggagtgggtctcatctctaagtggtggtggtggtgacacagcctacgcagactccgtgaagggccggttcaccatctccagggacaactccaagaacactctgtatttgcaaatgaacagcctgcgagccgaggacacggccgtatattactgtgcgaaggattatgtggggaccgtccctgatgcttttgatatctggggccaagggacaatggtcatcgtctcttca

SEQ ID NO: 4323 - DNA, 298 bp, Homo sapiens
  source 1..298: mol_type = other DNA
tgcagcctctggattcacgtttgccaggaatgccatgacctgggtccgccaggctccagggaaggggctggagtgggtctcatctctaagtggtggtggtggtgacacagcctacacagactccgtgaaaggccggttcaccatctccagagacaactccaagaacactctgtatttgcaaatggacagcctgcgagccgaggacacggccgtatattactgtgcgaaggattatgtggggaccgtccctgatgcttttgatatctggggccaagggacaatggtcatcgtctcttca

SEQ ID NO: 4324 - DNA, 298 bp, Homo sapiens
  source 1..298: mol_type = other DNA
tgcagcctctggattcacgtttgccaggaatgccatgacctgggtccgccaggctccagggaaggggctggagtgggtctcatctctaagtggtggtggtggtgacatagcctacacagactccgtgaagggccggttcaccatctccagagacaactccgagaacactctgtatttgcaaatgaacagcctgcgagccgaggacacggccgtatattactgtgcgaaggattatgtggggaccgtccctgatgcttttgatatctggggccaagggacaatggtcatcgtctcttca

SEQ ID NO: 4325 - DNA, 298 bp, Homo sapiens; identical to SEQ ID NO: 4322
  source 1..298: mol_type = other DNA

SEQ ID NO: 4326 - DNA, 298 bp, Homo sapiens
  source 1..298: mol_type = other DNA
tgcagcctctggattcacgtttgccaggaatgccatgacctgggtccgccaggctccagggaaggggctggagtgggtctcatctctaagtggtggtggtggtgacacagcctacacagactccgtgaagggccggttcaccatctccagagacaactccaagaatactctgtatttgcaaatggacagcctgcgagccgaggacacggccgtatattactgtgcgaaggattatgtggggaccgtccctgatgcttttgatatctggggccaagggacaatggtcatcgtctcttca

SEQ ID NO: 4327 - DNA, 298 bp, Homo sapiens
  source 1..298: mol_type = other DNA
tgcagcctctggattcatgtttgccaggaatgccatgacttgggtccgccaggctccagggaaggggctggagtgggtctcatctctagatggtggtggtggtgacacatactacacagactccgtgaagggccggttcaccatctccagagacaattccaagaacactctgtatttgcaaatgaacagcctgcgagccgaggacacggccgtatattactgtgcgaaggattatgtggggaccgtccctgatgcttttgatatctggggcccagggacaatggtcatcgtctcttca

SEQ ID NO: 4328 - DNA, 298 bp, Homo sapiens
  source 1..298: mol_type = other DNA
tgcagcctctggattcacgtttgccaggaatgccatgacctgggtccgccaggctccagggaaggggctggagtgggtctcatctctaagtggtggtggtggtgacacagcctacacagactccgtgaagggccggttcaccatctccagagacaactccgagaacactctgtatttgcaaatgaacagcctgcgagccgatgacacggccgtatattactgtgcgaaggattatgtggggaccgtccctgatgcttttgatatctggggccaagggacaatggtcatcgtctcttca

SEQ ID NO: 4329 - DNA, 298 bp, Homo sapiens
  source 1..298: mol_type = other DNA
tgcagcctctggattcacgtttgccaggaatgccatgacctgggtccgccaggctccagggaaggggctggagtgggtctcatctctaagtggtggtggtggtgacagatactacacagactccgtgaagggccggttcaccgtctccagagacaattccatgaacactctgtatttgcaaatgaacagcctgcgagccgaagacacggccgtatattactgtgcgaaggattatgtggggaccgtccctgatgcttttgatatctggggccaagggacaatggtcatcgtctcctca

SEQ ID NO: 4330 - DNA, 296 bp, Homo sapiens
  source 1..296: mol_type = other DNA
cagcctctggattcacgtttgccaggcatgccatgacctgggtccgccaggctccagggaaggggctggagtgggtctcatctctaagtggtggtggtactgacacatactacacagactccgtgaagggccggttcaccatctccagagacaattccaagaacactctgtatttgcaaatgaacagcctgcgagccgaagactcggccgtatattactgtgcgaaggattatgtggggaccgtccctgatgcttttgatatctggggccaagggacaatggtcatcgtctcttca

SEQ ID NO: 4331 - DNA, 298 bp, Homo sapiens
  source 1..298: mol_type = other DNA
tgcagcctctggattcacgtttgccaggcatgccatgacctgggtccgccaggctccagggaaggggctggagtgggtctcatctctaagtggtggtgatactgacacatactacacagactccgtgaagggccggttcaccatctccagagacaattccaagaacactctgtatttgcaaatgaacagcctgcgagccgaagactcggccgtatattactgtgcgaaggattatgtggggaccgtccctgatgcttttgatatctggggccaagggacaatggtcatcgtctcttca

SEQ ID NO: 4332 - DNA, 298 bp, Homo sapiens
  source 1..298: mol_type = other DNA
tgcagcctctggattcaccttcagtagctatagcatgaactgggtccgccaggctccagggaaggggctggagtgggtctcatctctaagtggtggtggtactgacacatactacacagactccgtgaagggccggttcaccatctccagagacaattccaagaacactctgtatttgcaaatgaacagcctgcgagccgaagactcggccgtatattactgtgcgaaggattatgtggggaccgtccctgatgcttttgatatctggggccaagggacaatggtcatcgtctcttca

SEQ ID NO: 4333 - DNA, 298 bp, Homo sapiens
  source 1..298: mol_type = other DNA
tgcagcctctggattcgcctttagagcctatgccatgagctgggtccgccaggctccagggaaggggctggagtgggtctcatctctaagtggtggtggtggtgacacagcctacacagactccgtgaagggccggttcaccatctccagagacaactccaagaacactctgtatttgcaaatgaacagcctgcgagccgaggacacggccgtatattactgtgcgaaggattatgtggggaccgtccctgatgcttttgatatctggggccaagggacaatggtcatcgtctcttca

SEQ ID NO: 4334 - DNA, 298 bp, Homo sapiens
  source 1..298: mol_type = other DNA
tgcagcctctggattcacctttaccagttatgccatgacctgggtccgccaggctccagggaaggggctggagtgggtctcaggtattagtggtagtggtggtacgacatactatgcagactccgtgaagggccggttcaccatctccagagacaattccaagaacacgctgtatctgcagatgaacagcctgagagtcgaggacacggccaaatatttttgtgcgaaagattatgtggggacagtccctgatgcttttgatatctggggccaagggacactggtcaccgtctcttca

SEQ ID NO: 4335 - DNA, 298 bp, Homo sapiens
  source 1..298: mol_type = other DNA
tgcagcctctggattcacctttagcacctatgccatgagctgggtccgccaggctccagggaaggggctggagtgggtctcaggtattagtggtagtggtggtaggacatactatgcagactccgtgaagggccggttcaccatctccagagacaattccaagaacacgctgtatctgcaaatgaacagcctgagagccgaggacacggccgtatattactgtgcgaaagattatgtcgggacagtgcctgatgcttttgatatctggggccaagggacaatggtcaccgtctcttca

SEQ ID NO: 4336 - DNA, 307 bp, Homo sapiens
  source 1..307: mol_type = other DNA
tgcagcctctggattcacctttagaaattattggatgagctgggtccgccaggctccagggaaggggctggagtgggtggccaccataaaccaagatggaagtgagcaagaccaggtggactctgtgaagggccgattcaccctctccagagacaacgccaagtactcactgtatctgcagatgaacaacctgagagccgaggacacggctatgtattactgtgcgaggaaaaagtattactatgatactagtcctatggggtggttcgactcctggggccagggaaccctggtcaccgtctcctca

SEQ ID NO: 4337 - DNA, 307 bp, Homo sapiens
  source 1..307: mol_type = other DNA
tacagcctctggattcacctttagtagctattggatgagctgggtccgccaggctccagggaaggggctggagtgggtggccaccataaaccaagatggaagtgagcaagaccacgttgactctgtgaagggccgattcaccctctccagagacaacgccaagaactcactgtatctgcaaatgaacaacctgagagccgaggacacggctatgtattactgtgcgaggaaaaagtattactatgatactagtcctatggggtggttcgactcctggggccagggaaccctggtcaccgtctcctca

SEQ ID NO: 4338 - DNA, 307 bp, Homo sapiens
  source 1..307: mol_type = other DNA
tacagcctctggattcgcctttagtggctattggatgagctgggtccgccaggctccagggaaggggctggagtgggtggccaccataaaccgagatgggagtgagcaggaccacgtgggctctgtggagggccgattcaccctctccagagacaacgccaagaattcactctatctgcaaatgaacaacctgagagccgaggacacggctatatattactgtgcgaggaaaaagtattactatgatactagtcctatggggtggttcgactcctggggccagggaaccctggtcaccgtctcctca

SEQ ID NO: 4339 - DNA, 307 bp, Homo sapiens
  source 1..307: mol_type = other DNA
tacagcctctggattcgcctttagtggctattggatgagctggttccgccaggctccagggaaggggctggagtgggtggccaccataaaccgagaagggagtgagcaagaccacgtgggctctgtggagggccgattcaccctgtccagagacaacgccaagaactcactctatctgcaaatgaacaacctgagagccgaggacacggctatgtattactgtgcgaggaaaaagtattactatgatactagtcctatggggtggttcgactcctggggccagggaaccctggtcaccgtctcctca

SEQ ID NO: 4340 - DNA, 307 bp, Homo sapiens
  source 1..307: mol_type = other DNA
tacagcccctggattcacctttagtagttattggatgagctgggtccgccaggctccagggaaggggctggagtgggtggccaccataaaccaagatgggagggagcaagaccacgtggactctgtgaagggccgattcaccctctccagagacaacgccaagaactcactgtatctgcaaatgaacaacctgagagccgaggacacggctatctattactgtgcgaggaaaaagtattattatgatactagtcctatggggtggttcgactcctggggccagggaaccctggtcaccgtctcctca

SEQ ID NO: 4341 - DNA, 307 bp, Homo sapiens; identical to SEQ ID NO: 4336
  source 1..307: mol_type = other DNA

SEQ ID NO: 4342 - DNA, 307 bp, Homo sapiens
  source 1..307: mol_type = other DNA
tacagcctctggattcacccttagtagctattggatgagctgggtccgccaggctccagggaaggggctggagtgggtggccaccataaaccaagatggaagtgagcaagaccacgttgactctgtgaagggccgattcaccctctccagagacaacgccaagaactcactgtatctgcaaatgaacaacctgagagccgaggacacggctatgtattactgtgcgaggaaaaagtattactatgatactagtcctatggggtggttcgactcctggggccagggaaccctggtcaccgtctcctca

SEQ ID NO: 4343 - DNA, 307 bp, Homo sapiens; identical to SEQ ID NO: 4336
  source 1..307: mol_type = other DNA

SEQ ID NO: 4344 - DNA, 307 bp, Homo sapiens
  source 1..307: mol_type = other DNA
tgcagcctctggattcacctttagaaattattggatgagctgggtccgccaggctccagggaaggggctggagtgggtggccatcataaaccaagatggaagtgagcaagaccaggtggactctgtgaagggccgattcaccctctccagagacaacgccaagtactcactgtatctgcagatgaacaacctgagagccgaggacacggctatgtattactgtgcgaggaaaaagtattactatgatactagtcctatggggtggttcgactcctggggccagggaaccctggtcaccgtctcctca

SEQ ID NO: 4345 - DNA, 307 bp, Homo sapiens
  source 1..307: mol_type = other DNA
tacagcctctggattcgcctttagtggctattggatgagctggttccgccaggctccagggaaggggctggagtgggtggccaccataaaccgagatgggagtgagcaggaccacgtgggctctgtggagggccgattcaccctctccagagacaacgccaagaactcactctatctgcaaatgaacaacctgagagccgaggacacggctatgtattactgtgcgaggaaaaagtattactatgatactagtcctatggggtggttcgactcctggggccagggaaccctggtcaccgtctcctca

SEQ ID NO: 4346 - DNA, 307 bp, Homo sapiens
  source 1..307: mol_type = other DNA
tacagcctctggattcgcctttagtggctattggatgagctgggtccgccaggctccagggaaggggctggagtgggtggccaccataaaccgagatgggagtgagcaggaccacgtgggctctgtggagggccgattcaccctctccagagacaacgccaagaactcactctatctgcaaatgaacaacctgagagccgaggacacggctatgtattactgtgcgaggaaaaagtattactatgatactagtcctatggggtggttcgactcctggggccagggaaccctggtcaccgtctcctca

SEQ ID NO: 4347 - DNA, 307 bp, Homo sapiens
  source 1..307: mol_type = other DNA
tacagcctctggattcgcctttagtggctattggatgagctgggtccgccaggctccaaggaaggggctggagtgggtggccaccataaaccgagatgggagtgagcaggaccacgtgggctctgtggagggccgattcaccctctccagagacaacgccaagaactcactctatctgcaaatgaacaacctgagagccgaggacacggctatgtattactgtgcgaggaaaaagtattactatgatactagtcctatggggtggttcgactcctggggccagggaaccctggtcaccgtctcctca

SEQ ID NO: 4348 - DNA, 307 bp, Homo sapiens
  source 1..307: mol_type = other DNA
tgtagcctctggattcacttttagtacttattggatgagttgggtccgccgggctccagggaaggggctggagtgggtggccaccataaaccaagatggaaatcaggaacgctatgtggactctgtgaagggccgattcaccgtctccagagacaatgccaggaactcactgtatctgcaaatgaacagcctgagagacgaggacacggctgtctatttttgtgcgaggaaaaaatattactatgatactagtcctatggggtggttcgactcctggggccagggaacccaggtcatcgtcgcctca

SEQ ID NO: 4349 - DNA, 286 bp, Homo sapiens
  source 1..286: mol_type = other DNA
tacgagctctggaatcacccgcagtagtatttggatggcctgggtccgccaggctccagggaaggggctggactgggtggccaacataaacgcagatggaagtgtgaaatactatgcggactctgtgaagggccgattcaccatctccagagacatcgccaagaactcactctatctgcaaatgaacgatctgagacccgacgacacggctgtttattactgtgcgacaacagcggatgcacccgggaacgactggggccagggaaccctggtcaccgtctcttca

SEQ ID NO: 4350 - DNA, 286 bp, Homo sapiens
  source 1..286: mol_type = other DNA
tacgagctctggaatcacccgcagtagtatttggatggcctgggtccgccaggctccagggaaggggctggactgggtggccaacataaacgcagatggaagtgtgaaatactatgcggactctgtgaagggccgattcaccatctccagagacatcgccaagaactcactctatctgcaaatgaacggtctgagacccgacgacacggctgtttattactgtgcgacaacagcggatgcacccgggaacgactggggccagggaaccctggtcaccgtctcttca

SEQ ID NO: 4351 - DNA, 286 bp, Homo sapiens
  source 1..286: mol_type = other DNA
tacgagctctggaatcacccgcagtagtatttggatggcctgggtccgccaggctccagggaaagggctggactgggtggccaacataaacgcagatggaagtgtgaaatactatgcggactctgtgaagggccgattcaccatctccagagacatcgccaagaactcactctatctgcaaatgaacgatctgagacccgacgacacggctgtttattactgtgcgacaacagcggatgcacccgggaacgactggggccagggaaccctggtcaccgtctcttca

SEQ ID NO: 4352 - DNA, 286 bp, Homo sapiens
  source 1..286: mol_type = other DNA
tatgagctctggaatcacccgcagtagtatttggatggcctgggtccgccaggctccagggaaggggctggactgggtggccaacataaacgcagatggaagtgtgaaatactatgcggactctgtgaagggccgattcaccatctccagagacatcgccaagaactcactctatctgcaaatgaacgatctgagacccgacgacacggctgtttattactgtgcgacaacagcggatgcacccgggaacgactggggccagggaaccctggtcaccgtctcttca

SEQ ID NO: 4353 - DNA, 286 bp, Homo sapiens
  source 1..286: mol_type = other DNA
tacgagctctggaatcacccgcagtagtatttggatggcctgggtccgccaggctccagggaaggggctggactgggtggccaacataaacgcagatggaagtgtgaaatactatgcggactctgtgaagggccgattcaccatctccagagacatcgccaagaactcactctatctgcacatgaacgatctgagacccgacgacacggctgtttattactgtgcgacaacagcggatgcacccgggaacgactggggccagggaaccctggtcaccgtctcttca

SEQ ID NO: 4354 - DNA, 286 bp, Homo sapiens
  source 1..286: mol_type = other DNA
tacgagctctggaatcacccgcagtagtatttggatggcctgggtccgccaggctccagggaaggggctggactgggtggccaacataaacgcagatggaagtgtgaaatactatgcggactctgtgaaggaccgattcaccatctccagagacatcgccaagaactcactctatctgcaaatgaacgatctgagacccgacgacacggctgtttattactgtgcgacaacagcggatgcacccgggaacgactggggccagggaaccctggtcaccgtctcttca

SEQ ID NO: 4355 - DNA, 286 bp, Homo sapiens
  source 1..286: mol_type = other DNA
tacgagctctggaatcacccgcagtagtatttggatggcctgggtccgccaggctccagggaaggggctggactgggtggccaacgtaaacgcagatggaagtgtgaaatactatgcggactctgtgaagggccgattcaccatctccagagacatcgccaagaactcactctatctgcaaatgaacgatctgagacccgacgacacggctgtttattactgtgcgacaacagcggatgcacccgggaacgactggggccagggaaccctggtcaccgtctcttca

SEQ ID NO: 4356 - DNA, 286 bp, Homo sapiens
  source 1..286: mol_type = other DNA
tacgagctctggaatcacccgcagtagtatttggatggcctgggtccgccaggctccagggaaggggctggactgggtggccaacataaacgcagatggaagtgtgaaatactatgtggactctgtgaagggccgattcaccatctccagagacatcgccaagaactcactctatctgcaaatgaacgatctgagacccgacgacacggctgtttattactgtgcgacaacagcggatgcacccgggaacgactggggccagggaaccctggtcaccgtctcttca

SEQ ID NO: 4357 - DNA, 286 bp, Homo sapiens
  source 1..286: mol_type = other DNA
tgcagcctctggattcacctttactagatattggatgacttgggtccgccagcctccagggaaggggctggagtgggtggccaacataaagcaagatggaactactacattctatgtggactctgtgaagggccgattcaccatctccagagacaacgccaagaactcactgtatctgcaaatgaacagcctgagagccgaggacacggctgtgtattactgtgcgacaaccgcagatgcgccggggaacgactggggccagggaaccctggtcaccgtctcctca

SEQ ID NO: 4358 - DNA, 280 bp, Homo sapiens
  source 1..280: mol_type = other DNA
tgcggcctctggattcacccttagtccctattggatgagctgggtccgccaggctccagggaaggggctggaatgggtggccaacataaagcaagatggaagtgagaaatactatgtggactctgtgaagggccgattcaccatctccagagacaacgccaagaatttattgtatctgcaaatgaacagcctgagagccgaggacacggctctatattactgtgcgagaaagaacattatggacgtctggggccaagggaccacggtcaccgtctcctca

SEQ ID NO: 4359 - DNA, 280 bp, Homo sapiens
  source 1..280: mol_type = other DNA
tgcggcctctggattcacccttagtccctattggatgagctgggtccgccaggctccagggaaggggctggaatgggtggccaacataaagcaagatggaagtgagaaatactatgtggactctgtgaaaggccgattcaccatctccagagacaacgccaagaatttattgtatctgcaaatgaacagcctgagagccgaggacacggctctatattactgtgcgagaaagaacattatggacgtctggggccaagggaccacggtcaccgtctcctca

SEQ ID NO: 4360 - DNA, 280 bp, Homo sapiens
  source 1..280: mol_type = other DNA
tgcagcctctggattcatcttcagtacctattggatggcctggggccgccaggctccagggaaggggctggagtgggtggccagcataaaggaagatggaagtgagaaatactatgtggactctgtgaagggccgattcaccatctccagagacaacgccaagaactcagtgtttctgcaaatggacagcctgagagccgaggacacggctctgtattattgtgcgagaaagaacattatggacgtctggggccaagggaccacggtcaccgtctcctca

SEQ ID NO: 4361 - DNA, 280 bp, Homo sapiens; identical to SEQ ID NO: 4360
  source 1..280: mol_type = other DNA

SEQ ID NO: 4362 - DNA, 292 bp, Homo sapiens
  source 1..292: mol_type = other DNA
tgcagcctctggattcactctcagtaacgcctggatgagctgggtccgccaggctccagggaaggggctggagtgggttggccgtattaaaagcaaaactgatggtgggacaacagactacgctgcacccgtgaaaggcagattcaccatctcaagagatgattcaaaaaacacgctgtctctgcaaatgaacagcctgaaaaccgaggacacagccgtgtattactgtaccaactggaactatgctcggtttgagtactggggccagggaaccctggtcaccgtctcctca

SEQ ID NO: 4363 - DNA, 292 bp, Homo sapiens
  source 1..292: mol_type = other DNA
tgcagcctctggattcgctttcagtaacgcctggatgaactgggtccgccagacgccagggaagggtctggagtgggttggccttattaaaaccaaaagtgctggtgggacaacagactacgctgcacccgtgaaaggcagatttaccatctcaagagatgattcaaaaaacacactggatctgcaaatgaacagcctggaaagcgaggacacagccgtgtattactgtacaaactggaactacgcaaggtttgaatactggggccagggaatcctggtcaccgtctcctca

SEQ ID NO: 4364 - DNA, 292 bp, Homo sapiens
  source 1..292: mol_type = other DNA
tgcagcctctggattcactctcagtaacgcctggatgagctgggtccgccaggctccagggaaggggctggagtgggttggccgtattaaaagcaaaactgatggtgggacaacagactacgctgcacccgtgaaagacagattcaccatctcaagagatgattcaaaaaacacgctgtctctgcaaatgaacagcctgaaaaccgaggacacagccgtgtattactgtaccaactggaactatgctcggtttgagtactggggccagggaaccctggtcaccgtctcctca

SEQ ID NO: 4365 - DNA, 298 bp, Homo sapiens
  source 1..298: mol_type = other DNA
tgcagcctctggactcaccgtccaaaacaactacatgagctgggtccgccaggctccagggaaggggctggagtgggtctcaattattcatagggatggaaccacttactacgcagactccgtgaggggcagattcaccatctccagagacacttccaagaacacggtgtttcttcaaatgaacggcctgagagtcgaggacacggctgtttatcactgtgcgagagatcctggttatagcagtggctgggtagagttcgacccctggggccagggaaccctggtcactgtcgcctca

SEQ ID NO: 4366 - DNA, 298 bp, Homo sapiens
  source 1..298: mol_type = other DNA
tgcagcctctggactcaccgtccaaaacaactacatgagctgggtccgccaggctccagggaaggggctggagtgggtctcaattattcatagggatggaaccacttactacgcagactccgtgaggggcagattcaccatctccagagacacttccaagaacacggtgtttcttcaaatgaacggcctgagagtcgagggcacggctgtttatcactgtgcgagagatcctggttatagcagtggctgggtagagttcgacccctggggccagggaaccctggtcactgtcgcctca

SEQ ID NO: 4367 - DNA, 298 bp, Homo sapiens
  source 1..298: mol_type = other DNA
tgcagcctctggattcaccgtcagtaccagctacatgagctgggtccgccaggctccagggaagggcctagagtgggtctcagttattcatagcggtggtgacacatactacgcagactccgtgaagggcagattcaccatctccagagacaattccaagaacacgctgtatcttcaaatgaacagcctgagagccgaggacacggctgtgtatcactgtgcgagagatccagggtatagttcggggtgggttgagttcgacccctggggccagggaaccctggtcaccgtctcctca

SEQ ID NO: 4368 - DNA, 298 bp, Homo sapiens
  source 1..298: mol_type = other DNA
tgcagcctctggattctccgtcagtgacagttacatgagctgggtccgccaggctccagggaagggactggagtgggtctcagttattcatgccactggtaacacatactacgcggactccgtgaagggcagattcaccatctccagggacacttccaagaacacgctgtatcttcaaatgaacagtctgcgagtcgaagactcggctgtatatcactgtgcgagagatccagggtatagttccgggtgggttgagttcgacccctggggccagggaaccctggtcaccgtctcctca

SEQ ID NO: 4369 - DNA, 307 bp, Homo sapiens
  source 1..307: mol_type = other DNA
tacagcctctggattcaccttaagtaactcttggatgagctgggtccgccaggctccaggcaaggggctggagtgggtggccaccataaatcaagatggaagtgggatgtactatgtgggctctgtgatgggccggttcaccatctccagagacaacgccaagaactcactgtttctgcaaatgaacagcctgagagacgacgacacggctatatatcattgtgcgagaaaattgtattactatgatactagtcctgcggggtggttcgacccctggggccagggaaccctggtcaccgtctccaca

SEQ ID NO: 4370 - DNA, 307 bp, Homo sapiens
  source 1..307: mol_type = other DNA
tacagcctctggactcaccttaagtaactcttggatgagctgggtccgccaggctccaggcaaggggctggagtgggtggccaccataaatcaagatggaagtgggatgtactatgtgggctctgtgatgggccggttcaccatctccagagacaacgccaagaactcactgtttctgcaaatgaacagcctgagagacgacgacacggctatatatcattgtgcgagaaaattgtattactatgatactagtcctgcggggtggttcgacccctggggccagggaaccctggtcaccgtctccaca

SEQ ID NO: 4371 - DNA, 307 bp, Homo sapiens
  source 1..307: mol_type = other DNA
tacagcctctggattcaccttaagtaactcttggatgagctgggtccgccaggctccaggcaaggggctggagtgggtggccaccataaatcaagatggaagtgggatgtactatgtgggctctgtgatgggccggttcaccatctccagagacaacgccaagaactcactgtttctgcaaatgaacagcctgagagacgatgacacggctatatatcattgtgcgagaaaattgtattactatgatactagtcctgcggggtggttcgacccctggggccagggaaccctggtcaccgtctccaca

SEQ ID NO: 4372 - DNA, 307 bp, Homo sapiens
  source 1..307: mol_type = other DNA
tgcagcctctggattcacgcctagtacctattggatgagctgggtccgccaggctccagggaaggggctggagtgggtggccaacataaagcaagatggaagtgaggaatactatgtggactctgtgaagggccgattcaccatctccagagacaacgccaagaactcagtgtatctgcaaatgaacagcctgagagccgaggacacggccgtctattactgtgcgaggaaactgtattactatgatactagtcccgcaggctggttcgacccctggggccagggaaccctggtcaccgtctcctca

SEQ ID NO: 4373 - DNA, 286 bp, Homo sapiens
  source 1..286: mol_type = other DNA
tgcagcctctggattcattttcagtgacgcctggatgaactgggtccgccaggctccagggaaggggctggagtgggttggccgcattaaaagtaaagctgctggtgggacaacagactacgctgcagccgtgaaaggcagattcaccatctcaagagatgattcaaaaaagacgtcgtttctgcaaatgaacagcctgaaaaacgaagacacagccgtgtattactgtaccacagggggtcgggtgggctactggggccagggaaccctggtcaccgtctcctca

SEQ ID NO: 4374 - DNA, 286 bp, Homo sapiens
  source 1..286: mol_type = other DNA
tgcagcctctggattcattttcagtgacgcctggatgaactgggtccgccaggctccagggaaggggctggagtgggttggccgcattaaaagtaaagctgctggtgggacaacagactacgctgcagccgtgaaaggcagattcaccatctcaagagatgattcaaaaaagacgtcgtttctgcaaatgaacagcctgaaaaacgaagacacagccgtgtattactgtaccacagggggtcgggtgggctactggggccagggtaccctggtcaccgtctcctca

SEQ ID NO: 4375 - DNA, 286 bp, Homo sapiens; identical to SEQ ID NO: 4373
  source 1..286: mol_type = other DNA

SEQ ID NO: 4376 - DNA, 286 bp, Homo sapiens
  source 1..286: mol_type = other DNA
tgcaccctctggattcactttcagtaacgcctggatgaattgggtccgccaggctccagggaaggggctggagtgggtcggccgtattaaaagcaacactgatggcgggacaacagactacgctgcacccgtaaaaggcagattcaccatctcaagagatgattcaaaaagcacggtgtatcttcaaatgaacagcctgaaaatcgaggacacagccgtctattactgtaccacaggcggtagggttggctactggggccagggaaccctggtcaccgtctcctca

SEQ ID NO: 4377 - DNA, 286 bp, Homo sapiens
  source 1..286: mol_type = other DNA
tgcagcctctggattcactttcagtaacgcctggatgaattgggtccgccaggctccagggaaggggctagagtgggtcggccgtattaagagcaaaactgatggcgggacaacagactacgctgcacccgtaaaaggcagattcaccatctcaagagatgattcaaagagcacgctgtatctgcaaatgaacagcctgaaaatcgaggacacagccgtctattactgtaccacaggcggtagggttggctactggggccagggaaccctggtcaccgtctcctca

SEQ ID NO: 4378 - DNA, 283 bp, Homo sapiens
  source 1..283: mol_type = other DNA
tgcagcctctggattcacctttaatagctattggatgagttgggtccgccaggctccagggaaggggctggagtgggtggccaacataaagcaagatggaagtgagatatactatgtggactctgtgaagggccgattcaccatctccagagacaacgccaggaactcactgtatctgcaaatgaacagcctgagagccgaggacacggctgtgtattactgtgggagaggtcgggcggattggggctactggggccagggaaccctggtcaccgtctcctca

SEQ ID NO: 4379 - DNA, 283 bp, Homo sapiens
  source 1..283: mol_type = other DNA
tgcagcctctggattcagttttagtatttattggatgagctgggtccgccaggctccagggaaggggctggagtgggtggccaacatcaaggaagatggaagtgagaaatactatgtggactctgtgaagggccgattcaccatctccagagacaacgccaagaactcactgtatctgcaaatgaacagcctgagagccgaggacacggctgtatattattgtgggagaggtcgggcggattggggctactggggccggggaaccctggtcaccgtctcctca

SEQ ID NO: 4380 - DNA, 283 bp, Homo sapiens
  source 1..283: mol_type = other DNA
tgcaacctctggattcacctttagtagccattggatgagctgggtccgccagactccagggaaggggctggagtgggtggccaacataaagcaagatggaagtgaaaagtactatgtggactctgtgaagggccgattcaccatctccagagacaatgccaagaactcactgtatctgcaaatgaacagcctgagagccgaggacacggctgtgtattactgtgggagaggtcgggcagactggggctactggggccagggaaccgtggtcaccgtctcctca

SEQ ID NO: 4381 - DNA, 286 bp, Homo sapiens
  source 1..286: mol_type = other DNA
tgtagcctctggattcgacttcactagttataccgtgaactgggtccgccaggctccagggaaggggctggagtgggtctcatctattagtagtagtagtagttatatattctacgcagactcagtgaagggccgattcaccatctccagagacaacgccaggaactcagtgtatctacatttgaacagtctgagagccgaggacacggctgtctatttctgtgcgagggatgcctacaattacggtgactactggggccagggaaccctggtcaacgtctccaca

SEQ ID NO: 4382 - DNA, 286 bp, Homo sapiens
  source 1..286: mol_type = other DNA
tgcagtctctggattcgacttcactagttataccgtgaactgggtccgccaggctccagggaaggggctggagtgggtctcatctattagtagtagtagtacttatatattctacgcagactcagtgaagggccgattcaccatctccagagacaacgccaggaactcagtgtatctacaattgaacagtctgagagccgaggacacggctgtatatttctgtgcgagggatgcctacaattacggtgactactggggccagggaaccctggtcaacgtctctaca

SEQ ID NO: 4383 - DNA, 286 bp, Homo sapiens
  source 1..286: mol_type = other DNA
tgcagtctctggattcgacttcactagttataccgtgaactgggtccgccaggctccagggaaggggctggagtgggtctcatctattagtagtagtagtacttatatattctacgcagactcagtgaagggccgattcaccatctccagagacaacgccaggaactcagtgtatttacaattgaacagtctgagagccgaggacacggctgtatatttctgtgcgagggatgcctacaattacggtgactactggggccagggaaccctggtcaacgtctctaca

SEQ ID NO: 4384 - DNA, 286 bp, Homo sapiens
  source 1..286: mol_type = other DNA
tgcagcctctggattcaccttcaacagttataccataaactgggtccgccaggctccagggctggggctggagtgggtctcatccattagtagcagcagtacttacatcttctatgcggactcaattaagggccgattcaccgtttccagagacaacgccaagaactcaatctttctgcacataaacagcctgggacccgacgacacaggtgtatatttttgtgcgagagacgcctacaattacggggactactggggccagggaaccctggtcaccgtctcctca

SEQ ID NO: 4385 - DNA, 286 bp, Homo sapiens
  source 1..286: mol_type = other DNA
tgcagccgctggattcacttttggtggctattggatgacctgggtccgccaggctccagggaaggggctggagtgcgtggcctacataaagtcagatggaagtgataagtattatgtggactctgtgaagggccggttcaccatcttcagagacaacgccaagacctcactgtatctgcaaatgaacagcctgagagccgaggacacggctgtctattactgtgtcagagagactgcctggtcttttgactcctggggccagggaaccctggtcaccgtctcctca

SEQ ID NO: 4386 - DNA, 286 bp, Homo sapiens
  source 1..286: mol_type = other DNA
tgcagcctctggattcagctttagtggctattggatgagttgggtccgccaggctccagggaaggggctggagtgggtggccatcataaaggaagatggaagtttgaaaaactatgtggactctgtgaagggccgattcactatctccagagacaacaccgagaagtctctgtatctccaaatgaacagcctgagaggcgaagacacggctatctactactgtgtgagggagactgcctggtcctttgactcctggggccagggaaccctggtcaccgtctcctca

SEQ ID NO: 4387 - DNA, 286 bp, Homo sapiens
  source 1..286: mol_type = other DNA
tgcagcctctggattcagttttagtggctattggatgagttgggtccgccaggctccagggaaggggctggagtgggtggccatcataaaggaagatggaagtttgaaaaactatgtggactctgtgaagggccgattcactatcttcagagacaacaccgagaagtctctatatctccaaatgaacagcctgagaggcgaagacacggctatctactactgtgtgagggagactgcctggtcctttgactcctggggccagggaaccctggtcaccgtctcctca

SEQ ID NO: 4388 - DNA, 286 bp, Homo sapiens
  source 1..286: mol_type = other DNA
tgcagccgctggattcacttttggtggctattggatgacctgggtccgccaggctccagggaaggggctggagtgcgtggcctacataaagtcagatggaagtgcgaagtattatgtggactctgtgaagggccgattcaccatctccagagacaacgccgagaactcactgtatctgcaaatgaacagcctgagagtcgaggacacggctgtctattactgtgtcagagagactgcctggtcttttgactcctggggccagggaaccctggtcaccgtctcctca

SEQ ID NO: 4389 - DNA, 286 bp, Homo sapiens
  source 1..286: mol_type = other DNA
tgcagccgctggattcacttttggtggctattggatgacctgggtccgccaggctccagggaaggggctggagtgcgtggcctacataaagtcagatggaagtgcgaagtattatgtggactctgtgaagggccgattcaccacctccagagacaacgccgagaactcactgtatctgcaaatgaacagcctgagagtcgaggacacggctgtctattactgtgtcagagagactgcctggtcttttgactcctggggccagggaaccctggtcaccgtctcctca

SEQ ID NO: 4390 - DNA, 286 bp, Homo sapiens
  source 1..286: mol_type = other DNA
tgcagccgctggattcacttttggtggctattggatgacctgggtccgccaggctccagggaaggggctggagtgcgtggcctacataaagtcagatggaagtgcgaagtattatgtggactctgtgaagggccgattcaccatctccagagacaacgccgagaactcagtgtatctgcaaatgaacagcctgagagccgaggacacggctgtctattactgtgtcagagagactgcctggtcttttgactcctggggccagggaaccctggtcaccgtctcctca

SEQ ID NO: 4391 - DNA, 277 bp, Homo sapiens
  source 1..277: mol_type = other DNA
tgtagcctctggattcacctttagcatcgacgccatgagctgggtccgccaggctccagggaaggggctggaatgggtctcagcaatcagtggtcgtgatactaacacatactacgcagactccgtgaagggccggttcagcatctccagagacaattccaagaacacattgtatttgcaaatggacagcctgagagccgacgacacggccgtatattattgtgtgaaagatcaatgggacgtctggggcaaagggaccacggtcgccgtctcctca

SEQ ID NO: 4392 - DNA, 277 bp, Homo sapiens
  source 1..277: mol_type = other DNA
tgtagcctctggattcacctttagcatcaacgccatgagctgggtccgccaggctccagggaaggggctggaatgggtctcagcaatcagtggtcgtgatactaacacatactacgcagactccgtgaagggccggttcagcatctccagagacaattccaagaacacattgtatttgcaaatggacagcctgagagccgacgacacggccgtatattattgtgtgaaagatcaatgggacgtctggggcaaagggaccacggtcgccgtctcctca

SEQ ID NO: 4393 - DNA, 277 bp, Homo sapiens
  source 1..277: mol_type = other DNA
tgcagcctctggattctcctttagcggctatttcatgagctgggtccgccaggctccagggaaggggctggagtgggtctcagcgatcagtgatagtggtgatagcacatactacgcagactccgtgaagggccggttcaccatctccagggacaattccaggaacacgttgtatttacaagtgagcagcctgagagccgaggacacggccgtatatttctgtgtgaaagatcagtgggacgtctggggcaaagggaccacggtcaccgtctcctca

SEQ ID NO: 4394 - DNA, 277 bp, Homo sapiens
  source 1..277: mol_type = other DNA
tgcagcctctggattctcctttagcggctatttcatgagctgggtccgccaggctccagggaaggggctggagtgggtctcagcgatcagtgatagtggtgatggcacatactacgcagactccgtgaagggccggttcaccatctccagggacaattccaggaacacgttgtatttacaagtgagcagcctgagagccgaggacacggccgtatatttctgtgtgaaagatcagtgggacgtctggggcaaagggaccacggtcaccgtctcctca

SEQ ID NO: 4395 - DNA, 277 bp, Homo sapiens
  source 1..277: mol_type = other DNA
tgcagcctctggattctcctttagcggctatttcatgagctgggtccgccaggctccagggaaggggctggagtgggtctcagcgatcagtgatagtggtgatagcacatactacgcagactccgcgaagggccggttcaccatctccagggacaattccaggaacacgttgtatttacaagtgagcagcctgagagccgaggacacggccgtatatttctgtgtgaaagatcagtgggacgtctggggcaaagggaccacggtcaccgtctcctca

SEQ ID NO: 4396 - DNA, 277 bp, Homo sapiens
  source 1..277: mol_type = other DNA
tgcagcctctggattcacctttagcggctataccatgggctgggtccgccaggctccagggaaggggctggagtgggtctcgactattagtgatagtggtagtagcacacactacgcagactccgtggagggccggttcaccatctccagagacaatcccaagaacacactgtatctgcaaatgaacagcctgagaggcgaggacacggccgtatattactgtgtcaaagatcaatgggacgtctggggccaaggcaccacggtcatcgtctcctca

SEQ ID NO: 4397 - DNA, 292 bp, Homo sapiens
  source 1..292: mol_type = other DNA
tgcagcctctggactcaccttcagtgaccacttcatgaactgggtccgccaggctccagggaaggggctggagtgggttggccgtagtagaaacaaagaaaatagttacgccacagaatacgccgcgtctgtgaaaggcagattcaccatctcaagagatgattcaaagaactcagtgtatctgcaaatgaacagcctgaaaatcgaggacacggccgtgtatcattgtgctagagagctcgatggggttctcgactactggggccagggaaccttggtcaccgtctcctca

SEQ ID NO: 4398 - DNA, 292 bp, Homo sapiens
  source 1..292: mol_type = other DNA
tgcagcctctggactcaccttcagtgaccacttcatgaactgggtccgccaggttccagggaaggggctggagtgggttggccgtagtagaagcaaacgcaataattatagcacagaattcgccgcgtctgtgaaaggcagattcaccatctcaagagatgattcaaagaactcagtgtatctgcaaatgaacagcctgaagaccgaggacacggccgtgtattattgtgctagagagctcgatggggttctcgactactggggccagggaaccttggtcaccgtctcctca

SEQ ID NO: 4399 - DNA, 292 bp, Homo sapiens
  source 1..292: mol_type = other DNA
tgcagcctctggactcaccttcagtgaccacttcatgaactgggtccgccaggttccaaggaaggggctggagtgggttggccgtagtagaagcaaacgcaataattatagcacagaattcgccgcgtctgtgaaaggcagattcaccatctcaagagatgattcaaagaactcagtgtatctgcaaatgaacagcctgaagaccgaggacacggccgtgtattattgtgctagagagctcgatggggttctcgactactggggccagggaaccttggtcaccgtctcctca

SEQ ID NO: 4400 - DNA, 292 bp, Homo sapiens
  source 1..292: mol_type = other DNA
tgcagcctctggactcaccttcagtgaccacttcatgaactgggtccgccaggttccagggaaggggctggagtgggttggccgtagtagaagcaaacgcaataattatagcacagaattcgccgcgtcggtgaaaggcagattcaccatctcaagagatgattcaaagaactcagtgtatctgcaaatgaacagcctgaagaccgaggacacggccgtgtattattgtgctagagagctcgatggggttctcgactactggggccagggaaccttggtcaccgtctcctca

SEQ ID NO: 4401 - DNA, 292 bp, Homo sapiens
  source 1..292: mol_type = other DNA
tgcagcctctggactcaccttcagtgaccacttcatgaactgggtccgccaggttccagggaaggggctggagtgggttggccgtagtagaagcaaacgcaataattatagcacagaattcgccgcgtctgtgaaaggcagattcaccacctcaagagatgattcaaagaactcagtgtatctgcaaatgaacagcctgaagaccgaggacacggccgtgtattattgtgctagagagctcgatggggttctcgactactggggccagggaaccttggtcaccgtctcctca

SEQ ID NO: 4402 - DNA, 292 bp, Homo sapiens
  source 1..292: mol_type = other DNA
tgcagcctctggactcaccttcagtgaccacttcatgaactgggtccgccaggttccagggaaggggctggagtgggttggccgtagtagaagcaaaactaatgcttacaccacagaattcgccgcgtctgtgaaaggcagattcaccatctcaagagatgattcaaagaactcagtgtatctgcaaatgaacagcctgaagaccgaggacacggccgtctatcattgtgctagagaactcgatggggttctcgactactggggccagggaaccttggtcaccgtctcctca

SEQ ID NO: 4403 - DNA, 292 bp, Homo sapiens
  source 1..292: mol_type = other DNA
tgcagcctctggactcaccttcagtgaccacttcatgaactgggtccgccaggctccagggaaggggctggagtgggttggccgtggtagaaacaaagctaacagttacagcacagaatacgccgcgtctgtgaaaggcagattcaccatctccagagatgattcagagaactcggtgtttctgcaaatggacagcctgagaaccggggacacggccgtgtattactgtgctagggaattggatggggtccttgactactggggccagggagctgtagtcaccgtctcctca

SEQ ID NO: 4404 - DNA, 292 bp, Homo sapiens
  source 1..292: mol_type = other DNA
tgcagcctctggactcaccttcagtgaccacttcatgaactgggtccgccaggctccagggaaggggctggagtgggttgcccgtggtagaaacaaagctaacagctacagcacagaatacgccgcgtctgtgaaaggcagattcaccatctccagagatgattcaggaaacgcggtgtttctgaaaatgagcagcctgagaaccgaggacacggccgtgtattattgtgctagagaattggatggggtcctagactactggggccagggaactgtagtcaccgtctcctca

SEQ ID NO: 4405 - DNA, 310 bp, Homo sapiens
  source 1..310: mol_type = other DNA
cactgtctctggtggctccatcagcaatggtgattaccactggggctggatccgccagcccccagggaaggggctggagtggattgggagtatatattatagtgggagcacctactacaacccgtccctcaagagtcgagtcaccatatccgtagacacgtccaagaaccacttctccctgaagctgagctctgtgaccgccgcagacacggctgtgtattactgcgcgagaaacgaagtgtcggcgagttattatagtactagggaatttgactgctggggccagggaaccctggtcaccgtctcctca

SEQ ID NO: 4406 - DNA, 310 bp, Homo sapiens
  source 1..310: mol_type = other DNA
cactgtctctggtggctccatcagcaatggtgattaccactggggctggatccgccagcccccagggaaggggctggagtggattgggagtatatattatagtgggagcacctactacaacccgtccctcaagagtcgagtcaccatatccgtagacacgtccaagaaccacttctccctgaagctgagctctgtgaccgccgcagacacggctgtgtattactgcgcgagaaacgaagtgtcggcgagttattatagtaccagggaatttgactgctggggccagggaaccctggtcaccgtctcctca

SEQ ID NO: 4407 - DNA, 286 bp, Homo sapiens
  source 1..286: mol_type = other DNA
tgcagcctctggattcaccttcagcggctactggatgcactgggtccgccaagttccagggaaggggctggtgtgggtctcacatattcatagtagtggcatttacgcaacctacgcggactccgtgaagggccgattcatcatctccagggacaacgccaagaacactctgtatctacaaatgaacagtctgacggccgaggacgcggctgtctattactgtgcaagaggaaatttcggtggctttgactactggggccagggtgccctggtcaccgtctcctca

SEQ ID NO: 4408 - DNA, 286 bp, Homo sapiens
  source 1..286: mol_type = other DNA
tgaagcctctgcattcaccttcaggacctactggatgctctgggtccgccaggctccaggggaggggctggtgtgggtctcacttattaatcctgatgggagtaccacaggctacgcggactccgtgaagggccgattcaccatctccagagacaacgccaagaatacactgtatctgcaaatgcacagtctgagggccgaggacacggctatatattactgtgcaaggggtaatttcggggggtttgactactggggccagggaaccgtagtcaccgtctcctca

SEQ ID NO: 4409 - DNA, 277 bp, Homo sapiens
  source 1..277: mol_type = other DNA
tgcagcctctggattcaccttcagtcgttatgaaatgaattgggtccgccaggctccagggaaggggctggagtacatttcgaatattaacagtgatgagaggatcaaaaactacgcagactctgtgaggggccgattcaccatctccagagacaacggcaagagttcactgtttctgcagatgaacagcctgagagccgaggacacggctgtttattactgtacgagaggggaaaacggcctgtggggtcggggaaccctggtcaccgtctcatca

SEQ ID NO: 4410 - DNA, 277 bp, Homo sapiens
  source 1..277: mol_type = other DNA
tgcagcctctggattcaccttcaagagttatcaaatgaactgggtccgccaggctccagggaaggggctggagtggctttcctccataagtagtgatagtgggaccaaatactacgcagactctgtggagggccgattcaccatctccagagacaacaccaagagctcactgtatctgcaaatgaacgacctgcgagccgaggacacgggtttttattactgtacgagaggagaaaacggcctgtggggccggggaaccctggtcaccgtctcctca

SEQ ID NO: 4411 - DNA, 277 bp, Homo sapiens
  source 1..277: mol_type = other DNA
tgcagcctctggattcaccttcagtagttatcaaatgaactgggtccgccaggctccagggaaggggctggagtgggtttcatacattagtagtagtagtgagaccatatactacgcagactctgtgaacggccgattcaccatctccagagacaacgccaagaagtcactgtatctgcaaatgaacagcctgagagccgaagacacggctatttattactgtacgagaggggaaaacggcctctggggccagggaaccctggtcaccgtctcctca

SEQ ID NO: 4412 - DNA, 277 bp, Homo sapiens
  source 1..277: mol_type = other DNA
tgcagcctctggattcaccttcagtagctataatatgaattgggtccgccaggctccagggaaggggctggagtgggtttcatacattagtagtagtagcagtaccatatactacgcagactctgtgaagggccgattcaccatctccagagacaatgccaagaactcactgtatttgcaaatgaacagcctgagagacgaggacacggctgtgtattactgtacgagaggggagaacggcctctggggccagggaaccctggtcaccgtctcctca

SEQ ID NO: 4413 - DNA, 298 bp, Homo sapiens
  source 1..298: mol_type = other DNA
cattgtctctggtggctccatcaacagtggttcctggagctggggctggatccgcctgcccccagggaagaggttggagtggattgggactttccattctagtgggaatacctattataatccgtccctcaaaagtcgagtcaccatatccgtagacacgtccaagaatcagttctccctgagcctgagctctgtgaccgccgcagacacggctgtttattactgcgcgaggctgccgactggtcacccgaactggttcgacccctggggccagggaaccctggtcaccgtctcctcc

SEQ ID NO: 4414 - DNA, 298 bp, Homo sapiens
  source 1..298: mol_type = other DNA
cattgtctctggtggctccatcaacagtggttcctggagctggggctggatccgcctgcccccagggaagaggttggagtggattgggactttccattctagtgggaatacctattataatccgtccctcaaaagtcgagtcaccatatccgtagacacgtccaagaatcagttctccctgagcctgagctctgtgaccgccgcagacacggctgtttattactgcgcgaggctgccgactggtcacccgaactggttcgacccctggggccagggaaccctggtcaccgtctcctca

SEQ ID NO: 4415 - DNA, 298 bp, Homo sapiens
  source 1..298: mol_type = other DNA
tactgtctctggtggctccatcgacatgactcattactcctggggctgggtccgccagcccccaggggcgggcctggagtggattgcgactatccatcaaactgggagcaccttctacaacccgtccctcaagagtcgagtcaccatttccgcagacacgtcccagaagcatttctccctaaacctgatatctgtgaccgccgcagacacggctctttattactgtgcgagactgcctacgggacatccgaattggttcgacccctggggccagggaaccctagtcaccgtctcctca

SEQ ID NO: 4416 - DNA, 289 bp, Homo sapiens
  source 1..289: mol_type = other DNA
cgctgtctctggtggcgccctcactgatggttactattgctcttgggtccgccagccccccggaaagggactggagtggattggagagatctatcatactgggaccaccatttacaacccgtccctcaagagtcgagtcattttatcactggacaagtccaagaattccttctccctgcagctgagttctgtgaccgccgcggacacggccatatattactgtgcgactagtagtggctggtggcgcattgactcctggggccagggatccctggtcaccgtctcctca

SEQ ID NO: 4417 - DNA, 289 bp, Homo sapiens
  source 1..289: mol_type = other DNA
cgatgtctccggtgtctccatcagtagtggttactggtgtaactgggtccgccagtccccagggaaggggctggagtggattggagaaatacatcatagtgggggcaccaactggaatccgtccctcaagagtcgagtcaccctttccgtagacacgtccaagaaccagttctccctggttttgaactctgtgacggccgcggacacggccgtgtattactgtgcgactagtagtggctggtggaggattgactcttggggccagggaacgctggtcaccgtctcctct

SEQ ID NO: 4418 - DNA, 289 bp, Homo sapiens
  source 1..289: mol_type = other DNA
tgcagcctctggattcaccttcagtacttatggcatgcactgggtccgccaggctccaggcaaggggctggagtgggtggcagttatatcatatgatggaagcaataaatattatgcagactccgtgaagggccgactcaccatctccagagacaattccaagaacacgctgtatctgcaaatgaacagcctgagagttgaggacacggctgtatattactgtgcgaagatggttcccggaaatttctttgactcctggggacagggaaccctggtcaccgtctcctca

SEQ ID NO: 4419 - DNA, 289 bp, Homo sapiens
  source 1..289: mol_type = other DNA
tgcagcctctgggttcaccttcagtacttatggcatgcactgggtccgccaggctccaggcaaggggctggagtgggtggcagttatatcatatgatggaagcaataaatattatgcagactccgtgaagggccgactcaccatctccagagacaattccaagaacacgctgtatctgcaattgaacagcctgagagttgaggacacggctgtatattactgtgcgaagatggttcccggaaatttctttgactcctggggacagggaaccctggtcaccgtctcctca

SEQ ID NO: 4420 - DNA, 289 bp, Homo sapiens
  source 1..289: mol_type = other DNA
tgcagcctctggattcaccttcagtagttatggcatgcactgggtccgccaggctccaggcaaggggctggagtgggtggctgttctgtcatatgatggaagtaataaatactatgcagactccgtgaagggccgattcaccatctccagagacaattccaagaacacgctatatctgcaaatgaacagcctgagatttgaggacacggctgtatattactgtgcgaaaatggtccccggcaacttttttgactcctggggccagggagccctggtcaccgtctcctca

SEQ ID NO: 4421 - DNA, 283 bp, Homo sapiens
  source 1..283: mol_type = other DNA
tgcagcctctggattcacctttactaggtattggatgacctgggtccgccaggctccagggaaggggctggagtgggtgggcaacataaaggaagatggaagtgagaaacactatgtggactctgtgaagggccgattcaccatgtccagagacaacgccaagaactcactgtatctgcaaatgaacagcctgagagccgaggacacggctgtatattactgtacgagagaaaactggggacctgactactggggccagggaaccctggtcaccgtctcctca

SEQ ID NO: 4422 - DNA, 283 bp, Homo sapiens
  source 1..283: mol_type = other DNA
tgtggcctctggattcccctttaattcctatacgctgacctgggtccgccaggctccagggaaggggctggagtgggtggccaacatgaaggaagacggtaggacgagaaattatgcggactctgtgaggggccgattcaccatttacagagacagcaccaagaactcagtctatctgcaaatgaacaacctgagagccgaggacacggctacgtattactgcacgagagaaaattggggtcctgactactggggccagggaaccctggtcaccgtctcctca

SEQ ID NO: 4423 - DNA, 280 bp, Homo sapiens
  source 1..280: mol_type = other DNA
cactgtctctggtggctccatcaggagttactactggagctggatccggcagcccccaggaaagggactggagtggattgggtatatctatgacagtgggagcaccaagtacaacccctccctcaagagtcgagtcaccatatctatggacacgtccaagaaccggttctccctgaagctgaactctgtcaccgccgcagacacggccgtgtattactgtgcgacgggcagtgactggcactactactggggccagggaaccctggtcaccgtctcctca

SEQ ID NO: 4424 - DNA, 280 bp, Homo sapiens
  source 1..280: mol_type = other DNA
cagtgtctctggtggctccatcagtagctactactggagctggatccggcagcccccgggtaagggactggagtggattggaaatatgtattacagtggggggaccaactacagcccctccctcaagagtcgagtcaccatctcaatagacacgtccaagaaccagttctccctgaagctgagctctgtgaccgctgcggacacagccgtgtattactgtgcgacagggagtgactggcattactactggggccagggaaccctggtcgccgtctcctca

SEQ ID NO: 4425 - DNA, 289 bp, Homo sapiens
  source 1..289: mol_type = other DNA
tgcagcctctggactcacctttagtagaagttggatgacctgggtccgccaggctccagggaaggggctggagtgggtggccaacataaaccctggtggagataacttgtactatgtggattctgtgaggggccgattcaccatctccagagacaacaccaagaactcactgtatctgcaaatgaacagcctgagacccgaggactcggctgtttactactgtgcgagagatcccgaccatggggccgttgactactggggccagggaaccctggtcaccgtcgcctca

SEQ ID NO: 4426 - DNA, 289 bp, Homo sapiens
  source 1..289: mol_type = other DNA
tgcagtctctggattcaccttttctacttcttggatgagctgggtccgccaggctccagggaaggggctggagtgggtggccgacatgaatccagatggaaatgcgaaagtctatgtggactctgtgaggggccgattcatcatctccagagacaacgccaagaactctctttatctacaaatgaacagcctgagagccgaggacacggctgtgtattactgtgcgagagatcccgaccacggggccgtggactactggggccaggggaccctggtcaccgtctcctca

SEQ ID NO: 4427 - DNA, 292 bp, Homo sapiens
  source 1..292: mol_type = other DNA
tgcagcctctgaattcaccttcagtagtaactggatgcactgggtccgccaagctccagggaaggggctggtgtgggtctcaggtattaaaggtgatgggagtatcagatggtacgcggactccgtgaagggccgattcaccatctccagagacaacgccaagaacacgctgtatctgcaaatgaacagtctgagagccgaggacacggctgtgtattattgtgcaagagatggagtgggacctacccccttggactactggggccagggagccctggtcaccgtctcctca

SEQ ID NO: 4428 - DNA, 292 bp, Homo sapiens
  source 1..292: mol_type = other DNA
tgcagcctctggattcaccttcagtagtaactggatgcactgggtccgccaagctccagggaaggggctggtatgggtctcacgtattaatactgatgggagtagcacaagctacgcggactccgtgaagggccgattcaccatctccagagacaacgccaagaacacactgtatttgcaaatgaacagtctgagagccgaggacacggctgtgtattactgtgcaagagatggggtgggacctaccccgcttgactactggggccagggaaccctggtcaccgtctcctca

SEQ ID NO: 4429 - DNA, 292 bp, Homo sapiens; identical to SEQ ID NO: 4428
  source 1..292: mol_type = other DNA

SEQ ID NO: 4430 - DNA, 289 bp, Homo sapiens
  source 1..289: mol_type = other DNA
tgcagtctctggattcaccttcagtgaccactacatggactgggtccgccaggctccagggaagggactggagtgggttggccgtagtagaaataaagatcatcgttacagtacagaatacgccacgtctgtgaaaggcagattcaccatctcaagagatgtttcaaggaactcaatgtatctgcaaatgaacagcctgaaaaccgaggacacggccgtctattactgtgttagaggtcataagagttttgacttctggggccagggaacactggtcaccgtctcctca

SEQ ID NO: 4431 - DNA, 289 bp, Homo sapiens
  source 1..289: mol_type = other DNA
tgtagtctctggattcaccttcagtgaccactacatggactgggtccgccaggctccagggagggggctggagtgggttggccgtagtagcgacaaagctcacagttacaccacagaatacgccgcgtctgtgaaaggcagattcgccatctcaagagatgattcgaagaactcactgtatctgcaaatgaacagcctgaataccgaggacacggccgtgtattattgtgttaggggacataagagctttgacttctggggccagggaaccctggtcaccgtctcctca

SEQ ID NO: 4432 - DNA, 289 bp, Homo sapiens; identical to SEQ ID NO: 4431
  source 1..289: mol_type = other DNA

SEQ ID NO: 4433 - DNA, 289 bp, Homo sapiens; identical to SEQ ID NO: 4431
  source 1..289: mol_type = other DNA

SEQ ID NO: 4434 - DNA, 289 bp, Homo sapiens
  source 1..289: mol_type = other DNA
tgtagtctctggattcactttcagtgaccactacatggactgggtccgccaggctccagggagggggctggagtgggttggccgtagtagcgacaaagctcacagttacaccacagaatacgccgcgtctgtgaaaggcagattcgccatctcaagagatgattcgaagaactcactgtatctgcaaatgaacagcctgaataccgaggacacggccgtgtattattgtgttaggggacataagagctttgacttctggggccagggaaccctggtcaccgtctcctca

SEQ ID NO: 4435 - DNA, 303 bp, Homo sapiens
  source 1..303: mol_type = other DNA
aagggctctggatacagctttaccagctactggatcggctgggtgcgccagatgcccgggaaaggcctggagtggatgggaatcatctgtcctggtgactctgataccagatacagcccgtccttccaaggccaggtcaccatctcagccgacaagtccatcagcaccgcctacttgcagtggagcagcctgaaggcctcggacaccgccatgtattactgtgcgagacatagtcaatattactctgataatagtggttatggggactactggggccagggaaccctggtcaccgtctcctca

SEQ ID NO: 4436 - DNA, 303 bp, Homo sapiens
  source 1..303: mol_type = other DNA
aagggctccggatacagctttaccagctactggatcggctgggtgcgccagatgcccgggaaaggcctggagtggatgggaatcatctgtcctggtgactctgataccagatacagcccgtccttccaaggccaggtcaccatctcagccgacaagtccatcagcaccgcctacttgcagtggagcagcctgaaggcctcggacaccgccatgtattactgtgcgagacatagtcaatattactctgataatagtggttatggggactactggggccagggaaccctggtcaccgtctcctca

SEQ ID NO: 4437 - DNA, 303 bp, Homo sapiens
  source 1..303: mol_type = other DNA
aagggctctggatacagctttaccagctactggatcggctgggtgcgccagatgcccgggaaaggcctggagtggatgggaatcatctgtcctggtgactctgataccagatacagcccgtccttccaagaccaggtcaccatctcagccgacaagtccatcagcaccgcctacttgcagtggagcagcctgaaggcctcggacaccgccatgtattactgtgcgagacatagtcaatattactctgataatagtggttatggggactactggggccagggaaccctggtcaccgtctcctca

SEQ ID NO: 4438 - DNA, 280 bp, Homo sapiens
  source 1..280: mol_type = other DNA
tgcagcctatggatttacctttagcagttattcaatgagttgggtccgccaggctccagggaaggggctggagtgggtggcccacatagggcaggatggaatcgctaaatactatgtggactctgtgaagggccgattcaccgtctccagagacaacgcccagaattcactgtatctgcaaatgaacaccctgagagacgaggacacggctgtatactattgtactactcgtgcctggcttgaattttggggccggggaacccgggtcagcgtctcctca

SEQ ID NO: 4439 - DNA, 280 bp, Homo sapiens
  source 1..280: mol_type = other DNA
tataggctctggatttacctttaatacctattcaatgagctgggtccgccaggctccagggaaggggctggagtgggtggcccacgtgaggcaagatgggattgagaaaaactatgcggacgctgtgaagggccgattcaccgtctccagagacaacgcccataattcactatatctgcagatgaatagcctgagagacgaggacacggctgtatattattgtactacccgtgcctggcttgaattttggggcccgggaaccctggtcaccgtctcctca

SEQ ID NO: 4440 - DNA, 280 bp, Homo sapiens
  source 1..280: mol_type = other DNA
tgcagcctctggagtcgtctttgatacctattggatgagctgggtccgccaggctccagggaaggggctggagtgggtggccaacataaaaccggatggaaatgagagaaactatgcggactctgtgaagggccgattcaccatctccagagacaacgccaagaactcactgtatctgcaaatgaacagcctgagagccgacgacacggctgtctattactgtacgacgagggcctggcttgagttctggggccagggaaccccggtcaccgtctcctca

SEQ ID NO: 4441 - DNA, 289 bp, Homo sapiens
  source 1..289: mol_type = other DNA
tgtagcgtctggaatccccttcagcttctctggcatgcactgggtccgccaggctccaggcaaggggctggagtgggtggcaatgatatggtctgacggaagtaaagaatattatgcagactccgtgaagggccgattcaccatttccagagacaattccaagaacacgatttatctgcaaatgaacagcctgagagccgacgatacggctatatattactgtgcgagagataaggggacatactattttgaccaatggggccagggaactctggtcaccgtctcctca

SEQ ID NO: 4442 - DNA, 289 bp, Homo sapiens
  source 1..289: mol_type = other DNA
tgcagcgtctggaatccccttcagcagatctggcatgcactgggtccgccaggctccaggcaaggggctggagtgggtggcaatgatatggtctgacggaagtatagaatattatgcagactccgtgaagggccgattcaccacttccagagacaattccaagaatacggcgtacctgcaaatgaacagcctgagagccgaggacacggctatgtattactgtgcgagagataaggggacctattattttgaccagtggggccagggaaccctggtcaccgtctcctca

SEQ ID NO: 4443 - DNA, 289 bp, Homo sapiens; identical to SEQ ID NO: 4441
  source 1..289: mol_type = other DNA

SEQ ID NO: 4444 - DNA, 289 bp, Homo sapiens
  source 1..289: mol_type = other DNA
tgcagcgtctggaatccccttcagttcctctggcatgcactgggtccgccaggctccaggcaaggggctggagtgggtggcatttatatggtctgatggaagtgataaatactatgtagactccgtgaagggccgattcaccatctccagagacaatttcaggaacacggtgtatctgcagatgaacagcctcagagccgaggacacggctgtctattactgtgcgagagataagggcacatactactttgaccagtggggccagggaaccctggtcaccgtctcctca

SEQ ID NO: 4445 - DNA, 289 bp, Homo sapiens
  source 1..289: mol_type = other DNA
tgcagcgtctggaatccccttcagtgcctctgggatgcactgggtccgccaacctccaggcaagggactggagtgggtgacatttatatggagcgacggaagtcagaagtactatgcagactccgtgaagggccgattcaccatctccagagacaattccaagaacatggtgtatctgcaaatggacagcctgagagacgacgacacggctctttattactgtgcgagagataaggggacttattattttgatcagtggggccagggaacacaggtcaccgtctcctca

SEQ ID NO: 4446 - DNA, 289 bp, Homo sapiens
  source 1..289: mol_type = other DNA
tgcagcgtctggaatccccttcagtgcctctggcatgcactgggtccgccaggctccaggcaaggggctggagtgggtggcacttatatggtacgatggaacttataagtattatgcagactccgtgaagggccgattcatcatctccagagacaattccaagaacacggtgtatttgcaaatgaacaccctgagagacgaggacacggctgtgtattactgtgcgagagataaggggacttattattttgaccagtggggccagggaaccctggtcaccgtctcctca

SEQ ID NO: 4447 - DNA, 289 bp, Homo sapiens
  source 1..289: mol_type = other DNA
tgcagcgtctggaatccccttcagccgctctggcatgcactgggtccgccaggctccaggcaagggactggagtgggtggcaatgatttggtctgacagaagtagagaatattatgcagactccgtgaagggccgattcaccatttccagagacaattccaagaacacggtgtatctgcaaatgaacagcctgagagccgaggacacggctgtgtattattgtgcgagagataaggggacctactattttgaccagtggggccagggaaccctggtcaccgtctcttca

SEQ ID NO: 4448 - DNA, 288 bp, Homo sapiens
  source 1..288: mol_type = other DNA
cagggttctggatacagctttaccaactactggatcggctgggtgcgccagatgcccgggaaaggcctggagtggatggggatcatctatcctggtgactctgataccagatacagtccgtccttccaaggccaggtcaccatctcagccgacaagttcatcagcaccgcctacctgcagtggagcagcctgaagccctcggacaccgccatgtattactgtgcgagacgtggagacggttcaaggttcgacccctggggccagggaaccctggtcaccgtctcctca

SEQ ID NO: 4449 - DNA, 288 bp, Homo sapiens
  source 1..288: mol_type = other DNA
aaggcttctggatacagttttaccacttattggatcggctgggtgcgccagatgcccgggaaaggcctggagtggatggggatcatctatcctggtgactctgataccagatacagcccgtccttccaaggccaggtcaccatctcagccgacaagtccatcagcaccgcctacctgcagtggagtagtctgaaggcctcggacaccgccatctattactgtgcgagacggggggacgggagtaggttcgacccctggggccagggaaccctgatcaccgtctcctca

SEQ ID NO: 4450 - DNA, 279 bp, Homo sapiens
  source 1..279: mol_type = other DNA
aagggttctggatacagttttagcagttactggatcggctgggtgcgccagatgcccgggaaaggcctggagtggatggggatcatctatcctggtgactctgaaaccagatacagcccgtccttccaaggccaggtcaccatctcagccgacaagtccatcagcaccgccttcctgcagtggagcagcctgaaggcctcggacaccgccatgtattattgtgcgagacatgatacttttgatatttggggccaagggacaatggtcaccgtctcttca

SEQ ID NO: 4451 - DNA, 279 bp, Homo sapiens
  source 1..279: mol_type = other DNA
aagggttctggatacagttttagcagctactggatcggctgggtgcgccagatgcccggaagaggcctggaatggatggggatcatctatcctggtgactctgaaaccagatacagcccgtccttccaaggccaggtcaccttctcagtcgacaagtccatcagcaccgcctacctacagtggagcagcctgaaggcctcggacagcgccatgtattactgtgcgagacacgatacttttgatatctggggtcaagggacaatggtcaccgtctcttca

SEQ ID NO: 4452 - DNA, 279 bp, Homo sapiens
  source 1..279: mol_type = other DNA
aagggttctggatacaacttcagcagttactacatcgcctgggtgcgccagatgcccgggaaaggcctggagtggatggggatcatctatcctggtgactctgataccagatacaacccgtccttccaaggccaggtcaccatctcagccgacaagtccatcagcaccgcctacctgcagtggagcagcctgaaggcctcggacaccgccatgtatttctgtgcgaggcatgatacttttgatatctggggccaagggacaatggtcaccgtctcttca

SEQ ID NO: 4453 - DNA, 286 bp, Homo sapiens
  source 1..286: mol_type = other DNA
tgcagcctctggattcgccttcaatacctatgctatgcactgggtccgcctgcctccaggcaaggggctggagtgggtggcagctatatcctatgatggccgtaataagtactacgcggactccgtgaagggccgattcaccatctcccgagacgattccaagaacacgctgtatctgcaaatgaacagcctgagagctgacgacacggctgtgtattactgtgccccctctggaagtggggactttgactattggggccagggaacccaggtcaccgtctcctca

SEQ ID NO: 4454 - DNA, 286 bp, Homo sapiens
  source 1..286: mol_type = other DNA
tgcagcctctggattcgccttcaatacctatgccatgcactgggtccgccaggctccaggcaaggggctggagtgggtgacagctatatcatatgatggccgtaataaatactacgcagactccgtgaagggccgattcgccatctcccgagacgattccaagaacacgctgtatctacaaatgaacagcctgagagttgaggacacggctgtatattactgtgccccctctggaagtggggactttgactactggggccagggaacccaggtcaccgtctcctca

SEQ ID NO: 4455 - DNA, 286 bp, Homo sapiens
  source 1..286: mol_type = other DNA
tgcagcctctggattcaccttcaatagctatgctatgcactgggtccgccagggtccaggcaaggggctggagtgggtggcagctatatcatatgatggaaataataaatactacgcagactccgtgaggggccgattcaccatctccagagacgattccaagaacacactgtatctgcaaatgaacagcctgagaaatgaggacacggctgtgtattactgtgctcctagtggctcgggggactttgactactggggccagggaaccctggtcaccgtctcctca

SEQ ID NO: 4456 - DNA, 286 bp, Homo sapiens
  source 1..286: mol_type = other DNA
tgaagcctttggattcatattcagtacctatgctatgcactgggtccgccagggtccaggcaaggggctggagtgggtggcagccatatcatatgatggaaatgataaatactacgccgactccgtgaagggccgattcaccatctccagagacgattccaagaacacactgtatctgcaaatgaacagcctgagaaatgaggacacagctgtatattactgtgctcctagtggctcgggggactttgactactggggccagggaaccctggtcaccgtctcctca

SEQ ID NO: 4457 - DNA, 280 bp, Homo sapiens
  source 1..280: mol_type = other DNA
tgcagcctctggattcaccttcagtagctactggatgttctgggtccgccaagctccagggaaggggctggtgtgggtctcacgtattagtgatgatgggagtagcacaacctacgcggactccgtgaagggccgattcaccatctccagagacaacgccaagaacacgctgtatctgcaaatgaacagtctgagagccgaggacacggctgtgtattactgtacaagagattacaatatggacgtctggggccaagggaccacggtcaccgtctcctca

SEQ ID NO: 4458 - DNA, 280 bp, Homo sapiens
  source 1..280: mol_type = other DNA
tgcagcctctggattcaccttcagtagctactggatgctctgggtccgccaagctccagggaaggggccggtgtgggtctcacatattaatactgatgggagtcgcacaagctacgcggactccgtgaagggccgattcaccatctccagagacaacgccaagaacacgctgtatctgcaaatgagcagtctgagagccgaggacacggctgtgtattactgtacaagagactacaatatggacgtctggggccaagggaccacggtcaccgtctcctca

SEQ ID NO: 4459 - DNA, 285 bp, Homo sapiens
  source 1..285: mol_type = other DNA
gcttccggatacagtttcacgagctattttgtacattggatgcgccaggcccccggacaaaacattgagtggatgggatggatcaaccctgccaaaggcgacacacgatattcacagaatttgcaggacagaatcaccatcagcagtgacacatccgcgagaacaatttatatggagttgaggagcctgagatctgaagacacggctgtctactactgtgcgaggggcccctctagtgggagctttgacttctggggccagggaaccctggtcaccgtctcctca

SEQ ID NO: 4460 - DNA, 285 bp, Homo sapiens
  source 1..285: mol_type = other DNA
gcttctggatacaccttcacgggctattatctacattggctgcgccaggcccccggacaaacccttgagtggatgggatggatcaacactaacaaaggtaacacacgctacgcacaaaacttgcaagacagagtcaccattaccagggacacgtccgcgagtacaacctatatggagttgaggagcctgagatctgaagacacggctgtctattactgtgcgaggggcccctctagtgggagctttgacttctggggccagggaaccctggtcaccgtctcctca

SEQ ID NO: 4461 - DNA, 285 bp, Homo sapiens
  source 1..285: mol_type = other DNA
gcttctggatacaccttcacgggctattatctacattggctgcgccaggcccccggacaaacccttgagtggatgggatggatcaacactgacaaaggtaacacacgctacgcacaaaacttgcaagacagagtcaccattaccagggacacgtccgcgagtacaacctatatggagttgaggagcctgagatctgaagacacggctgtctattactgtgcgaggggcccctctagtgggagctttgacttctggggccagggaaccctggtcaccgtctcctca

SEQ ID NO: 4462 - DNA, 285 bp, Homo sapiens
  source 1..285: mol_type = other DNA
gcttctggatacaccttcactaagtatactatgcattggctgcgccaggcccccggacaaacgcttgagtggatggggtggatcaaccctgccaatggtaacacaaaatattcacagagcttccagggcagagtcaccaataccagggacacatccgcgagcacattgtacatggaactgagcagcctgagctctgaagacacggctgtgtattactgtgcgagggggcccagcagtggctcctttgacttctggggccagggaaccctggtcaccgtctcctca

SEQ ID NO: 4463 - DNA, 285 bp, Homo sapiens
  source 1..285: mol_type = other DNA
gcttctggatacaccttcacgaactattatctgcattggatgcgccaggcccccggacaaagccttgagtggctgggatggatcaaccctgacaaaggtaacacacggtgttcacagagcctgcaggacagagtcaccattaccagtgacacaatcgcgagtacaacctatatggagttgaggagcctgacatctgaagacacggctgtctattactgtgcgaggggcccctcaagtgggagctttgacttctggggccaggggaccctggtcaccgtgtcgtca

SEQ ID NO: 4464 - DNA, 286 bp, Homo sapiens
  source 1..286: mol_type = other DNA
ggcttctggatacagtttcacgaactattttctacattggatgcgccaggcccccggacaaagccctgagtggatcggatggatcaacactgacaaaggtaacacacggtattcacagaacttacaagacagagtcactattaccagggacacatccgcgagcacaacgtatatggagttgagcagcctgagatctgaagacacggctgtctattactgtgcgaggggcccctctagtgggagctttgacttctggggccagggaaccctggtcaccgtctcctca

SEQ ID NO: 4465 - DNA, 315 bp, Homo sapiens
  source 1..315: mol_type = other DNA
acacagaccctcacactgacctgcaccttctctgggttctcactcagcactagtgaaatatgtgtgagctggatccgtcagcccccagggaaggccccggagtggcttgcacgcattgattgggatgatgataaatcttatagcacatctctgaagaccaggctcaccatctccaaggacacctccaaaaaccaggtggtccttacaatgaccaacatggaccctgtggacacagccacatattactgtgcacggacaccgcaccgacgtgaatttgactactggggcaagggaaccctggtcaccgtctcctca

SEQ ID NO: 4466 - DNA, 315 bp, Homo sapiens
  source 1..315: mol_type = other DNA
acacagaccctcacactgacctgcaccttctctgggttctcactcaccactagtggactgtgtgtgagctggatccgtcagcccccagggaaggccctggagtggcttgcactcattgattgggatggtgataaattctacaacacatctctgaagaccaggctcaccatctccagggacacctccaaaaaccaggtggtccttacaatgaccaacatgggccctgtggacacagccacgtattactgtgcacgaacaccccatcggagggaatttgactattggggccagggaaccctggtcaccgtctcctca

SEQ ID NO: 4467 - DNA, 315 bp, Homo sapiens; identical to SEQ ID NO: 4466
  source 1..315: mol_type = other DNA

SEQ ID NO: 4468 - DNA, 298 bp, Homo sapiens
  source 1..298: mol_type = other DNA
tgcagcctctggattcaccttcagtagctatactatgcactgggtccgccaggctccaggcaaggggctggagtgggtggcagttatatcatatgatggaagtaataaatactacgcagactccgtgaagggccgattcaccatctccagagacaattccaagaacacgctgtatctgcaaatgaacttcctgagagctggggacacggctgtgtattactgtgcgtcccccgggggcagtggctggtcccgtccctttgactactggggccagggaaccctggtcaccgtctcctca

SEQ ID NO: 4469 - DNA, 298 bp, Homo sapiens
  source 1..298: mol_type = other DNA
tgcagcctctggattcaccttcagtagctataccatgcactgggtccgccaggctccaggcagggggccggagtgggtggcagttatgtcatatgatgggagtagaaaatattacgcagactccgtgcagggccgattcaccatctccagggacaattccaagaacacgctgtacctgcaaatgaacaacctgagagctgaggacacggctctctattactgtgcgagccctggtggtagtggctggtcccgaccctttgactactggggccagggaaccctggtcaccgtctcctca

SEQ ID NO: 4470 - DNA, 298 bp, Homo sapiens
  source 1..298: mol_type = other DNA
tgcagcctctggattcaccttcagtagctatactatgcactgggtccgccaggctccaggcagggggccggagtgggtggcagttatgtcatatgatgggagtagaaaatattacgcagactccgtgcagggccgattcaccatctccagggacaattccaagaacacgctgtacctgcaaatgaacaacctgagagctgaggacacggctctctattactgtgcgagccctggtggtagtggctggtcccgaccctttgactactggggccagggaaccctggtcaccgtctcctca

SEQ ID NO: 4471 - DNA, 289 bp, Homo sapiens
  source 1..289: mol_type = other DNA
tgcagcctctggattcaccttcagtagttatgaaatgaactgggtccgccaggctccagggaaggggctggagtggatttcatacattagttatagtggtagtcccaaatactatgcagactctgtgaagggccgattcaccatttccagagacaacgccaagaactcactgtatctgcaaatgaacagcctgagagacgaggacacggctatttattactgtgcgagtcagggccgagcggctcgtcctggctactggggccagggaaccctggtcaccgtctcctca

SEQ ID NO: 4472 - DNA, 289 bp, Homo sapiens
  source 1..289: mol_type = other DNA
tgcagcctctggattcactttcactaattatgaaatgaactgggtccgccaggctccagggaaggggctggagtgggtttcatacattagtagtagtggtagttccatatactacgcagactctgtgaagggccgattcaccatctccagagacaacgccaagaattcattgtatctgcaaatgaacagcctgagagtcgaggacacggctgtttattactgtgcgagtcaggggcgagcagctcgtcccggctactggggccagggaacactggtcaccgtctcctca

SEQ ID NO: 4473 - DNA, 304 bp, Homo sapiens
  source 1..304: mol_type = other DNA
tgcagcctctggattcgccttcagtgactactacatgacctggatccgccaggctccagggaaggaactggagtgggtttcatacattactaggagtggtgataccgtgttctacacagactctgtgaagggccgattcaccatctccagggacaacgccaagaactcactgtatctggaaatgaacagcctgagagccgacgacacggccgtgtatcgctgtgcgagagataagggaaacggtgggaggacgcccgatgcctttgatctctggggccaagggacaatggtcaccgtctcttca

SEQ ID NO: 4474 - DNA, 298 bp, Homo sapiens
  source 1..298: mol_type = other DNA
tgcagcctctggattcaccttcaggcaccaccacatgacctgggtccgcctggctccagggaaagggctggagtgggttgcgcacatcactgagagttccacatattacctggactctctgaagggtcgattcaccatctccagggacaacgccaagaactcactgtatctacaactgaacagcctgagagtcgacgacacggcagtctatttttgtgcgagagataaggggaacggtggcagaaccccagatgcttttgatctctggggccgagggacagcggtcaccgtctcttca

SEQ ID NO: 4475 - DNA, 298 bp, Homo sapiens
  source 1..298: mol_type = other DNA
tgcagcctctggattcaccttcaggcgtcaccacatgacctgggtccgcctggctccagggaaagggctggagtgggttgcgcacatcactgacagttccacatattacctggactctgtgaagggtcgattcaccatctccagggacgacgccaagagttcattgtatctacaactgaacagcctgagagtcgacgacacggcagtctatttttgtgcgagagataaggggaacggtggcagaaccccagatgcttttgatctctggggccgagggacagcggtcaccgtctcttca

SEQ ID NO: 4476 - DNA, 280 bp, Homo sapiens
  source 1..280: mol_type = other DNA
tgcagcctctggattcagctttactacttattggatgatctgggtccgacaggctccagggaaggggctggagtgggtggccagcataaagcaggaaggaattgtgcaaaactttgtggactctgtgaagggccgattcaccatgtccagagacaatgacaggaattcagtgtctcttcaaatgaacagcctgagagtcgacgacacggctgtgtattactgtgcgagagggaatccggctgactactggggccagggaaccctggtcatcgtctcctca

SEQ ID NO: 4477 - DNA, 280 bp, Homo sapiens
  source 1..280: mol_type = other DNA
tgcagcctctggatttacttttactgactattggatgatctgggtccgccaggctccagggaagggtctggagtgggtggccagcataaagcaggatggaagtgagaagtcgtatgtggactctgtgaagggccgactcaccatctccagagacaactccaaaaactcagtgtatttgcaattgaacagcctgagagccgaggacacggctgtgttttactgtgcgagaggtaacccggctgactactggggccagggaaccctggtcaccgtctcatca

SEQ ID NO: 4478 - DNA, 280 bp, Homo sapiens
  source 1..280: mol_type = other DNA
tgcagcctctggatttacttttactgactattggatgatctgggtccgccaggctccagggaagggtctggagtgggtggccagcataaagcaggatggaagtgagaagtcgtatgtggactctgtgaagggccgactcaccatctccagagacaactccaaaaactcagtgtatctgcaaatgaacagcctgagagccgaggacacggctgtgttttactgtgcgagaggtaacccggctgactactggggccagggaaccctggtcaccgtctcatca

SEQ ID NO: 4479 - DNA, 298 bp, Homo sapiens
  source 1..298: mol_type = other DNA
tgtagcctctggattcatgtttagcaactatggcatgagctgggtccgccaggctccagggaaggggctggagtgggtctcaggttttaagggtacttatggtaccacatcctacgcagagtccgtgaagggccggttcaccatttccagagacaattccaggaacacgctgtatctgcagatgaacagcctgagagccgacgacacggccgtgtattattgtgcgaaaggaccttactttggttcgggtcgcggtatggacgtctggggccaagggaccacggtcaccgtctcctca

SEQ ID NO: 4480 - DNA, 298 bp, Homo sapiens
  source 1..298: mol_type = other DNA
tgcagcctctggattcacctttagtagctttgccatgagctgggtccgccaggctccagggaaggggctggagtgggtctcaattattaatagcgttggtagtggcacattctatgcagactccgtgaagggccggttcaccatctccagagatgattccaagaacacgctatatctgcaaatgaacagcctgagagccgaggacacggccgtatattactgtgcgaaagggccttactttggctcgggacgcggtatggacgtctggggccaagggaccacggtcaccgtctcctca

SEQ ID NO: 4481 - DNA, 286 bp, Homo sapiens
  source 1..286: mol_type = other DNA
cagtgtcgctggtggctccatcagcagtgactactggatgtggatccggcagcccccagggaagggactggagtggattggctatgtttattacagtgggaataccaactaccacccctccctcaggagtcgagtcagcatttcagtggacaggtccaagaaccagttctccctaagcctgcactctgtgaccgccgcagacacggccgtgtattattgtgcgagacagatctccccctatggattggacgtctggggccaggggaccacggtcatcgtctcccca

SEQ ID NO: 4482 - DNA, 286 bp, Homo sapiens
  source 1..286: mol_type = other DNA
cagtgtcagtagtggctcaatcagaggagactattggatgtggatccggcaggccccagggaagggactggaatgggttggctacatctaccacaatggggccaccttctacagcccctcccttaggggtcgactcaccatgtccataggcgcgtccaggaaccacttcgccctgacactcacgtctgtgaccgtcgcagacacggccacatatttttgtgcgagacagatttcgccctatggtttggacgtctggggcccagggaccacagtcaccgtcctctca

SEQ ID NO: 4483 - DNA, 286 bp, Homo sapiens
  source 1..286: mol_type = other DNA
cagtgtttctggcggttccatgagtcgggactactggatgtggattcgacagtcccccgggaagggattggagtggatcggatacatatattatagcgggaccaccaactacgccccctccctcaggagccgagtcaccatgttcttggacacgtctaagagtcggttctcccttcagctgaagtctgtgaccgccgctgacacaggcgtctattactgtgcgaggcaaatttctccatatggtctggacgtctggggccccggggccacagtctccgtctactca

SEQ ID NO: 4484 - DNA, 286 bp, Homo sapiens
  source 1..286: mol_type = other DNA
cagtgtctccggtggctccatcactcgtgactattggatgtggatccggcagaccccagggaagggactggagtggattggctatatgtatcacaatgggggtaccttttacagtccctctctcaggagtcgagtctccatctcaaaagagacgtccaacaaccagttctccctgaagttgacttctgtgaccgtcgcagacacggccgtctactactgtgcgagacagatatccccttatggtctggacgtctggggccaggggaccacggtcatcgtctcccca

SEQ ID NO: 4485 - DNA, 286 bp, Homo sapiens
  source 1..286: mol_type = other DNA
cagtgtctccggtggctccatgaatcgtgactattggatgtggatccggcagaccccagagaagggactggagtggattggctatatgtatcacaatgggggtaccttttacagtccctctctcaggagtcgagtctccttctcaaaagagacgtccaacaaccaattctccctgaagttgacttctgtgaccgtcgcagacacggccgtctactactgtgcgagacagatatcaccttatggtctggacgtctggggccaggggaccacggtcatcgtctcccca

SEQ ID NO: 4486 - DNA, 283 bp, Homo sapiens
  source 1..283: mol_type = other DNA
tgcagcctctgaattcagctttaacaactatggcatgatctgggtccgccaggttccagggaagggactggagtgggtctccgctattactaaaactagtggtaccacatactacgcagactccgtgcagggccgattcaccatctccagagacaattccaagaacacgatgtttctgcaaatgaacagcctgagagccgaggacacggccgtatattactgtgcgagaggactatggggaatggacgtctggggcccggggaccacggtcaccgtctcctca

SEQ ID NO: 4487 - DNA, 283 bp, Homo sapiens
  source 1..283: mol_type = other DNA
tgcagcctctgaattcagctttgacaactatggcatgatctgggtccgccaggttccagggaagggactggagtgggtctccgctattactaaaactagtggtaccacatactacgcagactccgtgcagggccgattcaccatctccagagacaattccaagaacacgatgtttctgcaaatgaacagcctgagagccgaggacacggccgtatattactgtgcgagaggactatggggaatggacgtctggggcccggggaccacggtcaccgtctcctca

SEQ ID NO: 4488 - DNA, 283 bp, Homo sapiens
  source 1..283: mol_type = other DNA
tgcagcctctggattcacctttagcgactttggcatgacctgggtccgccaggctccagggaaggggctggagtgggtctcaggtattagtcgtgatggtgaaaggacattctatgcagactccgtgaggggccggttcaccatctccagagacaactccaagaagacaatgtttctgcaactcaacagcctgagagccgaggacacggccgtatatttctgtgcgcgaggactatggggcatggacgtctggggccaagggaccacggtcagcgtctcctca

SEQ ID NO: 4489 - DNA, 283 bp, Homo sapiens; identical to SEQ ID NO: 4488
  source 1..283: mol_type = other DNA

SEQ ID NO: 4490 - DNA, 283 bp, Homo sapiens
  source 1..283: mol_type = other DNA
tgtagcctctggattcacgtttagcgactatggcatgacctgggtccgccaggctccagggaaggggctggagtgggtctcaggtattagtcgtgatggtgaaaggacatactatgcagactccgtgaggggccggttcaccatctccagagacaattccaagaagacaatatttgtgcaactcaacagcctgagagtcgaggacacggccgtatatttctgtgcgcgaggactatggggcatggacgtctggggccaagggaccacggtcagcgtctcctca

SEQ ID NO: 4491 - DNA, 283 bp, Homo sapiens
  source 1..283: mol_type = other DNA
tgcagcctcagatttcagctttcacaactatggcatgatctgggtccgccaggttccagggaagggactggagtgggtctccgctattactaaaaccagtgataccacatactacgcagcctccgtgcagggccgattcaccatctccagagacaattcccagaatacgatgtttctgcaaatgaacagtctgagagtcgaggacacggccgtatattactgtgcgagaggactctggggaatggacgtctggggcccggggaccacggtcatcgtctcctca

SEQ ID NO: 4492 - DNA, 292 bp, Homo sapiens
  source 1..292: mol_type = other DNA
tgtcgcctctggattcgcactcagtgactctcatatgcactgggtccgccaggctcccgggaaagggctggagtgggtcggccacacaagaagcagacctgacccttacgcgatagcatatggtgggtcggtacaaggcaggttcaccatctccagagatgattcgcagaacacggtctatctgcaaatgaacagtctgaaagccgaggacacagccgtgtatttctgtactcgacagaccatcagttgccatgactactggggccagggaaccctggtcaccgtctccaca

SEQ ID NO: 4493 - DNA, 292 bp, Homo sapiens
  source 1..292: mol_type = other DNA
tgcagcctctgggttcaccttcagtgactctcgtatacactgggtccgccaggctgccgggaaagggctggagtgggttggccgtattgaaaataaaggtagaagttacgcgacaacatatggtgcgtcggtggaaggcaggttcaccatctccagagatgatttaaagaacacggcgtatctgcaaatgaacagcctgaaaagcgaggacacggccgtgtatttttgtactagacaaaccatcagctgccatgactactggggccagggaaccctggtcaccgtctcctca

SEQ ID NO: 4494 - DNA, 292 bp, Homo sapiens
  source 1..292: mol_type = other DNA
tgtcgcctctggattcacactcagtgactctcatatgcactgggtccgccaggcttccgggaaaggcctggagtgggtcggccacgtaagaaacagagctgacagttacgcgacagcatatggtgcgtcggtgcgaggccggttcaccatctccagagatgaatcgcacaatacggtctatctgcaaatgaacagtctgaaagccgaggactcaggcatgtatttttgtactcgacagaccatcagctgccatgactactggggcctgggaacccgggtcaccgtctccgca

SEQ ID NO: 4495 - DNA, 292 bp, Homo sapiens
  source 1..292: mol_type = other DNA
tgtcgcctctggattcacactcagtgactctcatatgcactgggtccgccaggcttccgggaaagggctggagtgggtcggccacgcaagaagcagaactgacaattacgcgacagcatatggtgcgtcggtgcaaggcaggttcaccatctccagagatgaatcgcagaatacggtctatctgcaaatgaacagtctgaaagccgaggacacagccgtgtatttttgtactcgacagaccatcagctgccatgactactggggccagggaaccctggtcaccgtctccgca

SEQ ID NO: 4496 - DNA, 292 bp, Homo sapiens
  source 1..292: mol_type = other DNA
tgtcgcctctggattcgcactcagtgactctcatatgcactgggtccgccaggctcccgggaaagggctggagtgggtcggccacacaagaagcagacctgacccttacgcgatagcatatggtgggtcggtgcaaggcaggttcatcatctccagagatgactcgcagaacacggtctatctgcaaatgaacagtctgaaagccgaggacacagccgtctacttctgtactcgacagaccatcagctgccatgactactggggccaggggaccctggtcaccgtctccaca

SEQ ID NO: 4497 - DNA, 292 bp, Homo sapiens; identical to SEQ ID NO: 4492
  source 1..292: mol_type = other DNA

SEQ ID NO: 4498 - DNA, 277 bp, Homo sapiens
  source 1..277: mol_type = other DNA
tgcagcctctggattcacctttagtggcttttcgatgagctgggtccgccaggctccagggaaggggctggagtgggtggccaagataaagtcagatggaagtgacaaatactatgtggactctgtgaagggccgattcaccatctccagagacaacgccaagaactcactgtatctgcaaatgaacagcctgagagtcgaggactcggctgtgtattactgtgcgagagggcacctcgccgtctggggccggggaaccctggtcaccgtttcctca

SEQ ID NO: 4499 - DNA, 277 bp, Homo sapiens
  source 1..277: mol_type = other DNA
tgcagcctctggattcacctttagtaactattggatgagctgggtccgccaggctccagggaaggggctggagtgggtggccaacataaaggaagatggaagtgaggaatattatgtggactctgtgaagggccgattcaccatctccagagacaacgccaagaactcactgtatctgcaaatgaacagcctgagagccgaggacacggctgtgtattactgtgcgagagggcacttagcagtggggggccagggaaccctggtcaccgtctcctca

SEQ ID NO: 4500 - DNA, 277 bp, Homo sapiens
  source 1..277: mol_type = other DNA
tgcagcctctggattcacctttagtaactattggatgagctgggtccgccaggctccagggaaggggctggagtgggtggccaacataaaggaagatggaagtgaggaatattatgtggactctgtgaagggccgattcaccatctccagagacaacgccaagaactcactgtacctacaaatgaacagcctgagagccgaggacacggctgtgtactactgtgcgagagggcacttagcagtggggggccagggaaccctggtcaccgtctcctcg

SEQ ID NO: 4501 - DNA, 289 bp, Homo sapiens
  source 1..289: mol_type = other DNA
cactgtctctggtggctccatcagtaattactactggagctggatccggcagtctccagggaagggactggagtggattgggtatatcaagtacagtgggaccaccaactacaacccctccctcaagagtcgagtcaccatatcactagacacgtccaagggccacttctccctaaacctgagctctgtgaccgctgcggatacggccgtgtactactgtgcaagaaatgtgggggggctgagggcttttgatatctggggccaagggacattggtcaccgtctcttca

SEQ ID NO: 4502 - DNA, 289 bp, Homo sapiens
  source 1..289: mol_type = other DNA
cactgtctctggtggctccatcagtagttactactggagctggatccggcagcccccagggaagggactggagtggattggctatatctatcacagcgggagcaccaactacaacccctcactcaagagtcgactcaccatatcagtggacacgtccaagaaccagttctccctgaagttgagctctatgaccgctgcggacacggccgtgtatttctgtgcgaggaacgtcggagggctccgagcttttgatatctggggccaggggacaatggtcaccgtctcttca

SEQ ID NO: 4503 - DNA, 286 bp, Homo sapiens
  source 1..286: mol_type = other DNA
cgctgtctctggtgactccatcagcagaaataactggtggagttgggtccgccagcccccagggaaggggctggagtggattggggaattccatcatactgggagcaccaactacaacccgtccctcaagagtcgagtcaccatatcagtagacaagtccaagaaccagttctccctgaagctgaattttgtgaccgccgcggacacggccgtgtattactgtgcgagacactttgactatagctttgactactggggccagggaaccctggtcaccgtctcctca

SEQ ID NO: 4504 - DNA, 286 bp, Homo sapiens
  source 1..286: mol_type = other DNA
cgtagtctctggtgcctccatcagcagtaataactggtggagttgggtccgccagcccccagggaaggggctggagtggattggcgagatctatcatgctgggatcaccaactccaacccgtccctcaggagtcgagtcgccatatcaatggacacgtccaagaacctgttctccctgaccctgacctctgtgaccgccgcggacacggccctgtattactgtgcgagacactttgattactcctttgactactggggccagggaatcttggtcaccgtctcctca

SEQ ID NO: 4505 - DNA, 291 bp, Homo sapiens
  source 1..291: mol_type = other DNA
aagggttctggatacagcttttccagccactggatcggctgggtgcgccagatgcccgggaaaggcctggagtggatggggatcatcaatcctgttgactctgataccagatatagtccgtccttccaaggccaggtcaccatgtcagccgacaagtccatcaataccgcctacctgcagtggagcagcctgaaggcctcggacaccgccatgttttactgtgcgagacaaggaggcggagcagtgtcacttgactattggggccagggaaccctggtcaccgtctctcca

SEQ ID NO: 4506 - DNA, 291 bp, Homo sapiens
  source 1..291: mol_type = other DNA
caggtttctggatacagctttaccagtcactggatcgcctgggtgcgccagatgcccgggaaaggcctggagtggatggggattatcaatcctattgactctgacaccagatacagcccgtccttccgaggccaggtcaccctctcagtcgacaagtccatcagcaccgcctacctgcagtggagcagcctgaaggcctcggacaccgccatgttttactgtgcgagacaaggaggcggagcagtgtcacttgactactggggccagggaaccctggtcaccgtctcctca

SEQ ID NO: 4507 - DNA, 291 bp, Homo sapiens
  source 1..291: mol_type = other DNA
aagggttctggatacagctttaccagctactggatcggctgggtgcgccagatgcccgggaaaggcctggagtggatggggatcatcaatcctggtgactctgatactagatacagcccgtccttccaaggccaggtcaccatctcagtcgacaagtccagcagtaccgcctacctgcagtggagcagcctgaaggcctcggacaccggcatgtattactgtgcgaggcagggtgggggagccgtgagtcttgactactggggccagggaattctggtcaccgtctcctca

SEQ ID NO: 4508 - DNA, 295 bp, Homo sapiens
  source 1..295: mol_type = other DNA
tataacttctggattcaactttggcgattatgctataagctgggtccgccaggctccagggaaggggctggagtgggtcggtttcattagaaccagagcttatggtgggacgacaaaatacgccgcgtctgtgatcgacagattcaccatctcaagagatgattccaaaagcagtgcctatctgcaaatgaacagcctgaaaaccgaggacacagccgtgtattactgtactagagtgtttagttggggggcctctgactactggggccagggaacgctggtcaccgtctcctca

SEQ ID NO: 4509 - DNA, 295 bp, Homo sapiens
  source 1..295: mol_type = other DNA
tataacctctggattcacctttggtgattatgctgtgagctgggtccgccaggctccagggaaggggctggagtgggtcggtttcattagaaccagaccttatggtgggacgacacaatacgccgcgtctgtgatcggcagattcaccatctcaagagatgattccaaaagcagtgcctatctgcaaatgaacagcctgaaaaccgaggacacagccgtgtattactgtactagagtgtttagttggggggcctctgactactggggccagggaaccctggtcaccgtctcctca

SEQ ID NO: 4510 - DNA, 295 bp, Homo sapiens
  source 1..295: mol_type = other DNA
tgcggcctctggattcacctttggtgactatgctatgagctgggtccgccaggctccagggaaggggctggagtgggtaggtttcattagaaccaatggttatggtgggacaacacactacgccgcctctgtgaacggcagattcaccatctcaagagatgattccaaaagcatcgtctatcttcaaatgaacagcctgaaacccgaggacacagccgtgtattactgtactagagttttcagctggggtgccagtgactactggggccagggaaacctggtctccgtctcctca

SEQ ID NO: 4511 - DNA, 292 bp, Homo sapiens
  source 1..292: mol_type = other DNA
cactgtctctggtgggtccatgagtggttactactggagctggatccggcagcccccagggaagggactggagtggatggggtttatctattatagtggaaacaccaacaccaacccctccctcgggagtcgagtcaccatgtcagcagacatgtccaagaaccagttctccctgaagctgaactctgtgaccgccgcagacacggccgtgtattactgtgcgaggtttagcagtggctggtggggctactttgactactggggccagggaaccctggtcaccgtctcctca

SEQ ID NO: 4512 - DNA, 292 bp, Homo sapiens
  source 1..292: mol_type = other DNA
cactgtctctggtggctccatcagtggttactactggagctggatccggcagccccccgggaagggactggagtggattggttatatctattacagcgggagcaccaactacaacccctccctcaagagtggagtcaccatatcagtagacgcgtccaagagtcagatctccctgaagctgagctctgtgaccgccgtagacacggccgtgtattactgtgcgagatttagcagtggctggtggggctactttgactactggggccggggagccctggtcaccgtctcctcc

SEQ ID NO: 4513 - DNA, 295 bp, Homo sapiens
  source 1..295: mol_type = other DNA
tgcaacgtccggattcactttcaatagcgtctggatgagctgggtccgccaggctccagggaaggggctggagttcgttggccgtattaaaaaggaagttgatggtgggccaacaaactacgctgcgcccgtgaaaggcagattcaccatctcaagagatgattcgagaaacacgctgtttctacaaatgaacagcctgaaaaccgacgacacagccatttattattgtgtggcggggttgggaaaaagtgaccttgattcctggggccagggaaccctggtcaccgtgtcctca

SEQ ID NO: 4514 - DNA, 295 bp, Homo sapiens
  source 1..295: mol_type = other DNA
tgcaacgtccggattcactttcaatagcgtctggatgagctgggtccgccaggctccagggaaggggctggagttcgttggccgtattaaaaaggaaattgatggtgggccaacaaactacgctgcgcccgtgaaaggcagattcaccatctcaagagatgattcgagaaacacgctgtttctacaaatgaacagcctgaaaaccgacgacacagccatttattattgtgtcgcggggttgggaaaaagtgaccttgattcctggggccagggaaccctggtcaccgtgtcctca

SEQ ID NO: 4515 - DNA, 295 bp, Homo sapiens
  source 1..295: mol_type = other DNA
tgcaacttctggattcactttcagtaacgcctggatgagctgggtccgccaggttccagggaaggggctggagtggcttggccgtataaaaagaaaaagtgatggggagacaatacactatgctgcacccgtgaaaggcagattcaccatctcaagagatgactcaacaaacacgttgtatctgcaaatgaacagcctgaaaaccgaggacagagccgtgtattactgtgtcgcaggtttagggaaatcggaccttgactcctggggccagggaaccctggtcatcgtctcctca

SEQ ID NO: 4516 - DNA, 295 bp, Homo sapiens
  source 1..295: mol_type = other DNA
tgcaacgtccggattcactttcaataacgtctggatgagctgggtccgccaggctccagggaaggggctggagttcgttggccgtattaaaaaggaaattgatggtgggccaacagactacgctgcgcccgtgaaaggcagattcaccatctcaagagatgattcgagaaacacgctgtttctacaaatgaacagcctgaaaaccgacgacacagccatttattattgtgtcgcggggttgggaaaaagtgaccttgactcctggggccagggaaccctggtcaccgtgtcctca

SEQ ID NO: 4517 - DNA, 310 bp, Homo sapiens
  source 1..310: mol_type = other DNA
tgcagcctctggattcacctttagtagctatgccatgagctgggtccgccaggctccaggggaggggctggagtgggtctcagctattagtggtagtgatggtggcacaaattacgcagattccgtgaagggccgcttcaccatctccagagacaattccaagaacacgctgtatctgcaaatgaacagcctgagagccgaggacacggccgtatatcactgtggaaaagccacgcattgtagtagtatcagctgttcgagggggtggttcgacccctggggccagggcaccctggtcatcgtctcctca

SEQ ID NO: 4518 - DNA, 310 bp, Homo sapiens
  source 1..310: mol_type = other DNA
tacagcctctggattcacctttagtagttatgccatgagctgggtccgccaggctccaggggaggggctggagtgggtctcagctattagtggtagtgatggcggcacaaattacgcagattccgtgaagggccgcttcaccatctccagagacaattccaagaacacgctgtatctgcaaatgaacagcctgagagccgaggacacggccgtatatcactgtggaaaagccacgcattgtagtagtatcagctgttcgagggggtggttcgacccctggggccagggcaccctggtcatcgtctcctca

SEQ ID NO: 4519 - DNA, 310 bp, Homo sapiens
  source 1..310: mol_type = other DNA
tgcagcctctggattcacctttagtagctatgccatgagctgggtccgccaggctccaggggaggggctggagtgggtctcagctatgagtggtagtgatggtggcacaagttacgcagattccgtgaagggccgcttcaccatctccagagacaattccaagaacacgctgtatctgcaaatgaacagcctgagagccgaggacacggccgtatatcactgtggaaaagccacgcattgtagtagtatcagctgttcgagggggtggttcgacccctggggccagggcaccctggtcatcgtctcctca

SEQ ID NO: 4520 - DNA, 310 bp, Homo sapiens
  source 1..310: mol_type = other DNA
tgcagcctctggattcacctttagtagctatgccatgagctgggtccgccaggctccaggggaggggctggagtgggtctcagctattagtggtagtgatggtggcacaaattacgcagattccgtgaagggccgcttcaccatctccagagacaattccaagaacacgctgtatctgcaaatgaacagcctgagagccgaggacacggccgtatatcactgtgggaaagccacgcattgtagtagtatcagctgttcgagggggtggttcgacccctggggccagggcaccctggtcatcgtctcctca

SEQ ID NO: 4521 - DNA, 310 bp, Homo sapiens
  source 1..310: mol_type = other DNA
tgcagcctctggattcacctttagcaactatgccatgagctgggtccgccaggctccagggaaggggctggagtgggtctcagttattagcggtagtggtgatagtacatactacgcagactccgtgaagggccggttcgccatctccagagacaattccaagaacacactgtatctgcaaatgaacagcctgaaggccgaggacacggccatgtattactgtgggaaagccacacattgtagtagtatcagttgctccaggggttggttcgacccctggggcccgggaaccctggtcaccgtctcctca

SEQ ID NO: 4522 - DNA, 310 bp, Homo sapiens
  source 1..310: mol_type = other DNA
tgcagcctctggattcacctttagcagctatgccatgagctgggtccgccaggctccaggggaggggctggagtgggtctcagctattagtggtagtgatggtggcacaaactacgcagattccgtgaagggccgcttcaccatctccagagacaattccaagaacacgctgtatctgcaaatgaacagcctgagagccgaggacacggccgtatatcactgtgggaaagccacgcattgtagtagtatcagctgttcgagggggtggttcgacccctggggccagggcaccctggtcatcgtctcctca

SEQ ID NO: 4523 - DNA, 274 bp, Homo sapiens
  source 1..274: mol_type = other DNA
ctctgtctcgggtgcctccgtctataataattactggagttgggcccggcagtccccagggaagggactggagtggattggctacatccatcacactgggaccaccaactccaacgccgccctcaagagtcgggtcaccctgtcaatggacccgtccaagaatcagttcttcctgagtctgacttatgtgaccgctgcggacacggccgtgtattactgtgcgagagagacttttgagatctggggccaagggatattggtcaccgtctcttca

SEQ ID NO: 4524 - DNA, 274 bp, Homo sapiens
  source 1..274: mol_type = other DNA
cactgtctcgggagcctccgtcactactaactactggagctgggtccggcagcccccagggaaggggctacagtggattggctacatacattacaatggggacaccaattacagtccctccctcaagggtcgagtctccttttcactagacgcgtctaggaaccaattctccctgaggctgaactctatgaccgctgcggacacggccatttattactgtgcgagagagacttttgagatctggggccaaggaattatggtcgacgtctcttca

SEQ ID NO: 4525 - DNA, 274 bp, Homo sapiens
  source 1..274: mol_type = other DNA
cactgtctctggtggctccatcagtagtaactactggagctgggtccggcagcccccagggaagggactggagtggattgggtatatccatgacagtgggaccaccaattacaacccctccctgaagagtcgagtcgccatgacaatggacacatccaacaaccagttctccctgatattgacctctgtgaccgctgcggacacggccgtgtattactgtgccagagagacttttgagatctggggccaagggacaatggtcaccgtctcttca

SEQ ID NO: 4526 - DNA, 274 bp, Homo sapiens
  source 1..274: mol_type = other DNA
ctcagtctctggattgttctttagtagcaattggatggactgggtccgccaggctccagggaaggggctggagtgggtggccaacataaagccagatggaagtgagaaatactatgtggactctgtgaagggccgattcaccatctccagagacaacgccaaggactcactgtatctccaaatcaacagcctgagagccgaggacacggctgtgtattactgttcgccctccttaaactactggggccagggagtcctggtcaccgtctcctca

SEQ ID NO: 4527 - DNA, 274 bp, Homo sapiens
  source 1..274: mol_type = other DNA
ctcagtctctggattgttctttagtagcaattggatggactgggtccgccaggctccagggaaggggctggagtgggtggccaacataaagccagatggaagtgagaaatactatgtggactctgtgaagggccggttcaccatctccagagacaacaccaaggactcactgtatctccaaatcaacagcctgagagccgaggacacggctgtgtattactgttcgccctccttaaactactggggccagggaatcctggtcaccgtctcctca

SEQ ID NO: 4528 - DNA, 274 bp, Homo sapiens
  source 1..274: mol_type = other DNA
tgtagtctctggactgagctttagtgaccaatggatggactgggtccgccaggctccagggaagggtctggagtgggtggccaacataaaccaggatggaagtgacgaacactatgtggactctgtgaagggccgattcaccatctccagagacaacgccaagaactcagtgtttctgcaaataaacaccctgagaggcgacgacacggccgtgtattactgttcgccatcgcttaattactggggccagggaaccccggtcaccgtctcctca

SEQ ID NO: 4529 - DNA, 274 bp, Homo sapiens
  source 1..274: mol_type = other DNA
tgcagtctctggattgagctttcgtgagcaatggatggactgggtccgccaggctccagggaagggtctggagtgggtggccaacataaacaaagatgggagtgtcagtcactatgtggactctgtgaggggccgattccgcatctccagagacaacgccaagaactcagtgtttctggaaataaacaccctgagaggcgaggacacggccgtgtattactgttcgccatcgctaaactactggggccagggaaccctggtcaccgtctcctca

SEQ ID NO: 4530 - DNA, 274 bp, Homo sapiens
  source 1..274: mol_type = other DNA
tgcagcctccggattgtcctttagggacaattggatggactgggtccgccaggctccagggaagggtctggagtgggtggccaacataaatccaggtggaagtgacaaaaactatgtggactctgtgaagggacgattcatcatctccagagacaacgccaagaactcagtgtttctgcaaatggacagcctgagacgcgaggacacggccatgtatttctgttcgccatcgcttaactactggggccagggaatcctggtcaccgtctcctca

SEQ ID NO: 4531 - DNA, 274 bp, Homo sapiens
  source 1..274: mol_type = other DNA
tgcagtctctggattgagctttagtgaccaatggatggactgggtccgccaggctccagggaagggtctggagtgggtggccaacataaaccaagatggaagtgacaaacactatgtggactctgtgaagggccgattcagcatctccagagacaacgccaagaactcagtgtttctggaaataaacaccctgagaggcgaggacacggccgtgtattactgttcgccatcgctaaactactggggccagggaaccctggtcaccgtctcctca

SEQ ID NO: 4532 - DNA, 289 bp, Homo sapiens
  source 1..289: mol_type = other DNA
tgcagcctctggattcatctttaataattattggatgagttgggtccgccaggctccagggaaggggctggagtgggtggccaagataaagccagatgaaactgagaagtattatgggaattctgtgaagggccgattcgccatatccagagacaacgccaagaatacactatatctgcaaatcaatagcctgagagacgaagacacggctacatacttttgtgttaggacgggtatggcccatgggggtgactactggggccagggaaccctggtcgccgtctcctca

SEQ ID NO: 4533 - DNA, 289 bp, Homo sapiens
  source 1..289: mol_type = other DNA
tgcagcctctggattcatctttaataattattggatgagttgggtccgccaggctccagggaaggggctggagtgggtggccaagataaagccagatgaaactgagaagtattatgggaattctgtgaagggccgattcaccatctccagagacaacgccaagaactcactatatctgcaaatcaatagcctgagagacgaagacacggctgtatatttttgtgttaggacgggcatggcccatgggggtgactactggggccagggaaccctggtcgccgtctcctca

SEQ ID NO: 4534 - DNA, 289 bp, Homo sapiens
  source 1..289: mol_type = other DNA
tgcagcctctggattcacctttagtaattattggatgagttgggtccgccaggctccagggaaggggctggagtggctggccaagataaaggtggatggaagtgagaaatactatgcggactctgtgaaggggcgatgcaccatttccagagacaacggcaggaactcagtgtatctggagatgaacagcccgagagacgaagacacggctgtgtattattgtgtccggacaggaatggctcacggcggggactactggggccagggaaccctggtcaccgtctcttca

SEQ ID NO: 4535 - DNA, 289 bp, Homo sapiens
  source 1..289: mol_type = other DNA
tgtagcctctgggttcatctttactaattattggatgagttgggtccgccaggctccagggaaggggctggagtggctggccaagataaaggtggatggaactgagaaatactatgcggactctgtgaaggggcgatgcaccatttccagagacaacgacaagaactctctgtatctggagatgaacagtccgagagtcgaggacacggctgtctattattgtgtccggacaggaatggctcacggcggggactactggggccagggaaccctggtcaccgtctcttca

SEQ ID NO: 4536 - DNA, 286 bp, Homo sapiens
  source 1..286: mol_type = other DNA
tgcaacctctggattcaccttcactgactatgacatgaactgggtccgccaggctccagggaaggggctggagtgggtctcatccactaatgttaatagcgatgccattgcctacgcggactcagtgaagggccgcttcaccatctccagggacaactccaaggcctcactgtttctccaaatgaacagcctgagagccgaggacacggctgtctattactgtgcgagagaccccaactgggccgaggggtactggggccagggaaccctggtcaccgtctcctca

SEQ ID NO: 4537 - DNA, 286 bp, Homo sapiens
  source 1..286: mol_type = other DNA
tgcagcctctggattcaccttcactgactatgacatgaactgggtccgccaggctccagggaaggggctggagtgggtctcatccactaatgttaatagcgatgccattgcctacgcggactcagtgaagggccgcttcaccatctccagggacaactccaaggcctcactgtttctccaaatgaacagcctgagagccgaggacacggctgtctattactgtgcgagagaccccaactgggccgaggggtactggggccagggaaccctggtcaccgtctcctca

SEQ ID NO: 4538 - DNA, 286 bp, Homo sapiens; identical to SEQ ID NO: 4536
  source 1..286: mol_type = other DNA

SEQ ID NO: 4539 - DNA, 286 bp, Homo sapiens
  source 1..286: mol_type = other DNA
tgcagcctctggattcaccgtcaatagtcttgacatgagttgggtccgtaaggctccagggaagggcctggagtgggtcgcgacccttagtcgtagtggtttttccattagttacgcagactcagtgagggggcgattcaccatctccagagacaacaccgagaactcagtttatctacacatgaacagcctgcgagccgaggacacggctgtctactactgtgcgagagacccaaactgggccgagggctactggggccagggaacccgagtcaccgtctccaca

SEQ ID NO: 4540 - DNA, 292 bp, Homo sapiens
  source 1..292: mol_type = other DNA
cagtgtctctggtgactccgtcagtagtgactactggagttggctccgacagcccccagggaagggactggagtggattgggtttatttcttacactggaggcaccaggtacaatccctccctcaagagtcgagtcaccacatcagtagacacgtccaagaaccagttctccctgaagttgacgtctatgaccgctgcggacacggccgtttattactgtgcgaaagggtggtatcctgggagcttccgctttgactactggggccagggaatccaggtcaccgtctcctca

SEQ ID NO: 4541 - DNA, 292 bp, Homo sapiens
  source 1..292: mol_type = other DNA
cactgtctctggcgactccgtcagtaattattactggagttggctccgacagcccccagggaagggactggagtggattgggtttatctcttacaccggaggtaccaggtacaacccctccctcaagagtcgagtcaccacctcagtggacacggccaagaaccagttctccctgaacctgaactctgtgaccgctgcggacacggccatgtattactgtgcgaaagggtggtatcctgggagtttccgctttgactactggggccagggaaccctggtcaccgtctcctca

SEQ ID NO: 4542 - DNA, 292 bp, Homo sapiens
  source 1..292: mol_type = other DNA
cactgtctctgatgcctctatcagtggttattactggagctggatccggcagcccccggggaagggactggagtggattggctttgtccatagcagtgggggcaccaggtacaatccctccctggagagtcgagccaccacttcagcagacacgtccaagaatcagttctccctgaggttgagctatgtgaccgctgcggacacggccatttactattgtgcgaaagggtggtatccagggagtttccgttttgactactggggccagggaaccctggtcaccgtctcctca

SEQ ID NO: 4543 - DNA, 292 bp, Homo sapiens
  source 1..292: mol_type = other DNA
ctctgtctctggcgactccgtcagtaattcctattggagctggctccgacagcccccagggaagggactggagtggattgggtttatctcttacactggaggtaccaggtacaacccctccctcaagagtcgagtcaccatatcaatagacacgtccaagaaccagttctccctgaagctgagttctgtgatcgctgcggacacggccgtttattactgtgcaaaagggtggtatcctgggagttttcgctttgactactggggccagggaaccctggtcaccgtctcctca

SEQ ID NO: 4544 - DNA, 292 bp, Homo sapiens; identical to SEQ ID NO: 4543
  source 1..292: mol_type = other DNA

SEQ ID NO: 4545 - DNA, 292 bp, Homo sapiens
  source 1..292: mol_type = other DNA
cactgtctctggcgactccgtcagtaattactactggagttggctccgacagcccccagggaagggactggagtggattgggtttatctcttacactggaggtaccaggtacaacccctccctcaagagtcgagtcaccacatcagtggacacgtccaagaaccagttctccctgaagctgaactctgtgagcgctgcggacacggccgtgtattactgcgcgaaagggtggtatcctgggagtttccgctttgactactggggccagggagcgctggtcaccgtctcctca

SEQ ID NO: 4546 - DNA, 292 bp, Homo sapiens
  source 1..292: mol_type = other DNA
cactgtctctggcgactccgtcagtaattactactggagttggctccgacagcccccaggggagggactggagtggattgggttcatctcttacactggaggtaccaggtacaacccctccctcaagagtcgagtcaccatatcaatagacacgtcaaacaaccacttctccctgaggctgagctctgtgaccgctgcggacacggccgtgtattactgtgcgaaagggtggtatcctgggagtttccgctttgactactggggccagggagccctggtcaccgtctcctca

SEQ ID NO: 4547 - DNA, 292 bp, Homo sapiens
  source 1..292: mol_type = other DNA
cactgtctccggcgactccgtcagtaattcctactggagttggctccgacagcccccagggaagggactggagtggattgggtttatctcttatactggaggaaccaggtacaacccctccctcaagagtcgagtctccatatcagtagacacgtccaagaacctgttctccctgaggctgagctctgtgaccgctgcggacacggccgtgtattcctgtgcgaaagggtggtatcctgggagtttccgctttgactattggggccagggaaggctcgtcaccgtctcctca

SEQ ID NO: 4548 - DNA, 301 bp, Homo sapiens
  source 1..301: mol_type = other DNA
tgcagcctctgaactcactttcagtaacgcctggatgagctgggtccgccaggctccagggaaggggctggagtgggttggccgtattaaaagcagaactgatggtgggacaacagactacgctgcacccgtgaaaggcagattcaccatctcaagagatgattcaagaaacacgctgtatctgcaaatgaacagcctgaaaaccgaagacacagccgtgtattactgtaccacgtttaaagtgggagctactagagtctttgactactggggccagggaaccctggtcaccgtctcctca

SEQ ID NO: 4549 - DNA, 301 bp, Homo sapiens
  source 1..301: mol_type = other DNA
tgcagcctctgaattcactttcagtaacgcctggatgagctgggtccgccaggctccagggaaggggctggagtgggttggccgtattaaaagcagaactgatggtgggacaacagactacgctgcacccgtgaaaggcagattcaccatctcaagagatgattcaagaaacacgctgtatctgcaaatgaacagcctgaaaaccgaggacacagccgtgtattactgtaccacgtttaaagtgggagctactagagtctttgactactggggccagggaaccctggtcaccgtctcctca

SEQ ID NO: 4550 - DNA, 301 bp, Homo sapiens
  source 1..301: mol_type = other DNA
tgcagcctctgaactcactttcagtaacgccttgatgagctgggtccgccaggctccagggaaggggctggagtgggttggccgtattaaaagcagaactgatggtgggacaacagactacgctgcacccgtgaaaggcagattcaccatctcaagagatgattcaagaaacacgctgtatctgcaaatgaacagcctgaaaaccgaagacacagccgtgtattactgtaccacgtttaaagtgggagctactagagtctttgactactggggccagggaaccctggtcaccgtctcctca

SEQ ID NO: 4551 - DNA, 301 bp, Homo sapiens
  source 1..301: mol_type = other DNA
tgtagcctctgatttgactgtcagtgacgcctggatgaattgggtccgccaggctccagggaaggggctggagtgggttggccgcattaaaagcaaagccgatggtgggacaagagactacgctgcacccgtgaaaggcagattcaccatttcaagagatgagtcaaggaacacgctgtatctgcaaatgagtagcctgaaaaccgaggacacaggcgtctattattgcaccacctttaaagtgggagctacccgagtctttgactactggggccagggaaccctggtcaccgtctcccca

SEQ ID NO: 4552 - DNA, 301 bp, Homo sapiens
  source 1..301: mol_type = other DNA
tgcagcctctgaactcactttcagtaacgcctggatgagctgggtccgccaggctccagggaaggggctggagtgggttggccgtattaaaagcagaactgatggtgggacaacagactacgctgcacccgtgaaaggcagattcaccatctcaagagatgattcaagaaacacactgtatctacaaatgaacagcctgaaaatcgaggacacagccgtgtattactgcaccacgtttaaagtgggagctactagagtctttgactactggggccagggaaccctggtcaccgtctcctca

SEQ ID NO: 4553 - DNA, 301 bp, Homo sapiens; identical to SEQ ID NO: 4549
  source 1..301: mol_type = other DNA

SEQ ID NO: 4554 - DNA, 301 bp, Homo sapiens
  source 1..301: mol_type = other DNA
tgtagcctctgatttgactttcagtgacgcctggatgagctgggtccgccaggctccagggaaggggctggagtgggttggccgtattaaaagcaaagccgatggtgggacaacagactacgctgcacccgtgaaaggcagattcaccatttcaagagatgagtcaagaaataggctgtatctgcaaatgagtagcctgaaaaccgaggacacaggcgtgtattattgcaccacctttaaagtgggagctacccgagtctttgactactggggccagggaaccctggtcaccgtctcctca

SEQ ID NO: 4555 - DNA, 301 bp, Homo sapiens
  source 1..301: mol_type = other DNA
tgtagcctctgatttgactttcagtgacgcctggatgaattgggtccgccaggctccagggaaggggctggagtgggttggccgcattaaaagcaaagccgatggtgggacaagagactacgctgcacccgtgaaaggcagattcaccatttcaagagatgagtcaagaaacacgctgtatctgcaaatgagtagcctgaaaaccgaggacacaggcgtctattattgcaccacctttaaagtgggagctacccgagtctttgactactggggccagggaaccctggtcaccgtctcctca

SEQ ID NO: 4556 - DNA, 301 bp, Homo sapiens
  source 1..301: mol_type = other DNA
tgtagcctctgatttgactttaaatgacgcttggatgagctgggtccgccaggctccagggaaggggctggagtgggttggccgtattaaaagcaaagccgatggtgggacaaccgactacgctgcacccgtgaaaggcagattcaccatttcaagggatgagtcaagaaacactctgtatctgcaaatgagtagcctgaaaaccgaggacacaggcgtgtattattgcaccacctttaaagtgggagctacccgagtctttgactactggggccagggaaccctggtcaccgtctcctct

SEQ ID NO: 4557 - DNA, 301 bp, Homo sapiens
  source 1..301: mol_type = other DNA
tgtagcctctgatttgactttaagtgacgcctggatgagctgggtccgccaggctccagggaaggggctggagtgggttggccgtattaaaagtaaagccgatggtgggacaacagactacgctgcacccgtgaaaggcagattcaccatttcaagagatgagtcaagaaacactctgtatctgcaaatgagtagtctgaaaagcgaggacacaggcgtgtatttttgcaccacctttaaagtgggagctacccgagtctttgactactggggccagggagccctggtcaccgtctcctca

SEQ ID NO: 4558 - DNA, 301 bp, Homo sapiens
  source 1..301: mol_type = other DNA
tgtaacctctgatttgactttaagtgacgcctggatgagctgggtccgccaggctccagggaaggggctggagtgggttggccgtattaaaaggaaagccgatggtgggacaacagactacgctgtacccgtgaaaggcagattcaccatttcaagagatgagtcaagaaacactctgtatctgcaaatgagtagcctgaaaaccgaggacacaggcgtgtattattgcaccacctttaaagtgggagctacccgagtctttgactactggggccagggaaccctggtcaccgtctcctca

SEQ ID NO: 4559 - DNA, 301 bp, Homo sapiens
  source 1..301: mol_type = other DNA
tgaagcctctcaattcagtttcactaacgcctggatgaactgggtccgccaggcgccagggaaggggctggagtgggttggccatatcaaaagcaaacctgatggtgggacaacagactacgctgcacccgtgaaaggcagattcactatctcaagagatgaatcaaagaatacgctgtatttgcaaatgaacagcctgaaaagcgaggacacagccgtgtactactgtaccacattcaaggtgggcgccactagggtctttgactactggggccagggaaccctggtcaccgtctcctca

SEQ ID NO: 4560 - DNA, 301 bp, Homo sapiens
  source 1..301: mol_type = other DNA
tgcagcctctgaattcactttcaataatgcctggatgaactgggtccgccaggctccaggaaagggactggaatgggttggccatattaaaagcaagactgacggtgggacaacagactacgcttcacccgtgaaagggagatttagtatctcaagagatcattcaaaaaacatactgtatttacaaatgaacagcctgaaaaccgaggacacagccgtttattattgtactacattcaaagtgggagccactagagtctttgactactggggcccgggaaccctggtcaccgtctcctca

SEQ ID NO: 4561 - DNA, 292 bp, Homo sapiens
  source 1..292: mol_type = other DNA
cactgtctctggtgtctccatcagcagtagtagttaccactggggctggatccgccagcccccagggaaggggctggagtggattgggagtatctattatggagggaccacctactacaaatcgtccctcaagagtcgagtcaccatatccgtagacacgtccaagaaccagttctccctgaagctgagctctgtgaccgcctcagacacggctgtgtattattgtgcgagacatgtttcccatacagcttctgactactggggccagggaaccctggtcaccgtctcctca

SEQ ID NO: 4562 - DNA, 292 bp, Homo sapiens
  source 1..292: mol_type = other DNA
cactgtctctggtgtctccgtcagcagtagtagttactactgggcctggatccgccagcccccaggaaaggggctggagtggattgggagtatctattatagtgggagcacctactacaatccgtccctcaagagtcgagtcaccatatccgtagacacgtccaagaaccagttatccctgaagctgacctctgtgaccgccgcagacacggctgtgtactactgtgcgagacatgtatcgcatacagcgagtgactactggggccagggaaccctggtcaccgtctcctca

SEQ ID NO: 4563 - DNA, 292 bp, Homo sapiens
  source 1..292: mol_type = other DNA
cactgtctctggtgtctccgtcagcagtagtagttactactgggcctggatccgccagcccccaggaaaggggctggagtggcttgggagtatctattacagtgggagcacctactacaatccgtccctcaagagtcgagtcaccatatccgtagacacgtccaggaaccagttatccctgaagctgacctctgtgaccgccgcagacacggctatatactactgtgcgagacacgtttcgcatacagcgagtgactactggggccagggaaccctggtcaccgtctcctca

SEQ ID NO: 4564 - DNA, 274 bp, Homo sapiens
  source 1..274: mol_type = other DNA
tgcagcctctggattcacctttattaactatcggatgtactgggtccgccaggctccaggggaggggctggagtgtttggccaccataaaccaagatggaagtgagacatcctatgtgggctctgtgaagggccgcttcaccatctccagagacaacgccaagaattcagtgtatctgcaaatggacagcctgagagtcgaggatacggctgtatattattgtgcgaggccctgggacatctggggccaagggacaatggtcaccgtctcttca

SEQ ID NO: 4565 - DNA, 274 bp, Homo sapiens
  source 1..274: mol_type = other DNA
tgcagcctctggattcagctttagtaacagttggatgagctgggtccgccaggctccagggaaggggctggagtgggtggccaacatacaacgcaatggaaatgagatatactatgtggactctgtgaagggccgattcaccatctccagagacaacgccaagaactcattgtatctgcaaatgaacagcctgagagccgaggacacggctgtttattactgtgcgagaccttgggatatctggggccaagggacaatggtcaccgtctcttca

SEQ ID NO: 4566 - DNA, 286 bp, Homo sapiens
  source 1..286: mol_type = other DNA
tgcagcctctggattcagctttagcagctttgccatgagctgggtccgccaggctccagggaaggggctggagtgggtctcaactattgctggcagtgatggaagcacattctatgcagtctccgtgaagggccgcttcaccatctccagagacaattccaagaacacactgtttctgcaaatgaacagcctgagagccgaggacacggccatgtattactgtgcgagacggggcgggtactcctttgactcctggggccagggaaccctggtcaccgtctcctca

SEQ ID NO: 4567 - DNA, 286 bp, Homo sapiens
  source 1..286: mol_type = other DNA
tgtcgcctctggattcacctttagcagcaatgccatgagctgggtccgccaggctcctgggaagggtctggagtgggtctcagttattagttccactgctcttaacacatactatgcagactccgtgaaggcccgattcaccatctccagagacaattccaagaacacgctgtatctgcaaatgaacagcctgagagccgaggacacggccgtatattactgtgcgagacggggtggttactcctttgactcctggggccagggaaccctggtcaccgtctcctca

SEQ ID NO: 4568 - DNA, 292 bp, Homo sapiens
  source 1..292: mol_type = other DNA
tgcagcctctggcttcaccttcagtacttactggatgttctgggtccgccaaactccaggagtggggctgcagtgggtcgcacgaattaagggtgatgggggtgacgcaagctacgcggactccgtgaagggccgattcagcgtttccagagacaacgccaagaacacgctatatttgcaacttagtattctgagagtcgaggatacggctgtgtactactgtgcaagagatctgcctgcaactggtgcttttgatatctggggccaagggacagtggtcaccgtctcttca

SEQ ID NO: 4569 - DNA, 292 bp, Homo sapiens
  source 1..292: mol_type = other DNA
tgcagcctctggattcaccttcactacctactggatgttttgggtccgccaagctccagggaaggggccgcaatgggtctcacgtattagtggagatggaagtagtacaacgtatgcggactccgtgaagggccgcttcaccatctccagagacaacgccaaaaacacactttatctgcaaatcaatagtctgagagccgaggatacggctgtgtatttctgtgcaagagatctccccgccactggggcttttgatatctggggccaagggacagtggtcaccgtctcttca

SEQ ID NO: 4570 - DNA, 292 bp, Homo sapiens
  source 1..292: mol_type = other DNA
tgcagcctctggattcaccttcagtaggttctggatgttctgggtccgccaagttccagggaagagtccggtatgggtctcgcgtattgggactgatgggatcagtacaacctacgcggacaacgtgaagggccgattcaccatatctagagacaacgccaagaacaccctgtatttgcaaatgagcagtctgacagccgcggacacgggtgtctattattgtgcaagagatcttcccgccacgggggcttttgatatttggggccaagggacaatggtcaccgtctcttca

SEQ ID NO: 4571 - DNA, 292 bp, Homo sapiens
  source 1..292: mol_type = other DNA
tgcagcctctggattcaccttcagttcctactggatgttctgggtccgccaagttccggggaagaggctggtgtgggtctcacgtattaaaacagatgggagtgccactacctacgcggacgccgtgaagggccgattcaccatctccagagacaacgccaagaacacgctatatctccaaatgaatagtctaagagccgaggacacggctgtgtattactgtgcgagagatctgcctgctaccggagcttttgatatctggggccaagggacagtggtcaccgtctcttca

SEQ ID NO: 4572 - DNA, 292 bp, Homo sapiens
  source 1..292: mol_type = other DNA
tgtagcctctggattcaccttcagttcctactggatgttctgggtccgccaagtttcggggaaggggctcgtgtgggtctcacgtatcagaacagatgggcgtgtcactacctacgcggactccgtgaagggccgattcaccatctccagagacaacgccaagaacacgctttatctccaaatgaacagtctcagagccgacgatacgggtttgtattactgtgcgagagatctgcctgctaccggagcctttgatatctggggccaagggacagaggtcaccgtctcttca

SEQ ID NO: 4573 - DNA, 292 bp, Homo sapiens
  source 1..292: mol_type = other DNA
tgcagcctctggattcaccttcagcaactactggatgttctgggtccgccaagttccaggggaggcgccggtgtgggtctcacgtattcagggcgatgggagtaggacaggctacgcggactccgtgaagggccgattcaccatctccagagacaacgccaagaacacactctatctgcaaatgaacagtctgagagccgaggacacggctgtatattactgtgcaagggatctaccagccactggggcttttgatatctggggccaggggacaatggtcaccgtgtcttca

SEQ ID NO: 4574 - DNA, 292 bp, Homo sapiens
  source 1..292: mol_type = other DNA
tgcagcttcgggattcagcttcagaagctactggatgttctgggtccgccaagctccagggacggggctggagtgggtctcacgtattagtcctgatggcttcacgacaaactacggggactccgtggagggccgattcaccatgtccagagacaacgcgaagaacacactgtatttgcaaatgaatagtctgagaggcgatgacatggctctgtattattgtgcaagagatttgcctgctactggggcttttgatatctggggccaagggacactggtcaccgtctcttca

SEQ ID NO: 4575 - DNA, 292 bp, Homo sapiens
  source 1..292: mol_type = other DNA
tgcagcctctggcttcaccttcagtacttactggatgttctgggtccgccaaagtccaggggtggggctgcagtgggtcgcacgaattagtggtgatgggagcagcgcaagctacgcggactctgtgaagggccgattcagcgtttccagagacaacgccaagaacacgctatatttgcaaattagtattctgagagtcgaggatacggctgtatattattgtgcaagagatctgcctgcaactggtgcttttgatatctggggccaagggacagtggtcaccgtctcttca

SEQ ID NO: 4576 - DNA, 292 bp, Homo sapiens; identical to SEQ ID NO: 4570
  source 1..292: mol_type = other DNA

SEQ ID NO: 4577 - DNA, 292 bp, Homo sapiens
  source 1..292: mol_type = other DNA
tgcagcctcgggattcgccttcagtaatttctggatgttctgggtccgccaggctccaggaaaggggctggagtgggtctcacgtattaagactgatgggagtgaaacaacttacgcggacaccgtgaagggccgattcaccatctccagggacaacaccaagaataccctgtatctgcgaatgagccgtctgacagccgaggacacggctctctattactgtgcaagagatcttcccgccacgggggcttttgatatttggggccaagggacaatggtcaccgtctcttca

SEQ ID NO: 4578 - DNA, 292 bp, Homo sapiens
  source 1..292: mol_type = other DNA
tacagcttctggattcacctttggtgattatgctatgagctggttccgccaggctccagggaagagtccggtatgggtctcgcgtattgggactgatgggatcagtacaacctacgcggacaacgtgaagggccgattcaccatatctagagacaacgccaagaacaccctgtatttgcaaatgagcagtctgacagccgcggacacgggtgtctattattgtgcaagagatcttcccgccacgggggcttttgatatttggggccaagggacaatggtcaccgtctcttca

SEQ ID NO: 4579 - DNA, 292 bp, Homo sapiens; identical to SEQ ID NO: 4569
  source 1..292: mol_type = other DNA

SEQ ID NO: 4580 - DNA, 295 bp, Homo sapiens
  source 1..295: mol_type = other DNA
tgcagcctctggattcaccttcagggacttctacatgagctggatccgccaggctccagggaaggggctggagtgggtttcatacattagtactactgataatatcatatattacgcagactctgtgaagggccgattcaccatctccagggacaacgccaagaactcactgtatctgcaaatgaacagcctgagagccgaggacacggccgtgtattactgtgcgagagaaggatacagttatggttacgggtttgactactggggccagggaaccctggtcaccgtctcctca

SEQ ID NO: 4581 - DNA, 295 bp, Homo sapiens
  source 1..295: mol_type = other DNA
tgcagcctctggattcaccttcactgacttctacatgagttggttccgccaggctccagggaaggggctggagtgggtttcatacattagtagtagtggcagtaccatttcgtacgcagactctgtgaagggccgattcaccatctccagggacaacgccaagaactcagtgcatctgcaaatgaacagcctgagagccgaggacacggccttatattactgtgcgagagaggggtacagttatggttacggctttgactactggggccagggaaccctggtcaccgtctcctca

SEQ ID NO: 4582 - DNA, 301 bp, Homo sapiens
  source 1..301: mol_type = other DNA
tgaagcctctggattcacctttagaaattatgccatgagttgggtccgccaggctccagggaaggggctggaatgggtctcagccattagtggcagtggtgttgcctcaaactacgcagactccgtgaagggccggctcgtcatctccagagacttttccacgaataccttatacttgcaaatgaacagcctgagagccgaagacacggccgtatattactgtgcgagatctcgaatagaagcacttggtacgggtgcttttgatatgtggggccgagggacaatggtcaccgtctcttca

SEQ ID NO: 4583 - DNA, 301 bp, Homo sapiens
  source 1..301: mol_type = other DNA
tgcagcccctggattcacctttagtacctatcccctgagctgggtccgacagggtccagggaaggggctggagtgggtctcgactataagggatcctgatcataagacatactatgcagactccgtgaagggccggttcaccatttctggagacagttccaagaccacgatatacttgcaaatgagcagcctgagagccgaggactcggccatgtattactgtgcgagatcccgtatagaagcacttggtactggagcttttgatatgtggggccgagggacaatggtcaccgtctcttca

SEQ ID NO: 4584 - DNA, 298 bp, Homo sapiens
  source 1..298: mol_type = other DNA
cactgtctctggtggctccatcagcagtagtgcttactactggggctggatccgccagcccccagggaagggactggagtggcttgggagtaaatcctatagtgggagcacctactacaagccgtccctcaagagtcgagtcaccatatccatagatatgtccaagaaccagttctccctgaaggtgaactctgtgaccgccgcggacacggctgtgtattattgtgcgagacttagagatggttcggggagttattccgactactggggccagggaaccctggtcaccgtctcctca

SEQ ID NO: 4585 - DNA, 298 bp, Homo sapiens
  source 1..298: mol_type = other DNA
cagtgtctctggtggctccatcagtagtagtagttactactggggctggatccgccagcccccagggaaggggctggagtggattgggagtagacattatagtgggagcacctactacaacccgtccctcaagagtcgagtcaccatatccgtagacacgtccaagaaccagttgtccctgaagctgaggtctgtgaccgccgcagacacggctgtatattactgtgcgagacttcgggatggttcggggagttattccgactactggggccagggaaccctggtcaccgtctcctca

SEQ ID NO: 4586 - DNA, 298 bp, Homo sapiens
  source 1..298: mol_type = other DNA
cgctgtctatggtgggtccttcagtggttactactggagctggatccgccagcccccagggaaggggctggagtggattggggaaatcaatcatagtggaagcaccaaatacaacccgtccctcaagagtcgagtcaccatatcagtagacacgtccaagaaccagttctccctgaagctgagctctgtgaccgccgcggacacggctatgtattactgtgcgagaggcgggggttgtagtggtggtggctgctacggtgactcctggggccagggaaccctggtcaccgtctcctca

SEQ ID NO: 4587 - DNA, 298 bp, Homo sapiens
  source 1..298: mol_type = other DNA
cgctgtctatggtgggtccttcagtggttactactggagctggatccgccagcccccagggaagggactggagtggattggggagatcactcatggtggaagcaccaactacaacccgtccctcaagagtcgagtcatcatatcagtagacacgtccaagaaccagttctccctgaggctgagctctatgaccgccgcggacacggctgtgtattactgtgcgagaggggggggttgtagtggtggtggctgctacggggactcctggagccagggaaccctggtcaccgtctcctca

SEQ ID NO: 4588 - DNA, 298 bp, Homo sapiens
  source 1..298: mol_type = other DNA
cgctgtctatggtgggtccttcagtggttactactggagctggatccgccagcccccagggaagggactggagtggattggggagatcactcatggtggaagcaccaactacaacccgtccctcaagagtcgagtcatcatatcagtagacacgtccaagaaccagttctccctgaggctgagctctgtgaccgccgcggacacggctgtctattactgtgcgagaggggggggttgtagtggtggtggctgctacggggactcctggagccagggaaccctggtcaccgtctcctca

SEQ ID NO: 4589 - DNA, 298 bp, Homo sapiens; identical to SEQ ID NO: 4587
  source 1..298: mol_type = other DNA

SEQ ID NO: 4590 - DNA, 286 bp, Homo sapiens
  source 1..286: mol_type = other DNA
tgcagcctctggattcacctttcgtacctattggatgacctgggtccgtcaggctccagggaaggggctggagtgggtggccaacatagggccagatggaagtcagaaacactacgtggactctgtgaagggccgattctccttctccagagacaacgccaagaacttagtgtatctgcaaatgaacagcctgagagccgaggacgcggctgtgtattactgtgcgacaagcagagactgggcttttgactactggggccagggaatcctggtcaccgtctcctca

SEQ ID NO: 4591 - DNA, 286 bp, Homo sapiens
  source 1..286: mol_type = other DNA
tgcagcatctggattcacctttaggagtgtttggatgacctgggcccgccaggctccggggaagggtctggagtgggtggccaacataaatccagatggaagtgtgcaacaatatgtggactctgtgaagggccgattcaccatctccaaagacagcgccaagaattcactatatctgcaaatgaacagcctgagacccgaggatacggccttctattactgtgcgactagccgtgactgggccttcgactactggggccagggaaccctggtcaccgtctcctca

SEQ ID NO: 4592 - DNA, 280 bp, Homo sapiens
  source 1..280: mol_type = other DNA
tgcagcctctggattcaccttcagtagttatgaaatgaactgggtccgccaggctccagggaaggggctggagtggctttcatacattagtagtagtggtagtaccatatactacgcagactctgtgaagggccgattcaccatctccagagacaacgccaagaactcactgtatctgcaaatgaagagcctgagaggcgaggacacggctgtttattactgtgcgagagggggctggctcgacccctggggccagggaaccctggtcaccgtctcctca

SEQ ID NO: 4593 - DNA, 280 bp, Homo sapiens
  source 1..280: mol_type = other DNA
tgcagcctctggattcaccttcagtacttatagcatgaactgggtccgccaggctccagggaaggggctggagtggatttcatacattagtagtgatacttcaaccacatactatgcagactctgtgaagggccgattcaccatctacagagacaatgccaagaactcactgtctctgcatatgaacagcctgagagacgaagacacggctgtctattactgtgcgagaggtggctggctcgacccctggggccagggaaccctggtcaccgtctcctca

SEQ ID NO: 4594 - DNA, 304 bp, Homo sapiens
  source 1..304: mol_type = other DNA
tgcagcctctggattcacccttagtagttattggatgagttgggtccgccaggctccagggaaggggctggagtgggtggccaacataaagcaggatggaagtgaggaaaactatgtggactctgtgaagggccgattcaccatctccagagacaacgccaggaactcagtgtttctgcaattgaacagcctgagagtcgaggacacggctgtctattactgtgcgagagacgggcggggtgcggcaggtccttacaacttgttcgacccctggggccagggaaccctggtcaccgtctcctca

SEQ ID NO: 4595 - DNA, 304 bp, Homo sapiens
  source 1..304: mol_type = other DNA
tgtaggctctggattcacattttctggctattggatgagctgggtccgccaggctccagggaagaggctggagtgggtggccaacataaaacaagatggaagtgagatatattatctggactctgtgaagggccgattcaccatctccagagacaacgccgagaactcactgtatctgcaaatgaacagcctgagggccgaggacacggctatttatcactgtgcgagagacggccgcggggcagctggtccgtacaacttgttcgacccctggggccagggaaccctggtcaccgtctcctca

SEQ ID NO: 4596 - DNA, 280 bp, Homo sapiens
  source 1..280: mol_type = other DNA
tacagactctggattcacctttagtacttattggatgaactgggtccgccaggctccaggaaagggactggagtgggtggccaacataaagcaagatggaagtgagaaatactatgtggactctgtgaagggccgattcaccatctccagagacaacgccaagaactcactgtatctgcaaatgaacagcctgagggccgacgacacggctgtgtattactgtgcgagagggggcgctatggacgtctggggccaagggaccacggtcaccgtctcctca

SEQ ID NO: 4597 - DNA, 280 bp, Homo sapiens
  source 1..280: mol_type = other DNA
tgcagcctctggactcacctttagtacctcttggatgacctgggtccgccaggctccagggaaggggctggagtgggtggccaacataaagcaagatggaagtgagaaatactatgtggactctgtgaagggccgattcaccatctccagagacaacgccaagaactcactgtatctgcaaatgaacagcctgagagccgaggacacggccgtgtattattgtgcgagaggtggggccatggacgtctggggcaaagggaccacggtcaccgtctcctca

SEQ ID NO: 4598 - DNA, 280 bp, Homo sapiens
  source 1..280: mol_type = other DNA
tgcatcatctggattcagatttagtatcttttggatgacctgggtccgccaggctccagggaaggggctggagtgggtggccaatataaaggaagatggaagtgagaaatattatgtggactctgtgaagggccgatttaccatctccagagacaacgccaagaactcattggatctgcaaatggacagcctgagagccgaggacacggctgtgtattactgtgcgagagggggcgctatggacgtctggggccaagggaccacggtcaccgtcacctca

SEQ ID NO: 4599 - DNA, 286 bp, Homo sapiens
  source 1..286: mol_type = other DNA
tgaagcctctggattcacctttagtagatcttggatgagctgggtccgccaggctccagggaaggggctggagtggctggccaacataaaggaagatggaagtgagaagaactatgtggactctgtggagggccgattcaccatctccagagacaacgccaagaactcactgtatatgcaaatgaacagcctgagagccgaggacacggctgtgtattactgtgcgagggcatatagtagtagttgggactcctggggccagggaaccctggtcaccgtctcctca

SEQ ID NO: 4600 - DNA, 286 bp, Homo sapiens
  source 1..286: mol_type = other DNA
tgcagcctctggattcacgtttagtaactattggatgagctgggtccgccaggctccagggaaggggctggagtgggtggccaacatacagcgagaaggaagtgagaaataccatgcggactttgtgaagggccgattcaccatctccagagacaacgccaagaactcactgtatctgcaaatgaacagcctgagagtcgaggacacggctgtgtatttctgtgcgagggcgtatagtagcagctgggactcctggggccagggaaccctggtcaccgtctcctca

SEQ ID NO: 4601 - DNA, 289 bp, Homo sapiens
  source 1..289: mol_type = other DNA
tacaacttctggattcacctttgttgattatgcaatgagctgggtccgccaggctccagggaaggggctggagtgggtaggtttcattagaagcaaggcttacggtgggacaacagaatacgccccgcctgtcaaaggcagattcaccatctcaagagatgaccccaagagcgtcctctatctgcaaatgagcagcctgctaaccgcggacacagccgtctattactgtgttagaggagtgcgggaagtcccctactggggccagggaaccctggtcaccgtctcctca

SEQ ID NO: 4602 - DNA, 289 bp, Homo sapiens
  source 1..289: mol_type = other DNA
tacaacttctggattcacctttggtgattatgctatgacctgggtccgccaggctccagggaaggggctggagtgggtaggtttcattagaagcaacgcttatggtgggacaacagagtacgccgcgcctgtgaaaggcagattcaccatctcaagagatgaccccaagagcatcgcctacctgcaaatgaacagtcttcaaaccgaggacacagccgtgtattactgtgttagaggagtgcgggaggtcccctactggggccagggaaccctggtcaccgtctcctca

SEQ ID NO: 4603 - DNA, 289 bp, Homo sapiens
  source 1..289: mol_type = other DNA
tacaacttctggattcagttttgttgattatgctatgagctgggtccgccaggctccagggaaggggctggagtgggtaggttttattagaagcagagcttacggtgggacaacagaatacgccgcgcctgtgagaggcagattcaccatctcaagagatgactccaagagcatcgtctatctgcaaatgaacaacctgcaaatcgaggacacagccgtgtattattgtgttaggggagtgcgggaagtcccctactggggccagggaatcctggtcaccgtctcctca

SEQ ID NO: 4604 - DNA, 313 bp, Homo sapiens
  source 1..313: mol_type = other DNA
cacaacctctggattcacttttgttgattatgcaatgagttgggtccgccaggctccagggaaggggctggagtgggtaggtttcatcagaagcaaagcttacggtgggacaacagagtacgccgcgtctgtgagaggcagattcaccatctcaagagatgactccaaaagtaccctctatctgcagatggacagcctgaaaaccgaggacacagccttttattattgtgttagaggggttagggaagtcccctattggggccagggaaccctggtcaccgtctcctcagggaccacggtcaccgtctcctca

SEQ ID NO: 4605 - DNA, 289 bp, Homo sapiens
  source 1..289: mol_type = other DNA
tacaacttctggattcacgtttgttgattatgctatgagttgggtccgccaggctccagggaaggggctggcgtgggtgggcttcattagaagcaaaacttatggtgggacaacagagtacgccgcgtctgtgaaagggagattcaccatctcaagagatgattccaaaagcatcctctatctgcagatgaacagcctgaaaagcgacgacacagccgtctattattgtgttagaggggttagggaagtcccctactggggccagggaaccctggtcaccgtctcctca

SEQ ID NO: 4606 - DNA, 280 bp, Homo sapiens
  source 1..280: mol_type = other DNA
tgcagcctctggattcaccctcagtgcctactcgatgcactgggtccgccaagctccagggaaggggctggtgtgggtcacacgtattaaaagtgatggaagaaccataagctacgcggactccgtgaagggccgattcaccatctccagagacgatgccaagaacacgctgtatctgcaaatgaacagtctgagagccgaggacacggctgtgtattactgtgcaagagagttggcctctggctactggggccacggaaccctggtcaccgtctcctca

SEQ ID NO: 4607 - DNA, 280 bp, Homo sapiens
  source 1..280: mol_type = other DNA
tgcagcctctggattcatcttcagtagatacttgatgcactgggtccgccaacctccagggaagggactggtgtgggtctcacgtgttactagtgatgggggtagcacatgctacgcggactccgtgaagggccgattcaccatctccagagacaacgccaagaacacgctgtatctgcaaatgaacagtctgagagccgaggacacggctgtctattactgtgcaagggagttggcctctggctactggggccacggaaccctggtcaccgtctcctca

SEQ ID NO: 4608 - DNA, 280 bp, Homo sapiens
  source 1..280: mol_type = other DNA
tgcagtctctggattcaccttcaataactactggatgcactgggtccgccaagctccagggaagggtctggtgtgggtctcacgtattaagagtgatgggagtatcacaaactacgcggactccgtgaagggccgattcaccgtctccagagacaacgccaagaacaccctgtatctgcaaatgaacagtctgagagccgaggacacggctgtgtattactgtgcaagagagcttgcttctggctactggggccagggaaccctggtcaccgtctcctca

SEQ ID NO: 4609 - DNA, 289 bp, Homo sapiens
  source 1..289: mol_type = other DNA
tgcagcctctggattcaccttcagtacctatgctatccactgggtccgccaggctccaggcaaggggctggagtgggtggcagttatatcatatgatggaaataataaattctacgcaaactccgtgaagggccgattcaccgtctccagagacaattccaggaacacactctatctacaaatgaacagcctgagagctgaggacacggctatatattactgtacgagagggcccgcggggagtttctatgactattggggccagggaaccctggtcaccgtctcctca

SEQ ID NO: 4610 - DNA, 289 bp, Homo sapiens
  source 1..289: mol_type = other DNA
tgcagcctctggattcagcttcagtacctatgccatccactgggtccgccaggctccaggcaaggggctggagtgggtgggagttatatcaaaagatggaagtaataaattctacgcagactccgtgaagggccgattcaccatctccagagacaattccaagaacacggtgtatttgcaaatggacagcctgagaactgaagacacggctgtgtatcactgtacgaggggaccggcggggagtttctatgactactggggccagggaagcctggtcaccgtctcctca

SEQ ID NO: 4611 - DNA, 279 bp, Homo sapiens
  source 1..279: mol_type = other DNA
aaggggtctggatacagttttaccagctattggatcggctgggtgcgccagatgcccgggaaaggcctggagtggatggggatgatctatcctggagactctgagaccagatacagcccgtccttccaaggccaggtcaccatctcagtcgacaagtccttcagcaccgcctacctgcagtggagcagcctgaaggcctcggacactgccatatactactgtgcgagacatgatacttttgatatgtggggccaagggacaatggtcaccgtctcttca

SEQ ID NO: 4612 - DNA, 279 bp, Homo sapiens
  source 1..279: mol_type = other DNA
aagggttctggatacagctttagcagctactggatcggctgggtgcgccagatgcccgggaaaggcctggagtggatgggtatcatctatcctggtgactctgataccagatacagcccgtccttccaaggccaggtcaccatctcagtcgacaagtccatcagcaccgcctacctgcagtggagcagcctgaaggcctcggacaccgccatgtattactgtgcgaggcatgatacttttgatatgtggggccaagggacaatggtcactgtgtcttca

SEQ ID NO: 4613 - DNA, 285 bp, Homo sapiens
  source 1..285: mol_type = other DNA
acttctggttacacctttaccaattatggaatcagctgggtgcgacaggccccaggacaagggcttgagtggatgggatggataagcgcttacaatggtaacacaaattatgtacagaagttccatggcagagtcaccatgaccacagagacatccacgaggacagcctatatggaactgaggagcctgacatctgacgacacggccgtctattactgtgcgacatttacgtactacagtggctgcgactactggggccagggaaccctggtcaccgtctcctca

SEQ ID NO: 4614 - DNA, 285 bp, Homo sapiens
  source 1..285: mol_type = other DNA
gcttctggttacacctttaccacttatgaaatcagctgggtgcgacaggcccctggacaagggcttgagtggatgggatggatcagcgcctacaatggtaacacaaactatgcacagaaattccacggcagagtcaccatgaccacagacacacccacgagcacagcctacatggaactgaggaacctgagatctgacgacacggccgtgtattattgtgcgacatttacatattacagtggctgcgactactggggccagggaaccctggtcaccgtctcctca

SEQ ID NO: 4615 - DNA, 285 bp, Homo sapiens
  source 1..285: mol_type = other DNA
gcttctggttacacctttaccaattatggaatcagctgggtgcgacaggcccctggacaagggcttgagtggatgggatggatcagcgcctacaatggtaacacaaactatgcgcagaaattctacggcagagtcaccatgaccacagacacacccacgagcacagcctacatggaactgaggaacctgagatctgacgacacggccgtctattattgcgcgacatttacatattacagtggctgcgactactggggccagggatccctggtcaccgtctcctca

SEQ ID NO: 4616 - DNA, 288 bp, Homo sapiens
  source 1..288: mol_type = other DNA
gcttctggatacacctgcactacctatgctatgcattgggtgcgccaggcccccggacaaaggcttgagtggatgggatggatcaacgctggcaatggtaacacaaaatattcacagaagttccagggcagagtcaccattaccagggacacatccgcgagcacagcctacatggagctgagcagcctgagatctgaagacacggctgtgtattactgtgcgagagggcgtagtgggagctactctgttgactactggggccagggaaccctggtcaccgtctcctca

SEQ ID NO: 4617 - DNA, 288 bp, Homo sapiens
  source 1..288: mol_type = other DNA
gcttctggatacatcttcacttactatgctatgcattgggtgcgccaggcccccggacaaagacttgagtggatgggatggatcaacgctgccaatggtaacacaaaatattcaccgaagttccaggacagagtcacctttaccagggacacatccgcgagcacagcctatatggaggtgagcagcctgagatctgaagacacggctgtgtatcactgtgcgagagggaggagtgggagctactctgttgactactggggccagggaaccctggtcaccgtctcctca

SEQ ID NO: 4618 - DNA, 280 bp, Homo sapiens
  source 1..280: mol_type = other DNA
tgcagcctctggattcaactttaggacctcttggatgagctgggtccgccaggctccagggaaggggctggagggggtggccaacataaaagaagatggaagtgagaaaaactatgtggactctgtgaagggccgattcaccatctccagagacaacgccaagaattcactgtatctgcaaatgaacagcctgagagtcgaggacacggctgtttattactgtgcgagaattcgagggcttgactcctggggccagggaatcctggtcaccgtctcctca

SEQ ID NO: 4619 - DNA, 280 bp, Homo sapiens
  source 1..280: mol_type = other DNA
tgcagcctctggattcacctttagtagcttttggatgagctgggtccgccaggctccagggaaggggctggagtgggtggccaacataaaccaagatggaagtgagaaatactatgtggactctgtgaagggccgattcaccatctccagagacaacgccaagaactcactgtatctgcaaatgaacagcctgagagccgaggacacggctgtctattactgtgcgagaatacggggtcttgactcctggggccagggaaccctggtcaccgtctcctca

SEQ ID NO: 4620 - DNA, 301 bp, Homo sapiens
  source 1..301: mol_type = other DNA
cagtgtctctggtgactccatcagcagcagtaggtacttctggggctgggtccgccagcccccagggatgggcctggagtggattggagttatatattatgatgggaccacctactacaacccgtccctcaagagtcgagttaccatgtctgtagacacgtccaagaatcagttctctctgaagctgaactctgtgaccgccgcagacacggctttatattactgtgcgagacccctggttcggggaggcaaggatgcttttgatatctggggccaagggacaatggtcaccgtctccgca

SEQ ID NO: 4621 - DNA, 301 bp, Homo sapiens
  source 1..301: mol_type = other DNA
cactgtctctggaggcgccatcagcggcagtggttacaactggggctgggtccgccagcccccaggggagggactggagtggattgggtatatccactatagtgggaaaaccaactacaacccgtccctcaagagtcgagtcaccatgtccgtagacacgtccaagaatcggttctccctgaacctgagttctgtgaccgccgcagacacggctgtgtattactgtgcgagacctctggttcggggggggaaagatgcttttgatatctggggccaagggacaatggtcaccgtctcttca

SEQ ID NO: 4622 - DNA, 301 bp, Homo sapiens
  source 1..301: mol_type = other DNA
cagtgtctctggtgactccatcagcaggagtaggtactactggggctgggtccgccagcccccagggatgggcctggagtggattggggttatatattatgatgggaccacctactacaacccgtccctcaagagtcgagttaccatgtctgtagacacgtccaagaatcagttctctctgaagctgaactctgtgaccgccgcagacacggctttatattactgtgcgagacccctggttcggggaggcaaggatgcttttgatatctggggccaagggacaatggtcaccgtctccgca

SEQ ID NO: 4623 - DNA, 292 bp, Homo sapiens
  source 1..292: mol_type = other DNA
tgcagcctctggattcacctttgatgattctgccatgcactgggtccggctagctccagggaagggcctggagtgggtctcaagtattagttgggatagtggtagtataggctacgcggactctgtgaagggccggttcaccatctccagagacagcgccaagaactccctgtatctgcaaatgaacagtctgagacctgaggacacggccttgtattactgtgcaaagggtatagcagtggctgggacctttgactactggggccagggaaccctggtcaccgtctcctca

SEQ ID NO: 4624 - DNA, 292 bp, Homo sapiens
  source 1..292: mol_type = other DNA
tgcagcctctggattcacctttgatgattctgccatgcactgggtccggctaactccagggaagggcctggagtgggtctcaagtattagttgggatagtggtagtataggctacgcggactctgtgaagggccgattcaccatctccagagacagcgccaagaattccctgtatctgcaaatgaacagtctgagacctgaggacacggccttgtattactgtgcaaagggtatagcagtggctgggacctttgactactggggccagggaaccctggtcaccgtctcctca

SEQ ID NO: 4625 - DNA, 292 bp, Homo sapiens
  source 1..292: mol_type = other DNA
tgcagcctctggattcacctttgatgattctgccatgcactgggtccggctagctccagggaagggcctggagtgggtctcaagtattagttgggatagtggtagtataggctacgcggactctgtgaagggccgattcaccatctccagagacagcgccaagaactccctgtatctgcaaatgaacagtctgagacctgaggacacggccttgtattactgtgcaaagggtatagcagtggctgggacctttgactactggggccagggaaccctggtcaccgtctcctca

SEQ ID NO: 4626 - DNA, 292 bp, Homo sapiens
  source 1..292: mol_type = other DNA
tgcagcctctggattcatctttgatgattctgccatgcactgggtccggctagctccagggaagggcctggagtgggtctcaagtattagttgggatagtggtagtataggctacgcggactctgtgaagggccgattcatcatctccagagacagcgccaagaactccctgtatctgcaaatgaacagtctgagacctgaggacacggccttgtattactgtgcaaagggtattgcagtggctgggacctttgactactggggccagggaaccctggtcaccgtctcctca

SEQ ID NO: 4627 - DNA, 292 bp, Homo sapiens
  source 1..292: mol_type = other DNA
tgcagcctctggattcacctttggtgattatgccatgcactgggtccggcaagctccagggaagggcctggagtgggtctcaggtattagttggaatagtggtagcataggctatgcggactctgtgaagggccgattcaccatctccagagacaacgccaagaactccctgtatctgcaaatgaacagtctgagagctgaggacacggccttgtattactgtgcaaaaggtatagcagtggctggtacctttgactactggggccagggaaccctggtcaccgtctcctca

SEQ ID NO: 4628 - DNA, 280 bp, Homo sapiens
  source 1..280: mol_type = other DNA
tgcagcctctggattcaccattaggaacaatcacatgagttgggtccgccaggctcaggggaaggggctggagtgggtctcaagtatttatggtcgtgatgagagcgcatcctacgcagactccgtgaagggccggttcaccatctccagagactattccaagaacaccctccatctgcaaatgaacagcctgagagccgaggacacggccttatattattgtacgggtcacggtggctatagctattgtggccagggaaccctggtcaccgtctcgtca

SEQ ID NO: 4629 - DNA, 277 bp, Homo sapiens
  source 1..277: mol_type = other DNA
tgcagcctctggattcaccctttacaacaatgccatgacctgggtccgccaggctccagggaaggggctgcagtgggtctcagatattagaggtgaaggtgccacacactacgcagactccgtgaggggccggttcaccatctccagagacgattccatgaacatggtgtatcttcaaatgaacagcctgagagccgaagacacggccctttattattgtacaggacatggcggttactcttactggggccacggaaccttggtcaccgtctcctct

SEQ ID NO: 4630 - DNA, 286 bp, Homo sapiens
  source 1..286: mol_type = other DNA
tgtcgcctctggattcaccttcagtagccattggatgcactgggtccgccaagctccagggaaggggctggtgtgggtctcacgtattaatgaagatggacgcaccacaacctatgtggactccgtgaagggccgattcaccatctccagagacaacgccaagaacacgctgtatctgcaaatgatcagtctgagagtcgaggacacggctgtatattactgtgcaagagggggagatgggcggttcgacccctggggccagggaaccctggtcaccgtctcctca

SEQ ID NO: 4631 - DNA, 286 bp, Homo sapiens
  source 1..286: mol_type = other DNA
tgcagcctctggattcaccttcagtgtctactggatgcactgggtccgccaagctccagggaaggggctggtgtgggtctcacgtattaatagtgatggaggtagcacaagctacgcggactccgtgaagggccgattcaccatctccagagacaacggcaagaacacgctgtatctgcaaatgaacagtctgagagccgacgacacggctgtgtattattgtgcaagagggggtgatggacggttcgacccctggggccagggaaccctggtcaccgtctcctca

SEQ ID NO: 4632 - DNA, 280 bp, Homo sapiens
  source 1..280: mol_type = other DNA
tgcagcctctggattcaactttaggacctcttggatgagctgggtccgccaggctccagggaaggggctggagggggtggccaacataaaagaagatggaagtgagaaaaactatgtggactctgtgaagggccgattcaccatctccagagacaacgccaagaattcactgtatctgcaaatgaacagcctgagagtcgaggacacggctgtttattactgtgcgagagttcgagggtttgactcctggggccagggaatcctggtcaccgtctcctca

SEQ ID NO: 4633 - DNA, 280 bp, Homo sapiens
  source 1..280: mol_type = other DNA
tgcagcctctggattcacctttagtggctattggatgaactgggtccgccaggctccagggaagggactggagtgggtggccaacataaagcaagatggaagtgagaaatactatgtggactctgtgaagggccgattcaccatctccagagacaacgccaagaactcactgtatctgcaaatgaacagcctgagagccgaggacacagctgtgtattactgtgcgagggtacggggatttgactcctggggccagggaaccctggtcaccgtctcctca

SEQ ID NO: 4634 - DNA, 316 bp, Homo sapiens
  source 1..316: mol_type = other DNA
cgcagcgtctggattcaccttcagtgacttccacatggactgggtccgccaggttccagggaaggggctggagtgggttggccgtagtagaaagaaaagtcacgggcacaccacaacgtacgccgcgtctgtgaaaggcagattcaccttctcaagaaatgatgtagagatgtcagtgtatctgcaaatgaatagcctgaagaccgaggacacggccctgtattactgtgttagagcaggatactatgatagccgtgattattccactaatggttttgatatctggggccaagggacactggtcaccgtctcctca

SEQ ID NO: 4635 - DNA, 316 bp, Homo sapiens
  source 1..316: mol_type = other DNA
tgcagcctctggattcactttcagtgattaccacatcgattgggtccgccaggctccagggaaggggctggagtgggttggccgtattagaaaaagaggtcacggtcacaccacaacatacgccgcgtctgtggaaggcagattcatcctctcaagagaagattcaaggaactcgctgtatctgcaaatgaacagcctgaaaaccgaggacacggccctgtattactgtgttagagcgggatactatgacagtcgtgattactccactaatggttttgatatctggggccatgggacaatggtcaccgtctcttca

SEQ ID NO: 4636 - DNA, 316 bp, Homo sapiens
  source 1..316: mol_type = other DNA
cgcagcctctggattcagcttcagtgactatcacatggactgggtccgccaggctccagggaaggggctggagtgggttggccgtagtagaaagaaagctcacgggtacaccacagagtacgccgcgtctgtgaaaggcagattcaccttgtcaagaaatgatgtagagatgtcagtgtatctgcaaatgaatagcctgaagaccgaggacacggccctgtattactgtgttagagcaggatactatgatagccgtgattattccactaatggttttgatatctggggccaagggacaatggtcaccgtctcctca

SEQ ID NO: 4637 - DNA, 316 bp, Homo sapiens; identical to SEQ ID NO: 4636
  source 1..316: mol_type = other DNA

SEQ ID NO: 4638 - DNA, 316 bp, Homo sapiens
  source 1..316: mol_type = other DNA
cgcagcctctggattcagcttcagtgactatcacatggactgggtccgccaggctccagggaaggggctggagtgggttggccgtagtagaaagaaagctcacgggtacaccacagagtacgccgcgtctgtgaaaggcagattcaccttgtcaagaaatgatgaagagatgtcagtgtatctgcaaatgaatagcctgaagaccgaggacacggccctgtattactgtgttagagcaggatactatgatagccgtgattattccactaatggttttgatatctggggccaagggacaatggtcaccgtctcctca

SEQ ID NO: 4639 - DNA, 289 bp, Homo sapiens
  source 1..289: mol_type = other DNA
cactgtctctggtggctccatcagtaactactattggagctggatccggcagcccccagggaagggactggagtggattgggtatatgtattcgagtgggagcaccaactacaatccctccctcaagagtcgagtctccatatcagtagacacgtccaagaaccagttctccctgaagttgagttctgtgaccactgcggacacggccgtctattattgtgcgagagccgggggttgggtgggctacatggacgtctggggcaaagggaccacggtcaccgtctcctca

SEQ ID NO: 4640 - DNA, 289 bp, Homo sapiens
  source 1..289: mol_type = other DNA
cactgtctctcgtggctccatcagtagttactactggagctggatccggcagcccccagggaagggactggagtggattggctatatctattacagtgggagcaccaactacaacccctccctcaagagtcgagtcaccatatcagtggacacgtccaagaaccagttctccctgaagctgagctctgtgaccgctgcggacacggccgtgtattactgtgcgagagctggaggatgggttggatacatggacgtctggggcaaagggaccacggtcaccgtctcctca

SEQ ID NO: 4641 - DNA, 289 bp, Homo sapiens
  source 1..289: mol_type = other DNA
cactgtctctcgtggctccatcagtagttactactggagctggatccggcagcccccagggaagggactggagtggattggctatatctattacagtgggagcaccaactacaacccctccctcaagagtcgagtcaccatatcagtggacacgcccaagaaccagttctccctgaagctgagctctgtgaccgctgcggacacggccgtgtattactgtgcgagagctggaggatgggttggatacatggacgtctggggcaaagggaccacggtcaccgtctcctca

SEQ ID NO: 4642 - DNA, 285 bp, Homo sapiens
  source 1..285: mol_type = other DNA
gcttctggttacacctttaccaactatgctatcagctgggtgcgacagtcccctggacaagggcttgagtggatgggatggatcagcggttataatggtaacacaaagtatgcaccgaatctccagggcagagtcaccatgaccgcagacacatccacgagcacagcctacatggagctgaggagcctgagatctgacgatacggccgtgtattcctgtgcgagagattggggaaactacggtttggacgtctggggccaagggaccacggtcaccgtctcctca

SEQ ID NO: 4643 - DNA, 285 bp, Homo sapiens
  source 1..285: mol_type = other DNA
gcttctggttacaccttcaccgactttggcttcagctgggtgcgacaggcccctggacaagggcttgagtggatgggatggatcagcgcttacaatggtaacacaaagtatgcacagaagttccagggcagagtcaccatgaccacagacacatccacgagcacagcccacatggaactgaggagcctaaaatctggcgacatggccgtgtattactgtgcgagagattggggtaactacggtttggacgtctggggccaagggaccacggtcaccgtctcctca

SEQ ID NO: 4644 - DNA, 285 bp, Homo sapiens
  source 1..285: mol_type = other DNA
gcttctggttacaccttcaccgactatgctttcagctgggtgcgacaggcccctggacaagggcttgagtggatgggatggatcagcggttacaatggaaacacaaagtatgcacagaaattccagggcagagtcaccatgaccacagacacatccacgagcacagcctacatggaactgaggagcctaaaatctggcgacacggccgtgtattactgtgcgagagattggggtaactacggtttggacgtctggggccaagggaccacggtcaccgtctcctca

SEQ ID NO: 4645 - DNA, 298 bp, Homo sapiens
  source 1..298: mol_type = other DNA
tgcagcctctggattccccttcaaagactatgaaatggcgtgggtccgccaggctccagggaagggtctggagtgggtctcatatatcagtagcagtggaagtaacatttactacgcagactctgtgaagggccgattcaccatctccagagacaacaccaagaagtcagtgtttttgcaaatgaatagactgagaggcgacgacggcggtatttactactgtgcgagagaggactggaatcacttctaccaccacatggacgtctggggcagagggaccactgtcgtcgtctcctca

SEQ ID NO: 4646 - DNA, 298 bp, Homo sapiens
  source 1..298: mol_type = other DNA
tgcagcctctggattcccctttaaagactatgaaatggcgtgggtccgccaggctccagggaagggtctggagtgggtctcatatatcagtagcagtggaagtaacatttactacgcagactctgtgaagggccgattcaccatctccagagacaacaccaagaattcagtttttttgcaaatgaataggctgagcggcgacgacgccggtgtctattactgtgcgagagaggactggaatcacttctaccaccacatggacgtctggggcagagggaccacagtcgtcgtctcctca

SEQ ID NO: 4647 - DNA, 298 bp, Homo sapiens; identical to SEQ ID NO: 4646
  source 1..298: mol_type = other DNA

SEQ ID NO: 4648 - DNA, 298 bp, Homo sapiens
  source 1..298: mol_type = other DNA
tgtaggctctggattccccttaagtaaatatgaagtgagctgggtccgccaggctccagggaaggggctggagtggctttcatatataagtagcagtgggagtaacagaaactacgcagactttctgaagggccgattcaccgtctctagagacaataccaagaactcagtgtatctgcaaatgaacagcctgagagtcgaggacacgggtctttattactgtgcgagggaagactggaaccacttttaccatcacatggacgtctggggcaaagggaccacggtcatcgtctcctca

SEQ ID NO: 4649 - DNA, 282 bp, Homo sapiens
  source 1..282: mol_type = other DNA
gcttctggatacaccttcactagctatgctatgcattgggtgcgccaggcccccggacaaaggcttgagtggatgggatggatcaacgttggcaatggtaacacaaaatattcacagaagttccagggcagagtcaccattaccagggacacatccgcgagcacagcctccatggagctgagcagcctgagatctgaagacacggctgtgtattactgtgcgagaggatcagcagctggcattgactactggggccagggaaccctggtcaccgtctcctca

SEQ ID NO: 4650 - DNA, 282 bp, Homo sapiens
  source 1..282: mol_type = other DNA
gcttctggatacaccttcactaactatgctatgcattgggtgcgccaggcccccggacaaaggcttgagtggatgggatggatcaacgctggcaacggtaacacaaaatattcacagaagttccagggcagagtcaccattaccagggacacatccgcgagcacagcctacatggagctgagcagcctgagatctgaagacacggctgtgtattactgtgcgagaggatcagcagctggtatagactactggggccagggaaccctggtcaccgtctcgtca

SEQ ID NO: 4651 - DNA, 289 bp, Homo sapiens
  source 1..289: mol_type = other DNA
tgcagcctctggattcaccttttggaactatgccatgacctgggtccgccaggctccagggaaggggctggagtgggtctcagttattactggtagtggtggtaatacgtactatgcagactccgtgaagggccggttcaccatctccagagacaactccaacaacatcttctatctggaaatgaacagcctgagagccgaggacacggccgtatattactgtgcgaaagacgaattaccttacggtatggatgtctggggccaagggaccacggtcaccgtctcctca

SEQ ID NO: 4652 - DNA, 289 bp, Homo sapiens
  source 1..289: mol_type = other DNA
tgcagcctctggattcacctttagtccctatgccatgacctgggtccgccaggctccagagaaggggctggagtgggtctcagctcttagtggtagtggtacttacacatactacgcagactccgtgcagggccggttcatcatctccagagataattccaagaatacgctgtatctgcaaatgaacagcctgagagccgacgacacggccgtttatttctgtgctaaggatgagctaccctacggcatggacgtctggggccaagggaccacggtcaccgtctccaca

SEQ ID NO: 4653 - DNA, 289 bp, Homo sapiens
  source 1..289: mol_type = other DNA
tgaagcctctggattcacctttcataactatgccatgatctgggtccgacaggctccagggaaggggccggagtgggtctcagctattagtggtagtggtgcttacacataccacgcagacgccgtgaagggccggttcaccatttccagagacaactccaagaacacgctgtatctgcaaatgaacagcctgagagccgacgacacggccatttattactgtgcgaaggatgaactaccctacggtatggacgtctggggccaagggaccacggtcaccatctcctca

SEQ ID NO: 4654 - DNA, 289 bp, Homo sapiens; identical to SEQ ID NO: 4651
  source 1..289: mol_type = other DNA

SEQ ID NO: 4655 - DNA, 289 bp, Homo sapiens
  source 1..289: mol_type = other DNA
tgcagcctctggattcacctttagcaactatgccatgatctgggtccgccagggtccagggaaggggccggagtgggtctcagctattagtggtagtggtgattacacatactacgcagactccgtgaagggccggttcaccatctccagagacaattccaagaacacgctgtatctgcaaatgaacagtctgagagtcgaggacacggccgtatatttctgtgcgaaggatgagctaccttatggtatggacgtctggggccaagggaccacggtcaccgtctcctca

SEQ ID NO: 4656 - DNA, 295 bp, Homo sapiens
  source 1..295: mol_type = other DNA
tgcagcctctgggttcgccttcagtgactactacatgacttggatccgccaggctccagggagggggccagagtggatagcacacattagtgctagtggtacttccatgtttcacgcaaactctgtggcgggccgattcacgatctccagggacaatgccaagaaatcactgtatctgcaaatgaacagcctgagagacgacgacacggccgtctattactgtgcgagaggggggcgcggcaccagtttctactgggaatactggggccagggaaccctggtcgccatgtcctca

SEQ ID NO: 4657 - DNA, 292 bp, Homo sapiens
  source 1..292: mol_type = other DNA
tgccgcctctgggttcaccttcagtgcctactacatgacctggctccgccaggctccagggaaggggccggaatggcttgcacacattggcggcggcggttacacgaactacgcagcctctgtgcagggccgctttctcgtctccagagacaacgccaagaatttactgaatctggagatgagcagcctgagagacgaagacacggctgtctattattgtgcgagaggcggacgcggcaccagtttctactgggagtactggggcctgggaaccctggtcaccgtctcctca

SEQ ID NO: 4658 - DNA, 292 bp, Homo sapiens
  source 1..292: mol_type = other DNA
tgccgcctctgggttcaccttcagtgcctactacatgacctggctccgccaggctccagggaaggggccggaatggcttgcacacattggcggcggcggttacacgaactacgcagcctctgtgcaggaccgctttctcgtctccagagacaacgccaagaatttactgaatctggagatgagcagcctgagagacgaagacacggctgtctattattgtgcgagaggcggacgcggcaccagtttctactgggagtactggggcctgggaaccctggtcaccgtctcctca

SEQ ID NO: 4659 - DNA, 289 bp, Homo sapiens
  source 1..289: mol_type = other DNA
tgaagcctctggattcaccgtcagtagcaactacatgagctgggtccgccaggctccagggaaggggctggagtgggtctcagttatttatcacaatggtggcacatcttacgcagactccgtgaagggccgattcaccatctccagacacatttccaacaacacagtgtatcttcaattgaacagcctgacacctgaggacacggccgtctattactgtgcgagagataaccggttctactggtacttcgatctctggggccgtggcaccctggtcactgtctcctca

SEQ ID NO: 4660 - DNA, 289 bp, Homo sapiens
  source 1..289: mol_type = other DNA
tgcagcctctggattcactgtcagtagcaactacatgagctgggtccgccaggctccagggaaggggctggagtgggtctcagttatttatgtcggtggtgccacattctacgcagactccgtgaagggccggttcaccatctccagtgacaatgccaagaacacggtgtttcttcaaatgaacagcctgagagccgacgacacggccgtctattactgtgcgagagataatcgattttactggtacttcgatctctggggccgtggcaccccggtcactgtctcctca

SEQ ID NO: 4661 - DNA, 289 bp, Homo sapiens
  source 1..289: mol_type = other DNA
tgcagcctctggattcaccgtcagcagcaattatatgaattgggtccgccaggctccagggaaggggctggagtgggtctcagttatttatactaatggagtcacattctactcagactccgtgaagggccgattcaccatctccagagacatttccaagaacacggtgtttcttcagatgaacagcctgagagccgaggacacggccgtctatttctgtgcgagagataatcgattttactggtacttcgatctctggggccgtggcaccctggtcgctgtctcctca

SEQ ID NO: 4662 - DNA, 289 bp, Homo sapiens
  source 1..289: mol_type = other DNA
tgcagcctctgggttcaccgtcagtagtaactacatgacctgggtccgccaggctccagggaaggggctggagtgggtctcagttatttacagtaatggtcacacatactacgcagaccccgtaaagggccgattcaccatctccagagacaattccaagaacacgctgtatcttcaaatgaacagcctgacagccgaggacacggccgtgtattactgtgcgagagataatcgattttactggtacttcgatctctggggccgtggcaccctggtcactgtctcctca

SEQ ID NO: 4663 - DNA, 295 bp, Homo sapiens
  source 1..295: mol_type = other DNA
cagtgtctctgatggctccatcagcagtggtggttactcctggagctggatccgccagcacccagggaagggcctggagtggattgggtacatctattacagtgggagcacctactacaacccgtccctcaagagtcgagttgccatatcagtagacacgtctaagaaccagttctccctgaagctgaggtctgtgactgccgcggacacggccgtgtattactgtgcgagagatctgagtggctacgcccactttgactactggggccagggaaccctggtcaccgtctcctca

SEQ ID NO: 4664 - DNA, 295 bp, Homo sapiens
  source 1..295: mol_type = other DNA
cactgtctctggtggctccatcagcagtggtggttactactggagctggatccgccacctcccaggggagggcctggagtggattgggtacacttattatagtgggagcacctactacaatccgtccctcaagagtcgagttaccatatcagtggacacgtctaagaaccagttctccctgaagctgagctctgtgactgccgcggacacggccgtgtatttctgtgcgagagatctgagtggctacgcccactttgactactggggccagggaaccctggtcaccgtctcctca

SEQ ID NO: 4665 - DNA, 295 bp, Homo sapiens; identical to SEQ ID NO: 4664
  source 1..295: mol_type = other DNA

SEQ ID NO: 4666 - DNA, 295 bp, Homo sapiens
  source 1..295: mol_type = other DNA
cactgtctctggtggctccatcagcagtggtggttactactggagctggatccgccacctcccaggggagggcctggagtggattgggtacacttattatagtgggagcacctactacaatccgtccctcaagagtcgagttaccatatcagtggacacgtctaagaaccagttctccctgaagctgagatctgtgactgccgcggacacggccgtgtatttctgtgcgagagatctgagtggctacgcccactttgactactggggccagggaaccctggtcaccgtctcctca

SEQ ID NO: 4667 - DNA, 280 bp, Homo sapiens
  source 1..280: mol_type = other DNA
tgcaggctcaggattcacctttggtgcctattggatgaactgggtccgccaggctccagggagggggctggagtgggtggccaggataaacgaggatggaagtgagagtggccatgtggactctgtgaagggccggttcaccatctccagagacaacgccaaggactcactgtatctccaaatgaacagcctgagagtcgaggacacgggtgtctattactgtacgagacgtggcttcatggacgtctggggcaaagggaccacggtcaccgtctcctca

SEQ ID NO: 4668 - DNA, 280 bp, Homo sapiens
  source 1..280: mol_type = other DNA
tgcagcctctggattcacctttaataactattggatgaactgggtccgccaggctccagggaaggggctggagtgggtggcctacatgaacgaagatggaagtgtgaattcctatgtggactctgtgaagggccgatgcaccatctccagagacaacgccaagaactcactgtatcttcaaatgaacagcctgagagtcgaggacacggctgtgtattactgtacgaggcggggcttcatggacgtctggggcaaagggactacggtcaccgtctcctca

SEQ ID NO: 4669 - DNA, 283 bp, Homo sapiens
  source 1..283: mol_type = other DNA
tgcagcctctggattcacctttagcagctttgccatgagctgggtccgccaggctccagggaaggggctggagtgggtctcaggtattagtgccagtggtggtgccacatactacgcagactccgtgaagggccggttcaccatctccagagacaattccaagaacacgctatatctgcaaatgaacagcctgagagccgaggacacggccgtgtattactgtgcgaaagatcgcgtcagggtggcctactggggccagggaaccctggtcaccgtctcctca

SEQ ID NO: 4670 - DNA, 283 bp, Homo sapiens
  source 1..283: mol_type = other DNA
tgtagcctctggattcacctttagtgcttctggcatgagttgggtccgccaggttccagggaagggcctggagtgggtctcatctattaaaaatggtgataaagccacattctacgcagagtccgtgaagggccgcttcaccctctctagagacaattccaagaacacgctgtatttgcaaatgaacagcctgagagccgacgacacggccatatattactgtgcgaaggatcgagttagggtggcttactggggccagggggccctggtcaccgtctcctca

SEQ ID NO: 4671 - DNA, 285 bp, Homo sapiens
  source 1..285: mol_type = other DNA
gcatctggatacaccttcaccagctacttcatgcactgggtgcgacaggcccctggacaagggcttgagtggatgggaataatcaacacagggaatggtgacacagtttacgcacagaacctccagggcagagtcaccttgaccagggacacgtccacgagcacagtctacatggagctgagcagcctgagatctgaggacacggccgtgtattcctgtgcgagggaacttagtggtggcacctttgactactggggccagggaaccctggtcaccgtctcctca

SEQ ID NO: 4672 - DNA, 285 bp, Homo sapiens
  source 1..285: mol_type = other DNA
gcatctgggtacaccttcaccagtcgctatatacattggatgcgacaggcccctggacaaggacttgagtggctgggaagagtcaaccctggccctggtgacacgcactacgcacaggagttccaggacagagtctccatgaccgcagacacgtccacgaacaccggctacatggaactgcgtagcctgagatctgaggactcggccatctatttctgtgcgagagaacttagcggtggtacctttgactactggggccagggaaccctggtcaccgtctcctca

SEQ ID NO: 4673 - DNA, 285 bp, Homo sapiens
  source 1..285: mol_type = other DNA
gcatctgggtacaccttcaccagtcgctacatacattggatgcgacaggcccctggacaaggacttgagtggctgggaagagtcaaccctgccggtggtgacacgcactacgcacaggagttccaggacagagtctccatgaccacagacacgtccacgaacaccggctacatggaactgagtagcctgagatctgacgactcggccatctattactgtgcgagagaacttagcggtggtacctttgactactggggccagggaaccctggtcaccatctcctca

SEQ ID NO: 4674 - DNA, 285 bp, Homo sapiens
  source 1..285: mol_type = other DNA
gcatctgggtacaccttcaccagtcgctatatacattggatgcgacaggcccctggacaaggacttgagtggctgggaagagtcagccctggccctggtgacacgcactacgcacaggagttccaggacagagtctccatgaccgcagacacgtccacgaacaccggctacatggaactgcgtagcctgagatctgaggactcggccatctatttctgtgcgagagaacttagcggtggtacctttgactactggggccagggaaccctggtcaccgtctcctca

SEQ ID NO: 4675 - DNA, 286 bp, Homo sapiens
  source 1..286: mol_type = other DNA
tacagcctctggaatcagttttggcaattattggatgagctgggtccgccaggctccagggaaggggctggagtgggtggccaacataaacccacatggatatgagaaaaactgtgtggactctgtgaagggccgattcaccatctccagagacaacgccaacaatttattgtatctgcaaatgaccggcctgagagccgaggacacggctgtgtattactgtgcgacacacaacaactgggcgtttgagtactggggccagggaaccctggtcaccgtctcctca

SEQ ID NO: 4676 - DNA, 286 bp, Homo sapiens
  source 1..286: mol_type = other DNA
tgctgcctctggattcacctttagtcggtattggatgacctgggtccgccagggtccagggaaggggctggagtgggtgaccaacataagggatgatggaagtgaggaaaactatgtggactctgtgaagggccgattcaccatctccagagacaacgccaagaactcactgtttctgcaaatgaacagcctgagagccgaggacacggccatttactactgtgcgacacacaacaactgggcttttgagtactggggccagggaaccccggtcaccgtcacctca

SEQ ID NO: 4677 - DNA, 277 bp, Homo sapiens
  source 1..277: mol_type = other DNA
tgcagcctctggattcaccttcagtagctatagcatgaactgggtccgccaggctccagggaaggggctggagtgggtctcatccattagtagtagtagtagttacatatactacacagactcagtgaagggccgattcaccatctccagagacaattccaagaacacgctgtatcttcaaatgggcagcctgagagctgaggacatggctgtgtattactgtgcgagaaatcggggtgattactggggccagggaaccctggtcaccgtctcctca

SEQ ID NO: 4678 - DNA, 277 bp, Homo sapiens
  source 1..277: mol_type = other DNA
tgcagcctctggattcaccttcagtagctatagcatgaactgggtccgccaggctccagggaaggggctggagtgggtctcatccattagtagtagtagtagttacatatactacgcagactcagtgaagggccgattcaccatctccagagacaacgccaagaactcactgtatctgcaaatgaacagcctgagagccgaggacacggctgtgtattactgtgcgagaaatcgaggcgactactggggccagggaaccctggtcaccgtctcctca

SEQ ID NO: 4679 - DNA, 304 bp, Homo sapiens
  source 1..304: mol_type = other DNA
tgcagccactggattcacctttagtaatttttggatgacttgggtccgccaggctccagggaaggggctggagtgggtggccaacataaagcaagatggagatgagactttctatgtggactctgtgaagggccgattcaccatctccagagacaacgccaagaactcactatatctacaaatgaacaacctgagagccgaggacacggctttttattattgtgcgagatccggccggggcgacgtcagtacctattactactttgactactggggccagggaaccctggtcaccgtctcctca

SEQ ID NO: 4680 - DNA, 304 bp, Homo sapiens
  source 1..304: mol_type = other DNA
tgcaacttctggattcgactttggttcctattggatgacttgggtccgccagtccccagggaaggggctggagtgcgtggccaacataaaggaagacgcaactgaattaaactatgtggactttgcgaagggccggttcaccatctcccgagacaacgccaggaagtcactgtatctgcaaatgaacgacctgagagccgaggacacggccatttattactgtgcgagatccgggagaggggatgtaagcacctactactactttgactattggggccagggtaccctggtcgccgtctcctcg

SEQ ID NO: 4681 - DNA, 304 bp, Homo sapiens
  source 1..304: mol_type = other DNA
tgctgcctctggattcgcctttagttcctattggatgagttgggtccgcctggctccaggaaaggggctggagtgcgtggccaacataaaggaagatggaagtgagttaaactatgtggactctgggaagggccgattcaccatctcccgagacaacgccaagagctcactgtatctgcaaatgagcggcctgagagccgaggacacggccatttattactgtgcgagatccgggagaggggatgtaagcacctactactactttgactattggggccagggaaccctggtcgccgtctcctcg

SEQ ID NO: 4682 - DNA, 292 bp, Homo sapiens
  source 1..292: mol_type = other DNA
tgcagcctctggattcaccttcagtagctattggatgcactgggtccgccaagctccagggaaggggctggtgtgggtctcacgcattaatagtgacgggagtggcacaagctacgcggactccgtgaagggccgattcaccatctccagagacaacgccaagaacacgctgtctctgcaaatggacagtctgagagccgaggacacggctgtgtactactgtgtaagagatggagatggggagctaccaattgactactggggccagggaatcctggtcaccgtctcctcg

SEQ ID NO: 4683 - DNA, 292 bp, Homo sapiens
  source 1..292: mol_type = other DNA
tgtagcctctggattcaccttcagtggctactggatgcactgggtccgccaagctccagaaaaggggctggtgtgggtctctcgtactgataatgttgggagtaacacaggctacgcggactccgtgaagggccgattcaccatctccagagacaacgccaagaacaccctgtatctgcaaatgaacagtctgagagccgaggacacggctgtgtattactgtgtaagagatggagacggggaacttcccattgactactggggccagggaaccctggtcaccgtctcctca

SEQ ID NO: 4684 - DNA, 306 bp, Homo sapiens
  source 1..306: mol_type = other DNA
gcttctggttacacctttgccagctatggtatcagctgggtgcgacaggcccctggacaagggcttgagtggatgggatggatcagcgcttacagtggtaacacaaactatgcacagaagctccagggcagagtcaccatggctacagacacatccacgagcacagcctacatggagctgaggagcctgagatctgacgacacggccgtgtattactgtgcgagagacacgggattactatggttcggggagttattacgagcccctgactactggggccagggaaccctggtcaccgtctcctca

SEQ ID NO: 4685 - DNA, 306 bp, Homo sapiens
  source 1..306: mol_type = other DNA
gcttctggttacagctttgccagctatggtatcagctgggtgcgacaggcccctggacaagggcttgagtggatgggatggatcagcgcttacagtggtaacacaaactatgcacagaagctccagggcagagtcaccatgactacagacacatccacgagcacagcctacatggagctgaggagcctgagatctgacgacacggccgtgtattactgtgcgagagacacgggattactatggttcggggagttattacgagcccctgactactggggccagggaaccctggtcaccgtctcctca

SEQ ID NO: 4686 - DNA, 307 bp, Homo sapiens
  source 1..307: mol_type = other DNA
tgcagcctccggattcacctttagcggccatgccatgagctgggtccggcagtctccagggaaggggctggagtgggtctcagagattcatggtaatggtgctgacatatactacgcagactccgtgaagggccggttcaccacatccagagacagttccacgaacacgctgtatctgcaactgaacagcctgagagccgaggacacggccgtatattactgtgcgaaagcgggctacggttcggggagttattatacactaagttttgactcctggggccagggaaccctggtcaccgtctcctct

SEQ ID NO: 4687 - DNA, 307 bp, Homo sapiens
  source 1..307: mol_type = other DNA
tgcagcctctggattcacctttagtaactatgccatgatctgggtccgccaggctccagggaaggggctggagtgggtctcagatattcgcagtaatggcggtagtacaacctacgcagactccgtgagaggccggttcagcatctccagagacaactccaagaacaccctgtatctgcaaatgaacagtctgagagccgacgacacggccacatatttctgtgcgaaggcgggctatggttcagggagttattataccttatcatttgactcctggggccagggaaccctggtcaccgtctcctca

SEQ ID NO: 4688 - DNA, 307 bp, Homo sapiens; identical to SEQ ID NO: 4687
  source 1..307: mol_type = other DNA

SEQ ID NO: 4689 - DNA, 307 bp, Homo sapiens
  source 1..307: mol_type = other DNA
tgcagcctctggattcacctttagtaactatgccatgatctgggtccgccaggctccagggaaggggctggagtgggtctcagatattcgcagtaatggcggtagtacaacctacgcagactccgtgagaggccggttcagcatctccagagacaactccaagaacaccctgtatctgcaaatgaacagcctgagagccgacgacacggccacatatttctgtgcgaaggcgggctatggttcagggagttattataccttatcatttgactcctggggccagggaaccctggtcaccgtctcctca

SEQ ID NO: 4690 - DNA, 304 bp, Homo sapiens
  source 1..304: mol_type = other DNA
tgcagcctctggtttcaccttcagtacttattggatgcactgggtccgccaagctccagggaaggggctggtgtgggtcgcacgtattaatagtgatggggatagcacaatctacgcggactcagtgaagggccgattcaccatctccagagacaacgtcaagaacaccttgtttctgcaaatgaacagtctgagacccgaggacacggctgtatattattgtgtaagagatttgcgaagagattatcaccactactacggtatggacgtctggggccaagggtccacggtcaccgtctcctca

SEQ ID NO: 4691 - DNA, 304 bp, Homo sapiens
  source 1..304: mol_type = other DNA
cgcagcctctggattcacctttagtacttactggatgcactgggtccgccaagttccaggggaggggctggtgtgggtctcacgtataaatagtgatgggactaccacaagccacgcggactccgtgaagggccgattcaccatctccagagacaacgccaagaacacgttgtatttgcaaatgaacagtctgagagccgaggacacggctgtgtattattgtgtaagagatctacggagggattatcatcactattacggtatggacgtctggggccaagggaccacggtcaccgtctcctca

SEQ ID NO: 4692 - DNA, 304 bp, Homo sapiens
  source 1..304: mol_type = other DNA
cgcagcctctggattcacctttagtacttactggatgcactgggtccgccaagttccaggggaggggctggtgtgggtctcacgtgtaaatagtgatgggagtaccacaagccacgcggactccgtgaagggccgattcaccatctccagagacaacgccaagaacacgttgtatttgcaaatgaacagtctgagagccgaggacacggctgtgtattattgtgtaagagatctacggagggattatcatcactattacggtatggacgtctggggccgagggaccacggtcaccgtctcctca

SEQ ID NO: 4693 - DNA, 292 bp, Homo sapiens
  source 1..292: mol_type = other DNA
tgcagcctctggattcaccttcagtaactatggtatgcactggctccgccaggctccagggcagggactggaatatgtttcagcaatttataatgatgggagtagaacattttatacagactctgtgaagggcagattcaccatctccagagacaattccaagaacacgctgtatcttcaactgggcagcctgagagttgaggactcggccatatattactgtgcgaggagggcttgggacttaagctactttgactactggggccagggaaccctggtcaccgtctcctct

SEQ ID NO: 4694 - DNA, 292 bp, Homo sapiens
  source 1..292: mol_type = other DNA
tgtcgcctctggattcaccttcagtgactacggaatgcactgggtccgccaggctccagggaagggaccggaatatgtttcagctattcacaataatgggggtgccacatattatgcaaactctgtgaagggcagattcaccatctccagagacaattccaagaacacgctctatcttcaaatgggcggcctgagagctgaggacatggctgtgtattactgtgcgagaagggcgtgggatctgtcctactttgactactggggccaaggaaccctggtcaccgtctcctca

SEQ ID NO: 4695 - DNA, 292 bp, Homo sapiens
  source 1..292: mol_type = other DNA
tgcagcctctggattcacctttagtagcttttggatgagctgggtccgccaaactccagggaagggactggagtgggtggccaacataaaggaagatggaagtaagaaattgtatgttgactctgtgaagggccggttctccatctccagagacgacaccaagaactcactgtatctgcaaatgaacgacctgagagccgaggacacggctgtgtattactgtgcgagaggagacatagcagcagctggaattgactactggggccagggaacgctggtcaccgtctcctca

SEQ ID NO: 4696 - DNA, 292 bp, Homo sapiens
  source 1..292: mol_type = other DNA
tgtagcctctggattcacctttagtaactattggatgagttgggtccgtcaggctccagggaaggggctggagtgggtggccaacacaaagccagatggagttaggaaactccatgtggactctgtggagggccgattcaccatctccagagacaacgccaggaactcactgtatctgcaaatggacaatctgagagtcgaggacacggctgtctattactgtgcgagaggcgatatagcagcagctggtattgactacttgggccagggaaccctggtcaccgtctcccca

SEQ ID NO: 4697 - DNA, 283 bp, Homo sapiens
  source 1..283: mol_type = other DNA
tgcagcctctggattcacctttagtaactattggatgagttgggtccgccaggctccagggaaggggctggagtgggtggccaacataaagcaagatgaaagcgagaaatactatgtggactctgtaaagggccgattcaccatctccagagacaacgccaagaactcactgtatctgcagatgaacagcctgagagccgaggacacggctgtgtattactgtgcaaaaagggggggtactatgaactactggggccagggaaccctggtcaccgtctcctca

SEQ ID NO: 4698 - DNA, 283 bp, Homo sapiens
  source 1..283: mol_type = other DNA
tgtagcctctggattcacctttagtaactattggatgacttgggtccgccaggctccagggaaggggctggagtgggtggccaacataaagccagatgaaagtgaaaagtactatgtggactctgtgaagggccgattcaccatctccagagacaacgcccagaactcagtatttctgcaaatgaacagcctgagagccgaggacacggccgtctattactgtgcgaagaggggaggaacgatgaattactggggccagggaaccctggtcaccgtctcctca

SEQ ID NO: 4699 - DNA, 307 bp, Homo sapiens
  source 1..307: mol_type = other DNA
tgcagcctctggattcacctttagcagctatgccatgagttgggtccgccaggctccagggaagggcctggagtgggtctcatctattagtggtaatactgcttacatatattacgcagactccatggagggccggttcaccatctccagagacaattccaagaacacgctgtatctgcaaatgaacgacctgagagccgaggacacggccgtatatttctgtgcgaaaaggggcgaggtggcgactgctcttgggcactggtacttcgatctctggggccgtggcaccctgctcactgtctcctca

SEQ ID NO: 4700 - DNA, 307 bp, Homo sapiens
  source 1..307: mol_type = other DNA
tgcaggctctggattcacctttagcaactatgccatgacctgggttcgccaggctccagggaaggggctggagtgggtctcagtcattagtgctactactgaaatcatatactacgcagcctccgtgaagggccggttcaccatctccagagacaactccaagaacacgctctatctgcaaatgaacaatttgagagacgacgacacggccctatatttttgtgcgaaaaggggggaggtggctacagctttgggccactggtacttcgatctctggggccggggcaccctggtcactgtgtcctca

SEQ ID NO: 4701 - DNA, 283 bp, Homo sapiens
  source 1..283: mol_type = other DNA
tgcagcctctggattcacctttagcaattatggcatgagctgggtccgccaggctccagggaaggggctggagtgggtctcatgtattggtggtaatggtggtagcacctcctacggagactccgcgaagggccggttcaccatctccagagacaattccaagaacacggtgtatctgcaaatgaacagtctgagagccgaggacacggccgtatattactgtgcgagacatctccgatataatgactactggggccagggaaccctggtcaccgtctcctca

SEQ ID NO: 4702 - DNA, 280 bp, Homo sapiens
  source 1..280: mol_type = other DNA
tgaaggctctggattcacctttactactggcatgacctgggtccgccaggctccagggaaggggctggagtgggtcacatctattgttagtagtggtgttaccacaaactacgcagactccgtgaggggccggttcaccatctccagagacaactccaggaacacgttgtatttgcaaatgaacagcctgagagtcgaggacacggccgtttattactgtgcgagacacctccgctataatgattactggggacagggaaccctggtcaccgtctcctca

SEQ ID NO: 4703 - DNA, 280 bp, Homo sapiens
  source 1..280: mol_type = other DNA
tgtaggctctggattcacctttactactggcatgacctgggtccgccaggctccagggaaggggctggagtgggtcacatctattcttaatagtggtgttcccacaaactacgcagactccgtgaggggccggttcaccatctccagagacgactccaggaacacgttgtatttgcaaatgaacagcctgagagtcgaggacacggccgtttattactgtgcgagacacctccgctataatgattactggggacagggaaccctggtcaccgtctcctca

SEQ ID NO: 4704 - DNA, 283 bp, Homo sapiens
  source 1..283: mol_type = other DNA
tgcagcctctggattcaccttcagtagctactggatgcactgggtccgccaagctccagggaaggggctggtgtgggtctcacgtattaatactgatgggagtagcacaagctacgcggactccgtgaagggccgattcaccatctccagagacaacgccaagaacacgctgtatctgcaaatgaacagtctgagagccgaggacacggctgtttattactgtgtaaggagtggtggttggattgactactggggccagggaaccctggtcaccgtctcctca

SEQ ID NO: 4705 - DNA, 283 bp, Homo sapiens
  source 1..283: mol_type = other DNA
tgcagcctctggattcaccttcagtacctactggatgcactgggtccgccaagctccagggatggggctggtgtgggtctcacgtattagtactgatgtgagtaccacaacttacgcggactccgtgaagggccgcttcaccatctccagagacaacgccaagagcacgctgtatctgcaaatgaacagtctgagagccgaggacacggctgtgtattactgtgtaaggagtggtggctggattgactattggggccagggaaccctggtcaccgtctcctca

SEQ ID NO: 4706 - DNA, 301 bp, Homo sapiens
  source 1..301: mol_type = other DNA
tgcagcctctggattcaccgtcagtagcaactacatgagctgggtccgccaggctccagggaaggggctggagtgggtctcagttatttatagcggtggtagcacatactacgcagactccgtgaagggcagattcaccatctccagagacaattccaagaacacgctgtatcttcaaatgaacagcctgagagccgaggacacggctgtgtattactgtgcgagagaccgacgtgcatatagtggctacgattactactttgactactggggccagggaaccctggtcaccgtctcctca

SEQ ID NO: 4707 - DNA, 301 bp, Homo sapiens
  source 1..301: mol_type = other DNA
tgcagcgtctggattcactgtcagtaacaactacatgagctgggtccgccaggcgccagggaaggggctggagtgggtctcagttatttatagcggtggtagcacatactacgcagactccgtgaagggcagattcagcatctccagagacaattccaagaacacgctgtatcttcaaatgaacggcctgagagccgaggacacggctgtgtattactgtgcgagagatcgacgtgcatatagtggctacgattactactttgactactggggccagggaaccctggtcaccgtctcctca

SEQ ID NO: 4708 - DNA, 301 bp, Homo sapiens; identical to SEQ ID NO: 4706
  source 1..301: mol_type = other DNA

SEQ ID NO: 4709 - DNA, 282 bp, Homo sapiens
  source 1..282: mol_type = other DNA
gcttctggatacaccttcactggctatgttatgcattgggtgcgccaggcccccggacaaaggcttgagtggatgggatggatcaacgctggcaatggtaacacaaaatattcacagaagttccaggacagagtcaccattaccagggacacatccgcgagcgcagtttacatggagctgagcagcctgagatctgaagacacggctgtatattactgtgcgagatatagtagtgggagccttgactactggggccagggaaccctggtcaccgtctcctca

SEQ ID NO: 4710 - DNA, 282 bp, Homo sapiens
  source 1..282: mol_type = other DNA
gcttctggatacaccttcattagttatgctatgcattgggtgcgccaggcccccggacaaaggcttgagtggatgggatggatcatcactggcaatggtaacacaaaatattcacagaaattccaagacagagtcaccattaccagggacacatccgcgaacacagcctacatggagctgagcagcctgagatctgaagacacggctgtatattactgtgcgaggtatagcagtggctctcttgactactggggccagggaaccatggtcaccgtctcctca

SEQ ID NO: 4711 - DNA, 286 bp, Homo sapiens
  source 1..286: mol_type = other DNA
cactgtctctggtggctccatcactacttactactggagctggctccggcagtccccagggaagggactggagtggattggatatgccttttacagtaggagtgtcaccaactacaacccctccctcaagagtcgagtcaccatatcaatggacacgtcgaagaaccagttctccctgaagctgaactctgtgaccgctgcggacacggccgtgtattactgtgcgagaggtgaaaggttggggggtgacttctggggccagggaatcctggtcaccgtctcgtca

SEQ ID NO: 4712 - DNA, 283 bp, Homo sapiens
  source 1..283: mol_type = other DNA
cactgtctctggtggctccatcagtggttactactggagctggctccggcagcccccagggaagggactggagtggattgggtatattcgttacagtgggagcaccaactacagcccctccctcaacagtcgagtcaccatatcagtagacacgtccaagaaccaattctccctgaaggtgacctctgtgaccactgcggacacggccgtgtattactgtgcgagaggggaacgtctcggtggtgacttctggggccagggaatcctggtcaccgtctcctca

SEQ ID NO: 4713 - DNA, 298 bp, Homo sapiens
  source 1..298: mol_type = other DNA
tgttgcctctggaatcagtttcagtggctactggatgagctgggtccgccaggctccagggaaggggctggagtgggtggccagggtaaagccagatggaagtgacaaaaactatgtggactccgtgaagggccgattcaccatctccagagacaacgccaagaactcactgtctctgcaaatgaatagcctgagagccgaggacacggctgtctattactgtgcgagagtggggcagtggccactcaattgggcccttgactactggggccagggaaccctggtcaccgtctcctca

SEQ ID NO: 4714 - DNA, 298 bp, Homo sapiens
  source 1..298: mol_type = other DNA
tgttgcctctggaatcagtttcagtggctactggatgagctgggtccgccaggctccagggaaggggctggagtgggtggccagggtaaagccagatggaagtgacaaaaactatgtggactccgtgaagggccgattcaccatctccagagacaacgccaagaactcactgtctctgcaaatgaatagcctgagagccgaggacacggctgtctattactgtgcgagagtggggcagtggccactcaattgggcccttgactactggggccagggaacccaggtcaccgtctcctca

SEQ ID NO: 4715 - DNA, 298 bp, Homo sapiens
  source 1..298: mol_type = other DNA
tgttgcctctggaatcagtttcagtggctactggatgagctgggtccgccaggctccagggaaggggctggagtgggtggccagggtaaagccagatggaagtgacaaaaactatgtggactccgtgaagggccgattcaccatctccagagacaacgccaagaactcactgtctctgcaaatgaatagcctgagagccgaggacacggctgtctactactgtgcgagagtggggcagtggccactcaattgggcccttgactactggggccagggaacccaggtcaccgtctcctca

SEQ ID NO: 4716 - DNA, 298 bp, Homo sapiens
  source 1..298: mol_type = other DNA
tgttggatctggaatcagcttcagtggctattggatgacctgggtccgccagactccagggaaggggctggagtgggtggccagggtaaagccagatggaggtgagaaaaactatgtggactctgtgaagggccgattcaccatctccagagacaacgccaagaactcactgtctctgcaaatgaatagcctgagagacgaggacacggctgtgtattactgtgcgagagtggggcagtggccactcaattgggcccttgactactggggccagggaacccaggtcaccgtctcctca

SEQ ID NO: 4717 - DNA, 298 bp, Homo sapiens
  source 1..298: mol_type = other DNA
tgttgcctctggaatcagtttcagtggctactggatgagctgggtccgccaggctccagggaaggggctggagtgggtggccagggaaaagccagatggaagtgacaaaaactatgtggactccgtgaagggccgattcaccatctccagagacaacgccaagaactcactgtctctgcaaatgaatagcctgagagccgaggacacggctgtctattactgtgcgagagtggggcagtggccactcaattgggcccttgactactggggccagggaacccaggtcaccgtctcctca

SEQ ID NO: 4718 - DNA, 277 bp, Homo sapiens
  source 1..277: mol_type = other DNA
tgcagcctctggattcatcttcaggaattactggatgcactgggtccgccaagctccagggaaggggctggtgtgggtctcacgttgcagcggtgatggcagactcacaacatacgcggactccgtgaagggccggttcaccatctccagagacaacgccaagaacatagtctatcttcaaatcaacagtctgagagtcgaggacacggctgtttatcattgcgtctcaggcttgggcgaccactggggccagggaatcctggtctccgtctcctca

SEQ ID NO: 4719 - DNA, 277 bp, Homo sapiens
  source 1..277: mol_type = other DNA
tgcagcctctggattcaccttcagaacctattggatgcactgggtccgtcaagctccaggaaaggggctgctttgggtctcacgtattaatagcgatgggaatctcagaacttacacggactccgtgaagggccgcttcaccatctccagagacaacgccagggacacactgtatctacaaatcaataatctgagaaccggggacacgggtttgtattattgtgtcagtggactgggcgaccactggggccagggaaccctggtcaccgtctcctca

SEQ ID NO: 4720 - DNA, 277 bp, Homo sapiens
  source 1..277: mol_type = other DNA
tgcagcctctggattcgacttcaccaactcctggatgcactgggtccgccaagctccagggaaggggctggagtgggtctcacgtattaatggtgatgggagtctcacaacttgcgttgactccgtgaagggccgcttcaccgtctccagagacaacgccaaatatacagtgcagctgcagatgagcagtctgagagtcgaggacacggctttttattactgtgtgagtggcctgggcgaccactggagccagggaaccctggtcaccgttttctct

SEQ ID NO: 4721 - DNA, 292 bp, Homo sapiens
  source 1..292: mol_type = other DNA
cactgtctctggtggctccatcagcagtgggactaactactggggctggatccgccagcccccagggaaggggctggagtggattgcgagtatctattatagtgggaacacctactacaacccgtccctcaagagtcgagtcaccatatccgtagacacgtccaagaaccagttctccctgaacctgagctctgtgaccgccgcagacacggctgtgtattactgtgcgagacggccgaggggtgggagcctagactactggggccagggagccctggtcaccgtctcctca

SEQ ID NO: 4722 - DNA, 289 bp, Homo sapiens
  source 1..289: mol_type = other DNA
cactgtctctggtggctccatcagcagtagtacttccttctgggcctggatccgccagcccccagggaaggaactggagtggattgggaatatctttaatagtggcaccgcctacaacccgtccctcaggactcgagtcgccatatccgcagacatgtccaagaaccagttctccctggagttgaggtctgtgaccgccgaagacacggctgtgtattactgtgcgagacggccgaggggcggcagcctcgactactggggccagggaaccctggtcaccgtctcctca

SEQ ID NO: 4723 - DNA, 292 bp, Homo sapiens
  source 1..292: mol_type = other DNA
cgctgtctctggtgggtccttcagtggttactactggagttggatccgccagccccccgggaaggggctggagtggattggggaaatcaatcatagtggaaacaccaactacaacccgtccctcaagagtcgagtcaccatatcagtagacacgtccaagaaccagttctccctggagctgagctctgtgaccgccgcggacacggctgtgtattactgtgcgagaggacaaagcagcagctggtactactttgactactggggccagggaaccctggtcaccgtctcctca

SEQ ID NO: 4724 - DNA, 292 bp, Homo sapiens
  source 1..292: mol_type = other DNA
cgctgtctatggtgggtccttcaatggttactactggagctggatccgtcagcccccagggaaggggctggagtggattggggaaatcaatcatagtggaagctccaactacaacccgtccctcaagagtcgggtcaccatatcagtagacacgtccaagaaccagttctccctgaagctgagctctgtgaccgccgcggacacggctgtttattactgtgcgagaggccagagcagctcgtggtactactttgactactggggccggggaaccctggtcaccgtctcctca

SEQ ID NO: 4725 - DNA, 306 bp, Homo sapiens
  source 1..306: mol_type = other DNA
gcttctggatatggcttaaaggactactttatgcactgggtgcgacaggcccctgggcaagggctggagtggatgggacgcattaatggtaacgatgcggacacagattatgaacagagatttcaggccagggtcaccttgaccagggacacggccaccaatataggttacatggagttgaggaggctgacttctgacgactctgccctgtatttctgtgtacgaggaaggagcattacaggacgggggggagtctatgatgcttttgatatttggggccaagggacaacggtcgtcgtcgcttca

SEQ ID NO: 4726 - DNA, 306 bp, Homo sapiens
  source 1..306: mol_type = other DNA
gcttctggatatggcttaaaggactactttatgcactgggtgcgacaggcccctgggcaagggctggagtggatgggacgcattaatggtaacgatgcggacacagaatatgaacagagatttcaggccagggtcaccttgaccagggacacggccaccaatataggttacatggagttgaggaggctgacttctgacgactctgccctgtatttctgtgtacgaggaaggagcattacaggacgggggggagtctatgatgcttttgatatttggggccaagggacaacggtcgtcgtcgcttca

SEQ ID NO: 4727 - DNA, 306 bp, Homo sapiens
  source 1..306: mol_type = other DNA
gcttctggatatggcttaaaggactactttatgcactgggtgcgacaggcccctgggcaagggctggagtggatgggacgcattaatggtaacgatgcggacacagattatgaacagagatttcaggccagggtcaccttgaccagggacacggccaccaatataggttacatggagttgaggaggctgacttctgacgactctgccctgtatttctgtgtacgaggaaggagcattacaggacgggggggagtctatgatgcttttgatatttggggccaagggacaacggtcgtcgttgcttca

SEQ ID NO: 4728 - DNA, 289 bp, Homo sapiens
  source 1..289: mol_type = other DNA
cgcagcctctggattcaccttcaggagttatgaaatgaactgggtccgccaggctccagggaaggggctggaatggctttcatacattagtactagtggcagtaccatatactacgcagactctgtgaagggccgattcaccatctccagagacaacgccaagaactcactgtatctgcaaatgaacagcctgagagccgaggacacggctgtttatttctgtgcgaggggttacggtgggaatccctttgactactggggccagggaaccctggtcaccgtctcctca

SEQ ID NO: 4729 - DNA, 289 bp, Homo sapiens
  source 1..289: mol_type = other DNA
tgcagcctctggattcaccttcagtagttatgaaatgaactgggtccgccaggctccagggaaggggctggagtgggtttcatacattagtagtagtggtagtaccatatactacgcagactctgtgaagggccgattcaccatctccagagacaacgccaagaactcactgtatctgcaaatgaacagcctgagagccgaggacacggctgtttattactgtgcgagaggctacggtggtaacccctttgactactggggccagggaaccctggtcaccgtctcctca

SEQ ID NO: 4730 - DNA, 292 bp, Homo sapiens
  source 1..292: mol_type = other DNA
cactgtctctggtggctccatcagcacttactactggagctggatccggcagcccccaggggagggactggagtggattgggaatatctactacagagggagcacctactacaacccctccctcaagagtcgagtcaccatatcagtagacacgtccaagaaccagttctccctgaacctgagctctgtgaccgccgcagacacggccgtgtattactgtgcgagacaagcccaatactactactacggtatggacgtctggggccaagggaccacggtcaccgtctcctca

SEQ ID NO: 4731 - DNA, 292 bp, Homo sapiens
  source 1..292: mol_type = other DNA
cactgtctctggtggctccatcagtacttactactggagctggatccggcagcccccagggaagggactggagtggattgggtatatctattacagtgggagcaccacctacaacccctccctcaagagtcgagtcaccatatcggtagacacgtccaagaaccagttctccctgaagctgagctctgtgaccgccgcagacacggccgtgtattactgtgcgagacaagcccaatactactactacggtatggacgtctggggccaagggaccacggtcaccgtctcctca

SEQ ID NO: 4732 - DNA, 292 bp, Homo sapiens; identical to SEQ ID NO: 4731
  source 1..292: mol_type = other DNA

SEQ ID NO: 4733 - DNA, 295 bp, Homo sapiens
  source 1..295: mol_type = other DNA
tgcagcctctggattcaccttcagtagctactggatgcactgggtccgccaagctccagggaaggggctggtgtgggtctcacgtattaatagtgatgggagtagcacaagttacgcggactccgtgaagggccgattcaccatctccagagacagcgccaagaacacgctgtatctgcaaatgaacagtctgagagccgaggacacggctctgtattactgtgcaagagggggaggatacagctatggtgctcctgactactggggccagggaaccctggtcaccgtctcctca

SEQ ID NO: 4734 - DNA, 295 bp, Homo sapiens
  source 1..295: mol_type = other DNA
tgcagcctctggattcaccttcagtagctactggatgcactgggtccgccaagctccagggaaggggctggtgtgggtctcacgtattaatagtgatgggagtagtacaagctacgcggactccgtgaagggccgattcaccgtctccagagacaacgccaagaacacgctgtatctgcaaatgaacagtctgagagccgaggacacggctgtgtattactgtgcaagaggtggtggatacagctatggtgctcctgactactggggccagggaaccctggtcaccgtctcctca

SEQ ID NO: 4735 - DNA, 295 bp, Homo sapiens
  source 1..295: mol_type = other DNA
tgcaacctctggattccccttcagtgattatgccatggcctgggtccgccaggttccagggaaggggctggagtgggtctcagctattggtggtggtggttttaatacatactacgcagactccgtgaagggccggttcaccatctccagagacgattccaagaacacactgtatctgcaaatgaacagcctgaaagccgaggacacggccatttattactgtgcgaaaagggggggtagtagcagctggacttttgactcctggggccacggaaccctggtcaccgtctcctca

SEQ ID NO: 4736 - DNA, 295 bp, Homo sapiens
  source 1..295: mol_type = other DNA
tgcagcctctggattcacgtttagcagatatgccatgagctgggtccgccaggctccagggaaggggctggagtgggtctcagctattactggtggtggtaccaccgcatactacgcagactccgtgaagggccgcttcaccatcgccagagacgattccgagagcacactacatctgcaaatgaacagcctgagcgccgaggacacggccctatattactgtgcgaaaaggggagggagcagcagctggacttttgactcctggggccagggaaccctggtcaccgtctcctca

SEQ ID NO: 4737 - DNA, 280 bp, Homo sapiens
  source 1..280: mol_type = other DNA
cactgtctcttctggctccatgagaagtaactactggagctggatccggcaggccccagggaaggaactggaatggattggctatgtccattacagtgggagcacctcctataatccctccctcacgagtcgagtcaccatatcaatcgacacgtccaagaatcaattctccctgaacctgaggtctgtgaccgctgcggacacggccgtctattattgtgcgagaggaaatggctggcaccccgactggggccagggaaccctggtcaccgtctcctgg

SEQ ID NO: 4738 - DNA, 280 bp, Homo sapiens
  source 1..280: mol_type = other DNA
cagtgtctctggtggctccatcagtggtcactactggacctggatccggcagcccccagggaaggggctggagtggattgggaatatccattacagtaggagcaccgactccaatccctccctcaagagtcgagtcaccatttccttagacatgtccaagaaccaggtctccctgaaactgaactttgtgaccgctgcggacacggccgtatattactgtgcgagaggcaatggctggcatcctgattggggccagggaaccctggtcaccgtctcctca

SEQ ID NO: 4739 - DNA, 283 bp, Homo sapiens
  source 1..283: mol_type = other DNA
tgcagcctctggattcaactttgaagatgttgccatgcactgggtccgtcatattgcaggaaagggtctggaatggctctcttttatttccggggatggtgctaagcagtactatgcagactctgtgaagggccgattcaccatctccagagacagcagcaagcactccctgtatctgcaaatgaacagtctgggagctgaggacaccgccttatattattgtgttaaagataatcccgttcttcatatctggggccaggggacaatggtcaccgtctcttca

SEQ ID NO: 4740 - DNA, 283 bp, Homo sapiens
  source 1..283: mol_type = other DNA
tgcagcctctggattcaactttgatgaccatgccatgcactgggtccgtcaagctccagggaagggtccggagtgggtcggtcttattagaggggacgacagtttcagaaaatatggagactctgtgaagggccgattcatcatttccagagacaacagcaaaaactccctgtatttgcaaatgaacagtctgagaactgaggacaccgccctgtattactgtgtaaaggataaccctgttttacatatctggggccaagggacactagtcaccgtctcttta

SEQ ID NO: 4741 - DNA, 297 bp, Homo sapiens
  source 1..297: mol_type = other DNA
aagggttctggatacagctttaccacctactggatcggctgggtgcgccagatgcccgggaaaggcctggagtggatggggatcatctatcctgatgactctgataccagatacagcccgtccttccaaggccaggtcaccttctcagccgacaagtccatcagcaccgcctacctacagtggagcagcctgaaggcctcggacaccgccatgtattactgtgcaagactttgctttcgtaatagtatcacctgcttatactactggggccagggaaccctggtcaccgtctcctca

SEQ ID NO: 4742 - DNA, 297 bp, Homo sapiens
  source 1..297: mol_type = other DNA
aagggttctggatacagctttaccacctactggatcggctgggtgcgccagatgcccgggaaaggcctggagtggatggggatcatctatcctgatgactctgataccagatacagcccgtccttccaaggccaggtcaccatctcagccgacaagtccatcagcaccgcctacctacagtggagcagcctgaaggcctcggacaccgccatgtattactgtgcaagactttgctttcgtaatagtatcacctgcttatactactggggccagggaaccctggtcaccgtctcctca

SEQ ID NO: 4743 - DNA, 297 bp, Homo sapiens
  source 1..297: mol_type = other DNA
aagggttctggatacagctttaccacctactggatcggctgggtgcgccagatgcccgggaaaggcctggagtggatggggatcatatatcctgatgactctgataccagatacagcccgtccttccaaggccaggtcaccttctcagccgacaagtccatcagcaccgcctacctacagtggagcagcctgaaggcctcggacaccgccatgtattactgtgcaagactttgctttcgtaatagtatcacctgcttatactactggggccagggaaccctggtcaccgtctcctca

SEQ ID NO: 4744 - DNA, 297 bp, Homo sapiens
  source 1..297: mol_type = other DNA
aagggttctggatacagctttaccacctactggatcggctgggtgcgccagatgcccgggaaaggcctggagtggatggggatcatctatcctgatgactctgataccagatacagcccgtccttccaaggccagatcaccttctcagccgacaagtccatcagcaccgcctacctacagtggagcagcctgaaggcctcggacaccgccatgtattactgtgcaagactttgctttcgtaatagtatcacctgcttatactactggggccagggaaccctggtcaccgtctcctca

SEQ ID NO: 4745 - DNA, 297 bp, Homo sapiens
  source 1..297: mol_type = other DNA
aagggttctggatacagctttaccacctactggatcggctgggtgcgccagatgcccgggaaaggcctggagtggatggggatcatctatcctgatgactctgataccagatacagcccgtccttccaaggccaggtcaccatctcagccgacaagtccatcagcaccgcctacctacagtggagcagcctgaaggcctcggacaccgccatgtattactgtgcaagactttgttttcgtaatagtatcacctgcttatactactggggccagggaaccctggtcaccgtctcctca

SEQ ID NO: 4746 - DNA, 297 bp, Homo sapiens
  source 1..297: mol_type = other DNA
aagggttctggatacagctttaccacctactggatcggctgggtgcgccagatgcccgggaaaggcctggagtggatggggatcatctatcctgatgactctgataccagatacagcccgtccttccaaggccaggtcaccgtctcagccgacaagtccatcagcaccgcctacctacagtggagcagcctgaaggcctcggacaccgccatgtattactgtgcaagactttgctttcgtaatagtatcacctgcttatactactggggccagggaaccctggtcaccgtctcctca

SEQ ID NO: 4747 - DNA, 297 bp, Homo sapiens
  source 1..297: mol_type = other DNA
aagggttctggatacagctttaccacctactggatcggctgggtacgccagatgcccgggaaaggcctggagtggatggggatcatctatcctgatgactctgataccagatacagcccgtccttccaaggccaggtcaccttctcagccgacaagtccatcagcaccgcctacctacagtggagcagcctgaaggcctcggacaccgccatgtattactgtgcaagactttgctttcgtaatagtatcacctgcttatactactggggccagggaaccctggtcaccgtctcctca

SEQ ID NO: 4748 - DNA, 297 bp, Homo sapiens
  source 1..297: mol_type = other DNA
aagggttctggatacagctttaccacctactggatcggctgggtgcgccagatgcccgggaaaggcctggagtggatggggatcatctatcctgatgactctgataccagatacagcccgtccttccaaggccaggccaccttctcagccgacaagtccatcagcaccgcctacctacagtggagcagcctgaaggcctcggacaccgccatgtattactgtgcaagactttgctttcgtaatagtatcacctgcttatactactggggccagggaaccctggtcaccgtctcctca

SEQ ID NO: 4749 - DNA, 292 bp, Homo sapiens
  source 1..292: mol_type = other DNA
tgcagcctctggattcacctttagtagatatgccatgagctgggtccgccaggctccagggaaggggctggagtgggtctcaggtcttagtagtagtggtagtagtacatactacgcagactccgtgaagggccggttcaccatctccagagacaattccaagaacacgctgtatctgcaaatgaacagcctgagagccgaggacacggccgtatattactgtgcggtaaattgtagtggtggtacctgctgggactactggggccagggaaccctggtcaccgtctcctca

SEQ ID NO: 4750 - DNA, 292 bp, Homo sapiens; identical to SEQ ID NO: 4749
  source 1..292: mol_type = other DNA

SEQ ID NO: 4751 - DNA, 292 bp, Homo sapiens
  source 1..292: mol_type = other DNA
tgcagcctctggattcacctttagtagatatgccatgagctgggtccgccaggctccagggaaggggctggggtgggtctcaggtcttagtagtagtggtagtagtacatactacgcagactccgtgaagggccggttcaccatctccagagacaattccaagaacacgctgtatctgcaaatgaacagcctgagagccgaggacacggccgtatattactgtgcggtaaattgtagtggtggtacctgctgggactactggggccagggaaccctggtcaccgtctcctca

SEQ ID NO: 4752 - DNA, 292 bp, Homo sapiens
  source 1..292: mol_type = other DNA
tgcagcctctggattcacctttagcaactatgccatgagctgggtccgccaggctccagggaaggggctggagtgggtctcaggtattagtggtagtggtggtagcacatactacgcagcctccgtgaagggccggttcaccatctccagagacaattccaaggacaccctgtatctgcaaatgaacagcctgagagccgaggacacggccgtatattactgtgcggttaattgtagtggtggtacctgttgggactactggggccagggaaccctggtcaccgtctcctca

SEQ ID NO: 4753 - DNA, 327 bp, Homo sapiens
  source 1..327: mol_type = other DNA
acacagaccctcacgctgacctgcagcttctcaggcttctcactcaacacgactggagtgtgtgtggcctggatccgtcagcccccagggaaggccctggagtggcttgcagtcattgactgggatggcgctgtattctacagcacatctctgaggcccaggctcaccgtctccaagggcacctccaaaaaccaggtggtccttacaatgaccagcatggagccagcggacactgccactttttattgtgcacgccatttctatgacaggagtgactattttggctttgacttctggggcccgggaaccctggtcaccgtctcctca

SEQ ID NO: 4754 - DNA, 327 bp, Homo sapiens
  source 1..327: mol_type = other DNA
acacagaccctcacgctgacctgcagcttctcaggcttctcactcaacacgactggagtgtgtgtggcctggatccgtcagcccccagggaaggccctggagtggcttgcagtcattgactgggatggcgctgtattctacagcacatctctgaggcccaggctcaccgtctccaagggcacctccaaaaaccaggtggtccttacaatgaccagcatggagccagaggacactgccactttttattgtgcacgccatttctatgacaggagtgactattttggctttgacttctggggcccgggaaccctggtcaccgtctcctca

SEQ ID NO: 4755 - DNA, 327 bp, Homo sapiens
  source 1..327: mol_type = other DNA
acacagaccctcacgctgacctgcagcttctcaggcttctcactcaacacgactggagtgtgtgtggcctggatccgtcagcccccagggaaggccctggagtggcttgcagtcattgactgggatggcgctgtattctacagcacatctctgaggcccaggctcaccgtctccaagggcacctccaaaaaccaggtggtccttacaatgaccagcatggagccagcggacactgccaccttttattgtgcacgccatttctatgacaggagtgactattttggctttgacttctggggcccgggaaccctggtcaccgtctcctca

SEQ ID NO: 4756 - DNA, 327 bp, Homo sapiens
  source 1..327: mol_type = other DNA
acacagaccctcacgctgacctgcagcttctcagacttctcactcaacacgactggagtgtgtgtggcctggatccgtcagcccccagggaaggccctggagtggcttgcagtcattgactgggatggcgctgtattctacagcacatctctgaggcccaggctcaccgtctccaagggcacctccaaaaaccaggtggtccttacaatgaccagcatggagccagcggacactgccactttttattgtgcacgccatttctatgacaggagtgactattttggctttgacttctggggcccgggaaccctggtcaccgtctcctca

SEQ ID NO: 4757 - DNA, 277 bp, Homo sapiens
  source 1..277: mol_type = other DNA
tgttgcatctgggttcaccgccagttccagttacatgaactgggtccgccaggctccagggaaggggctggagtggatatcagttctttacagtgacgagagaacatactacgcagactccgtgaagggccgctttattatctccagagacaattccaagaacaccctatatcttcaaatcaatagcgcgagagtcgaggacacggccgtgtattactgtgcgagaggcaagggtttcgacccctggggccagggaaccctggtcaccgtctcctca

SEQ ID NO: 4758 - DNA, 277 bp, Homo sapiens
  source 1..277: mol_type = other DNA
tgtagcctctgggttcaccgccagctccagctacatgaattgggtccgccaggctccagggaaggggctggagtggatttcggttctttacagtgatggtagaacattctacgcagactccgtgaagggccgcttcaccatctccagagacagttccaacaacactctatatcttcaaatgaatagcgtgagagccgaggacacggccgtctattactgtgcgagaggaaaggggttcgacccctggggccagggaaccctggtcaccgtctcctca

SEQ ID NO: 4759 - DNA, 277 bp, Homo sapiens
  source 1..277: mol_type = other DNA
tgtagcatctggcttcaccgccagtgacagctacatgagttgggtccgccaggctccagggaaggggctggagtggatttcagttctttacagtgatgatagaacattctacgcagactccgtgaagggccgcttcaccgtctccagagaccgttccaagaacactctatatcttcaaatgaatcgcgtgagagccgaggacacggccatgtattactgtgcgagaggcaaagggttcgacccctggggccagggaaccctggtcaccgtctcctca

SEQ ID NO: 4760 - DNA, 277 bp, Homo sapiens
  source 1..277: mol_type = other DNA
tgcagcctctgggttctccatcagtggcaactacatgaactgggtccgccaggctccagggaaggggctggagtgggtcgcaggtttcacaagtactgataatacacattatgctgactccgtgaggggccgattcaccatctccagagacacttcaagaaacacactctttcttcaaatgaatagcctgagagtcgaggactcggccctttattactgtgcgagaggcaaagggttcgacccctggggccgcggaaccctggtcaccgtctcctca

SEQ ID NO: 4761 - DNA, 277 bp, Homo sapiens
  source 1..277: mol_type = other DNA
tgcagcctctgggttcgacatcagtggccattacatgaactgggtccgccaggctccaggaaagggactggagtgggtcgcaggtttcacaggtaccgggaaaatacattatgccgactccctgaggggccgattcagcatctccagagacctttcgaataacacactttttcttcaaatgaatagtctgagagtcgaagactcggccctttattactgtgcgagaggcaaagggttcgacccctggggccgcggaaccctggtcaccgtctcctca

SEQ ID NO: 4762 - DNA, 277 bp, Homo sapiens
  source 1..277: mol_type = other DNA
tgcagcctctgggttcgacatcagtggccattacatcaactgggtccgccaggctccaggaaagggactggagtgggtcgcaggtttcacaaatactgggagaatacattacgctgactccctgaggggccgattcagcatctccagagacctttcgagtaacacagtctttcttcaaatgaatagtctgagagtcgaagactcggccctttattactgtgcgagaggcaaagggttcgacccctggggccgcggaaccctggtcagcgtctcctca

SEQ ID NO: 4763 - DNA, 277 bp, Homo sapiens
  source 1..277: mol_type = other DNA
tgcagcctctgggttctccatcagtggcaactacatgaactgggtccgccaggctccagggaaggggctggagtgggtcgcaggtttcacaagtactgataatacacattatgctgactccgtgaggggccgattcaccatctccagagacacttcaagaaacacactctttcttcaaatgaatagcctgagagtcgaggactcggccctttattactgtgcaagaggcaaagggttcgacccctggggccgcggaaccctggtcaccgtctcctca

SEQ ID NO: 4764 - DNA, 277 bp, Homo sapiens
  source 1..277: mol_type = other DNA
tgcagcctctgggttcggcatcagtggccattacataaactgggtccgccaggctccagggaaggggctggaatgggtcgcaggtttcacaagtactggaaatacacattatgctgactccgtgaggggccgattcaccatctccagagacatctcaaataacacagtctttcttcaattgaatagcctgagagtcgaggactcggccctttattactgtgcgagaggcaaagggttcgacccctggggccgcggaaccctggtcaccgtctcctca

SEQ ID NO: 4765 - DNA, 277 bp, Homo sapiens
  source 1..277: mol_type = other DNA
tgcagcctctgggttcgacatcagagaccattacctcaactgggtccgccaggctcctggaaagggactggagtgggtcgcaggcttcacaaatactggcagaatgcattatgctgactccctgaggggccgattcagcatctccagagacctttcgaataacacactgtttcttcacatgactagtctcagagtcgaagactcggccctttattactgtgcgagaggcaaagggttcgacccctggggccgcggaaccctggtctccgtctcccca

SEQ ID NO: 4766 - DNA, 277 bp, Homo sapiens
  source 1..277: mol_type = other DNA
tgcagcctctgggttcgacatcagtgggcattacttgaactgggtccgccaggctccaggaaagggactggagtgggtcgcaggtttcacaaatactgggaaaatacattatgctgactccctgaggggccgattcaccatctccagagacctttcgaataacacactctttcttcaaatgaatagtctgagagtcgaagactcggccctttattactgtgcgagaggcaaagggttcgacccctggggccgcggaaccctggtcaccgtctcctca

SEQ ID NO: 4767 - DNA, 277 bp, Homo sapiens
  source 1..277: mol_type = other DNA
tgcagcctctgggttcgacatcagtggtcattatatgaattgggtccgccaggctccaggaaagggactggaatgggtcgcaggtttcacaaatactgggagaatacattatgccgactccctgaggggccgattcagcatctccagagacctttcgaataacacactctttcttcaaatgaatagtctgagagtcgaagactcggccctttattactgtgcgagaggcaaagggttcgacccctggggccgcggaaccctggtcaccgtctcctca

SEQ ID NO: 4768 - DNA, 291 bp, Homo sapiens
  source 1..291: mol_type = other DNA
aagggttctggatacagctttaccagctactggatcggctgggtgcgccagatgcccgggaaaggcctggagtggatgggagtcatctatcctggtgactctgataccagatatagtccgtccttccaaggccaggtcaccatctcagtcgacaagtccatcaacaccgcctacctgcagtggagcagcctaaaggcctcggacaccgccgtgtattactgtgcgagacgggcgggagacgctgaatacttccaacactggggccagggcaccccggtcaccgtctcctca

SEQ ID NO: 4769 - DNA, 291 bp, Homo sapiens
  source 1..291: mol_type = other DNA
aagggttctggatacagcttcaccaactactggatcggctgggtgcgccagatgcccgggaaaggcctagagtggatggggaccatctatcctggtgactctgatactagatacagcccgtccttccaaggccaggtcaccatctcagccgacaagtccatcaacaccgccaccctgcagtggagcagcctgaaggcctcggacaccgccatatattactgtgcgagacgggcgggagacgctgaatacttccagcactggggccagggcaccccggtcaccgtctcctca

SEQ ID NO: 4770 - DNA, 291 bp, Homo sapiens
  source 1..291: mol_type = other DNA
aagggttctggatacagctttaccagctactggatcggctgggtgcgccagatgcccgggaaaggcctggagtggatgggggtcatctatcctggtgactctgataccagatacagcccgtccttccaaggccaggtcaccatctcagtcgacaagtccatcaacaccgcctacctgcagtggagcagcctaaaggcctcggacaccgccgtgtattactgtgcgagacgggcgggagacgctgaatacttccaacactggggccagggcaccccggtcaccgtctcctca

SEQ ID NO: 4771 - DNA, 291 bp, Homo sapiens
  source 1..291: mol_type = other DNA
aagggttctggatacagctttaccagctactggatcggctgggtgcgccagatgcccgggaaaggcctggagtggatgggggtcatctatcctggtgactctgataccagatacagcccgtccttccaaggccaggtcaccatctcagccgacaagtccatcaacaccgcctacctgcagtggagcagcctaaaggcctcggacaccgccgtgtattactgtgcgagacgggcgggagacgctgaatacttccagcactggggccagggcaccccggtcaccgtctcctca

SEQ ID NO: 4772 - DNA, 291 bp, Homo sapiens
  source 1..291: mol_type = other DNA
aagggttctggatacagctttaccagctactggatcggctgggtgcgccagatgcccgggaaaggcctggagtggatgggagtcatctatcctggtgactctgataccagatatagtccgtccttccaaggccaggtcaccatctcagtcgacaagtccatcaacaccgcctacctgcagtggagcagcctaaaggcctcggacaccgctgtgtattactgtgcgagacgggcgggagacgctgaatacttccaacactggggccagggcaccccggtcaccgtctcctca

SEQ ID NO: 4773 - DNA, 291 bp, Homo sapiens
  source 1..291: mol_type = other DNA
aagggttctggatacagctttaccagctactggatcggctgggtgcgccagatgcccgggaaaggcctggagtggatgggggtcatctatcctggtgactctgataccagatacagcccgtccttccaaggccaaatcaccatctcagccgacaagtccatcaacaccgcctacctgcagtggagcagcctaaaggcctcggacaccgccgtatattactgtgcgagacgggcgggagacgctgaatacttccagcactggggccagggcaccccggtcaccgtctcgtca

SEQ ID NO: 4774 - DNA, 291 bp, Homo sapiens; identical to SEQ ID NO: 4768
  source 1..291: mol_type = other DNA

SEQ ID NO: 4775 - DNA, 291 bp, Homo sapiens
  source 1..291: mol_type = other DNA
aagggttctggatacagctttatcaactactggatcggctgggtgcgccagatgcccgggaaaggcctggagtggatggggatcatctatcctggtgactctgataccagatacagcccgtccgtccaaggccaggtcaccatctcagccgacaagtccatcagcaccgcctacctgcagtggagcagcctgaaggcctcggacaccgccatgtattactgtgcgagacgagcaggagacgctgaatacttccagcactggggccagggcaccctggtcaccgtctcttca

SEQ ID NO: 4776 - DNA, 291 bp, Homo sapiens
  source 1..291: mol_type = other DNA
aagggttctggatacagctttatcaactactggatcggctgggtgcgccagatgcccgggaaaggcctggagtggatggggatcatctatcctggtgactctgataccagatacagcccgtccgtccaaggccaggtcaccatctcagccgacaagtccatcagcaccgcctacctgcagtggagcagcctgaaggcctcggacaccgccatgtattactgtgcgagacgagcaggagacgctgaatacttccagcactggggccagggcaccctggtcaccgtctcctca

SEQ ID NO: 4777 - DNA, 291 bp, Homo sapiens
  source 1..291: mol_type = other DNA
aagggttctgaatacagctttaccagttactggatcggctgggtgcgccagatgcccgggaaaggcctggagtggatggggatcatctatcctggtgactctgataccagatacagcccgtccttccaaggccaggtcaccatctcagccgacaagtccatcagcaccgcctacctgcagtggagcagcctgaaggcctcggacaccgccatctattactgtgcgagacgagcaggagacgctgaatacttccagcactggggccagggcaccctggtcaccgtctcctca

SEQ ID NO: 4778 - DNA, 291 bp, Homo sapiens
  source 1..291: mol_type = other DNA
aagggttctggatacagctttaccagctactgggtcggctgggtgcgccagatgcccgggaaaggcctggagtggatgggagtcatctatcctggtgactctgataccagatatagtccgtccttccaaggccaggtcaccatctcagtcgacaagtccatcaacaccgcctacctgcagtggagcagcctaaaggcctcggacaccgccgtgtattactgtgcgagacgggcgggagacgctgaatacttccaacactggggccagggcaccccggtcaccgtctcctca

SEQ ID NO: 4779 - DNA, 291 bp, Homo sapiens
  source 1..291: mol_type = other DNA
aagggttctggatacagctttaccagctactggatcggctgggtgcgccagatgcccgggaaaggcctggagtggatgggagtcatctatcctggtgactctgataccagatatagtccgtccttccaaggccaggtcaccatctcagtcgacaagtccatcaacaccgcctacctgcagtggagcagcctaaaggcctcggacaccgccgtgtatttctgtgcgagacgggcgggagacgctgaatacttccaacactggggccagggcaccccggtcaccgtctcctca

SEQ ID NO: 4780 - DNA, 303 bp, Homo sapiens
  source 1..303: mol_type = other DNA
gcttctggttacacctttaccagctatggtatcagctgggtgcgacaggcccctggacaagggcttgagtggatgggatgggtcagcgcttacaatggtaacacaaactatgcacagaagctccagggccgagtcaccatgaccacagacacatccacgagcacagcctacatggagctgaggcgcctgagatctgacgacacggccatgtattactgtgcgagagggactacagtaaccacccaacctccctactactacatggacgtctggggcaaagggaccacggtcaccgtctcctca

SEQ ID NO: 4781 - DNA, 303 bp, Homo sapiens; identical to SEQ ID NO: 4780
  source 1..303: mol_type = other DNA

SEQ ID NO: 4782 - DNA, 303 bp, Homo sapiens
  source 1..303: mol_type = other DNA
gcttctggttacacctttaccagctatgttatcagttgggtgcgacaggcccctggacaagggcttgagtggatgggatgggtcagcgcttacaatggttacacaaactatgcacagaagctccagggccgagtcaccatgaccacagacacatccacgagcacagcctacatggagctgaggcgcctgagatctgacgacacggccatgtattactgtgcgagagggactacagtaaccacccaacctccctactactacatggacgtctggggcaaagggaccacggtcaccgtctcctca

SEQ ID NO: 4783 - DNA, 303 bp, Homo sapiens
  source 1..303: mol_type = other DNA
gcttctggttacacctttaccagctatggtatcagctgggtgcgacaggcccctggacaagggcttgagtggatgggatgggtcagcgcttacaatggtaacacaaactatgcacagaaactccagggccgagtcaccatgaccacagacacatccacgagcacagcctacatggacctgaggcgcctgagatctgacgacacggccatatattactgtgcgagagggactacagtaaccacccaacctccctactactacatggacgtctggggcaaagggaccacggtcaccgtctcctca

SEQ ID NO: 4784 - DNA, 303 bp, Homo sapiens
  source 1..303: mol_type = other DNA
gcttctggctacagctttatcagctatgttatcagctgggtgcgacaggcccctggacaagggcttgagtggatgggatgggtcagcccttacaatggtatcacaaagtatacacagaagctccagggccgagtcaccatgaccacagacacatccacgaacacagcctacatggaactgaggcgcctgagatctgacgacacggccatgtatttttgtgcgagagggaccacagtcaccacccaacctccctactactacatggacgtctggggcaaagggaccacggtcaccgtctcctca

SEQ ID NO: 4785 - DNA, 303 bp, Homo sapiens
  source 1..303: mol_type = other DNA
gcttctggttacacctttaccagctatggtatcagctgggtgcgacaggcccctggacaagggcttgagtggatgggatgggtcagcgcttacaatggtaacacaaactatgcacagaagctccagggccgagtcatcatgaccacagacacatccacgagcacagcctacatggagctgaggcgcctgagatctgacgacacggccatgtattactgtgcgagagggactacagtaaccacccaacctccctactactacatggacgtctggggcaaagggaccacggtcaccgtctcctca

SEQ ID NO: 4786 - DNA, 303 bp, Homo sapiens; identical to SEQ ID NO: 4782
  source 1..303: mol_type = other DNA

SEQ ID NO: 4787 - DNA, 302 bp, Homo sapiens
  source 1..302: mol_type = other DNA
gcttctggttacacctttaccagctatggtatcagctgggtgcgacaggcccctggacaagggcttgagtggatgggatgggtcagcgcttacaatggtaacacaaactatgcacagaagctccagggccgagtcaccatgaccacagacacatccacgagcacagcctacatggagctgaggcgcctgagatctgacgacacggccatgtattactgtgcgagagggactacagtaaccacccaacctccctactactacatggacgtctggggcaagggaccacggtcaccgtctcctca

SEQ ID NO: 4788 - DNA, 303 bp, Homo sapiens
  source 1..303: mol_type = other DNA
gcctctggttacacctttaccagttatgctatcagctgggtgcgacaggcccctggacaagggcttgagtggatgggatgggtcagcgcttacaacggtaacacaaaatatgcacggagcctccagggccgagtcaccatgaccacagacacatccacgagcacagcctacatggagctgaggcgcctgagatctgacgacacggccatctattactgtgcgagagggactacagtaaccacccaacctccctactactacatggacgtctggggcaaagggaccacggtcaccgtctcctca

SEQ ID NO: 4789 - DNA, 303 bp, Homo sapiens; identical to SEQ ID NO: 4788
  source 1..303: mol_type = other DNA

SEQ ID NO: 4790 - DNA, 289 bp, Homo sapiens
  source 1..289: mol_type = other DNA
tgcagcctctggattcacgttcagcagtaactggatgcactgggtccgccaagctccagggaaggggctagtgtgggtctcacgtattagtgattatgatggaagcatcacagactacgcggactccgtgaagggccgattcaccatctccagagacaacgccaagaacacgctctatctgcaaatgcacagtctgagagccgaggacacggctgtgtattattgtggaagggacttaagtggcagccgggactactggggccagggaaccctggtcaccgtctcctca

SEQ ID NO: 4791 - DNA, 286 bp, Homo sapiens
  source 1..286: mol_type = other DNA
tgcaggcgctggattcaccttcagtaattactggttccactgggtccgccaagttcctgggaaggggctggtgtgggtctcacgcattgatgagcgtgggactatcacagattacgcggactccgtgaggggccgattcacaatctccagagacaacgccaagaacacactgtatcttcaaatgaacagtctgggagtcgaggacacggctgtatatttctgtggtcgagatctcagtgggagccgtgactactggggccggggaaccctagtcaccgtctcctca

SEQ ID NO: 4792 - DNA, 286 bp, Homo sapiens
  source 1..286: mol_type = other DNA
tgcaggctctggattcaccttcagtaattactggttccactgggtccgccaagttcctgggaaggggctggtgtgggtctcacgcattaatactgatgggactatcacaaattacgcggactccgtgaggggccgattcacaatctccagagacaacgccaagaacacactgtatcttcaaatgaacagtctgggagtcgacgacacggctgtgtatttctgtggtcgagatctcagtgggagccgtgactactggggccagggaaccctagtcaccgtctcctca

SEQ ID NO: 4793 - DNA, 286 bp, Homo sapiens
  source 1..286: mol_type = other DNA
tgcagcgtctggattcaccttcagttcctatgccatgcactgggtccgccaggctccaggcaaggggctggtgtgggtctcacgcattgatgagcgtgggactatcacagattacgcggactccgtgaggggccgattcacaatctccagagacaacgccaagaacacactgtatcttcaaatgaacagtctgggagtcgaggacacggctgtatatttctgtggtcgagatctcagtgggagccgtgactactggggccggggaaccctagtcaccgtctcctca

SEQ ID NO: 4794 - DNA, 286 bp, Homo sapiens
  source 1..286: mol_type = other DNA
tgcaggcgctggattcaccttcagtaattactggttccactgggtccgccaagttcctgggaaggggctggtgtgggtctcacgcattgatgaacgtgggactatcacagattacgcggactccgtgaggggccgattcacaatctccagagacaacgccaagaacacactgtatcttcaaatgaacagtctgggagtcgaggacacggctgtatatttctgtggtcgagatctcagtgggagccgtgactactggggccggggaaccctagtcaccgtctcctca

SEQ ID NO: 4795 - DNA, 286 bp, Homo sapiens
  source 1..286: mol_type = other DNA
tgcaggcgctggattcaccttcagtaattactggttccactgggtccgccaagttcctgggaaggggctggtgtgggtctcacgcattgatgagcgtgggactatcacagattacgcggactccgtgaggggccgattcacaatccccagagacaacgccaagaacacactgtatcttcaaatgaacagtctgggagtcgaggacacggctgtatatttctgtggtcgagatctcagtgggagccgtgactactggggccggggaaccctagtcaccgtctcctca

SEQ ID NO: 4796 - DNA, 286 bp, Homo sapiens
  source 1..286: mol_type = other DNA
ttcagcctctggatacatcttcagcgactactggatgcactgggtccgccaagtcccagggaaggggctggtgtgggtcgcacgtattgatagaaatggcggaaccacaaactacgcggactccgtgaagggtcgattcaccgtctccagagacaacgccaagaacaccctgtatctgcagatgaacagtctgcgagccgaggacacggctgtatattattgtggaagagacttaagtgggagtcgtgactactggggccagggaaccctggtcaccgtctcctcg

SEQ ID NO: 4797 - DNA, 286 bp, Homo sapiens
  source 1..286: mol_type = other DNA
ttcagcctctggattcaccttcagcgcctactggatgcactgggtccgccaagtcccagggaaggggctggtgtgggtcgcacgtactgatgaatatgggggaaccacaaactacgcggactccgtgaagggtcgattcaccgtctccagagacaacgccaagaacaccctgtatctgcagatgaacagtctgcgagccgaggacacggctgtatattactgtggaagagacttaagtgggagtcgtgactactggggccagggaaccctggtcaccgtctcctcg

SEQ ID NO: 4798 - DNA, 286 bp, Homo sapiens
  source 1..286: mol_type = other DNA
ttcagcctctggattcaccttcagcgcctactggatgcactgggtccgccaagtcccagggaaggggctggtgtgggtcgcacgtattgatgaatatgggggaaccacaaactacgcggactccgtgaagggtcgattcaccgtctccagagacaacgccaagaacaccctgtatctgcagatgaacagtctgcgagccgaggacacggctgtatattactgtggaagagacttaagtgggagtcgtgactactggggccagggaaccctggtcaccgtctcctcg

SEQ ID NO: 4799 - DNA, 289 bp, Homo sapiens
  source 1..289: mol_type = other DNA
tgcagcctctggattcaccttcagtaactactggatgcactgggtccgccaagttccagggaaggggctgatgtgggtctcacgtattagtgattatggtggaagtaccacagactacgcggactccgtgaagggccgattcaccatctccagagacaacgccaggaacacgctgtatctgcaaatgaacagtctgagagccgaggacacggctgtctattattgtggaagagacttaagtgggagccgagactactggggccagggaaccctggtcaccgtctcctca

SEQ ID NO: 4800 - DNA, 289 bp, Homo sapiens
  source 1..289: mol_type = other DNA
tgcagcctctggattcacgttcagcagtaactggatgcactgggtccgccaagctccagggaaggggctagtgtgggtctcacgtattagtgattatggtggaagcaccacagactacgcggactccgtgaagggccgattcaccatctccagagacaacgccaagaacacgctctatctgcaaatgaacagtctgagagccgaggacacggctgtgtattattgtggaagggacttaagtggcagccgggactactggggccagggaaccctggtcaccgtctcctca

SEQ ID NO: 4801 - DNA, 289 bp, Homo sapiens
  source 1..289: mol_type = other DNA
tgcagcctctggattctccttcagtagcaactggatgcactgggtccgccaagctccagggaaggggctggtgtgggtctcacgtattagtgattatggtggaagtaccacagactacgcggactccgtgaagggccgattcaccatctccagagacaacgccaagaacacgctgtatctgcaaatgaacagtctgagagccgaggacacggctgtgtattactgtggaagagacttaagtgggagccgggactactggggccagggaaccctggtcaccgtctcctca

SEQ ID NO: 4802 - DNA, 289 bp, Homo sapiens
  source 1..289: mol_type = other DNA
tgcagcctctggattcacgttcagcagtaactggatgcactgggtccgccaagctccagggaaggggctagtgtgggtctcacgtattagtgattatgatggaagcatcacagactacgcggactccgtgaagggccgattcaccatctccagagacaacgccaagaacacgctctatctgcaaatgcacagtctgagagccgaggatacggctgtgtattattgtggaagggacttaagtggcagccgggactactggggccagggaaccctggtcaccgtctcctca

SEQ ID NO: 4803 - DNA, 286 bp, Homo sapiens
  source 1..286: mol_type = other DNA
ttcagcctctggatacatcttcagcgactactggatgcactgggtccgccaagtcccagggaaggggctggtgtgggtcgcacgtattgatagaaatggcgaaaccacaaactacgcggactccgtgaagggtcgattcaccgtctccagagacaacgccaagaacaccctgtatctgcagatgaacagtctgcgagccgaggacacggctgtatattattgtggaagagacttaagtgggagtcgtgactactggggccagggaaccctggtcaccgtctcctcg

SEQ ID NO: 4804 - DNA, 298 bp, Homo sapiens
  source 1..298: mol_type = other DNA
tgcagcctctggattcacctttgatgattatgccatgcactgggtccggcaacctccagggaagggcctggagtgggtctcaggtattaattggaatagtggtaacataggctatgcggactctgtgaagggccgattcaccatctccagagacaacgccaagaactccctgtatctgcaaatgaacagtctgagagctgaggacacggccttgtattactgtgcaaagggcgtggactatgatagtagtgggccctttgactactggggccagggaaccctggtcaccgtctcctca

SEQ ID NO: 4805 - DNA, 298 bp, Homo sapiens
  source 1..298: mol_type = other DNA
tgcagcctctggattcacctttgatgattatgccatgtactgggtccggcaagctccagggaagggcctggagtgggtctcaggtattagttggaatagtggtaacataggctatgcggactctgtgaagggccgattcaccatctccagagacaacgccaagaactccctgtatctgcaaatgaacagtctgagagctgaggacacggccttgtattactgtgcaaaaggagtggactatgatagtagtggcccgtttgactactggggccagggaaccctggtcaccgtctcctca

SEQ ID NO: 4806 - DNA, 298 bp, Homo sapiens; identical to SEQ ID NO: 4804
  source 1..298: mol_type = other DNA

SEQ ID NO: 4807 - DNA, 295 bp, Homo sapiens
  source 1..295: mol_type = other DNA
cgctgtctctgatgggtccttaagaactctcttctggggctggattcgccagcccccaggaaaggggctggagtggattggggaagaccatcataatggaaacaccaactacaacccgtccttcaggagtcgagtcactatatcagtagacacgtccaagctccagatctccctgcaactgcgttctgtgaccgccgcggacacggctgtctattactgtgcgagagccgggacttggggtgcctatgatgcttttgatatctggggccaagggactatggtcgtcgtctcttca

SEQ ID NO: 4808 - DNA, 295 bp, Homo sapiens
  source 1..295: mol_type = other DNA
cgctgtctctgatgggtccttaagaactctcttctggggctggattcgccagcccccaggaaaggggctggagtggattggggaagaccatcataatggaaacaccaacttaaacccgtccttcaggagtcgagtcactatatcagtagacacgtccaagctccagatctccctgcaactgcgttctgtgaccgccgcggacacggctgtctattactgtgcgagagccgggacttggggtgcctatgatgcttttgatatctggggccaagggactatggtcgtcgtctcttca

SEQ ID NO: 4809 - DNA, 295 bp, Homo sapiens
  source 1..295: mol_type = other DNA
cactgtctctggtgcctccatcagtagtcatttctggagctggatccggcagcccccagggaaggggctggagtggattggggaaaacaatcatggtggaagtgccaactccaacccgtccctcaagagtcgagtcaccatatcaatagacacgtccaagaatcagctctccctgaggctgacctctgtgaccgccgcggatacggctgcctattactgtgcgagggcgggcacctggggcgcctatgatgcttttgatatctggggccaagggacagtggtcatcgtctcttca

SEQ ID NO: 4810 - DNA, 295 bp, Homo sapiens; identical to SEQ ID NO: 4807
  source 1..295: mol_type = other DNA

SEQ ID NO: 4811 - DNA, 295 bp, Homo sapiens
  source 1..295: mol_type = other DNA
cgctgtctatgatgggtccttcagaactctcttctggagctggatccgccagcccccaggaaaggggctggagtggattggggaaatccatccttctggaagcaccaactacaacccgtccctcaggagtcgagtcaccatatcagtagacacgtccaaccaccagatctccctgaggctgagttctgtgaccgccgcggacacggctgtgtattattgtgcgagagccgggacttggggtgcctatgatgcttttgatatctggggccaagggacaatggtcgccgtctcttca

SEQ ID NO: 4812 - DNA, 295 bp, Homo sapiens
  source 1..295: mol_type = other DNA
cgctgtctctgatgggtccttaagaactcacttctggagctggattcgccagcccccaggaaaggggctggagtggattggggaagaccatcatgctggaagcaccaactacaacccgtccttcaggagtcgagtcactatatcagtagacacgtccaagctccagatctccctgaaactgcgttctgtgaccgccgcggacacggctgtctattactgtgcgagagccgggacttggggtgcctatgatgcttttgatatctggggccaagggactatggtcgtcgtctcttca

SEQ ID NO: 4813 - DNA, 289 bp, Homo sapiens
  source 1..289: mol_type = other DNA
tgcagcctctggattcaccttcagtgattttgaaatgaactgggtccgccaggctccagggaaggggctggagtgggtttcatacattagtagtgttggtggtaccatatactacgcagactctgtgaagggccgattcaccatctccagagacaacgccaagaactcactgtatctgcaagtcaacagcctgagagccgaggatacggctgtttattactgtgcgagagggggcttcagctggtcctttgactactggggccagggaaccctggtcaccgtctcctca

SEQ ID NO: 4814 - DNA, 289 bp, Homo sapiens
  source 1..289: mol_type = other DNA
tgcagcctctggattcaccttcagtagttatgaaatgaactgggtccgccaggctccagggaaggggctggagtgggtttcatacattactagtagtggaagtaccatatactacgcagactctgtgaagggccgattcaccatctccagagacaacgccaaggattcattgtatctgcaaatgaacagcctgagagccgaggacacggctgtttattactgtgcgagaggtggcttcagctggtcctttgattactggggccagggaaccctggtcaccgtctcctca

SEQ ID NO: 4815 - DNA, 289 bp, Homo sapiens
  source 1..289: mol_type = other DNA
tgcagcctctggattcaccttcagtagttctgaaatgaactgggtccgccaggctccagggaaggggctggagtgggtttcatacattagtagtggtggaggtaccatatactacgcagactctgtgaagggccgattcaccatctccagagacaacgccaaggattcattgtatctgcaaatgaacagcctgagagccgacgacacggctctttattactgtgcgagaggtggcttcagctggtcctttgattactggggccagggaaccctggtcaccgtctcctca

SEQ ID NO: 4816 - DNA, 300 bp, Homo sapiens
  source 1..300: mol_type = other DNA
gcttctggatacaccttcattagttatgctatgcattgggtgcgccaggcccccggacaaaggcttgagtggatgggatggatcaacgctggcaatggtaacacaaaatattcacagaagttccagggcagagtcaccattaccagggacacatccgcgagcacagcctacatggagctgagcagcctgagatctgaagacacggctgtgtattactgtgcgagagagtattacgatattttgactggtcaaattcctcttgactactggggccagggaaccctggtcaccgtctcctca

SEQ ID NO: 4817 - DNA, 300 bp, Homo sapiens
  source 1..300: mol_type = other DNA
gcttctggatacaccttcattagttatgctatgcattgggtgcgccaggcccccggacaaaggcttgagtggatgggatggatcaacgctggcaatggtaacacaaaatattcacagaagttccagggcagagtcaccattaccagggacacatccgcgagcacagcctacatggagctgagcagcctgagatctgaagacacggctatgtattactgtgcgagagagtattacgatattttgactggtcaaattcctcttgactactggggccagggaaccctggtcaccgtctcctca

SEQ ID NO: 4818 - DNA, 300 bp, Homo sapiens
  source 1..300: mol_type = other DNA
gcttctggatacaccttcattagctatgctatgcattgggtgcgccaggcccccggacagaggcttgagtggatgggatggatcaacgctggcaatggtaacacaaaatattcacagaagtttcagggcagagtcaccattaccagggacacatccgcgagcacagcctacatggagctgagcagcctgagatctgaagacacggctgtatattactgtgcgagagagtattacgatattttgactggtcaaattcctcttgactactggggccagggaaccctggtcaccgtctcctca

SEQ ID NO: 4819 - DNA, 300 bp, Homo sapiens; identical to SEQ ID NO: 4816
  source 1..300: mol_type = other DNA

SEQ ID NO: 4820 - DNA, 300 bp, Homo sapiens
  source 1..300: mol_type = other DNA
gcttctggatacaccttcactaactatgctatgcattgggtgcgccaggcccccggacaaaggcttgagtggatgggatggatcaacgctggcaatggtaacacaaaatattcacagaagttccagggcagagtcaccattaccagggacacatccgcgagcacagcctacatggagctgagcagcctgaagtctgaagacacggctgtgtattactgtgcgagagagtattacgatattttgactggtcaaatccctcttgactactggggccagggaaccctggtcaccgtctcctca

SEQ ID NO: 4821 - DNA, 300 bp, Homo sapiens
  source 1..300: mol_type = other DNA
gcttctggatacaccttcattagttatgctatgcattgggtgcgccaggcccccggacaaaggcttgagtggatgggatggatcaacgctggcaatggtaacacaaaatattcacagaagttccagggcagagtcaccattgccagagacacatccgcgagcacagcctacatggagctgagtagcctgagatctgaagacacggctgtctattactgtgcgagagagtattacgatattttgactggtcaaattcctcttgactactggggccagggaaccctggtcaccgtctcctca

SEQ ID NO: 4822 - DNA, 300 bp, Homo sapiens
  source 1..300: mol_type = other DNA
gcttctggatacaccttcattagttatgctatgcattgggtgcgccaggcccccggacaaaggcttgagtggatgggatggatcaacgctggcaatggtaacacaaaatattcacagaagttccagggcagagtcaccattaccagggacacatccgcgagcacagccttcatggagctgagcagcctgagatctgaagacacggctgtgtattactgtgcgagagagtattacgatattttgactggtcaaattcctcttgactactggggccagggaaccctggtcaccgtctcctca

SEQ ID NO: 4823 - DNA, 300 bp, Homo sapiens
  source 1..300: mol_type = other DNA
gcttctggatacaccttcattagttatgctatgcattgggtgcgccaggcccccggacaaaggcttgagtggatgggatggatcaacgctggcaatggtaacacaaaatattcacagaagttccagggcagagtcaccattaccagggacacatccgcgagcacagcctatatggagctgagcagcctgagatctgaagacacggctgtgtattactgtgcgagagagtattacgatattttgactggtcaaattcctcttgactactggggccagggaaccctggtcaccgtctcctca

SEQ ID NO: 4824 - DNA, 300 bp, Homo sapiens
  source 1..300: mol_type = other DNA
gcttctggatacaccttcactaactatgctatgcattgggtgcgccaggcccccggacaaaggcttgagtggatgggatggatcaacgctggcaatggtaacacaaaatattcacagaagttccagggcagagtcaccattaccagggacacatccgcgagcacagcctacatggagctgagcagcctgaagtctgaagacacggctgtgtatttctgtgcgagagagtattacgatattttgactggtcaaatccctcttgactactggggccagggaaccctggtcaccgtctcctca

SEQ ID NO: 4825 - DNA, 303 bp, Homo sapiens
  source 1..303: mol_type = other DNA
gcctctggatataacttcattacatatgctatacattgggtgcgccaggcccccggacaaagccttgagtggatgggatggatcgacactggcaatggtgacacaaaatattcacagaagttccagggcagagtcaccattactagggacacatccgcgagcacggcctatctggagctgagcagcctgagatctgaagacacggcactttattactgtgcgaggggaaattactatgatagtagtagttattactacccgtttgactactggggccagggaaccctggtcaccgtctcctca

SEQ ID NO: 4826 - DNA, 303 bp, Homo sapiens
  source 1..303: mol_type = other DNA
gcctctggatatagtttcattacgtatgctatacattgggtgcgccaggcccccggacaaagccttgagtggatgggatggatcgacactggcaatggtgacacaaaatattcacagaacttccagggcagagtcaccattaccagggacacatccgcgagcacagcctatatggagctgagcagcctgagatctgaagacacggctttttattactgtgcgaggggaaattactatgatagtagtagttattactacccgtttgactactggggccagggaaccctggtcaccgtctcctca

SEQ ID NO: 4827 - DNA, 303 bp, Homo sapiens
  source 1..303: mol_type = other DNA
gcctctggatacaccttcattacctatgctatacattgggtgcgccaggcccccggacaaaggcttgagtggatgggatggatcaacactggcaatggtgacacaaaatattcacagaagttccagggcagagtcaccattaccagagacacatccgcgagcgcagcctacatggagctgagcagcctgagatctgaagacacggctgtgtattactgtgcgaggggaaattactatgatagtagtagttattactacccgtttgactactggggccagggaaccctggtcaccgtctcctca

SEQ ID NO: 4828 - DNA, 303 bp, Homo sapiens
  source 1..303: mol_type = other DNA
gcttctggatacaccttcactaactatgctgtgcattgggtgcgccaggcccccggacaaagacttgagtggatgggatggatcgacactggcaatggtaacacaaaatattcacagaagttccagggcagagtcaccattaccagggacacatccgcgagcacagcctacatggagctgagcagcctgagatctgaagacacggctgtgtattactgtgcgagagggaattactatgatagtagtagttattactacccctttgactactggggccagggaaccctggtccccgtctcctca

SEQ ID NO: 4829 - DNA, 277 bp, Homo sapiens
  source 1..277: mol_type = other DNA
tgcagcctctggattcactttcagaaacgcctggatgaactgggtccgtcaggctccagggaaggggctggagtgggttggccgtattagaagcactcttgatggtgggacagtagagtatgctgcacccgtgaaaggcagattcaccatctcaagagatgactcaaaaaacatgttgtatctgcaaatgaacagcctgaaagccgaggacacagccgtgtattactgtgtcgcccggcctcactggggccagggaaccctggtcagcgtctcctca

SEQ ID NO: 4830 - DNA, 277 bp, Homo sapiens
  source 1..277: mol_type = other DNA
tgcagcctctggattcaatgtcagtgatgtctggatgaattgggtccgccagtctccagggaaggggctggaatgggttggccgaataagagccaaaattgctggtgggacaacagacaacgctgcacccgtgaaaggcagattcaccgtctcaagagatgattcaaaaaacacgttctatctgcaaatgaacaacctgaaaagcgaggacacagccgtatattactgtgtcgcccgcccccactggggccagggaaccctggtcaccgtctcctca

SEQ ID NO: 4831 - DNA, 313 bp, Homo sapiens
  source 1..313: mol_type = other DNA
ttcagtttctggattcacctttggtgattatgctgtgacctggttccgccaggctccagggaaggggctggagtgggtaggtctcatgagaagcgaacgttatggtgggacaaaagaatacgccgcgtctgtgaaaggcagattcaccctttcaagagatgattccagaagcattgcctatctgcaaatgaacagtctgaaaaccgaggacacagccgtgtattactgtagtaggggctgtagtggtggtagctgctactactactacggtatggacgtctggggccaagggaccacggtcaccgtctcctca

SEQ ID NO: 4832 - DNA, 313 bp, Homo sapiens
  source 1..313: mol_type = other DNA
ttcagtttctggattcagctttggtgattatgctgtgacctggttccgccaggctccagggaaggggctggagtgggtaggtctcatgagaagcgaacgttatggtgggacaaaagaatacgccgcgtctgtgaaaggcagattcagcctttcaagagatgattccagaagcattgcctatctgcaaatgaacagtctgaaaaccgaggacacagccgtgtattactgtagtaggggctgtagtggtggtagctgctactactactacggtatggacgtctggggccaagggaccacggtcaccgtctcctca

SEQ ID NO: 4833 - DNA, 313 bp, Homo sapiens
  source 1..313: mol_type = other DNA
ttcaggttctgggttcacccttggtgattatggcatgagttggttccgccaggctccagggaaggggctggagtgggtaggtttcatcagaagcgaacgatatggtggggcaacagaatacgccccgtctgtgaaaggcagattcatactctcaagagatgattccaaaagtatcgcctatctacaaatgaatagcctgaaaaccgaggacacagccatttatcactgtagtagagggtgcagtggtggtagttgctattattattatggcatggacgtctggggccaagggaccacggtcaccgtctcctca

SEQ ID NO: 4834 - DNA, 313 bp, Homo sapiens
  source 1..313: mol_type = other DNA
tacagcctccgggttcacctctggtgattatggtatgagctggttccgccaggcttcagggaaggggctggagtgggtagctttcattagaagcgaagcttatggtggggcaacagaatacgccgcgtctgtgaaaggcagattcaccatctcaagagatgattccaaaagcatcgcctatctgcaaatgaacagcctgaaaaccgaggacacagccgtgtattactgtagtagaggttgtagtggtggtagctgctactactactacggtatggacgtctggggccaagggaccacggtcaccgtctcctca

SEQ ID NO: 4835 - DNA, 313 bp, Homo sapiens
  source 1..313: mol_type = other DNA
ttcaggttctgggttcacccttggtgattatggcatgagttggttccgccaggctccagggaaggggctggagtgggtaggtctcatcagaagcgaacgatatggtggggcaacagaatacgccccgtctgtgaaaggcagattcatactctcaagagatgattccaaaagtatcggctatctgcaaatgaacagcctgaaaaccgaggacacagccgtgtatcactgtagtagagggtgcagtggtggtagttgctactattattacggcatggacgtctggggccaagggaccacggtcaccgtctcctca

SEQ ID NO: 4836 - DNA, 313 bp, Homo sapiens
  source 1..313: mol_type = other DNA
ttcagtctctggattcagctttggtgactatgctgtgacctggttccgccaggctccagggaaggggctggagtgggtaggtctcatgaaaagcgaacgttatggtgggacaaaagaatacgccgcgtctgtgaaaggcagattcaccatttcaagagatgattccagaggcattgcctatctgcaaatggacagtctgaaaaccgaggacacagccgtgtattactgtagtaggggctgtagtggtggtagctgctactactactacggtatggacgtctggggccaagggaccacggtcaccgtctcctca

SEQ ID NO: 4837 - DNA, 280 bp, Homo sapiens
  source 1..280: mol_type = other DNA
cactgtctctggtggctccatcagtaattactactggagctggatccggcagcccccagggaagggactggagtggattgggtatatctattacagtgggagcaccaactacaacccctccctcaagagtcgagtcaccatatcagtcgacacgtccaagaaccagttctccctgatgttgagctctgtgaccgctgcggacacggccgtgtattactgtgcgagaggtaggattcgggctgactactggggccagggaaccctggtcaccgtctcctca

SEQ ID NO: 4838 - DNA, 280 bp, Homo sapiens; identical to SEQ ID NO: 4837
  source 1..280: mol_type = other DNA

SEQ ID NO: 4839 - DNA, 280 bp, Homo sapiens
  source 1..280: mol_type = other DNA
cactgtctctggtggctccatcaataattactactggagctggatccggcagcccccagggaagggactggagtggattgggtatatttattatagtgggggcaccaactacaacccctccctcaagagtcgagtcaccatatcagtagacacgtccaaaaaccagttctccctgaagctgaactctgtgaccgctgcggacacggccgtgtattactgtgcgagagggagaattcgggctgactactggggccagggaaccctggtcaccgtctcctca

SEQ ID NO: 4840 - DNA, 276 bp, Homo sapiens
  source 1..276: mol_type = other DNA
gcttctggatacaccttcactaactatgctatacattgggtgcgccaggcccccggacaaagccttgagtggatgggatggatcaacgctgccagtggtaacacaaaatattcacagaagttccagggcagagtcaccattactagggacacatccgcgagcacagcctacatggacctgagcagcctgagatctgaagacacggctgtgtattactgtgcgaggtccgcgagtcttgactactggggccagggaatcctggtcaccgtctcctca

SEQ ID NO: 4841 - DNA, 276 bp, Homo sapiens
  source 1..276: mol_type = other DNA
gcttccggatatagcttcacttcctatcttatgcattgggtgcgccaggcccccggacaaaggcttgagtggatgggatggatcaacgctggcaatggtaacacaagatattcacagaagttccagggcagagtcaccattaccagggacacgtccgcgagcacagcctacatggagctgagcagcctgacatatgaagacacggctgtatatttctgtgcgagaagtgcctcccttgactactggggccagggaaccctggtcaccgtctcctca

SEQ ID NO: 4842 - DNA, 276 bp, Homo sapiens; identical to SEQ ID NO: 4840
  source 1..276: mol_type = other DNA

SEQ ID NO: 4843 - DNA, 277 bp, Homo sapiens
  source 1..277: mol_type = other DNA
tgtagcctctggattcacctttagtaccttttggatgggctgggtccgccaggctccagggaaggggctggagtgggtggccaacataaagcaagatggaagtggcaaatattatgtggactctgtgaagggccgattcaccatctccagagacaacgccaaaaactcactgtatctgcaaatgaacggcctgagagccgaggacacggccgtgtattactgtgcgagagattggcttgactactggggccagggaaccctggtcaccgtctcctca

SEQ ID NO: 4844 - DNA, 277 bp, Homo sapiens
  source 1..277: mol_type = other DNA
tgcagcctctgaattcatctttaataaccattggatgagctgggtccgccaggctccagggaaggggctgcagtgggtggccaacataaaccaagatggaagtcagatacagtatttggactctgtcaagggccgattcaccatctccagagacaatgccaagaagtcactgtatctgcaaatgaacagcctgagacccgaggacacggccgtgtattactgtgcgagagactggcttgactactggggccagggaaccctggtcaccgtctcctca

SEQ ID NO: 4845 - DNA, 277 bp, Homo sapiens
  source 1..277: mol_type = other DNA
tgtagtctctggactcacctttagtaattattggatgagctgggtccgccaggctccagggaaggggctggagttggtggccaacataaaggaagatggaagtgcgaaacagtatttggactctgtgcagggccgattcaccgtctccagagacaacgccaagaactcagtgtatctgcaaatgaacagcctgagagccgaggacacggctgtgtattactgtgcgagagattggcttgactactggggccagggaaccctggtcaccgtctcctca

SEQ ID NO: 4846 - DNA, 277 bp, Homo sapiens; identical to SEQ ID NO: 4843
  source 1..277: mol_type = other DNA

SEQ ID NO: 4847 - DNA, 292 bp, Homo sapiens
  source 1..292: mol_type = other DNA
tgcagcctctggattcacctttgatgattatggcatgagctgggtccgccaagttccagggaaggggctggagtgggtctctggcattaattggaatggtgataccacaggttatgcagactctgtgaagggccgattcaccatctccagagacaacgccgagaactctctgtatctgcaaatgaacagtctgagagtcgaggacacggccttgtattattgtgcgagaggacgcagtggctggtacttctttgactactggggccagggaatcctggtcaccgtctcctca

SEQ ID NO: 4848 - DNA, 292 bp, Homo sapiens
  source 1..292: mol_type = other DNA
tgcagcctctggattcacctttgatgattatggcatgagctgggtccgccaagttccagggaaggggctggagtgggtctctggcattaattggaatggtgataccacaggttatgcagactctgtgaagggtcgattcaccatctccagagacaacgccgagaactctctgtatctgcaaatgaacagtctgagagtcgaggacacggccttgtattattgtgcgagaggacgcagtggctggtacttctttgactactggggccagggaatcctggtcaccgtctcctca

SEQ ID NO: 4849 - DNA, 292 bp, Homo sapiens; identical to SEQ ID NO: 4847
  source 1..292: mol_type = other DNA

SEQ ID NO: 4850 - DNA, 291 bp, Homo sapiens
  source 1..291: mol_type = other DNA
tgcagcctctggattcacctttgatgattatggcatgagctgggtccgccaagttccagggaaggggctggagtgggtctctggcattaattggaatggtgataccacaggttatgcagactctgtgaagggtcgattcaccatctccagagacaacgccgagaactctctgtatctgcaaatgaacagtctgagagtcgaggacacggccttgtattattgtgcgagaggacgcagtggctggtacttctttgactactggggccagggaatcctggtcaccgtctcctc

SEQ ID NO: 4851 - DNA, 292 bp, Homo sapiens; identical to SEQ ID NO: 4848
  source 1..292: mol_type = other DNA

SEQ ID NO: 4852 - DNA, 292 bp, Homo sapiens
  source 1..292: mol_type = other DNA
tgcagcctctggattcacctttgatgattatggcatgagctgggtccgccaagctccagggaaggggctggagtgggtctctggtgttcattggaatgctggtaccacaggttatacagactctgtaaagggccgatttaccatctccagagacagcgccaagaactccctgtatctgcaaatgaacagtctgagagccgaagacacggccttgtattactgtgcgagaggccgcagtggctggtacttctttgactactggggccagggaaccctggtcaccgtctcctca

SEQ ID NO: 4853 - DNA, 327 bp, Homo sapiens
  source 1..327: mol_type = other DNA
acacagaccctcacgctgacctgcaccttctctggcttctcactcaccacttatggagtgggcgtgggctggatccgtcagcccccaggaaaggccctggagtggcttgcactcatttattgggatgattataagccctacagcccatctctgaagaccaggctcaccgtcaccaaggacacccccaaaaaccaagtggtccttacaatgaccaacatggaccctgtggacacagccacatattattgtgcacaccgccgtggagatgggaacaggggtgatgcgtttgatatctggggccaagggacaatggtcaccgtctcttca

SEQ ID NO: 4854 - DNA, 327 bp, Homo sapiens
  source 1..327: mol_type = other DNA
acacagaccctcacgctgacctgtaccttctctgggttctcactcaacactcatggagtgggtgtgggctggatccgtcagcccccgggaaaggccctggagtggcttgcactcatttattgggatgattataagtcctacaccccatctctgcagagcaggctcaccatcaccaaggacacctccaacaaccaggtggtcctttcaatgaccaacatggaccctgtggacacagccgcatattactgtgcacacaggcgtggagatggcaacaggggggatgcttttgatatctggggccaagggacaatggtcaccgtctcttca

SEQ ID NO: 4855 - DNA, 280 bp, Homo sapiens
  source 1..280: mol_type = other DNA
tgcagcctctggattcaccttcagtagttatgaaatgaattgggtccgccaggctccagggaaggggctggagtgggtttcatacattagtagtagtggtagtaacatatactacgcagactctgtgaagggacgattcaccatctccagagacaacgccaagaactcactgtatctgcaaatgaacagcctgagagccgaggacacggctgtttatcactgtgcgagaggcagggcattaagcttctggggccagggaaccctggtcaccgtctcctca

SEQ ID NO: 4856 - DNA, 280 bp, Homo sapiens
  source 1..280: mol_type = other DNA
tgcagcctctggattcaccttcagtagttatgaaatgaactgggtccgccaggctccagggagggggctggagttggtttcacacattagtagtagtggtactaccatatactacgcagactctgtgaggggccgattcaccatctccagagacaacgccaagaactcactgtatatgcaaatgaacagcctgagagccgaggacacggctgtttattactgtgcgagaggtcgcgcgctttcgttctggggccagggaaccctggtcaccgtctcctca

SEQ ID NO: 4857 - DNA, 304 bp, Homo sapiens
  source 1..304: mol_type = other DNA
tgcagcctctggattcaccttcagtgactactacatgagctggatccgccaggctccagggaaggggctggagtgggtttcatacattagtagtggtggtagtaccatatactacgcagactctgtgaagggccgattcaccatctccagggacaacgtcaagaattcactgtatctgcaaatgaacagcctgagagccgaggacacggccgagtatttctgtgcgagagggtttgattgcagtagtaccagctgttatgcttttgatctctggggccaagggactatggtcaccgtctcttca

SEQ ID NO: 4858 - DNA, 304 bp, Homo sapiens
  source 1..304: mol_type = other DNA
tgccgcctctggattcaccttcagtgactactacatgagctggatccgccaggctccagggaaggggctggagtggatttcatacattagtggtagtgctactagcatatactacgcagactctgtgaagggccgattcaccatctccagggacaacgccaggaagtcactgtatctgcaaatgaacagcctgagagccgaggacacggccgtctatttctgtgcgagagggtttgattgtagtagtaccagctgctatgcttttgatctctggggccaagggacaatggtcaccgtctctcca

SEQ ID NO: 4859 - DNA, 304 bp, Homo sapiens
  source 1..304: mol_type = other DNA
tgcagcctctagattcaccttcagtgactactacatgagctggatccgccaggctccagggaaggggctggagtgggtttcatacatcagtagtagtgataataccatatactatgcagactctgtgaggggccgattcaccatctccagggacaacgccaagaactcactgtatctgcaaatgaacagcctgagagccgaggacacggcccggtattactgtgcgagagggtttgattgtagtagtaccagctgctatgcttttgatctctggggccaagggacaatggtcaccgtctcttca

SEQ ID NO: 4860 - DNA, 304 bp, Homo sapiens
  source 1..304: mol_type = other DNA
tgcagcctctggattcaccttcagtggctactacatgagctggatccgccaggctccagggaaggggctggagtgggtttcatacattagtagtcgtgatagcaccacatactacgctgactctgtgatgggccgattcaccatctccagggacaacgccaagaacgcattgtatctacaaatgaacaacctgagagccgaggacacggccatcttttactgtgcgagaggatttgattgtagtagtaccagctgctatgcttttgatctctggggccaagggacaatggtcaccgtctcttca

SEQ ID NO: 4861 - DNA, 301 bp, Homo sapiens
  source 1..301: mol_type = other DNA
tgcagcctctggattccccttcagtgactactacctgagctggatccgccaggctccagggaaggggctggagtgggtttcatacattggtagtagtggtgccatatactacggagactctgtgaggggccgattcaccatctccagggacaacgccaaaaactcgctgtatctgcaaatgaacagcctgagaggcgaggacacggccgtgtattactgtgcgagaggtttcgattgtagtagtaccagctgctatgcttttgatctctggggccgggggacaatggtcaccgtctcttca

SEQ ID NO: 4862 - DNA, 304 bp, Homo sapiens
  source 1..304: mol_type = other DNA
tgcagcctctggattcatcgtcagtggctactacatgagctggatccgccaggctccagggaaggggctggagtgggtctcatacattagtgatagtggtagtatactatactacggagactctgtgaagggccgatgcaccatctccagggacaccgccaaaaactcactgtttctgcaaatggacagcctgggagccgaagacacggccatgtattactgtgcgagaggtttcgattgtagtagtaccagctgctatgcttttgatctctggggccaagggacaatggtcaccgtctcttca

SEQ ID NO: 4863 - DNA, 304 bp, Homo sapiens
  source 1..304: mol_type = other DNA
tgcagcctctggattcaccgtcagtggctactacatgagctggatccgccaggctccagggaaggggctggagtgggtctcatacattagtgatagtggtagtatcctatactacggagactctgtgaagggccgatacaccatctccagggacaccgccaaaaactcactgtatctgcaaatgaacagcctgggagccgaggacacggccatgtattactgtgcgagaggtttcgattgtagtagtaccagctgctatgcttttgatctctggggccaagggacaatggtcaccgtctcttca

SEQ ID NO: 4864 - DNA, 301 bp, Homo sapiens
  source 1..301: mol_type = other DNA
tacagcctctggattcacccacagcggctactacatgggctggatccgccaggctccagggaaggggctggagtgggtttcatatattagtactagtggcaccatatactacggagactctgtgaggggccgattcaccatctccagggacaacgccaaaaactcactgtacctggaaatgaacggcctgagagtccaggacacggccatgtattactgtgcgagaggtttcgattgtagtagtacgagctgctatgcttttgatctgtggggccaggggacaatggtcaccgtctcttca

SEQ ID NO: 4865 - DNA, 304 bp, Homo sapiens
  source 1..304: mol_type = other DNA
tgcagcctctggattcagcgtcagtgactactacatgagctggatccgccaggctccagggaaggggctggagtgggtctcatacattagtaatagtggtagtatcctatattacggagactctgtgaagggccgatgcaccatctccagggacaccgccaaaaactcactgtatctgcaaatgaacagcctgggagccgaggacacggccatgtattactgtgcgagaggtttcgattgtagtagtaccagctgctatgcttttgatctctggggccaagggacaatggtcaccgtctcttca

SEQ ID NO: 4866 - DNA, 304 bp, Homo sapiens
  source 1..304: mol_type = other DNA
tgcagcctctggattcagcatcagtgactactacatgagctggatccgccaggctccagggaaggggctggagtgggtctcatacattagtgatagtggtagtatcctatactacggagactctgtgaagggccgatgcaccatctccagggacaccgccaaaaactcagtgtatctgcaaatgaacagcctgggagtcgaggacacggccatgtattactgtgcgagaggtttcgattgtagtagtaccagctgctatgcttttgatctctggggccaagggacagtggtcaccgtctcttca

SEQ ID NO: 4867 - DNA, 304 bp, Homo sapiens
  source 1..304: mol_type = other DNA
tgcagcctctggattcaccttcagtgactactacatgagctgggtccgccaggctccagggaaggggctggagtgggtttcatacattagtggtagtggtattaccatatactatgcagactctgtgatgggccgattcaccatctccagggacaacgcccagcactcactgtatctgcaaatggacagcctgagagccgaggacacggccgtgtattactgtgcgagaggtttcgattgtagtagcaccagctgctatgcttttgatctctggggccaagggacaatggtcaccgtctcttca

SEQ ID NO: 4868 - DNA, 304 bp, Homo sapiens
  source 1..304: mol_type = other DNA
tgcagcctctggattcagcatcagtgactactacatgagctggatccgccaggctccagggaaggggctggagtgggtctcatacattagtgatagtggtagtatcctatactacggagactctgtgaagggccgatgcaccatctccagggacaccgccaaaaactcagtgtatctgcagatgaacagcctgggagtcgaggacacggccatgtattactgtgcgagaggtttcgattgtagtagtaccagctgctatgcttttgatctctggggccaagggacagtggtcaccgtctcttca

SEQ ID NO: 4869 - DNA, 304 bp, Homo sapiens
  source 1..304: mol_type = other DNA
tgcagcctctggattcatcgtcagtgactactacatgagctggatccgccaggctccagggaaggggctggagtgggtctcatatattagtgatagtggtagtatagtatactacggagactctgtgaagggccgatgcaccatctccagggacaccgccaaaaactcagtgtttctgcaaatggacagcctgggagtcgacgacacggccaagtattactgtgcgagaggtttcgattgtagtagtaccagctgctatgcttttgatctctggggccaagggacaatggtcaccgtctcttca

SEQ ID NO: 4870 - DNA, 304 bp, Homo sapiens
  source 1..304: mol_type = other DNA
tgcagcctctggattcatcgtcagtgactactacatgagctggatccgccaggctccagggaaggggctggagtgggtctcatacattagtgatagtggtagtatagtataccacggagactctgtgaagggccgatgcaccatctccagggacaccgccaaaaactcactgtttctgcaaatggacagcctgggagccgaggacacggccatgtattactgtgcgagaggtttcgattgtagtagtaccagctgctatgcttttgatctctggggccaagggacaatggtcaccgtctcttca

SEQ ID NO: 4871 - DNA, 304 bp, Homo sapiens
  source 1..304: mol_type = other DNA
tgcagcctctggattcatcgtcagtgactactacatgagctggatccgccaggctccagggaaggggctggagtgggtctcatatattagtgatagtggtagtatagcatactacggagactctgtgaagggccgatgcaccatctccagggacaccgccaaaaactcagtgtttctgcaaatggacagcctgggagtcgacgacacggccaagtattactgtgcgagaggtttcgattgtagtagtaccagttgctatgcttttgatctctggggcctagggacaatggtcaccgtctcttca

SEQ ID NO: 4872 - DNA, 304 bp, Homo sapiens
  source 1..304: mol_type = other DNA
tgcagcctctggattcaccttcagtggctactacatgagctggatccgccaggctccagggaaggggctggagtgggtttcatacattagtgatagtggtattagcaggtactacgcagactctgtgaagggccgatccaccatctccagggacaacgcccagcactcattgtatctgcaaatggacagcctgagagccgaggacacggccctgtattactgtgcgagaggtttcgattgtagtagtaccagctgctatgcttttgatctctggggccaagggacaatggtcaccgtctcttca

SEQ ID NO: 4873 - DNA, 304 bp, Homo sapiens; identical to SEQ ID NO: 4869
  source 1..304: mol_type = other DNA

SEQ ID NO: 4874 - DNA, 304 bp, Homo sapiens
  source 1..304: mol_type = other DNA
tgcagcctctggattaacttttagcaggtttcccatgagctgggtccgccaggctccagggaaggggccggagtgggtctcatatattagtgatagtggtagtatagtatactacggagactctgtgaagggccgatgcaccatctccagggacaccgccaaaaactcagtgtttctgcaaatggacagcctgggagtcgacgacacggccaagtattactgtgcgagaggtttcgattgtagtagtaccagctgctatgcttttgatctctggggccaagggacaatggtcaccgtctcttca

SEQ ID NO: 4875 - DNA, 304 bp, Homo sapiens
  source 1..304: mol_type = other DNA
tgcagcctctggattcaccgtcagtggctactacatgagctggatccgccaggctccagggaaggggctggagtgggtctcatacattagtgatagtggtagtatcctatactacggagactctgtgaagggccgatgcaccatctccagggacaccgccaaaaactcactgtatctgcaaatgaacagcctgggagccgaggacacggccatgtattactgtgcgagaggtttcgattgtagtagtaccagctgctatgcttttgatctctggggccaagggacaatggtcaccgtctcttca

SEQ ID NO: 4876 - DNA, 304 bp, Homo sapiens
  source 1..304: mol_type = other DNA
tgcagcctctggattcgtcatcagtgactactacatgagctggatccgccaggctccagggaaggggctggagtgggtctcatacattagtggtagtggtagtatactatactacggagactctgtgaagggccgatgcaccgtctccagggacaccgccaaaaactcactgtttctgcaactggacagcctgggagccgaagacacggccatgtattactgtgcgagaggtttcgattgtagtagtaccagctgctatgcttttgatctctggggccaagggacaatggtcaccgtctcttca

SEQ ID NO: 4877 - DNA, 304 bp, Homo sapiens; identical to SEQ ID NO: 4865
  source 1..304: mol_type = other DNA

SEQ ID NO: 4878 - DNA, 304 bp, Homo sapiens
  source 1..304: mol_type = other DNA
tgcagcctctggattccccttaagtggctattacatgagctggatccgccaggctccagggaaggggctggagtgggtttcatacattagtggtagtgctggtgccatatattacggagactctgtgaagggccgattcaccatctccagagacaacgccaaaaactcactgtatctgcaattgaacagcctgagagccgaggacacggccgtgtattactgtgcgagaggtttcgattgtagtagtaccagctgctatgcttttgatctctggggccaagggacaatggtcaccgtctcttcg

SEQ ID NO: 4879 - DNA, 304 bp, Homo sapiens
  source 1..304: mol_type = other DNA
tgcagcctcgggattcagaatcagtgactactacatgacctggatccgccaggctccagggaaggggctggagtgggtctcatacattactgataatggtgatgtcctgtactccggagactctgtgaagggccgatgcaccatctccagggacaccgccaaaaattcactgtctcttcaaatggacagcctgggagtcgaggacacggccatgtactactgtgcgagaggtttcgattgtagtagtaccagctgctatgcttttgatctctggggccaagggacaatggtcaccgtctcttca

SEQ ID NO: 4880 - DNA, 304 bp, Homo sapiens
  source 1..304: mol_type = other DNA
tgcagcctctggattcaccatcagtgactactacatgagctggctccgccaggctccagggaaggggctgcagtgggtttcatacattagtggtagtggtagtaccatatactacggagactctgtgaagggccgattcaccatctccagggacaacgccatgaactcactgtatctgcaaatgaacagcctgggagccgaggacacggccgtgtattactgtgcgagaggtttcgattgtagttctaccagctgctatgcttttgatctctggggccaagggacagtggtcaccgtctcttca

SEQ ID NO: 4881 - DNA, 304 bp, Homo sapiens
  source 1..304: mol_type = other DNA
tgcagcctctggattcgccgtcagtgactactacatgagctggatccgccaggctccagggaaggggctggagtgggtctcatacattagtgatagtggtagtatcctatactacggagactctgtgaagggccgatgcaccatctccagggacaccgccaaaaactcactgtatctgcaaatgaacagcctgggagccgacgacacggccatgtattactgtgcgagaggtttcgattgtagtagtaccagctgctatgcttttgatctctggggccaagggacaatggtcaccgtctcttca

SEQ ID NO: 4882 - DNA, 304 bp, Homo sapiens
  source 1..304: mol_type = other DNA
tgcagcctctggattcatcgtcagtgactactacatgagctggatccgccaggctccagggaaggggctggagtgggtctcatacattagtgatagtggtagtatactatactacggagactctgtgaagggccgatgcaccatctccagggacaccgccaaaaactcactgtttctgcaaatggacagcctgggaggcgaggacacggccatgtattactgtgcgagaggcttcgattgtagtagtaccagctgctatgcttttgatctctggggccaagggacaatggtcaccgtctcttca

SEQ ID NO: 4883 - DNA, 304 bp, Homo sapiens
  source 1..304: mol_type = other DNA
tgcagcctctggattcagcatcagtggctactacatgagctggatccgccaggctccagggaaggggctggagtgggtctcatacattagtgatggtggtagtatcctatactacggagactctgtgaagggccgatgcaccatctccagggacaccgccaaaaactcagtgtatctgcaaatgaacagcctgggagccgaggacacggccatatattactgtgcgagaggattcgattgtagtagtaccagctgctatgcttttgatctctggggccaagggacaatggtcaccgtctcttca

SEQ ID NO: 4884 - DNA, 304 bp, Homo sapiens
  source 1..304: mol_type = other DNA
tgcagcctcgggattcagagtcagtgactactacatgagctggatccgccaggctccagggaaggggctggagtgggtctcatacattactaatagtggtgatgtcctgtactacggagactctgtgaagggccgatgcaccatctccagggacaccgccaaaaattcactgtatctgcaagtggacagcctgggagtcgaggacacggccatgtattactgtgcgagaggtttcgattgtagtagtaccagctgctatgcttttgatctctggggccaagggacaatggtcaccgtctcttca

SEQ ID NO: 4885 - DNA, 301 bp, Homo sapiens
  source 1..301: mol_type = other DNA
tgcagcctccggattcaccttcagtgactactacatgagttggatccgccaggctccagggaaggggctggagtgggtttcatatattggtactggaagtaccatatactacggagactctgtgaagggccgattcaccatctccagggacaacgccaaaaactcactgtatctgcagatgaatagcctgacagccgaggacacggccctatattattgtgcgagaggtttcgattgtagtagtaccagctgctatgcttttgatctctggggccaggggacaatggtcaccgtctcttcg

SEQ ID NO: 4886 - DNA, 304 bp, Homo sapiens
  source 1..304: mol_type = other DNA
tacagcctctggattcgccttcagtgactattacatgagctggatccgccaggctccagggaaggggctggagtgggtttcatacattagtggtagtgatattaccatatactacgcagactctgtgaagggccgattcaccatctccagggacaacgcccagaactcactgtatctgcaaatgaacagcctgagagccgaggacacggccgtgtattattgtgcgagaggtttcgattgtagtagtaccagctgctatgcttttgatctctggggccaagggacaatggtcaccgtctcttca

SEQ ID NO: 4887 - DNA, 301 bp, Homo sapiens
  source 1..301: mol_type = other DNA
tgcagcctctggattccccctcagtgactactacctgagctggatccgccaggctccagggaaggggctggagtgggtttcatacattggtagtagtggtatcatatactatggagagtctgtgaagggccgattcaccatctccagggacaacgccaaaaactcactgtatctgcaaatgaacagcctgagagccgaggacacggccgtgtattattgtgcgagaggtttcgactgtagtagcaccagctgctatgcttttgatctctggggccaggggacaatggtcaccgtctcttca

SEQ ID NO: 4888 - DNA, 304 bp, Homo sapiens
  source 1..304: mol_type = other DNA
tgcagcctctggattcagcatcagtgactactacatgagctggatccgccaggctccagggaaggggctggagtgggtttcatacattagtactcgtggtagtcccatatactacgcaggctctgttaagggccgattcaccatctccagggacaacgccaagaactcactgtatctgcaaatgaacagcctgagagccgaggacacggccgtgtattactgtgcgagggggtttgattgtagtagtaccagctgctatgcttttgatctctggggccaagggacaatggtcaccgtctcttca

SEQ ID NO: 4889 - DNA, 304 bp, Homo sapiens
  source 1..304: mol_type = other DNA
tgcagcctctggattcaccctcagtgactactacatgagctggatccgccaggctccagggaaggggctggagtgggtttcatacagtagtagtagtggtagtaccagatactatgcagactctgtgaagggccgattcaccatctccagggacaacgccaagaactcactgtatctgcaaatgaacagcctgagagccgaggacacggccgtgtattactgtgcgagagggtttgattgtagtagtaccagctgctatgcttttgatctctggggccaagggacaatggtcaccgtctcttca

SEQ ID NO: 4890 - DNA, 304 bp, Homo sapiens
  source 1..304: mol_type = other DNA
tgcagcctctggattcaccttcagtgactactacatgagctggatccgccgggctccagggaaggggctggagtgggtttcatacattagtaatagtgttagtagcagatactacgcagactctgtgaagggccgattcaccatctccagggacaacgccaagaactcactgtatctgcaaatgaacagcctgagagccgaggacacggccgtatattactgtgcgagagggtttgattgtagtagtactagctgctatgcttttgatctctggggccaagggacaatggtcaccgtctcttca

SEQ ID NO: 4891 - DNA, 304 bp, Homo sapiens; identical to SEQ ID NO: 4860
  source 1..304: mol_type = other DNA

SEQ ID NO: 4892 - DNA, 304 bp, Homo sapiens
  source 1..304: mol_type = other DNA
tgccgcctctggattcaccttcagtgactactacatgagctggatccgccaggctccagggaaggggctggagtggatttcatacattagtgatagtggtactagcatatactacgcagactctgtgaagggccgattcaccatctccagggacaacgccaggaactcactgtatcttcaaatgaacagcctgagagccgaggacacggccgtgtatttctgtgcgagagggtttgattgtagtagtaccagctgctatgcttttgatctctggggccaagggacaatggtcaccgtctctcca

SEQ ID NO: 4893 - DNA, 307 bp, Homo sapiens
  source 1..307: mol_type = other DNA
tgcagcctctggattccccttcagtgactactacatgagttggattcgccaggctccagggaaggggctggagtgggtttcatacattagtagtagttttagtagtcacatatattacgcagactctgtgaagggccgattcaccatctccagggacaactccaagaactcattgtatctgcaaatgaacagcctgagagccgaggacacggccctatattactgtgcgagagggtttgattgtagcagtaccagctgctatgcttttgatctctggggccaagggacaatggtcaccgtctcttca

SEQ ID NO: 4894 - DNA, 307 bp, Homo sapiens
  source 1..307: mol_type = other DNA
tgcagcctctggattcaccttcagtgactactacatgagttggatccgccaggctccagggaaggggctggagtgggtttcatacattagtagtagtgttagtagtaccatatactacgcagactctgtgaggggccgattcaccatctccagggacaactccaagaagtcattgtatctgcaaatgaacagtctgagagccgaggacacggccctgtattactgtgcgagagggtttgattgtagcagtaccagctgctatgcttttgatctctggggccaagggacaatggtcaccgtctcttca

SEQ ID NO: 4895 - DNA, 295 bp, Homo sapiens
  source 1..295: mol_type = other DNA
cgctgtctctgatgggtccttaagaactctcttctggggctggattcgccagcccccaggaaaggggctggagtggattggggaagaccatcataatggaaacaccaactacaacccgtccttcaggggtcgagtcactatatcagtagacacgtccaaactccagatctccctgcaactgcgttctgtgaccgccgcggacacggctgtctattactgtgcgagagccgggacttggggtgcctttgatgcttttgatatctggggccaagggactatggtcgtcgtctcctca

SEQ ID NO: 4896 - DNA, 295 bp, Homo sapiens
  source 1..295: mol_type = other DNA
cgctgtctctgatgggtccttaagaactctcttctggggctggattcgccagcccccaggaaaggggctggagtggattggggaagaccatcataatggaaacaccaactacaacccgtccttcaggagtcgagtcactatatcagtagacacgtccaagctccagatctccctgcaactgcgttctgtgaccgccgcggacacggctgtctattactgtgcgagagccgggacttggggtgcctttgatgcttttgacatctggggccaagggactatggtcgtcgtctcttca

SEQ ID NO: 4897 - DNA, 295 bp, Homo sapiens
  source 1..295: mol_type = other DNA
cgctgtctatggtgagtccttcagtcgcctcttctggagctggatccgccagcccccagggaaggggctggagtggcttggggaaatcaatcatggtggaagcgccaactccaacccgtccctcaagagtcgagtcaccatgtcaattgacccgtccaagaaccaattctccctgagactgacctcggtgaccgccgcggacacggctgtctattattgtgcgagggcgggcacctggggcgcctttgatgcttttgatatctggggccaagggacaatggtcaccgtctcttca

SEQ ID NO: 4898 - DNA, 283 bp, Homo sapiens
  source 1..283: mol_type = other DNA
tgcagcctctgggttcaccgtcagtaccaactacatgagctgggtccgccaggctccagggaaggggctggagtgggtctcaattatctataacgatggtagtacatactacgtagactccgtgaagggccgattcaccatctccagagacaattccaagaacctgctgtatcttcaaatgaacactctgagaaccgacgacacggccgtgtattactgtgcgagatggagtgggacctactatgaccactggggccagggaaccctggtcaccgtctcctca

SEQ ID NO: 4899 - DNA, 286 bp, Homo sapiens
  source 1..286: mol_type = other DNA
tgcagtctctgggttcagcgtcagtagcaactatatgagttgggtccgccaggctccagggaaggggctggagtgggtctcaattatttatgctggtgggaccacaacattttatagagactccgtgaggggccgattcaccatctccagagacaactccaagaacacattgtaccttcaaatgaatagtctaagagtcgacgacacggccatgtactattgtgcgaggtggagtgggacctactatgaccactggggccagggaaccccggtcaccgtctcctca

SEQ ID NO: 4900 - DNA, 286 bp, Homo sapiens
  source 1..286: mol_type = other DNA
tgcagtctctgggttcagtgtcagtagcaactatatgagttgggtccgccaggctccagggaaggggctggagtgggtctcaatcatttatgctgatgggaccacaacattttatcgagactccgtgaggggccgattcaccatctccagagacaactccaagaacacattgtaccttcaaatgaacagtctaagagccgacgacacggccatgtactattgtgcgaggtggagtgggacctactatgaccactggggccagggaaccccggtcaccgtctcctca

SEQ ID NO: 4901 - DNA, 283 bp, Homo sapiens
  source 1..283: mol_type = other DNA
tgcagcctctgggttctccgttggtagcaactacatgagttgggtccgccaggctccagggaaggggctggagtgggtctcaatgatttataatagtggtcctacatattacacagactccgtgaagggccgattcaccatctccagagacaattccatgaacacactgtatcttcaaatgaacagcctgagagacgaggacacggccatgtattactgtgcgagatggagtgggacctactatgaccactggggccagggaaccctggtcaccgtctcctca

SEQ ID NO: 4902 - DNA, 283 bp, Homo sapiens
  source 1..283: mol_type = other DNA
tgcagcctctgggttcaccgttggtagcaactacatgagttgggtccgccaggctccagggaaggggctggagtgggtctcaatgatttatagcggtggtcctacatattacacagactccgtgaagggccgattcaccatctccagagacaattccaagaatatgctgtatcttcaaatgaacagcctgagagacgaggacacggccatgtactactgtgcgagatggagtgggacctactatgaccactggggccagggaaccctggtcaccgtctcctca

SEQ ID NO: 4903 - DNA, 283 bp, Homo sapiens
  source 1..283: mol_type = other DNA
tgcagcctctgagttcaccgttggtagcaactacatgagttgggtccgccaggctccagggaaggggctggagtgggtctcaatgatttatagcggtggtcctacatattacacagactccgtgaagggccgattcaccatctccagagacaattccaagaacactctgtatcttcaaatgaacagcctgagagacgaggacacggccatgtattactgtgcgagatggagtgggacctactatgaccactggggccagggaaccctggtcaccgtctcctca

SEQ ID NO: 4904 - DNA, 283 bp, Homo sapiens
  source 1..283: mol_type = other DNA
tgcagcctctgggttctccgttggtagcaactacatgagttgggtccgccaggctccagggaaggggctggagtgggtctcaatgatttataatagtggtcctacatattacacagactccgtgaagggccgattcaccatctccagagacaattccatgaacacactgtatcttcaaatgaacagcctgagagacgaggacacggccatgtattactgtgcgagatggagtgggacctactatgaccactggggccagggaaccctggtcaccgcctcctca

SEQ ID NO: 4905 - DNA, 283 bp, Homo sapiens
  source 1..283: mol_type = other DNA
tgcagcctctgggatcaccgttggtagcaactacatgagttgggtccgccaggctccagggaaggggctggagtgggtctcaatgatttatagcggtggtcctacatattacacagactccgtgaagggccgattcaccatctccagagacaattcgaagaacacgctgtatcttcaaatgaacagcctgagagacgaggacacggccatgtattactgtgcgagatggagtgggacctactatgaccactggggccagggaaccctggtcaccgtctcctca

SEQ ID NO: 4906 - DNA, 283 bp, Homo sapiens
  source 1..283: mol_type = other DNA
tgcagcctctgggttcaccgttggtagcaactacatgagttgggtccgccaggctccagggaaggggctggagtgggtctcaatgatttatagcggtggtcctacatattacacagactccgtgaagggccgattcaccatctccagagacagttccaagaacacgctgtatcttcaaatgaacagcctgagagacgaggacacggccatgtattactgtgcgagatggagtgggacctactatgaccactggggccagggaaccctggtcaccgtctcctca

SEQ ID NO: 4907 - DNA, 283 bp, Homo sapiens
  source 1..283: mol_type = other DNA
tgcagcctctgggttcaccgttggtagcaactacatgagttgggtccgccaggctccagggaaggggctggagtgggtctcaatgatctatagcggtggtcctacatattacacagactccgtgaagggccgattcaccatctccagagacaattccaagaacacgctgtatcttcaaatgaacagcctgagagacgaggacacggccatgtattactgtgcgagatggagtgggacctactatgaccactggggccagggaaccctggtcaccgtctcctca

SEQ ID NO: 4908 - DNA, 283 bp, Homo sapiens
  source 1..283: mol_type = other DNA
tgcagcctctgggttcaccgttggtagcaactacatgagttgggtccgccaggctccagggaaggggctggagtgggtctcaatgatttatagcagtggtcctacatattacacagactccgtgaagggccgattcaccatctccagggacagttccaagaacacgctgtatcttcaaatgaacagcctgagagacgaggacacggccatgtattactgtgcgagatggagtgggacctactatgaccactggggccagggaaccctggtcaccgtctcctca

SEQ ID NO: 4909 - DNA, 283 bp, Homo sapiens; identical to SEQ ID NO: 4908
  source 1..283: mol_type = other DNA

SEQ ID NO: 4910 - DNA, 283 bp, Homo sapiens
  source 1..283: mol_type = other DNA
tgcagtctctggtttccccgttggtagcaactacatgagttgggtccgccaggctccagggaaggggctggagtgggtctcaatgatttataacagtgggcccacatattacacagactctgtgaagggccgattcaccatctccagagacaattccaagaacactttgtatctccaaatgaacagcctgagagacgaggacacggccatgtattattgtgcgagatggagtgggacctactatgaccactggggccagggaaccctggtcaccgtctcctca

SEQ ID NO: 4911 - DNA, 283 bp, Homo sapiens
  source 1..283: mol_type = other DNA
tgcagcctctgggttcaccgttggtagcaactacatgagttgggtccgccaggctccagggaaggggctggagtgggtctcaatgatttatagcggtggtcctacatattacacagactccgtgaagggccgattcaccatctccagagacaattccaagaacacgctgtatcttcaaatgaacagcctgagagacgaggacacggccatgtattactgtgcgagatggagtgggacctactatgaccactggggccagggaaccctggtcaccgtctcctca

SEQ ID NO: 4912 - DNA, 298 bp, Homo sapiens
  source 1..298: mol_type = other DNA
cactgtctctggtggctccatcagcagtagtagttactactggggctggatccgccagcccccagggaaggggctggagtggattgggaatatctattatagtgggagcacctactacaacccgtccctcaagagtcgggtcaccatatccgtagtcacgtccaagaaccagttctccctgaacctgagctctgtgaccgccgcagacacggctgtgtattactgtgcgagacgtcatagcagcagccgcaactggttcgacccctggggccagggaaccctggtcaccgtctcctca

SEQ ID NO: 4913 - DNA, 298 bp, Homo sapiens
  source 1..298: mol_type = other DNA
cactgtctctggtggctccatcatccccgatagttactactggtgctggatccgccagtccccagggacggggctagaatggattgggagtatctattatagtgggagtacttactacaacccgtccctcaagagtcgagtcaccatgtccgtagacaggtccaagaaccagttcttcctgaacctgaactctgtgaccgccgcagacacggctctctattactgtgcgagacgtcatagcagcagtcgaaactggttcgacccctggggccagggaaccctggtcaccgtctcctca

SEQ ID NO: 4914 - DNA, 309 bp, Homo sapiens
  source 1..309: mol_type = other DNA
acacagaccctcacactgacctgcaccttctctgggttctcactcagcactagtggaatgtgtgtgacttggatccgtcagcccccagggaaggccctggagtggcttgcactcattgattgggatgatggtaaatactacaacacatctctgaaggccaggctcaccatctccaaggacacctccaaaaaccaggtggtccttataatgaccaacgtggactctgtggacacaggcacttattattgtgcacggaggtgggacggtctggacgtctggggccaagggaccacggtcaccgtctcctca

SEQ ID NO: 4915 - DNA, 309 bp, Homo sapiens
  source 1..309: mol_type = other DNA
acacagaccctcacactgacctgcaccttctctgggttctcactcagcactagtggaatgtgtgtgacttggatccgtcagcccccagggaaggccctggagtggcttgcactcattgattgggatgatggtaaatactacaacacatctctgaaggccaggctcaccatctccaaggacacctccaaaaaccaggtggtccctataatgaccaacgtggactctgtggacacaggcacttattattgtgcacggaggtgggacggtctggacgtctggggccaagggaccacggtcaccgtctcctca

SEQ ID NO: 4916 - DNA, 309 bp, Homo sapiens
  source 1..309: mol_type = other DNA
acacagaccctcacactgacctgcaccttctctgggttctcactcagcactagtggaatgtgtgtgagctggatccgccagcccccagggaaggccttggagtggcttgcactcattgattgggatgataataagtactacagtgcatctctgaagaccaggctcaccatctccaaggacacctccaaaaatcaggtggtccttataatgaccaacatggaccctgtggacacagccacctatttctgtgcacggaggtgggacggtctggacgtctggggccaagggaccacggtcaccgtctcctca

SEQ ID NO: 4917 - DNA, 309 bp, Homo sapiens
  source 1..309: mol_type = other DNA
acacagaccctcacattgacgtgcaccttctctgggttctcactcagcactagtggagtgtgtgtgagctggatccgtcagcccccagggaaggccctggagtggcttgcactcattgattgggataataataaatactacaacacatctctgaagaccaggctcaccgtctccaaggacacctccaaaaaccaggtggtccttataatgaccaacatggaccctgtggacacagccacctattactgtgcacggaggtgggacggcttggacgtctggggccaagggaccacggtcaccgtctcctca

SEQ ID NO: 4918 - DNA, 309 bp, Homo sapiens
  source 1..309: mol_type = other DNA
acacagaccctcacactgacctgcaccttctctgggttctcactcagcactagtggaatgtgtgtgagctggatccgtcagcccccagggaaggccttggagtggcttgcgctcattgattgggatgataataaatactacagtacatctctgaagaccaggctcaccatctccaaggacacctccaaaaatcaggtggtccttataatgaccaacatggaccctgtggacacagccacctattactgtgcacggaggtgggacggtctggacgtctggggccaagggaccacggtcaccgtctcctca

SEQ ID NO: 4919 - DNA, 309 bp, Homo sapiens
  source 1..309: mol_type = other DNA
acacagaccctcacactgacctgcaccttctctgggttctcactcagcactagtggaatgtgtgtgacttggatccgtcagcccccagggaaggccctggagtggcttgcactcattgattgggatgatggtaaatactacaacacatctctgaaggccaggctcaccatctccaaggacacctccaaaaaccaggtggtccttataatgaccaacgtggagcctgtggacacaggcacttattattgtgcacggaggtgggacggtctggacgtctggggccaagggaccacggtcaccgtctcctca

SEQ ID NO: 4920 - DNA, 309 bp, Homo sapiens
  source 1..309: mol_type = other DNA
acacagaccctcacactgacctgcaccttctctgggttctcactcagcactagtggaatgtgtgtgagctggatccgtcagcccccagggaagcccttggagtggcttgcactcattgattgggatgataataaatactacagtacatctctgaagaccaggctcaccatctccaaggacacctccaaaaatcaggtggtccttataatgaccaacatggaccctgtggacacagccacctattattgtgcacggaggtgggacggtctggacgtctggggccaagggaccacggtcaccgtctcctca

SEQ ID NO: 4921 - DNA, 309 bp, Homo sapiens
  source 1..309: mol_type = other DNA
acacagaccctcacactgacctgcaccttctctgggttctcactcagcactagtggaatgtgtgtgagctggatccgtcagcccccagggaaggccttggagtggcttgcactcattgattgggatgataataaatactacaatacatctctgaagaccaggctcaccatctccaaggacacctccaaaaatcaggtggtccttataatgaccaacatggaccctgtggacacagccacctattactgtgcacggaggtgggacggtctggacgtctggggccaagggaccacggtcaccgtctcctca

SEQ ID NO: 4922 - DNA, 309 bp, Homo sapiens
  source 1..309: mol_type = other DNA
acacagaccgtcacactgacctgcagcttctctgggttctcactcagcactagtggaatgtgtgtgagctggatccgtcagcccccagggaagcccttggagtggcttgcactcattgattgggatgataataaatactacagtacatctctgaagaccaggctcaccatctccaaggacacctccaaaaatcaggtggtccttataatgaccaacatggaccctgtggacacagccacctattattgtgcacggaggtgggacggtctggacgtctggggccaagggaccacggtcaccgtctcctca

SEQ ID NO: 4923 - DNA, 309 bp, Homo sapiens
  source 1..309: mol_type = other DNA
acacagaccctcacactgacctgcaccttctctgggttctcactcagtactagtggaatgtgtgtgagctggatccgtcagcccccagggaaggccttggagtggcttgcactcattgattgggatgataataaatactacagtacatctctgaagaccagactcaccatctccaaggacacctccaaaaatcaggtggtccttataatgaccaatttggaccctgtggacacagccacctattattgtgcacggaggtgggacggtctggacgtctggggccaagggaccacggtcaccgtctcctca

SEQ ID NO: 4924 - DNA, 309 bp, Homo sapiens; identical to SEQ ID NO: 4917
  source 1..309: mol_type = other DNA

SEQ ID NO: 4925 - DNA, 288 bp, Homo sapiens
  source 1..288: mol_type = other DNA
gcctctggatacaccttctctagctatactatgcattgggtgcgccaggcccccggacaaaggcttgagtggatgggaagcatccccactggcaatggtgacccaaaatgttcacagaggttccaggacagagtcaccattaccagggacacatccgcgagcacagcctacatggagctgagcagcctgatatttgaagacacggctgtgtattactgtgcgagagggagtagttggtcaggctggttcgacccctggggccagggaaccctggtcaccgtctcctca

SEQ ID NO: 4926 - DNA, 288 bp, Homo sapiens
  source 1..288: mol_type = other DNA
gcttctggatacaccttcactagttatgctatgcattgggtgcgccaggcccccggacaaaggcttgagtggatgggatggatcaacgctggcaatggttacacaaaatattcacagaagttccaggacagagtcaccattaccagggacacatccgcgagcacagcctacatggagctgagcagcctgagatctgaagacacggctgtgtattactgtgcgaggggcagcagctggtcaggctggttcgacccctggggccagggaaccctggtcaccgtctcctca

SEQ ID NO: 4927 - DNA, 289 bp, Homo sapiens
  source 1..289: mol_type = other DNA
tgaagcctctggattcacctttagcgactattggatgatttgggcccgccaggctccagggaaggggctggagtgggtagccaatataaacccaggtggaagtgagacatactatgtcgactctgtgaagggccgattcaccatctccagagacaacgccaagaggtcactttatctgcaaatgagcagcctgagagtcgaggacacggctgtttatcactgtgcgagatttggtatagaggccactactgactactggggccagggaaccctggtcaccgtctcctcg

SEQ ID NO: 4928 - DNA, 289 bp, Homo sapiens
  source 1..289: mol_type = other DNA
tgaagcctctggattcacctttagcgactattggatgatttgggcccgccgggctccagggaaggggctggagtggctggccaatataaacccaggtggaagtgcgaagtactatgtcgactctctgaagggccgattcaccatctccagagacaacgccaagagctcactttatctgcaaatgagcagcctgagagtcgaagacacggctgtttatcactgtgcgagatttggtatagaggcaactactgactactggggccagggaaccctggtcaccgtctcctca

SEQ ID NO: 4929 - DNA, 289 bp, Homo sapiens
  source 1..289: mol_type = other DNA
tgaagtctctgaattcacccttacaatctattggatgacctgggtccgccaggctccggggggggggctggagtgggtggccaacataaacccagatggaaatgacagattctatctggactctgtgaggggccgattcaccatttccagagacaacgccaagaattcagtgtttctgcaaatgaacaacctgagagccgatgacacgggtgtttattattgtgcgagattcggtatagaggcaaccaccgactactggggccagggaaccctggtcaccgtctcctca

SEQ ID NO: 4930 - DNA, 286 bp, Homo sapiens
  source 1..286: mol_type = other DNA
tgcagcctccggatttaccttcagtagctactggatgcactgggtccgccaagctccagggaaggggctggtgtgggtctcacgtattgatagtgatgggagtagcacaaactacgcggactccgtgaagggccgattcaccatctccagagacaacgccaagaacaccctgtatctgcaaatgaacagtctgagagccgaggacacggctgtgtattactgtgcaaggctggctacaattcggtcggactactggggccagggaaccctggtcaccgtctcttca

SEQ ID NO: 4931 - DNA, 286 bp, Homo sapiens
  source 1..286: mol_type = other DNA
tgcagcgtctggattcaccttcagtagctactggatgcactgggtccgccaagctccagggaaggggctggtgtgggtctcacgtattaatagtgatgggagtagcacaaactacgcggagtccgtgaagggccgattcaccatctccagagacaacgccaagaacacgctgtatctgcaaatgaacagtctgagagccgaggacacggctgtgtattactgtgcaagattggctacgattaggagcgactactggggccagggaaccctggtcaccgtctcctca

SEQ ID NO: 4932 - DNA, 286 bp, Homo sapiens
  source 1..286: mol_type = other DNA
tgcagcctctggattcaccttcggtagctactggatgcactgggtccgccaagctccggggaaggggctggtgtgggtctcacatattaataatgatgggagtaccacaacctacgcggactccgtgaagggccgattcaccgtctccagagacaacgccaagaacacgctgtatctgcaaatgaacagtctgagagccgaggacacggctgtgtattactgtgcaagactggctacgattaggagcgactactggggccagggaaccctggtcaccgtctcctca

SEQ ID NO: 4933 - DNA, 280 bp, Homo sapiens
  source 1..280: mol_type = other DNA
tgcagcctctggattcacctttagcagctatgccatgacctggctccgccaggctccaggggagggactggagtgggtctcagctatcagtggtggtggtggtagcacatactacgcagactccgtgaagggccggttcaccatctccagagacaattccaagaacacgctgtatctgcaaatgaacagcctgagagccgaggacacggccgtataccactgtgcgaagacagtggctaatgaattctggggccagggaaccctggtcaccgtctcctca

SEQ ID NO: 4934 - DNA, 280 bp, Homo sapiens
  source 1..280: mol_type = other DNA
tgcagcctctggattcacctttaacacttatgccatgacctgggtccgccaggctccagggaaggggctggagtgggtctcagctattagtggtgatggtctcaatacatattatgcagactccgtgaagggccggttcatcatgtccagagacaattccaggaacagactgtatctgcagatgaatggcctgagagccgaggacacggccgtttatcactgtgcgaagacagtggccaatgaattctggggccagggaaccctggtcaccgtctcctca

SEQ ID NO: 4935 - DNA, 280 bp, Homo sapiens
  source 1..280: mol_type = other DNA
tgcagcctctggattcacctttaacacttatgccatgacctgggtccgcctggctccagggaaggggctggagtgggtctcagctattagtggtgatggtctcaatacatattatgcagactccgtgaagggccggttcatcatgtccagagacaattccaggaacagactgtatctgcagatgaatggcctgagagccgaggacacggccgtttatcactgtgcgaagacagtggccaatgaattctggggccagggaaccctggtcaccgtctcctca

SEQ ID NO: 4936 - DNA, 286 bp, Homo sapiens
  source 1..286: mol_type = other DNA
tgcagcctctggattcacctttagtacctattggatgacctggctccggcaggctccagggaaggggccggagtgggtggccaacataaacccaggtgggagtgcggaatactatgtggcctctgtgaagggccgattcaccatctccagagacaacgccaaggagtcactggttctgcagatgaacagcctgagagtcgaggacacggctatatattactgtgcgacacacttgaactgggcatgggactactggggccagggaaccctggtcaccgtctcctca

SEQ ID NO: 4937 - DNA, 286 bp, Homo sapiens
  source 1..286: mol_type = other DNA
tgcagcctctggattcacctttagtagctattggatgagctggctccgccaggctccagggaaggggctggagtgggtggccaacataaaacaagatggaagtgaaaaatactatgtgggctctgtgaagggccgattcaccatctccagagacaaccccaagaactcactgtatctgcaaatgaacagcctgagagccgaggacacggctatatattactgtgcgacccaccttaactgggcatgggactactggggccacggaaccctggtcaccgtctcctcg

SEQ ID NO: 4938 - DNA, 286 bp, Homo sapiens
  source 1..286: mol_type = other DNA
tgcagcctctggattcatctttagtagttattggatgacttggctccgccaggctccagggaaggggctggagtgggtggccaacattaaaccagatggaagtgaggagtactatgtgggctctgtgaggggccgattcaccatctccagagacaacgccaagaactcacaatatctccaaatgaacagcctgagagccgaggacacggctgtatactactgtgcgacccacctcaactgggcatgggactactggggcccgggaaccctagtcaccgtctcctca

SEQ ID NO: 4939 - DNA, 286 bp, Homo sapiens
  source 1..286: mol_type = other DNA
tgcagcctctggattcacctttagtggctattggatgagctggctccgccaggctccagggaaggggctggagtgggtggccaacataaaaccagatggaagtgagagatactatgtgggctctgtgaagggccgattcaccatctccagagacaacgccaagaactcactgtatctgcaaatgaacagcctgagagtcgaggacacggctgtatattactgtgcgacccaccttaactgggcatgggactactggggccagggaaccctggtcaccgtctcctca

SEQ ID NO: 4940 - DNA, 295 bp, Homo sapiens
  source 1..295: mol_type = other DNA
tgcagcctctggattcaccttcagtgactacagtctgcactgggtccgccaggctccaggcaagggcctggagtgggtggcaattatatcatatgatggaagtcaaagatactacagagagtccgcggggggccgattcgccatctccagagacaattccgcgaacacgctgtatctgcaagtgaacaccctgacaagtgaggacacggctatctattattgtgcgcgagcacctagcaacgcctggcacaactttgactactggggccagggaaccctggtcaccgtctcctca

SEQ ID NO: 4941 - DNA, 295 bp, Homo sapiens
  source 1..295: mol_type = other DNA
tgcagcctctggattcagcttcaaagactacgccatgcactgggtccgccaggctccaggcaaggaattggagtgggtggcagtcatttcattcgatgccagtcagagatactacagagacgtcgtccagggccgattcattatctcaagggacaatacccaggagactctacatctccatatgaggtccctgacaatcgatgattcggctacttattattgtgcgagagccccctccaacgcctggcacaattttgattactggggcctgggaaccctggtcaccgtctcctca

SEQ ID NO: 4942 - DNA, 295 bp, Homo sapiens
  source 1..295: mol_type = other DNA
tgcagcctctggattcaccttcagagactactccatgcactgggtccgccaggctccaggcaaggacttggagtgggtggcaataatttcattcgatggaactcagaaatactacagagacgtcgtgcagggccgatttatcatctccagagacaatacccaggagaccctatatctccatatgaggtccctgacaatcgatgattcggctacttattactgtgcgagagccccctccaacgcctggcacaattttgattactggggcctgggaaccctggtcaccgtctcctca

SEQ ID NO: 4943 - DNA, 295 bp, Homo sapiens
  source 1..295: mol_type = other DNA
tgcagcctctggattcaccttcagagactactccatgcactgggtccgccaggctccaggcaaggacttggagtgggtggcaataatttcattcgatggaactcagaaacactacagagacgtcgtgcagggccgatttatcatctccagagacaatacccaggagaccctgtatctccatatgagctccctgacaatcgatgattcggctacttattactgtgcgagagccccctccaacgcctggcacaattttgattactggggcctgggaaccctggtcaccgtctcctca

SEQ ID NO: 4944 - DNA, 280 bp, Homo sapiens
  source 1..280: mol_type = other DNA
cactgtctctggtggctccatcagtagttaccactggagctggatccgacagcccccagggaagggactggagtggattggatatatctattacagtgggagcaccaagtacaacccctccctcaagagtcgagtcaccatagcagtagacacgtcccagaaccagttctccctgaagctgagctctgtgaccgctgcggacacggccgtgtattactgtgcgagggggcctgggtcctttgactactggggccagggaaccctggtcaccgtctcctca

SEQ ID NO: 4945 - DNA, 280 bp, Homo sapiens
  source 1..280: mol_type = other DNA
cactgtctctggtggctccatcagtagttactactggagctggatccggcagcccccagggaagacactggagtggattggtaatatctattacagcgggagcaccaactacaacccctccctcaagagtcgagtcaccatatcaatagacatgtccaagaaccagatctccctgaagctgaactctgtgaccgctgcagacacggccgtgtattattgtgcgagaggaccgggttcctttgactactggggccagggaaccctggtcaccgtctcctca

SEQ ID NO: 4946 - DNA, 280 bp, Homo sapiens
  source 1..280: mol_type = other DNA
tgcagcctctggattcggccttaggggcaatgccatgacatgggtccgccaggctccagggaaggggctggaatgggtctcagatattcgtggtgatggtcatacgactttctatgcggactcggcgaagggccggttcctcatctccaaagacgattccaaagacacgttgcgtctagaaatgaccagcctgagagtcgaggacacggccctctattactgtgtgggccacggtggttcttcctactggggccggggaacctcggtcaccgtctcccca

SEQ ID NO: 4947 - DNA, 280 bp, Homo sapiens
  source 1..280: mol_type = other DNA
tgcagtctctggaatcacccttagcaacaatgccatgacctgggtccgccaggctccagggaagggtcttcagtgggtctcagatattagaggtggtcgtgatgacacatactacgcagactccgtgaggggccggttcagcatctccagagacatctccgagaacatattgtatctccaaatgaacagcctgagagtcgaggacacggccgtttattattgtgtaggacatggcggttcctcttactggggccagggaaccttggtcaccgtctcctct

SEQ ID NO: 4948 - DNA, 280 bp, Homo sapiens
  source 1..280: mol_type = other DNA
tgctgtctctggaatcacccttagtaacaatgccatgacctgggtccgccaggctccagggaagggtcttcagtgggtttcagatattagaggtggtcgtgatgacacatactacgcagactccgtgaggggccgcttcatcatctccagagacgtctccgagaacatattgtatctccaaatgaacagcctgagagtcgaggacacggccctttattattgtgtaggacatggcggttcctcttactggggccagggaacctgggtcaccgtctcctct

SEQ ID NO: 4949 - DNA, 289 bp, Homo sapiens
  source 1..289: mol_type = other DNA
tgcagcctctggattcatctttaccagctatgccgtgagctgggtccgccaggccccagggaaggggctggagtgggtctcaactgttactggtggtgttggtaacacatataacgcagactctgtggagggccggttcaccatctccagagacatctccaagagcacggtgtatctgcagatgaacagcctgagagtcgaggacacggccatatacttctgtgcgaaaggcggacattacagctgcttcgacccctggggccagggaaccctggtcaccgtctcctca

SEQ ID NO: 4950 - DNA, 289 bp, Homo sapiens
  source 1..289: mol_type = other DNA
ttcagcctctgaattcgcctttagtacctatgccatgacctgggtccgccaggctccagggaaggggctggagtgggtctcaactattagtggtggtggtgctgccacatactacgcagactccgtgaagggccggttcaccatctccagagacaattccaagaacatgttgtatctgcaaatgaacagcctgagagccgaagacacggccgtatattactgtgcgaaagggggacactatagttgcttcgacccctggggccagggaaccctggtcaccgtctcctca

SEQ ID NO: 4951 - DNA, 289 bp, Homo sapiens
  source 1..289: mol_type = other DNA
tgcagcctctggattcatgtttaccagctatgccgtgagctgggtccgccaggccccagggaaggggctggagtgggtctcaactattactggtggtgttggtaacacatactacgcagactctgtggagggccggttcaccatctccagagacatttccaagagcacggtgtatctgcagatgaacagcctgagagtcgaggacacggccacatacttctgtgcgaaaggcggacattacagctgcttcgacccctggggccagggaaccctggtcaccgtctcctca

SEQ ID NO: 4952 - DNA, 276 bp, Homo sapiens
  source 1..276: mol_type = other DNA
gcttctggatacaccttcactagctatgctatgcattgggtgcgccaggcccccggacaaagtcttgagtggatgggatggatcaacgctggcaatggtaacacaaaatattcacagaagttccagggcagagtcaccattaccagggacacatccgcgagcacagtatacatggagctgagcagcctgagatctgaagacacggctgtgtattactgtgcgaggaaactgtactttgactactggggccagggaaccctggtcaccgtctcctca

SEQ ID NO: 4953 - DNA, 276 bp, Homo sapiens
  source 1..276: mol_type = other DNA
gcttctggatacaccttcaatagctatgctgtgcattgggtgcgccaggcccccggacaaagccttgagtggatgggatggatcaacgctggcaatggcaacacaaagtattcacagaagttccagggcagactcatcatgaccagggacacatccgcgaacacagtctacatggaactgagcagcctgagatcggaagacacggctgtgtatttctgcgcgagaaagttatactttgactattggggccagggaaccctggtcaccgtctcctca

SEQ ID NO: 4954 - DNA, 276 bp, Homo sapiens
  source 1..276: mol_type = other DNA
gcttcaggatacaccttctctggctatgctctgcattgggtgcgccaggcccccggacaaaggcttgagtggatgggatggatcaacggtggcaatggtaacacaaaatattcagagaagttccagggcagagtcaccattaccagagacacatccgcgaccacagtctacatggagctgagtagcctgagatctgaagacacggctgtgtattattgtgcgagaaaactttactttgactactggggccagggaaccctggtcaccgtctcctca

SEQ ID NO: 4955 - DNA, 276 bp, Homo sapiens
  source 1..276: mol_type = other DNA
gcttctggctacatcttcactagctatgctatgcattgggtgcgccaggcccccggacaaaggcttgagtggatgggatggatcaacgctggcaatggtaacacaaaatattcacagaagttccagggcagagtcaccattaccagggacacatccgcgagcacagcctacatggagctgagcagcctgagatctgaagacacggctgtgtattactgtgcgagaaagttatactttgactactggggccagggaaccctggtcaccgtctcctca

SEQ ID NO: 4956 - DNA, 291 bp, Homo sapiens
  source 1..291: mol_type = other DNA
aagggttctggatacagctttaccaactactggatcggctgggtgcgccagatgcccgggaaaggcctggagtggatggggatcatctaccctggggactctgataccagatacagcccgtccttccaaggccaggtcaccatctcagccgacaagtccatcaacaccgcctacctgcagtggagcagcctgaaggcctcggacaccgccgtgtattactgtgcgagacgggcgggaggcgctgaatacttccaacactggggccagggcaccccggtcaccgtctcctca

SEQ ID NO: 4957 - DNA, 291 bp, Homo sapiens
  source 1..291: mol_type = other DNA
aagggttctggatacagctttaccagctactggatcggctgggtgcgccagatgcccgggaaaggcctggagtggatggggatcatctaccctggggactctgataccagatacagcccgtcgttccaaggccaggtcatcatctcagccgacaagtccatcaacaccgcctacctgcagtggagcagcctgaaggcctcggacaccgccgtgtattactgtgcgagacgggcgggaggcgctgaatacttccagcactggggccagggcaccccggtcaccgtctcctca

SEQ ID NO: 4958 - DNA, 291 bp, Homo sapiens
  source 1..291: mol_type = other DNA
aagggttctgaatacagctttaccagctactggatcggctgggtgcgccagatgcccgggaaaggtctggagtggatggggatcatctatcctggtgactctgataccagatacagcccgtccttccaaggccaggtcaccatctcagccgacaagtccatcagcaccgcctacctgcagtggagcagcctgaaggcctcggacaccgccatgtattactgtgcgagacgggccggaggggctgaatacttccagcactggggccagggcaccctggtcaccgtctcctca

SEQ ID NO: 4959 - DNA, 291 bp, Homo sapiens
  source 1..291: mol_type = other DNA
aagggttctggatacagctttagcagctactggatcggctgggtgcgccagatgcccgggaaaggcctggagtggatggggatcatctatcctggtgactctgataccagatacagcccgtccttccaaggccaggtcaccatctcagccgacaagtccatcaacaccgcctacctgcagtggagcagcctgaaggcctcggacaccgccgtgtattactgtgcgagacgggcgggaggcgctgaatacttccagcactggggccagggcaccccggtcaccgtctcctca

SEQ ID NO: 4960 - DNA, 291 bp, Homo sapiens
  source 1..291: mol_type = other DNA
aagggttctggatacagctttaccagctactggatcggctgggtgcgccagatgcccgggaaaggcctggagtggatggggatcatctatcctggtgactctgataccagatacagcccgtccttccaaggccaggtcaccatctcagccgacaagtccatcaacaccgcctacctgcagtggagcagcctgaaggcctcggacaccgccgtatattactgtgcgagacgggcgggaggcgctgaatacttccagcactggggccagggcaccccggtcaccgtctcctca

SEQ ID NO: 4961 - DNA, 271 bp, Homo sapiens
  source 1..271: mol_type = other DNA
tacggcctctggactcacctttagcgactttgccctgagctgggtccgccaggctccagggaaggggctggagtgggtctcagctattggtggcagtggtgttaacacatactacgcagactccgtgaagggccggttcaccatctccagagacaattctaaaaacactctgtatctgcaaattcacagcctgagagtcgacgacacggccgtatattattgtgcgggtattcgcttctggggccagggaaccctggtcgccgtctcctcg

SEQ ID NO: 4962 - DNA, 271 bp, Homo sapiens
  source 1..271: mol_type = other DNA
ttcagcctctggattcacctttagcacccatgccatgaactgggtccgccaggctccagggaaggggctggagtgggtctcagccattagtggtagtggtggtcacacatactacacagactccgtgaagggccggttcaccatctccagagacgattccaagaacactatgtttctgcaaatgagcagcctgcgaatcgaggacacggccctatatttctgtgcggggattcggttctggggccagggaaccctggtcaccgtctcctca

SEQ ID NO: 4963 - DNA, 282 bp, Homo sapiens
  source 1..282: mol_type = other DNA
acttctggattcagctttactagctcttctgtgcagtgggtgcgacaggctcgtggacaacgccttgagtggataggatggatcgtcgtaggcagtggtaacacaaactacgcacagaagttcctggaaagagtcacttttaccagggacatgtccagaagcacaacctacatggagctgagcagcctgagatccgacgacacggccgtgtattactgtgcggcagatccggggttactaacctactactggggccagggaaccctggtcaccgtctcctca

SEQ ID NO: 4964 - DNA, 282 bp, Homo sapiens
  source 1..282: mol_type = other DNA
gcctctggattcaccttttctacgtctgctgtgcagtgggtgcgacaggctcgtggacaacgccttgagtggataggatggatcgtcgttgatagtggtaagacaaactacgctcagaagttccagaaaagagtcaccattaccagggacatgtccacaagcacagcctacatggaattgagcagcctcagatccgaggacacggccgtctattactgtgcggcagacccgggactactaacctactactggggccagggcaccctggtcaccgtctcctca

SEQ ID NO: 4965 - DNA, 282 bp, Homo sapiens
  source 1..282: mol_type = other DNA
gcttctggattcgccttttctacctctgctgtgcaatgggtgcgacaggctcgtggacaacgccttgagtggataggatggatcgtcgttggcagtggtaagacaaactacgcacagaagttccaggaaagagtcaccattaccagggacatgtccacaagcacagcctacatggagctgagcagcctgagatccgaggacacggccgtgtattactgtgcggcagatccggggctactgacctactactggggccggggaaccctggtcaccgtctcctca

SEQ ID NO: 4966 - DNA, 282 bp, Homo sapiens
  source 1..282: mol_type = other DNA
gcctctggattcaccttttctacctctgctgtgcagtgggtgcgacaggctcgtggacaacgccttgagtggatagggtggatcgtcgttggtgtcggaaagacaagctacgcagagaagttccaggaaagagtcaccattaccagggacatgtccaaaagaacagtctacttggaattgagtggcctcagatccgaggacacggccgtctattactgtgcggcagacccggggctgctaacttactactggggccagggcaccctggtcaccgtctcctca

SEQ ID NO: 4967 - DNA, 282 bp, Homo sapiens
  source 1..282: mol_type = other DNA
gcttctggattcagctttactagctctgctgtgcagtgggtgcgacaggctcgtggacaacgccttgagtggataggatggatcgtcgtaggcagtggtaacacaaactacgcacagaagttccaggaaagagtcactattaccagggacatgtctataaacacagcctacatggagctgagcagcctgagatccgaggacacggccgtgtattactgtgcggcagatccggggttattaacctactactggggccagggaaccctggtcaccgtctcctca

SEQ ID NO: 4968 - DNA, 282 bp, Homo sapiens
  source 1..282: mol_type = other DNA
gcttctggattcaccttttctaccgctgctgtgcagtgggtgcgacaggctcgtggacaacgccttgagtggataggatggatcgtcgttggcagtggtaagacagactacgcacagaatttccaggaaagagccaccattaccagggacaagtccacaagcacagcctacatggagctgagcagcctgagatccgaagacacggccgtctattactgtgcggcagatccgggtctactaacctattactggggccggggaaccctggtcaccgtctcctca

SEQ ID NO: 4969 - DNA, 295 bp, Homo sapiens
  source 1..295: mol_type = other DNA
cgctgtctatggtgggtccttcagtggttactactggagctggatccgccagcccccagggaaggggctggagtggattggggaaatcaatcatagtggaagcaccaactacaacccgtccctcaagagtcgagtcaccatatcagtagacacgtccaagagccagttctccctgaagctgagttctgtgaccgccgcggacacggctgtgtattactgtgcgagaggcttccagctgctatttgggggctggttcgacccctggggccagggaaacctggtcaccgtctcctca

SEQ ID NO: 4970 - DNA, 295 bp, Homo sapiens
  source 1..295: mol_type = other DNA
cgctgtctatggtgggtccttcagtggttactactggacctggatccgccagcccccagggaaggggctggagtggattggggaaatcaatcatagtggaagaaccaactacaacccgtccctcaagagtcgagtcaccatatcagtagacacgtccaagatccaattctccctgaagctgaggtctgtgaccgccgcggacacggctgtgtactactgtgcgagaggcttccagctgctattcggtggatggttcgacccctggggccagggaaccctggtcaccgtctcctca

SEQ ID NO: 4971 - DNA, 301 bp, Homo sapiens
  source 1..301: mol_type = other DNA
tgcagcctctggattcatctttagtagctattggatgagctgggtccgccaggctccagggaaggggctggaatgggtggccaacataaagcacgatggaagtgagaaattctatgtggactctgtgaagggccgactcaccatctccagagacaacgccaacaactcactgtatctgcaaatgaacagcctgagagccgaggacacggccgtgtattactgtgcgagactacccgggtacagtagcagctggcaatactttgactactggggccagggaaccttggtcaccgtctcctca

SEQ ID NO: 4972 - DNA, 301 bp, Homo sapiens
  source 1..301: mol_type = other DNA
tgcagcctctggattcacctttagtagcttttggatgagctgggtccgccaggctccagggaaggggctggagtgggtggccaacataaagcatgatggaattgagagaaactatgtggactctgtgaagggccgattcaccatctccagagacaacgccaagaactcactgtatctgcaaatgaacagcctgagagccgaggacacggccgtgtattactgtgcgagactccccgggtatagcagcagctggcaatactttgactactggggccagggaaccctggtcaccgtctcctca

SEQ ID NO: 4973 - DNA, 289 bp, Homo sapiens
  source 1..289: mol_type = other DNA
tgcagcctctggattcacctttagcagctatgccatgagctgggtccgacaggctccagggaagggtctggagtgggtctcagctattagtggtagtggtgttagcacatactacgcagactccgtgaagggccggttcaccatctccagagacaattccaagaacacgctgtttctgcaaatgaacagcctgagagccgaggacacggccctatattactgtgcgaaattaggcatggttcggggtaatgactactggggccagggaaccctggtcaccgtctcctca

SEQ ID NO: 4974 - DNA, 289 bp, Homo sapiens
  source 1..289: mol_type = other DNA
tgcagcctctggattcacctttagcagctatgccatgagctgggtccgccaggctccagggaaggggctggagtgggtctcagctattagtggtaatggtgttagcacatactacgcagactccgtgaagggccggttcaccatctccagagacaattccaagaacacgctgtttctgcaaatgaacagcctgagagccgacgacacggccctatattactgtgcgaaattaggcatggttcggggtaatgactactggggccagggaaccctggtcaccgtctcctca

SEQ ID NO: 4975 - DNA, 289 bp, Homo sapiens; identical to SEQ ID NO: 4973
  source 1..289: mol_type = other DNA

SEQ ID NO: 4976 - DNA, 289 bp, Homo sapiens
  source 1..289: mol_type = other DNA
tgcaggttctggattcacctttagcagctatgccatgagctgggtccgccaggctccaggcaaggggctggagtgggtctcgtcaattagtggtaatggtgttagcacatattacgcaaactccgtgaagggccggttcaccatctccagagacaattccaagaacacactgtttctgcaaatgagcagcctgagagccgaagacacggccgtatattactgtgcgaaattaggaatggttcggggaaacgactactggggccagggaaccctggtcaccgtctcgtca

SEQ ID NO: 4977 - DNA, 289 bp, Homo sapiens
  source 1..289: mol_type = other DNA
tgcagcctctggattcacctttagcagctatgccatgagctgggtccgacaggctccagggaaggggctggagtgggtctcagctattagtggtagtggtgttagcacatactacgcagactccgtgaagggccggttcaccatctccagagacaattccaagaacacgctgtttctgcaaatgaacagcctgagagccgaggacacggccctatattactgtgcgaaattaggcatggttcggggtaatgactactggggccagggaaccctggtcaccgtctcctca

SEQ ID NO: 4978 - DNA, 289 bp, Homo sapiens
  source 1..289: mol_type = other DNA
tgcagcctctggattcacctttagcagctatgccatgagctgggtccgccaggctccagggaaggggctggagtgggtctcagctattagtggtagtggtgttagcacatactacgcagactccgtgaagggccggttcaccatctccagagacaattccaagaacacgctgtttctgcaaatgaacagcctgagagccgaggacacggccctatattactgtgcgaaattaggcatggttcggggtaatgactactggggccagggaaccctggtcaccgtctcctca

SEQ ID NO: 4979 - DNA, 286 bp, Homo sapiens
  source 1..286: mol_type = other DNA
tgtagcctctggattcacctttagtatctattggatgacctgggtccgccaggctccagggaaggggctggagtgggtggccaacataaacccagatggaagtaagatatactatgtggactctgtgaagggccgattcaccatctccagagacaacgccaagaactcactgtatctgcaaatgaacagcctgagagccgaggacacggccctatattattgtgtgaaacaaattggtggttcggggtcctactggggccagggaaccctggtcaccgtctcctca

SEQ ID NO: 4980 - DNA, 286 bp, Homo sapiens
  source 1..286: mol_type = other DNA
tgtagcctctggattcacctttagtaactattggatgacctgggtccgccaggctcgagggaaggggctggagtgggtggccaacataaaagaagatggaagtcagaaatactatgtggactctgtgaagggccgattcaccatctccagagacaacgccaagagctcactgtatctccaaatgaacagcctgagagccgaggacacggctgtttactactgtgtgaaacaaattggaggttcggggagctactggggccagggaaccctggtcgccgtctcctca

SEQ ID NO: 4981 - DNA, 298 bp, Homo sapiens
  source 1..298: mol_type = other DNA
tgcagcctctggattcacctttagcagctatgccatgagctgggtccgccaggctccagggaaggggctggagtgggtctcaactatcagtgctattagtggtgatggtgggaccacaaactacgcagactccgtgaagggccggttcaccatctccagagacaattccaagcccacgctgtatctgcaaatgaacagcctgagagccgaggacacggccgtatattactgtgcgaaagggggggtcacaactgggttcgacccctggggccagggaaccctggtcaccgtctcctca

SEQ ID NO: 4982 - DNA, 289 bp, Homo sapiens
  source 1..289: mol_type = other DNA
tgcagcctttgaattcacctttagcagctatgccatgagttgggtccgccaggctccagggaaggggctggagtgggtctcagttatttatagcggtggtggaaggacatcctatgcagactccgtgaagggccggttcaccgtctccagagataattccaagaacacgctgtatctgcaaatgaacaacctgagagccgaggacacggccgtatattactgtgcgaaagggggagtaacgactgggttcgacccctggggccagggaaccctggtcatcgtctcctca

SEQ ID NO: 4983 - DNA, 289 bp, Homo sapiens
  source 1..289: mol_type = other DNA
tgcagcctctggattcactttcaggaacgcctggatgacctgggtccgccaggctccagggaaggggctggagtgggttggccgtgttaaaagcaaaactgatggtgggacaacagactacgctgcacccgtgaaaggcagattcaccatctcaagagatgattcaaaaaccacgctgtatctgcaaatgaacagcctgaaaaccgaggacacagccgtgtattactgtaccacaggagctcctgcttttgatatctggggccaagggacaatggtcaccgtctcttca

SEQ ID NO: 4984 - DNA, 289 bp, Homo sapiens
  source 1..289: mol_type = other DNA
tgcagcctctggattcacttttagtaacgcctggatgagttgggtccgccaggctccagggaaggggctggagtgggttggccgtattataagcaaaattgatggtgggacaacagactacactgcacccgtgaaaggcagattcaccatctcaagagatgattcaaaaaacacgttgtatctgcaaatgaacagcctgcaaaccgaggacacagccgtgtattactgtaccacaggcgcacccgcttttgatatctggggccaagggacaatggtcaccgtctcttca

SEQ ID NO: 4985 - DNA, 289 bp, Homo sapiens
  source 1..289: mol_type = other DNA
tgcagcctctggattcactttcagtaacgcctggatgacctgggtccgccaggctccagggaaggggctggagtggattggccgtattaaaagcaaaattgatggtgggacaacagactacgctgcacccgtgaaaggcagattcaccatctcaagacatgattcaaaaaacacgctgtatctgcaaatgaacagcctgaaaaccgaggacacagccgtgtattattgtaccacaggagctcctgcttttgatatctggggccaagggacaatggtcaccgtctcttca

SEQ ID NO: 4986 - DNA, 289 bp, Homo sapiens; identical to SEQ ID NO: 4985
  source 1..289: mol_type = other DNA

SEQ ID NO: 4987 - DNA, 289 bp, Homo sapiens
  source 1..289: mol_type = other DNA
tgcagcctctggattcactttcaggaacgcctggatgagctgggtccgccaggctccagggaaggggctggagtgggttggccgtattaaaagcaaaattgatggtgggacaacagactacgctgcacccgtgaaaggcagattcaccatctcaagagatgattcaaaaaacacgctatatctgcaaatgaacagcctgaaaaccgaggacacagccgtgtattactgtaccacaggggcccccgcttttgatatctggggccaagggacaatggtcaccgtctcttca

SEQ ID NO: 4988 - DNA, 289 bp, Homo sapiens
  source 1..289: mol_type = other DNA
tgcagcctctggattcactttcagtaacgcctggatgacctgggtccgccaggctccagggaaggggctggagtggattggccgtattaaaagcaaaattgatggtgggacaacagactacgctgcacccgtgaaaggcagattcaccatctcaagacatgattcaaaaaatacgctgtatctgcaaatgaacagcctgaaaaccgaggacacagccgtgtattattgtaccacaggagctcctgcttttgatatctggggccaagggacaatggtcaccgtctcttca

SEQ ID NO: 4989 - DNA, 277 bp, Homo sapiens
  source 1..277: mol_type = other DNA
tgcagtctctggattcacctttggtgattattggatgagttgggtccgccaggctccagggaagggactggagtgcgtggccaacatcaagggagatggaagtgagaagttctatgcggactctgtgaagggccgattcaccgtctccagggacaacgccaagggctcattgtatctggaaatgatctccctgagagccgaggacacggccgtttattattgtgggagagattttggtggctactggggccagggaaccctggtcaccgtctcctca

SEQ ID NO: 4990 - DNA, 277 bp, Homo sapiens
  source 1..277: mol_type = other DNA
tacagcctctggattcacctttagtagctattggatgagctggatccgccaggcttcagggaaggggctggagtgggtggccaacataaaggaagatggaagtattaaatactatgtggactctgtgaagggccgattcaccatctccagagacaacgccaacaacttcctatatctacaaatggacagtctgagagccgaagacacggctatatattattgtgggagagatttcggtggctactggggccagggaaccctggtcaccgtctcctca

SEQ ID NO: 4991 - DNA, 286 bp, Homo sapiens
  source 1..286: mol_type = other DNA
cactatctctggtggctccgtcagtacttactactgcagctggatccggcagcccccagggaagggactggagtggattgggtatatctcctacagtgggagcaccaagtacaacccctccctcaggagtcgagtcaccatatcgctagacacgtccaggaatcagttctccctaaaactgagttctgtgaccgctgcggacacggccatatattactgtgcgagatcacgtagtcccggtgactttgactactggagccagggaaccctggtcaccgtctcctca

SEQ ID NO: 4992 - DNA, 286 bp, Homo sapiens
  source 1..286: mol_type = other DNA
cactgtctctggtggctccatcagtagttactactggaactggatccggcagcccccagggaagggactggagtggattgggtatatctattacagtgggagcaccgactacaacccctccctcaagagtcgagtcaccatatccgtagacacgtccaagaaccagttctccctgaagttgagctctgtgaccgctgcggacacggccgtgtattactgtgcgagatcccgtagccctggggactttgactactggggccagggaaccctggtcaccgtctcctca

SEQ ID NO: 4993 - DNA, 283 bp, Homo sapiens
  source 1..283: mol_type = other DNA
tgcaggctctggattcacctttagcaggtacaccatgagctgggtccgccaggctccagggaaggggctggagtgggtctcaagtattagtgatagtggtgataacacaaactacgcagactccgtgaggggccggttcaccatctccagagacaattccaagagcacgctgtatctggaaatgaacagcctgagagccgaagacacggccgtttattactgtgcgaaaccccaatgggaactactactctggggccagggaaccctggtcaccgtctcctca

SEQ ID NO: 4994 - DNA, 283 bp, Homo sapiens
  source 1..283: mol_type = other DNA
tgcagcctctggattcacctttgacagctatgccatgagctgggtccgccaggctccagggaaggggctggagtgggtctcagctattagtggtagtggtgataacacatactacgcagactccgtgaagggccggttcaccatcttcagagacaattccaagaacacgctgtatctgcaaatgaacagcctgagagccgaggacacggccgtatattactgtgcgaaaccccagtgggaactcctgctctggggccagggagccctggtcaccgtctcctcg

SEQ ID NO: 4995 - DNA, 283 bp, Homo sapiens; identical to SEQ ID NO: 4994
  source 1..283: mol_type = other DNA

SEQ ID NO: 4996 - DNA, 292 bp, Homo sapiens
  source 1..292: mol_type = other DNA
tgcttctggatacaccttcactagttatgctatgcattgggtgcgccaggcccccggacaaaggcttgagtggatgggatggatcaacgttggcaatggtaatccaaaatattcacagaagttccagggcagagtcaccattaccagggacacatccgcgaacacagccgacatggagctgagcggcctcagatctgaagacacagctatatattactgtgcgagaggacgtggattccgaccttactacttcgactactggggccagggaaccctggtcaccgtctcctca

SEQ ID NO: 4997 - DNA, 291 bp, Homo sapiens
  source 1..291: mol_type = other DNA
gcttctggatacaccttcactagctatgctatgcattgggtgcgccaggcccccggacaaaggcttgagtggatgggatggatcaacgctggcaatggtaacacaaaatattcacagaagttccagggcagagtcaccattaccagggacacatccgcgagcacagcctacatggagctgagcagcctgggatctgaagacacggctgtatattactgtgcgaggggccgtggattccgaccgtactactttgactactggggccagggaaccctggtcaccgtctcctca

SEQ ID NO: 4998 - DNA, 294 bp, Homo sapiens
  source 1..294: mol_type = other DNA
gcttctggatacaccttcactagccatgctatgaattgggtgcgacaggcccctggacaagggcttgagtggatgggatggatcaacaccaacactggcaacccaacgtatgcccagggcttcacaggacggtttgtcttctccttggacacctctgtcagcacggcatatctgcagatcagcagcctaaaggctgaagacactgccatatattactgtgcgagagatcctcgtggatatagtggctacgaccttgactcctggggccagggaaccctggtcaccgtctcctca

SEQ ID NO: 4999 - DNA, 294 bp, Homo sapiens
  source 1..294: mol_type = other DNA
gcctctggatacaccttcagttcctatgctatgaattgggtgcgacaggcccctggacaagggcttgagtggatgggatggatcaacaccaacactgggaacccaacgtatgcccagggcttcacaggacggtttgtcttctccttggaaaactctgtcagtacggcatatctgcagatcagcggccttaaggctgaggacactgccgtgtattactgtgcgagagacccacgtggatacagtggctacgaccttgactcctggggccagggaaccctggtcatcgtctcctca

SEQ ID NO: 5000 - DNA, 298 bp, Homo sapiens
  source 1..298: mol_type = other DNA
tgcagcctctggattcaccttcagtgcctataccataaactgggtccgccaggctccagggaaggggctggagtgggtctcatccattagtagtagtagtacttacatatactacgcagactcagtgaagggccgattcaccctctccagagacaacgccaagaactcactgtatctgcaaatgagcagcctgagagccgaggacacggctgtgtattactgtgcgagagatcgtgacggtgactcgaactggtacttcgatctctggggccgtggcaccctggtcactgtctcctca

SEQ ID NO: 5001 - DNA, 298 bp, Homo sapiens
  source 1..298: mol_type = other DNA
tgcagcctttggattcaccttcagtagttataccatgaactgggtccgccaggctccagggaaggggctggagtgggtctcatccattagtagtagtagtacttacatatactacgcagactcactgaagggccgatgcaccatctccagagacaacgccaagaactcactgtatctgcaaatgaacagcctgagagccgaggacacggctgtttattactgtgcgagagatagggacggtgactcaaactggtacttcgatctctggggccgtggcaccctggtcactgtctcctca

SEQ ID NO: 5002 - DNA, 298 bp, Homo sapiens
  source 1..298: mol_type = other DNA
tgcggcctctggattcacgttcagtgcctacaccatgaactgggtccgccaggctccagggaaggggctggagtgggtctcgtccattagtagtagtactgtttacatatactatgcagactcactgaagggccgattcaccatctccagagacaacgccaagaagtcactgtatctgcaaatgaacagcctgagagccgacgacacggctgtttattactgtgcgagagatagggacggtgactctaactggtacttcgatctctggggccgtggcaccctggtcactgtctcctca

SEQ ID NO: 5003 - DNA, 298 bp, Homo sapiens
  source 1..298: mol_type = other DNA
tgcagcctctggattcaccttcagtagttataccatgaactgggtccgccaggctccagggaaggggctggagtgggtctcatccattagtagtagtagtacttacatatatcacgcagactcagtgaagggccgattcaccatctccagagacaacgccaagaactcactgtatctgcaaatgaacagcctgagagccgaggacatggctgtgtattactgtgcgagagatagggacggtgactcaaactggtacttcgatctctggggccgtggcaccctggtcactgtctcctca

SEQ ID NO: 5004 - DNA, 298 bp, Homo sapiens
  source 1..298: mol_type = other DNA
tgcagcctctggattcagcttcagtagttatactatgaactgggtccgccaggctccagggaaggggctggagtgggtctcatctattagtagtagtagtacttacatgtactacgcagactcagtgaagggccgattcaccatctccagagacaacgccaagaactcactgtatctgcaaatgaacagcctgagagccgaggacacggctgcgtatttctgtgcgagagatagggacggtgactcaaactggtacttcgatctctggggccgtggcaccctggtcactgtctcctca

SEQ ID NO: 5005 - DNA, 298 bp, Homo sapiens; identical to SEQ ID NO: 5001
  source 1..298: mol_type = other DNA

SEQ ID NO: 5006 - DNA, 298 bp, Homo sapiens
  source 1..298: mol_type = other DNA
tgtagcctctggattcaccttcagtagttataccatgaactgggtccgccaggctccagggaaggggctggagtgggtctcatccattagtagtagtagtacttacatatatcacgcagactcagtgaagggccgattcaccatctccagagacaacgccaagaagtcactgtatctgcaaatgaatagcctgagagccgaggacatggctgtgtattactgtgcgagagatagggacggtgactcaaactggtacttcgatctctggggccgtggcaccctggtcactgtctcctca

SEQ ID NO: 5007 - DNA, 298 bp, Homo sapiens; identical to SEQ ID NO: 5004
  source 1..298: mol_type = other DNA

SEQ ID NO: 5008 - DNA, 298 bp, Homo sapiens
  source 1..298: mol_type = other DNA
tgcagcctctggattcaccttcagtagttataccatgaactgggtccgccaggctccagggaaggaactggagtgggtctcatgcattactagtaatcgcatttacatatactacgcagactcagtgaagggccgattcaccatctccagagacaacgccaagaactcactgtatctgcaaatgaacagcctgagagccgacgacacggctgtttattactgtgcgagagatagggacggtgactctaactggtacttcgatctctggggccgtggcaccctggtcactgtctcctca

SEQ ID NO: 5009 - DNA, 298 bp, Homo sapiens
  source 1..298: mol_type = other DNA
tgcagcctttggattcaccttcagtagttataccatgaactgggtccgccaggctccagggaaggggctggagtgggtctcatccattagtagtagtagtacttacatatactacgcagactcactgatgggccgatgcaccatctccagagacaacgccaagaactcactgtatctgcaaatgaacagcctgagagccgaggacacggctgtttattactgtgcgagagatagggacggtgactcaaactggtacttcgatctctggggccgtggcaccctggtcactgtctcctca

SEQ ID NO: 5010 - DNA, 298 bp, Homo sapiens; identical to SEQ ID NO: 5003
  source 1..298: mol_type = other DNA

SEQ ID NO: 5011 - DNA, 298 bp, Homo sapiens
  source 1..298: mol_type = other DNA
tgcaggctttggattcaccttcagtagttataccatgaactgggtccgccaggctccagggaaggggctggagtgggtctcatccattagtagtagtagtacttacatatactacgcagactcactgaagggccgatgcaccatctccagagacaacgccaagaactcactgtatctgcaaatgaacagcctgagagccgaggacacggctgtttattactgtgcgagagatagggacggtgactcaaactggtacttcgatctctggggccgtggcaccctggtcactgtctcctca

SEQ ID NO: 5012 - DNA, 298 bp, Homo sapiens
  source 1..298: mol_type = other DNA
tgcagcctctggattcacgtttagtagctataccatgaactgggtccgccaggctccagggaaggggctggagtgggtctcatcaattagtagtagtagtacttacatatattacgcagactcagtgaagggccgattcaccatctccagagacaacgccaagaactcactgtatctgcaaatgaacagcctgagagccgaggacacggctgtgtattactgtgcgagagatagggacggtgactcaaactggtacttcgatctctggggccgtggcaccctggtcactgtctcctca

SEQ ID NO: 5013 - DNA, 298 bp, Homo sapiens
  source 1..298: mol_type = other DNA
tgcagcctctgggttcaccctcagtccttatgaagtcaattgggtccgccaggcgccagggaaggggctggagtggatttcatacatgagtagcagtggaagtaatatatactacgcagactctgtgaagggccgattcaccatctccagagacaacgccaagaactcagtgtatctgcaactgagtcgcctgagagccgaggacacggctctctattactgtgcgagagttgactggaaccacttctacaagcacatggacgtctggggcaaagggaccacggtcacggtctcctca

SEQ ID NO: 5014 - DNA, 298 bp, Homo sapiens
  source 1..298: mol_type = other DNA
tgaagcgtctggattcaccctcagtccttatgaagtgaattgggtccgccaggctccagggaaggggctggagtgggtctcatacatcagtagcagtggaagtaacatctattacgcagactctgtgaagggccgattcaccatctccagagacaacgccaagaattcagtgtatctccaaatgaggagcctgagagccgaggacacggctctttattactgtgcgagagttgattggaaccacttctacaaacacatggacgtctggggcaaagggaccacggtcacggtctcctca

SEQ ID NO: 5015 - DNA, 298 bp, Homo sapiens
  source 1..298: mol_type = other DNA
tgcagcctcaggattcaccctcagtccttatgaagtgaactgggtccgccgggctccagggaaggggctggagtgggtctcatacattagtagtagtggaagtaacatatactacgcagactctgtgaagggccgattcaccatctccagagacaacgccaagaattctctctatttgcaaatgaacagcctgagagccgaggacacggctatttattactgtgcgagagttgactggaatcacttctacaagcacatggacgtctggggcaaagggaccacggtcatcgtctcctca

SEQ ID NO: 5016 - DNA, 336 bp, Homo sapiens
  source 1..336: mol_type = other DNA
acacagaccctcacgctgacctgcaccttctctgggttctcactcagcaatagtggagtgagtgtgggctggacccgtcagcccccaggaaaggccctggagtggcttgcactcatttattgggatgatgataaacgctacagcccatctctgaagaacaggctcaccatcacgaaggacacctccaaaaaccaggtgatccttacaatgaccaacatgggccctggggacacagccacatattactgtgcacacagactaagcggtatagcgggagctacaacgggtctctactttgactactggggccagggaacattggtcaccgtctcctca

SEQ ID NO: 5017 - DNA, 336 bp, Homo sapiens
  source 1..336: mol_type = other DNA
acacagaccctcacgctgacctgcaccttctctgggttctcactcaccactagtggagtggctgtgggctggatccgtcagcccccaggaaaggccctggagtggcttgcactcatttattgggatgatgatcagcggtacagccactctctgaagagtaggctcaccatcaccaaggacacctccaaaaaccaggtggtccttacaatgaccaacatggaccctgtggacacagccacatattactgtgcacacagactatcgggtatagcgggggctacaacagggctgtactttgactactggggccagggaaccctggtcaccgtctcctca

SEQ ID NO: 5018 - DNA, 277 bp, Homo sapiens
  source 1..277: mol_type = other DNA
cactgtctctggtggctccatcagcagcagtaattactactggggctggatccgccagcccccagggaagggtctggagtggattgggagtatctattatagtgggagaacctactacaacccgtccctcacgcgtcgagtcaccatatccgtagacacgcccaagaaccagttctccctggagctgaaatctgtgaccgccgcagacacggcagtgtattactgtgcgagaggggcaacctcctggggccagggaaccctggtcaccgtctcctca

SEQ ID NO: 5019 - DNA, 277 bp, Homo sapiens
  source 1..277: mol_type = other DNA
cgctgtctctggtggctccatcagcggtagtaattactactggggctggatccgccagcccccagggaaggggctggagtggattgggagtatttattatagtgggagaacctactacaacccgtccctcaagcgtcgagtcaccatatccgttgactcgcccaagaagcaattctccctgaagctgagctctgtgaccgccgcagacacggctatatattactgtgcgagaggggctacttcctggggccagggaaccctggtcaccgtctcctca

SEQ ID NO: 5020 - DNA, 277 bp, Homo sapiens
  source 1..277: mol_type = other DNA
cactgtctctggtggctccatcagtagtagtacttattactggggctggatccgccagtccccagggaaggggctggagtgggttgggagtatctattatagtgggaggacctactacaacccgtccctcaagagtcgagtcaccatgtccgtggacacgtccaagaaccagttctccctgaagctgagatctgtgaccgccacagacacggctgtgtattactgtgcgaggggggcaacctcctggggccagggaaccctggtcaccgtctcctca

SEQ ID NO: 5021 - DNA, 277 bp, Homo sapiens; identical to SEQ ID NO: 5019
  source 1..277: mol_type = other DNA

SEQ ID NO: 5022 - DNA, 312 bp, Homo sapiens
  source 1..312: mol_type = other DNA
acacagaccctcacgctgacctgcaccttctctgggttctcactcagcactagtggagtgagtgtgggctggatccgtcagcccccaggaaaggccctggagtggcttgcactcctttattgggatgatgataagcgctacagcccatctctgaagagcaggctcaccatcaccaaggacacctccaaaaaccaggtggtccttacaatgaccaacatggaccctgtagacacagccacatattactgtgcacacagacggggcagcagctggtacgtctggggccagggaaccctggtcaccgtctcctca

SEQ ID NO: 5023 - DNA, 312 bp, Homo sapiens
  source 1..312: mol_type = other DNA
acacagaccctcacgctgacctgcaccttctctgggttctcactcagcactagtggagtgagtgtgggctggatccgtcagcccccaggaaaggccctggagtggcttgcactcatttactgggatgatgataggcgctacagcccaactctgaagagcaggctcaccatcaccaaggacacctccaaaaaccaggtggtccttacaatgaccaacatggaccctgtggacacaggcacatattactgtgcacacagacggggcagcagctggtacgtgtggggccagggaaccctggtcaccgtctcctca

SEQ ID NO: 5024 - DNA, 312 bp, Homo sapiens
  source 1..312: mol_type = other DNA
acacagaccctcacgctgacctgcaccttctctgggttctcactcagcactagtggagtgagtgtgggctggatccgtcagcccccaggaaaggccctggagtggcttgcactcctttattgggatgatgataagcgctacagcccatctctgaagagcaggctcaccatcaccagggacacctccaaaaaccaggtggtccttacaatgaccaacatggaccctgtagacacagccacatattactgtgcacacagacggggcagcagctggtacgtctggggccagggaaccctggtcaccgtctcctca

SEQ ID NO: 5025 - DNA, 298 bp, Homo sapiens
  source 1..298: mol_type = other DNA
tgcagcctctggcttcacattgaatacttatgaattcaattgggtccgccaggctccagggatgggcctggagtggatttcatacattggtcattctggtattggcatatactacgcaggctctgtgaagggccgcttcaccgtctccagagacaacgccaagaactcggtgtatctgcaaatgaacagcctgcgggccgacgacacggctgtctattattgcgcgagagagaccgaaggttgtggtggtgactgctatgactactggggccagggaaccctggtcaccgtctcctca

SEQ ID NO: 5026 - DNA, 298 bp, Homo sapiens
  source 1..298: mol_type = other DNA
tgcagcctctggattcaccttcagcagttatgaattcaattgggtccggcaggctccagggaaggggctggagtgggtttcatacattggtcacggtggtagagccacatactactcagactctgtgaagggccggttcaccatctccagagacgacgccaagaactcagtgtatctgcaaatgaacagcctgagagtcgaggacacggctctgtattactgtgcgagagagacagaggggtgtggtggtgactgctatgactactggggccagggaactctggtcaccgtctcctca

SEQ ID NO: 5027 - DNA, 280 bp, Homo sapiens
  source 1..280: mol_type = other DNA
tgcagccgctggattcacctttagcaactatgccatgggctgggtccgccaggctccagggaaggggctggagtgggtctcaactattagtggtagtggtgataacacatattacgcagactccgtgaagggccggttcaccatctccagagacaattccaagaacacgctgtatctacaaatgaacagcctgagagccgaggacacggccgtatattactgtgcgagacaggtatggcttgactactggggccagggaactctggtcaccgtctcctca

SEQ ID NO: 5028 - DNA, 280 bp, Homo sapiens
  source 1..280: mol_type = other DNA
tgcagcctctggattcacctttagcagctatgccatgagctgggtccgcctggctccagggaaggggctggagtgggtctcaactattagtggtagtggtgatagcacatactacgcagactccgtgaagggccggttcaccatctccagagacaattccaagaacacgctgtatctgcaaatgaacagcctgagagccgaggacacggccgtacattactgtgcgagacaggtatggcttgactactggggccagggaaccctggtcaccgtctcctca

SEQ ID NO: 5029 - DNA, 285 bp, Homo sapiens
  source 1..285: mol_type = other DNA
gcttctggatacatcttcacctctcatttcattcattgggtgcgccaggcccccggtcaaaggcttgaatggatgggatggattaatcctgacaacggtaacacaaagtattcagagagattccagggcagagtcaccattatcagggacacatccgcgagcagtgccttcatggagctgaccagcctgacatttgaggacacggctgagtacttctgtgcgagagggggatatagaagtggccttgactactggggccagggaaccctggtcaccgtctcctca

SEQ ID NO: 5030 - DNA, 285 bp, Homo sapiens
  source 1..285: mol_type = other DNA
gcttctggatacagcttcggtatccactttatccattgggtgcgacaggcccccggacaaaggcttgagtggatcggatggatcagcgttgacaaagatattgcaaaatattcacagaacttccaggacagagtcaccattaccagggacacatccgcgaacacatcctacatggagctgagcagcctgagaactgaagacacggctgtatattattgtgcgagaggaggatatagaagtggccttgactactggggccagggaaccctggtcaccgtctcttca

SEQ ID NO: 5031 - DNA, 285 bp, Homo sapiens
  source 1..285: mol_type = other DNA
gcttctggatacagcttcggtatccactttatccattgggtgcgacaggcccccggacaaaggcttgagtggatcggatggatcagcgttgacaaaggtattgcaaaatattcacagaacttccaggacagagtcaccattaccagggacacatccgcgaacacatcctacatggagctgagcagcctgagaactgaagacacggctgtatattattgtgcgagaggaggatatagaagtggccttgactactggggccagggaaccctggtcaccgtctcttca

SEQ ID NO: 5032 - DNA, 283 bp, Homo sapiens
  source 1..283: mol_type = other DNA
tgcagcctctggattcacctttagcagctatgccatgagctgggtccgccaggctccagggaaggggctggagtgggtctcagctattagtggtagtggtggtagcacatactacgcagactccgtgaagggccggttcaccatctccagagacaattccaagaacacgctgtatctgcaaatgaacagcctgagagccgaggacacggctgtttattactgtgcgaggggttccgactacggtgactactggggccagggaaccctggtcaccgtctcctca

SEQ ID NO: 5033 - DNA, 283 bp, Homo sapiens
  source 1..283: mol_type = other DNA
tgcagcctctggattcacttttagcacctatgccatgaactgggtccgccaggctccaggaaaggggctggagtgggtctcaagtattagtactagtactgataacacacactacgcagactccgtgaagggccggttcaccatctccagagacaattccaagagcacgctatatctgcaaatgaacagcctgagagccgaggacacggccgtttattactgtgcgcgagggagtgactacggtgactactggggccagggaaccctggtcaccgtctcctca

SEQ ID NO: 5034 - DNA, 301 bp, Homo sapiens
  source 1..301: mol_type = other DNA
cgaagtctctggaataaacttcaatctcgcctggatgacctgggtccgccaggctccagggaaggggctggagtgggttagtcgtattaagagcaaaggtagtggtgagacaacagactacgctgcacccgttgaaggcagattcaccatctcaagagacgattcaaaaaccactctgtatctgcaaatgagcagcctgaaaatcgaagacacagccttctattattgtgccaacgtaaaagatatgagtagctggtccttagaatactggggccagggaatcctggtcaccgtctcccca

SEQ ID NO: 5035 - DNA, 301 bp, Homo sapiens
  source 1..301: mol_type = other DNA
cgaagtctctggaataaacttcaatcgcgcctggatgacctgggtccgccaggctccagggaaggggctggagtgggttagtcgtattaagagcaaaggtggtggtgggacaacagactacgctgcacccgttgaaggcagattcaccatctcaagagacgattcaaaaaacactctgtatctgcaaatgagcagcctgaaaatcgaagacacagccttctattattgtgccaacgtaaaagatatgagtagctggtccttagaatactggggccagggaatcctggtcaccgtctcccca

SEQ ID NO: 5036 - DNA, 301 bp, Homo sapiens
  source 1..301: mol_type = other DNA
cgaagtctctggaataaacttcaatgtcgcctggatgacctgggtccgccaggctccagggaaggggctggagtgggttagtcgtattaagagcaaaggtagtagtgagacaacagactacgctgcacccgttgaaggcagattcaccatctcaagagacgattcaaaaaccactctgtatctgcaaatgagcagcctgaaaatcgaagacacagccttctattattgtgccaacgtaaaagatatgagtagctggtccttagaatactggggccagggaatcctggtcaccgtctcccca

SEQ ID NO: 5037 - DNA, 301 bp, Homo sapiens
  source 1..301: mol_type = other DNA
tgcagcctctggattcaatttcatttacgcctggatgacctgggtccgccagtctccagggaaggggctggagtgggttggccgtattaaaagcaaaggttctggtgagacaacagactacgctgcacccgtgaaaggcagattcaccatctcaagagatgattcaaaaaatatggtgtatctgcaaatgaacagcctgaaaaccgaggacacagccgtgtattactgtgccaacgtcaaggatatgagcagctggtctctcgagtactggggccggggaaccctggtcaccgtctcctca

SEQ ID NO: 5038 - DNA, 289 bp, Homo sapiens
  source 1..289: mol_type = other DNA
tgcagcctctggattcagctttagcagctatattatgaactgggtccgccaggctccagggaaggggctggagtgggtctcaactattagtggaagtggtggtgccactttctacgcagactccgtgaggggccgattcaccatctccagagacaattccaaggacacgctgtatctggaaatgaacagcctgagagccgaggacacggccatgttttactgtgcgaaatctatagggaggaactactttgactactggggccagggaaccctggtcaccgtctcctcg

SEQ ID NO: 5039 - DNA, 289 bp, Homo sapiens
  source 1..289: mol_type = other DNA
tgcagcctccggattcccccttagcaagtatcccatgagctgggtccgccaggctccagggaaggggctggagtgggtctcaagttttgacccctacaatggttatccaacttacgcagactccgtgcaggggcggttcaccatctccagggacacctccaggaacacgctgtatctgcagatgaacagcctgagagccgacgacacggccctatattattgtgcgaaaagtataggcagaaactactttgactactggggccagggagccctggtcaccgtctcctca

SEQ ID NO: 5040 - DNA, 276 bp, Homo sapiens
  source 1..276: mol_type = other DNA
gcttctggatacaccttcattagctatactatacattgggtgcgccaggcccccggacaaaggcttgcgtggatgggatgcatcaacgctggcaatggtaacacaaaatattcacagaagttccagggcagagtcaccattaccagggacacatccgcgagcacagtctacatggagctgagcagcctgagatctgaagacacggctgtgtattactgtgcgagggcggacatcctacgcccctggggccagggaaccctggtcaccgtctcctca

SEQ ID NO: 5041 - DNA, 276 bp, Homo sapiens
  source 1..276: mol_type = other DNA
gcttttggatacactttcactagttatcctatgcattgggtgcgccaggcccccggacaaaggtttgagtggatgggatggatcaacgttgccaatggtaacacaaaatattcacagaagttccagggcagagtcaccattaccagggacacatccgcgagcacagcctacatggagctgagcagcctgagatctgaagacacggctgtgtattactgtgcgagggcggatatcctaagaccctggggccagggaaccctggtcaccgtctcctca

SEQ ID NO: 5042 - DNA, 276 bp, Homo sapiens
  source 1..276: mol_type = other DNA
gcttctggatacaccttcactagttatcctatgcattggctgcgccaggcccccggacaaaggcctgagtggatgggatggatcaacgttggcaatggtaatacaaaatactcacagaggttccagggcagagtcaccattaccagggacacgtccgcgagcacagcctacatggagctgagcagcctgacatctgaagacacggctacatattactgtgcgagggcggatatcctaagaccctggggccagggaaccctggtcaccgtctcctca

SEQ ID NO: 5043 - DNA, 276 bp, Homo sapiens
  source 1..276: mol_type = other DNA
gcttctggatacaccttcactagctatcctatgcattggctgcgccaggcccccggacaaaggcttgagtggatgggatggatcaacgttggcaatggtaatacaaaatattcacagaagttccagggcagagtcaccattaccagggacacgtccgcgagcacagcctacatggagctgagcagcctgagatctgaagacacggctatatattactgtgcgagggcggatatcctaagaccctggggccagggaaccctggtcaccgtctcctca

SEQ ID NO: 5044 - DNA, 276 bp, Homo sapiens
  source 1..276: mol_type = other DNA
gcttctggatacaccttcactagttatcctatgcattggctgcgccaggcccccggacaaaggtttgagtggatgggatggatcaacgttggcaatgggaacacaaaatattcaccgaagttccagggcagagtcaccattaccagggacacatccgcgagcacagcctacatggagctgagcagcctgaaatctgaagacacggctctatattactgtgcgagggcggatatcctaagaccctggggccagggaaccctggtcaccgtctcctca

SEQ ID NO: 5045 - DNA, 276 bp, Homo sapiens; identical to SEQ ID NO: 5042
  source 1..276: mol_type = other DNA

SEQ ID NO: 5046 - DNA, 276 bp, Homo sapiens
  source 1..276: mol_type = other DNA
gcttctggatacaccttcactagttttcctattcattgggtgcgccaggcccccggacaaaggcttgagtggatggggtgcatcaacataggcaatggaaacacaaaatactcacagaagttccagggcagagtcaccatcaccagggacacaagcgcgaacacagcctacctggaactgagcagcctgagatttgaagacatggcggtatattattgtgcgagggcagatattttgaggccctggggccagggaacgcaggtcaccgtctcctca

SEQ ID NO: 5047 - DNA, 301 bp, Homo sapiens
  source 1..301: mol_type = other DNA
cactgtctctggtggctccatcagcagtagtacttactactggggctggatccgccagcccccagggaaggggctggagtggattgggagtatctattatagtgggagcacctactacaacccgtccctcaagagtcgagtcaccatatccgtagacacgtccaagaaccagttctccctgaagctgagctctgtgaccgccgcagacacggctgtgtataactgtgcgagggtgtattactatgatagtagtgggccctttgactactggggccagggaaccctggtcaccgtctcctca

SEQ ID NO: 5048 - DNA, 301 bp, Homo sapiens
  source 1..301: mol_type = other DNA
cactgtctctggtggctccatcagcagtagtacttactactggggctggatccgccagtccccagggaagggactggagtggactggaagtatctattatagtgggagcacctactacaacccgtccctcaagagtcgagtcaccatatccgtagacacgtccaagaaccagttctccctgaagctgagctctgtgaccgccgcagacacggctgtctattactgtgcgagggtgtattactatgatagtagtggcccgtttgactactggggccagggaaccctggtcaccgtctcctca

SEQ ID NO: 5049 - DNA, 301 bp, Homo sapiens
  source 1..301: mol_type = other DNA
cactgtctctggtggctccatcagcagtagtagttactactggggctggatccgccagcccccagggaaggggctggagtggattgggagtatctattatagtgggaccacctactacaacccgtccctcaagagtcgagtcaccatatccgtagacacgtcccagaaccagttctccctgaagctgagctctgtgaccgccgcagacacggctgtgtattactgtgcgagagtgtattactatgatagtagtggaccatttgactactggggccagggaaccctggtcaccgtctcctca

SEQ ID NO: 5050 - DNA, 301 bp, Homo sapiens
  source 1..301: mol_type = other DNA
cactgtctctggtggctccatcagcagtagtacttactactggggctggatccgccagcccccagggaaggggctggagtggattgggagtatctattatagtgggagcacctattacaacccgtccctcaagagtcgagtcaccatatccgtagacacgtccaagaaccagttctccctgaggctgagctctgtgaccgccgcagacacggctgtgtgttactgtgcgagggtgtattattatgatagtagtgggccctttgactactggggccagggaaccctggtcaccgtctcctca

SEQ ID NO: 5051 - DNA, 277 bp, Homo sapiens
  source 1..277: mol_type = other DNA
tgcagcctctggattcacctttagtagcgattggatgatctgggtccgccaggctccggagaaggggctggagtgggtggccagcattcagccgcatggagattacaaatactatgtggactctgtgaagggccgattcaccatctccagagacaacgcccagaattcactgtttctacaaatgaacagcctgagagtcgacgatacggctgtctattactgtacgactggagggctcgacttctggggccaggggaccctggtcaccgtctcctca

SEQ ID NO: 5052 - DNA, 277 bp, Homo sapiens
  source 1..277: mol_type = other DNA
tgaagcctctggattcacctttagtagcacttacatgaggtggatccgccaggctccagggaaggggctggagtgggtggccaccattaaagaaaatggaagtgggaaattctatgtggactctgtgaagggccgcttcaccatctccagagacaacgccgagaactccctatatctggaaatgaattccctgagagtcgaggacacggctatttattactgtacgacagggggccttgacttctggggccagggagccctggtcaccgtctcctca

SEQ ID NO: 5053 - DNA, 297 bp, Homo sapiens
  source 1..297: mol_type = other DNA
gcttctggatacaccttcactaactatgctatacattgggtgcgccaggcccccggacaaaggcttgagtggatgggatggatcaacgctggcaatggtaacacaaaatattcacagaagttccagggcagagtcaccattaccagggatacatccgcgagcacagcctacatggaactaagcagcctgagatctgaagacacggctgtgtattactgtgcgagagcctatatggttcggggagttatattctggttcgacccctggggccagggaaccctggtcaccgtctcctca

SEQ ID NO: 5054 - DNA, 297 bp, Homo sapiens
  source 1..297: mol_type = other DNA
gcttctggatacaccttcactaactatgctatacactgggtgcgccaggcccccggacaaaggcttgagtggatgggatggatcaacgctggcaatggtaacacaaaatattcacagagcttccagggcagagtcacctttaccagggacacatccgcggccacagcctacatgcagctgagcagcctgaaatctgaagacacggctgtgtattattgtgcgagagcctatatggttcggggagttattttctggttcgacccctggggccagggaaccctggtgaccgtctcctca

SEQ ID NO: 5055 - DNA, 286 bp, Homo sapiens
  source 1..286: mol_type = other DNA
tacagcttttggattcgcctttggtgattatacaatgacctggatccgccagactccagggaaggggctggagtgggtaggtttcatcagaaacaaagctgatggtgggacaccagaatacgccgcgtctgtgaaaggcagattcaccctctcaagagatgattccaaaagtattgtctttctgcaaatgaacagcctgcaaaccgaggacacagccatatattactgtactagagaccctgtcttgaccggctggggccagggaaccctggtcaccgtctcctca

SEQ ID NO: 5056 - DNA, 286 bp, Homo sapiens
  source 1..286: mol_type = other DNA
tacaacttttggattcgcctttcgtgattatacaatgacctggatccgccagactccaaggaaggggctggagtgggtaggtttcatcagaaacaaagctgatggtgggacaccagaatacgccgcgtctgtgaaaggcagattcaccctctcaagagatgattccaaaagtattgtctttctgcaaatgaacagcctgcaaaccgaggacacagccatatattactgcactagagaccctgtcttgaccggctggggccagggaaccctggtcaccgtctcctca

SEQ ID NO: 5057 - DNA, 286 bp, Homo sapiens
  source 1..286: mol_type = other DNA
tacagcttctggattcacctttggagattatactatgagttggatccgccagactccaggggaggggctggagtgggtaggtttcattagaaacaaagcttctggtgggacaccagaatacgccgcgtctgtgagaggcagattcaccatctcaagagatgattccaaaagcatcgcctacctgcaaatgaacaacctgaaaaccgaggacacagccgtgtattattgtactagagatccggtcttgaccggctggggccagggaaccctggtcaccgtctcctca

SEQ ID NO: 5058 - DNA, 286 bp, Homo sapiens
  source 1..286: mol_type = other DNA
tacaacttttggattcgcctttcgtgattatacaatgacctggatccgccagactccaaggaaggggctggagtgggtaggtttcatcagaaacaaagctgatggtgggacaccagaatacgccgcgtctgtgaaaggcagattcaccctctcaagagatgattccaaaagtattgtctttctgcaaatgaacagcctgcaaaccgaggacacagccatatattactgtactagagaccctgtcttgaccggctggggccagggaaccctggtcaccgtctcctca

SEQ ID NO: 5059 - DNA, 304 bp, Homo sapiens
  source 1..304: mol_type = other DNA
tgcagcctctgggttcacgttcagtggctctgctatgcactgggtccgccaggcttccggaaaagggctggagtggattggccttactagaagcaaatatcacaactacgcgacatcatatgctgcgtcggtgaaaggcaggttcaccatctccagagatgattcaaagaacacggcgtatctgcaaatgaacagcctgaagaccgacgacacggccgtctattactgtgctagacataattactatgatagtagtggttatttggactactggggccagggagccctggtcaccgtctcctca

SEQ ID NO: 5060 - DNA, 304 bp, Homo sapiens
  source 1..304: mol_type = other DNA
tgcagcctctgggttcacgttcagtggctctgctattcactgggtccgccaggcttccggaaaagggctggagtggattggccttactagaagcaaatatcacaactacgcgacatcatatgctgcgtcggtgaaaggcaggttcaccatctccagagatgattcaaagaacacggcgtatctgcaaatgaacagcctgaagaccgacgacacggccgtctattactgtgctagacataattactatgatagtagtggttatttggactactggggccagggagccctggtcaccgtctcctca

SEQ ID NO: 5061 - DNA, 304 bp, Homo sapiens; identical to SEQ ID NO: 5059
  source 1..304: mol_type = other DNA

SEQ ID NO: 5062 - DNA, 274 bp, Homo sapiens
  source 1..274: mol_type = other DNA
tgcagcctctggattcagcttcagtgactactacatgacctggatccgccaggctccagggaaggggctggagtgggtttcacacattagtagtagtggtagtaccatatactacgcagactctgtgaagggccgattcaccatctccagggacaacgccaagaactcactgtatctgcaaatggacagcctgagacccgaggacacggccgtgtattactgtgcgagaaaatttaactactggggccagggaaccctggtcaccgtctcctca

SEQ ID NO: 5063 - DNA, 274 bp, Homo sapiens
  source 1..274: mol_type = other DNA
tgcagcctctggattcaccttcagtgactactacatgaactggatccgccaggctccagggaaggggctagagtgggtttcatatattagtagtagtggtagtaccatatactacgcagactctgtgaagggccgattcaccatctccagggacaacgccaagaactcactgtatctgcaaatgaacagcctgagcgccgaggacacggccgtgtattactgtgcgagaaaatttaactactggggccagggaaccctggtcaccgtctcctca

SEQ ID NO: 5064 - DNA, 274 bp, Homo sapiens
  source 1..274: mol_type = other DNA
tgcagcctctggattcacgttcagtgactacagcatgaactggatccgccaggctccagggaaggggccggagtgggtttcacacatttctagtagtggtagtaacatatactacgctgactctgtgaagggccgattcaccatctccagggacaacgcccacaactcactgtatctgcaaatgaacagcctgagagccgaggacacggctgtatattactgtgcgagaaagttcaactactggggccagggaaccctggtcaccgtctcctca

SEQ ID NO: 5065 - DNA, 274 bp, Homo sapiens
  source 1..274: mol_type = other DNA
tgcagcctctggattcaccttcagtgactactacatgacctggctccgccaggctccagggaaggggctggagtgggtttcatacattagtagtagtggtagtaccatatactacgcagactctgtgaagggccgattcaccatctccagggacaacgccaagaactcactgtatctgcaaatgaacagcctgagagccgaggacacggctgtgtattactgtgcgaggaagttcaactactggggccagggaaccctggtcaccgtctcctca

SEQ ID NO: 5066 - DNA, 294 bp, Homo sapiens
  source 1..294: mol_type = other DNA
gcctctggatacaccttcactagctacgctctgcagtgggtgcgccaggcccccggacaaaggcttgagtggctgggatggaccaacgctgacaatggtaacacagaatattcacagaagttccggggcagagtcaccatgaccagggacacattcgcgagcacagcctacatggagctgagcagcctgagatctgaagacacggctgtatattactgtgcgagagattttttaggcgatagtggcttcgagtttgactactggggccagggaactctggtcaccgtctcctca

SEQ ID NO: 5067 - DNA, 294 bp, Homo sapiens
  source 1..294: mol_type = other DNA
gcctctggatacaccttcactagctatgctctgcagtgggtgcgccaggcccccggacaaaggcttgagtggctgggatggaccaacgctggcaatggtaacacagaatattcacagaagttccggggcagagtcaccattaccagggacacatccgcgagcacagcctacatggagctgagcagcctgagatctgaagacacggctgtatattactgtgcgagagattttttaggcgatagtggcttcgagtttgactactggggccagggaactctggtcaccgtctcctca

SEQ ID NO: 5068 - DNA, 295 bp, Homo sapiens
  source 1..295: mol_type = other DNA
ggcctctggatacaggttcagttcctatgctatacagtgggtgcgccaggcccccggacaaaggcttgagtggatgggttgggtcaacggtgccaacggtgacacacgatactctcagaagttccagggcagagtcacctttagcagagactcatccgcgagcacagcctacatggagttgaccagcctggcatctgaagacacggctgtatattactgtgcgcgagattttctcggggacagtggtttcgagtttgactattggggccagggaaccctggtcaccgtctccgca

SEQ ID NO: 5069 - DNA, 292 bp, Homo sapiens
  source 1..292: mol_type = other DNA
tgcagcctctggattcacctttagcagctatgccatgacttgggtccgccaggctccagggaaggggctggagtgggtctcagctattagtggtagtagtgataggacatactacgcagactccgtgaagggccggttcaccgtctccagagacaattccaagaacacgctgtatctgcaaatgagcagcctgagagccgaggacacggccgtatattactgtgcgaaaggtcgtggactggtaagtcccgatgactactggggccagggaaccctggtcaccgtctcctca

SEQ ID NO: 5070 - DNA, 292 bp, Homo sapiens
  source 1..292: mol_type = other DNA
tgcagcctctggattcacctttatcaactatgccatgacctgggtccgccaggctccagggaaggggctggagtgggtctcagctattagtggcagttctgatagaacatactacgcagactccgtgaagggccggttcaccatctccagagacaattccaagaacacgctgtatctgcaaatgaacagcctgagagccgaggacacggccctatattactgtgcgaaaggccgagggttggtaagtccggatgactactggggccagggaaccctggtcaccgtctcctca

SEQ ID NO: 5071 - DNA, 292 bp, Homo sapiens
  source 1..292: mol_type = other DNA
tgcagcctctggattcgcctttttcaactatgccatgacctgggtccgccaggctccagggaagggactggagtgggtctcagccattagtggcggttctgataggacatactacgcagactccgtggagggccgtttcaccatctccagagacaattccaagaacacgctgtatctgcaaatgaacaacttgagagccgaggacacggccctatattactgtgcgaaaggccgagggttggtaagtccggatgactactggggccagggaaccctggtcaccgtctcctca

SEQ ID NO: 5072 - DNA, 277 bp, Homo sapiens
  source 1..277: mol_type = other DNA
tgcagcctctggattcaccttcagtaaatttgctatgaattgggtccgccaggctccagggaagggactggagtggatttcatattgtaatagtgatagtcgtgccatatactacgcagactctgtggagggccgattcaccatctccagagacaacgccaagaactcactttatctgcaaatgaacagcctgagaggcggggacacggctgtctattattgtatgagaggcaacggggactactggggccagggaaccccggtcaccgtctcctca

SEQ ID NO: 5073 - DNA, 277 bp, Homo sapiens
  source 1..277: mol_type = other DNA
tgcagcctctggattcaccttcagtagatttgccatgaactgggtccgccaggctccagggaagggactggagtgggtttcatattgtaatagtgatagtcgtgccatgtactacgcagactctgtgaggggccgattcaccatctccagagacaacgccaagaattcagtttatcttcaaatgaacagtctgagagacggggacacggctgtatattattgtatgagaggtaatggggactactggggcccgggaaccctggtcaccgtctcctca

SEQ ID NO: 5074 - DNA, 277 bp, Homo sapiens
  source 1..277: mol_type = other DNA
tacagcctctggattcaccttcagtagatttgccatgaactgggtccgccagactccagggaaggggctggagtggatttcatacatcaatagtgacagtcgtgccatgtattacgcagactctgtgcagggtcgattcaccatctccagagacaatgtcaagaattctttctatctgcaaatgaacagcctacgagtcggagacacggctgtatattactgtatgagaggtaacggggactactggggcccgggaaccctggtcaccgtctcctca

SEQ ID NO: 5075 - DNA, 277 bp, Homo sapiens
  source 1..277: mol_type = other DNA
tgcagcctctggattcaccttcagtagatttgccatgaactgggtccgccaggctccagggaaggggctggagtgggtttcatattgtaatagtgatagtcgtgccatgtactacgcagactctgtgaagggccgattcaccatctccagagacaattccaagaactcagtgtatttgcaaatgaacagtctgagagacggggacgcggctgtctattactgtatgagaggcaacggggactactggggccagggaaccctggtcaccgtctcctca

SEQ ID NO: 5076 - DNA, 277 bp, Homo sapiens
  source 1..277: mol_type = other DNA
tgaagtctctggattcaccttcaagaactttgccatgaattgggtccgccaggctccagggaaggggctggaagaggtttcatacatcagtaagtacagtactagtatatattacatagactctgtgaagggccgattcaccacctccagagacaatgacaagaactctctgtatctgcaaatggacagcctgagagacgaagacacggctatgtactactgtatgaggggtaacggggactactggggccagggaaccctggtcatcgtctcctca

SEQ ID NO: 5077 - DNA, 298 bp, Homo sapiens
  source 1..298: mol_type = other DNA
tgcagcctccggattcattttcagtagggcctggatgagctgggtccgccagcctccagggaaggggctggagtgggttggccgtattaaagccaaaagtgatgatgaggcaacagactacgctgctttcgtgaaaggcagattcaccgtctcgagagatgattcaaaaaatacgctgtatctacaaatgaacagcctgaaaaccgaggacacagccgtgtattattgtatcacagagtgcagtagcaccatctgcaacggagggtggggccagggaaccctggtcaccgtctcctca

SEQ ID NO: 5078 - DNA, 298 bp, Homo sapiens
  source 1..298: mol_type = other DNA
tgcagcctctggattcactttcagtgacgcctggatgagttgggtccgccaggctccagggaaggggctggagtgggttgctggtattaaaatcaaatctgacggtgaggcaacaaactacgctgcatccgtgaaaggcagattcaccatctcaagagatgattcagaaaacacactgtatctgcaaatgaacagcctgaaaaccgaggacacagccgtatattattgtattacagagtgtagtagcaccatctgcaatggcggctggggccagggaaccctggtcaccgtctcctca

SEQ ID NO: 5079 - DNA, 298 bp, Homo sapiens
  source 1..298: mol_type = other DNA
tgcagcctctggattcactttcagtaccgcctggatgagttgggtccgccaggctccagggaaggggctggagtgggttgctggtattaaaatcaaatctgacgatgaagcaacaaactacgctgcatccgtgaaaggcagattcaccatctcaagagatgattcagaaaacacgctgtatctgcaaatgaacagcctgaaaaccgaggacacagccacatattattgtatcacagagtgcagtagcaccatctgcaatggcggctggggccagggaaccctggtcaccgtctcctca

SEQ ID NO: 5080 - DNA, 298 bp, Homo sapiens
  source 1..298: mol_type = other DNA
tgcagcctctggattcagcttcagtacctactggatgcactgggtccgccaagctccagggaaggggctggtgtgggtctcacgtattaatagtgatgagactatcacaacctacgcggactccgtgaagggccgattcaccatctccagagacaacgccaggaacacgctgtatttgcaaatgaacagtctgagagtcgaggacacggctgtgtattactgtgtaagagagcagactgcgctgacgatttttggcatggacgtctggggccaagggaccacggtcaccgtctcctca

SEQ ID NO: 5081 - DNA, 298 bp, Homo sapiens
  source 1..298: mol_type = other DNA
tgcagcctctggattcaccttcagtaactactggatgcactgggtccgccaggctccagggaaggggctggtgtgggtcgcacacattaatagtgatgggactaccacaaactacgcggattctgtgaggggccgattcgccatctccagagacaacgccaagaacgcgctgtatctgcaaatgaacagtctgagagccgaggacacggctgtgtattattgtgtaagagagcagactgcgctgactatctttggtatggacgtctggggccaagggtccacggtcaccgtctcctca

SEQ ID NO: 5082 - DNA, 298 bp, Homo sapiens
  source 1..298: mol_type = other DNA
cactgtctctggtggctccatcagcagtggtggttactcctggagctggatccgccagcacccagggaagggcctggagtggattgggtacatctatgacagtgggagcacctactccaacccgtccctcaagagtcgtattaccatatcagtagacacgtctaagaaccagttctccctgaacctgagctctgtgactgccgcggacacggccgtgtattactgtgcgagagatccgatagcagtgcctggtctctttgactactggggccagggaaccctggtcaccgtctcctca

SEQ ID NO: 5083 - DNA, 298 bp, Homo sapiens
  source 1..298: mol_type = other DNA
cactgtctctggtggctccatcagcagtggtggttactcctggagctggatccgccagcacccagggaagggcctggagtggattgggtacatctatgacagtgagagcacctactccaacccgtccctcaagagtcgtattaccatatcagtagacacgtctaagaaccagttctccctgaacctgagctctgtgactgccgcggacacggccgtgtattactgtgcgagagatccgatagcagtgcctggtctctttgactactggggccagggaaccctggtcaccgtctcctca

SEQ ID NO: 5084 - DNA, 286 bp, Homo sapiens
  source 1..286: mol_type = other DNA
tgcagcctctggattcaccttcactagctactggatgcactgggtccgccaagctccagggaaggggctggtgtgggtctcacgtattaatagtgatgggagtagcacaagctacgcggactccgtgaagggccgattcaccatctccagagacaacgccaagaacacgctgtatctgcaaatgaacagtctgagagccgaggacacggctgtgtattattgtgcaagaggaggtgggagctattctggttactggggccagggaaccctggtcaccgtctcctca

SEQ ID NO: 5085 - DNA, 286 bp, Homo sapiens
  source 1..286: mol_type = other DNA
tgcagcctctggattcaccttcagtagctactggatgcactgggtccgccaagctccagggaaggggctggtgtgggtctcacgtattaatagtgatgggagtagcacaagctacgcggactccgtgaagggccgattcaccatctccagagacaacgccaagaacacggtgtatctgcaaatgaacagtctgagagccgaggacacggctgtgtattcctgtgcacgggggggagggagctactctggctactggggccagggaaccctggtcaccgtctcctca

SEQ ID NO: 5086 - DNA, 286 bp, Homo sapiens
  source 1..286: mol_type = other DNA
tgcagcctctggattcaccttcagtagttactggatgcactgggtccgccaagcttcagggaaggggctggtgtgggtctcacgtattaatagtgatgggagtagcacaacctacgcggactccgtgaagggccgattcaccatctccagagacaacgccaagaacacgctgtatctgcaaatgaacagtctgagagccgaggacacggctgtgtattactgtgcaagaggtggtgggagctactcagggtactggggccagggaaccctggtcaccgcctcctca

SEQ ID NO: 5087 - DNA, 286 bp, Homo sapiens
  source 1..286: mol_type = other DNA
tgcagcctctggattcaccttcagtagttactggatgcactgggtccgccaagcttcagggaaggggctggtgtgggtctcacgtattaatagtgatgggagtagcacaacctacgcggactccgtgaagggccgattcaccatctccagagacaacgccaagaacacgctgtatctgcaaatgaacagtctgagagccgaggacacggctgtgtattactgtgcaagaggtggtgggagctactcagggtactggggccagggaaccctggtcaccgtctcctca

SEQ ID NO: 5088 - DNA, 280 bp, Homo sapiens
  source 1..280: mol_type = other DNA
tgcagtctctggattcagctttaggagaaatgccttgacctgggtccgccaggcgccagggaaggggctggagtgggtctcaactattaggggtgttgacgataccacactctacgcagactccgtgaagggccggttcgccatcttcagagacaattccaaggacacgctgtatctgcaaatgaatagcctgagagccgaggacacggccgtgtattattgtgtgggacatggcagctcgtcgggctggggccagggaaccctggtcaccgtctcctca

SEQ ID NO: 5089 - DNA, 280 bp, Homo sapiens
  source 1..280: mol_type = other DNA
tgcagcctctggattcactttgactggaaatgccatggactgggtccgccaggctccagggaagggactggagtgggtcgcaagtattcgaggtgatcgtgatagaagattctacgcagcctccgtgaggggccgcttcaccatcttcactgacgattccagtaacaccctctatctgcaaatggacagcctgagagtcgaagacacggccatctattactgtgtggggcatggatcgagcagcggctgcggccagggaaccccggtcgccgtctcctca

SEQ ID NO: 5090 - DNA, 280 bp, Homo sapiens
  source 1..280: mol_type = other DNA
tgcagcctctggattcactttgactggaaatgccatggactgggtccgccaggctccagggaagggactggagtgggtcgcaagtattcgaggtgatcgtgatagaagattctacgcagcctccgtgaggggccgcttcaccatcttcactgacgattccagtaacaccctctatctgcaaatggacagcctgagagtcgaagacactgccatctattactgtgtggggcatggatcgagcagcggctgcggccagggaaccccggtcgccgtctcctca

SEQ ID NO: 5091 - DNA, 280 bp, Homo sapiens; identical to SEQ ID NO: 5088
  source 1..280: mol_type = other DNA

SEQ ID NO: 5092 - DNA, 286 bp, Homo sapiens
  source 1..286: mol_type = other DNA
tgcagcctctggattcaccttcagtgactatagcatgaattgggtccgccaggctccagggaaggggctggagtggatttcatacattagaagtggtactcattccatagtctacgcagactctgtgaagggccgattcaccatttccagagacaatgccaagaactcactgtatctgcaaatgaacagcctgagagacgaggacacggctctatattactgtgtgagagaccacatgtatgcttttgatatctggggccaagggacaatggtcaccgtctcttca

SEQ ID NO: 5093 - DNA, 286 bp, Homo sapiens
  source 1..286: mol_type = other DNA
tgcagcctctggattcaccttcagtccctatagcatgaactgggtccgccaggctccagggaaggggctggaatgggtttcatacattaggactagtcctagtaccatatattatgcagactctgtgaagggccgattcaccatctccagagacaatgccaagaactcactgtatctgcaaatgaacagcctgagagacgaggacacggctgtgtattactgtgtgagagatcatatgtatgcttttgatatctggggccaagggacaatggtcgccgtctcttca

SEQ ID NO: 5094 - DNA, 301 bp, Homo sapiens
  source 1..301: mol_type = other DNA
cgctgtctatggtgggtccttcagtggttactactggacctgggtccgccagcccccagggaagggcctggagtggattggggaaatcaatcatagtggaagtgccaactacaacccgtccctcaagagtcgagtcaccgtatcagtagacacgtccaagaaccagttctccctgaagctgaactctgtgaccgccgcggacacggctgtgtattactgtgcgggggctgtggtggtgactgctatgacgtactggtacttcgatctctggggccgtggcaccctggtcactgtctcctca

SEQ ID NO: 5095 - DNA, 301 bp, Homo sapiens
  source 1..301: mol_type = other DNA
cgccgcgtatggtgggtctttcagtggtcactactggacttggatccgccagtccccagggagggggctggagtggatcgggcaactcagtcatagtggaagcaccaactacaatccgtccctcaagagtcgagtcaccatttcactcgacacgtccaggaaccagttctccctgaagttgacctctgtgaccgccgcggacacggctacatattattgtgcgggggctgtggtggtgactgctatgacctactggtacttcgatctctggggccgtggcaccccggtcacggtctcctca

SEQ ID NO: 5096 - DNA, 289 bp, Homo sapiens
  source 1..289: mol_type = other DNA
tgcagcctctggattcactttcactaacgcctacatgagctgggtccgccaggctccagggaaggggctggagtgggttggccgtattaaaagcaaaagtgaaggtgggacagcagactacgctgcacccgtgaaaggcagattcaccatctcaagagatgattcaaaaaacacgctatacctgcagatgaacagcctgaaaaccgaggacacagccgtgtattactgtaccacataccgttcctacatggacgtctggggcaaagggaccacggtcaccgtctcccca

SEQ ID NO: 5097 - DNA, 289 bp, Homo sapiens
  source 1..289: mol_type = other DNA
tgcagcctctggattcactttcagtaacgtctacatgagctgggtccgccaggctccagggaaggggctggagtgggttggccgtattaaaagtgaaactgaaggcgggacagcagactacgctgcacccgtgaaaggcagattcaccatctcaagagatgattcacaaaacacgatgtatctgcaaatgaacagcctgaaaaccgaggacacagccgtctattactgtaccacatatcggagttacatggacgtctggggccaggggaccacggtcaccgtctcctca

SEQ ID NO: 5098 - DNA, 289 bp, Homo sapiens
  source 1..289: mol_type = other DNA
tgaagcctctgaattcacttttactaatgtctggatgagctgggtccgccaggctccagggacggggctggagtgggttggccgtattcaaagcaaaactgatggtgggacagcagagtacgctgcacccgtgaaaggcagattcaccatctcaagagatgattcaaaaaacaccctgtatctgcaaatgaacagcctgaaaattgaggacacagccgtgtattactgtaccacatatcgttcctacatggacgtctggggcaaagggaccacggtcaccgtctcttca

SEQ ID NO: 5099 - DNA, 289 bp, Homo sapiens
  source 1..289: mol_type = other DNA
tgcagcctctggattcactttcactaacgcctacatgagctgggtccgccaggctccagggaaggggctggagtgggttggccgtattaaaagcaaaagtgaagatgggacagcagactacgctgcacccgtgaaaggcagattcaccatctcaagagatgattcaaaaaacatgctgtacctgcagatgaacagcctgaaaaccgaggacacagccgtttattactgtaccacataccgttcctacatggacgtctggggcaaagggaccacggtcaccgtctcccca

SEQ ID NO: 5100 - DNA, 297 bp, Homo sapiens
  source 1..297: mol_type = other DNA
tccatctccggggacagtgtctctagtaacagtgctgcttggaactggatcaggcagtccccatcgagaggccttgagtggctgggaaggacatactaccagtccaagtggtataatgattatgcagtatctgtgaaaagtcgaataactatcaacccagacacatccaagaaccagttctccctgcagctgaactctgtgactcccgaggacacggctgtgtattactgtgcaagagggtggctacggaacggtatggacgtctggggccaagggaccgcggtcaccgtctcctca

SEQ ID NO: 5101 - DNA, 296 bp, Homo sapiens
  source 1..296: mol_type = other DNA
ccatctccggggacagtgtctccggcaacagtggtgcttggaactggatcaggcagtccccatcgagaggccttgagtggctgggaaggacatacttccagtccaagtggtataatgattatgaagtatctgtgaagagtcgagtaagcatcaccccagacacatccaagaaccagttctccctgcaactgaactctgtgactcccgaggacacggctgtgtattactgtgctagagggtggctacgcaacggtatggacgtctggggccaagggaccacggtcaccgtctcctca

SEQ ID NO: 5102 - DNA, 292 bp, Homo sapiens
  source 1..292: mol_type = other DNA
tggagcctctggattcacctttgacagcagtgccatgagctgggtccgccaggctccagggaagggactggagtgggtctcaagtattaataattttggcgggaccacatactacgcagactccgtgaagggccggttcaccatctccagagacaactccaagaacacgctgtatttgcaaatgaacagcctgagagccgaggacacggccgtgtattactgtgcgaaagtacagggctgggtggacccctttgactactggggccagggaaccctggtcagcgtctcctca

SEQ ID NO: 5103 - DNA, 292 bp, Homo sapiens
  source 1..292: mol_type = other DNA
tgcagcctctggattcacctttagtagttctggcatgagttgggtccgccaggctccagggaaggggctggagtgggtctcatccattaataataatggtggtaggacattcttcgcagactccgtgaagggccggttcaccatttccagagacaattccaagaacactctgtatctgcaaatgaacagcctgagaggcgaggacacggccgtatattactgtgcgaaagttcaggggtgggtagatccctttgactactggggccagggaaccctggtcaccgtctcctca

SEQ ID NO: 5104 - DNA, 294 bp, Homo sapiens
  source 1..294: mol_type = other DNA
aagggttctggatacagctttaccagctactggatcggctgggtgcgccagatgcccggaaaaggcctggagtggatggggatcatctatcctcatgactctgataccagatatagtccgtccttccaaggccaggtcaccatctcagccgacaagtccaccaacaccgcctacctgcagtggaccagcctgaaggcctcggacaccgccatctattactgtgcgagacggggacgcgggggcaccacctattttgactactggggccagggaaacctggtcaccgtctcctca

SEQ ID NO: 5105 - DNA, 294 bp, Homo sapiens
  source 1..294: mol_type = other DNA
aaggcttctggatacagctttaccagttactggatcggctgggtgcgccagatgcccgggacaggccttgagtggatggggatcatctatcctagtgactctgataccagatacagcccgtccttccaaggccaggtcaccatctcagccgacaggtccatcagcaccgcctacctgcagtggagcagcctgaaggcctcggacaccgccatgtattactgtgcgagacgggggagaggtggaacgacctactttgactactggggccagggaaccctggtcaccgtctcctca

SEQ ID NO: 5106 - DNA, 286 bp, Homo sapiens
  source 1..286: mol_type = other DNA
tgcagtctctggattcatctttagtaactattggatgagttgggtccgccaggctccagggaaggggctggagtgggtggccaacatagcgccagatggaagtgacaaatactatgtggactctatgtggggccgattcaccatctccagagacaacaccaagaactcactgtatctgcaagtgaacagcctgagagacgacgacacggctctctattactgtgggagagtggtgggagctgccgttgactactggggccagggaaccctggtcaccgtctcctca

SEQ ID NO: 5107 - DNA, 286 bp, Homo sapiens
  source 1..286: mol_type = other DNA
tgcagcctctggattcacatttggaaattattggatgagctgggtccgccaggctccagggaaggggccggaatgggtggccaacatagcgccaggtggagatgacacgaggtatgtggactctgttaggggccgattcaccatctccagagacaactccaagaactcacagtggctgcaagtgaacagcctgagagccgaggacacggcagtttattactgtggaagagtcgtgggagccgccgttgactactggggccagggaaccctggtcaccgtctcctca

SEQ ID NO: 5108 - DNA, 280 bp, Homo sapiens
  source 1..280: mol_type = other DNA
tgcagcctctggattcaccttcaacagctatgccatgagctgggtccgccaggctccagggaaggggctggagtgggtctcaactattagtagtagtggtgataacacatactacgcagactccgtgaagggccggttcaccatctccagagacaattccaagcacacgctgtatctgcaaatgaacagcctgagaggcgaggacaccgccttatattactgtgtgaggcaggtatggagcgactactggggccagggaaccctggtcaccgtctcctca

SEQ ID NO: 5109 - DNA, 280 bp, Homo sapiens
  source 1..280: mol_type = other DNA
tgcagcctctggattcacctttagcacctatgccatgagctgggtccgccaggctccagggaaggggctggagtgggtctcaactattagtagtagtggtgataggacatactacgcagactccgtgaagggccagttcaccatctccagagacaattccaagaacacgctgtatctgcaagtgaacagcctgagagccgaagacacggccgtatattattgtgtgaggcaggtttggtctgactactggggccagggaaccctggtcaccgtctcctca

SEQ ID NO: 5110 - DNA, 283 bp, Homo sapiens
  source 1..283: mol_type = other DNA
cactgtctctggtgactccatgacaacttactattggagctggatccggcagccccccgggaagggactggagtggattggctatatctcccagagtgggagcgccacctacaatccctccctcaacagtcgagtcaccatatcaatagacacggccaccaaccagttttccctgaacctgaggtctgtgacccccgcggacacggccatctattactgtgcgagggagagcagaaactttttcgacccctggggccagggaaccctggtcaccgtctcctca

SEQ ID NO: 5111 - DNA, 286 bp, Homo sapiens
  source 1..286: mol_type = other DNA
cactgtctctggtgactccatcaaaagttcattctattggagttggatccggcagaccccagggaagggacttgagtggattgcctacatgcatcatagtgggaccgccaaatacaatccctacctcaagagtcgcgtcaccatatcaatggacacgtccaagaaccaactctccctgaaggtgacgtctatgagtactgtggatacggccatatattactgtgcgagggaatctaggaacttcttcgacccctggggccaggggaccctggtcaccgtctcctca

SEQ ID NO: 5112 - DNA, 276 bp, Homo sapiens
  source 1..276: mol_type = other DNA
gcttctggatacaccttcactagctatcctatgcattgggtgcgccaggcccccggacaaggccttgagtggatggcatggatcagcgctggcaatgataacacaaaatattcacagaagttccagggcagagtcaccattaccagggacacatccgcgagcacagcctacatggagctgagcagcctgagatctgaagacacggctgtgtattactgtgcgagaggtgacgttctcgactactggggccagggaaccctggtcaccgtctcctca

SEQ ID NO: 5113 - DNA, 276 bp, Homo sapiens
  source 1..276: mol_type = other DNA
gcttctggatacaccttcactagttatgctatgcattgggtgcgccaggcccccggacaaacgcttgagtggatggcatggatcaacgctggcaatgatgacacaaaatattcacagaagttccagggcagagtcaccataaccagagacacatccgcgagcacagcctacatggacctgagcagccttacatctgaagacacggctgtctattactgtgcgagaggggacgtccttgactactggggccagggaagcctggtcaccgtctcctca

SEQ ID NO: 5114 - DNA, 274 bp, Homo sapiens
  source 1..274: mol_type = other DNA
tgcagcctctggattcctcctcagtagttacgaagtgaactgggtccgccaggctccagggaaggggctggagtggcttgcatatattaacgctgatggtgacaccatacactacacgggctctgtcaggggccgattcaccatctccagagacaacgccgcgaacagagtatttttgcaaatgaatagcctgacagtcgaggattcggccctctattactgtgcggggagttgggattattggggccagggaaccctggtcaccgtctcctca

SEQ ID NO: 5115 - DNA, 274 bp, Homo sapiens
  source 1..274: mol_type = other DNA
tgcagtctctggattcaccctcagtaattatgaaatgaattgggtccgccaggctccagggaaggggctggagtgggtttcatacattggcagtagcggaagtagcataagctacacagactctgtgaagggccgattcaccatctccagagacaacgccaagaactcattgtatttgcaaatgaacagtctgagagccgaggacacggctatttattactgtgcggggtcttgggactactggggccagggagccctggtcaccgtctcctca

SEQ ID NO: 5116 - DNA, 283 bp, Homo sapiens
  source 1..283: mol_type = other DNA
tgcagcctctggattcaccttcagtagttatgtgatgaactgggtccgccaggctccagggaaggggctggagtgggttgcatacataagtgtcgctagtgatatcatatactacgcagactctgtgaagggccgattcaccatctccagagacaatgccaagaattcactatatctgcaaatggacagcctgagagacgaagacacggctgtctattactgtacgagagatcgctacagtggaagctactggggccagggaaccctggtgaccgtctcctca

SEQ ID NO: 5117 - DNA, 283 bp, Homo sapiens
  source 1..283: mol_type = other DNA
tgccgcgtctggtttcatcttccgcaactacaacttgaattggatccgccgggctccagggaaggggctggagtggattgcatatattagcactggttccactaccatccactacgcagactctgtgaagggccgattcaccatctccagagacgatgccaaggactcaatatttctgcaaatggacagcctgagagacgaggacacggctacgtattattgtacaagagacagatatagtggcagttattggggccagggaaccctggtcaccgtctcctct

SEQ ID NO: 5118 - DNA, 283 bp, Homo sapiens
  source 1..283: mol_type = other DNA
tgtagcctctggattcagtttcagtaattatgtcatgaattgggtccgccaggctccaggtaaggggctggagtgggttgcatacataagtgtcgccagtgatatcacatactacgcagactctgtgaagggccgattcaccatctccagagacaatgccaagaattcactatatctgcaaatggacagcctgagagacgaagacacggctgtctattactgtacgagagatcgctatagtgggagctactggggccagggaaccctggtgaccgtctcctca

SEQ ID NO: 5119 - DNA, 289 bp, Homo sapiens
  source 1..289: mol_type = other DNA
tgtagcctctggattcactttcagtaatcactggatgcactgggtccgccaagctccagggaaggggctggtctgggtctcagagattaatcctgatgggcgtgccgcacattacgcggactccgtgaggggccgcttcaccatctccagagacaacgccaagaatacattgtttctgcaaatgaacactctgggagccgacgacagggctgtttatttttgtacaaaaggaggccctaggtacagtgtggacgtctggggcctaggggccacggtcaccgtctcctca

SEQ ID NO: 5120 - DNA, 289 bp, Homo sapiens
  source 1..289: mol_type = other DNA
tgtagcctctggattcactttcagtaatcactggatgcactgggtccgccaagctccagggaaggggctggtctgggtctcagagattaatcctgatgggcgtgccgcacattacgcggactccgtgaggggccgcttcaccatctccagagacaacgccaagaatacattgtttctgcaaatgaacactctgggagccgacgacagggttgtttatttttgtacaaaaggaggccctaggtacagtgtggacgtctggggcctaggggccacggtcaccgtctcctca

SEQ ID NO: 5121 - DNA, 289 bp, Homo sapiens
  source 1..289: mol_type = other DNA
tgcagcctctggattcaccttcagtagccgctggatgcactgggtccggcaagctccagggaaggggctggtgtgggtctcacaaattagtggtgatgggggtggcacatcctactcggactccgtgaagggccgatttaccatctccagagacaacgccaagaacacactgtatctgcaaatgaacagtctgagagccgaggacacggctgtctattactgtacaaaaggggggcctcgctacagtgtggacgtctggggccaagggaccacggtcaccgtctcctca

SEQ ID NO: 5122 - DNA, 295 bp, Homo sapiens
  source 1..295: mol_type = other DNA
tgcagcctctggattcagctttaacacctatgccatgagctgggtccgccaggctccagggaaggggctggagtgggtctcaaccattagtaattccagaagtggagaaagaacatattacacagagtccgtgacgggtcggttcaccatctccagagacccttccaaggacacggtgaatctccaaatgaacagcctgagagccgaggacacggccgtctatttctgtgtgaaggataagggagctatttttggggactactggggccagggagccctggtcaccgtctcctca

SEQ ID NO: 5123 - DNA, 289 bp, Homo sapiens
  source 1..289: mol_type = other DNA
tgcagcctctggattctcctttagaacctatgccatgagttgggtccgccaggctccagggagggggctggactgggtctcaactattagtaatgatggtactcgcacatactacgcagagtccgtaaagggccgcttcaccatctccagagacgattcctcgaacacggtatatctgcaaatgagcagcctgagagccgacgacacggccctatattattgtgtgaaagataaaggagctatttttggggactattggggccagggagccctggtcaccgtctcctca

SEQ ID NO: 5124 - DNA, 289 bp, Homo sapiens
  source 1..289: mol_type = other DNA
tgcagcctctggattcacctttagaacctatgccatgagttgggtccgccaggctccagggagggggctggactgggtctcaactattagtaatgatggtactcgcacatactacgcagagtccgtaaagggccgcttcaccatctccagagacgattccacgaacacggtatatctgcaaatgaacagcctgagagccgaggacacggccctatattattgtgtgaaagataaaggagctatttttggggactattggggccagggagccctggtcaccgtctcctca

SEQ ID NO: 5125 - DNA, 295 bp, Homo sapiens
  source 1..295: mol_type = other DNA
tgcagcctctggattcagctttaacacctatgccatgagctgggtccgccaggctccagggaaggggctggagtgggtctcaaccattagtaattccagaagtggagaaagaacatattacacagagtccgtgacgggccggttcaccatctccagagacccttccaaggacacggtgaatctccaaatgaacagcctgagagccgaggacacggccgtctatttctgtgtgaaggataagggagctatttttggggactactggggccagggagccctggtcaccgtctcctca

SEQ ID NO: 5126 - DNA, 293 bp, Homo sapiens
  source 1..293: mol_type = other DNA
cagcctctggattcagctttaacacctatgccatgagctgggtccgccaggctccagggaaggggctggagtgggtctcaaccattagtaattccagaagtggagaaagaacatattacacagagtccgtgacgggtcggttcaccatctccagagacccttccaaggacacggtgaatctccaaatgaacagcctgagagccgaggacacggccgtctatttctgtgtgaaggataagggagctatttttggggactactggggccagggagccctggtcaccgtctcctca

SEQ ID NO: 5127 - DNA, 295 bp, Homo sapiens
  source 1..295: mol_type = other DNA
tgcagcctctggattcccctttaccacctacgccatgagttgggtccgccaggcttcagggaagggactggagtggatctcaactattagtaacacttacaaaggtcatcgcacatattatgcggactccgtggagggccgcttcaccatctccagagacaattccaagaacatcgtctatctgcaaatgaacagcctgagagccgaggacacggccatatattcctgtgtgaaagataagggagcgattttcggtgactactggggcctgggaaccgtggtcaccgtctcctca

SEQ ID NO: 5128 - DNA, 295 bp, Homo sapiens
  source 1..295: mol_type = other DNA
tgcagcctctggattcccctttaccacctatgccatgagctgggtccgccaggcctcagggagggggctggagtgggtctccactatcggtaacgttcccaaaggcagtcgcacatactatgcggactccgtgaagggccggttcaccatctccagagacaattccaacaacattgtatatctgcaaatgaacagcctgagagccgaggacacggccatatattcctgtgtgaaagataagggggcgattttcggtgactactggggcctgggaaccctggtcaccgtctcctca

SEQ ID NO: 5129 - DNA, 289 bp, Homo sapiens; identical to SEQ ID NO: 5124
  source 1..289: mol_type = other DNA

SEQ ID NO: 5130 - DNA, 295 bp, Homo sapiens
  source 1..295: mol_type = other DNA
ttcagcctctggattcaccttcagtacctatgctatgcactgggtccgccaggctccagggaagggactggaacatgtttcagctattaataataatggggatgatacatactacgccgactcagtgaagggcagattcaccatctccagagacaattccaagaaaacgctatatcttcaaacgagcagtctgagagttgaggacacggctgtctattactgtgtgaaagatcgggggtccctcgtccgagactttgactcctggggccagggaaccctggtcaccgtctcctca

SEQ ID NO: 5131 - DNA, 293 bp, Homo sapiens
  source 1..293: mol_type = other DNA
cagcctctggattcacctttagcagctatgccatgagctgggtccgccaggctccagggaagggactggaacatgtttcggctattaataataatggggatgatacatactacgccgactcagtgaagggcagattcaccatctccagagacaattccaagaaaacgctatctcttcaaacgagcagtctgagagttgaggacacggctgtctattactgtgtgaaagatcgggggtccctcgtccgagactttgactcctggggccagggaaccctggtcaccgtctcctca

SEQ ID NO: 5132 - DNA, 295 bp, Homo sapiens
  source 1..295: mol_type = other DNA
ttcagcctctggattcaccttcagtacctatgctttccactgggtccgccagggtccagggaagggactggaatatgtttcaggtattagtggtagtggggatgacacatactatgcagactcactgaggggcagattcaccatctccagagacaattccaagaacaccctgtttcttcaaatgaccagtctgagagctgaggacacggctgtgtattactgtgtgaaagatagagggtccctcgtccgggactttgactcttggggccagggaaccctggtcacagtctcctca

SEQ ID NO: 5133 - DNA, 273 bp, Homo sapiens
  source 1..273: mol_type = other DNA
gcatctggatacaccttcaccagctactatatgcactgggtgcgacaggcccctggacaagggcttgagtggatgggaataatccaccctaatggtggtaggacaggctacgcacagaacttccagggcagagtcaccttgaccagggacacgtccacgagcacagtctacatggagctgagcagcctgagatctgacgacacggccgtgtattactgtgcgagagatcagggggcgtactggggccagggaaccctggtcaccgtctcctca

SEQ ID NO: 5134 - DNA, 273 bp, Homo sapiens
  source 1..273: mol_type = other DNA
gcatctggatacaccttcaccagctactatatacactgggtgcgacaggcccctggacaagggcttgagtggatgggaataatccaccctaatggtggtaggacaggctacgcacagaacttccagggcagagtcaccttgaccagggacacgtccacgagcacagtctacatggagctgagcagcctgagatctgacgacacggccgtgtattactgtgcgagagatcagggggcgtactggggccagggaaccctggtcaccgtctcctca

SEQ ID NO: 5135 - DNA, 273 bp, Homo sapiens
  source 1..273: mol_type = other DNA
gcatctggatacactttcaccagctactatatgcactggatgcgacaggcccctggacaaggacttgagtggatgggagtcatcaaccctagtggtggtggcacaaccaacgcacagaagttccagggaagagtcaccatgaccagggacacgtccacgaacacaatctacatggagctgagtagcctgagatctgaggacactgccgtgtattactgtgcgagagatcagggagcctactggggccagggaaccctggtcaccgtctcctca

SEQ ID NO: 5136 - DNA, 273 bp, Homo sapiens
  source 1..273: mol_type = other DNA
gcatccgggtacactttcaccaactactatatgcactggatgcgacaggcccatgggcaaggacttgagtggattggagtaatcaaccctactggcggtggccaaacctgggcacagaagttgcagggcagagtcaccctgaccagggacacgtccacgaacacagtctacatggcgctgagtagcttgacatctgaggacactgccgtctattactgtgcgagagatcagggagcctactggggccagggaaccctggtcaccgtctcctca

SEQ ID NO: 5137 - DNA, 289 bp, Homo sapiens
  source 1..289: mol_type = other DNA
tgcagcctctggattcagctttagcacctatgccatgagctgggtccgccaggctccagggaaggggctggactgggtcgcaactattagtggtgatggtggaaggacatactacgcagactccgtgaagggccgattcaccatttccagagacagttccaagaacacggtgtttctgcaaatgaacaacctgagagccgaggacacggccatatattactgtgtgaaagacaatggacctatctttggggaatactggggccagggaaccctggtcaccgtctcctca

SEQ ID NO: 5138 - DNA, 289 bp, Homo sapiens
  source 1..289: mol_type = other DNA
tgcagcctctggattcagctttagcacctatgccatgagctgggtccgccagactccagggaaggggctggactgggtcgcaactattagtggtgatggtggaaggacatactacgcagactccgtgaagggccgattcaccatttccagagacagttccaagaacacggtgtttctgcaaatgaacaacctgagagccgaggacacggccatatattactgtgtgaaagacaatggacctatctttggggaatactggggccagggaaccctggtcaccgtctcctca

SEQ ID NO: 5139 - DNA, 295 bp, Homo sapiens
  source 1..295: mol_type = other DNA
tgcagcctctggattcagctttaccacctatgccatgagctgggtccgccaggcttcagggaaggggctggagtgggtctcaactattagtaacagtgccaaaggtggtcgcacatattatgcggactccgtgcagggccggttcaccatctccagagacaattccaagaacatcgtgtatctgcaaatggacagtgtgagagccgaggacacgggcatatattcctgtgtgaaggataacggaccaattttcggtgaatactggggcccgggaaccctggtcaccgtctcctca

SEQ ID NO: 5140 - DNA, 273 bp, Homo sapiens
  source 1..273: mol_type = other DNA
gcctctggatacaccttcactagttttgtaatacattgggtgcgccaggcccccggacaaagacttgagttgctggggtggattcacggcggcactggaaacacagggtgttcacagaagttccagggcagagtcacgattaccagagacacacccgcgagcacagcctacatggaactgaccagcctgacatctgaagacacggctgtatattactgtgcgagaggcgatcttttagactggggccagggaaccctggtcaccgtctcctca

SEQ ID NO: 5141 - DNA, 273 bp, Homo sapiens
  source 1..273: mol_type = other DNA
gcctctggatacaccttcactagttttgtaatacattgggtgcgccaggcccccggacaaagacttgagttgctggggcggattcacggcggcactggaaacacagggtgttcacagaagttccagggcagagtcacgattaccagagacacacccgcgagcacagcctacatggaactgaccagcctgacatctgaagacacggctgtatattactgtgcgagaggcgatcttttagactggggccagggaaccctggtcaccgtctcctca

SEQ ID NO: 5142 - DNA, 273 bp, Homo sapiens
  source 1..273: mol_type = other DNA
gcttctggatacaccttcactacctatgctatacattgggtgcgccaggcccccggacaagggcttcagttactgggatacatccacgctggcagtggttacacagaattctcacagaacttccagggcagaggcaccattagcagggacacatccgcgagcacagcctacatggagctgagtaacctgagatctgaagacacggctgtttattactgtgcgagaggggacctcctggactggggccagggaaccctggtcaccgtctcctcc

SEQ ID NO: 5143 - DNA, 283 bp, Homo sapiens
  source 1..283: mol_type = other DNA
tgcagcctctgcattcaccttcaaggactttgctatgcactgggtccgccagcctccaggcaaggggctggagtgggtggcagttgtatcatatgaaggaagtaatgaatattacccagactccgtgaagggccgattcaccatctccagagacaattccaagaacacgctgtatctgcaaatgaacagcctgagagctgaggacacggctgtatattactgtgcgaggaagggtaatgcttttgatatctggggccaagggacaatggtcaccgtctcttca

SEQ ID NO: 5144 - DNA, 283 bp, Homo sapiens
  source 1..283: mol_type = other DNA
tgcagcctctggattcaccttcagcaactatgatatgcactgggtccgccaggctccaggcaaggggctggagtgggtggcaattatatcatctgatggaagtagtaaatactacccagactccgtgaagggccgattcaccctctccagagacaattccaataatatgctgtttctgcaaatgaacagcctgagagaggaggacacggctgtgtattactgtgcgagaaaggggaatgcttttgatatctggggccaagggacaatggtcaccgtctcttcc

SEQ ID NO: 5145 - DNA, 283 bp, Homo sapiens
  source 1..283: mol_type = other DNA
tgcagcctctgcattcaccttcaaggactttgctatgcactgggtccgccagcctccaggcaaggggctggagtgggtggcagttgtatcatatgaaggaagtaataaatattacccagactccgtgaagggccgattcaccatctccagagacaattccaagaacacgctgtatctgcaaatgaacagcctgagagctgaggacacggctgtatattactgtgcgaggaagggtaatgcttttgatatctggggccaagggacaatggtcaccgtctcttca

SEQ ID NO: 5146 - DNA, 283 bp, Homo sapiens
  source 1..283: mol_type = other DNA
tgcagcctctgcattcaccttcaaggactttgctatgcactgggtccgccagcctccaggcaaggggctggagtgggtggcagttgtatcatatgaaggaagtaatgaatattacccagactctgtgaagggccgattcaccatctccagagacaattccaagaacacgctgtatctgcaaatgaacagcctgagagctgaggacacggctgtatattactgtgcgaggaagggtaatgcttttgatatctggggccaagggacaatggtcaccgtctcttca

SEQ ID NO: 5147 - DNA, 283 bp, Homo sapiens
  source 1..283: mol_type = other DNA
tgcagcctctggcatctccctcagtacctttgctatacactgggtccgccaggctccaggcaaggggctggagtggcttactgttgtgtcagttgatggaagtaatgaatactacgctgactccgtgaagggccgattcaccatctccaaagacaatcccaagaacaccctgtatctgcaaatgaacagcctgagaactgaggacacggctgtttattactgtgcgagaaagggcaatgcttttgatatctggggccaagggacaatggtcaccgtctcttca

SEQ ID NO: 5148 - DNA, 283 bp, Homo sapiens; identical to SEQ ID NO: 5147
  source 1..283: mol_type = other DNA

SEQ ID NO: 5149 - DNA, 283 bp, Homo sapiens; identical to SEQ ID NO: 5147
  source 1..283: mol_type = other DNA

SEQ ID NO: 5150 - DNA, 280 bp, Homo sapiens
  source 1..280: mol_type = other DNA
tgcagcctctggagtcaccgtcggtaacaactacatgagttgggtccgccaggctccagggaaggggctggagtggatctcagttatttatagcggtggtagtacatactactcagactccgtgaagggcagattcaccgtctccagagacagttccaagaacacggtgtaccttcaaatgaacagcctgagagtcgaggacacggctgtgtattattgtacgagagaccccccggggggtggctactggggccagggaaccctggtcaccgtctcctca

SEQ ID NO: 5151 - DNA, 280 bp, Homo sapiens
  source 1..280: mol_type = other DNA
tgcagcctctggagtaaccgtcagtaacaactacatgagctgggtccgccaggctccagggaaggggctggagtggatctcagttatgtatagtggcggtaggacaaactacgtcgactccgtgaagggccgattcaccgtctccagagacagttccaagaacacactatatcttcaaatgaacagcctgagagttgaggacacggctatgtattattgtacgagagaccctccgggggggggctactggggccagggaaccctggtcaccgtctcctca

SEQ ID NO: 5152 - DNA, 277 bp, Homo sapiens
  source 1..277: mol_type = other DNA
tgcagcctctggattcatctttagtagttattggctgagctgggtccgccaggctccagggaaggggctggagtggctggccagcataaaggaagatggaagtgagaaatactatgtggactctgtgaagggccgattcaccatctccagagacaacgccaagaactcactgtatctgcaaatgaacagcctgagagccgaggacacggccgtgtattactgtgcgagggaaagggggacgtactggggccagggaaccctggtcaccgtctcctca

SEQ ID NO: 5153 - DNA, 277 bp, Homo sapiens
  source 1..277: mol_type = other DNA
tgcagtctctggattcacctttagtaacttttggatgagttgggcccgccaggctccagggaaggggctggagtgggtggccaccataaagcaagatggaagtgcgaaactctatgtggactctgtgaagggccgattcaccatctccagagacaacgccaataagtcactgtatgtgcaaatgaacagcctgagagtcgaggacacggcggtgtattactgtgcgagagagcggggaacctactggggccagggaaccctcgtcaccgtctcctca

SEQ ID NO: 5154 - DNA, 295 bp, Homo sapiens
  source 1..295: mol_type = other DNA
tgcagcctctggattcactttcagtaacgcctggatgacctgggtccgccaggctccagggaaggggctggagtgggttggccgtattaaaaggaaaactgatggtgggacaacagactacggtgcacccgtgaaaggcagattcaccatctcaagagatgattcaaaaaacacggtgtatctgcaaatgaacagcctgaaaaccgaggacacagccgtatattactgtaccggtggagtgggaactacggactttgactactggggccagggaaccctggtcaccgtctcctca

SEQ ID NO: 5155 - DNA, 295 bp, Homo sapiens
  source 1..295: mol_type = other DNA
tgcagcctctggattcactttcaataacgcctggatgagctgggtccgccaggctccagggaaggggctggagtgggttggccgtattaaaagcaaaactgatggtgggacaacagactacactgcatccgtgaaaggcagattcagcatctcaagagatgatccgaaaaacacggcatttctgcaaatgaatagcctgaaaaccgaggacacagccgtttattactgtaccgggggagtgggaactactgactttgactattggggccagggaaccctggtcaccgtctcctca

SEQ ID NO: 5156 - DNA, 292 bp, Homo sapiens
  source 1..292: mol_type = other DNA
cactgtctctggtggctccatcagtagtttctactggagctggatccggcagcccccagggaagggactggagtggattgggtatatttattacagtgggagcaccaactacaacccctccctcaagagtcgagtcaccatatcagtagacacgtccaagagccagttctccctgaggctgagctctttgaccgctgcggacacggccgtgtattactgtgcgagaggttatagcagtggctggtacttcttcgactactggggccagggaaccctggtccccgtctcctca

SEQ ID NO: 5157 - DNA, 292 bp, Homo sapiens
  source 1..292: mol_type = other DNA
cactgtctctggtggctccatcagtagttactactggacgtggatccggcagcccccagggaagggactggagtggattgggtatatctattacagtgggagcaccaactacaacccctccctcaagagtcgagtcaccatatcagtagacacgtccaagaaccagttctccctgaagctgagctctgtgatcgccgcagacacggccgtgtattactgtgcgagagggtatagcagtggctggtacttttttgactactggggccagggaaccctggtcaccgtctcctca

SEQ ID NO: 5158 - DNA, 290 bp, Homo sapiens
  source 1..290: mol_type = other DNA
ccatctccggggacagtgtctctagcaacagtgctgcttggaactggatcaggcagtccccatcgagaggccttgagtggctgggaaggacatactacaggtccaagtggtataatgattatgcagtatctgtgaaaagtcgaataaccatcaacccagacacatccaagaaccagttctccctgcagctgaactctgtgagtcccgaggacacggctgtgtactactgtgcaagaggtgcgggatctattgactactggggccagggaaccccggtcaccgtctcctca

SEQ ID NO: 5159 - DNA, 290 bp, Homo sapiens
  source 1..290: mol_type = other DNA
ccatctccggggacagtgtctctagcaacagtgctgcttggaactggatcaggcagtccccatcgagaggccttgagtggctgggaaggacatactacaggtccaggtggtatcatgattatgcagtatctgtgcaaagtcgaataaccatcaacccagacacatccaagaaccaggtctccctgcagctgaactctgtgactcccgaggacacggctgtgtattactgtgcaagaggcgcggggtcgattgactactggggccagggaaccctggtcaccgtctcctca

SEQ ID NO: 5160 - DNA, 274 bp, Homo sapiens
  source 1..274: mol_type = other DNA
cactgtctctggaggctccatcactagtgactactggagctggttccggcagcccccagggaagggaccggagtggattggctatatgtattacagtgggaacaccgactacaacccctccctcaagagtcgggtcaccatatcaatggacacgtccaagaatcaattctccctgaagctgacctctgtgaccgccgcagacacggccgtctattattgtgcgagacgggctggaacggagtggggccagggaaccctggtcaccgtctcctca

SEQ ID NO: 5161 - DNA, 274 bp, Homo sapiens
  source 1..274: mol_type = other DNA
cgctgtctctggtggctccatcactagtgactactggagctggttccggcagcccccagggaagggactggagtggattgcctatatctattacagtgggaacaccgactacaatccctccctcaggagtcgagccaccatatcaatagacacgtccaagaatcaattctccctgaagctgacctctgtgaccgccgcagacacggccgtctattattgtgcgagacgggctggtacggagtggggccagggaaccctggtcaccgtctcctca

SEQ ID NO: 5162 - DNA, 274 bp, Homo sapiens
  source 1..274: mol_type = other DNA
tactgtctctggaggctccatcactagtgactactggagctggttccggcagcccccagggaagggaccggagtggattggctatatgtattacagtgggaacaccgactacaacccctccctcaagagtcgggtcaccatatcaatggacacgtccaagaatcaattctccctgaagctgacctctgtgaccgccgcagacacggccgtctattattgtgcgagacgggctggaacggagtggggccagggaaccctggtcaccgtctcctca

SEQ ID NO: 5163 - DNA, 274 bp, Homo sapiens
  source 1..274: mol_type = other DNA
cgctgtctctggtggctccatcactagtgactactggagctggttccggcagcccccagggaagggactggagtggattggctatatctattacagtgggaataccgactacaatccctccctcaggagtcgagccaccatatcaatagacacgtccaagaatcaattctccctgaagctgacctctgtgaccgccgcagacacggccgtctattattgtgcgagacgggctggtacggagtggggccagggaaccctggtcaccgtctcctca

SEQ ID NO: 5164 - DNA, 274 bp, Homo sapiens
  source 1..274: mol_type = other DNA
cattgtctctggtgactccatcagtaattctcactggagctggatccggcagcccccagggaagggactggagtggattgggtatatctataacggtgggagcaccaactacaacccctccctcaagagtcgagtcaccatatcagtggacacgtccaagaaccagttctccctgaagctgagatctgtgaccgccgcagacacggccgtgtattactgtgcgagacgggccggaactgaatggggccagggaaccctggtcaccgtctcctca

SEQ ID NO: 5165 - DNA, 274 bp, Homo sapiens
  source 1..274: mol_type = other DNA
cattgtctctggtgactccatcagtaattctcactggagctgggtccggcagcccccagggaagggactggagtggattgggtatatctataacggtggaaacaccaactacaacccctccctcaagagtcgagtcaccatatcagtggacacgtccaagaaccagttctccctgaagctgagatctgtgaccgccgcagacacggccgtatattactgtgcgagacgggccggaactgaatggggccagggaaccctggtcaccgtctcctca

SEQ ID NO: 5166 - DNA, 274 bp, Homo sapiens
  source 1..274: mol_type = other DNA
cattgtctctggtgactccatcagtaattcccactggagctggatccggcagcccccagggaagggactggagtggattgcatatatctataacggtgggagcaccaactacaacccctccctcaagagtcgagtcaccatatcagtggacacgtccaagaaccagttctccctgaagctgagatctgtgaccgccgcagacacggccgtgtattactgtgcgagacgggccggaactgaatggggccagggaaccctggtcaccgtctcctca

SEQ ID NO: 5167 - DNA, 283 bp, Homo sapiens
  source 1..283: mol_type = other DNA
ttcagcctctggattcgactttagttactattggatgagttgggtccgccaggctccagggaaggggctggagtgggtggccaatataaaggcagatggaagcgccaaatactatgtggacgctgtgaagggccgattcaccatctccagagacaactccaagaacacactgtatctgcaaatggacagcctgagacccgaggacacggccctgtattactgtgcgagggataactggaacgaccgatactggggccagggaaccctggtcaccgtctcctca

SEQ ID NO: 5168 - DNA, 283 bp, Homo sapiens
  source 1..283: mol_type = other DNA
tgaagcctctggattcccctttagtagttattggatgagttgggtccgccaggctccagggaaggggctggagtgggtggccaatataaacgaagatggacgtcaaagatactatgtggacgctgtgaagggccgattcaccatctccagagacaacgccaagaactcactgtatctgcaaatgaacagcctgagagccgaggacacggctgtgtattactgtgcgagggataactggaacgacaggtactggggccagggaaccctagtcaccgtctcctca

SEQ ID NO: 5169 - DNA, 283 bp, Homo sapiens
  source 1..283: mol_type = other DNA
tgcagcctctggattcccctttagtagttattggatgagttgggtccgccaggctccagggaaggggctggagtgggtggccaatataaacgaagatggacgtcaaaaatactatgtggactctgtgaagggccgattcaccatctccagagacaacgccaagaactcactgtatctgcaaatgaacagcctgagagccgaggacacggctgtgtattactgtgcgagggataactggaacgacaggtactggggccagggaaccctggtcaccgtctcctca

SEQ ID NO: 5170 - DNA, 283 bp, Homo sapiens
  source 1..283: mol_type = other DNA
tgcagcctctggattcccctttagtagttattggatgagttgggtccgccaggctccagggaaggggctggagtgggtggccaatataaacgaagatggacgtcaaagatactatgtggactctgtgaagggccgattcaccatctccagagagaacgccaagaactcactgtatcttcaaatgagcagcctgagagccgaggacacggctgtatattactgtgcgagggataactggaacgacaggtactggggccaaggaaccctggtcaccgtctcctca

SEQ ID NO: 5171 - DNA, 283 bp, Homo sapiens
  source 1..283: mol_type = other DNA
tgcagcctctggattcccctttagtacttattggatgagttgggtccgccaggctccagggaaggggctggagtgggtggccaatataaacgaagatggacgtcaaagatactatgtggactctgtgaagggccggttcaccatctccagagagaacgccaagaactcattgtatcttcaaatgagcagcctgagagccgaggacacggctgtctattactgtgcgagggataactggaacgacaggtactggggccagggaaccctggtcaccgtctcctca

SEQ ID NO: 5172 - DNA, 304 bp, Homo sapiens
  source 1..304: mol_type = other DNA
tgtagtctctggattcaccttgagtgaccactacatggactgggtccgccaggctccagggaaggggctggagtgggttggccgtactagaaacaaagctaacagttacaccacagaatacgccgcgtccgtgaaaggcagattcaccatctcaagagatgattcaaagaactcactgtatctgcaaatgaacaccctgaaaaccgaggacacggccgtgtattactgtgctagacttcagtctgtggggcccagggccgaccttgactcctggggccagggaaccctggtcaccgtctcctca

SEQ ID NO: 5173 - DNA, 302 bp, Homo sapiens
  source 1..302: mol_type = other DNA
tagtctctggattcaccttgagtgaccactacatggactgggtccgccaggctccagggaaggggctggagtgggttggccgtactagaaacaaagctaacagttacaccacagaatacgccgcgtccgtgaaaggcagattcaccatctcaagagatgattcaaagaactcactgtatctgcaaatgaacaccctgaaaaccgaggacacggccgtgtattactgtgctagacttcagtctgtggggcccagggccgaccttgactcctggggccagggaaccctggtcaccgtctcctca

SEQ ID NO: 5174 - DNA, 274 bp, Homo sapiens
  source 1..274: mol_type = other DNA
tgcagcctctggattcaccttcagtagctactggatgcactgggtccgccaagctccagggaaggggctggtgtgggtctcacgtattaagagtgatgggagtatgacaaactacgcggactccgtgcagggccgattcaccatctccagagacaacaccaagaacacgctgtatctgcaaatgaacagtctgagagccgaggacacggctgtgtattactgtgcaagagtcgtaggggactggggccagggaaccctggtcaccgtctcctca

SEQ ID NO: 5175 - DNA, 274 bp, Homo sapiens
  source 1..274: mol_type = other DNA
tacagcctctggattcattttcactaactactggatgcactgggtccgccaagttccaggaaaggggttggtttgggtctcacatattagtcctgatgggcgtgccacaacctacgcggactccgtgaagggccgattcaccatctccagagacaacgccaagaacacgctgtatctgcaaatggacagtctgagagacgaagacacggctatatattactgtgcaagagttgttggggactggggccagggaaccctggtcaccgtctcctca

SEQ ID NO: 5176 - DNA, 289 bp, Homo sapiens
  source 1..289: mol_type = other DNA
tgcagcctctggattcacgtttggtaactattggatgagctgggtccgccaggctccagggagggggctggagtgggtggccaacataaaaagagacggaagtgagaaagactatgtggactctgtgaagggccgattcaccatctccagagacaacgccaagaactcactgtatctgcaaatgaacagcctgagagccgaggacacggccgtgtattactgtgcgagagatcctcaacatggggctcttgatatctggggcctagggacagtggtcaccgtctcttca

SEQ ID NO: 5177 - DNA, 289 bp, Homo sapiens
  source 1..289: mol_type = other DNA
tgcagcctctggaatcacctttagtacctcttggatgacctgggtccgccagtctccggggaaggggctggagtgggtggccataatgaacccagatggaagttcgatatcctatgtggactctgtgaagggccgattcaccatctccagagacaacgccaagaactcgctctatattcaaatgaacagcctgaggccagaggacacgggtctatattactgtgcgagagacccccagcacggtgctcttgatatatggggccaagggacaatggtcaccgtctcttca

SEQ ID NO: 5178 - DNA, 289 bp, Homo sapiens
  source 1..289: mol_type = other DNA
tgcagcctctggattcaccttcaatacctactggatgcactgggtccgccaagctccagggaaggggctaatgtgggtctcacgtattagtggtgatgggagtaggacaaactacgcggactccgtgaagggccgattcaccatctccagagacagcggcaggaacacggtgcatttacaaatgaacagtcttagagccgaggacacggctgtgtatttctgtacaagagatcgggctgatgttacttttgatatctggggccaagggacaatggtcaccgtctcttca

SEQ ID NO: 5179 - DNA, 289 bp, Homo sapiens
  source 1..289: mol_type = other DNA
tgcagcctctggattcaccttcgataactactggatgcactgggtccgccaagctccagggaaggggctggtgtggctctcccgtattaatggtgatgggcgaaggataacctacgcggactccgtgaggggccgattcaccatctccagagacagcgccaagaacacgctgtatctgcaaatgaccagtctgagagccgaggacacggctgtgtattactgtacaagagaccgcgctgatgtgacttttgatatctggggccaagggacaatggtcaccgtctcttca

SEQ ID NO: 5180 - DNA, 289 bp, Homo sapiens
  source 1..289: mol_type = other DNA
tgcagcctctggattcaccttcaataactactggatgcactgggtccgccaagctccagggaaggggctggtgtgggtctcccgtattaatggtgatgggagtagcacagcctacgcggactccgtgaagggccgattcaccatctccagagacaacgccaagaacacgctgtatctgcaaatgaccagtctgagagccgaggacacggctgtgtattactgtacaagagaccgtgctgatgtgacttttgatatctggggccaagggacaatggtcaccgtctcttca

SEQ ID NO: 5181 - DNA, 289 bp, Homo sapiens
  source 1..289: mol_type = other DNA
tgcagcctctggattcaccttcgataactactggattcactgggtccgccaagctccagggaaggggctggtgtgggtctcccgtatttatggtgatggaactcgaacaacctacgcggactccgtgaagggccgattcaccatctccagagatcgcgccaagaacaccctgtatctgcaaatgaccagtctgagagccgaggacacggctatatattactgtacaagagaccgcgctgatgtgacttttgatatctggggccaagggacaatggtcaccgtctcttca

SEQ ID NO: 5182 - DNA, 289 bp, Homo sapiens
  source 1..289: mol_type = other DNA
tgcagcctctgggttcaccttcgatacgtactggacacactgggtccgccaagttccagggaaggggctggtgtgggtctcccgtatttatagtgatgggagtagagcagtgtacgcggactccgtgaagggccgattcaccatctccagagacagcgccaagaacacggtgtatctgcaaatgaccagtctcagagtcgaagacacggctgtgtattactgtacaagagaccgcgctgatgtgacttttgatatctggggccaagggacaatggtcaccgtctcttca

SEQ ID NO: 5183 - DNA, 289 bp, Homo sapiens
  source 1..289: mol_type = other DNA
tgcagcctctgaattcaccctcgataactactggatgcactgggtccgccaagttccagggaaggggctggtgtgggtctcgcgtatttatggtgatgggagtagaataacctacgcggattccgtgaagggccgattcaccatctccagagacagagccaagaacacactgtatctgcaaatgaccagtctgagagccgaggacacggctgtgtattactgtacaagagaccgcgctgatgtgacttttgatatctggggccaagggacaatggtcaccgtctcttca

SEQ ID NO: 5184 - DNA, 289 bp, Homo sapiens
  source 1..289: mol_type = other DNA
tgcagcctctggattcagcttcgataattactggatccattgggtccgccaagctccagggaaggggctggtgtgggtctcccgtatttacggtgatgggaatagaccaacctacgcggactctgtgaagggccgattcaccatctccagaggcagcgccaggaacacgttctatttgcaaatgagcggtctgagagccgaggacacggctatttattattgtacaagagaccgcgctgatgtgacttttgatatctggggccaagggacactggtcatcgtctcttca

SEQ ID NO: 5185 - DNA, 289 bp, Homo sapiens
  source 1..289: mol_type = other DNA
tgcagcctctgggttcaccttcgatacgtactggacacactgggtccgccaagttccagggaaggggctggtgtgggtctcccgtatttttagtgatgggagtagagcattttacgcggactccgtgaagggccgattcaccatctccagagacagcgccaagaacacagtgtttctgcaaatgaccagtctcagagtcgaagacacggctgtgtattactgtacaagagaccgcgctgatgtgacttttgatatctggggccaagggacaatggtcaccgtctcttca

SEQ ID NO: 5186 - DNA, 289 bp, Homo sapiens
  source 1..289: mol_type = other DNA
tgcagcctctggattcaccttcgataactactggatgcactgggtccgccaagctccagggaaggggctggtgtgggtctcccgtatttatagtgatgggagtcgaacaacctacgcggactccgtgaagggccgattcaccatctccagagaccgcgccaagaacaccctgtatctgcaaatgaccagtctgagagccgaggacacggctgtgtattactgtacaagagaccgcgctgatgtgacttttgatatctggggccaagggacaatggtcaccgtctcttca

SEQ ID NO: 5187 - DNA, 289 bp, Homo sapiens
  source 1..289: mol_type = other DNA
tgcagcctctggattcaccttcgataactactggattcactgggtccgccaagctccagggaaggggctggtgtgggtctcccgtatttatggtgatggaactcgaacaacctacgcggactccgtgaagggccgattcaccatctccagagaccgcgccaagaacaccctgtatctgcaaatgaccagtctgagagccgaggacacggctatatattactgtacaagagaccgcgctgatgtgacttttgatatctggggccaagggacaatggtcaccgtctcttca

SEQ ID NO: 5188 - DNA, 289 bp, Homo sapiens
  source 1..289: mol_type = other DNA
tgcagcctctagattcacctttaataactactggatgcactgggtccgccaaactccagggaaggggctggtgtgggtctcccgtattagtggtgatgggagtagaacaacctacgcggactccgtgaagggccgattcaccatctccagagacaacgccaagaacacgctgtatctgcaaatgaccagtctgagagccgaggacacggctgtgtattactgtacaagagaccgtgctgatgtgacttttgatatctggggccaagggacaatggtcaccgtctcttca

SEQ ID NO: 5189 - DNA, 289 bp, Homo sapiens
  source 1..289: mol_type = other DNA
tgcagcctctggattcaccttcaatgactattggatacactgggtccgccaagctccagggaaggggctggtgtgggtctctcgcattagtaatgatgggagaaggacagcctacgcggactccgtgaagggccgattcaccatctccagagacaacgccaagagcacggtgtttctacaaatgaccagtctgagagccgaagacacggctgtttattactgtacaagagaccgtgctgatgtgacttttgatatctggggccaagggacaatggtcaccgtctctcca

SEQ ID NO: 5190 - DNA, 289 bp, Homo sapiens
  source 1..289: mol_type = other DNA
tgcagcctctggattcaccttcgataattactggatgcactgggtccgccaagctccagggaaggggctggtgtgggtctcccgtatttatggtgatggaactcgaacaacctacgcggactccgtgaagggccgattcaccatctccagagaccgcgccaagaacaccctgtatctgcaaatgaccagtctgagagccgacgacacggctgtgtattactgtacaagagaccgcgctgatgtgacttttgatatctggggccaagggacaatggtcaccgtctcttca

SEQ ID NO: 5191 - DNA, 274 bp, Homo sapiens
  source 1..274: mol_type = other DNA
cactgtcgctggtggctccatcagtagttactactggagctggatccggcagcccccagggaagggactggagtgggttgggtatatctcttacactgggggcaccaactacaacccctccctcaagagtcgagtcaccatatcaatagacgcgtccaagaaccagttctccctgagggtgagctatgtgaccgccgcagacacggccgtgtattattgtgcgagactgaacgggggctcctggggccagggaaccctggtcaccgtctcctca

SEQ ID NO: 5192 - DNA, 274 bp, Homo sapiens
  source 1..274: mol_type = other DNA
cactgtctctggtggctccatcagtagttactactggagctggattcggcagcccccagggaagggactggagtggattggatatatctattacagtgggagcaccaactacaacccctccctcaagagtcgagtcaccatatcaatagacgcgtctaagacccagttctccctgaggctgagctctgtcaccgccgcagacacggccgtgtattactgtgcgagacttaacgggggttcctggggccagggaacccgggtcaccgtctcctca

SEQ ID NO: 5193 - DNA, 274 bp, Homo sapiens
  source 1..274: mol_type = other DNA
cactgtctctggtggctccatgagtggttactactggagctggatccggcagcccccagggaagggactggagtggattgggtatatgtcttacagtgggaacaccaactacaacccctccctcaagagtcgagtcaccatatcagtagacacgtccaggaaccggttctccctgaagctgagctctgtgaccgccgcagacacggccgtatattactgtgcgcgactgaacgggggctcctggggccagggaaccctggtcaccgtctcctca

SEQ ID NO: 5194 - DNA, 274 bp, Homo sapiens
  source 1..274: mol_type = other DNA
cactgtcgctggtggctccatcagtagttactactggagctggatccggcagcccccagggaagggactggagtgggttgggtatatctcttacacggggggcagcaactacaacccctccctcaagagtcgagtcaccatatcaatagacgcgtccaagaaccagttctccctgaagctgagctctgtgaccgccgcagacacggccgtgtattattgtgcgagactaaacgggggctcctggggccagggaaccctggtcaccgtctcctca

SEQ ID NO: 5195 - DNA, 274 bp, Homo sapiens
  source 1..274: mol_type = other DNA
cactgtctctggtggctccatgagtggttactactggagctggatccggcagcccccagggaagggactggagtggattgggtatatctctgacagtgggaacaccaactataatccctccctcaagagtcgagtcaccatatcaatagacacgtccaggaagcggttctccctgaagctgagctctgtgaccgccgcagacacggccgtatattactgtgcgcgactgaacgggggctcctggggccagggaaccctggtcaccgtctcctca

SEQ ID NO: 5196 - DNA, 283 bp, Homo sapiens
  source 1..283: mol_type = other DNA
tgcggcctctggcttctcttttagtaactattggatgacctgggtccgccagggtccagcgaaggggctgcaatgggtggccagcataaataaggatggaggggagaggtaccatgtggcctctgtgaggggccgattcaccatctccagagacaacgcccagaactcattgtttctccaaatgaacagcctgacagtcgacgacacggccgtgtattactgtgcgcgagatttggtgcctgacccctactggggccggggagccctggtcaccgtctcctcc

SEQ ID NO: 5197 - DNA, 283 bp, Homo sapiens
  source 1..283: mol_type = other DNA
tgcagcctctggattcacttttagtagatattgcatgacctgggtccgccaggctccagggaaggggctggagtgggtggccaacatagatgaacatggaagtcagatatactatctggactctgtgaggggccgattcaccatctccagagacaacgccaggaacttcctgtatctgcggatgagcagcctgagcgacgaggacacggccgtctattactgtgcgagagacttagtgcccgatccctactggggccagggaaccctggtcaccgtctcctcg

SEQ ID NO: 5198 - DNA, 283 bp, Homo sapiens
  source 1..283: mol_type = other DNA
tgtagcctctggattcaccttcagtagatattacatgacctgggtccgccaggctccagggaaggggctggagtgggtggccaacatacacgaagatggaaatcagaaatactatgtggactctgtgaagggccgattcaccatctccagagacaacgccaagaactcactgtctctgcagatgaacaacctgagggacgaggacacggccgtctattactgtgcgagggacttagtacccgatccctactggggccggggaaccctggtcaccgtctcctca

SEQ ID NO: 5199 - DNA, 283 bp, Homo sapiens
  source 1..283: mol_type = other DNA
tgcagcctctggattcacttttagtagatattgcatgacctgggtccgccaggctccagggaaggggctggagtgggtggccaacatagatgaacatggaagtcagatatactatctggactctgtgaggggccgattcatcatctccagagacaacgccaggaacttcctgtatctgcggatgagcagcctgagcgacgaggacacggccgtctattactgtgcgagagacttagtgcccgatccctactggggccagggaaccctggtcaccgtctcctcg

SEQ ID NO: 5200 - DNA, 283 bp, Homo sapiens
  source 1..283: mol_type = other DNA
tgcagcctctggattcacttttagtagatattgcatgaccggggtccgccaggctccagggaaggggctggagtgggtggccaacatagatgaacatggaagtcagatatactatctggactctgtgaggggccgattcaccatctccagagacaacgccaggaacttcctgtatctgcggatgagcagcctgagcgacgaggacacggccgtctattactgtgcgagagacttagtgcccgatccctactggggccagggaaccctggtcaccgtctcctcg

SEQ ID NO: 5201 - DNA, 283 bp, Homo sapiens
  source 1..283: mol_type = other DNA
tgtagcctctggattcaccttcagtagatattacatgacctgggtccgccaggctccagggaaggggctagagtgggtggccaacatacacgaagatggaaatcagaaatactatgtggactctgtgaagggccgattcaccatctccagagacaacgccaagaactcactgtctctgcagatgaacaacctgagggacgaggacacggccgtctattactgtgcgagggacttagtacccgatccctactggggccggggaaccctggtcaccgtctcctca

SEQ ID NO: 5202 - DNA, 283 bp, Homo sapiens
  source 1..283: mol_type = other DNA
tgtagcctctggattcaccttcagtagatattacatgacctgggtccgccaggctccagggaaggggctggagtgggtggccaacatacacgaagatggaaatcagaaatactatgtggactctgtgaagggccgattcaccatctccagagacaacgccaagaactcactgtctctgcagatgaacaacctgagggacgaggacacggccgtctattactgtgcgagggacttagtccccgatccctactggggccggggaaccctggtcaccgtctcctca

SEQ ID NO: 5203 - DNA, 289 bp, Homo sapiens
  source 1..289: mol_type = other DNA
cactgtctctggtggctccctcactagttactactggggctggatccggcagcccccagggaaggggctagagtggattgggtatatctattacactgggaccaccaactacaacccctccctcgagagtcgagtcaccacatcagtagacacgtccaagaaccagttctccctgaagctgaactctgtgaccgcttcggacacggccgtgtattactgtgcgagaggtagagtggtaactcgtgactttgactactggggccagggaaccctggtcaccgtctcctca

SEQ ID NO: 5204 - DNA, 289 bp, Homo sapiens
  source 1..289: mol_type = other DNA
cactgtctcaggtggctccctcactagttactactggagttggatccggcagcccccagggaagggactggagtggattgggtatatctattacactgggaccaccaactacaacccctccctcgagagtcgagtcaccacatcagtagacacgtccaacaaccagttctccctgaagctgaactctgtgaccgcttcggacacggccgtgtattactgtgcgagaggtagagtggtaactcgtgactttgactactggggccagggaaccctggtcaccgtctcctca

SEQ ID NO: 5205 - DNA, 289 bp, Homo sapiens
  source 1..289: mol_type = other DNA
cactctctctggtggctccatcagagattactactggagctggatccggcagcccccagggcgcagactagagtggattggctatgtctatgacagtgggatcaccaactacaacccctccctcaagagtcgagtcaccatatcagcacatacgtccatgaaccagttctccctgaagttggactctgtgagtgctgcggacacggccgtctattattgtgcgagaggaagggtggtcacgagggattttgactattggggccagggagccctggtcaccgtctcctca

SEQ ID NO: 5206 - DNA, 289 bp, Homo sapiens; identical to SEQ ID NO: 5203
  source 1..289: mol_type = other DNA

SEQ ID NO: 5207 - DNA, 271 bp, Homo sapiens
  source 1..271: mol_type = other DNA
tgcagcctctggattcacctttaggaattttgatatgaactgggtccgccaggctccagggaaggggctagagtggatctcacgtattagtggtagtggtggtaacacatactacgcagactccgtgaagggccggttcaccatctccagagacaattccaagaacacgctgtatttgcaaatgaacagcctgcgagccgaagacacggccgtatatttctgtgcgggactctgggaatggggccagggaaccccggtcaccgtctcctca

SEQ ID NO: 5208 - DNA, 271 bp, Homo sapiens
  source 1..271: mol_type = other DNA
tgcagcctctggattcacctttaggaattttgatatgaactgggtccgccaggctccagggaaggggctagagtggatctcacgtattagtggtagtggtggtaacacatactacgcagactccgtgaagggccggttcaccatctccagagacaattacaagaacacgctgtatttgcaaatgaacagcctgcgagccgaagacacggccgtatatttctgtgcgggactctgggaatggggccagggaaccccggtcaccgtctcctca

SEQ ID NO: 5209 - DNA, 271 bp, Homo sapiens
  source 1..271: mol_type = other DNA
tgcagcctctggaatcacctttaccacctatgacatgagctgggtccgccaggttccaggaaaggggctggagtgggtctcaagtattcgtggtggtgatggtagcacatactacgcagactccgtggagggccgcttcaccatctccagagacacttccaagcacacggtatatctgcaaatgaatagcctgagagtcgaggacacggccttatatttctgtgcgggactttgggagtggggccagggaaccctggtcaccgtctcctca

SEQ ID NO: 5210 - DNA, 271 bp, Homo sapiens
  source 1..271: mol_type = other DNA
tgtagtctctggaatcacttttagcaactatgacatgaactgggtccgccaggttccaggaaaggggctggagtgggtctcacgtattcgtggcggtgatggtcgcgcgtactacgcagactccgtgaagggccgcttcaccatctccagagacacttccaaggacacggtgtatctgcaaatgaatagcctgagaatcgaggactcggccgtatatttctgtgcgggactttgggagtggggccagggaaccgtggtcaccgtctcctca

SEQ ID NO: 5211 - DNA, 271 bp, Homo sapiens
  source 1..271: mol_type = other DNA
tgtagcctctggaatcacctttagcaactatgacatgaactgggtccgccaggttccaggaaaggggctggagtgggtctcacgtattcgtggtggtgatggtcgcgcgtactacgcagactccgtgaagggccgcttcaccatctccagagacacttccaaggacacgatatatctgctaatggatagcctgagaaccgaggacacggccgtatatttctgtgcgggactttgggagtggggccagggaaccctggtcaccgtctcctca

SEQ ID NO: 5212 - DNA, 271 bp, Homo sapiens
  source 1..271: mol_type = other DNA
tgcagcctctggaatcacgtttagcacctatgatgtgcactgggtccgccaggttccaggaaaggggctggagtgggtctcaattatttttggtggcgatggtcgcgcatactacgcagactccgtgaagggccggttctccatctccagagacgcttccaggcacacggtgtatctgcaaatggatagcctgagagccgaggacacggccgtatatttctgtgcgggactttgggagtggggccagggaaccctggtcaccgtctcctca

SEQ ID NO: 5213 - DNA, 271 bp, Homo sapiens
  source 1..271: mol_type = other DNA
cgcaacctctggattcacgtttagtttctatgacatgaattgggcccgccaggctccaggtaggggactggagtgggtctcacgcatcaatggtcctggtgataggacatattacacagacgccgtgaagggccggttcaccatctccagagacaacgccaagaacacgctctatctggaaatgaacagcctgagagtcgaggacacggccgtatattactgtgcggggctctgggagtggggccaaggagttctggtcaccgtctcctca

SEQ ID NO: 5214 - DNA, 271 bp, Homo sapiens
  source 1..271: mol_type = other DNA
cacaacctctggattcacgtttagtttctatgacatgaattgggcccgccaggctccaggtgggggactggagtgggtctcacgcatcaatggtcctggtgacaggacatactacacagactccgtgaggggccggttcaccatctccagagacaacgccaagaacgccctctatttggaaatgaacagcctgagagtcgaggacacggccgtgtattactgtgcgggactctgggagtggggccaaggaattctggtcaccgtctcccca

SEQ ID NO: 5215 - DNA, 271 bp, Homo sapiens
  source 1..271: mol_type = other DNA
tgtagcctctggaatcacctttagcaactatgacatgagctgggtccgccaggttccaggaaaggggctggagtgggtctcaagtattcgtggtggtgatggtcgcgcgtactacgcagactccgtgaagggccgcttcaccatctccagagacacttccaaggacacggtgtatctgcaaatgaatagcctgagaaccgaggacacggccgtatatttctgtgcgggactttgggagtggggccagggaaccctggtcaccgtctcctca

SEQ ID NO: 5216 - DNA, 271 bp, Homo sapiens
  source 1..271: mol_type = other DNA
tgcagcctctggaatcacctttaccacctatgacatgagctgggtccgccaggttccaggaaaggggctggagtgggtctcaactattcgtggtggtgatggtagcacatactacgcagactccgtggagggccgcttcaccatctccagagacacttccaagcacacggtatatctgcaaatgaatagcctgagagtcgaggacacggccttatatttctgtgcgggactttgggagtggggccagggaaccctggtcaccgtctcctca

SEQ ID NO: 5217 - DNA, 271 bp, Homo sapiens; identical to SEQ ID NO: 5210
  source 1..271: mol_type = other DNA

SEQ ID NO: 5218 - DNA, 271 bp, Homo sapiens
  source 1..271: mol_type = other DNA
tgtagcctctggaatcacctttagcaactatgacatgagctgggtccgccaggttccaggaaaggggctggagtgggtctcaagcattcgtggtggtgatggtcgcgcgtactacgcagactccgtgaagggccgcttcaccatctccagagacacttccaaggacacggtgtatctgcaaatgaatagcctgagaaccgaggacacggccgtatatttctgtgcgggactttgggagtggggccagggaaccctggtcaccgtctcctca

SEQ ID NO: 5219 - DNA, 271 bp, Homo sapiens
  source 1..271: mol_type = other DNA
tgcagcctctggaatcacgtttagcacctatgatgtgcactgggtccgccaggttccaggaaaggggctggagtgggtctcaattatttttggtggcgatggtcgcgcatactacgcagactccgtgaagggccggttctccatctccagagacgcttccaggcacacggtgtatctgcaaatggatagcctgagagccgaggacacggccgtatatttctgtgcgggactttgggagtggggccagggaaccctggtcatcgtctcctca

SEQ ID NO: 5220 - DNA, 271 bp, Homo sapiens
  source 1..271: mol_type = other DNA
tgcagcctctggattcacctttaggaactatgatatgaactgggtccgccaggctccagggaaggggctggagtgggtctcacgtattagtggtagtggaggttacacatactacgcagagtccgtgaagggccggttcaccatctccagagacaattccaaggacacgctgtatttgcaaatgaacagcctgcgagccgaagacacggccgtatattactgtgcgggactctgggagtggggccagggaaccctggtcaccgtctcctca

SEQ ID NO: 5221 - DNA, 280 bp, Homo sapiens
  source 1..280: mol_type = other DNA
tgcggcctctggattcaccttcagtagttatagtttccactgggtccgccaggctccagggaaggggctggaatggctttcatatatcagcagtagtggtgccaccaagtactacgcggactctgtgatgggccgattcaccatctccagagacaacgccgacaatttactgtatctgcaaatggacagcctgagagccgaggactcggctctttattactgtgcgagggaacgggcgttcgactactggggccagggaaccctggtcaccgtcccctca

SEQ ID NO: 5222 - DNA, 280 bp, Homo sapiens
  source 1..280: mol_type = other DNA
tgcagcctctggattcacgttcagtagttataacatgaactgggtccgccaggctccagggaaggggctggagtgggtttcatacattagtagtagtagtattaccatatactacgcagactctgtgaagggccgattcaccatctccagagacaacgccaagaactcactgtatctgcaaatgaacagcctgagagccgaggacacggctgtgtattactgtgcgagagagagggcttttgactactggggccagggaaccctggtcaccgtctcctca

SEQ ID NO: 5223 - DNA, 301 bp, Homo sapiens
  source 1..301: mol_type = other DNA
tgcagcctctggattcaccttcagtagctcggacatgcactgggtccgccaagctacaggaaaaggtctggagtgggtctcagctattggtactattggtgacacatactatccagcctccgtgaagggccgattcaccatctccagagaaaatgccaagaactccttgtatcttcaaatgaacagcctgagagccggggacacggctgtgtattactgtgcaagagagggcccaagcagcagctggaatgactggtacttcgatctctggggccgtggcaccctggtcactgtctcctca

SEQ ID NO: 5224 - DNA, 301 bp, Homo sapiens
  source 1..301: mol_type = other DNA
tgcagcctctggattcaccttcagtagctccgaaatgcactgggtccgccaaactacaggaaaaggtctggagtgggtctcagctattggtactattggtgacacattctatgcagactccgtgaagggccgattcaccatctccagagaagatgccaagaactccttgtatcttcaaatgaacagcctgagagccggggacacggctctgtattactgtgcaagagaggggcctagcagcagctggaacgactggtacttcgatctctggggccgtggcaccctggtcactgtctcctca

SEQ ID NO: 5225 - DNA, 301 bp, Homo sapiens
  source 1..301: mol_type = other DNA
tgcagcctctggattcaccttcagtagctccgacatgcactgggtccgccaagctacaggaaaaggtctggagtgggtctcagctattggtgctgctggtgacacatactatccaacctccgtgaagggccgattcaccatctccagagaaaatgccaagaactccttgtatcttcaaatgagcagcctgagagccgaggacacggctgtctattactgtgcaagagagggcccaagcagcagctggaatgactggtacttcgatctctggggccgtggcaccctggtcactgtctcctca

SEQ ID NO: 5226 - DNA, 289 bp, Homo sapiens
  source 1..289: mol_type = other DNA
tgcagcctctggattcaccttcagtagttattctatgcactgggtccgccaggctcctgggaagggactacaatctgtttcagctattaattttaatgggggtgtcacatattatgcaaactttgtggagggcagattcaccatctccagagacaattccaagaacacgctgtatcttcaaatgggcggcctgagagttgaggacacggctgtctattactgtgcgagagaggggactcctggaaccaatgactactggggccagggaaccctggtcaccgtctcctca

SEQ ID NO: 5227 - DNA, 289 bp, Homo sapiens
  source 1..289: mol_type = other DNA
tgcagcctctggattcaccttcagtaactatcctatgcactgggtccgccaggctccagggaagggactggaatatgtttcagctattagtgaaaatgggggtaccacgtattatgcaaactctgtgaagggcagattcaccatctccagagacaactccgagaacacgttgtatcttcaaatgggcagcctgagaactgaggacatggctctgtattactgtgcgagagaagggacccctgggaccaatgactactggggccagggaaccctggtcaccgtctcctca

SEQ ID NO: 5228 - DNA, 286 bp, Homo sapiens
  source 1..286: mol_type = other DNA
tgcagcctctggattcacctttaacacctatgccatggcctgggtccgccaggctccagggaaggggctggagtgggtctctactattggtcatagtggtcgtgacacatactacgcagactccgtgaagggccggttcaccatctccagagacaattccaagaacaccctgtttctgcaaatgaacagcctgagagccgaggacacggccgtatatttttgtacgaaggccggcagcagctggtgcgactactggggccagggaaccctggtcaccgtctcctca

SEQ ID NO: 5229 - DNA, 283 bp, Homo sapiens
  source 1..283: mol_type = other DNA
tgcagcctctggattcacctttagcaccaatgccatgggctgggtccgccaggctccagggaggggtctggagtgggtctcagctactagtcttagtggcaccccatactacgcagactccgtgaggggccggttcaccatctccagagacaattccgagagcaccctgtttctgcaaatgaacagcctgagagccgaggacacggccatatactactgtacgaaggccggcagcagctggtgtgactactggggccagggaaccctggtcaccgtctcctca

SEQ ID NO: 5230 - DNA, 286 bp, Homo sapiens; identical to SEQ ID NO: 5228
  source 1..286: mol_type = other DNA

SEQ ID NO: 5231 - DNA, 292 bp, Homo sapiens
  source 1..292: mol_type = other DNA
tgcagcctctggattcacctttattagctattggttgagctgggtccgccaggctccagggaaggggctggagtgggtggccaacataaagcaagatggaagtgtgaagtactatgtggactctgtgaagggccgattcaccatctccagagacaacgccaagaactcactgtatctgcaaatgaacaacctgagagccgaggacacggccgtctattactgtgcgagaatcgggtatagcagctcggggattgactactggggccagggcaccctggttaccgtctcctca

SEQ ID NO: 5232 - DNA, 292 bp, Homo sapiens; identical to SEQ ID NO: 5231
  source 1..292: mol_type = other DNA

SEQ ID NO: 5233 - DNA, 292 bp, Homo sapiens
  source 1..292: mol_type = other DNA
tgcagcctctggattcccctttaatcactattggatgagctgggtccgccaggctccagggaaggggctggagtgggtggccaacataaaggaggatggaggtaaagaatactttgtggactctctgaagggccgattcaccatgtctagagacaacgccaagaactcactgtatctgcaaatgaacagtctgagagccgaagacacggctatgtattactgtgcgagaataggatatagtagctcggggattgactactggggccagggaaccctggtcaccgtctcctca

SEQ ID NO: 5234 - DNA, 292 bp, Homo sapiens
  source 1..292: mol_type = other DNA
tgcagcctctggattcccctttaatcactattggatgagctgggtccgccaggctccagggaaggggctggagtgggtggccaacataaaggaggatggaggtaaagaatattttgtggactctctgaagggccgattcaccgtgtctagagacaacgccaagaacttactgtttctgcaaatgaacagtctgagagccgaagacacggctatgtatttctgtgcgagaataggatatagtagttcggggattgactactggggccagggaaccctggtcaccgtctcctca

SEQ ID NO: 5235 - DNA, 292 bp, Homo sapiens
  source 1..292: mol_type = other DNA
tgcagcctctggattcatttttattagttattggttgagctgggtccgccaggctccagggaaggggctggagtgggtggccaacataaagcaagatggaagtgtgaagtactatgtggactctgtgaagggccgattcaccatctccagagacaacgccaagaactcactgtatctgcaaatgaacaacctgagagccgaggacacggccgtctattactgtgcgagaatcgggtatagcagctcggggattgactactggggccagggcaccctggttaccgtctcctca

SEQ ID NO: 5236 - DNA, 283 bp, Homo sapiens
  source 1..283: mol_type = other DNA
tgaagcctctggattcaccctgagtggttattggattagttgggtccgccaggctccagggaaggggctggagtgggtggccaacataaaccaagatggaagtcagaaacactatttggactctgtgaagggccgattcaccatctccagagacaacgccaaaaactctgtgtatttgcagatgaacagcctgagaggcgaggacacggccatatatcactgtgcaagaggacatttgtggcttgagaactggggccagggaaccctggtcaccgtctcctca

SEQ ID NO: 5237 - DNA, 283 bp, Homo sapiens
  source 1..283: mol_type = other DNA
tagaggttctggactcaccttaagctctttttggatgacctgggtccgccaggctccagggaaggggctggagtgggtggccaacataaacccagatggaagtgagaaatactctgtggactctatgaagggccgattcaccatctccagagacaatgccaagaactcactgtatttgcaaatgaacagcctgagagccgaggacacggccgtgtattcctgtgccagaggtcatctgtggctggagaattggggccagggaaccctggtcaccgtctcctca

SEQ ID NO: 5238 - DNA, 283 bp, Homo sapiens
  source 1..283: mol_type = other DNA
cgcagtctctggactcacctttcgaaacttttggatgacctgggtccgccaggctccagggaaggggctggagtgggtggccaccataaagggggatgaaagtgagaagtactatgtggactctgtgaggggccgattcaccatctccagagacaacgccgacaactctctgtatctgcaaatgaacggcctgagagtcgaggacacggccgtctattattgtgcgagaggacatttgtggttggagaactggggcccgggaaccctggtcaccgtctcctca

SEQ ID NO: 5239 - DNA, 283 bp, Homo sapiens
  source 1..283: mol_type = other DNA
tgcagcctctggaatcacattgagtaacttttggatgagctgggtccgccaggctccaggaaaggggctggagtgggtggccttctcgaatcaacatggaactgaggcatactacgtggactctgtgaagggccgattcaccatctccagagacaacgccaagaactcactgtatctgcaaatgaatagcctgagagccgaggacacggctgtctatcgatgtgcgcgagggcacctatggttagagaactggggccagggaaccctggtcaccgtctcctca

SEQ ID NO: 5240 - DNA, 283 bp, Homo sapiens
  source 1..283: mol_type = other DNA
tgcagtgtctggattaaccctgagtaatttttggatgagttgggtccgccaggctccagggaaggggctggagtgggtggccaccataaaggaagatggaagtaagaaatactatgtggactctgtgaagggccgattcaccatctccagagacaacgccgagaactcagtgtatctgcaaatgaacagcctgagagtcgacgacacggctgcgtattcttgtgcgagaggtcatctttggcttgagaattggggccagggaaccctagtcaccgtctcctca

SEQ ID NO: 5241 - DNA, 283 bp, Homo sapiens
  source 1..283: mol_type = other DNA
tgcagcctctggaatctcattgagtaacttttggatgagctgggtccgccaggctccaggggaggggctggagtgggtggccttctcgaaccagcatggaagtgaggcatactatgtggactctgtgaagggccgattcaccatctccagagacaacgacaagaactcactgtatctgcaaatgaacagcctgcgagccgaggacacggctgtctatcgatgtgcgcgagggcacctttggttagaaaactggggccagggaaccctcgtcaccgtctcctca

SEQ ID NO: 5242 - DNA, 283 bp, Homo sapiens
  source 1..283: mol_type = other DNA
tgcagcctctggattcacccttggtaactctggcatgacctgggtccgccaggctccagggaaggggctggagtggctctcatctattagtcgtactggtggtgacacatactacgcagactccgtaaagggccgcttcaccatctccagagacagctccaagaacacgctgtatctgcagatgaacagcctgagagtcgaggacacggccatatattactgtgcgaaagaaacgcggcccaatgactactggggccagggaaccctggtcaccgtcacctca

SEQ ID NO: 5243 - DNA, 283 bp, Homo sapiens
  source 1..283: mol_type = other DNA
tgcaacctctggattcaccttcagcaactctgccatgagctgggtccgccaggctccagggaaggggctggagtgggtctcttctattagtattagtggttataagacatactacgcagactccgtgaagggccggttcaccatctccagagacaattccaagaacatggtgtatctgcaaatgaacagactgacagccgacgacacggccgtatattattgtgcgaaagagacacgacccaatgactactggggccagggaaccctggtcaccgtctcctca

SEQ ID NO: 5244 - DNA, 283 bp, Homo sapiens
  source 1..283: mol_type = other DNA
tgcaacctctggattcaccttcagcaactctgccatgagctgggtccgccaggctccagggaaggggctggagtgggtctcttctattagtattagtggttataagacatactacgcagactccgtgaggggccggttcgccatctccagagacaattccaagaacatggtgtatctgcaaatgaacagcctgacagccgacgacacggccgtgtattattgtgcgaaagagacacgacccaatgactactggggccagggaaccctggtcaccgtctcctca

SEQ ID NO: 5245 - DNA, 283 bp, Homo sapiens
  source 1..283: mol_type = other DNA
tgcaacctctggattcaccttcagcaactctgccatgagctgggtccgccaggctccagggaaggggctggagtgggtctcttctattagtattagtggttataagacatactacgcagactacgtgaggggccggttcgccatctccagagacaattccaagaacatggtgtatctgcaaatgaacagcctgacagccgacgacacggccgtgtattattgtgcgaaagagacacgacccaatgactactggggccagggaaccctggtcaccgtctcctca

SEQ ID NO: 5246 - DNA, 283 bp, Homo sapiens
  source 1..283: mol_type = other DNA
tgcaacctctggattcaccttcagcaacgctgccatgagctgggtccgccaggctccagggaaggggctggagtgggtctcttctattagtattagtggttataagacatactatgcagactccgtgaagggccggttcaccatctccagagacaattccaagaacatggtgtatctgcaaatgaacagactgacagccgacgacacggccgtatattattgtgcgaaagagacacgacccaatgactactggggccagggaaccctggtcaccgtctcctca

SEQ ID NO: 5247 - DNA, 283 bp, Homo sapiens
  source 1..283: mol_type = other DNA
tgaagtctctggattcacctttagcacctctgccatgacctgggtccgccaggctccagggaaggggctggagtgggtctcctctattgatatcggtggggacaacacactctacgcagactccgtgcagggccggttcaccatctccagagacaattccaagaacacactgtatctgcaaatgcacaacgtgagagccgaggacacggccctatattattgtgcgaaggaaacacgaccgaatgactactggggccagggaacactggtcaccgtctcctca

SEQ ID NO: 5248 - DNA, 292 bp, Homo sapiens
  source 1..292: mol_type = other DNA
cactgtctctggtgaccccgtcagcagcgatttctggacttggatccggcagcccccagggaagggactggagtggattggatttatccgttacagtgggagaaccgagtacaatccctccctcaagagtcgcgtctccatttcaattgacacgtccaagaagcagttctccctgaggctgacctctgtgaccgtttcggacacggcccaatattactgtgcgagacttttggatgttagtggctggccatttgactactggggccagggaaccctggtcatcgtctcctca

SEQ ID NO: 5249 - DNA, 292 bp, Homo sapiens
  source 1..292: mol_type = other DNA
cactgtctctagtgactttatcaatagtgacttctggacctggatccggcaggccccagggaagcgaccggagtgggtgggatatatccgtcacagtggaagaaccgaatacaacccctccctcaagagtcgagtcaccatagcaatagacaagtccaagagccagttctccctgaaattgagctctgtgaccgctgcggacacggccgtatattactgtgcgagactattggatgtcagtggctggccctttgactactggggccggggaaccctggtcaccgtctcctca

SEQ ID NO: 5250 - DNA, 298 bp, Homo sapiens
  source 1..298: mol_type = other DNA
tgcagcctctggattcaccttcagtagtcatagcatgaactgggtccgccaggctccagggaaggggctggagtgggtttcatacattagtagtagtagtagtaccacatactacgcagactctgtgaagggccgattcaccatctccagagacaacgccaagaactcactgtatctgcaaatgaacagcctgagagccgaagacacggctgtgtattactgtgcgagagaccagacggggtatagcagctcgtcttcggactactggggccagggaaccctggtcaccgtctcctca

SEQ ID NO: 5251 - DNA, 298 bp, Homo sapiens
  source 1..298: mol_type = other DNA
tgcagcctctggattcaccctcagtggttatagcatgaactgggtccgccaggctccagggcagggactggagtggatttcatatattagtagtagtggtggaaccacatactacgcagactctgtgaagggccgattcaccatctccagagacaacgccaacaacttcctgtatctgcaattggccagcctgagagccgaggacacggctgtatattactgtgcgcgagatcagaccggatatagcagcagctcttcagactactggggccagggaaccctagtcaccgtctcctca

SEQ ID NO: 5252 - DNA, 298 bp, Homo sapiens
  source 1..298: mol_type = other DNA
tgcagcctctggatttaccttcagtagccatagcatgaactgggtccgccaggctccagggaaggggctggagtgggtttcatacattagtagtagtagtagtaccacatactacgcagactctgtgaagggccgattcaccatctccagagacaacgccaagaactcactgaatctgcaaatgaacagcctgagagccgaagacacggctgtgtattactgtgcgagagaccagacggggtatagcagctcgtcttcggactactggggccagggaaccctggtcaccgtctcctca

SEQ ID NO: 5253 - DNA, 298 bp, Homo sapiens
  source 1..298: mol_type = other DNA
tgcagcctctggattcaccttcagtagtcatagcatgaactgggtccgccaggctccagggaaggggctggagtgggtttcctacattagtagtagtagtagtaccacatactacgcagactctgtgaagggccgattcaccatctccagagacaacgccaagaactcactgtatctgcaaatgaacagcctgagagccgaagacacggctgtctattactgtgcgagagaccagacggggtatagcagctcgtcttcggactactggggccagggaaccctggtcaccgtctcctca

SEQ ID NO: 5254 - DNA, 292 bp, Homo sapiens
  source 1..292: mol_type = other DNA
tgcagcctctggattcacctttaatagttattggatgacctgggtccgccaggctccagggaaggggctggagtgggtggccaacataaagcaagatggaagtgagaaatactatgtggactctgtgaagggccgattcaccatttccagagacaatgccaagaactcactgtatctgcaattgaacagcctgagagccgaggacacggccgtgtattactgtgcgagagatccttttagcagctcgggggggggctactggggccagggaaccctggtcaccgtctcgtca

SEQ ID NO: 5255 - DNA, 292 bp, Homo sapiens
  source 1..292: mol_type = other DNA
tgcagcctctggattcacctttaatagttattggatgacctgggtccgccaggctccagggaaggggctggagtgggtggccaacataaagcaagatggaagtgagaaatactatgtggactctgtgaagggccgattcaccatttccagagacaatgccaagaactcactgtatctgcaattgaacagcctgagagccgaggacatggccgtgtattactgtgcgagagatccttttagcagctcgggggggggctactggggccagggaaccctggtcaccgtctcgtca

SEQ ID NO: 5256 - DNA, 292 bp, Homo sapiens
  source 1..292: mol_type = other DNA
tgcagcctctggcctcaccatcaataattattggatgacctgggtccgccaggctccagggaaggggctggagtgggtggccaatataaaggaagatggaagtgtgaagtactatgtggactctgtgaagggccgattcaccgtctccagagacaacgccaagaactcaatttatctgcaaatgaacagcctgagaggcgaggacacggctgtttattactgtgcgagagacccctttagtagcagtggtggtgggtactggggccagggaaccctggtcatcgtctcctca

SEQ ID NO: 5257 - DNA, 292 bp, Homo sapiens
  source 1..292: mol_type = other DNA
tgcagcctctggattcacctttaataactattggatgacctgggtccgccaggctccagggaaggggctggagtgggtggccaacataaagcaagatggaagtgagaaatactatgtggactctgtgaagggccgattcaccatctccagagacaacgccaagaactcattgtatctgcaattgaacagcctgagagccgaggacacggccgtgtattactgtgcgagagatccttttagcagctcgggggggggctactggggccagggaaccctggtcaccgtctcgtca

SEQ ID NO: 5258 - DNA, 298 bp, Homo sapiens
  source 1..298: mol_type = other DNA
tgtagcctctggattcaccttcagtaacatctggatgagctgggtccgccaggctccagggaaggggctggagtgggttgggcgtattaaaaccagaaatggtggtggggcaacagagtacgctgcacccgtgaaaggcagattcaccatctcaagagatgattctgcaaacacgctgtatctgcaaatgaacagcctgaaaaccgaggacacagccgtgtattactgtaccgcactctggtattactctgagagtagtggtcactggggccagggaaccctggtcaccgtctcctca

SEQ ID NO: 5259 - DNA, 298 bp, Homo sapiens
  source 1..298: mol_type = other DNA
tgcaacctctggattctatttccatgaattctggatgagctgggtccgccaggctccagggaaggggctggagtggattggccggattaaaagcagatctgacggtgagacaatagactacgccgcacccgtgaaaggcagattcaccatctcaagagatgattcaaagaccacactgtatctgcaaatgaacagcctcaaaagcgaggacacagccgtctattactgtaccgcactctggtattactctgagagcagtggtcactggggccagggaaccctggtcaccgtctcctca

SEQ ID NO: 5260 - DNA, 286 bp, Homo sapiens
  source 1..286: mol_type = other DNA
tgcagcctctggattcacctttagctcctatgccatgacctgggtccgccaggctccagggaaggggctggagtgggtctctactattggtcatagtggtcgtgacacatactacgcagactccgtgaagggccggttcaccatctccagagacaattccaagaacaccctgtttctgcacatgaacagcctgagagccgaggacacggccgtatatttttgtgcgaaggccggcagcagctggtccgactactggggccagggaaccctggtcaccgtctcctca

SEQ ID NO: 5261 - DNA, 286 bp, Homo sapiens
  source 1..286: mol_type = other DNA
tgcaggctctggcttcacctttaataagtatgccatgagttggctccgccaggctccagggaaggggctggagtggctctcaactattggtggtggtggtcgtgacacatattacgcagattccgtgaagggccggttcaccatctccagagacaattccaggaacacgttgttcctgcaaattaacagtctgagagtcgaggacacggccgtatattactgtgcgaaagctggtagcagctggtctgattactggggccagggaaccctggtcaccgtctcttca

SEQ ID NO: 5262 - DNA, 280 bp, Homo sapiens
  source 1..280: mol_type = other DNA
tgcagcctctggattcaactttagcggctatgacatgacctgggtccgccagtctccagggaaggggctggagtgggtctcaaggataagtgctggtggtagtgacacacactacgcagactccgtgaagggccgattcaccatctccagagacaactccaaaaacacagtgtatctgcgaatggacagcctgaaagccgaggacacggccacatattactgtacgaagggtggctggtgcgacaactggggccagggaaccctggtcaccgtctcctca

SEQ ID NO: 5263 - DNA, 280 bp, Homo sapiens
  source 1..280: mol_type = other DNA
tgcagcctctggattcaaccttagcggctatgacatgacctgggtccgccagtctccagggaaggggctggagtgggtctcaaggataagtgctggtggtagtgacacacactacgcagactccgtgaagggccgattcaccatctccagagacaactccaaaaacacagtgtatctgcgaatggacagcctgaaagccgaggacacggccacatattactgtacgaagggtggctggtgcgacaactggggccagggaaccctggtcaccgtctcctca

SEQ ID NO: 5264 - DNA, 280 bp, Homo sapiens
  source 1..280: mol_type = other DNA
tgcagcctctggattcacctttagtacctatctcatgacctgggtccgccaggctccagggaaggggctggagtgggtctcagctgttggtaccagtggtgatagtacattctactccgactccgtgaagggccgattcaccatctccagagacaattctaagaacacggtgtatctgcaaatgaatagcctgagagtcgaggacacggccgtatattactgtacgaaggggggttggtgcgacaactggggccagggaaccctggtcaccgtctcctca

SEQ ID NO: 5265 - DNA, 286 bp, Homo sapiens
  source 1..286: mol_type = other DNA
tgcagcctctggattcacgtttaccggccaagccatgacctgggtccgccaggctccagggaaggggctggagtgggtctcaactgttagaggacgtggtggtggcgcatactacgcagactccgtgaagggccggttcaccatctccagagacaatgccaagaatacgctgtatctgcaaatgaacggcctgagagtcgaggacacggccatttattattgtgtgaaggggtccaagtgggggggagataattggggccagggaacccaggtcaccgtctcgtca

SEQ ID NO: 5266 - DNA, 283 bp, Homo sapiens
  source 1..283: mol_type = other DNA
tgcagcctctggattcacctttagcaagcaagccatgagctgggtccgccaggctccagggaaggggctggagtgggtctcagtcatttttgatagtgtgaagacactctacgcagactccgtgaagggccggttcactatctccagagacaactctaagaacaccctgtatttgcaaatgaacagcctgagagccgacgacacggccgtatattattgtgtgaagggcagcaagtggggaggggacaactggggccagggaaccctggtcaccgtctcctca

SEQ ID NO: 5267 - DNA, 283 bp, Homo sapiens
  source 1..283: mol_type = other DNA
tgcagcctctggattcacctttagtagctattggatgacctgggtccgccaggctccagggaaggggctggagtgggtggccaacataaagcaagatggaagtgagaaatactatgtggactctgtgaagggccgattcaccatctccagagacaacgccaagaactcactgtatctgcaaatgaacagcctgagcgccgaggacacggccgtgtattactgtgcgagagataaagtgccccgggactactggggccagggaaccctggtcaccgtctcctca

SEQ ID NO: 5268 - DNA, 283 bp, Homo sapiens
  source 1..283: mol_type = other DNA
tgcagcctctggattcacttttagtagttattggatgacctgggtccgccaggctccagggaaggggctggagtgggtggccaacataaagcaagatggaagtgagaaatactatgtggactctgtgaagggccgattcaccatctccagagacaacgccaagaactcactgtatctgcaaatgaacagcctgagagccgaggacacggccgtgtattactgtgcgagagataaagtgccccgggactactggggccagggaaccctggtcaccgtctcctca

SEQ ID NO: 5269 - DNA, 283 bp, Homo sapiens
  source 1..283: mol_type = other DNA
tgcagcctctggattcacctttagtagctattggatgacctgggtccgccaggctccagggagggggctggagtgggtggccaacataaagcaagatggaagtgcgaaatactatgtggactctgtgaagggccgattcaccatctccagagacaacgccaagaactcactgtatctgcaaatgaacagcctgagagccgaggacacggccgtgtattactgtgcgagagataaagtgccccgggactactggggccagggaaccctggtcaccgtctcctca

SEQ ID NO: 5270 - DNA, 283 bp, Homo sapiens
  source 1..283: mol_type = other DNA
tgcagcctctggattcacctttagtagttattggatgacctgggtccgccaggctccagggaaggggctggagtgggtggccaacataaagcaagatggaagtgagaaatactatgtggactctgtgaagggccgattcaccatctccagagacaacgccaagaactcactgtatctgcaaatgaacagcctgagagccgaggacacggccgtgtattactgtgcgagagataaagtgccccgggactactggggccagggaaccctggtcaccgtctcctca

SEQ ID NO: 5271 - DNA, 283 bp, Homo sapiens
  source 1..283: mol_type = other DNA
tgcagcctctggattcacctttagtaattattggatgagctgggtccgccaggctccagggaaggggctggagtgggtggccaacataaaacaagaaggaagtgagaagtactatgtggactctgtgaagggccgattcaccatctccagagacgacgccaagaactcactgtctctgcacatgaacagcctgagagccgaggacacggctgtgtattactgtgcgagagataaagtgccccgggactattggggccagggaaccctggtcaccgtctcctca

SEQ ID NO: 5272 - DNA, 283 bp, Homo sapiens; identical to SEQ ID NO: 5271
  source 1..283: mol_type = other DNA

SEQ ID NO: 5273 - DNA, 283 bp, Homo sapiens
  source 1..283: mol_type = other DNA
tgcagcctctggattcacctttagtaattattggatgagctgggtccgccaggctccagggaaggggctggagtgggtggccaacataaaacaagaaggaagtgagaagtactatgtggactctgtgaagggccgattcaccatctccagagacgacgccaagaactcactgtctctgcacatgaacagcctgagagccgaggacacggctgtgtattactgtgcgagagataaagtgccccgggactattggggccagggaaccctggtcaccgtctcttca

SEQ ID NO: 5274 - DNA, 298 bp, Homo sapiens
  source 1..298: mol_type = other DNA
tgcagcctctggattcacctttaccagctattccatgagttgggtccgccaggctccagggaaggggctggagtgggtctcagctattaggggtagtggtgttagcacatactacgcagactccgtgaagggccggttcaccatctccagagacaattccgggaacacactgtatctgcaaatgaacagcctgagagccgaggacacggccgtttattactgtgcgaaagatccatatgaaagtagtggttattactctgactactggggccagggaaccctggtcaccgtctcctca

SEQ ID NO: 5275 - DNA, 304 bp, Homo sapiens
  source 1..304: mol_type = other DNA
tgcagcctctggattcacctttagcagctatgccatgagatgggtccgccaggctccagggaaggggctggagtgggtctcagctattagaggtagtggcgataacacatacacatactacgcagactccgtgaagggccggttcaccgtctccagagacaattccaagagcacgctgtatctgcaaatgaacagcctgagagccgaggacacggccgtatattattgtgcgaaagacccctatgaaagtagtggttattacagtgactactggggccagggaatcctggtcaccgtctcctca

SEQ ID NO: 5276 - DNA, 283 bp, Homo sapiens
  source 1..283: mol_type = other DNA
ctctgtctctggtggctccatcagcagtagtactgcctactggggctgggtccgccagcccccaggaaaggggttggagtggattgggactatctattttcctggggacgcctactacaacccgtccctcaagagtcgagtcaccatatcactggacacgtccaagaaccaattctccctgaaactgttctctgtgaccgccgcggacacggccgtttactactgcgcgacttctaactggggtgactactggggccggggaaccctggtcaccgtctcctca

SEQ ID NO: 5277 - DNA, 289 bp, Homo sapiens
  source 1..289: mol_type = other DNA
cactgtctctggtggctccatcagcagtagtacttcctattggggctggatccgccagcccccagggaaggggctggagtggattgggagtatctattatattgggagcgaaaacacctactacaacccgtccctcaagagtcgagtcaccatttcaatagacacgtccaggaaccagttctccctgaagctgacctctgtgaccgccgcggacacggccatgtattactgtgcgacctctaactggggggactactggggccagggaaccctggtcaccgtctcctca

SEQ ID NO: 5278 - DNA, 286 bp, Homo sapiens
  source 1..286: mol_type = other DNA
tgcagcctctggattcaccttcagtagctatgctatgcactgggtccgccaggctccaggcaagggcctggagtgggtggcaagtgtatcatctgatggaagaaatataaactacgcagactccgtggagggccgattcaccatctccagagacaattcccagaccaccctgtatctgcaaatgaacagcctcagacttgaggacacggctgtatattactgtgcgagagatcacccggggagtcttgactactggggccagggaaccccggtcaccgtctcctca

SEQ ID NO: 5279 - DNA, 286 bp, Homo sapiens
  source 1..286: mol_type = other DNA
tgcagcctctcaattcaccttcagaaattatgctatgcactgggtccgccaggctccaggcaaggggctggactgggtggcatttatatcatctgatggaagtagtgagaagtacgcagactctgtgaggggccgattcaccgtctccagagacaattccaagaacacggtattcctgcagttgaccagcctgagacctgaggacacggctgtatatttttgtgcgagagaccatcctggcagtcttgactactggggccagggaaccctggtcaccgtctcctca

SEQ ID NO: 5280 - DNA, 292 bp, Homo sapiens
  source 1..292: mol_type = other DNA
tgcagcctctggattcaccctcagtgactactacatgacatggatccgccaggctccagggaaggggctggagtgggtttcatacattagtggtagtggtactatcatatactacgcagactctgtgaagggccgattcaccatctccagggacaacgcccagaactcactcgatctgcaaatgaacagcctgagagtcgaggacacggccgtgtattactgtgcgagagggggtagagatggctacaagtttgactactggggccagggaaccctggtcaccgtctcctca

SEQ ID NO: 5281 - DNA, 292 bp, Homo sapiens
  source 1..292: mol_type = other DNA
tgcagcctctggattcgccttcagtgactactacatgacctggatccgccaggctccagggaaggggctggagtgggtttcatacagtagtagtagtggtagcaccatatactacgcagtctctgtgaagggccgattcaccatctccagggacaacgccaagaactcactgtatctgcaaatgaacagcctgagagccgaggacacggctgtgtattactgtgcgagaggaggtagagatggctacaaatttgactactggggccagggaaccctggtcaccgtctcctca

SEQ ID NO: 5282 - DNA, 292 bp, Homo sapiens
  source 1..292: mol_type = other DNA
tgcagcctctggattcgccttcagtgactactacatgacctggatccgccaggctccagggaaggggctggagtgggtttcatacattagtagtagtggtagtatcatatactacgcagtctctgtgaagggccgattcaccatctccagggacaacgccaagaactcactgtatctgcaaatgaacagcctgagagccgaggacacggctgtgtattactgtgcgagaggaggtagagatggctacaaatttgactactggggccagggaaccctggtcaccgtctcctca

SEQ ID NO: 5283 - DNA, 289 bp, Homo sapiens
  source 1..289: mol_type = other DNA
tgcagcctctggattcagcttcagtaagaagtacatgagctgggtccgccaggctccagggaaggggctggagtgggtctcagctatctatagtgctggcagcacatactacgcagactccgtgaagggcagattcaccatctccagagacaattcccagaatacggtatatcttcaaatgaacagccttagagtcgaagacacggctgtgtattactgtgcgaggttggggggccacggtgaccactttgactactggggccagggaaccctggtcaccgtctcctca

SEQ ID NO: 5284 - DNA, 289 bp, Homo sapiens
  source 1..289: mol_type = other DNA
tgcaacctctggattcgccgtcagtaggaagttcctgagctgggtccgccaggctccagggaagggcctggagtgggtctcagctatttatagcgctgatagcacatactacgcagactccgtgaagggcagattctccatctccagagacaattccaagagcacggtgtatcttcaaatgaacaacctgagagcggaggacacggctgtgtattactgtgcgagactcgggggccacggtgaccactttgactactggggccagggaaccctggtcaccgtctcctca

SEQ ID NO: 5285 - DNA, 289 bp, Homo sapiens
  source 1..289: mol_type = other DNA
tgcagcctctggattcaccttcagttcccactggatgcagtgggtccgccaaggtccaggggaggggctggtgtgggtctcaaatataaatggagatgggactagcacaaactacgcggactccgtgaagggccgattcaccgtctccagagacaacgccaagaacacgctgtatttgcaaatgaacagtctgagagccgaggacacggctgtatactactgtgcaagagatggagtggcgggagcccgtgactactggggccagggaaccctggtcaccgtctcctca

SEQ ID NO: 5286 - DNA, 289 bp, Homo sapiens
  source 1..289: mol_type = other DNA
tgtagcctctggattcaccttcagtaattactggatgcactgggtccgccaagctccagggaaggggctggtgtgggtctcagaaatcaagactgatgggagtagaacaaactacgcggactccgtgaggggccgattcaccatctccagagacaacgccaagaacacgctctttctgcaaatggacagtctgagtggcgaggacacggctgtgtattactgtgcaagagacggagttgcaggtgcaagagattactggggccagggaaccctggtcaccgtctccccg

SEQ ID NO: 5287 - DNA, 280 bp, Homo sapiens
  source 1..280: mol_type = other DNA
tgaagcctctggattcacctttagtagtcattggatgacctgggtccgccagggtccagggaaggggctggagtgggtggccaccacaaactacgatggaagtgagattcactatctggactctgtgagtggccgattcaccatttccagagacaacgccaagaactcactgtatttgcaaatgaacagcctgagagccgaagacacggccgtatattactgtgcgagaagaggacggtttgactactgtggccagggaaccctggtcaccgtctcctca

SEQ ID NO: 5288 - DNA, 280 bp, Homo sapiens
  source 1..280: mol_type = other DNA
tgcagcctctggattcacctttagtagctattggatgaattgggtccgccaggctccagggaaggggctggagtgggtggccaacataaagcaagatggaactgagaaatactatgtggactctgtgaagggccgattcaccatctccagagacaacgccaagaactcagtgtatctggaaatgaacagcctgagagccgaggacacggctgtgtattactgtgcgagacgggggcggtttgactactggggccagggaaccctggtcaccgtctcctca

SEQ ID NO: 5289 - DNA, 298 bp, Homo sapiens
  source 1..298: mol_type = other DNA
tgcagcctctggattcacctttgatgattatgccatgcactgggtccggcaagctccagggaagggcctggagtgggtctcaggtattagttggaatagtggtagtataggctatgcggactctgtgaagggccgattcaccatctccagagacaacgccaagaactccctgtatctgcaaatgaacggtctgagagctgaggacacggccttgtattactgtgcaaaaaccaattactatgatagtagtggttactttgactactggggccagggaaccctggtcaccgtctcctca

SEQ ID NO: 5290 - DNA, 298 bp, Homo sapiens
  source 1..298: mol_type = other DNA
tgcagcctctgcattcacctttgatgattatgccatgcactgggtccggcaagctccagggaagggcctggagtgggtctcaggtattacttggaatagtggtaacatagactatgcggactctgtgaagggccggttcaccatctccagagacaacgccaagaactccctctatctgcaaatgaacagtctgagagctgaggacacggccttgtattactgtgcaaaaactaattactatgatagtagtggttattttgactactggggccagggaaccctggtcaccgtctcctca

SEQ ID NO: 5291 - DNA, 280 bp, Homo sapiens
  source 1..280: mol_type = other DNA
tgcagcctctggattcacctttggtatttattatatgacctgggtccgccaggctccagggaaggggctggagtgggtggccaacatacagcaagatggaagtgagaaatactatgtggactctgtgaagggccgattcaccatctccagagacaacgccaagaactcactgtatctgcaaatgaacagcctgagagccgaggacacggccgtgtattactgtgcgagaggggccagtggggcctactggggccagggagccctggtcaccgtctcctca

SEQ ID NO: 5292 - DNA, 280 bp, Homo sapiens
  source 1..280: mol_type = other DNA
tgcagcctctgaattcacctttagtagttcttggatgaattgggtccgccaggctccagggagggggctggagtgggtggccaacataaagcaagatggaagtgagaaacactatctggactctgtgaagggccgattcaccatctccagagacaacgccaagaacgcactgtatctgcaaatgaacagcctgagagccgaggacacggctgtgtattattgtgcgagaggagcaagcggggcctactggggccagggagccctggtcaccgtctcctca

SEQ ID NO: 5293 - DNA, 280 bp, Homo sapiens
  source 1..280: mol_type = other DNA
tgcagcctctgaattcacctttagtagttcttggatgaattgggtccgccaggctccagggagggggctggagtgggtggccaacataaagcaagatggaagtgagaaacactatctggactctgtgaagggccgattcaccatctccagagacaacgccaagaacgcactgtatctgcaaatgaacagcctgagagccaaggacacggctgtgtattattgtgcgagaggagcaagcggggcctactggggccagggagccctggtcaccgtctcctca

SEQ ID NO: 5294 - DNA, 292 bp, Homo sapiens
  source 1..292: mol_type = other DNA
cactgtctctggtggctccgtcagtccttattactggagttggatccggcagcccccaggacagggactggagtggattggctatatttattataatggccacgcggaatataccccccacctcacgagtcgagtcaccatgtcagtagacacgtccacgaacaagttgtccctgattctgaggtctgtgacggccgcagacacggccgtatattactgtgcgagactccatttttggagatcggaggagttcgacccctggggccagggaatccttgtcaccgtctcctca

SEQ ID NO: 5295 - DNA, 292 bp, Homo sapiens
  source 1..292: mol_type = other DNA
cactgtctctggtggctccatcagtccctactactgggcttggatccggcagtctccagggaagggactggagtggattgcgtacatttattacagtgggtcctcctactacaacccctccctcaagagtcgcgccaccatatcagtggacacgcccaggaatcagttctccctaaaacttacctctgtcacccctgcggacacggccctctattactgcgcgaggctccatttttggcgttcggaggagttcgacccgtggggccagggaaccctggtcaccgtctccgca

SEQ ID NO: 5296 - DNA, 295 bp, Homo sapiens
  source 1..295: mol_type = other DNA
tgcagcctctggattcaccttcagtagctatgctatgcactgggtccgccaggctccaggcaaggggctggagtgggtggcagttatatcatatgatggaagtaataaatactacgcagactccgtgaagggccgattcaccatctccagagacaattccaagaacacgctgtatctgcaaatgaacagcctgagagctgaggacacggctgtgtattactgtgcgggtgattactatgatagtagtggttaccttgactactggggccagggaaccctggtcaccgtctcctca

SEQ ID NO: 5297 - DNA, 295 bp, Homo sapiens
  source 1..295: mol_type = other DNA
tgcagcctctggattcaccttcagtagctatggcatgcactgggtccgccaggctccaggcaaggggctggagtgggtggcagttatatcatatgatggaagtaataaatactatgcagactccgtgaagggccgattcaccatctccagagacaattccaagaacacgctgtatctgcaaatgaacagcctgagagctgaggacacggctgtgtattactgtgcgggcgattactatgatagtagtggttatcttgactactggggccagggaaccctggtcaccgtctcctca

SEQ ID NO: 5298 - DNA, 276 bp, Homo sapiens
  source 1..276: mol_type = other DNA
gcatctggatacaccttcaccagctactatatgcactgggtgcgacaggcccctggacaagggcttgagtggatgggaataatcaaccctagtggtggtagtacaagctacgcacagaagttccagggcagagtcaccatgaccagggacacgtccacgaacacagtctacatggagctgagcagcctgagatctgaagacacggccgtgtattactgtgcgcgacagctgggccttgactactggggccagggaaccctggtcaccgtctcctca

SEQ ID NO: 5299 - DNA, 276 bp, Homo sapiens
  source 1..276: mol_type = other DNA
gcatctggatacattttcaccaactactatatgcactgggtgcgacaggcccctggacaagggcttgagtggatgggaataatcaaccctagtggtggtagcacaagctacgcacaggagttccagggcagagtcaccatgaccagggacacgtccacgagcacagtctacatggagctgagcagcctgacatctgaggacacggccgtgtattactgtgcgaggcagctgggacttgactactggggccagggaaccctggtcaccgtctcctca

SEQ ID NO: 5300 - DNA, 286 bp, Homo sapiens
  source 1..286: mol_type = other DNA
tgtagcctctggattcaccttcagtaattacgacatgcactgggtccgccaagtcagaggaagaggactggagtgggtctcacttattgggactgctggcaatacacattatccagactccgtgaagggccgattcaccgtctccagagaaaatgccaagaacgccctgtaccttcaaatgaacagcctgagagacggggacacggctgtgtattactgtgcaagagacccctccggcgggggtttggacgtctggggccaagggaccacggtcaccgtctcctca

SEQ ID NO: 5301 - DNA, 286 bp, Homo sapiens
  source 1..286: mol_type = other DNA
tgtagcctctggattcaccttcagtacctacgacatgcactgggtccgccaagtagcaggaaaaggtctggagtgggtctcacttattggtagacgtggcgacacacactatccagactccctgaggggccgattcaccacctccagagaaaatgacaagaactccttgtatcttcaaatgaacagcctgacagccggggacacggctgtatattactgtgcacgagatccgtcagggggcggtctggacgtctggggccaagggactacggtcatcgtctcctca

SEQ ID NO: 5302 - DNA, 286 bp, Homo sapiens; identical to SEQ ID NO: 5301
  source 1..286: mol_type = other DNA

SEQ ID NO: 5303 - DNA, 292 bp, Homo sapiens
  source 1..292: mol_type = other DNA
tgcagcctctggattcatcttcagtgaccatcgcttggactgggtccgccagactccagggaagggactggagtggattggccgttctgcaaacaaagctaataattacgccacacaatacgtcgcgtctgtggaaggcagattcatcatctctagagatgattcaaagagttcaatgtatctgcagatgggcagcctgaaaaccgaggacacggccgtgtattattgtgctagagatgagggtgggacttatatttactggggccagggaaccctggtcaccgtctcctca

SEQ ID NO: 5304 - DNA, 292 bp, Homo sapiens
  source 1..292: mol_type = other DNA
tgcagcctctggattcatcttcagtgaccactacatagactgggtccgccaggttccagggaaggggctggagtgggttggccgttctagagacaaaactaccaattacgccacagaatacgccccgtctgtgaagggcagattcaccatctcaagagatgcctcaaggaactcagtgcatctgcaaatcaacagcctgaaaaccgaggacacggccgtgtattactgtgctagagatgaaggtggcacctacatctactggggccagggaaccctggtcaccgtctcctcg

SEQ ID NO: 5305 - DNA, 292 bp, Homo sapiens
  source 1..292: mol_type = other DNA
tgcagcctctggattcagctttactgactactacatggactgggtccgccagtctccagaaaaggggctggagtggattggccgtagtaaagacaaacctaataactacgccactgaatacgtcgcgtctgtgaaaggcagattcaccatctcaagagataattcaaagaactcattgtttctgcaaatgaacagcctgaaaagcgaggacacggccgtttattactgtgctagagatgagggtgggacgtacatctactggggccagggagccctggtcaccgtctcctca

SEQ ID NO: 5306 - DNA, 292 bp, Homo sapiens; identical to SEQ ID NO: 5304
  source 1..292: mol_type = other DNA

SEQ ID NO: 5307 - DNA, 295 bp, Homo sapiens
  source 1..295: mol_type = other DNA
tgcagcctctggattcaccttcactacctatactatgcactgggtccgccaggctccaggcaaggggctggagtgggtggcagttatatcagatgatggaggtaagaaatgctacgcagagtccgtgaagggccgattcaccatctccagagacaattccgagaacacgctgtatctgcaaatgaacagcctgagacctgaggacacggctgtgtatcactgtgcgcgtgcggaaagtagcagctggcacaactttgactactggggccaaggaaccctggtcgccgtctcctca

SEQ ID NO: 5308 - DNA, 295 bp, Homo sapiens
  source 1..295: mol_type = other DNA
tgcagcctctggattcaccttcagaaactatgctatgcactgggtccgccagtctccaggcgaggggctggagtgggtggcaattacatcagataatggagatcagaaatactacgcagaatccgtgaaggtccgattcgccatctccagagacaattccgagaacactctgtatctgcaaatgaacggcctgagagctgaggacacggctatatattactgcgcgagagcggagagcagcagctggcataactttgactactggggccagggaaccccggtcaccgtctcctcg

SEQ ID NO: 5309 - DNA, 289 bp, Homo sapiens
  source 1..289: mol_type = other DNA
cgctgtctatggggagtccttcaattcatactactggagctgggtccgccagcccccagggaaggggctggagtggattggggaaatcgattacagtggaagcaccaattacagcccgtcactcaggagtcgagtcaccatatcagtagacaggtccaagaaccaattctccctgaagatgacctctgtgaccgccgcggacacggctgtatattattgtgcgagaaaacgtggatatagaagttactttgactcttggggccagaaaaccctggtcaccgtctcctca

SEQ ID NO: 5310 - DNA, 289 bp, Homo sapiens
  source 1..289: mol_type = other DNA
cgctgtctacggtgggtcgttcagtggttactactggagctggcttcgccagcccccaggaaagggcctggagtggattggagaaatcaattataatggaaacaccgactacaactcgtccctcgagagtcgggtcaccatatcagtggacacttccaagaaccagttctccctgaaagtgacctctgtgaccgccgcggacacagctgtctatttatgtgcgagaaaacgtggatacagaagctactttgactcctggagtcagggaggtctggtcaccgtctcctca

SEQ ID NO: 5311 - DNA, 287 bp, Homo sapiens
  source 1..287: mol_type = other DNA
ctgtctacggtgggtcgttcagtggtttctactggagctggcttcgccaggccccagggaagggcctggagtggattggagaaatcaattataatggaaacaccgactacaattcgtccctcgagagtcggatcaccatatcagtggacacctccaagaatcagttctccctgacagtgacctctgtgaccgccgcggacacagctgtctacttatgtgcgcgaaaacgtggatacagaagctactttgactcctggagtcagggaggtctggtcaccgtctcgtca

SEQ ID NO: 5312 - DNA, 289 bp, Homo sapiens
  source 1..289: mol_type = other DNA
cgctgtgtatggtgagtccttcaattcattctactggagttggatccgccagcccccaggcatggggctggagtggattggggaaatcgattatactggaagtaccaattacagcccgtccctcaggagtcgagtcaccatatcagtagacaggtccaagaaccaattctccctgaagttgacctctgtgaccgccgctgacacggctgtgtattattgtgcgagaaaacgtggatatagaagttactttgactcttggggccagaaaaccctggtcaccgtctcctca

SEQ ID NO: 5313 - DNA, 289 bp, Homo sapiens
  source 1..289: mol_type = other DNA
cgctgtgtatggcgggtcctttagtggtttttattggagttgggtccgccactcccccgggaagggactagagtggattggggaaatcagtcatactggaactacttattataatccgtccctcaagagtcgagtcaccgtatcggaagacacgtccaagaaccagttctccctgaagttgagttttgtgaccgtcgcggatacggctgtctatttttgtgcgagaaaacggggctatagaagttactttgactcctggggccggggaaccctggtcaccgtctcctca

SEQ ID NO: 5314 - DNA, 289 bp, Homo sapiens
  source 1..289: mol_type = other DNA
cgctgtctatggtcaatccttcagtggtttttattggagctggctccgccagcccccagggaagggactggagtggattggagaaatcaattatagtgaaagtaccaacttcaacccgtccctcgagagtcgagtcatcatatcaatagacacgtccaagaatcagttctccctgaaactgagttctgtgaccgccgcggacacggctatttattactgtgcgagaaaacgtggatacagaagttactttgactcctggggccggggaaccccggtcgccgtctcctca

SEQ ID NO: 5315 - DNA, 289 bp, Homo sapiens
  source 1..289: mol_type = other DNA
cgctgtgtatggtgactccttcaattcatactactggacttggatccgccagcccccagggaaggggctggagtggattggggaaatcgattatagtggaagcaccaattacagtccgtccctcaggagtcgagtcaccatatcaatagacaggtccaagaaccaattctccctgaggctgacctctgtgaccgccgcggacacggctgtgtattattgtgcgagaaaacgtggatatagaagttactttgactcttggggccagaaaaccctggtcaccgtctcctca

SEQ ID NO: 5316 - DNA, 289 bp, Homo sapiens
  source 1..289: mol_type = other DNA
cgctgtctatggtgagaccttaagtgctttttactggacctggatccgccagcccccagggaggggactggagtggattggagaaatcaattatggtgaaagtgtgagcctaaacccgtccctcaagagtcgagtaatgttgttaatagataagtccaagaatcaattctccctgaagctgaattctgtgaccgccgcggacacggctgtttatttctgtgcgagaaaacgtggatacagaagttactttgactcctggggccggggaacgccggtcgccgtctcctca

SEQ ID NO: 5317 - DNA, 289 bp, Homo sapiens
  source 1..289: mol_type = other DNA
cgctgtctatggtgagaccttaagtgctttttactggacctggatccgccagtccccagggaggggactggagtggattggagaaatcaattatggtgaaagtgtgagcctaaacccgtccctcaagagtcgagtaatcatgttaatagataagtccaagaatcaattctccctgaagctgaattctgtgaccgccgcggacacggctgtttatttctgtgcgagaaaacgtggatacagaagttactttgactcctggggccggggaacgccggtcgccgtctcctca

SEQ ID NO: 5318 - DNA, 289 bp, Homo sapiens
  source 1..289: mol_type = other DNA
cgctgtgtatggagagaccttcaattcatactactggagttggatccgccagcccccagggagggggctggagtggattggggaaatcgattatagtggaaacaccaattacaacccgtccctcgagagtcgagtcaccatatcaatagacaggtccaagaaccaattctccctgaggctgacgtctgtgaccgccgcggacacggctgtgtattattgtgcgagaaaacgtggatacagaagttactttgactcttggggccagaaaaccctggtcaccgtctcctca

SEQ ID NO: 5319 - DNA, 289 bp, Homo sapiens
  source 1..289: mol_type = other DNA
cgctgtgtatggtgagtccttcaatccatactattggagttggatccgccagcccccagggaaggggctggagtggattggggaaatcgattatagtggaagcaccaattacagcccgtccctcaggagtcgagtcaccatatcagtagacaggtccaagaaccaattctccctgaagctgacctctgtgaccgccgcggacacggctgtgtattattgtgcgagaaaacgtggatatagaagttactttgactcttggggccagaaaaccctggtcaccgtctcctca

SEQ ID NO: 5320 - DNA, 280 bp, Homo sapiens
  source 1..280: mol_type = other DNA
tgaagcctctggattcacctttagtagttattggatgacctgggtccgccaggctccagggaaggggctggagtgggtggcaaatataaaacaagatggaagtcagaaaaactatgtggactctctgaagggccgattcaccatctccagagacaacgccaagaactcactgcttctgcaaatgaacagcctgagagccgaggacacggccgtgtattactgtgcgagaggagtggttagtgactactggggccagggaaccctggtcaccgtctcctca

SEQ ID NO: 5321 - DNA, 280 bp, Homo sapiens
  source 1..280: mol_type = other DNA
tgcagcctctggattcacttttagtacctattggatgagttgggtccgccaggccccagggaaggggctggagtgggtggccaacataaaggaagatggaagtgagaaatactatgtggactctgtgaagggccgattcaccatctccagagacaacatcaagaactcactgtttctgcaaatgaatgccctgagagccgaggacacgtctctatattactgtgcgaggggggtggtcagcgactactggggccagggaacccaggtcaccgtctcctca

SEQ ID NO: 5322 - DNA, 280 bp, Homo sapiens
  source 1..280: mol_type = other DNA
tgcagcctctggactcaccttcactacttactggatgtcgtgggtccgccaaacgccaggggaggggctggtgtgggtctcatctattaagagtgatgggagtgtcacaggttacgcggattccgtgaagggccgattcaccatctccagagacaacgccaagaacacactgtatctggaaatgaacagtctgagagccgaggacacggccctgtatttttgtgcaagaggaaacagtatggacgtctggggccaagggaccacggtcaccgtctcctca

SEQ ID NO: 5323 - DNA, 280 bp, Homo sapiens
  source 1..280: mol_type = other DNA
tgcagcctctggattcaccttcagtaatcactggatgtactgggtccgccaagctccagggaaggggctggtgtggctctcatttattaaaagtgatgggagcaccacaagctacgcggactccgtgaagggccgattcaccatctccagagacaacgccaagaacaccctgtatctgcaaatgagcagtctgagagccgaggacacggctgtgtattattgtgcaagagggaacagtatggacgtctggggccaagggaccacggtcaccgtctcctca

SEQ ID NO: 5324 - DNA, 280 bp, Homo sapiens
  source 1..280: mol_type = other DNA
tgcagcctctggattcacctttagtaacttctggatgaactgggtccgccaatctccagggaaggggctggtttgggtctcaggtattaataatgatgggagtattagaagttatgcggactctgtgaagggccgattcaacatctccagagacaacgccaagaacacgctgtatctgcaactgagcagtctgagagccgaggacacgactgtctattactgtgcaaggggtaacagtatggacgtctggggccaagggaccacggtcaccgtctcctca

SEQ ID NO: 5325 - DNA, 280 bp, Homo sapiens
  source 1..280: mol_type = other DNA
tgcagcctctggattcacttttactgactcttggatgacctgggtccgccaggctccaggaaaggggctggagtgggtggccaacataaaggaagatggaagtgagaaatactatgtggactctgtaaagggccgatttaccatctccagagacaacgccaagacctctctgtatctgcaaatgaacagcctgagagccgaggacacggccctatattactgtgcgagagggagaggctgtgggtcctggggccagggaaccctggtcaccgtctcctca

SEQ ID NO: 5326 - DNA, 280 bp, Homo sapiens
  source 1..280: mol_type = other DNA
tgcagcctctggattcacctttagtaactattggatgagctgggtccgccaggctccagggaaggggctggagtgggtggccaacataaagctagatggaagtgagaaatactatgtggactctgtgaagggccgattcaccatctccagagacaacgccaagaactcactgtatctgcaaatgaacagcctgagagccgaggacacggctgtgtattactgtgcgagaggacggggctgtggctcctggggccagggagccctggtctccgtctcctca

SEQ ID NO: 5327 - DNA, 289 bp, Homo sapiens
  source 1..289: mol_type = other DNA
tgcagcctctggattcacctttagtagatcttggatgacctgggtccgccaggctccagggaaggggctggagtgggtggccaacataaaggaagatggaagtacgaaaaactatgtggactctgtgaagggccgattcaccatctccagagacaacgccaagaactcactgtatctgcagatgaacagcctgagagccgacgacacggccctgtattactgtgcgagagacagtggctggttccgctttgactactggggccagggaaccgtggtcaccgtctcctca

SEQ ID NO: 5328 - DNA, 289 bp, Homo sapiens
  source 1..289: mol_type = other DNA
tgcagcctctggactcacctttagtagcgattggatggcctgggtccgccaggctccagggaaggggctggagtgggtggccaacataaaggaagatggaaatgagaaaaaccatgtggactctgtgaagggccgattcaccatctccagagacaacgccaagaagtcactttatctgcaaatgaacagcctgagagccgaggacacggctatatatttctgtgcgagagacagtggctggttccgatttgattattggggccagggaaccctggtcatcgtctcctca

SEQ ID NO: 5329 - DNA, 286 bp, Homo sapiens
  source 1..286: mol_type = other DNA
cgctgtctatggcgggtcccacagtggctattattggagttggatccgccagcccccggggaaggggctggagtggattggggaagtcaatcatggtggaagtaccaactacaacccgtccctcaagagtcgagtcagcatatcagtcgacacgtcgaagaaccagttctccctgacgctgaggtctgtgaccggcgcggacacggctgtatattactgtgcgagaggccagtatagccccccccccgactactggggccagggaaccctggtcaccgtctcctca

SEQ ID NO: 5330 - DNA, 286 bp, Homo sapiens
  source 1..286: mol_type = other DNA
cgctgtgtatggtgggtcctctaggggttactactggagttggatccgccagcccccaggggggggactggagtggattggagagatcaatcatcatagaaacaccaactacaacccgtccctcaagagtcgagtcaccatatcagctgacacgtccaagaaccagttctccctgagactgaggtctgtcaccgccgcggacacggctgtctattactgtgcgagaggccaatatagccccccccccgactactggggccagggaaccctggtcaccgtctcctca

SEQ ID NO: 5331 - DNA, 286 bp, Homo sapiens
  source 1..286: mol_type = other DNA
cgctgtgtatggtgggtcctctaggggttactactggagttggatccgccagcccccaggggggggactggagtggattggagaaatcaatcataatagaaacaccaactacaacccgtccctcaagagtcgagtcaccatatcagctgacacgtccaagaaccagttgtccctgagactgaggtctgtcaccgccgcggacacggctgtctattactgtgcgagaggccaatatagccccccccccgactactggggccagggaaccctggtcaccgtctcctca

SEQ ID NO: 5332 - DNA, 286 bp, Homo sapiens
  source 1..286: mol_type = other DNA
cgctgtgtatggtgggtccttgagtggttactactggagctggatccgccagcccccagggaaggggctggagtggataggggaaatcaatcatagtggaagcaccaactacaacccgtccctcaagagtcgagtcaccatatcagtggacacgtccaagaaccaattctccctgaagctgaggtctgtgaccgccgcggacacggctgtgtattactgtgcgagaggacaatactccccacccccggactactggggccagggaaccctggtcaccgtctcctca

SEQ ID NO: 5333 - DNA, 286 bp, Homo sapiens; identical to SEQ ID NO: 5329
  source 1..286: mol_type = other DNA

SEQ ID NO: 5334 - DNA, 286 bp, Homo sapiens
  source 1..286: mol_type = other DNA
cgctgtgtatggtgggtcctctaggggttactactggagttggatccgccagcccccaggggggggactggagtggattggagaaatcaatcataatagaaaaaccaactacaacccgtccctcaagagtcgagtcaccatatcagctgacacgtccaagaaccagttctccctgagactgaggtctgtcaccgccgcggacacggctgtctattactgtgcgagaggccagtatagccccccccccgactactggggccagggaaccctggtcaccgtctcctca

SEQ ID NO: 5335 - DNA, 286 bp, Homo sapiens
  source 1..286: mol_type = other DNA
cgctgtgtatggtgggtcctctaggggtttctattggagttggatccgccagcccccaggggggggactggagtggattggagaaatcaatcataatagaaacaccaactacaacccgtccctcaagagtcgagtcaccatatcagctgacacgtccaagaaccagttctccctgagactgaggtctgtcaccgccgcggacacggctgtctattactgtgcgagaggccaatatagccccccccccgactactggggccagggaaccctggtcaccgtctcctca

SEQ ID NO: 5336 - DNA, 280 bp, Homo sapiens
  source 1..280: mol_type = other DNA
tacaggctctggattcgactttaacagatttgacattacttgggtccgccagcctccagggaagagaatggagtgggtctcgggaattactggacttaatgatcataaaggctatgtggactccgtgaagggccgtttcaccatctccagagacccttccaacaacacggtgtatctgcaaatgaacagcctgagagccgacgacacggccctatattactgtgtgaaaggcttctggggcgacaactggggccagggaaccctggtcaccgtctcctca

SEQ ID NO: 5337 - DNA, 283 bp, Homo sapiens
  source 1..283: mol_type = other DNA
tgcagcctctggattcacctttagcacctttgagatggagtgggtccgccaggctccagggaaggggctggagtgggtctcagctattacaagtggtggaggtgatacaacatactacgcagagtccgtgaagggccggttcaccatctccagagacagttccaagaatgtattgtatctacaaatgaacagcctgagagtcgaggacacggccatatattactgtgtgaaaggtttttggggtgacaactggggccacggaaccctggtcaccgtctcctca

SEQ ID NO: 5338 - DNA, 283 bp, Homo sapiens
  source 1..283: mol_type = other DNA
tgcagtctctggattagttttcagtaatgcctggatgaactgggtccgccagggtccagggaaggggctggagtgggttggccgcattaaaagcaaaagtaatggtgagacagtagactacgccgcacccgtgaaaggcagattcaccatctcaagagatgattcaaaaaacacggtgtatctggaaatgaacagcctgaaaaccgaggacacaggcgtgtattactgtaccacaggggcgcgggactactggggccagggaaccctggtcaccgtctcctca

SEQ ID NO: 5339 - DNA, 283 bp, Homo sapiens
  source 1..283: mol_type = other DNA
tagagcctctggaatcattttcactaacgcctggatgaactgggtccgccaggctccagggcaggcgctggagtgggttggtcgtattaaaagcaagaatgatggtgggacaatagtctacgctgcacccgtggaaggcagattcactgtctcaagagatgactcaaaagacacgctttatctgcaaatgaacagcctgaaacccgaggacacagccgtgtattactgtaccacaggcgctcgtgactactggggccggggaaccctggtcaccgtctcctca

SEQ ID NO: 5340 - DNA, 304 bp, Homo sapiens
  source 1..304: mol_type = other DNA
tgcagcctctggattcaccttcaggagctattggatgcactgggtccgccaagctccagggaaggggctggtgtgggtctcacacattaatagtgatgggagtagcacaagcaacgcggactccgtgaagggccgattcaccatctccagagacaacgccaagaatacgctgtatctgcaaatgaacagtctgagagacgaggacacggctgtgtattactgtgcaagagatttacgccgtgactactaccactattacggtatggacgtctggggccaagggaccacggtcaccgtctcccca

SEQ ID NO: 5341 - DNA, 304 bp, Homo sapiens
  source 1..304: mol_type = other DNA
tgcagcctctggattcaccttcagtaactactggatgcactgggtcctccaagctccagggaaggggctggtgtgggtctcacgtactaatagtgatgggagtagtacaacctacgcggactccgtgaagggccgattcaccatctccagagacaacgccaagaacaccctgtatctgcaaatgaacagtctgagagccgaggacacggctgtgtactactgtgcaagagatcttaggcgggattactaccactactacggtatggacgtctggggccaagggacgacggtcaccgtctcctca

SEQ ID NO: 5342 - DNA, 304 bp, Homo sapiens
  source 1..304: mol_type = other DNA
tgcagcctctggattcaggttcagtaattactggatgaactgggtccgccaggctccagggaaggggctggtatgggtctcacgtattgatagtgatgggagtagcacaacttacgcggactccgtgaagggccgattcaccatctccagagacaacgccaagaacacgctgtatctgcaaatgagcagtctgagagtcgaggacacggctgtatattactgtgcaagagatctacgtcgggattactatcattattacggtatggacgtctggggccaagggaccacggtcaccgtctcctca

SEQ ID NO: 5343 - DNA, 280 bp, Homo sapiens
  source 1..280: mol_type = other DNA
tgcagcctctggattcacctttagcagctatgccatgagctgggtccgccaggctccagggaaggggctggagtgggtctcatctattattggtagtggtggtagcacatattacgaagactccgtgaagggccggttcaccatctccagagacaattccaagaacacgctgtatctccaaatgaacagcctgagagccgaggacacggccgtatattactgtgcgaaaactgcgagctttgactactggggccagggaaccctggtcaccgtctcctca

SEQ ID NO: 5344 - DNA, 280 bp, Homo sapiens
  source 1..280: mol_type = other DNA
tgcagcctctggattcacctttagcagctttggcatgagctgggtccgccaggctccagggcaggggctggagtgggtctcaactattggtggtagtggtggtaacacgtactacgcagactccgtgaaaggccggttcaccatctccagagacaattccaagaacatgctgtatctgcaaatgaacagcctgacagccgaggacacggccgtatattactgtgcaaaaactgcctcatttgactactggggccagggaaccctggtcaccgtctcctca

SEQ ID NO: 5345 - DNA, 280 bp, Homo sapiens
  source 1..280: mol_type = other DNA
ttcagcctctggattcatcttcaaaacctatagcatgaactgggtccgccaggctccagggaagggactggaatggatttcatacattactagtaatagtaataccacatactacgcagactctgtgaagggccgattcaccatctccagagacaatgccaagaattcactgtatctgcacatgagcagcctgagagaggaggacacggcagtgtattactgtgcgagagatgcctttggggacttctggggccagggaaccctagtcaccgtctcctca

SEQ ID NO: 5346 - DNA, 280 bp, Homo sapiens
  source 1..280: mol_type = other DNA
ttcagcctctggattcatcttcaaaacctatagcatgaactgggtccgccaggctccagggaagggactggaatggatttcatacattactagtaatagtaataccacatactacgcagactctgtgaagggccgattcaccatctccagagacaatgccaagaattcactgtatctgcacatgagcagcctgagagatgaggacacggcagtgtattactgtgcgagagatgcctttggggacttctggggccagggaaccctagtcaccgtctcctca

SEQ ID NO: 5347 - DNA, 280 bp, Homo sapiens
  source 1..280: mol_type = other DNA
tgcagcctctggatttaccttcagtacctatagcatgaactgggtccgccaggctccagggaaggggctggagtgggttgcatacatcactagtaatagtagtaccatattctacgcagactctgtgaagggccgattcaccatctccagagacaatgccaagaactcactatatctgcaaatgaacagcctgagagacgaggacacggctgtgtattactgtgcgcgagatgcttttggggacttctggggccagggaaccctggtcaccgtctcctca

SEQ ID NO: 5348 - DNA, 280 bp, Homo sapiens
  source 1..280: mol_type = other DNA
tgcagcctctggattcaccttgagtacctattggatgagttgggtccgccaggctccagggaaggggctggagtgggtggccaacataaagcacgatggaagtgagaaatactatgtggactctgtgaagggccgattcaccatctccagagacaacgccaagaactcactgtatctgcaaatgaacagcctgagagccgaggacacggccgtgtattactgtgcgagagaattaaggctctcctactggggccagggaaccctggtcaccgtctcctca

SEQ ID NO: 5349 - DNA, 280 bp, Homo sapiens
  source 1..280: mol_type = other DNA
tgcagcctctggattcacctttagtacctattggatgagctgggtccgccaggctccagggaaggggctggagtgggtggccaacataaagcaagatggaagtgcgaaatcctatgtggactctgtgaagggccgattcaccatctccagagacaacgccaagaactcactgtatctgcaaatgaacagcctgagagccgaagacacggctatgtattactgtgcgagagaactacgcctcagctactggggccagggaaccctggtcaccgtctcctca

SEQ ID NO: 5350 - DNA, 280 bp, Homo sapiens
  source 1..280: mol_type = other DNA
tacagcctctggattcacctttaataaacaatggatgatgtgggtccgccagcctccaggcaaggggccggagtgcgtggccaacataaagtccgatggaagtgagacatattatgtggactctgtgaggggccgattcaccatctccagagacaacgccaagaactcactttatctgcaaatgactagcctgagagtcgaagacacggccgtctatcactgtgcgagaggttgggggattgactccttgggccagggaaccctggtcagcgtctcctca

SEQ ID NO: 5351 - DNA, 280 bp, Homo sapiens
  source 1..280: mol_type = other DNA
tgcagcctctggattcacctttagtagatatggaatgacctgggtccgccaggctccagggaaggggctggagtgggtggccaacataaaccaagatggaagtcagaaatactatgtggactctgtgaagggccgattcaccatctccagagacaacgccaagaactcactgtatctgcaaatgaacagcctgagagccgaggacacggctgtgtattactgtgcgagagggtgggggattgactcctggggccagggagccctggtcaccgtctcctca

SEQ ID NO: 5352 - DNA, 280 bp, Homo sapiens
  source 1..280: mol_type = other DNA
tacagcctctggattcacctttaataaacaatggatgatgtgggtccgccagcctccaggcaaggggccggagtgcgtggccaacataaagtccgatggaagtgagacatactatgtggactctgtgaagggccgattcaccatctccagagacaacgccaagaactcactttatctgcaaatgactagcctgagagtcgaagacacggccgtctatcactgtgcgagaggttgggggattgactccttgggccagggaaccctggtcaccgtctcctca

SEQ ID NO: 5353 - DNA, 280 bp, Homo sapiens
  source 1..280: mol_type = other DNA
tacagcctctggattcacctttgacaaacaatggatgatctgggtccgccagcctccaggcaaggggccggagtgcgtggccaacataaagtccgatggaagtgagacatactatgtggactctgtgaagggccgattcaccatctccagagacaacgccaagaactcactttatctgcaaatgactagccttagagtcgaagacacggccgtctatcactgtgcgagaggttgggggattgactccttgggccagggaaccctggtcaccgtctcctca

SEQ ID NO: 5354 - DNA, 292 bp, Homo sapiens
  source 1..292: mol_type = other DNA
tgcagcctctggattcacctttaacaactatgccatgagctgggtccgccaggctccagggagggggctggagtgggtctcagctattagtgctagtggttatgacacacactacggagcctccgtgaagggccggttcaccatctccagagacaattccaagaacaccctatttctgcaaatgaacagcctgagagccgacgacacggccttatattactgtgcgaaagaccggattacgatttcggcttttgatatctggggccaagggacaatggtcaccgtctcttca

SEQ ID NO: 5355 - DNA, 292 bp, Homo sapiens
  source 1..292: mol_type = other DNA
tgcagcctctggattcacctttaacaactatggcatgagctgggtccgccaggctccagggaaggggctggagtgggtctcagctattagtgctagtagtggtgacacatactacggagactccgtgaagggccggttcaccatctccagagacaattccaagaacaccctatttctgcaaatgaacagcctgagagccgacgacacggccttatattactgtgcgaaagaccggattacgatttcggcttttgatatctggggccaagggacaatggtcaccgtctcttca

SEQ ID NO: 5356 - DNA, 292 bp, Homo sapiens
  source 1..292: mol_type = other DNA
tgcagcctctggattcacctttaaggactatggcatgagctgggtccgccaggctccagggaaggggctggagtgggtctcaggtattagtgctactagtggtgacagatattatggagactccgtgaagggccggttcaccatctccagagacaattccaagaacaccctatttctgcaaatgaacagcctgagagccgacgacacggccttatattactgtgcgaaagaccggattacgatttcggcttttgatatctggggccaagggacaatggtcaccgtctcttca

SEQ ID NO: 5357 - DNA, 292 bp, Homo sapiens
  source 1..292: mol_type = other DNA
tgcagcctctggattcacctttaacaactatggcatgagttgggtccgccaggctccaggaaaggggctggagtgggtctcaggtattagtggtagtggtcgtgacacatactacggagactccgtgaagggccggttcaccatctccagagacaattccaagaacaccctatttctgcaaatgaacagcctgagagccgacgacacggccttatattactgtgcgaaagaccgcattacgatttcggcttttgatatctggggccaagggacaatggtcaccgtctcttca

SEQ ID NO: 5358 - DNA, 292 bp, Homo sapiens
  source 1..292: mol_type = other DNA
tgcagcctctggattcacctttagcagctatggtatgaactgggtacgccaggctccagggaaggggctggagtgggtctcaggtgttagtgacagtggtggtagtaaatactacggagactccgtgaagggccgggtcaccatctccagagacaattccaagaacacggtgtatttgcaaatgaacagcctgagagtcgaggacacggccatatattattgtgcgaaagaccggattacgatttcggcttttgatatttggggccaagggacaatggtcaccgtctcttca

SEQ ID NO: 5359 - DNA, 289 bp, Homo sapiens
  source 1..289: mol_type = other DNA
tgcagcctctggattcaccgtcagtagttatggcatgaattgggtccgccaggctccagggaaggggccggagtgggtctcagccattagtagtgattttaggacatactacacagactccgtgaagggccgcttcaccatctccagagacaattccaagaacacggtttatctgcaaatgaactacctgagagtcgaggacacggccgtatactactgtgcgaaagataggattactatctcagcttttgatatttggggccgggggacagtggtcaccgtctcttca

SEQ ID NO: 5360 - DNA, 304 bp, Homo sapiens
  source 1..304: mol_type = other DNA
cactgtctctggtggctccatcagtagtttctactggagttggatccggcagcccccagggaagggactggagtacattggatatatctatgacggtgagaacaccaactataatccttccttcaagagtcgagtcaccatatcagtagacacgtccgagaagcagttctccctgaagctgagctctgtgaccgctgcggacacggccgtttactactgtgcgagcggggatttttggagtggttatgactactactactacatggacgtctggggcaaagggaccacggtcaccgtctcctca

SEQ ID NO: 5361 - DNA, 304 bp, Homo sapiens
  source 1..304: mol_type = other DNA
cactgtctctggtggctccatcagtagtttctactggagctggatccggcagcccccagggaggggactggagtggattgggtatgtctatgacagtgggagcaccaactacaacccctccctcaagagtcgagtcaccatatcaatagacacgtccaagaaccaggtctccctgaagctgacctctgtgaccgctgcggacacggccgtgtattactgtgcgagtggcgatttttggagtggttacgactactactactacatggacgtctggggcaaagggaccgcggtcaccgtctccaca

SEQ ID NO: 5362 - DNA, 304 bp, Homo sapiens
  source 1..304: mol_type = other DNA
cactgtctctggtggctccatcagtggttactactggagctggatccggcagccccccgggaagggactggaatggattgggtatatctatgacagtgggagcaccaagtacagcccctccctcaagagtcgagtcaccatatcagtagacacgtccaagaaccagttctccctgaagctgagctctgtgaccgctgcggactcggccatctattattgtgcgagtggcgatttttggagtggttacgactactactactacatggacgtctggggcaaagggaccacggtcaccgtctcctca

SEQ ID NO: 5363 - DNA, 304 bp, Homo sapiens
  source 1..304: mol_type = other DNA
cactgtctctggtggctccatgaatagtttctactggagttggatccggcagcccccagggaggggactggagtggattgggtatatctatgacagtgggagcaccaactacagcccctccctcaagagtcgagtcaccatgtcaatggacacgtccaagaagcagttctccctgaagctgacctctgtgaccgctgcggacacggccgtctattactgtgcgagtggcgacttttggagtggctacgactattactactacatggacgtctggggcaaagggaccgcggtcaccgtctcctca

SEQ ID NO: 5364 - DNA, 304 bp, Homo sapiens
  source 1..304: mol_type = other DNA
cactgtctctggtggctccatcgatagtttttactggagctggatccggcagcccccagggaagggactggagtggattgggtatgtctattacagtgagagcaccaagtacaacccatccctcaagagccgggtcaccatatcattagacacgtccaagaaccagttctccctgaagttgacctctgtgaccgctgcggacacggccgtgtattactgtgcgagtggcgatttttggagtggctacgactactactactacatggacgtctggggcaaagggaccacggtcaccgtctcctca

SEQ ID NO: 5365 - DNA, 313 bp, Homo sapiens
  source 1..313: mol_type = other DNA
cactgtctctggtgtgtctggtggctccatgaatagtttctattggagttggatccggcagcccccagggaggggactggagtggattggttatatctatgacagtgggagtaccaagtacaatccctccctcaagagtcgagtcaccatatcaatggacacgtccaagaaccagttctccctgaagctgacctctgtgaccgctgcggacacggccgtgtattactgtgcgagtggcgatttttggagtggttacgactactactactacatggacgtctggggcaaaggggccgcggtcaccgtctcttca

SEQ ID NO: 5366 - DNA, 304 bp, Homo sapiens
  source 1..304: mol_type = other DNA
cactgtctctggtgcctccatcagtggttactactggagctggatccggcagaccccagggaagggactggagtggattggatatatctatgacagtgggagcaccaactacaacccctccctcaagagtcgagtcaccatatcaatagacacgtccgagaaccagttctccctgaagctgagttctgtgaccgctgcggacacggccgtatattactgtgcgagtggcgatttttggagtggttacgactactactactacatggacgtctggggcaaagggaccacggtcaccgtctcctca

SEQ ID NO: 5367 - DNA, 304 bp, Homo sapiens; identical to SEQ ID NO: 5364
  source 1..304: mol_type = other DNA

SEQ ID NO: 5368 - DNA, 304 bp, Homo sapiens
  source 1..304: mol_type = other DNA
cagtgtctctggtggctccatgaatagtttctactggagctggatccggcagcccccagggaggggactggagtggattggttatatctatgacactgggagcaccaagtacaatccctccctcaagagtcgagtcactatatcaatggacacgtccaacaagcagttctccctgaggttgacctctgtgaccgctgcggacacggccgtgtattactgtgcgagtggcgatttttggagtggctacgactattactattacatggacgtctggggcaaagggaccgcggtcaccgtgtcctca

SEQ ID NO: 5369 - DNA, 304 bp, Homo sapiens
  source 1..304: mol_type = other DNA
cactgtctctggtggccccatcaacagttactactggagctggatccggcagcccccagggaagggactggaatatattgggtatatctatgacactgggcgcaccaactacaatccctccctcaagagccgagtcaccatatcaatggacacgtccaagaatcacttctccctgaagctgaactctgtgaccgctgcggacacggccgtgtattattgtgcgagtggcgatttctggagtggttacgactactactactacatggacgtctggggcaaagggaccacggtcaccgtctcctca

SEQ ID NO: 5370 - DNA, 313 bp, Homo sapiens
  source 1..313: mol_type = other DNA
cactgtctctggtgtgtctggtggctccatgaatagtttctattggagttggatccggcagcccccagggaggggactggagtggattggttatatctatgacagtgggagtaccaagtacaacccctccctcaagagtcgagtcaccatatcggtggacacgtccaagaaccagttctccctgaagctgacctctgtcaccgctgcggacacggccgtctattactgtgcgagcggtgatttttggagtggttacgactactactactacatggacgtctggggcaaagggaccgcggtcaccgtctcttca

SEQ ID NO: 5371 - DNA, 304 bp, Homo sapiens
  source 1..304: mol_type = other DNA
cactgtctctggtggccccatcaatagttactactggagctggatccggcagcccccagggaagggactggaatatattggatatatctatgacactgggcgcaccaactacaatccctccctcaagagtcgagtcaccatatcaatggacacgtccaagaatcacttctccctgaagctgaactctgtgaccgctgcggacacggccgtttattattgtgcgagtggcgatttctggagtggttacgactactactactacatggacgtctggggcaaagggaccacggtcaccgtctcctca

SEQ ID NO: 5372 - DNA, 304 bp, Homo sapiens
  source 1..304: mol_type = other DNA
cactgtctctggtggccccatcaatagttactactggagttggatccggcagcccccagggaagggactggaatatattgggtatatctatgatactgggcgcaccaactacaatccctcccttaagagtcgagtcaccatatcaatggacacgtccaagaatcagttctccctgaagctgaactctgtgaccgctgcggacacggccgtgtattattgtgcgagtggcgatttttggagtggttacgactactactactacatggacgtctggggcaaagggaccacggtcaccgtctcctca

SEQ ID NO: 5373 - DNA, 304 bp, Homo sapiens; identical to SEQ ID NO: 5363
  source 1..304: mol_type = other DNA

SEQ ID NO: 5374 - DNA, 304 bp, Homo sapiens
  source 1..304: mol_type = other DNA
cactgtctctggtggccccatcaatagttactactggagctggatccggcagcccccagggaagggactggaatatattgggtatatctatgacactgggcgcaccaactacaatccctccctcaagagtcgagtcaccatatcaatggacacgtccaagaatcacttctccctgaagctgaactctgtgaccgctgcggacacggccgtgtattattgtgcgagtggcgatttctggagtggttacgactactactactacatggacgtctggggcaaagggaccacggtcaccgtctcctca

SEQ ID NO: 5375 - DNA, 304 bp, Homo sapiens
  source 1..304: mol_type = other DNA
cactgtctctggtggccccatcaatagttactactggagctggatccggcagcccccagggaagggactggaatatattgggtatatctatgacactgggcgcaccaactacaatccctccctcaagagtcgagtcaccatatcaatggacacgtccaagaatcagttctccctgaagctgaactctgtgaccgctgcggacacggccgtgtattattgtgcgagtggcgatttttggagtggttacgactactactactacatggacgtctggggcaaagggaccacggtcaccgtctcctca

SEQ ID NO: 5376 - DNA, 304 bp, Homo sapiens
  source 1..304: mol_type = other DNA
cactgtctctggtgcctccatcactggttactactggagctggatccggcagcccccagggaagggactggagtggattgggtacatctatgacagtgggagcaccaactacaacccctccctcaagagtcgactcacgatatcagtagacatgtctaagaaccagttctccctgaagctgaattctgtgaccgctgcggacacggccgtgtattattgtgcgagtggcgatttttggagtggttacgactactactactacatggacgtctggggcaaagggaccacggtcaccgtctcctca

SEQ ID NO: 5377 - DNA, 304 bp, Homo sapiens
  source 1..304: mol_type = other DNA
cactgtctctggtggctccatcaatagtttctactggagttggatccggcagcccccagggaagggactggagtggattgggtatgtctatgaaagtgagaccaccaactacaacccctccctcaagagtcgagtcaccatatcactggacacgtccaagaaccagttctccctgaagctgagctctgtgaccgctgcggacacggccgtgtattattgtgcgagtggcgatttttggagtggttatgactactactactacatggacgtctggggcaaagggaccacggtcaccgtctcctca

SEQ ID NO: 5378 - DNA, 304 bp, Homo sapiens
  source 1..304: mol_type = other DNA
cactgtctctggtggctccatcgatagtttttattggagctggatccggcagcccccagggaggggactggagtggattgggtatgtctattacagtgagaccaccaagtacaacccatccctcaagagccgagtcaccatatcactagacacgtccaagaaccagttctccctgaaactgaactctgtgaccgctgcggacacggccgtgtattactgtgcgagtggcgatttttggagtggttacgactactattactacatggacgtctggggcaaagggaccacggtcaccgtctcctca

SEQ ID NO: 5379 - DNA, 277 bp, Homo sapiens
  source 1..277: mol_type = other DNA
tgcagcctctggattcacctttagtacctatttgatgaactgggtccgccaggctccagggaaggggctggagtgggtggccaatataaagcaagatggaagtgagaaatactatgtggactctgtgaagggccgaatcaccatctccagagacaacgccaagaactcactgtatctgcaaatgaacggcctgagagccgaggacacggccgtgtattactgtacgagagggaggttagactactggggccagggaaccctggtcaccgtctcctca

SEQ ID NO: 5380 - DNA, 277 bp, Homo sapiens
  source 1..277: mol_type = other DNA
tgcagcctctggattcacctttagtagttattggatgagctgggtccgccaggctccagggaaggggctggagtgggtggccatcataaaccaagatggaagtgagaaatactatgtggactctctgaagggccgcctcaccatctccagagacaacgccaagaactcactgtgtctgcaaatgaacagtctgagagccgaggacacggctgtgtattactgtacaaggggcaggcttgactactggggccagggaaccctggtcaccgtctcctca

SEQ ID NO: 5381 - DNA, 277 bp, Homo sapiens; identical to SEQ ID NO: 5380
  source 1..277: mol_type = other DNA

SEQ ID NO: 5382 - DNA, 289 bp, Homo sapiens
  source 1..289: mol_type = other DNA
tgcagcctctggattcaccttcagtacctatagcatgaactgggtccgccaggctccagggaaggggcgggagtgggtttcatacattagtggtagtagtggcaccatatactacgcagaccctgtgaagggccgattcaccatctccagagacaacgccaagaactcattgtatctgcaaatgaacagcctgagagccgaggacacggctgtgtattactgtgcgagagcgaggagtggttactacatggacgtctggggcaaagggaccacggtcaccgtctcctca

SEQ ID NO: 5383 - DNA, 289 bp, Homo sapiens
  source 1..289: mol_type = other DNA
tgcagcctctggattcaccttcagtagctatagcatgaactgggtccgccaggctccagggagggggctggagtgggtttcattcattagtgatactagtaagatcatatactacgcagactctgtgaagggccgattcaccatctccagagacgatgcccaggactcactgtatctgcaaatgaccagcctgagagacgaggacacggctgtgtattactgtgcgagagcccgatctggctactacatggacgtctggggcaaagggtccacggtcgccgtctcttca

SEQ ID NO: 5384 - DNA, 301 bp, Homo sapiens
  source 1..301: mol_type = other DNA
cactgtctctggtggctccatcagcagtagtagttactactggggctggatccgccagcccccagggaaggggctggagtggattgggagtatctattatagtgcgagcacctactacaacccgtccctcaagagtcgagtcaccatatcagtcgacacgtccaagaaccagttctccctgaagctgagctctgtgaccgccgcggacacggccgtgtattactgtgcgagagtgtattactatgatagtagtggcccttatgactactggggccagggaaccctggtcaccgtctcctca

SEQ ID NO: 5385 - DNA, 301 bp, Homo sapiens
  source 1..301: mol_type = other DNA
cactgtctctggtggctccatcagcagaagtacttactactggggctgggtccgccagcccccagggaaggggctggagtggattgggagtatctattatagtgggaccacctactacaacccgtccctcaagagtcgagtcaccatatccgtagacacgtccaagaaccagttctccctgaagctgagctctgtgaccgccgcagacacggctgtatattactgtgcgagggtctattactatgacagtagtggcccctacgactactggggccagggaaccctggtcaccgtctcctca

SEQ ID NO: 5386 - DNA, 283 bp, Homo sapiens
  source 1..283: mol_type = other DNA
tgcagcctctggattcaccttcagtgactactacatgagctggatccgccaggctccagggaaggggctggagtgggttgcatacattcgtagtagtagtagttacacaaactacgcagactctgtgaagggccgattcaccatctccagagacaacgccaagaactcactgtatctgcaaatgaacagcctgagagccgaggacacggccgtgtattactgtgcgagagggaaggatgcttttgatatctggggccaagggacaatggtcaccgtctcttca

SEQ ID NO: 5387 - DNA, 283 bp, Homo sapiens
  source 1..283: mol_type = other DNA
tgcagcctctggattcaccttcagtgactactacatgagctggatccgccaggctccagggaaggggctggagtgggtttcatacattagtagtagtggtagtaccatatactacgcagactctgtgaagggccgattcaccatctccagggacaacgccaagaactcactgtatctgcaaatgaacagcctgagagccgaggacacggccgtgtattactgtgcgagaggaaaagatgcttttgatatctggggccaagggacaatggtcaccgtctcttca

SEQ ID NO: 5388 - DNA, 286 bp, Homo sapiens
  source 1..286: mol_type = other DNA
tgcagtctatggattcaccttcagtaattatagcatgaactgggtccgccaggctccagggaaggggctggagtgggtttcatacattagtaggagtagcagtgttaaatactacgcagactctgtgaagggccgattcaccatctccagagacaatgccaagaactcactgtatctgcaaatgaacaacctgagagacgatgacacggctgtgtattactgtgcgagagcgggtagcagtggtttttactactggggccagggaaccctggtcaccgtctcctcc

SEQ ID NO: 5389 - DNA, 286 bp, Homo sapiens
  source 1..286: mol_type = other DNA
tgcagcctctggattcaccttcagtagctatagcatgaactgggtccgccaggctccagggaaggggctggagtgggtttcatacattagtagtagtagtagtagcatatattatgtagactctgtgaagggccggttcaccatctccagagacaatgccaagagctcactgtatctgcaaatgaacagcctgagagacgaggacacggctgtgtattactgtgcgagagccggtagtagtggtttttactactggggccagggaaccctggtcaccgtctcctca

SEQ ID NO: 5390 - DNA, 277 bp, Homo sapiens
  source 1..277: mol_type = other DNA
cgcggtctatggtgcgtccatcagtgattactcctggggctggatccgccagcccccaagtaaggggctggagtggattggggaaatcaatcaaggtggaagcaccaactacaacccgtccctcaagagtcgagtcaccatatcagtagacacgtccaagaaccagttctccctgaagctgaactctgtgaccgccgcggacacggctgtgtattactgtgcgagaggcggggggcaccgctactggggccagggaaccctggtcaccgtctcctca

SEQ ID NO: 5391 - DNA, 277 bp, Homo sapiens; identical to SEQ ID NO: 5390
  source 1..277: mol_type = other DNA

SEQ ID NO: 5392 - DNA, 277 bp, Homo sapiens
  source 1..277: mol_type = other DNA
cgctgtctatggtgggtctgttagtagttactcctggggctggatccgccagccccccgggaaggggctggagtggattggagaaatcagtcaaagtggaagcaccaacttcaacccgtccctcaagagtcgagtcaccatatcagttgacacgtccaggaaccagttctccctcaaactgaactctgtgaccgtcgcggacacggctgtgtattattgtgcgagaggagggggccaccgctactggggccagggaaccctggtcaccgtcttctca

SEQ ID NO: 5393 - DNA, 277 bp, Homo sapiens
  source 1..277: mol_type = other DNA
cgctgtctacggtgcgtccttcagtgattacacctggagctgggtccgccagcccccagggaaggggctggagtggattggggaaatcaatcaaagtggagacaccaactacaacccgtccctcaagagtcgaggcaccatatcacgagacacgtccaagaaccagttttccctgaaggtgacctctgtgaccgccgcggacacggctctttattactgcgcgagaggcggtggccatcgctattggggccagggaaccctggtcaccgtctcctca

SEQ ID NO: 5394 - DNA, 277 bp, Homo sapiens
  source 1..277: mol_type = other DNA
cgctgtctatggtgcgtccttcagtacttacacctggagctgggtccgccagcccccgggaaaggggctggagtggattggggaaatcaatcaaagtggaaacaccaactacaacccgtccctcaagggtcgagtcaccatatcagcagacacgtccaagaaccagttctccctgagggtgacctctgtgaccgccgcggacacggctctttatttctgtgcgagaggcggtggccatcgctactggggccagggaaccctggtcaccgtctcctca

SEQ ID NO: 5395 - DNA, 277 bp, Homo sapiens
  source 1..277: mol_type = other DNA
cgctgtcaatggtgcgtccttcacttcttactcctggggctggatccgccagtccccagcgaaggggctggagtggattggggaaatcaatcagggtggaagcaccagttacaacccgtccctcaagagtcgagtcaccatatcacgggacacgtccaagaatcagttttccctgaagttgacctctgtgagcgccgcagacacggctgtttattactgtgcgagaggcggtggccatcggtactggggccagggaaccctggtcaccgtctcctca

SEQ ID NO: 5396 - DNA, 277 bp, Homo sapiens
  source 1..277: mol_type = other DNA
cgctgtctacggtgcgtccttcagtgattacacctggagctgggtccgccagcccccaggagaggggctggagtggattggggaaatcaatcaaagtggagacaccaagtacaacccgtccctcaagagtcgaggcaccatatcacgagacacgtccaagaaccagttctccctgaaggtcacctctgtgaccgccgcggacacggctctttattactgcgcgagaggcggtggccatcgctattggggccagggaaccctggtcaccgtctcctca

SEQ ID NO: 5397 - DNA, 298 bp, Homo sapiens
  source 1..298: mol_type = other DNA
cactgtgtctggtgtctccatcagcagcactgattactcctggtactggggctgggtccgccagccccccgggacggggctggagtggattgggggaatgtctactagtgggagtgtcttctacaacccgtccctcaagagtcgatgcaccatatcggtggacacgtccaagaatgagttctccctgtggttgacctctgtgaccgccgcagacacggctaaatattactgtgcgagacgggactacagggcttggttcgacccctggggccagggaatcctggtcaccgtctcctca

SEQ ID NO: 5398 - DNA, 319 bp, Homo sapiens
  source 1..319: mol_type = other DNA
cagtgtctctggtggctccatcactagtagtgtctctggtggctccatcagtagtagtagttactactggggctggatccgccagcccccagggaagggactggagtggattgggggtatctattatagtgggggcaccctctacaacccgtccctcaagagtcgagtcaccatatccaaagacacgtccaagaaccaaatctccctgaagctgagttctgtgaccgccgcagacacggctgtctattactgtgcgagacgtgactacagggcttggttcgacccctggggccagggaaccctggtcaccgtctcctca

SEQ ID NO: 5399 - DNA, 292 bp, Homo sapiens
  source 1..292: mol_type = other DNA
cactgtctctggtggctccatgaccagtggtagtttctactggggctgggtccgccagccccccgggaaggagctggagtggattgggagtgtgtattatagtggaagtaccatgtacaacccgtccctcaagagtcgagtcttcatattcggtgacacctccaagaaccagttctccctggagttgagttctgttagtgtcgcagatacggctgtctattactgtgcgagacgggactacagggcttggttcgacccctggggccagggaacccaggtcaccgtctcctca

SEQ ID NO: 5400 - DNA, 298 bp, Homo sapiens
  source 1..298: mol_type = other DNA
cagtgtgtctggtggctctatcgccagtaatgattactccaagtactgggcctggatccgccagtcccccgggacgggactggagtggattgggggcatgcctactactgggggtgccttctacaacccgtccctcaagagtcgcgtcaccatatccgtggacacgtccaagagtgagttctccctgagactgaactctgtgatcgccgcagacacggctgtctattactgtgcgcgacgggactacagggcttggttcgacccctggggccagggaatcctggtcaccgtctcctca

SEQ ID NO: 5401 - DNA, 298 bp, Homo sapiens
  source 1..298: mol_type = other DNA
cactgtgtctggtgtgtccatcagtagtactgattacagttactactgggagtggatccgccagcccccagggacgggcctggagtggattgggggaatgtccactagtgggagttcctactacaacccgtccctcaagagtcgagtcaccatatccgtagacacgtccaagaatcagttctccctgaagttgaactctgtgaccgccgcagacacggccgtatattactgtgcgagacgggactacagggcttggttcgacccctggggccagggcatcctggtcaccgtctcctca

SEQ ID NO: 5402 - DNA, 298 bp, Homo sapiens
  source 1..298: mol_type = other DNA
cactgtctctggtggctccatcagtggttactactggagctggatccggcagcccccagggaagggactggagtggattgggtatatctattctagtgggagcaccaactacaacccctccctcaagaggcgagtcaccatatcagaagacacgtccaagaaccagttctccctgaagctgagctctgtgaccgccgcagacacggccgtctattactgtgcgagaaaggatagcagcagctggtacggaaactggttcgacccctggggccagggaaccctggtcaccgtctcctca

SEQ ID NO: 5403 - DNA, 298 bp, Homo sapiens
  source 1..298: mol_type = other DNA
cactgtctctggtgcctccatcagtggttactactggagctggatccggcagcccccggggaagggactcgagtggattggctatatctataatagtgggagcaccaactacaacccctccctcaagagtcgagtcaccatatcagcagacacgtccaagaaccagttctccctgaaactgagctctgtgaccgctgcggacacggccatgtattactgtgcgagaaaagatagcagcagctggtacggtaactggttcgacccctggggccagggaaccctggtcaccgtctcctca

SEQ ID NO: 5404 - DNA, 298 bp, Homo sapiens
  source 1..298: mol_type = other DNA
cactgtctctggtgcccccatcagtggttactactggagctggatccggcagcccccggggaagggactcgagtggattggctatatctataatagtgggagcaccaactacaacccctccctcaagagtcgagtcaccatatcagcagacacgtccaagaaccagttctccctgagagtgagatctgtgaccactgcggacacggccatgtattactgtgcgagaaaagatagcagcagctggtacggtaactggttcgacccctggggccagggaaccctggtcaccgtctcctca

SEQ ID NO: 5405 - DNA, 298 bp, Homo sapiens
  source 1..298: mol_type = other DNA
cactgtctctggtgactccatcagcggttactactggagctggatccggcagcccccagggaagggactggaatacattggctatatctataacagtgggagcaccaattacagcccctccctcaagagtcgagtcaccatatcagtagacacgtccaagaatcagttctccctgaagctgacctctgtgaccgccgcagacacggccacatattactgtgcgagaaaagatagtagcagctggtacggaaactggttcgacccctggggccagggaaccctggtcaccgtctcctca

SEQ ID NO: 5406 - DNA, 301 bp, Homo sapiens
  source 1..301: mol_type = other DNA
cactgtctctggtggctccgtcagtagttactactggagctggatccggcagcccccagggaagggactggagtggattggctatatctattcccgtgggagcaccaactacaacccctccctcaggactcgagtcaccatatcagtggacacgtccaagaaccagttctcactgaggctgaggtctgtgaccgctgcggacacggccgtctattactgtgcgagagatgggggcattgccgtgagtggtactgatgcttttgatatctggggccaagggacagtggtcaccgtctcttca

SEQ ID NO: 5407 - DNA, 301 bp, Homo sapiens
  source 1..301: mol_type = other DNA
cactgtctctggtggctccgtcagtagctactactggagctggatccggcagtccccagggaagggactggagtggattgggtatatctattcccgtgggagcaccaactacaacccctccctcaagagtcgagtcaccatatcagtagacacgtccaagaaccagttctccctgaggctgaggtctgtgaccgctgcggacacggccgtctattactgtgcgagagatgggggcatagcagtgagtggtactgatgcttttgatatctggggccaagggacaatggtcaccgtctcttca

SEQ ID NO: 5408 - DNA, 301 bp, Homo sapiens
  source 1..301: mol_type = other DNA
cactgtctctggaggctccgtcaagagttactactggagctggatccggcagcccccagggaagggactggaatggattggatatatctattacggtgggagcaccaactacaacccctccctcaacagtcgagtcaccatatcagtagacacgtccaacaaccgcttctccctgaaactgaggtctgtgaccgctgcggacacggccgtgtattactgtgcgagagatggaggtatagcagtgtctggtaccgatgcttttgacatctggggccaagggacaatggtcaccgtctcttca

SEQ ID NO: 5409 - DNA, 301 bp, Homo sapiens
  source 1..301: mol_type = other DNA
cactgtctctggtggctccgtcagtagttactactggagctggatccggcagcccccagggaagggactggagtggattgggtatatctattcccgagggagcaccaactacaacccctccctcaagagtcgagccaccatatcagtagacacgtccaagaaccagttctccctgaggctgaggtctgtgaccgctgcggacacggccgtctattactgtgcgagagatgggggcatagcagtgagtggtactgatgcttttgatatctggggccaagggacaatggtcaccgtctcttca

SEQ ID NO: 5410 - DNA, 301 bp, Homo sapiens
  source 1..301: mol_type = other DNA
cactgtctctggtggctccgtcagtagttactactggagctggatccggcagcccccagggaagggactggagtggattgggtatatctattcccgtgggagcaccaactacaacccctccctcaagagtcgagccaccatatcagtagacacgtccaagaaccagttctccctgaggctgaggtctgtgaccgctgcggacacggccgtctattactgtgcgagagatgggggcatagcagtgagtggtactgatgcttttgatatctggggccaagggacaatggtcaccgtctcttca

SEQ ID NO: 5411 - DNA, 301 bp, Homo sapiens
  source 1..301: mol_type = other DNA
cactgtctctggtggctccgtcactagttactactggagctggatccggcagcccccagggaagggactggagtggattgggtatatctattcccgagggagcaccaactacaacccctccctcaagagtcgagccaccatattagtagacacgtccaagaaccagttctccctgagactgaggtctgtgaccgctgcggacacggccgtctattactgtgcgagagatgggggcatagcagtgagtggtactgatgcttttgatatctggggccaagggacaatggtcaccgtctcttca

SEQ ID NO: 5412 - DNA, 273 bp, Homo sapiens
  source 1..273: mol_type = other DNA
gcttctggatacatgttctccacttctgatatcaattgggtgcgacaggcccctgggcaagggcttgagtgggtgggatggatgagccctaagagtgggttcacagcctatgcacagaagttccagggcacagtcaccatgaccagggacaactccataaacacagcctacatggaggtgagaagcctaaaatctgaggacacggccgtttattattgtgcaagagccctctttgactcctggggccagggaaccctggtcaccgtctcctct

SEQ ID NO: 5413 - DNA, 273 bp, Homo sapiens
  source 1..273: mol_type = other DNA
gcttctggatacaccttcagcaattctgatatcaactgggtgcgacaggccactggacaagggcttgagtggatgggatggatgagccctaatagtggaaacacaggctatgcacagaagttccggggcagagtcaccatgacctggaacacctccataggaacagcctacatggagctgagcagcctgagatctgacgacacggccgtgtattactgtgcgagagccctctttgactcctggggccagggaaccctggtcaccgtctcctca

SEQ ID NO: 5414 - DNA, 313 bp, Homo sapiens
  source 1..313: mol_type = other DNA
tgtggcctcgggattcagttttagaacttacaaaatgacctgggtccgccaggctccagggagggggctgcagtgggtggccaatatcaagcaggatgtaagtgaaacagactatgtggactctgtgaagggccgattcagcatctccagagacaacgccatgaattcattgtatctgcaaatgaacagcctgagagtcgaggacacggccacatattactgcgcgagatattgtagtggtggcagttgtccgacccactacttctacggaatggacgtctggggcccagggaccacggtcaccgtctcctca

SEQ ID NO: 5415 - DNA, 313 bp, Homo sapiens
  source 1..313: mol_type = other DNA
tgcagcctctggattcagctttcgtagttatcagatgacctgggtccgccaggctccaggaaaggggctggagtgggtggccaacataatccaagatggaagtgggaaatactatgtggactctgtggagggccgattcaccatctccagagacaacgccaagaactcactgtatctgcagatgaacgacctgagagccgtggacacggctgtctattactgtgcgagatattgtagtggtggtagttgccccacccactacttctacggtatggacgtctggggccaagggaccacggtcaccgtctcctca

SEQ ID NO: 5416 - DNA, 277 bp, Homo sapiens
  source 1..277: mol_type = other DNA
tgtagcctctggattcacctttagcaactatgccatgagctgggtccgccaggctccagggaaggggctggactgggtctcaactattaatggtagtggtagtagcacatactacgcagactccgtgaagggccggttcaccatctccagagacaattccaagaacacgctgtatctgcaaatgaacagcctgagagccgaggacacggccatatattattgtgcgaaacgtcagattgactactggggccagggaatgctggtcaccgtctcctca

SEQ ID NO: 5417 - DNA, 277 bp, Homo sapiens
  source 1..277: mol_type = other DNA
tgcagcctctggattcacctttagcagccatgccatgaactgggtccgccaggctccagggaaggggctggagtgggtctcagctattagtggtagtggtactaacacatactacgcagactccgtgaagggccggttcaccatctccagagacaattccaagaacacgctgtatctgcaaatgaacagcctgagagtcgaggacacggccgtatattactgtgcgaaacgccaaattgactactggggccagggaaccctggtcaccgtctcctca

SEQ ID NO: 5418 - DNA, 277 bp, Homo sapiens
  source 1..277: mol_type = other DNA
tgcagcctctggattcactcttagtggcgcatggatgagctgggtccgccaggctccagggaaggggctggagtgggtggccactataaaaggagatggaagtgaccaatactatgtggactctgtgaggggccgattcaccatctccagagacatcgacaagaactcactgttcctccaaatgaacagcctgagagtcgaggacacggctatatattactgtgcgaaggatacgctggacgtctggggccaagggaccacggtcaccgtctcctca

SEQ ID NO: 5419 - DNA, 277 bp, Homo sapiens
  source 1..277: mol_type = other DNA
tgcagcctctggattcactcttagtggcgcatggatgagctgggtccgccaggctccagggaaggggctggagtgggtggccactataaaaggagatggaagtgaccaatactatgtggactctgtgaggggccgattcaccatctccagagacatcgacaagaactcactgttcctccaaatgaacagcctgagagtcgaggacacggctatatattaccgtgcgaaggatacgctggacgtctggggccaagggaccacggtcaccgtctcctca

SEQ ID NO: 5420 - DNA, 277 bp, Homo sapiens
  source 1..277: mol_type = other DNA
tgcagcctctggattcactcttagtggcgcatggatgagctgggtccgccaggctccagggaaggggctggagtgggtggccactataaaaggagatggaagtgaccaatactatgtgcactctgtgaggggccgattcaccatctccagagacatcgacaagaactcactgttcctccaaatgaacagcctgagagtcgaggacacggctatatattactgtgcgaaggatacgctggacgtctggggccaagggaccacggtcaccgtctcctca

SEQ ID NO: 5421 - DNA, 277 bp, Homo sapiens
  source 1..277: mol_type = other DNA
tgcagcctctggattcactcttagtggcgcatggatgagctgggtccgccaggctccagggaaggggctggagtgggtggccactataaaaggagatggaagtgaccaatactatgtggactctgtgaggggccgattcaccatctccagagacatcgacaagaattcactgttcctccaaatgaacagcctgagagtcgaggacacggctatatattactgtgcgaaggatacgctggacgtctggggccaagggaccacggtcaccgtctcctca

SEQ ID NO: 5422 - DNA, 277 bp, Homo sapiens
  source 1..277: mol_type = other DNA
tgcagcctccggattcaccttgagagactcttggatgagctgggtccgccaggctccagggaaggggctggagtgggtggccaccatagggggggaagagagtcagaaattctatgtggactctgtgaagggccgattcaccatctccagagacgacgccaggagttcagtgtttctgcaaatggacagcctgagagtcgaggacacggccgtgtatttctgtgcgaaggacactttggacgtctggggccaagggaccacggtcaccgtctcctca

SEQ ID NO: 5423 - DNA, 277 bp, Homo sapiens
  source 1..277: mol_type = other DNA
tgcaacgtcgggattcattctgagaaacgcatggatgacctgggtccgccaggccccggggaaggggctggagtgggtggccaccatggggggtgaagaaagtgagaaattctatgtggactctgtgaagggccgattcatcatctccagagacgacgccaggagctcggtgtttctgcaaatggacagcctgagaggcgaggacacggccgtgtattactgtgcgaaggacactttggacgtccggggccaagggaccacggtcaccgtctcctca

SEQ ID NO: 5424 - DNA, 277 bp, Homo sapiens
  source 1..277: mol_type = other DNA
tgcagcctccggcttcactttgagaaacgcttggatgagctgggtccgccaggcaccagggaaggggctgcagtgggtggccaccatggggggggaggagtatgagaaattctatgtggactctgtgaagggccgattcaccatctccagagacgacgccaggagctcagtgtttctgcaagtggacagcctgagagtcgaggacacggccgtgtatttttgtgcgaaggacaccttggacgtctggggccaagggaccacggtcaccgtctcctca

SEQ ID NO: 5425 - DNA, 277 bp, Homo sapiens
  source 1..277: mol_type = other DNA
tgcagcctctggattcacattcagtagctatggcatgaactgggtccgccaggctccagggaaggggctggagtgggttgcacacattagcagtagtggtagtcccatatactacgcagactctgtgaagggccgattcaccatctccagagacaatggcaagaactcactgtatcttcaaatgagcagcctgagagacgaggacacggctacttattactgtgcgactctcgtctcggaccactggggccagggaaccctggtcaccgtcttctca

SEQ ID NO: 5426 - DNA, 277 bp, Homo sapiens; identical to SEQ ID NO: 5425
  source 1..277: mol_type = other DNA

SEQ ID NO: 5427 - DNA, 277 bp, Homo sapiens
  source 1..277: mol_type = other DNA
tgcagcctctggattcacattcagtagctatggcatgaactgggtccgccaggctccagggaaggggctggagtgggttgcacacattagcagtagtggtagtcccatatactacgcagactctgtgaagggccgattcaccatctccagagacaatggcaagaactcactgtatcttcaaatgagcagcctgagagacggggacacggctacttattactgtgcgactctcgtctcggaccactggggccagggaaccctggtcaccgtcttctca

SEQ ID NO: 5428 - DNA, 277 bp, Homo sapiens
  source 1..277: mol_type = other DNA
tgcagcctctggattcacattcagtagctatggcatgaactgggtccgccaggctccagggaaggggctggagtgggttgcacacattagcagtagtggtagtcccatatactacgcagactctgtgaagggccgattcaccatctccagagacaatggcaagaactcactgtatcttcaaatgagcagcctgagagacgaggacacggctacttattactgtgcgactctcgtctcggaccactggggccagggaaccccggtcaccgtcttctca

SEQ ID NO: 5429 - DNA, 277 bp, Homo sapiens
  source 1..277: mol_type = other DNA
tgcagcctctggattcacattcagtagctatggcatgaactgggtccgccaggctccagggaaggggctggagtgggttgcacacattagcagtagtggtagtcccatatactacgcagactctgtgaagggccgattcaccatctccagagacaatggcaagaactcactgtatcttcaaatgagcagcctgagagacgaggacacggctacttattactgtgcgactctcgtctcggaccactggggccagggaaccctggtcaccatcttctca

SEQ ID NO: 5430 - DNA, 277 bp, Homo sapiens
  source 1..277: mol_type = other DNA
tgtagcctctggattcacattcagtagttatggcatgaactgggtccgccaggctccagggaaggggctggagtgggtttcacacattagcagtagtggtagtcccatattctacgcagactctgtgaagggccgattcaccatctccagagacaatggcaagagctcactgtatctgcaaatgaccagcctgagagacgaagacacggctacttattactgtgcgactctcgtctcggaccactggggccagggaaccctggtcaccgtctcctca

SEQ ID NO: 5431 - DNA, 277 bp, Homo sapiens
  source 1..277: mol_type = other DNA
tgtagcctctggattcacattcagtagctatggcatgaactgggtccgccaggctccagggaaggggctggagtgggtttcacacattagcagtagtggtagtcccatcttctacgcagactctgtgaagggccgattcaccatctccagagacaatggcaagagctcactgtatctgcaaatgaccagcctgagagacgaagacacggctacttattactgtgcgactctcgtctcggaccactggggccagggaaccctggtcaccgtctcctca

SEQ ID NO: 5432 - DNA, 277 bp, Homo sapiens
  source 1..277: mol_type = other DNA
tgcagcctctggattcacattcagtagctatggcatgaactgggtccgccaggctccagggaaggggctggagtgggttgcacacattagcagtagtggtagtcccatatactacgcagactctgtgaagggccgattcaccatctccagagacaatggcaagaactcactgtatcttcaaatgagcagcctgagagacgaggacacagctacttattactgtgcgactctcgtctcggaccactggggccagggaaccctggtcaccgtcttctca

SEQ ID NO: 5433 - DNA, 277 bp, Homo sapiens
  source 1..277: mol_type = other DNA
tgtagcctctggattcgcattcagcacctatggcatgaactgggtccgccaggctccagggaaggggctggagtggatttcacacattagcagtagtggtagtcccatattctacgcagactctgtgaagggccgattcaccatctccagagacaatgccaagaactctctgtatctgcaaatgaccagcctgagagacgaagacacggctacttattactgtgcgactctcgtctcggaccactggggccagggaaccctggtcaccgtctcctca

SEQ ID NO: 5434 - DNA, 275 bp, Homo sapiens
  source 1..275: mol_type = other DNA
cagcctctggattcaccttcagtagctatggcatgcactgggtccgccaggctccagggaaggggctggagtgggttgcacacattagcagtagtggtagtcccatatactacgcagactctgtgaagggccgattcaccatctccagagacaatggcaagaactcactgtatcttcaaatgagcagcctgagagacgaggacacggctacttattactgtgcgactctcgtctcggaccactggggccagggaaccctggtcaccgtcttctca

SEQ ID NO: 5435 - DNA, 277 bp, Homo sapiens
  source 1..277: mol_type = other DNA
tgtagcctctggattcacattcagtagctatggcatgaactgggtccgccaggctccagggaaggggctggagtgggtttcacacattagcagtagtggtagtcccatattctacgcagactctgtgaagggccgattcaccatctccagagacaatggcaagagctcactgtatctgcaaatgaccagcctgagagacgaagacacggctacttattactgtgcgactctcgtctcggaccactggggccagggaaccctggtcaccgtctcctca

SEQ ID NO: 5436 - DNA, 279 bp, Homo sapiens
  source 1..279: mol_type = other DNA
gcttctggatacaccttctccaattatgatatcaactgggtgcgacaggccactggacaagggcttgagtgggtgggatggatgaaccctaaaagtggtaacacaggctatgcacagaagttccagggcagagtcaccatgaccaggcacacctccatgaccacagcctacatggaactaagcaacctgagatctgaggacacggccgtttattattgtgtgagagtagctggtagcattgactactggggccagggaaccctggtcaccgtctcctca

SEQ ID NO: 5437 - DNA, 279 bp, Homo sapiens
  source 1..279: mol_type = other DNA
gcttctggatacaccttctccaattatgatatcaactgggtgcgacaggccactggacaagggcttgagtgggtgggatggatgaaccctaaaagtggtaatacaggctatgcacagaagttccagggcagagtcaccatgaccaggcacacctccatgaccacagcctacatggaactaagcaacctgagatctgaggacacggccgtttattattgtgtgagagtagctggtagcattgactactggggccagggaaccctggtcaccgtctcctca

SEQ ID NO: 5438 - DNA, 279 bp, Homo sapiens
  source 1..279: mol_type = other DNA
gcttctggatacaccttcaccagttatgatatcaactgggtgcgacaggccactggacaagggcttgagtggatgggatggacgaaccccaagagtggttacacaggctatgcacagaagttccagggcagagtcaccatgaccagggacacctccacaagcacagcctacatggagctgagcaacctgagatctgaggacacggccttgtattattgtgtgagagtcgctggtagtatcgactactggggccagggaacccttgtcaccgtctcctca

SEQ ID NO: 5439 - DNA, 279 bp, Homo sapiens
  source 1..279: mol_type = other DNA
gcttctggatacaccttcaccagttatgatatcaactgggtgcgacaggccactggacaagggcttgagtggatgggatggacgaaccctaagagtggtaacacaggctatgcacagaagttccagggcagagtcaccatgaccagggacacctccataagcacagcctacatggagctgagcaacctgagatctgaggacacggccttgtattactgtgtgagagtcgctggtagtatcgactactggggccagggaaccctggtcaccgtctcctca

SEQ ID NO: 5440 - DNA, 279 bp, Homo sapiens
  source 1..279: mol_type = other DNA
gcttctggatacaccttcaccagttatgatatcaactgggtgcgacaggccactggacaagggcttgagtgggtgggatggacgaaccctaagagtggttacacaggctctgcacagaagttcctgggcagagtcaccatgaccagggacacctccataagcacagcctacatggagctgagcaacctgagatctgaggacacggcgttgtattactgtgtgagagtcgctggtagtatcgactactggggccagggaaccctggtcaccgtctcctca

SEQ ID NO: 5441 - DNA, 279 bp, Homo sapiens; identical to SEQ ID NO: 5438
  source 1..279: mol_type = other DNA

SEQ ID NO: 5442 - DNA, 279 bp, Homo sapiens
  source 1..279: mol_type = other DNA
gcttctggatacaccttcaccacttatgatatcaactgggtgcgacaggccactggacaagggcttgagtggatgggatggacgaaccctaagagtggttacacaggctcttcacagaacttcctgggcagagtcaccatgaccagggacagctccataagcacagcctacatggagctgagcaacctgagatctgaggacacggccttgtattattgtgtgagagtcgctggtagtatcgactattggggccagggaaccctggtcaccgtctcctca

SEQ ID NO: 5443 - DNA, 292 bp, Homo sapiens
  source 1..292: mol_type = other DNA
tgtagcctctggattcacctttagtacttattggatggcctgggtccgccaggctccagggaaggggctggaatgcgtggccaaaataaagcgagatggaagtgacaaatactatgtggactctgtgaagggccgattcaccatctccagagacagcgccaagaactcactgtatctgcaaatgaacagcctgagagtcgaagacacggctgtgtattactgtgcgagagacgctggccgttacggggactttgactactggggccagggaaccctggtcaccgtctcctca

SEQ ID NO: 5444 - DNA, 292 bp, Homo sapiens
  source 1..292: mol_type = other DNA
tgaagcctctggattcacctttagtatgtattggatgtgttgggtccgccaggctccagggaaggggccggagtgtgtggccaagataaaaaatgatggaagtgcgaaatactatgtggactctgtgaaggggcgattcaccatctccagagacaacgccaagaattcaatgtttctgcaaatgaatagcctgagagccgaggacacggctatttatcactgtgcgagagatgcaggaaggtatggtgactttgactactggggccagggaaccccggtcaccgtctcctca

SEQ ID NO: 5445 - DNA, 292 bp, Homo sapiens; identical to SEQ ID NO: 5444
  source 1..292: mol_type = other DNA

SEQ ID NO: 5446 - DNA, 292 bp, Homo sapiens
  source 1..292: mol_type = other DNA
tgaagcctttggattcacctttagtatgtattggatgtgctgggtccgccaggctccagggaaggggccggagtgtgtggccaagataagaaaggatggaagtgcgaaatactatgtggactctgtaaaggggcgattcaccgtctccagagacaacgccaagaactcactgtttctgcaaatgaacagcctgagaggcgaggacacggctgtatattactgtgcgagagatgcaggcaggtatggtgactttgactactggggccagggaaccccggtcaccgtctcctca

SEQ ID NO: 5447 - DNA, 298 bp, Homo sapiens
  source 1..298: mol_type = other DNA
tgcagcctctggattcaccttcagttcctctgacatgcactggctccgccaggctccaggcaaggggctggagtgggtggcagtaatatcatatggcggagggattataaagtatgcagactccgtgaagggccgattcaccatctccagagacaattccaagagcacgctgtatctgcaaatgaacagcctgagagctgaggacacggcggtctattactgtgcgaaagatctgactggagattaccgggcatactttgactactggggccagggaaccctggtcaccgtctcctca

SEQ ID NO: 5448 - DNA, 296 bp, Homo sapiens
  source 1..296: mol_type = other DNA
cagcctctggattcaccttcagttcctctgacatgcactggctccgccaggctccaggcaaggggctggagtgggtggcagtaatatcatatggcggagggattataaagtatgcagactccgtgaagggccgattcaccatctccagagacaattccaagagcacgctgtatctgcaaatgaacagcctgagagctgaggacacggcggtctattactgtgcgaaagatctgactggagattaccgggcatactttgactactggggccagggaaccctggtcaccgtctcctca

SEQ ID NO: 5449 - DNA, 298 bp, Homo sapiens
  source 1..298: mol_type = other DNA
tgcagcctctggattcaccttcagttcctctgacatgcactggctccgccaggctccaggcaaggggctggagtgggtggcagtaatatcatatggcggagggattataaagtatgcagactccgtgaagggccgattcaccatctccagagacaattccaagagcacgctgtatctgcaaatgaacagcctgagagctgaggacacggcggtctattactgtgcgaaagatctgactggagattaccgggcatactttgactactggggccaaggaaccctggtcaccgtctcctca

SEQ ID NO: 5450 - DNA, 298 bp, Homo sapiens
  source 1..298: mol_type = other DNA
tgcagcctctggattcaccttcagttcctctgacatgcactggctccgccaggctccaggcaaggggctggagtgggtggcagtaatatcatatggcggagggattataaagtatgcagactccgtgaagggccgattcaccatctccagagacaattccaagagcacgctgtatctgcaaatgaacagcccgagagctgaggacacggcggtctattactgtgcgaaagatctgactggagattaccgggcatactttgactactggggccagggaaccctggtcaccgtctcctca

SEQ ID NO: 5451 - DNA, 298 bp, Homo sapiens
  source 1..298: mol_type = other DNA
tgcagcctctggattcagcttcagtgccagcgacatgcactgggtccgccaggctccaggcaaggggctggagtgggtggcagttatatcaagtcttggaaatatcagattttatacagactccgtgaagggccgattcaccgtctcccgagacaattccaagaacacactgtatctgcaaatgaacagcctgacagcagaggatacggctgtatattactgtgccaaagatctgactggggactaccgtgcctactttgactactggggccagggaaccctggtcaccgtctcctcg

SEQ ID NO: 5452 - DNA, 298 bp, Homo sapiens
  source 1..298: mol_type = other DNA
tgcagcctctggattcagcttcagtgccagcgacatgcactgggtccgccaggctccaggcaaggggctggagtgggtggcagttatatcaactattggaaatatcagattttatgtagactccgtgaagggccgattcaccgtctcccgagacaattccaagaacacactctatctgcaaatgaacagcctgagagcagaggatacggctgtatattactgtgcgaaagatctgactggggactaccgtgcctactttgactactggggccagggaaccctggtcaccgtctcctca

SEQ ID NO: 5453 - DNA, 298 bp, Homo sapiens
  source 1..298: mol_type = other DNA
tgcagcctctggattcatcttcggtaactttgacatgcactgggtccgccagactccaggcaaggacctggagtgggtggcagttatatcaagtgatggaagtactaaaatctatagagactccgtgaagggccgattcaccatctccagagataattccaagaacacgttgtatctgcaaatgagcagcctgacacctgaggacacggctgtctattactgtgcgaaagatttgactggggactaccgggcctacttcgactattggggccagggaaccgtggtcaccgtctccgca

SEQ ID NO: 5454 - DNA, 316 bp, Homo sapiens
  source 1..316: mol_type = other DNA
tgcagcctccggattcacgttcagtagttataggatgaactgggtccgccaggctccagggaaggggctggagtgggttgcattcattagcactggtggtcataacatatattacgcagactctgtgaagggccgattcaccatctccagagacgatgccaagaactcagtgtatctgcaaatgaacagtctgaaagacgaggacacggctgtgtactactgtgcgagagataaattaggcagagaatttagtgactatgagacgatcccgccttttgtctactggggccagggaaccctggtcaccgtctcctca

SEQ ID NO: 5455 - DNA, 316 bp, Homo sapiens
  source 1..316: mol_type = other DNA
tgcagcctccggattcacgttcagtagttataggatgaactgggtccgccaggctccagggaaggggctggagtgggttgcattcattagcactggtggtcataacatatattacgcagactctgtgaagggccgattcaccatctccagagacgatgccaagaactcagtgtatctgcaaatgaacagcctgaaagacgaggacacggctgtgtactactgtgcgagagataaattaggcagagaatttagtgactatgagacgatcccgccttttgtctactggggccagggaaccctggtcaccgtctcctca

SEQ ID NO: 5456 - DNA, 316 bp, Homo sapiens
  source 1..316: mol_type = other DNA
tgcagcctccggattcacgttcagtagttataggatgaactgggtccgccaggctccagggagggggctggagtgggttgcattcattagcactggtggtcataacatatattacgcagactctgtgaagggccgattcaccatctccagagacgatgccaagaactcagtgtatctgcaaatgaacagtctgaaagacgaggacacggctgtgtactactgtgcgagagataaattaggcagagaatttagtgactatgagacgatcccgccttttgtctactggggccagggaaccctggtcaccgtctcctca

SEQ ID NO: 5457 - DNA, 286 bp, Homo sapiens
  source 1..286: mol_type = other DNA
tgtagcctctggattcaccttcagtaactccccaatgcactgggtccgccaagctccaggggagggactggtgtgggtctcacgtattggtggtggggggactgacattacctacgcggactccgtgaagggccgattcaccacctccagagacaacgccaagaacacggtatatctacaaatgaacaatctgagagtcgaggacacggctgtctattactgcacaggagatcggggaagcttgggtgactcctggggccagggaaccctggtcaccgtctcctca

SEQ ID NO: 5458 - DNA, 286 bp, Homo sapiens
  source 1..286: mol_type = other DNA
tgtaggctctggattcaccttcagtaactccccaatgcactgggtccgccaagctccaggggaggggctggtgtgggtctcacgtattggtggtggggggactgacattacctacgcggactccgtgaagggccgattcaccacctccagagacaacgccaagaacacggtatatctacaaatgaacaatctgagagtcgaggacacggctgtctattactgcacaggagatcggggaagcttgggtgactcctggggccagggaaccctggtcaccgtctcctca

SEQ ID NO: 5459 - DNA, 286 bp, Homo sapiens
  source 1..286: mol_type = other DNA
tgtagcctctggattcaccttcagtaactccccaatgcactgggtccgccaagctccaggggagggactggtgtgggtctcacgtattggtggtggggggactgacattacctacgcggactccgtgaagggccgattcaccacctccagagacaacgccaagaacacggtatatctacaaatgaacaatctgagagtcgaggacacggctgtctattattgcacaggagatcggggaagcttgggtgactcctggggccagggaaccctggtcaccgtctcctca

SEQ ID NO: 5460 - DNA, 286 bp, Homo sapiens
  source 1..286: mol_type = other DNA
tgtagcctctggattcaccttcagtaactccccaatgcactgggtccgccaagctccaggggagggactggtgtgggtctcacgtattggtggtggggggactgacattacctacgcggactccgtgaagggccgattcaccacctccagagacaacgccaagaacacggtatatctacaaatgaacaatctgagagtcgaggacacggctgtccattactgcacaggagatcggggaagcttgggtgactcctggggccagggaaccctggtcaccgtctcctca

SEQ ID NO: 5461 - DNA, 283 bp, Homo sapiens
  source 1..283: mol_type = other DNA
tgcagcgtctggacccatgttcagaaatggcccgatgcactgggtccgccagcctccaggagaggggccattgtgggtctcacgtattgatggttgggggggcacgacttacgcggccgccgtgcagggccggttcatcacttccagagacgacgccagcaacacgctgtccctgcacatgaacaacttgagacccgaggacacggctgtttattactgtacaggagatcgagggagcctaggtgactcctggggccagggaaccctggtcaccgtctcgtca

SEQ ID NO: 5462 - DNA, 286 bp, Homo sapiens
  source 1..286: mol_type = other DNA
tgtagcctctggattcaccttcagcaactccccaatgcactgggtccgccaaactccaggggggggactggtgtgggtctcacgtatttatagaggggaggccgacgttacctacgcggactctgtgaagggccgattcaccatctccagagacaacgccaagaacacggtatatctgcaaatgaacaatctgagagtcgaggacacggctgtctattactgcacaggagatcggggaagcttgggtgactcctggggccagggaaccctggtcaccgtctcctca

SEQ ID NO: 5463 - DNA, 286 bp, Homo sapiens; identical to SEQ ID NO: 5457
  source 1..286: mol_type = other DNA

SEQ ID NO: 5464 - DNA, 298 bp, Homo sapiens
  source 1..298: mol_type = other DNA
tgcagcctctggattcaccttcaatacctatggcatgcactgggtccgccaggctccaggcaaggggctggagtgggtggcacttatatcatatgatggatttaataaatactatgcagagtccatgaagggccgattcaccatctccagagataattccaagaacacgttatatctgcaaatgaacagcctgagacctgaagacacggctgtgtattactgtgcgaggacttccaggggaagttactactacggtatggacgtctggggccaagggaccacggtcaccgtctcctca

SEQ ID NO: 5465 - DNA, 298 bp, Homo sapiens
  source 1..298: mol_type = other DNA
tgcagcctctggattcaccttcagtacctatggcatgcactgggtccgccaggctccaggcaaggggctggagtgggtggcacttatatcatatgatggaagtaataaatactatgcagactccatgaagggccgattcaccatctccagagacaattccaagaacactctatatctgcaaatgaacagcctgagacctgaggacacggctgtgtattactgtgcgaggacttccaggggaagttactactacggtatggacgtctggggccaagggaccacggtcaccgtctcctcg

SEQ ID NO: 5466 - DNA, 298 bp, Homo sapiens
  source 1..298: mol_type = other DNA
tgcagcctctgggttcaccttcagtatctatggcatacactgggtccgccaggctccaggcaaggggctggagtgggtggcgcttatatcatatgatggaattaataaatactatgcagactccgtgaggggccgattcaccatctccagagacaattccgagaccacactgtatctgcaaatgaacagcctgagagttgaggacacggctgtctattactgtgcgaggacgtctagggggagctactactacggtatggacgtctggggccaagggaccacggtcaccgtctcctca

SEQ ID NO: 5467 - DNA, 286 bp, Homo sapiens
  source 1..286: mol_type = other DNA
tgcagcctctggattcacctttagcacctatgccatgagctgggtccgccaggctccagggaaggggctggagtgggtctcagcaattggttatagtggtgttgacacatactacgcaggctccgtgaagggccggttcaccatctccagagacaattccaagaatactctgtatctgcaaatggacagcctgagagacgaagacacggccgtatattactgtgcgcgagggagtcacggtgaacacgactcctggggccagggaaccctggtcaccgtctcctca

SEQ ID NO: 5468 - DNA, 286 bp, Homo sapiens
  source 1..286: mol_type = other DNA
tgcagcctctggattcacttttaacaactatgccatgagctgggtccgcctggctccagggaaggggctggaatgggtctcagctattggtggtattactactggcacatactacgcagactccgtgaagggccggttcaccatttccagagacaattccaagaacacactgtttctgcaaatgaacagcctgagagccgaggacacggccctatattactgtgcgagagggtcccacggtgagcacgactcttggggccagggtaccctggtcaccgtctcctca

SEQ ID NO: 5469 - DNA, 319 bp, Homo sapiens
  source 1..319: mol_type = other DNA
tgcagcctctggattcaccttcagtaattactggatgcattgggtccgccaagagccaggaaagggtctggtgtgggtctcacgtattaatcgtgatgggagcgacacaacctacgcggactccgtgcagggccgattcaccatctccagagacaacgccaagaacacgttgtatctgcaaatgaatagtctgagagccgaagacacggctgtgtattactgtgtaggagccccagactgtggtggtggtagctgcttctcccaccattactacggtttggacgtctggggccaagggaccacggtcaccgtctcctca

SEQ ID NO: 5470 - DNA, 319 bp, Homo sapiens
  source 1..319: mol_type = other DNA
tgcagcctctggattcaccttcagtaattattggatgcattgggtccgccaagagccaggaaagggtctggtgtgggtctcacgtattaatcgtgatgggagcgacacaacctacgcggactccgtgcagggccgattcaccatctccagagacaacgccaagaacacgttgtatctgcaaatgaatagtctgagagccgaagacacggctgtgtattactgtgtaggagccccagactgtggtggtggtagctgcttctcccaccattactacggtttggacgtctggggccaagggaccacggtcaccgtctcctca

SEQ ID NO: 5471 - DNA, 319 bp, Homo sapiens
  source 1..319: mol_type = other DNA
tgcagcctctggattcaccttcaggaattactggttccactgggtccgccaagctccagggaagggactggtgtgggtctcacgtgttaatagggatgggagtgagacagcctacgaggactccgtgaggggtcgcctcatcatctccagagacaacgccagaaatacgctgtacctgcaaatgagcagtctgagagccgaggacacggctgtatattactgtgtaggagcccctgactgtggtggtggtagctgcttctctcaccactactacggtctggacgtctggggccaaggggccacggtcgttgtctcctca

SEQ ID NO: 5472 - DNA, 319 bp, Homo sapiens; identical to SEQ ID NO: 5471
  source 1..319: mol_type = other DNA

SEQ ID NO: 5473 - DNA, 288 bp, Homo sapiens
  source 1..288: mol_type = other DNA
gcatctggatacacattcacctactactatatacactgggtgcgacaggtccctggacaaggacttgagtggatgggaataatcttccttggtggtgatgacacagcctacgcacagaagttccagggcagagtcaccatgaccagggacacgtccacgagcacagtctacatggagctgagcagcctgagatctgaggacacggccgtctatttctgtgcgagagagtccccacatactttttactttgactactggggtcagggatccctggtcaccgtctcctca

SEQ ID NO: 5474 - DNA, 288 bp, Homo sapiens
  source 1..288: mol_type = other DNA
gcatttggatacacattcacctactactatatacactgggtgcgacaggtccctggacaaggacttgagtggatgggaataatcttccttggtggtgatgacacagcctacgcacagaagttccagggcagagtcaccatgaccagggacacgtccacgagcacagtctacatggagctgagcagcctgagatctgaggacacggccgtctatttctgtgcgagagagtccccacatactttttactttgactactggggtcagggatccctggtcaccgtctcctca

SEQ ID NO: 5475 - DNA, 288 bp, Homo sapiens
  source 1..288: mol_type = other DNA
gcatctggatacaccttcaccaactactatatacactgggtgcgacaggcccctggacaagggcctgagtggatgggaataatcaatgtcactggtggtagcacaagtcacgcacagaatttccggggcagagtcaccatgaccagggacacgtccacgaggacagtctatatggagctgaacaacttgagatctgaggacacggccatatattactgtgcgagagaatcgcctcatactttctactttgactactggggccagggaactctggtcaccgtctcctca

SEQ ID NO: 5476 - DNA, 286 bp, Homo sapiens
  source 1..286: mol_type = other DNA
tgcaacctctggattcatcttcagtacctactggatgtactgggtccgccaagctccagggaaggggctggtgtgggtctcacgtattaaaagtgatgggattagcacaagctacggggactccgtgaagggccggttcaccatctccagagacaacgccaagaacacgttttttctgcaaatgaacagtctgagagacgaggacacggctgtgtattactgtgcaaggggggggatctactcctttgactactggggccagggaaccctggtcaccgtctcctca

SEQ ID NO: 5477 - DNA, 283 bp, Homo sapiens
  source 1..283: mol_type = other DNA
tgcagcctctggattcaccttcagtacttacggaatgtactgggtccgccaagctccagggaaggggctggtgtgggtcgcacgaattttcaaagatgagactactaattacgcggattccgtgaagggccgattcaccatctccagagacaacgccaagaacacgttgtatttgcaaatgagcagtctgagaggcgacgacacggctctatattactgtgcaagaggtgggatttattcttttgactactggggccagggaaccctggtcaccgtctcctca

SEQ ID NO: 5478 - DNA, 286 bp, Homo sapiens
  source 1..286: mol_type = other DNA
tgcagcctctggattcaacttcagtatctactggatgtactgggtccgccaagctccagggaaggggctggtgtgggtctcacgtattaaaagtgatggaattagcacaagttacggggactccgtgaagggccgattcaccatctccagagacaacgccaagaacacgttttttctgcaaatgaacagtctgagagacgaggacacggctgtgtattattgtgcaaggggggggatctactcctttgactactggggccagggaatattggtcaccgtctcctca

SEQ ID NO: 5479 - DNA, 292 bp, Homo sapiens
  source 1..292: mol_type = other DNA
tgcagcctctggattcaccttcggtgactacgccatgacctgggtccgccaggttccagggaaggggctggagtgggtttcatatattagcggtagtagtggcactatattctacgcagactctgtgaagggccgattcacaatctccagagacaatgtcaagaactcactgtacctgcaaatgaacagcctgagagacgaggactcggctttatattattgtgcgagagattcgggttcagcaggagctgatgattattggggccagggaaccctggtcaccgtctcctca

SEQ ID NO: 5480 - DNA, 292 bp, Homo sapiens
  source 1..292: mol_type = other DNA
tgtagcctctggattcaccttcggtggctatagcatgacctgggtccgccaggctccaggaaaggggctggagtgggtttcatacattagtggtggaagtaataccatatactacgcagactctgtgaagggccgattcaccatctccagagacaacgccaagaactcactgtatctgcaaatgaacagcctgagagccgaggacacggctgtgtattactgtgcgagagactcgggttcagcaggcgctgatgactactggggccagggaaccctggtcaccgtctcctca

SEQ ID NO: 5481 - DNA, 292 bp, Homo sapiens
  source 1..292: mol_type = other DNA
tgcagcctctggattcatcttcagtgactatagcatgacctgggtccgccagggtccagggaaggggctggagtgggtttcatatattagtggcagtagtagtattatatactacacagactctgtgaagggccgattcaccatctccagagacaatgtcaagaactcactgtacctgcaaatgaacagcctgagagacgaggacacggctgtgtattactgtgcgagagattcgggttcagcaggagctgatgattattggggccagggaaccctggtcaccgtctcctca

SEQ ID NO: 5482 - DNA, 292 bp, Homo sapiens
  source 1..292: mol_type = other DNA
tgcagcctctggattcaccttcagtgactatagcatgacctgggtccgccagggtccagggaaggggctggagtgggtttcatatattagtggtagtagtagtattatatactacgcagactctgtgaagggccgattcaccatctccagagacaatgtcaagaactcactgtacctgcaaatgaacagcctgagagacgaggacacggctgtatattactgtgcgagagattcgggttcagcaggagctgatgattattggggccagggaaccctggtcaccgtctcccca

SEQ ID NO: 5483 - DNA, 298 bp, Homo sapiens
  source 1..298: mol_type = other DNA
tgcagcctctggattcaccttcagtgactactatatgatctggatccgccaggctccagggaaggggctggagtgggtttcacacattactgatagtagtagttacacaaactccgcagactctgtgaagggccgattcaccatctccagagacaacgccaagaattcactgaatctgcaaatgaacagtctgagagtcgaggacacggccgtgtattactgtgcgagagttgggcgcttcccccacaactacgctatggacgtctggggccaagggaccacggtcaccgtctcctca

SEQ ID NO: 5484 - DNA, 298 bp, Homo sapiens
  source 1..298: mol_type = other DNA
tgcaggctctggattcaccttcagtgactactatatgatttggatccgccaggctccagggaaggggctggagtgggtttcatacattactgaggatagtcgtcatacaaactccgcggactctgtgaagggccgattcaccatctccagagacaacgccaaggcttcactgaatctgcaaatgaacagtctgagagtcgaggacacggccgtgtattattgtgcgagagttgggcgcttcccccacaactacgctatggacgtctggggccaagggaccacggtaatcgtctcctca

SEQ ID NO: 5485 - DNA, 298 bp, Homo sapiens
  source 1..298: mol_type = other DNA
tgcaggctctggattcaccttcagtgactactacatgatttggatccgccaggctccagggaaggggctggagtgggtttcatacattactgaggatagtcgtaatacaaactccgcggactctgtgaagggccgattcaccatctccagagacaacgccaaggcttcactgaatctgcaaatgaacagtctgagagtcgaggacacggccgtgtattattgtgcgagagttgggcgcttcccccacaactacgctatggacgtctggggccaagggaccacggtaatcgtctcctca

SEQ ID NO: 5486 - DNA, 307 bp, Homo sapiens
  source 1..307: mol_type = other DNA
tacaggctctggattctctggattcacctttggtgactactacatgagttggatccgccagactccagggaagggactggagtgggtttcccacattactgatacaagtagttacacaaggtattcagactctgtgaagggccgattcaccatctccagagacaacgtcaaaaacgcgctgtatctgcaaatgaatcgcctgagagccgaggacacggccgtttactactgtgcgagagtgggacgatttccccacaactacgctatggacgtctggggccaagggaccacggtcaccgtctcctca

SEQ ID NO: 5487 - DNA, 307 bp, Homo sapiens; identical to SEQ ID NO: 5486
  source 1..307: mol_type = other DNA

SEQ ID NO: 5488 - DNA, 310 bp, Homo sapiens
  source 1..310: mol_type = other DNA
tgcagcctctggattcacgtttagtagttattggatgagctgggtccgccaggctccagggaaggggctggagtgggtggccaacataaagcaagatggaagtgaatttttctctgtggactctgtgaagggccgattcaccattttcagagacaacgccaagaactcactctatctgcaaatgagcagcctgagagccgaggacacggctgtgtattactgtgcgagaggggattactatgatagtagtggtgattaccatgatgtttttgatatctggggccaagggacagtggtcaccgtctcttca

SEQ ID NO: 5489 - DNA, 310 bp, Homo sapiens; identical to SEQ ID NO: 5488
  source 1..310: mol_type = other DNA

SEQ ID NO: 5490 - DNA, 310 bp, Homo sapiens
  source 1..310: mol_type = other DNA
tgcagtctctggattcacctttagtagttattggatgagctgggtccgccaggctccagggaaggggctggagtgggtgggcaacataaagccagatggaagtgagaaatactatgtggactctgtgaagggccgattcaccatctccagagacaacgccaagaactcactatatctgcaaatgaacagcctgagagccgaggacacggctgtgtatttctgtgcgagaggggattactatgatagtagtggtgattatcatgatgtttttgatatctggggccaagggacaatggtcaccgtctcttca

SEQ ID NO: 5491 - DNA, 310 bp, Homo sapiens
  source 1..310: mol_type = other DNA
tgcagtctctggattcacctttagtagttattggatgagctgggtccgccaggctccagggaaggggctggagtgggtgggcaacataaagccagatggaagtgagaaatactatgtggactctgtgaagggccgattcaccatctccagagacaacgccaagaactcaatatatctgcaaatgaacagcctgagagccgaggacacggctgtgtatttctgtgcgagaggggattactatgatagtagtggtgattatcatgatgtttttgatatctggggccaagggacaatggtcaccgtctcttca

SEQ ID NO: 5492 - DNA, 308 bp, Homo sapiens
  source 1..308: mol_type = other DNA
cagcctctggattcacgtttagtagttattggatgagctgggtccgccaggctccagggaaggggctggagtgggtggccaacataaagcaagatggaagtgaatttttctctgtggactctgtgaagggccgattcaccattttcagagacaacgccaagaactcactctatctgcaaatgagcagcctgagagccgaggacacggctgtgtattactgtgcgagaggggattactatgatagtagtggtgattaccatgatgtttttgatatctggggccaagggacagtggtcaccgtctcttca

SEQ ID NO: 5493 - DNA, 310 bp, Homo sapiens
  source 1..310: mol_type = other DNA
tgcagtctctggattcacctttagtagttattggatgagctgggtccgccaggctccagggaaggggctggagtgggtgggcaacataaagccagatggaagtgagaaatactatgtggactctgtgaagggccgattcaccatctccagagacaacgccaagaactcactgtatctgcaaatgaacagcctgagagccgaggacacggctgtgtatttctgtgcgagaggggattactatgatagtagtggtgattatcatgatgtttttgatatctggggccaagggacaatggtcaccgtctcttca

SEQ ID NO: 5494 - DNA, 299 bp, Homo sapiens
  source 1..299: mol_type = other DNA
ccatctccggggacagtgtgtctagcaacagtgctgcttggaattggatcagacagtccccatcgagaggccttgagtggctgggaaggacatactacaggtccaagtggaataatgattatgcagtatctgtgaaaagtcgaataaccatcaacccagacacaaccgagaaccagttctccctgcagttgaagtctgtgactcccgaggacacggctgtgtattattgtgcaagagcaagggagggtggctggttctttgactactggggccagggaaccctggtcaccgtctcctca

SEQ ID NO: 5495 - DNA, 299 bp, Homo sapiens
  source 1..299: mol_type = other DNA
ccatctccggggacagtgtctctagcagcagtgcggcttggaactggatcaggcagtccccatcgagaggccttgagtggctgggaaggacatactacaggtccaagtggaataatgattatacaatatctgtaaaaagtcgaataaccatcaacccagacacatccaagaaccacttctccctgcagctgaactctgtgactcccgaggacacggctgtgtattactgtgcaagagcgcgggagggtggctggttctttgactactggggccagggaaccctggtcaccgtctcctca

SEQ ID NO: 5496 - DNA, 295 bp, Homo sapiens
  source 1..295: mol_type = other DNA
cactgtctctggtggctccattagcattagcaattacaactggggctggatccgccagcccccagggaaggggctggaatggattgggagtacctattatagtgggagcacccactacaacccgtccctcaagagccgagtcaccatatcggcagacacgtccaagaaccagttctccctgaagctgagctctgtgaccgccgcagacacggctgtatattactgtgcgagacatggggactatggtgactacctttactactggggccggggagccctggtcaccgtctcctca

SEQ ID NO: 5497 - DNA, 295 bp, Homo sapiens
  source 1..295: mol_type = other DNA
cactgtctctggtggctccattagcattagcaattacaactggggctggatccgccagcccccagggaaggggctggaatggattgggagtacctattatagtgggagcacccactacaacccgtccctcaagagccgagtcaccatatcggcagacacatccaagaaccagttctccctgaagctgacctctgtgaccgccgcagacacggctgtatattactgtgcgagacatggggactatggtgactacctttactactggggccggggagccctggtcaccgtctcctca

SEQ ID NO: 5498 - DNA, 295 bp, Homo sapiens
  source 1..295: mol_type = other DNA
cactgtctctggtggctccatcagcagtagtacttacagctggggctggatccgccagtccccagggaaggggctggagtggattgggagtgcctattatagtggggccacctactacaacccgtccctcaagagtcgagtcaccttatcgttagacacgtccaagaaccagttctccctgaagttgagctctgtgaccgccacagacacggctgtgtattactgtgcgagacatggggactacggtgactacctttactactggggccagggcaccctggtcaccgtctcctca

SEQ ID NO: 5499 - DNA, 295 bp, Homo sapiens
  source 1..295: mol_type = other DNA
cactgtctctggtggctccatcagcagtagtacttacaactggggctggatccgccagtccccagggaaggggctggagtggattgggagtgcctattatagtggggccaccttctacaacccgtccctcaagagtcgagtcaccttatcgttagacacgtccaagaaccagttctccctgaagttgagctctgtgaccgccacagacacggctgtgtattactgtgcgagacatggggactacggtgactacctttactactggggccagggcaccctggtcaccgtctcctca

SEQ ID NO: 5500 - DNA, 295 bp, Homo sapiens
  source 1..295: mol_type = other DNA
cactgtctctggtgactcctccagcagtagtacttacaactggggctggatccgccagaccccagggaagggactggagtggattgggagtatctattctagtgggagcaccttctacaacccgtccctcaagagtcgagtgaccatatccgtagacacgtccaacaagcagttctccctgaggctgacctctgtgaccgccgcagacacggctgtctattactgtgcgagacatggggactacggtgactacctctactactggggccagggaaccctggtcaccgtctcgtca

SEQ ID NO: 5501 - DNA, 295 bp, Homo sapiens
  source 1..295: mol_type = other DNA
cactgtctctggtggctccatcagcactagtacttacaactggggctggatccgccagcccccagggaaggggctggagtggattgggagtatctattatagtgggagcacctactacaacccgtccctcaagagtcgagtcaccatatcggcagacacgtcccagaaccagttctccctgaagctgagctctgtgaccgccgcagacacggctgtgtattactgtgcgagacatggggactacggtgactacctttactactggggccagggaaccctggtcaccgtctcctca

SEQ ID NO: 5502 - DNA, 295 bp, Homo sapiens
  source 1..295: mol_type = other DNA
cactgtctctggtggctccatcagcagtagtagttacaactggggctggatccgccagcccccagggaaggggctggagtggattgggagtatctattatagtgggagcacctactacaacccgtccctcaagagtcgagtcaccatatcggcagacacgtccaagaaccagttctccctgaagctgagctctgtgaccgccgcagacacggctgtatatttctgtgcgagacatggggactacggtgactacctctactactggggccagggaaccctggtcaccgtctcctca

SEQ ID NO: 5503 - DNA, 295 bp, Homo sapiens; identical to SEQ ID NO: 5501
  source 1..295: mol_type = other DNA

SEQ ID NO: 5504 - DNA, 295 bp, Homo sapiens
  source 1..295: mol_type = other DNA
cactgtctctggtggctccatcagcagtaatacttacaactggggctggatccgccagcccccagggaagggactggagtggattgggagtgtctattatagtgggagcacctactacaacccgtccctcaagagtcgagtcaccttatcgatagacacgtccaagaaccagttctccctgaagttgaggtctgtgaccgccacagacacggctgtgtactactgtgcgagacatggggattacggtgactacctttactactggggcctgggaaccctggtcaccgtctcctca

SEQ ID NO: 5505 - DNA, 295 bp, Homo sapiens
  source 1..295: mol_type = other DNA
cagtgtctctggtggctccatcagcagtagaacttacaactggggctggatccgccagcccccaggtaagggactggagtggattgggagtatctattatagtgggagcacccactacaacccgtccctcaagagtcgagtcacgatatcggcagacacgtccaagaaccagttctccctgaaggtgaactctgtgaccgccgcagacacggctgtgtattactgtgcgagacatggggactacggtgactacctttactactggggccagggaaccctggtcaccgtctcctca

SEQ ID NO: 5506 - DNA, 295 bp, Homo sapiens
  source 1..295: mol_type = other DNA
cagtgtctctggtggctccatcagcagtagtacttacagctggggctggatccgccagcccccagggaaggggctggagtggattgggagtgcctattatagtggggccacctactacaacccgtccctcaagagtcgagtcaccttatcgttagacacgtccaagaaccagttctccctgaagttgagctctgtgaccgccacagacacggctgtgtattactgtgcgagacatggggactacggtgactacctttactactggggccagggcaccctggtcaccgtctcctca

SEQ ID NO: 5507 - DNA, 295 bp, Homo sapiens
  source 1..295: mol_type = other DNA
cactgtctctggtggctccattagcattagcaattacaactggggctggatccgccagcccccagggaaggggctggaatggattgggagtgcctattatagtgggagtacccactacaacccgtccctcaagagtcgagtcaccatatcggcagactcgtccaagaaccagttctccctaaagctgagctctgtgaccgccgcagacacggctgtatattactgtgcgagacatggggactatggtgactacctttactactggggccggggagccctggtcaccgtctcctta

SEQ ID NO: 5508 - DNA, 295 bp, Homo sapiens
  source 1..295: mol_type = other DNA
cactgtctctggtgactccatcagcagtagtagttacaactggggctggatccgccagtccccagggaagggactggagtggattgggagtatctattctagtggaagcacctactacaacccgtccctcaagagtcgagtgaccatatccgtagacacgtccaagaggcaattctccctgaggctgacctctgtgaccgtcgcagacacggctgtctattactgtgcgagacatggggactacggtgactacctctactactggggccagggaacccaggtcaccgtctcgtca

SEQ ID NO: 5509 - DNA, 295 bp, Homo sapiens
  source 1..295: mol_type = other DNA
cactgtctctggtggctccatcagcagtcgtagttacaactggggctggatccgccagcccccagggaaggggctggagtggattgggagtgtctattctagtgggagcacctactacaacccgtccctcaagagtcgagtcaccatatccgtagacacgtccaagacccagttctccctgaagctgagctctgtcaccgccgcagacacggctgtgtattattgtgcgagacatggggactacggtgactacctctactactggggccagggaaccctggtcactgtctcctca

SEQ ID NO: 5510 - DNA, 295 bp, Homo sapiens
  source 1..295: mol_type = other DNA
cactgtctctggtgactccgtcagcagtagtacttacaactggggctggatccgccagtccccagggaagggactggagtggattgggagtatctattctagtggaagcacctactacaacccgtccctcaagagtcgagtgatcatgtccgtagacacgtctaagaggcaattctccctgaggctgacctctgtgaccgtcgcagacacggctgtctattactgtgcgagacatggggactacggtgactacctctactactggggccagggaacccaggtcaccgtctcgtca

SEQ ID NO: 5511 - DNA, 295 bp, Homo sapiens
  source 1..295: mol_type = other DNA
cactgtctctggtggctccatcagcagtcgtagttacaactggggctggatccgccagcccccagggaaggggctggagtggattggaagtgtctattctagtgggagcacctactacaacccgtccctcaagagtcgagtcaccatatccgtagacacgtccaagacccagttctccctgaagctgagctctgtcaccgccgcagacacggctgtgtattattgtgcgagacatggggactacggtgactacctctactactggggccagggaaccctggtcactgtctcctca

SEQ ID NO: 5512 - DNA, 276 bp, Homo sapiens
  source 1..276: mol_type = other DNA
acctctggttatacctttagcgcctatggtataagttgggtgcgacaggcccctggacaagggcttgagtggatgggatggatcagcgtttacaccggtgacatagagtatgcaccgaacttccagggcagactgaccatcacaatagacaaatccacgaccacagcccacatggaattgactggcctagtattcgacgacacggccatttattattgtgcgcgaaggggactccttgactactggggccagggaaccctggtcaccgtctcctca

SEQ ID NO: 5513 - DNA, 276 bp, Homo sapiens
  source 1..276: mol_type = other DNA
gcttctggttacacctttaccacctacgatatcagctgggtgcgacaggcccctggacaagggcttgagtggatgggatggatcagcgcttacaatggtaacacaaagtatgcacagaaactccagggcagagtcaccatgaccacagacacatccacgaccacagcctacatggagctgaggagcctgagatctgacgacacggccgtgtactactgtgcgagacgtggattacttgactactggggccagggaaccctggtcaccgtctcctca

SEQ ID NO: 5514 - DNA, 292 bp, Homo sapiens
  source 1..292: mol_type = other DNA
tgcagcctctggattcacctttagtaacttttggatgagctgggtccgccaggctccagggaaggggctggagtgggtggccaacatgaaccaagatggaagtgagaaatactatgtggactctgtgaagggccgattcaccatctccagagacaacgccaagaactcactgtatctgcaaatgaacagcctgagagccgaggacacggctgtatattactgtgcgagggataaaggtggttattatccctttgactactggggccagggaaccctggtcaccgtctcctca

SEQ ID NO: 5515 - DNA, 292 bp, Homo sapiens
  source 1..292: mol_type = other DNA
tgcagcctctggattcacctttagtacttattggatgagctgggtccgccaggctccagggagggggctggagtgggtggccaacatgaaccaagatggaagtaagaaagactatgtgggctctgtgaagggccgattcaccatctccagggacaacgccaagaactcactgtttctgcaaatgaacagcctgagagccgaggacacggctgtctattactgtgcgagagataaaggtggttattacccttttgactactggggccagggaaccctggtcaccgtctcctca

SEQ ID NO: 5516 - DNA, 298 bp, Homo sapiens
  source 1..298: mol_type = other DNA
tgtagcctctggattccccttcagtcattactggattcactgggtccgccaacctccagggaaggggctggtgtgggtctcacgtgttaacagtgatggaagtagcacaacctacgcggactccgtgaagggccgattcaccatctccagagacaacgccaagaacacgctgtatctgcaaatgaacagtctgagagtcgaggacacggctgtgtattattgtgcaagaggagagactaccaacagctggtcgacctttgactactggggccagggaaccctggtcaccgtctcctca

SEQ ID NO: 5517 - DNA, 298 bp, Homo sapiens
  source 1..298: mol_type = other DNA
tgtagcctctggattcaccttcagtagttactggattcactgggtccgccaagttccagggaaggggctggtgtgggtctcacgtattaaaagtgatggaagtttcacaacctacgcggactccgtgaagggccgattcaccatctccagagacaacgccaagaacacgctgtatctgcaaatgaacagtctgagagtcgaggacacggctgtgtattattgtgcaagaggagagactaccaacagctggtcgacctttgactactggggccagggaaccctggtcaccgtctcctca

SEQ ID NO: 5518 - DNA, 298 bp, Homo sapiens
  source 1..298: mol_type = other DNA
tgtagcctctggattcaccttcagtagttactggattcactgggtccgccaagttccagggaaggggctggtgtgggtctcacgtattagaagtgatggaagtttcacaacctacgcggactccgtgaagggccgattcaccatctccagagacaacgccaagaacacgctgtatctgcaaatgaacagtctgagagtcgaggacacggctgtgtattattgtgcaagaggagagactaccaacagctggtcgacctttgactactggggccagggaaccctggtcaccgtctcctca

SEQ ID NO: 5519 - DNA, 298 bp, Homo sapiens; identical to SEQ ID NO: 5517
  source 1..298: mol_type = other DNA

SEQ ID NO: 5520 - DNA, 298 bp, Homo sapiens
  source 1..298: mol_type = other DNA
tgcggcctctggattccccttcaatcactattggatgcactgggtccgccaatctccagggaagaggccgatgtggatttcacgtgtcaattttgatgggcgtgaaacagcctacgcggactccgtgaggggccgtttcaccatctccagagacaacgccgagaacactctgtttctgcaaatgaacagtctgagagccgaagacacgggtgtctattattgtgcaagaggagaaactaccaacagctggtcaacctttgactactggggccagggaaccctggtcaacgtctcctca

SEQ ID NO: 5521 - DNA, 298 bp, Homo sapiens
  source 1..298: mol_type = other DNA
tgcagcctctggattccccttcaataagtattggatgcactgggtccgccaatctccagggaagaggccggtgtggatttcacgtgttaattttgatgggagtgatacagcctacgcggactccgtgaggggccgtttcaccatctccagagacaacgccaagaacactctgtttctgcaaatgaacagtctgagagccgaagacacgggtgtctattattgtgcaagaggagaaactaccaacagctggtcaacctttgactactggggccagggaagcctggtcagcgtctcctca

SEQ ID NO: 5522 - DNA, 298 bp, Homo sapiens
  source 1..298: mol_type = other DNA
tgcagcctctggattccccttcagtagttactggattcactgggtccgccaaactccagggaaggagctggtgtgggtctcacgtattagaggtgatggaagaagtacaacctacgcggactccgtgaagggccgattcaccatctccagagacaacgccaagaacacggtgtatctgcaaatgaacagtctgagagccgaggacacggctgtgtattactgtgcaagaggagagactaccaacagctggtcgacctttgactactggggccagggaaccctggtcgccgtctcctca

SEQ ID NO: 5523 - DNA, 298 bp, Homo sapiens
  source 1..298: mol_type = other DNA
tgcagcctctggattccccttcagtagttactggattcactgggtccgccaaactccagggaaggagctggtgtgggtctcacgtattaaaggtgatggaagaagtacaacctacgcggactccgtgaagggccgattcaccatctccagagacaacgccaagaacacggtgtatctgcaaatgaacagtctgagagccgaggacacggctgtgtattactgtgcaagaggagagactaccaacagctggtcgacctttgactactggggccagggaaccctggtcgccgtctcctca

SEQ ID NO: 5524 - DNA, 298 bp, Homo sapiens
  source 1..298: mol_type = other DNA
cgtagcctctggattcaccttcagtaattactggattcactgggtccgccaacctccagggaaggggctggtgtgggtcgcacgtgttaaaagtgatggaagtagcacaacgtatgcggactccgtgaagggccgattcaccatctccagagacaacgccatgaacactctgtatctgcaaatgaacagtctgagagtcgaggacacggctgtgtattattgtgcaagaggagagactaccaacagctggtcgacctttgactactggggccagggaaccctggtcaccgtctcctca

SEQ ID NO: 5525 - DNA, 310 bp, Homo sapiens
  source 1..310: mol_type = other DNA
tgcagcctctggaccctctggattcacccttagtacctatggcatgaactgggtccgccaggctccacggaagggcctggagtgggtctcaactattagtgatgatggttcttacacatattacgcagactccgtgaagggccggttcaccatctccagagacaactccaagaacacggtgtatctgcaaatgaacagcctgagagccgacgacacggccgtatattactgtgcgaaagaccgatattgtagtagtattaggtgccccactgactactggggccagggaaccctggtcaccgtctcctca

SEQ ID NO: 5526 - DNA, 310 bp, Homo sapiens
  source 1..310: mol_type = other DNA
tgcagcctctggaccctctggattcacccttagcagctatggcatgaactgggtccgccaggctccacggaagggcctggagtgggtctcaactattagtgatgatggttcttacacatattacgcagactccgtgaagggccggttcaccatctccagagacaattccaagaacacggtgtatctgcaaatgaacagcctgagagccgacgacacggccgtatattactgtgcgaaagaccgatattgtagtagtattaggtgccccactgactactggggccagggaaccctggtcaccgtctcctca

SEQ ID NO: 5527 - DNA, 310 bp, Homo sapiens
  source 1..310: mol_type = other DNA
tgcagcctctggaccctctggattcatctttagcagctatgccatgaactgggtccgccaggctccacggaagggcctggagtgggtctcaactattagtggtgatggtgcttacacatactacgcagactccgtgaagggccggttcaccatctccagagacaattccaagaacacggtgtatctgcaaatgaacagcctgagagccgacgacacggccgtatattactgtgcgaaagaccgatattgtagtagtattaggtgccccactgactactggggccagggaaccctggtcaccgtctcctca

SEQ ID NO: 5528 - DNA, 310 bp, Homo sapiens
  source 1..310: mol_type = other DNA
tgcagcctctggaccctctggattcatctttagcagctatgccatgaactgggtccgccaggctccacggaagggcctggagtgggtctcaactattagtggtgatggtgcttacacatactacgcagactccgcgaagggccggttcaccatctccagagacaattccaagaacacggtgtatctgcaaatgaacagcctgagagccgacgacacggccgtatattactgtgcgaaagaccgatattgtagtagtattaggtgccccactgactactggggccagggaaccctggtcaccgtctcctca

SEQ ID NO: 5529 - DNA, 301 bp, Homo sapiens
  source 1..301: mol_type = other DNA
tgcagcctctggagtcagcattagcagttatgccatgaactgggtccgccaggctccagggaaggggctggagtgggtctcagctattagtggcagtggtgatagcacatactacgcagactccgtgaagggccggttcaccatttccagagacaattccaagaatatgctgtatctgcaaatgagccgcctgacagtcgacgacacggccgtatattactgtgcgaaagaccgatattgtagtagtatcagatgcccgactgactactggggccagggaaccctggtcaccgtctcctca

SEQ ID NO: 5530 - DNA, 301 bp, Homo sapiens
  source 1..301: mol_type = other DNA
tgcagcctccggagtcagcattagcagttatgccatgaactgggtccgccaggctccagggaaggggctggagtgggtctcagctattagtggcagtggtgatagcacatactacgcagactccgtgaagggccggttcaccatttccagagacaattccaagaatatgctgtatctgcaaatgaacagcctgacagtcgacgacacggccgtatattactgtgcgaaagaccgatattgtagtagtatcagatgcccgactgactactggggccagggaaccctggtcaccgtctcctca

SEQ ID NO: 5531 - DNA, 310 bp, Homo sapiens
  source 1..310: mol_type = other DNA
tgcagcctctggaccctctggattcacctttagcagctatggcatgaactgggtccgccaggctccacggaagggcctggagtgggtctcaactattagtggtgatggttcttacacatattacgcagactccgtgaagggccggttcaccatctccagagacaattccaagaacacggtgtatctgcaaatgaacagcctgagagccgacgacacggccgtatattactgtgcgaaagaccgatattgtagtagtattaggtgccccactgactactggggccagggaaccctggtcaccgtctcctca

SEQ ID NO: 5532 - DNA, 310 bp, Homo sapiens
  source 1..310: mol_type = other DNA
tgcagcctctggaccctctggattcatctttagcagctatgccatgaactgggtccgccaggctccacggaagggcctggagtgggtctcaactattagtggtgatggtgcttacacatattacgcagactccgtgaagggccggttcaccatctccagagacaattccaagaacacggtgtatctgcaaatgaacagcctgagagccgacgacacggccgtatattactgtgcgaaagaccgatattgtagtagtattaggtgccccactgactactggggccagggaaccctggtcaccgtctcctca

SEQ ID NO: 5533 - DNA, 310 bp, Homo sapiens
  source 1..310: mol_type = other DNA
tgcagcctctggaccctctggattcatctttagcagctatggcatgaactgggtccgccaggctccacggaagggcctggagtgggtctcaactattagtggtgatggtgcttacacatactacgcagactccgtgaagggccggttcaccatctccagagacaattccaagaacacggtgtatctgcaaatgaacagcctgagagccgacgacacggccgtatattactgtgcgaaagaccgatattgtagtagtattaggtgccccactgactactggggccagggaaccctggtcaccgtctcctca

SEQ ID NO: 5534 - DNA, 310 bp, Homo sapiens
  source 1..310: mol_type = other DNA
tgcagcctctggaccctctggattcaccattagcacctatggcatgaactgggtccgccaggctccacggaagggcctggagtgggtctcaactattagtgatgatggttcttacacatactacgcagactctgtgaagggccggttcaccatctccagagacaattccaagaacacggtgtatctgcaaatgaacagcctgagagccgacgacacggccgtatattactgtgcgaaagaccgatattgtagtagtattaggtgccccactgactactggggccagggaaccctggtcaccgtctcctca

SEQ ID NO: 5535 - DNA, 310 bp, Homo sapiens
  source 1..310: mol_type = other DNA
tgcagcctctggaccctctggattcacctttagcaggtatggcatgaactgggtccgccaggctccacggaagggcctggagtgggtctcaactattagtgatgatggttcttacacatattacgcagactccgtgaagggccggttcaccatctccagagacaattccaagaacatggtgtatctgcaaatgaacagcctgagagccgacgacacggccgtatattactgtgcgaaagaccgatattgtagtagtattaggtgccccactgactactggggccagggaaccctggtcaccgtctcctca

SEQ ID NO: 5536 - DNA, 310 bp, Homo sapiens
  source 1..310: mol_type = other DNA
tgtagcctctggaccctctggattcacctttaacagctatgccatgaactgggtccgccaggctccacggaagggcctggagtgggtctcaactattagtggtgatggtgcttacacatactacgcagactccgtgaagggccggttcaccatctccagagacaattccaagaacacggtgtatctgcaaatgaacagcctgagagccgacgacacggccgtatattactgtgcgaaggaccgatattgtagtagtattaggtgccccactgactactggggccagggaaccctggtcaccgtctcctca

SEQ ID NO: 5537 - DNA, 310 bp, Homo sapiens
  source 1..310: mol_type = other DNA
tgcagcctctggaccctctggattcatccttagcagttatgccatgaactgggtccgccaggctccacggaagggcctggagtgggtctcaactattagtggtgatggtgcttacacatactacgcagactccgtgaagggccggttcaccatctccagagacaattccaagaacacggtgtatctgcaaatgaacagcctgagagccgacgacacggccgtatatttctgtgcgaaagaccgatattgtagtagtattaggtgccccactgactactggggccagggaaccctggtcaccgtctcctca

SEQ ID NO: 5538 - DNA, 310 bp, Homo sapiens
  source 1..310: mol_type = other DNA
tgcagcctctggaccctctggattcacctttagcagctatggcatgaactgggtccgccaggctccacggaagggcctggagtgggtctcaactattagtggtgatggtggttatacatactacgcagactccgtgaagggccggttcaccatctccagagacaattccaaaaacacggtgtatctgcaaatgaacagcctgagagccgacgacacggccgtatattactgtgcgaaagaccgatattgtagtagtattaggtgccccactgactactggggccagggaaccctggtcaccgtctcctca

SEQ ID NO: 5539 - DNA, 280 bp, Homo sapiens
  source 1..280: mol_type = other DNA
tgcagcctctggattcacctttaacagttattggatgagctgggtccgccaggctccagggaaggggctggagtgggtggccaacatgaagcaagatggaagtgagacacactatgtggactctgtgaagggccgattcaccatctccagagacaacgccaagaactcactgtatctgcaaatgaacagcctgagagccgaggacacggctgtatattactgtgcgagaatggcgtcacttgactactggggccagggagccctggtcaccgtctcctca

SEQ ID NO: 5540 - DNA, 280 bp, Homo sapiens
  source 1..280: mol_type = other DNA
tgcagcctctggattcaccctcaggagttattggatgagctgggtccgccaggctccagggaaggggctggagtgggtggccaacataaagcacgatggaagtgagaagtattatgtggactctgtgaagggccgattcaccatctccagagacaacgccgagaactcactttctctgcaaatgaacagcctgagagtcgaagacacggctgtctattactgtgcgagaatggctagtcttgactactggggccggggaaccctggtcaccgtctcctca

SEQ ID NO: 5541 - DNA, 280 bp, Homo sapiens
  source 1..280: mol_type = other DNA
tgcagcctctggattcaccctcaggagttattggatgagctgggtccgccaggctccagggaaggggctggagtgggtggccaacataaagcacgatggaagtgagaagtattatgtggactctgtgaagggccgattcaccatctccagagacaacgccgagaactcactttctctgcaaatgaacagcctgagagtcgaagacacggctgtgtattactgtgcgagaatggctagtcttgactactggggccggggaaccctggtcaccgtctcctca

SEQ ID NO: 5542 - DNA, 301 bp, Homo sapiens
  source 1..301: mol_type = other DNA
tgcagcctctggactcacctttagcagctatgccatgagttgggtccgccaggctccagggaaggggctggagtgggtctcaactattagtgttagtggtgatagaacattccacgcagacttcgcgaagggccggttcaccatctccagagacaattccaagaacacgctgtatatgcaaatgaacagcctgagagccgaggacacggccgtatattactgtgcgaaggatggggatgataatcgcccccccgatgcttatgatatctggggccaagggacagtggtcaccgtctcttca

SEQ ID NO: 5543 - DNA, 301 bp, Homo sapiens
  source 1..301: mol_type = other DNA
tgcagcctctggattcaccttcagtacctatgccatgacctgggtccgccaggctccagggaaggggctggaatgggtctctactattattgatagtggtgctaggacacaatatgcagactccgtgaggggccgcttcaccatctccagagacaattccaagaacacgctgtatctgcaaatgaacagcctgagagccgaagacacggccgtctactactgtgcgaaagatggggatgataataggccgccggatgcttatgatatctggggccaagggacaatggtcaccgtctcttca

SEQ ID NO: 5544 - DNA, 301 bp, Homo sapiens
  source 1..301: mol_type = other DNA
tgaagcctctggattcacccttagcagctacgccatgagctgggtccgccaggcgccagggaaggggctggagtgggtctcaactattagtgatagtggtagtagaacatggtacgcagactccctgaagggccgggtcaccatctccagagacaattccaagaacacggtgtatctggaaatgaacagcctgagagccgaggacacggccgtatattactgtgcgaaagacggagatgacaataggcctccggatgcttatgatatctggggccaagggactatggtcaccgtctcttca

SEQ ID NO: 5545 - DNA, 289 bp, Homo sapiens
  source 1..289: mol_type = other DNA
tgcggcctccgaattcagttttagtaactattggatgggctgggtccgccaggccccagggaaggggctggagtggatggccaacatacaccaaggcggaagtcagaaatactatgcggactctgtgaagggccgattcaccatctccagagacaacgccaagcactcactgtatttgcaaatgaatagcctgagagccgaggacacggctgtgtattattgtgtgagatggggagtctcctacggtatggacgtctggggccaagggaccacggtcaccgtctcccca

SEQ ID NO: 5546 - DNA, 289 bp, Homo sapiens
  source 1..289: mol_type = other DNA
tgcggcctccgaattcagttttagtaactattggatgggctgggtccgccaggccccagggaaggggctggagtggatggccaacatacaccaaggcggaagtcagaaatactatgcggactctgtgaagggccgattcaccatctccagagacaacgccaagcactcactgtatttgcaaatgaatagcctgagagccgaggacacggctgtgtattattgtgtgagatggggagtctcctacggtatggacgtctgggaccaagggaccacggtcaccgtctcccca

SEQ ID NO: 5547 - DNA, 289 bp, Homo sapiens
  source 1..289: mol_type = other DNA
tgcagcctctgaattcagtttaagtggctattggatggcctgggtccgccaggctccagggaaggggctggagtgggtggccatcataaagcaacttggcagtgagaggtactatgtggactctgtgaagggtcgattcgccatctccggagacaacaccaagaactcactgtatctccaaatgaacagcctgagagccgaggatacggctatgtattactgtgtgagatggggggtgagctacggtatggacgtctggggccaagggaccaccgtcactgtcgcctca

SEQ ID NO: 5548 - DNA, 289 bp, Homo sapiens
  source 1..289: mol_type = other DNA
tgcagcctctggattcagtttaagtggctattggatggcctgggtccgccaggctccggggaaggggctggagtgggtggccatcataaaccaagatggcagtgagaaatactatgtggactctgtgaagggccgattcgccgtctccggagacaacaccaagaactcactgtatctgcaaatgaacagcctgagagccgaggatacggctatgtattactgtgtgagatggggggtgagctacggtatggacgtctggggccaagggaccaccgtcactgtcgcctca

SEQ ID NO: 5549 - DNA, 304 bp, Homo sapiens
  source 1..304: mol_type = other DNA
tgcaacctctggattccctttcagtgaatatagcatgaactgggtccgccaggctccagggaaggggctggagtggatttcacacattagtgccgctactagtaactccatatattacgcagactctgtgaagggccgatttaccatctccagagacaatgccaagaactcactgtatctgcaaatgaacagcctgagagacgaagacacggctgtctattactgtgcgacagatggagtgggagttgtccccggtgatgtttttgatatctggggccaagggacaatggtcaccgtctcttca

SEQ ID NO: 5550 - DNA, 301 bp, Homo sapiens
  source 1..301: mol_type = other DNA
tgcagcctctggattccccttcattacacacagcatgaactgggtccgccaggctccagggaaggggctggagtggctgtcacacagtgttgctggaaatgatatcatattctacgcagactctgtgaagggccgattcaccatgtccagagacaatgccaagaactcagtgtttctgcaaatggacagcctgagagacgaggacacggctttatattactgtgcgacagatggggtaggagttgttccgggggatgtttttgatatctggggccgagggacaatggtcaccgtctcctca

SEQ ID NO: 5551 - DNA, 307 bp, Homo sapiens
  source 1..307: mol_type = other DNA
tgcagcctctggactcaccttcagtgactatagcatgcagtgggtccgccaggctccagggaaggggctggagtgggtttcatacattagtggtggttctgataccatttactacgcagactctgtgaagggccgattcaccatctccagagacaatgccaagaattcactgtatctacaaatgaacagcctgagagacgaggacacggctgtgtattactgtgcgagaggccaactacggggctttgactactggggccagggaaccctggtcaccgtctcctcaggtctggtcaacgtctcctca

SEQ ID NO: 5552 - DNA, 286 bp, Homo sapiens
  source 1..286: mol_type = other DNA
tgcagcctccggattcaccttcagtgcctatgccatgcactgggtccgccaggctccagggaaggggctggagtgggtttcattcattaatagtgtaggtaatagcgtttactacgcagactctgtgaggggccgattctccatctccagagacaatgccaagaactcactgtatctgcaaatgaacagcctgagagacgaggacacggctgtgtatttctgtgcgaggggtcaactacgcggctttgactactggggccagggagccctggtcaccgtctcctca

SEQ ID NO: 5553 - DNA, 277 bp, Homo sapiens
  source 1..277: mol_type = other DNA
tgcagcctctggattctccctcagtagtcatgatatgagctgggtccgccaggctcctgggaaggggctggagtgggtttcatacattagtggtagtggtactggcatatactacgcagagtctgtgaagggccgattcaccatcttcagagacaattccaagaactctctgtatctgcaaatgaacagcctgagagacgaggacacggctgtgtattactgtgcgagaggtcatatggacgtctggggccaagggaccacggtcaccgtctcctca

SEQ ID NO: 5554 - DNA, 274 bp, Homo sapiens
  source 1..274: mol_type = other DNA
tgcagcctctggattcaccctcagtagccatgatatgagctgggtccgccaggctccagggaagcggctggagtgggttgcatacattagtagaagtagttccacatactatgcagactctgtgaagggccgattcaccatctccagagacaatggcaagaactcattgcatctgcaaatgatcagcctgagagacgacgacacggctgtgtatttctgcgcgcgcggccacatggacgtctggggcacagggaccacggtcaccgtctcctca

SEQ ID NO: 5555 - DNA, 274 bp, Homo sapiens
  source 1..274: mol_type = other DNA
tgcagcctctggatttaccctcagtagccatgatatgagctgggtccgccaggctccagggaagcggctggagtgggttgcatacattagtggaggtagttccacatactatgcagactctgtgaagggccgattcaccatctccagagacaatggcaagaactcattgcatctgcaaatgatcagcctgagagacgacgacacggctgtgtatttctgcgcgcgcggccacatggacgtctggggcacagggaccacggtcaccgtctcctca

SEQ ID NO: 5556 - DNA, 274 bp, Homo sapiens
  source 1..274: mol_type = other DNA
tgcagcctctggattcaccctcagtagccatgatatgagctgggtccgccaggctccagggaagcggctggagtgggttgcatacatcagtagaagtggttccacatactatgcagactctgtgaagggccgattcaccatctccagagacaatggcattaactcattgcatctgcaaatgatcagcctgagagacgacgacacggctgtgtatttctgcgcgcgcggccacatggacgtctggggcacagggaccacggtcaccgtctcctca

SEQ ID NO: 5557 - DNA, 280 bp, Homo sapiens
  source 1..280: mol_type = other DNA
cactgtctctggtgactccatcactagttcctactggagctggatccggcagcccccagggaagggactggaataccttggatatatctattacactgggattaccaattacaacccctccctcaagagtcgggtcagcatgtcaatagacgcgtccaggaaccaggtctccctggacctgagctctgtgaccgctgcggacacggccgtgtattactgtgcgaaaactgcccgagtccccgtctattggggccagggaaccctggtcaccgtctcctca

SEQ ID NO: 5558 - DNA, 280 bp, Homo sapiens
  source 1..280: mol_type = other DNA
cactgtctctggtgactccttcactacttcctactggagctggatccggcagctcccaggggggggactggagtccattgggtatatccatcacagtggaatcaccaactacaacccctccctctggggtcgagccactatatcaatggacatgtctaagggccaattctccctgaagttgtcctctgtgaccgctgcagacacggccgtctattactgtgcgaaaaccgctcgggttcctgtctactggggccagggagccctggtcatcgtctcctca

SEQ ID NO: 5559 - DNA, 310 bp, Homo sapiens
  source 1..310: mol_type = other DNA
tgcagcctctggaccctctggattcaccttaagcacctatggcatgaactgggtccgccaggctccacggaagggcctggagtgggtctcaactattagtgctgatggttcttatacatactacgcagactccgtgaagggccgattcaccatctccagagacaattccaagaacacagtgtatctgcaaatgaacagcctgagagccgacgacacggccatatattactgtgcgaaagaccgatattgtactagtattaggtgccccactgactactggggccagggaaccctggtcaccgtctcctca

SEQ ID NO: 5560 - DNA, 310 bp, Homo sapiens
  source 1..310: mol_type = other DNA
tgcagcctctggaccctctggattcaccattagcacctatggcatgaactgggtccgccaggctccacggaagggcctggagtgggtctcaactattagtagtgatggttcttacacatactacgcagactccgtgaagggccggttcaccatctccagagacaattccaagaacacggtgtatctgcaaatgaacagcctgagagccgacgacacggccatatactactgtgcgaaagaccgatactgtactagtattaggtgccccactgactactggggccagggaaccctggtcaccgtctcctca

SEQ ID NO: 5561 - DNA, 310 bp, Homo sapiens
  source 1..310: mol_type = other DNA
tgcagcctctggaccctctggattcaccattagtacctatggcatgaactgggtccgccaggctccacggaagggcctggagtgggtctcaactattagtgctgatggttctcacacatactacgcagactctgtgaagggccggttcaccatctccagagacaattccaagaacacggtgtatctgcaaatgaacagcctgagagccgacgacacggccgtatattactgtgcgaaagaccgatattgtactagtattaggtgccccactgactactggggccagggaaccctggtcaccgtctcctca

SEQ ID NO: 5562 - DNA, 301 bp, Homo sapiens
  source 1..301: mol_type = other DNA
tgtagcctctggagtcgcccttagcagctatgccatgaactgggtccgcctggctccagggaaggggctggaatgggtctcaagtataagtgatagtggtggtagcacatactacgcagactccgtgaagggccggttcaccatctccagagacaattccaagaacacgctatatctgcaaatgaacagcctgagagccgaggacacggccatatattactgtgcgaaagatcgatactgtactagtatcaggtgtcccactgactactggggccagggaaccctggtcaccgtctcctca

SEQ ID NO: 5563 - DNA, 310 bp, Homo sapiens
  source 1..310: mol_type = other DNA
tgcagcctctggaccctctggattcacccttagcacctatggcatgaactgggtccgccaggctccacggaagggcctggagtgggtctcaactattagtgctgatggttcttacacatattacgcagactccgtgaagggccggttcaccatctccagagacaattccaagaacacggtgtatctccaaatgaacagcctgagagccgacgacacggccgtatattactgtgcgaaagaccgatattgtactagtattaggtgccccactgactactggggccagggaaccctggtcaccgtctcctca

SEQ ID NO: 5564 - DNA, 292 bp, Homo sapiens
  source 1..292: mol_type = other DNA
tgcagcctctggattcaccttcagtagttacagcatgacctgggtccgccgggctccagggaaggggctggagtggctttcatacattaccagtagtagtagtgtcatatattacgcagactctgtgaagggccgattcaccatttccagagacaatgccaagaactcattgtatctgcaaatgaacagcctgagagacgaggacacggctatatattactgtgcgagagattcgggtacagcaggagccgatgactactggggccagggaaccctggtcaccgtctcctca

SEQ ID NO: 5565 - DNA, 292 bp, Homo sapiens
  source 1..292: mol_type = other DNA
tgtaacctctggattcacctttagcgcccatcccatgacctgggtccgccaggctccagggaaggggctggagtgggtttcatatattagcggtggaagtgaaatcatatactacagagactctgtgaagggccgattcaccatctccagagacaacgccaagaactcactgtatttgcagatgagcaatgtgagagtcgaggacacggctgtctattactgtgcgagagactcgggtacagcaggcgctgatgactattggggccagggaaccctggtcaccgtctcctca

SEQ ID NO: 5566 - DNA, 292 bp, Homo sapiens
  source 1..292: mol_type = other DNA
tgcagcctctggattcactttcagtgcctatgccatgacctgggtccgccaggctccagggaaggggctggagtggatttcatacattagtcgtacttctacaatcatatactatgcagactctatgaagggccgattcaccatctccagagacgacgccggaaattctctgtatctgcaaatgaacagcctgagagtcgaagacacgggtatttatttctgtgcgagagattcgggaacggcaggagctgacgactactggagtcagggaaccctggtcaccgtctcctca

SEQ ID NO: 5567 - DNA, 286 bp, Homo sapiens
  source 1..286: mol_type = other DNA
tgcagcctctggattcaccttcagtgactatagcatgaactgggtccgccaggctccagggaagggactggagtggatttcatacattggtactagtactagtaccacatatttcgcagactctgtgaagggccgattcaccatcaccagagacaatgccaagaactcactgtatgtgcaaatgaacagcctgagagacgaggacacggccgtgtattactgtgtgagagatcactattggtcttttgactattggggccagggtaccctggtcaccgtttcctca

SEQ ID NO: 5568 - DNA, 286 bp, Homo sapiens; identical to SEQ ID NO: 5567
  source 1..286: mol_type = other DNA

SEQ ID NO: 5569 - DNA, 286 bp, Homo sapiens
  source 1..286: mol_type = other DNA
tgcagcctctggattcaccttcagaagttatagcatgaattgggtccgccaggctccagggaaggggctggagtggatctcatacatccgtggaggtggcagtcccatatacttcgcagactctgtgaggggccgattcaccatctccagagacgatgccaggaactcactatatctgcaaatgagcagcctgagagaggaggacacggctgtctactactgtgtgagagaccattactggagctttgattattggggccagggagccctggtctccgtctcctca

SEQ ID NO: 5570 - DNA, 277 bp, Homo sapiens
  source 1..277: mol_type = other DNA
cactgtctctggtggctccatcagcagtggtagtttcttctggagctgggtccggcagcccgccgggaagggactggagtggattgggcgtatccttaccagtgggagcaccacctacaacccctccctcaagagtcgagtcaccatatcactagacacgtccaagaaccagttctccctgaggctgagctctgtgaccgccgcagacacggccgtatattactgtgcgagaaaccccatttactggggccagggaaccctggtcagcgtctcctca

SEQ ID NO: 5571 - DNA, 277 bp, Homo sapiens
  source 1..277: mol_type = other DNA
cactgtttctggtgactccatcagcagtggtagttacttctggagctgggtccggcagcccgccgggaagggactggagtggattgggcgtatccataccagtgggagcaccacctacaacccctccctcaagagtcgagttagcatatcaatggacacgtccaagaaccacttctccctgaggctgaactctgtgaccgccgcagacacggccgtttattactgtgcgagaaaccccatttactggggccagggaaccctggtcaccgtctcctca

SEQ ID NO: 5572 - DNA, 277 bp, Homo sapiens
  source 1..277: mol_type = other DNA
cactgtctctggtgactccatgaccagcggtacttacttctggggctggatccggcagcccgccgggaagggactggagtggattgggcgtatccatagcagtgggagtaccacctacaacccctccctcaagggtcgagtcaccatttcactagacacgtccaagaagcagttctccctgaacttgaactctgtgaccgccgcagacacggccgtgtattactgtgcgcgaaatccgatctattggggccagggagccctagtcaccgtctcctca

SEQ ID NO: 5573 - DNA, 277 bp, Homo sapiens
  source 1..277: mol_type = other DNA
cactgtctctggtgactccatgacccgcggtacttacttctggggctggatccggcagcccgccgggaagggactggagtggattgggcgtatccatagcagtgggtttaccacctacaacccctccctcaagggtcgagtcaccatttcactagacacgtccaagaagcagttctccctgaacttgaactctgtgaccgccgcagacacggccgtgtattactgtgcgcgaaatccgatctattggggccagggagcccgagtcaccgtctcctca

SEQ ID NO: 5574 - DNA, 277 bp, Homo sapiens
  source 1..277: mol_type = other DNA
cactgtctctggtgcctccatcagcagtggtagtttcttctggagctgggtccggcagcccgccgggaagggactagagtggattggccgtattattaccagtgggagcaccacgtacaacccctccttcaagagtcgagtcgccatatcaatagacacgtccaagaaccagttctccctgaggctgaactctgtgaccgacgcagacacggccgtatattactgtgcgagaaatcccatttactggggccagggaaccctggtcaccatctcctca

SEQ ID NO: 5575 - DNA, 286 bp, Homo sapiens
  source 1..286: mol_type = other DNA
tgtagcctctggattcacctttagtaatcattacatgagctgggtccgccaggctccagggaaggggctggagtgggtggccaacataaagggagatggaggtgacaaaggctatgtggactctgtgaagggccgattcaccatctccagagacaacgccaagaattcactgtatctgcaaatgaacagcctgagagtcgaggacacggctgtgtattactgtctgagaggcggtggctggtacccggactactggggccagggaaccctggtcaccgtctcctca

SEQ ID NO: 5576 - DNA, 286 bp, Homo sapiens
  source 1..286: mol_type = other DNA
tgcagcctctggattcacctttgttacgtcttggatgagttgggtccgccaggctccagggaaggggctagagtgggtggccaacataaagggagatggaagtgagacagcctatgtggactctgtgaagggccgattcaccgtctccagagacaacgccaaggactccctgtatctgcaaatgaacagtctaagagtcgaggacacggctgtttattactgtctgagagggggaggatggtaccctgactactggggccagggaaccctggtcaccgtctcctca

SEQ ID NO: 5577 - DNA, 286 bp, Homo sapiens
  source 1..286: mol_type = other DNA
cgcagcgtccggattcacctttagtaaattttggatgagttgggtccgccaggctccagggaaggggctggagtgggtggccaacataaaggaagacggaagtgagaaagcctatatggactctatgaagggccgattcaccgtctccagagacaacgccaaggacgcactgtatctgcaaatgaacagtctaagagtcgaggacacggctgtttattattgtttgagagggggaggctggtaccctgactactggggccagggaaccctggtcaccgtctcctca

SEQ ID NO: 5578 - DNA, 286 bp, Homo sapiens; identical to SEQ ID NO: 5577
  source 1..286: mol_type = other DNA

SEQ ID NO: 5579 - DNA, 285 bp, Homo sapiens
  source 1..285: mol_type = other DNA
gcatctggatacaccttcagcagttacaatatgcactgggtgcgacaggcccctggacaagggcttgagtggatgggaataatcaaccctagtggtacaaccacaggctacgcacagagcttccagggcagagtcaccatgaccagcgacgcgtccacgggcacagtctacatggaactgagcagcctgagatctgaggacacggccgtgtatttctgtgcgagggatagcactcattggtcctctgactactggggccaaggaaccctggtcaccgtctcctca

SEQ ID NO: 5580 - DNA, 285 bp, Homo sapiens
  source 1..285: mol_type = other DNA
gcatctggatacatcttcaccagctacaagatgcactgggtgcgacaggcccctggacaagggcttgagtggatggcaataatcaacccgagtgatggggtcacaaggtacgcacagaacttccagggcagagtcaccatgaccagggacacgtccacgagtacagtctacatggagttgagcagcctgagatctgaggacacggccgtgtattactgtgcgagagacagcacccactggtcctctgactactggggccagggaaccctggtcaccgtctcctca

SEQ ID NO: 5581 - DNA, 282 bp, Homo sapiens
  source 1..282: mol_type = other DNA
aagggttctggatacagctttgccacctactggatcgcctgggtgcgccagatgcccgggaaaggcctggagtggatggggatcatctatcctggtgactcggataccagatacagcccgtccttccaaggccaggtcaccatctcagccgacaagtccatcagcaccgcctacttgcagtggagcagcctgaaggcctcggacaccgccatgtattactgtgcgagaaagtcggccggtatggacgtctggggccaagggaccacggtcaccgtctcctca

SEQ ID NO: 5582 - DNA, 282 bp, Homo sapiens
  source 1..282: mol_type = other DNA
aagggttctggatacagctttaccaactactggatcggctgggtgcgccagatgcccgggaaaggcctggagtggatggggatcatctatcctggtgactctgataccacatacagcccgtccttccaaggccaggtcaccatttcagccgacaagtccatcaacaccgcctacctgcagtggagcagcctgaaggcctcggacactgccatgtatttttgtgcgagaaagtccgcgggtatggacgtctggggccaagggaccacggtcaccgtctcctca

SEQ ID NO: 5583 - DNA, 289 bp, Homo sapiens
  source 1..289: mol_type = other DNA
tgcagcctctggattcaccttcaaagactactacgtgacctggatccgccagtctccagggaagggcctggagtggctttcatatattagtgggagtggtgatatcatacactatgcagactccgtgaagggccgattcaccgtctccagggacaacggcaaggacttattgtttctgcaaatgaacagtctgagagccgaggacacggccgtttattactgtgcgagagatccatattactattcttcggacccctggggccagggaaccctggtcaccgtctcctca

SEQ ID NO: 5584 - DNA, 289 bp, Homo sapiens
  source 1..289: mol_type = other DNA
tacaacctctggattcacctttagtgccttctacatgacctggatccgccaggctcctgggaaggggctggagtggatttcatatatcagtgaaactggggacaccattcactacgcagactcagtgaggggccgattcaccgtctccagggacaacgccagaaactcactatttctgcaaatgaacagtctgcgagccgaggacacggccatttattactgtgcaagagatccctattactattcttcggacccctggggccagggagccctggtcaccgtctcctca

SEQ ID NO: 5585 - DNA, 289 bp, Homo sapiens
  source 1..289: mol_type = other DNA
tgcagcctctggattcaccttcactgactactacatgacctggctccgccaggctccagggaagggcctggagtgggtttcaaagattagtggtagtggtagtaccatatattacgcagactctgtgaagggccgattcaccatctccagggacaacggcaaggactcagtgtatctgcaaatgaacagcctgagagccgaggacacggccatgtattactgtgcgagagatccatattactattcttcggacccctggggccagggaaccctggtcaccgtctcctca

SEQ ID NO: 5586 - DNA, 289 bp, Homo sapiens
  source 1..289: mol_type = other DNA
cacaacctctggattcacctttactgccttctacatgacctggatccgccaggctcctgggaaggggctggagtggatttcatacatcagtgaaactggggacaccattcactacgcagactcagtgaggggccgattcaccgtctccagggacaacgccagaaactccctatttctgcaaatgaacagtctgcgagccgaggacacggccatttattactgtgcaagagatccctattactattcttcggacccctggggccagggagccctggtcaccgtctcctca

SEQ ID NO: 5587 - DNA, 289 bp, Homo sapiens
  source 1..289: mol_type = other DNA
cgcagcctctggattcatcttcagtgactcctacatgacctggtaccgccaggctccagggaaggggctagaatggatttcatacattagtggtagtggtactaccatacactacgcagactctgtgaggggccgattcaccgtctccagggacaacgccaagaactcagtgtttctgcaaatgaacagcctgagagccgaggacacggctgtgtattactgtgcgcgagatccatattactattcttcagacccctggggccagggtaccctggtcaccgtctcctca

SEQ ID NO: 5588 - DNA, 298 bp, Homo sapiens
  source 1..298: mol_type = other DNA
tgcagcgtctggtttcaccttcactagtcatgccatacactgggtccgccaggctccaggcaagggtctggagtgggtggcacaagtttgggctgatgatagaaatcaatattatgcagacgccgtgaagggccgattcaccttctccagagacaattccaagaacacactgtatgtgcaaatgaatggcctcagagtcgacgacacggctgtgtattactgtgcgagagatggccaggggggggctccctacgctatggacgtctggggccaagggaccacggtcaccgtctcctca

SEQ ID NO: 5589 - DNA, 298 bp, Homo sapiens
  source 1..298: mol_type = other DNA
tgcagcgtctggattcaccttcactagtcatgccatacactgggtccgccaggctccaggcaagggtctggagtgggtggcacaagtttggcctaatggaataaatcaatattatgcagactccgtgaagggccgattcaccttcttcagagacaattccaagaacacactgtatgtgcaaatgaatggcctgagagtcgacgacacggctgtgtattactgtgcgagagatggccaggggggggctccctacgctatggacgtctggggccaagggaccacggtcaccgtcacctca

SEQ ID NO: 5590 - DNA, 298 bp, Homo sapiens
  source 1..298: mol_type = other DNA
tgcagcgtctggattcatctttagtagacatgccatgcactgggtccgccaggctccaggcaaggggctggagtgggtggtacaagtctgggctgatggaagtactagatattatgcagactccgtgaagggccggttcaccagctccagagatgagtccaagaccacactgaacctgcaaatgaatagcctgagagccgaggacacggctgtgtattactgtgcgagagatggacagggtggagccccctatgctatggacgtctggggccaagggaccacggtcaccgtctcctca

SEQ ID NO: 5591 - DNA, 298 bp, Homo sapiens
  source 1..298: mol_type = other DNA
tgaaacgtctggattcgccttcagtggacatgccatgcattgggtccgccaggctccaggcaaggggctggagtgggtgacacaaatatggcctgatgacattaataaatattatgcagactccgtgaagggccgattcaccgcctccagagacaattccaagaccacggtgtatctgcaaatggatagcctgagagtcgaggacacggctgtgtattattgtgcgagagatggacaggggggggccccctatgctatggacgtctggggccaagggaccacggtcaccgtctcctca

SEQ ID NO: 5592 - DNA, 298 bp, Homo sapiens
  source 1..298: mol_type = other DNA
tgcagcgtctggattcatctttagtagacatgccatgcactgggtccgccaggctccaggcaaggggctggagtgggtggtacaagtctgggctgatggaagtactagatattatgcagactccgtgaagggccggttcaccagctccagagatgagtccaagaccacactgaacctgcaaatgaatagcctgagaaccgaggacacggctgtgtattactgtgcgagagatggacagggtggagccccctatgctatggacgtctggggccaagggaccacggtcaccgtctcctca

SEQ ID NO: 5593 - DNA, 298 bp, Homo sapiens
  source 1..298: mol_type = other DNA
tgcagcgtctggattcatctttagtagacatgccatgcactgggtccgccaggctccaggcaaggggctggagtgggtggtacaagtctgggctgatggaagtactagatattatgcagactccgtgaagggccggttcaccagctccagagacgagtccaagaccacactgaacctgcaaatgaatagcctgagagccgaggacacggctgtgtattactgtgcgagagatggacagggtggagccccctatgctatggacgtctggggccaagggaccacggtcaccgtctcctca

SEQ ID NO: 5594 - DNA, 298 bp, Homo sapiens
  source 1..298: mol_type = other DNA
tgcagcgtctggattcagctttagtgaacatgccatccactgggtccgccaggctccaggcaaggggctggagtgggtggtacaagtctggtctgatggaagtactagatattatgcagactccgtgaagggccggttcaccagctccagagatgagtccagggccacagtgaacctgcaaatgaatagcctgagagtcgacgacacggctgtgtattactgtgcgagagatggacagggtggagccccctatgctatggacgtctggggccaagggaccacggtcaccgtctcctca

SEQ ID NO: 5595 - DNA, 296 bp, Homo sapiens
  source 1..296: mol_type = other DNA
cagcgtctggattcagctttagtgaacatgccatccactgggtccgccaggctccaggcaaggggctggagtgggtggtacaagtctggtctgatggaagtactagatattatgcagactccgtgaagggccggttcaccagctccagagatgagtccagggccacagtgaacctgcaaatgaatagcctgagagtcgacgacacggctgtgtattactgtgcgagagatggacagggtggagccccctacgctatggacgtctggggccaagggaccacggtcaccgtctcctca

SEQ ID NO: 5596 - DNA, 283 bp, Homo sapiens
  source 1..283: mol_type = other DNA
tgcagcctctggattcaccttcagtaattattggatgcactgggtccgccaagctccagggaagggactgctgtgggtcgcacgtattaatcctgatgggagttccacatactacgcggactccgtgaagggccgattcaccatctccagagataactccaagaacaccctgtatctgcaaatgaacagtctgagagccgaggacacggctgtctattactgtacaagcgacccaaattgggttgactactggggccagggaaccctggtcaccgtctcctca

SEQ ID NO: 5597 - DNA, 283 bp, Homo sapiens
  source 1..283: mol_type = other DNA
tatagcctctggattcaccttcagtagttaccagatgtactgggtccgccaacctccagggaaggggctggtgtacgtctcaaatatttctcctgatgggagccgcacaacctacgcggactccgtgaagggtcgattcaccatctctagagacaacgccaagagcacgctttatctgcaaatgaacagtctgagagccgaggacacggctgtgtattactgtacaagtgaccctaactgggtggactactggggccagggaaccctggtcaccgtctcctca

SEQ ID NO: 5598 - DNA, 283 bp, Homo sapiens
  source 1..283: mol_type = other DNA
tgtaggctctggattcaccttcagtagctacttgatgtactgggtccgccaagctccagggaaggggctggtgtgggtctcaagtatttatactgatgggagtcgcacaagctacgcggactccgtgaagggccgattcaccatctctagagacaacgccaagagcacgctgtatctgcaaatgaacagtctgagagccgaggacacggctgtatattactgtacaagtgaccctaactgggtggactactggggccagggaaccctggtcaccgtctcctca

SEQ ID NO: 5599 - DNA, 283 bp, Homo sapiens
  source 1..283: mol_type = other DNA
tttagcctctggattcaccttcagtggttaccagatgtactgggtccgccaatctccagggaaggggctgctgtacgtctcaaatatttctcctgatgggagccgcacaacctacgcggactccgtgaagggtcgatttaccatctctagagacaacgccaagagcacgctttatctgcaaatgaagagtctgagagtcgaggacacggctgtgtattactgtacaagtgaccctaactgggtggactactggggccagggaaccctggtcaccgtctcctca

SEQ ID NO: 5600 - DNA, 283 bp, Homo sapiens
  source 1..283: mol_type = other DNA
tgtaggctctggattcaccttcagtagttacttgatgtactgggtccgccaacctccagggaaggggctggtgtgggtctcaagtatttatactgatgggagtcgcacaagctacgcggactccgtgaagggccgattcaccatctctagagacaacgccaagagcacgctgtatctgcaaatgaacagtctgagagccgaggacacggctgtgtattactgtacaagtgaccctaactgggtggactactggggccagggaaccctggtcaccgtctcctca

SEQ ID NO: 5601 - DNA, 283 bp, Homo sapiens; identical to SEQ ID NO: 5600
  source 1..283: mol_type = other DNA

SEQ ID NO: 5602 - DNA, 283 bp, Homo sapiens; identical to SEQ ID NO: 5598
  source 1..283: mol_type = other DNA

SEQ ID NO: 5603 - DNA, 283 bp, Homo sapiens
  source 1..283: mol_type = other DNA
tgcagcctctggattcaccttcagtagctacttgatgtactgggtccgccaagctccagggaaggggctggtgtgggtctcaagtatttatactgatgggagtcgcacaagctacgcggactccgtgaagggccgattcaccatctctagagacaacgccaagagcacgctgtatctgcaaatgaacagtctgagagccgaggacacggctgtgtattactgtacaagtgaccctaactgggtggactactggggccagggaaccctggtcaccgtctcctca

SEQ ID NO: 5604 - DNA, 283 bp, Homo sapiens
  source 1..283: mol_type = other DNA
tgtagcctctggattcaccttcagtagctacttgatgtactgggtccgccaagctccagggaaggggctggtgtgggtctcaagtatttatactgatgggagtcgcacaagctacgcggactccgtgaagggccgattcaccatctctagagacaacgccaagagcacgctgtatctgcaaatgaacagtctgagagccgaggacacggctgtgtattactgtacaagtgaccctaactgggtggactactggggccagggaaccctggtcaccgtctcctca

SEQ ID NO: 5605 - DNA, 283 bp, Homo sapiens
  source 1..283: mol_type = other DNA
tgcagcctctggattcaccttcactaattactggatgcactgggtccgccaagctccaggggaggggctgctgtgggtcgcacgcattaataaagatgggagtgccacatactacgcggactccgtgaagggccgattcaccatctccagagacaacgccaagaatacgctgtatctgcaaatgaacagtctgacagccgaggacacggctgtctattactgtacaagcgacccaaactgggttgactactggggccagggagccctggtcaccgtttcctca

SEQ ID NO: 5606 - DNA, 274 bp, Homo sapiens
  source 1..274: mol_type = other DNA
tagagtctctgaattcatcttcaccacccattgggtggactgggtccgccaagttccagggaaggggctggtgtgggtctcacgtattaagagtgatgggagtgatatactctatgcggactccgtgaagggccgattcaccatctccagagacaacgccgagaacaggttctatttgcagatgaacagtctgagagacgaggacacggctctatattattgtatgataaatccgggctactggggccagggaaccctggtcaccgtctcctca

SEQ ID NO: 5607 - DNA, 274 bp, Homo sapiens
  source 1..274: mol_type = other DNA
tagagtctctgaattcatcttcagcacccattgggtggactgggtccgccaagttccagggaaggggctggtgtgggtctcacgtattaagagtgatgggagtagtatactctacgcggactccgtgaagggccgattcaccatctccagagacaacgccgagaacaggttctatttgcagatgaacagtctgagagacgaggacacggctctatattactgtatgataaatccgggctactggggccagggaaccctggtcaccgtctcctca

SEQ ID NO: 5608 - DNA, 274 bp, Homo sapiens
  source 1..274: mol_type = other DNA
tgcagtctctgaattcatgttcagcacccattgggtggactgggtccgccaagttccagggaaggggctggtgtgggtctcacgtattaaaagtgatgggagtgaaatactccaagcggactccgtgaagggccgattctccatctccagagacaacgccggtaacaggttctatttgcaaatgaacagtctgagagacgaggacacggctctatattactgtatgataaatccgggctactggggccagggaaccctggtcaccgtctcctca

SEQ ID NO: 5609 - DNA, 274 bp, Homo sapiens
  source 1..274: mol_type = other DNA
tgcagcctctcgactcaccttcagtagtcactggatgttctgggtccgccaaactccagggaagggcctggtgtgggtctcacgtattctgagtgatgggactagtatgacctacgtggactccgtgaagggccgcttcaccgtctccagagacaacgtcaagaacataatgtatctgcaaatgaacagtctgagggccgaggacacggctgtatattactgcatgataaatcctggttactggggccagggaacccaggtcaccgtctcctca

SEQ ID NO: 5610 - DNA, 274 bp, Homo sapiens
  source 1..274: mol_type = other DNA
tagagtctctgaattcatcttcagcacccattgggtggactgggtccgccaagttccagggaagggactggtgtgggtctcacgtattaagagtgatgggagtgaaacactctacgcggactccgtgaagggccgattcaccatctccagagactacgccgagaacaggttctacttgcagatgaacagtctgagagacgaggacacgggtctatattactgtatgataaatccgggctactggggccagggaaccctggtcaccgtctcctca

SEQ ID NO: 5611 - DNA, 298 bp, Homo sapiens
  source 1..298: mol_type = other DNA
tgcagcctctggattcagatttgttggctatgtcatgagttgggtccgccaggctccagggaaggggttggagtgggtctcaggtcttagtcgtagtggtgataggacatactacgcagactccgtgaagggccgcttcaccgtctccagagacaattccaagaacacactatatctgcagatgaacagtctgggggccggcgacacggccttatatttctgtgtgaaagatcgggatgatcacggtgacttcttgtttgactcctggggccagggaaccctggtgaccgtctcctca

SEQ ID NO: 5612 - DNA, 298 bp, Homo sapiens
  source 1..298: mol_type = other DNA
tacagcctccggattcatatttagtaactatgtcatgagctgggtccgccaggctccagggaagggactggaatgggtctcaggcatttggcgtactggtcatcccacatactacgcagactccgtggagggccggttcaccatctccagagacaattccaagaacacgctgtacctgcaaatgcacagcctgagagccgacgacacggccttatactactgtgtgaaggaccgagacgaccacggtgacttcctatttgactcctggggtcagggaattctggtcaccgtctcctca

SEQ ID NO: 5613 - DNA, 298 bp, Homo sapiens
  source 1..298: mol_type = other DNA
tgcagcctctggattcaggtttgttggctatgtcatgagttgggtccgccaggctccagggaaggggttggagtgggtctcaggtctcagtcgtagtggtgataggacatactacgcagactccgtgaagggccgcttcaccgtctccagagacaattccaggaacacactatatctgcagatgaacagtctgggggccggcgacacggccttatatttctgtgtgaaagatcgggatgatcacggtgacttcttgtttgactcctggggccagggaaccctggtgaccgtctcctca

SEQ ID NO: 5614 - DNA, 286 bp, Homo sapiens
  source 1..286: mol_type = other DNA
tgcagcctctggattcagctttagtagctatacgatgagctgggtccgccaggctccagggaagggcctggagtgggtggccaggatgaaggaagatggaaatgatatatattatgtggactctgtgaggggccgattcaccatctccagagacaacgccaagaactcagtgtatctgcaaatgaacagcctgagagccgaggacacggctgtgtattactgtgcgagaggaggctatcattactttgactactggggccagggaaccctggtcaccgtctcctca

SEQ ID NO: 5615 - DNA, 286 bp, Homo sapiens
  source 1..286: mol_type = other DNA
tgcagcctctggattcaggtttagtacctattggatgagctgggtccgccaggctccagggaaggggctggagtgggtggccaacataaaggaagatggaggtgagaaatactatgtggactctgtgaagggccgcttcaccatctccagagacaacgccaagaactcactgtatctgcaaatgaatagcctgagagccgaggacacggctgtgtattactgtgcgagaggtggatatcactactttgactactgggcccagggaaccttggtcaccgtctcctca

SEQ ID NO: 5616 - DNA, 288 bp, Homo sapiens
  source 1..288: mol_type = other DNA
gcctctggatacaccttcactagccattctttgaattgggtgcgacaggcccctggacaaggccttgagtggatgggattgatcaacaccaacactgggaacccaacgtatgcccagggcttcacaggacggtttgtcttctccttggacacctctgtcaacacggcatatctgcagatcagtagcctaaagactgaggacactgccgtatactactgtgcgcgaggctcaggggatggctacaactctgactactggggccagggagccctggtcaccatctcctca

SEQ ID NO: 5617 - DNA, 288 bp, Homo sapiens
  source 1..288: mol_type = other DNA
gcttctggaggcaccttcagcagctatgctatcagctgggtgcgacaggcccctggacaagggcttgagtggatgggagggatcaataccgacactgggaactcaacatatgcccagggcttcacaggacggtttgtcttttcgttggacacctccgtcaacacggcatatatgcaaatcactagtctaaaggctgaagacagtgccatattttattgtgcgagaggctcaggggatggctacaactctgactactggggccagggaaccctggtcaccgtctcctca

SEQ ID NO: 5618 - DNA, 288 bp, Homo sapiens
  source 1..288: mol_type = other DNA
gcctctggatactccttcactgattattctatgaattgggtgcgacaggcccctggacaagggcttgagtggatgggagtgatcaacaccgacactgggaactcaacatatgcccagggcttcacaggacggtttgtcttttcgttggacacctccgtcaacacggcatatatgcaaatcactagtctaaaggctgaagacagtgccatattttattgtgcgagaggctcaggggatggctacaactctgactactggggccagggaaccctggtcaccgtctcctca

SEQ ID NO: 5619 - DNA, 288 bp, Homo sapiens
  source 1..288: mol_type = other DNA
gcctctggatactccttcactgattattctatgaattgggtgcgacaggcccctggacaagggcttgagtggatgggagtgatcaataccgacactgggaactcaacatatgcccagggcttcacaggacggtttgtcttttcgttggacacctccgtcaacacggcatatatgcaaatcactagtctaaaggctgaagacagtgccatattttattgtgcgagaggctcaggggatggctacaactctgactactggggccagggaaccctggtcaccgtctcctca

SEQ ID NO: 5620 - DNA, 288 bp, Homo sapiens
  source 1..288: mol_type = other DNA
gcttctggatacaggttcactgactatgctatgaactgggtgcgacaggcccctggacaagggcttgagtggatggggttgatcaacaccaacagcgggaattcaacctatgccccggacttcacaggacggtttgtcttctccttcgacacctctgtcagtatggcacatctgcagatcagtagcctaaagcctgaggacactgccgtgtatttctgtgcgaggggaagtggagatggctacaattcggactactggggccagggaaccctggtcaccgtctcctca

SEQ ID NO: 5621 - DNA, 288 bp, Homo sapiens
  source 1..288: mol_type = other DNA
gcttctggatacagtttcactgaatatgctatgaactgggtgcgtcaggcccctggacaagggcttgagtgggtggggttgatcaacaccaacaacggggattcaacctatgccccggacttcacaggacgctttgtcttctccttcgacacgtctgtcactatggcatacctgcagataagtagcctaaaggctgaggacacagccgtatatttctgtgcgaggggaagtggagatggctacaattcggactactggggccagggaaccctggtcactgtctcctca

SEQ ID NO: 5622 - DNA, 288 bp, Homo sapiens
  source 1..288: mol_type = other DNA
gcttctggatacagtttcactgaatatgctatgaactgggtgcgtcaggcccctggacaagggcttgagtgggtggggttgatcaacaccaacaacggggattcaacctatgccccggacttcacaggacgctttgtcttctccttcgacacctctgtcactatggcatacctgcagataagtagcctaaaggctgaggacacagccgtatatttctgtgcgaggggaagtggagatggctacaattcggactactggggccagggaaccctggtcactgtctcctca

SEQ ID NO: 5623 - DNA, 288 bp, Homo sapiens; identical to SEQ ID NO: 5618
  source 1..288: mol_type = other DNA

SEQ ID NO: 5624 - DNA, 288 bp, Homo sapiens
  source 1..288: mol_type = other DNA
gcctctggatactccttcactgattattctatgaattgggtgcgacaggcccctggacaagggcttgagtggatgggagtgatcaacaccgacactgggaactcaacatatgcccagggcttcacaggacggtttgttttttcgttggacacctccgtcaacacggcatatatgcaaatcactagtctaaaggctgaagacagtgccatattttattgtgcgagaggctcaggggatggctacaactctgactactggggccagggaaccctggtcaccgtctcctca

SEQ ID NO: 5625 - DNA, 286 bp, Homo sapiens
  source 1..286: mol_type = other DNA
tgcaacttctggattcatctttagtaactattacatggcctgggtccgccaggctccagggaaggggctggagtgggtggccaacattaggcaagatgaaagtaacaaaaactatgtgggctctgtaaagggccgattcaccgtctccagagataatgccaagaactcactatatctgcaaatgaacagcctgagagacgaggacacggctctttacttctgtgcgagagatgtcggggggacccttgactactggggccagggaaccctggtcaccgtctcctca

SEQ ID NO: 5626 - DNA, 286 bp, Homo sapiens
  source 1..286: mol_type = other DNA
tgcagcctctggattcacccttggtcgctattggatggcctgggtccgccaggctccagggaaggggctggagtgggtggccaacgtaagagcggatgaaggtgataaaggttatgcggactctgtggagggccgattcaccatctccagagacaacgccaagggctcagtgtatctgcaaatgaacagcctgagagccgacgacacggctgtctattactgtgcgagagatgtggggggtacacttgactactggggccagggaaccctggtcaccgtctcctca

SEQ ID NO: 5627 - DNA, 286 bp, Homo sapiens
  source 1..286: mol_type = other DNA
tgcagcctctggattcacctttagtcgctattggatggcctgggtccgccaggctccagggaaggggctggagtgggtggccaacataagatcggatgaaggtgacaaaggttatgcggactctgtgaggggccgattcaccatcaccagagacaacgccaagggctcagtgtatctgcaaatgaacagcctgagagtcgaggacacggctgtctattactgtgcgagagatgtggggggtacacttgactactggggccagggaagcctggtcaccgtctcctca

SEQ ID NO: 5628 - DNA, 286 bp, Homo sapiens; identical to SEQ ID NO: 5626
  source 1..286: mol_type = other DNA

SEQ ID NO: 5629 - DNA, 292 bp, Homo sapiens
  source 1..292: mol_type = other DNA
tgcagcctctggattcaccttcagtagctacgacttccactgggtccgccaaactacaggaaaaggtctagaatgggtctcaggtattagtactaatggtgacacatactatccaggctccgtgaagggccgattcaccatgtccagagaaaatgccaagaactccttgtatcttcaaatgaacactctcacagccggggacacggctctctattactgtgcaagagcgggatggttcggggagtccggtatggacgtctggggccaagggacctcggtcaccgtctcctca

SEQ ID NO: 5630 - DNA, 292 bp, Homo sapiens
  source 1..292: mol_type = other DNA
tgcagcctctggattcatcttcaggggctacgactttcactgggtccgccaacctacaggaggacgtcttgaatgggtctcaggtattagtactaatggtgacacatactacccagagtccgtgaagggccgcttcaccatgtccagagaaaatgccaagaactccttctatcttcaaatgaacagcctgacagtcggggacacggctgtgtattactgtgcaagagcgggatggttcggggagagcggtatggacgtctggggccacgggaccacggtcaccgtctcctca

SEQ ID NO: 5631 - DNA, 298 bp, Homo sapiens
  source 1..298: mol_type = other DNA
tgcagcctcagcctctggattcatcttcagtggctacgacatgcactgggtccgccaacctacaggaagaggtcttgaatgggtcgcagctattagtactgctggtgacacatactatcctaactccgtgaagggccgcttcatcatctccagagaaaatgccaagagctccttctatcttcaaatgaacagcctgacagtcggggacacggctgtgtattactgtgcaagagcgggatggttcggggagagcggtatggacgtctggggccaagggaccacggtcaccgtctcctca

SEQ ID NO: 5632 - DNA, 298 bp, Homo sapiens
  source 1..298: mol_type = other DNA
cactggctctggtgactccatcagcagtaatcgtcactggtggggctggatccgccagcccccagggaaggggctggagtggattgggagtatctataacgatgggagcacttactacagcccgtccctcaagagtcgagtcaccattgccgtagacacgtccaagaagcagttctccctgaagctgagttctgtgaccgccgcagacacggctgtgtattactgtgcgagacagctgggtcggggactttgggcttttgatatctggggccaagggacaatggtcaccgtctcttca

SEQ ID NO: 5633 - DNA, 298 bp, Homo sapiens
  source 1..298: mol_type = other DNA
cattgtctctggtggccccatcagcagtgatgattactggtgggcctggatccgccaggccccagggacggggctagaatggattgggagtatcttttatactgggggcacccactacaattcgtccctcaagagtcgagcctccatatccgtggacacgtccaaggaccagttctccctgaagctgtactctctgaccgccgcagacacggctgtttattcttgtgcgagacagctgggcaggggcttgtgggcttttgatatctggggccaagggacaatggtcaccgtctcttca

SEQ ID NO: 5634 - DNA, 289 bp, Homo sapiens
  source 1..289: mol_type = other DNA
tgcagcctctggattcacctttagtacttattggatggactgggtccgccaggctccagggaaggggctggagtgggtggccaacataaaggaagatggaactactgaaaactatgtggactctgtgaagggccgattcaccatctccagagacaacgccaagaacttactatatctgcaaatgaacagcctgagtgccgaggacacggccgtctattactgtgcgagaaatcgggggtggcaacaatttgacaactggggccagggagccctggtcaccgtctcctca

SEQ ID NO: 5635 - DNA, 289 bp, Homo sapiens
  source 1..289: mol_type = other DNA
tggagcctctgggttcacctttagtagtcattggatggactgggtccgccaggctccagggaaggggctggagtgggtggccaacataaacgaggatggaagtgtcaagtactatgcggactctgtgaagggccgattcaccatctccagagacaacgccaagaactcactgtttttgcaaatgagcaacctgagagacgaggacacggctgtctattattgtgcgagaaatcgggggtggcaacagtttgacaactggggccagggaaccctggtctccgtctcctca

SEQ ID NO: 5636 - DNA, 289 bp, Homo sapiens
  source 1..289: mol_type = other DNA
tgcagcctctggattcacttttagtacttattggatggactgggtccgccaggctccagggaaggggctggagtgggtggccaacataaaggaagatggaactactgaaaactatgtggactctgtgaagggccgattcaccatctccagagacaacgccaagaacttactatatctgcaaatgaacagcctgagtgccgaggacacggctgtctattactgtgcgagaaatcgggggtggcaacaatttgacaactggggccagggagccctggtcaccgtctcctca

SEQ ID NO: 5637 - DNA, 289 bp, Homo sapiens
  source 1..289: mol_type = other DNA
tgcagcctctggattcacttttagtacttattggatggactgggtccgccaggctccagggaaggggctggagggggtggccaacataaaggaagatggaactactgaaaactatgtggactctgtgaagggccgattcaccatctccagagacaacgccaagaacttactatatctgcaaatgaacagcctgagtgccgaggacacggctgtctattactgtgcgagaaatcgggggtggcaacaatttgacaactggggccagggagccctggtcaccgtctcctca

SEQ ID NO: 5638 - DNA, 304 bp, Homo sapiens
  source 1..304: mol_type = other DNA
tgcagtctctggattcacctttaacaattatgccatgagttgggtccgccaggctccagggaaggggctggagtgggtctcctctattgatggtagtggtgacggcacatattacgtagactccgtgaagggccggttcaccatctccagagacaactccaagaacacactgtatctacaaatgaccagcctgagagccgaagacacggccgtttattactgtgcgaagaaccggggatattgtagtggtgggacctgctactcggactactggggccagggaaccctggtcaccgtctcctca

SEQ ID NO: 5639 - DNA, 304 bp, Homo sapiens
  source 1..304: mol_type = other DNA
tgtagcctctggattcacctttagcaactatgccatgagctgggtccgccaggctcaagggaaggggctggagtgggtctcaagtattagtggtggtgctggtaccacatactacgcagactccctgaacggccggttcaccatctccagagacaattccaagaacacgctgtatctgcaaatgaacagcctgagagccgaggacacggccgtatattactgtgcgaaaaatcgcggatattgtagtggtggtacctgctactcggactactggggccagggaaccctggttaccgtctcttca

SEQ ID NO: 5640 - DNA, 283 bp, Homo sapiens
  source 1..283: mol_type = other DNA
tgtagcctctgaattcgcctttacaagttactggatgacctgggtccgccaggctccagggaaggggctggagtgggtggccagcataaaggaagatggaattgaaaaacattatgcggactctgtgaagggccgattcaccgtctccagagacaaccgcaaggactcattgtatctgctactagatagcctgagagccgaggacacggctgtgtattactgtgcgagaggaggctggaccttcggtctctggggccgtgacaccctggtcattgtctcctca

SEQ ID NO: 5641 - DNA, 283 bp, Homo sapiens
  source 1..283: mol_type = other DNA
tgcaggctcaggattcacgtttagaagctattggatgagctgggtccgccaggctccagggaagggactggagtgggtggccaacataaaggaagatggaagtgagaaacactatggggactctgtgaagggccgattcaccatctccagagacaacgccgaggactcactgttcctgcaaatgaacagcctgagagccgaggacacggctgtgtattactgtgcgagagggggctggaccttcggtctctggggccgtggcaccctggtcactgtctcctca

SEQ ID NO: 5642 - DNA, 298 bp, Homo sapiens
  source 1..298: mol_type = other DNA
tgcagcctctggatttaccttcggtcgctatggcttgatctgggtccgtcaggctccagggaggggcctagagtggatttcatatattagttccactagtggtaccatatactacgcagactcagtgaagggccgattcaccatctccagagacgatgccaggaactcactgtatctacaaatgaacagcctgagagacgaggacacggctgtgtattactgtgcgagagccaaccagccgaccccaatatactactttgactactggggccagggaaccctggtcaccgtctcctcg

SEQ ID NO: 5643 - DNA, 298 bp, Homo sapiens
  source 1..298: mol_type = other DNA
tgcagcctctggatttacgttcggtcgctatggcttgatctgggtccgtcaggctccagggaggggcctagagtggatttcatatattagttccgctagtagtaccatatactatgcaggctcagtgaagggccgattcaccatctccagagacgatgccaggaactcactgtctctacaaatgaacagcctgagagacgaggacacggctgtctactactgtgcgagagccaaccagccgaccccaatatactactttgactactggggccagggagccctggtcaccgtctcctcg

SEQ ID NO: 5644 - DNA, 298 bp, Homo sapiens
  source 1..298: mol_type = other DNA
tgcagcctctggattcagcttcagtagctatagcatgaactgggtccgccaggctccagggaaggggctggagtggctttcatacattgatatgggtagtgaaaccatatactacgcagactctgtgaagggccgcttcaccatctccagagacaatgccaagaactcactgtatctgcaaatgaatagcctgagagacgaggacacggctgtgtattactgtgcgagagctaaccagccaacgcccatctactactttgactactggggccagggaaccctggtcaccgtctcctct

SEQ ID NO: 5645 - DNA, 283 bp, Homo sapiens
  source 1..283: mol_type = other DNA
tgcagcctctggattcaccttcaggacctataccatgaactgggtccgccaggctccagggaaggggctggagtgggtctcatccattagtactactggtacttacatatactacgcggactcagtgaggggccggttcaccatctccagagacaacaccaagaactcgctgtatctgcaactggacagcctgagagccgaggacacggctctctattactgtgcgagagacagcagttggtacgactcctggggcccgggaaccccggtcaccgtctcctca

SEQ ID NO: 5646 - DNA, 283 bp, Homo sapiens
  source 1..283: mol_type = other DNA
tgtagcctctggattcaccttcagtagctatagcatgaactgggtccgccaggctccagggaaggggctggagtgggtctcatccattagtagtagtagtagttatatatattacgcagactcagtgaagggccgattcaccatctccagagacaacgccaagaactcactgtatctgcaaatgaacagcctgagagccgaggacacggctgtgtattactgtgcgagagatagcagctggtacgactcctggggccagggaaccctggtcaccgtctcctca

SEQ ID NO: 5647 - DNA, 283 bp, Homo sapiens
  source 1..283: mol_type = other DNA
tgcagcctctggattcaccttcagtagctacagtatgaactgggtccgccaggctccagggaaggggctggagtgggtctcatccattagtagtactggttcttacaaatactacgcggactcagtgaggggccggttcaccatctccagagacaacaccaagaactcgctgtatctgcaacttgacagcctgagagccgaggacacggctctctattactgtgcgagagacagcagttggtacgactcctggggcccgggaaccccggtcaccgtctcctca

SEQ ID NO: 5648 - DNA, 280 bp, Homo sapiens
  source 1..280: mol_type = other DNA
tgcagcctctggattcaccttcagtagctatagcatgaactgggtccgccaggctccagggaaggggctggagtgggtttcatacattagtagtagtagtaccatatactacgcagactctgtgaagggccgatttaccatctccagagacaaagccatgaggtcaatgtatctgcaaatgaacagtctgagagacgaggacacggctgtttattactgtgcgagaggaggggcctggttcgacccctggggccagggaaccctggtcaccgtctcctca

SEQ ID NO: 5649 - DNA, 283 bp, Homo sapiens
  source 1..283: mol_type = other DNA
tgcagcctctggtttcagcttcagtgattatgaaatgaactgggtccgccaggctgcagggaaggggctggaatgggtttcatacattaatagtggtggtgatatcatatactatgaagactctgtgaagggccgattcaccatctccagagacaacgccaagaactcactatatctgcaaatggatcgtctgcgagacgaggacacggctgtctatttctgtgcgaggggaggggcctggttcgacccctggggccagggaaccccggtcaccgtctcctca

SEQ ID NO: 5650 - DNA, 289 bp, Homo sapiens
  source 1..289: mol_type = other DNA
tgcagcctcggggttcagtgtcagtcgcagctacatgaactgggtccgccaggctccagggaaggggctgcagtgggtctcaattatttacagcggtggtaccacatactacgcagactccgtgaagggccgattcaccatctccagagacaattccgagaacaggctgtatcttcaaatgaacaacctgagagccgaggacacggccgtgtattactgtgcgagagggggttcgggggatttagactttgactactggggccagggaaccctggtcaccgtctcctca

SEQ ID NO: 5651 - DNA, 289 bp, Homo sapiens
  source 1..289: mol_type = other DNA
tgcagcctctgggttcagtgtcagtagcagctacatgagctgggtccgccaggctccggggagggggctgcagtgggtctcaattatttatagcggtggtagcacattctacgcagactccgtgaagggccgattcaccatctccagagacaattccgagaacaggctgtatcttcaaatgagcaacctgagagccgaggacacggccgtgtattactgtgcgagagggggttcgggggatttagactttgactactggggccagggaaccctggtcaccgtctcctca

SEQ ID NO: 5652 - DNA, 289 bp, Homo sapiens
  source 1..289: mol_type = other DNA
tgcagtctctgggttcaccgtcaatagtaactacatgagctgggtccgccaggctccagggaaggggctggagtgggtctcaattatttatagcggtggtagaacatactacgcagactccgtgaggggccgattcaccatctccagagacaattcgaagaacacgctgtatcttctaatgaacatcctgagagccgaggacacggccgtgtattactgtgcgagagggggaagtggggacttagactttgactactggggccagggaaccctggtcaccgtctcctca

SEQ ID NO: 5653 - DNA, 289 bp, Homo sapiens
  source 1..289: mol_type = other DNA
tgcagtctctgggttcaccgtcaatagtaactacatgagctgggttcgccaggctccagggaaggggctggagtgggtctcaattatttatagcggtggtagaacatactacgcagactccgtgaggggccgattcaccatctccagagacaattcgaagaacacgctgtatcttctaatgaacatcctgagagccgaggacacggccgtgtattactgtgcgagagggggaagtggggacttagactttgactactggggccagggaaccctggtcaccgtctcctca

SEQ ID NO: 5654 - DNA, 289 bp, Homo sapiens
  source 1..289: mol_type = other DNA
tgtagcctctgggttcaccgtcaatagtaactacatgagctgggtccgccaggctccagggaaggggctggagtgggtctcaattatttatagcggtggtagtacatactacgcagactccgtgaagggccgattcaccatctccagagacaattccaagaacacgctgtatcttctaatgaacaccctgagagccgaggacacggccgtgtattactgtgcgagagggggaagtggggacttagactttgactactggggccagggaaccctggtcaccgtctcctca

SEQ ID NO: 5655 - DNA, 289 bp, Homo sapiens
  source 1..289: mol_type = other DNA
tgcagcctctgggttcaccgtcaagactaactacatgagttgggtccgccaggctccagggaaggggctggagtgggtctcaactatttatagtggtgatagcacatactacgcagactccgtgaagggccgattcaccatctccagagacaattcccagaacaccatatctcttcaaatgaacagcctgagagccgaggacacggccgtgtattactgtgcgagagggggaagtggagacttagactttgactactggggccagggaaccctggtcaccgtctcctca

SEQ ID NO: 5656 - DNA, 289 bp, Homo sapiens
  source 1..289: mol_type = other DNA
tgcagcctctgggttcagtgtcagtagcagctacatgagctgggtccgccaggctccggggagggggctgcagtgggtctcaattatttatagcggtggtagcagattctacgcagactccgtgaagggccgattcaccatctccagagacaattccgagaacaggctgtatcttcaaatgagcaacctgagagccgaggacacggccgtgtattactgtgcgagagggggttcgggggatttagactttgactactggggccagggaaccctggtcaccgtctcctca

SEQ ID NO: 5657 - DNA, 289 bp, Homo sapiens
  source 1..289: mol_type = other DNA
tgcagcctctgggttcagtgtcagtagcagctacatgagctgggtccgccaggctccagggaaggggctgcagtgggtctcaattatttatagcggtggtagcacatactacgcagactccgtgaagggccgattcaccatctccagagacaattccgagaacaggctgtatcttcaaatgaacaacctgagagccgaggacacggccgtgtattactgtgcgagagggggttcgggggatttagactttgactactggggccagggaaccctggtcaccgtctcctca

SEQ ID NO: 5658 - DNA, 271 bp, Homo sapiens
  source 1..271: mol_type = other DNA
tgcagcctctggactcaccttcagtagttatagcatgaactgggtccgccaggctccagggaaggggctggagtggctttcatacattagtagtagtagtgataccgtattctacgcagactctgtgaagggccgattcaccatctccagagacaatgccaagaactcactgtatctgcaaatgaacagcctgagagacgacgacacggctgtgtatttctgtgcgagagtgcctcactggggccagggaaccctggtcaccgtctcctca

SEQ ID NO: 5659 - DNA, 271 bp, Homo sapiens
  source 1..271: mol_type = other DNA
tgcagcctctggattcaccttcagtagttatgaaatgaactgggtccgccaggctccagggaaggggctggagtgggtttcatacattagtggtagtggtactaccatatactacgcagactctgtgaagggccgattcaccatctccagagacaacgccaagaactcactgtatctgcaaatgaacagcctgagagccgaggacacggctgtttattactgtgcgagagttccacactggggccagggaaccctggtcaccgtctcctca

SEQ ID NO: 5660 - DNA, 289 bp, Homo sapiens
  source 1..289: mol_type = other DNA
cgctgtctatggtgggtcattcagtggttactactggagttggattcgccagcccccagggaaagggctggagtggattggggaaatcactgaaagtggagatacctactacagtccgtccctcaagagtcgaatcaccatatcagtagactcgtccaagaaccaattctccctgaagttgacctctgtgaccgccgcggacacggctgtgtattactgtgcgagaggccgagatgcctacaaatgcggtaattattggggccagggaaccctggtcaccgtctcctca

SEQ ID NO: 5661 - DNA, 289 bp, Homo sapiens
  source 1..289: mol_type = other DNA
cgctgtctatggtgggtccttcagtggttactactggagctggatccgccagcccccagggaaggggctggagtggattggggaaatcaatcctagtggaagcaccaactacaacccgtccctcaagagtcgagtcaccatatcagtagacacgtccaagaaccagttctccctgaagctgagctctgtgaccgccgcggacacggctgtgtattactgtgcgagaggtagagatgcctacaagtgtggtaactactggggccagggaaccctggtcaccgtctcctca

SEQ ID NO: 5662 - DNA, 295 bp, Homo sapiens
  source 1..295: mol_type = other DNA
tgcagcctctggattcacctttagtaactactggatgcactgggtccgccaagctccagggaaggggctggtgtgggtctcacgtattgatactgatgggagtagcacaagttacgcggactccgtgaagggccgattcaccatctccagagacaacgccaaaaacacgctgtttctgcaaatgaacagtctgagagccgaggacacggctgtgtattactgtgtaaagttaattgcagcggctggccaggacattgcctactggggccagggaaccctggtcaccgtctcctca

SEQ ID NO: 5663 - DNA, 295 bp, Homo sapiens
  source 1..295: mol_type = other DNA
tgcagcctctggattcacctttagtaactactggatgcactgggtccgccaagctccagggaaggggctggtgtgggtctcacgtattgatactgatgggagtagcacaagttacgcggactccgtgaagggccgattcaccatctccagagacaacgccgagaacacgctgattctgcaaatgaacagtctgagagccgaggacacggctgtgtattactgtgtaaagttaattgcagcggctggccaggacattgcctactggggccagggaaccctggtcaccgtctcctca

SEQ ID NO: 5664 - DNA, 295 bp, Homo sapiens
  source 1..295: mol_type = other DNA
tgcagcctctggattcacctttagtaactactggatgcactgggtccgccaagctccagggaaggggctggtgtgggtctcacgtattgacactgatgggagtagcacaagttacgcggactccgtgcagggccgattcaccatctccagagacaacgccgagaacacgctgtttctgcaaatgaacagtctgagagccgaggacacggctgtgtattactgtgtaaagttaattgcagcggctggccaggacattgcctactggggccagggaaccctggtcaccgtctcctca

SEQ ID NO: 5665 - DNA, 295 bp, Homo sapiens
  source 1..295: mol_type = other DNA
tgcagcctctggattcacctttagtaactactggatgcactgggtccgccaagctccagggaaggggctggtgtgggtctcacgtattgatactgatgggagtagcacaagttacgcggacttcgtgaagggccgattcaccatctccagagacaacgccgagaacacgctgtttctgcaaatgaacagtctgagagccgaggacacggctgtttattattgtgtaaagttaattgcagcggctggccaggacattgcctactggggccagggaaccctggtcaccgtctcctca

SEQ ID NO: 5666 - DNA, 304 bp, Homo sapiens
  source 1..304: mol_type = other DNA
cgcagcctctggattcacctttgccatgtatgccatgacgtgggtccgccaggctccagggaaggggccggagtgggtctcagttatttatagtcgtggtggaaccacatactatgcagactctgtgaagggccggttcaccatctccagagataattcctacaacatgttgtatctgcaaatgaacaatctgagagccgaggacacggccgtctattactgcgcgaaagatcactcgcaaaatggctacgattggggggcctttgaccactggggccagggaaccgtggtcaccgtctcctca

SEQ ID NO: 5667 - DNA, 304 bp, Homo sapiens
  source 1..304: mol_type = other DNA
cgcagcctctggattcacgtttgccatgtatgccatgacctgggtccgccaggctccagggaaggggccggagtgggtctcagttatttataatcgtggtggaaccacatactatgcagactctgtgaagggccggttcaccatctccagagataattcctacaatatgttgtatctgcaaatgaacaatctgagagccgaggacacggccgtctattactgcgcgaaagatcactcgcaaaatggctacgattggggggcctttgaccactggggccagggaaccgtggtcaccgtctcctca

SEQ ID NO: 5668 - DNA, 304 bp, Homo sapiens
  source 1..304: mol_type = other DNA
cgcagcctctggattcacctttgccatgtatgccatgacctgggtccgccaggctccagggaaggggccggagtgggtctcagttatttatagtcgtggtggaaccacatactatgcagactctgtgaagggccggttcaccatctccagagataattcctacaacatgttgtatctgcaaatgaacaatctgagagccgaggacacggccgtctattactgcgcgaaagatcactcgcaaaatggctacgattggggggcctttgaccactggggccagggaaccgtggtcaccgtctcctca

SEQ ID NO: 5669 - DNA, 304 bp, Homo sapiens
  source 1..304: mol_type = other DNA
tgcagcctctggattcacctttgccatgtatgccatgacctgggtccgccaggctccagggaaggggccggagtgggtctcagttatttatagtcgtggtggaaccacatactatggagactctgtgaagggccgcttcaccgtctccagagataattcctacaacatgttgtatctgcaaatgaacaatctgagagccgaggacacggccgtctattactgcgcgaaagatcactcgcaaaatggctacgattggggggcctttgaccactggggccagggaaccgtggtcaccgtctcctca

SEQ ID NO: 5670 - DNA, 304 bp, Homo sapiens; identical to SEQ ID NO: 5667
  source 1..304: mol_type = other DNA

SEQ ID NO: 5671 - DNA, 304 bp, Homo sapiens
  source 1..304: mol_type = other DNA
tgcagcctctggattcacctttggcatgtatgccatgacctgggtccgccaggctccagggaaggggccggagtgggtctcagttatttatagtcgtggtggaaccacatactatgcagactctgtgaagggccggttcaccatctccagagataattcttacaacatgttgtatctacaaatgaacaatctgagagccgaggacacggccgtctattactgcgcgaaagatcactcgcaaaatggctacgattggggggcctttgaccactggggccagggaaccgtggtcaccgtctcctca

SEQ ID NO: 5672 - DNA, 304 bp, Homo sapiens; identical to SEQ ID NO: 5667
  source 1..304: mol_type = other DNA

SEQ ID NO: 5673 - DNA, 304 bp, Homo sapiens
  source 1..304: mol_type = other DNA
tgcagcctctggattcacctttggcatgtatgccatgacctgggtccgccaggctccagggaaggggccggagtgggtctcagttatttatagtcgtggtggaaccacatactatgcagactctgtgaagggccggttcaccatctccagagataattcctacaacatgttgtatctgcaaatgaacaatctgagagccgaggacacggccgtctattactgcgcgaaagatcactcgcaaaatggctacgattggggggcctttgaccactggggccagggaaccgtggtcaccgtctcctca

SEQ ID NO: 5674 - DNA, 304 bp, Homo sapiens
  source 1..304: mol_type = other DNA
cgcagcctctggattcacctttgccatgtatgccatgacctgggtccgccaggctccagggaaggggccggagtgggtctcagttatttatagtcgtggtggaaccacatactatgcagactctgtgaagggccggttcaccatctccagagataattcctacaacatgttgtatctgcaaatgaacaacctgagagccgaggacacggccgtctattactgcgcgaaagatcactcgcaaaatggctacgattggggggcctttgaccactggggccagggaaccgtggtcaccgtctcctca

SEQ ID NO: 5675 - DNA, 304 bp, Homo sapiens
  source 1..304: mol_type = other DNA
cgcagcctctggattcacctttgccatgtatgccatgacctgggtccgccaggctccagggaaggggccggagtgggtctcagttatttataatcgtggtggaaccacatactatgcagactctgtgaagggccggttcaccatctccagagacaactcctacaatatgttgtatctgcaaatgaacaatctgagagccgaggacacggccgtctattactgcgcgaaagatcactcgcaaaatggctacgattggggggcctttgaccactggggccagggaaccgtggtcaccgtctcctca

SEQ ID NO: 5676 - DNA, 304 bp, Homo sapiens
  source 1..304: mol_type = other DNA
cgcagcctctggattcacctttgccatgtatgccatgacttgggtccgccaggctccagggaaggggccggaatgggtctcagttatttatagtcgtggtggaaccacatactatgcagactctgtgaagggccggttcaccatctccagagataattcctacaacatgttgtatctgcaaatgaacaatctgagagccgaggacacggccgtctattactgcgcgaaagatcactcgcaaaatggctacgattggggggcctttgaccactggggccagggaaccgtggtcaccgtctcctca

SEQ ID NO: 5677 - DNA, 304 bp, Homo sapiens
  source 1..304: mol_type = other DNA
tgcagcctctggattcacctttggcctgtatgccatgacctgggtccgccaggctccagggaaggggccggagtgggtctcagttatttatagtcgtggtggaaccacatactatgtagactctgtgaagggccggttcaccatctccagagataattcctacaacatgttgtatctgcaaatgaacaatctgagagccgacgacacggccgtctattattgcgcgaaggatcactcgcaaaatggctacgattggggggcctttgaccactggggccagggaaccgtggtcaccgtctcctca

SEQ ID NO: 5678 - DNA, 304 bp, Homo sapiens
  source 1..304: mol_type = other DNA
cgcagcctctggattcacctttgccatgtatgccatgacctgggtccgccaggctccagggaaggggccggagtgggtctcagttatttataatcgtggtggaaccacatactatgcagactctgtgaagggccggttcaccatctccagagataattcctacaatatgttgtatctgcaaatgaacaatctgagagccgaggacacggccgtctattactgcgcgaaagatcactcgcaaaatggctacgattggggggcctttgaccactggggccagggaaccgtggtcaccgtctcctca

SEQ ID NO: 5679 - DNA, 304 bp, Homo sapiens
  source 1..304: mol_type = other DNA
tgcagcctctggattcacctttggcatgtatgccatgacctgggtccgccaggctccagggaaggggccggagtgggtctcagttatttatagtcgtggtggaaccacatactatgcagactctgtgaagggccggttcaccatctccagagacaattcctacaacatgttgtatctgcaaatgaacaatctgagagtcgaggacacggccgtctattactgcgcgaaagatcactcgcaaaacggctacgattggggggcctttgaccactggggccagggaaccgtggtcaccgtctcctca

SEQ ID NO: 5680 - DNA, 304 bp, Homo sapiens
  source 1..304: mol_type = other DNA
cgcagcctctggattcacctttgccatgtatgccatgacttgggtccgccaggctccagggaaggggccggaatgggtctcagttatttatagtcgtggtggaaccacatactatgcagactctgtgaagggccggttcagcatctccagagataattcctacaacatgttgtatctgcaaatgaacaatctgagagccgaggacacggccgtctattactgcgcgaaagatcactcgcaaaatggctacgattggggggcctttgaccactggggccagggaaccgtggtcaccgtctcctca

SEQ ID NO: 5681 - DNA, 304 bp, Homo sapiens
  source 1..304: mol_type = other DNA
tgcagcctctggattcacctttgccatgtatgccatgacctgggtccgccagactccagggaaggggccggagtgggtctcacttatttatagtcgtggtggaaccacatactatgcagactctgtgaagggccggttcaccatctccagagataattcctacaacatgttgtatctgcaaatgaacaatctgagagccgaggacacggccgtctattactgcgcgaaagatcactcgcaaaatggctacgattggggggcctttgaccactggggccagggaaccgtggtcaccgtctcctca

SEQ ID NO: 5682 - DNA, 304 bp, Homo sapiens; identical to SEQ ID NO: 5668
  source 1..304: mol_type = other DNA

SEQ ID NO: 5683 - DNA, 304 bp, Homo sapiens; identical to SEQ ID NO: 5675
  source 1..304: mol_type = other DNA

SEQ ID NO: 5684 - DNA, 304 bp, Homo sapiens
  source 1..304: mol_type = other DNA
cgcagcctctggattcacctttgccatgtatgccatgacctgggtccgtcaggctccagggaaggggccggagtgggtctcagttatttatagtcgtggtggaaccacatactatgcagactctgtgaagggccggttcaccatctccagagataattcctacaacatgttgtatctgcaaatgaacaatctgagagccgaggacacggccgtctattactgcgcgaaagatcactcgcaaaatggctacgattggggggcctttgaccactggggccagggaaccgtggtcaccgtctcctca

SEQ ID NO: 5685 - DNA, 304 bp, Homo sapiens
  source 1..304: mol_type = other DNA
tgaagcctctggattcacctttggcatgtatgccatgacctgggtccgccaggctccagggaaggggccggagtgggtctcagttatttatagtcgtggtggaaccacatactatgcagactctgtgaagggccggttcaccatctccagagataattcctacaacatgttgtatctgcaaatgaacaatctgagagccgaggacacggccgtctattactgcgcgaaagatcactcgcaaaatggctacgattggggggcctttgaccactggggccagggaaccgtggtcaccgtctcctca

SEQ ID NO: 5686 - DNA, 304 bp, Homo sapiens; identical to SEQ ID NO: 5685
  source 1..304: mol_type = other DNA

SEQ ID NO: 5687 - DNA, 295 bp, Homo sapiens
  source 1..295: mol_type = other DNA
tgcagcctctggattcaccttcagtcacgcctggatgaattgggtccgccagactccagggaaggggctggaatggattggccgtattaaaagtaaaagtgatggtgggacaagagacttcgctgcacccgtgaaaggcagattcaccatttcaagagatgactcaaagcgcacggtctatctggaattgaacttcctgaaaaccgaagatacagccctttattattgtgccgcaggcacggggaagtccgattttgaccactggggccaggggaccctggtcaccgtctcctca

SEQ ID NO: 5688 - DNA, 295 bp, Homo sapiens
  source 1..295: mol_type = other DNA
tgcagcctctggattcactttcagtcacgcctggatgaattgggtccgccagactccagggaaggggctggagtggattggccgtattaaaagtaaaagtgaaggtgggacaagagacttcgctgcacccgggaaaggcagattcaccatttcaagagatgactcaaaaagcacggtatatttggaactgaacttcctgaaaagcgaagacacaggcgtttattactgtgccgcaggcacggggaagtccgattttgaccactggggccaggggaccctggtcaccgtctcctca

SEQ ID NO: 5689 - DNA, 295 bp, Homo sapiens
  source 1..295: mol_type = other DNA
tgtagcctctggattcaattttaaagacgcctggatgagttgggtccgccaggctccagggaaggggctggagtgggtgggccgcatgaaaagtaaaaatgaaggagggacaaaagacttcgctgcacccgtgagaggcagatgcgccatgtcaagagatgagtcaaaaaacatagtatatctgcaactggacagtctgaaaatcgaagacacagccgtctactactgtgccgccgggaccggaaagtccgactttgatcactggggccagggaaccctggtcaccgtctcctca

SEQ ID NO: 5690 - DNA, 295 bp, Homo sapiens; identical to SEQ ID NO: 5689
  source 1..295: mol_type = other DNA

SEQ ID NO: 5691 - DNA, 295 bp, Homo sapiens
  source 1..295: mol_type = other DNA
tgtagcctctggattcaattttaaagacgcctggatgagttgggtccgccaggctccagggaaggggctggagtgggtgggccgcatgaaaagtaaaaatgaaggagggacaaaagacttcgctgcacccgtgagaggcagatgcgccatgtcaagagatgagtcaaaaaatttagtatatctgcaactggacagtctgaaaatcgaagacacagccgtctactactgtgccgccgggaccggaaagtccgactttgatcactggggccagggaaccctggtcaccgtctcctca

SEQ ID NO: 5692 - DNA, 295 bp, Homo sapiens
  source 1..295: mol_type = other DNA
taaagcctctggattcaccttcagtcacgcctggatgaattgggtccgccagattccagggaaggggctggaatggattggccgtattaaaagtaaaaccgatggtgcgacaagagacttcgctgcacccgtgaaaggcagatttaccatttcaagagatgactcaaaaagtacggtgtatttggaattgaacttcctgaaaagcgaagacacagccgtttattattgtgccgcaggcacggggaagtccgattttgaccactggggccaggggaccctggtcaccgtctcctca

SEQ ID NO: 5693 - DNA, 295 bp, Homo sapiens
  source 1..295: mol_type = other DNA
tgcagcctctggattcaccttcagtcacgcctggatgaattgggtccgccagagtccagggaaggggctggagtggattggccgtattaaaagtaaaagtgaaggtgggacaagagacttcgctgcacccgtgaaaggcagattcatcatttcaagagatgactcaaaaagcacggtatatttggaattgaacttcctgaaaagggaggacacagccgtttattactgtgccgcaggcacggggaagtccgattttgaccactggggccaggggaccctggtcaccgtctcctca

SEQ ID NO: 5694 - DNA, 295 bp, Homo sapiens
  source 1..295: mol_type = other DNA
taaagcctctggattcaccttcagtcacgcctggatgaattgggtccgccagactccagggaaggggctggaatggattggccgtattaaaagtaaaagtgatggtgggacaagagacttcgctgcacccgtgaaaggcagatttatcatttcaagagatgactcaaaaagcacggtatatttggaattgaacttcctgaaaagcgaagacacagccgtttattactgtgccgcaggcacggggaagtccgattttgaccactggggccaggggaccctggtcaccgtctcctca

SEQ ID NO: 5695 - DNA, 295 bp, Homo sapiens
  source 1..295: mol_type = other DNA
tgcagcctctggattcaccttcagtcacgcctggatgaattgggtccgccagactccagggaaggggctggagtggattggccgtattaaaagtaaaagtgatggtgggacaagagacttcgctgcacccgtgaaaggcagattcatcatttcaagagatgactcaaaaagcacagtatatttggaattgaacttcctgaaaaccgaagacacagccgtttattactgtgccgcaggcacggggaagtccgattttgaccactggggccaggggaccctggtcaccgtctcctca

SEQ ID NO: 5696 - DNA, 295 bp, Homo sapiens
  source 1..295: mol_type = other DNA
tgcagcctctggattcactttcagtcacgcctggatgaattgggtccgccagactccagggaaggggctggagtggattggccgtattaaaagtaaaagtgaaggtgggacaagagacttcgctgcacccgggaaaggcagattcaccatttcaagagatgacacaaaaagtatggtatatttggatttgaacttcctgaaaaccgaggacacagccgtttatttctgtgccgcaggcacggggaagtccgattttgaccactggggccaggggaccctggtcaccgtctcctca

SEQ ID NO: 5697 - DNA, 283 bp, Homo sapiens
  source 1..283: mol_type = other DNA
tgcagcctctggattcaccgtcagtagcaactacatgtactgggtccgccaggctccagtgaaggggctggagtgggtctcagttatttatagccgtggtaccacatactacgcagactccgtgaagggcagattcaccatctccagagacaattctaagaacacgctgtatcttcaaatgaacagcctgagagccgaggacacggctgtgtattactgtgcggcatttagtgggacctacataacctactggggccagggaaccctggtcaccgtctcctca

SEQ ID NO: 5698 - DNA, 283 bp, Homo sapiens
  source 1..283: mol_type = other DNA
tgcagcctctggattcaccgtcagtagcaactacatgtactgggtccgccaggctccagtgaaggggctggagtgggtctcagttatttatagccgtggtaccacatactacgcagactccgtgaagggcagattcaccatctccagagacaattccaagaacacgctgtatcttcaaatgaacagcctgagagccgaggacacggctgtgtattactgtgcggcatttagtgggacctacataacctactggggccagggaaccctggtcaccgtctcctca

SEQ ID NO: 5699 - DNA, 295 bp, Homo sapiens
  source 1..295: mol_type = other DNA
tgcagcgtctggattcagcttcagtaaccatggcatgcattgggtccgccaggctccaggcaaggggctggagtgggtgtccgttatactccatgatggaagtaagcaacactatgcagaatccgtgaagggccgattcaccatttccagagacaactcgaagaacacactgtatctgcaaatgaacagcctgagagacgaggacacggctatgtattactgtgcgagagatgaccttttgcctgataatggttttgatatttggggccaagggacaatggtcaccgtgtcttca

SEQ ID NO: 5700 - DNA, 295 bp, Homo sapiens
  source 1..295: mol_type = other DNA
tgcagcgtctggattcagtttcagtaattatggcatgcactgggtccgccaggctccaggcaaggggctggagtgggtggcagtcataccgcatgatggaacatatagacattatgcagactccgtgaagggccgattcaccatctccagagacaattccaagaacatgctgtatctggaaatgaacagcctgagagtcgaggacacggctgtgtattactgtgcgagagatgacctcctccccgataatggttttgatatctggggccaagggacaatggtcaccgtctcttca

SEQ ID NO: 5701 - DNA, 292 bp, Homo sapiens
  source 1..292: mol_type = other DNA
tgcagcctctggattcacctttagcacctatgccatgagctgggtccgccaggctccagggaaggggctggagtgggtctcagttagtagtggtagtggtggtagcacatactacgcagactccgtgaagggccgattcaccatctccagagacaattccaagaacacgctgtatctgcaaatgaacagcctgagagccgaggacacggccgtatattactgtgcgaaagatgttaggttattggatgcttttgatatctggggccaagggacaatggtcaccgtctcttca

SEQ ID NO: 5702 - DNA, 289 bp, Homo sapiens
  source 1..289: mol_type = other DNA
tgcagcctctggattcaactttagcagctatgccatgagctgggtccgccaggctccagggaaggggctggagtgggtctcagttattagtagtagtggtagcacatactacgcagactccgtgaagggccggttcaccatctccagagacaattccaagaacacgctgtatctgcaaatgcacagcctgagagccgaggacacggccgtatattactgtgcgaaagatgtaaggttactagatgcttttgatatctggggccaagggacaatggtcaccgtctcttca

SEQ ID NO: 5703 - DNA, 292 bp, Homo sapiens
  source 1..292: mol_type = other DNA
tgcagcctctggattcagccttagcacctatgccatgagctgggtccgccaggctccagggaaggggctggagtgggtctcagttagtagtgatagtggtggtagcacatactacgcagactccgtgaagggccggttcaccatctccagagacaattccaagaacacgctgtatctgcaaatgaacaccctgagagccgaggacacggccgtatattactgtgcgaaagatgttaggttattggatgcttttgatatctggggccaagggacaatggtcaccgtctcctca

SEQ ID NO: 5704 - DNA, 313 bp, Homo sapiens
  source 1..313: mol_type = other DNA
tgcagcctctggattcacctttagtacctacgccatgaactgggtccgccaggcaccagggaaggggctggagtgggtctcatctattagtactggtggttcaaccacatactacgcagactccgtgcagggccggttcaccatctccagagacaattccaagaacgcactctatctgcaaatgaacagcctgagagccgaggacacggccgtgtattactgtgcgaaagtcgcggtgcctacgacgtccgcactaatgttctactacgctgtggacgtctggggccaagggaccacggtcaccgtctcctca

SEQ ID NO: 5705 - DNA, 313 bp, Homo sapiens
  source 1..313: mol_type = other DNA
tgcagcctctggattcacctttagtacctatgccatgaactgggtccgccaggcaccagggaaggggctggagtgggtctcagctattagtactggtggtacaaccacatactacgcagactccgtgaagggccggttcaccatctccagagacaattccaagaacgcactctatctgcaaatgaacagcctgagagccgaggacacggccgtgtattactgtgcgaaagtcgcggtgcctacgacgtccgcactaatgttctactacgctgtggacgtctggggccaagggaccacggtcaccgtctcctca

SEQ ID NO: 5706 - DNA, 313 bp, Homo sapiens; identical to SEQ ID NO: 5705
  source 1..313: mol_type = other DNA

SEQ ID NO: 5707 - DNA, 277 bp, Homo sapiens
  source 1..277: mol_type = other DNA
tgcagcctctggattcaccttcggtgactactatatgacgtggatccgccagcctccagggaaggggctggagtgggtttcgtccattaatggtgatagtagtgccacaaactacgcagactctgtgaagggccgattcaccatctccagagacaacgcccaaaagtcactttatctgcaaatgaacagcctgagagccgaagacacggccgtctattactgtgcgagggcttcggggagttactggggccagggaaccctggtcaccgtctcgtca

SEQ ID NO: 5708 - DNA, 277 bp, Homo sapiens
  source 1..277: mol_type = other DNA
tgttgcctctggattctccttcagtgactactacatgacgtggatccgccaggctccagggaagggtctgcagtgggtttcatccattagtaatggaagtactcacataaattacgcagactctgtgaagggccgattcaccatctccagagacgacgccaggaagtcactgtatctgcaaatgaacaccctgagagccgacgacacggccgtatattactgtgcgagagctagtgggagctactggggccagggaaccctggtcatcgtctcctca

SEQ ID NO: 5709 - DNA, 313 bp, Homo sapiens
  source 1..313: mol_type = other DNA
tgcagcctctggattcaggtttgatgattatgccatgcactgggtccggcaagctccagggaagggcctggagtgggtctcaggcattaattggaatggtgataacaaaggctatgcggactctgtgaagggccgattcaccatctccagagacaacgccaagaactccctgtatttccaaatgaatagtctgagcgctgaggacacggccttgtatttctgtgcaagagataagagcctggtttattatgcttcggggagttcgaatgcttttgatatctggggccaagggacaatggtcaccgtctcttca

SEQ ID NO: 5710 - DNA, 313 bp, Homo sapiens
  source 1..313: mol_type = other DNA
tgcagcctctggattcaggtttgatgattatgccatgcactgggtccggcaagctccagggaagggcctggagtgggtctcaggcattaattggaatggtgataacaaaggctatgcggactctgtgaagggccgattcaccatctccagagacaacgccaagaactccctgtatttccaaatgaatagtctgagcgctgaggacacggccttgtatttctgtgcaagagataagagcctggtttactatgcttcggggagttcgaatgcttttgatatctggggccaagggacaatggtcaccgtctcttca

SEQ ID NO: 5711 - DNA, 313 bp, Homo sapiens; identical to SEQ ID NO: 5709
  source 1..313: mol_type = other DNA

SEQ ID NO: 5712 - DNA, 313 bp, Homo sapiens; identical to SEQ ID NO: 5710
  source 1..313: mol_type = other DNA

SEQ ID NO: 5713 - DNA, 313 bp, Homo sapiens
  source 1..313: mol_type = other DNA
tgcagcctctggattcaggtttgatgattatgccatgcactgggtccggcaagctccagggaagggcctggagtgggtctcaggcattaattggaatggtgataacaaaggctatgcggactctgtgaagggccgatccaccatctccagagacaacgccaagaactccctgtatttccaaatgaatagtctgagcgctgaggacacggccttgtatttctgtgcaagagataagagcctggtttactatgcttcggggagttcgaatgcttttgatatctggggccaagggacaatggtcaccgtctcttca

SEQ ID NO: 5714 - DNA, 313 bp, Homo sapiens
  source 1..313: mol_type = other DNA
tgcagcctctggattcaggtttgatgattatgccatgcactgggtccggcaagctccagggaagggcctggagtgggtctcaggcattaattggaatggtgataacaaaggctatgcggactctgtgaagggccgattcaccatctccagagacaacgccaagaactccctgtatctccaaatgaatagtctgagcgctgaggacacggccttgtatttctgtgcaagagataagagcctggtttactatgcttcggggagttcgaatgcttttgatatctggggccaagggacaatggtcaccgtctcttca

SEQ ID NO: 5715 - DNA, 313 bp, Homo sapiens
  source 1..313: mol_type = other DNA
tgcagcctctggattcaggtttgatgattatgccatgcactgggtccggcaagctccagggaagggcctggagggggtctcaggcattaattggaatggtgataacaaaggctatgcggactctgtgaagggccgattcaccatctccagagacaacgccaagaactccctgtatttccaaatgaatagtctgagcgctgaggacacggccttgtatttctgtgcaagagataagagcctggtttactatgcttcggggagttcgaatgcttttgatatctggggccaagggacaatggtcaccgtctcttca

SEQ ID NO: 5716 - DNA, 313 bp, Homo sapiens
  source 1..313: mol_type = other DNA
tgcagcctctggattcaggtttgatgattatgccatgcactgggtccggcaagctccagggaagggcctggagtgggtctcaggcattaattggaatggtgataacaaaggctatgcggactctgtgaagggccgattcaccatctccagagacaacgccaagaactccctgtatttccaaatgaatagtctgagcgctgaggacacggccttgtatttctgtgcaagagataagagcctggtttactatgcttcggggagttcgaatgcttttgatatcaggggccaagggacaatggtcaccgtctcttca

SEQ ID NO: 5717 - DNA, 313 bp, Homo sapiens
  source 1..313: mol_type = other DNA
tgcagcctctggattcaggtttgatgattatgccatgcactgggtccggcaagctccagggaagggcctggagtgggtctcaggcattaattggaatggtgataacaaaggctatgcggactctgtgaagggccgattcaccatctccagagacaacgccaagaactccctgtatttccaaatgaatagtctgagcgctgaggacacggccttgtatttctgtgcaagagataagagcctggtttactatgcttcggggagttcgaatgcttttgatatctggggccaagggaccacggtcaccgtctcctca

SEQ ID NO: 5718 - DNA, 313 bp, Homo sapiens
  source 1..313: mol_type = other DNA
tgcagcctctggattcaggtttgatgattatgccatgcactgggtccggcaagctccagggaagggcctggagtgggtctcaggcattaattggaatggtgataacaaaggctatgcggactctgtgaagggccgattcaccatctccagagacaacgccaagaactccctgtatctccaaatgaatagtctgagcactgaggacacggccttgtatttctgtgcaagagataagagcctggtttactatgcttcggggagttcgaatgcttttgatatctggggccaagggacaatggtcaccgtctcttca

SEQ ID NO: 5719 - DNA, 289 bp, Homo sapiens
  source 1..289: mol_type = other DNA
tgcagcctctggattcacctttgatgattatggcatgagctgggtccgccaagctccagggaaggggctggagtgggtctctggtattaataggaatggcggtagcacaggttatgcagactctgtgaagggccgattcaccatctccagagacaacgccaagaactccctgtatctgcaaatgaacagtctgagagccgaggacacggccttgtattcctgtgcgagaggatacaactatggtccctttgactactggggccagggaaccctggtcaccgtctcctca

SEQ ID NO: 5720 - DNA, 289 bp, Homo sapiens
  source 1..289: mol_type = other DNA
tgcggcctctggatccacctttggtgatcatggcatgagctgggtccgccaagctccagggaaggggctggagtgggtctctggtattaatcggaatagtgatagcacaggttatgtagagtctgtgaagggccgattcaccatctctagagacaacgccaagaactccctgtatctgcaaatgaacattctgagagccgaggacacggccttatattactgtgcgagaggatacaattatggtccatttgactactggggccagggaaccctggtcaccgtctcctca

SEQ ID NO: 5721 - DNA, 289 bp, Homo sapiens
  source 1..289: mol_type = other DNA
tgaagcctctggagtcacttttgctgatcatggcatgagttgggtccgccaagctccagggaaggggctggagtgggtcgctggtattaatcggaatagtggaaatacagattatatagactctgtgaagggccgtttcaccatctccagagacaacgccaagaagtacctgtatctgcaaatgagcagtctgagagccgaggacacggccttatattactgtgcgaggggatataattatggtccctttgattactggggccggggaaccctggtcaccgtctcctca

SEQ ID NO: 5722 - DNA, 289 bp, Homo sapiens
  source 1..289: mol_type = other DNA
tgaagcctctggagtcacttttgctgatcatggcatgagttgggtccgccaagctccagggaaggggctggagtgggtcgctggtattaatcggaatggtgataatacagattatatagactctgtgaagggccgattcaccatctccagagacaacgccaagaagtacctgtatctgcaaatgagcagtctgagagccgaggacacggccttatattactgtgcgaggggatataattatggtccctttgattactggggccggggaaccctggtcaccgtctcctca

SEQ ID NO: 5723 - DNA, 289 bp, Homo sapiens
  source 1..289: mol_type = other DNA
tgaagcctctggagtcacttttggtgatcatggcatgagttgggtccgccaagctccagggaaggggctggagtgggtcgcgggtattaatcggaatggtgcgaatacagattatatagactctgtgaagggccgattcaccatctccagagacaacgccaagaagtacttgtatctgcaaatgaacagtctgagagccgaggacacggccttatattactgtgcgaggggatataattatggtccctttgattactggggccggggaaccctggtcaccgtctcctca

SEQ ID NO: 5724 - DNA, 336 bp, Homo sapiens
  source 1..336: mol_type = other DNA
acacagaccctcacgctgacctgtaccttctctgagctctcactcagcactaggggagtgggtgtgggctggatccgtcagcccccaggaaaggccctggagtggcttgcactcatttattgggaagatgataagcgctacatcccatctctgaagagcaggctcaccatcaccaaggacacctccagaaaccaggtggtccttacactgaccaacgtggaccctgtggacacagccacatattactgtgcacacagaccgagccaacgtcacagtgggtggtaccccaactggttcgacccctggggccagggaaccctggtcaccgtctcctca

SEQ ID NO: 5725 - DNA, 336 bp, Homo sapiens
  source 1..336: mol_type = other DNA
acacagaccctcacgctgacctgcaccttctctggcttctcactcagcactagtggggtgggtgtgggctggatccgtcagcccccaggaaaggccctggagtggcttgcactcatttattgggatgacgataagcgctacagcccatctctgaggagcaggctcaccatcaccaaggacacctccaaaaaccaggtggtccttacactgaccaacgtggaccctgtggacacagccacatattactgtgcacacagaccgagccaacgtcacagtgggtggtaccccaactggttcgacccctggggccagggaaccctggtcaccgtctcctca

SEQ ID NO: 5726 - DNA, 336 bp, Homo sapiens
  source 1..336: mol_type = other DNA
acacagaccctcacgctgacctgcaccttctctgggttctcactcagcactagtggagtgggtgtgggctggatccgtcagcccccaggaaaggccctggagtggcttgcactcatttattgggatgacgataagcgctacagcccatctctgaggaccaggctcaccatcaccaaggacacctccaaaaaccaggtggtccttacactgagcaacgtggaccctgtggacacagccacatattactgtgcacacagaccgagccaacgtcacagtgggtggtaccccaactggttcgacccctggggccagggaaccctggtcaccgtctcctca

SEQ ID NO: 5727 - DNA, 336 bp, Homo sapiens
  source 1..336: mol_type = other DNA
gcacagaccctcacgctgacctgcaccttctctgggttctcactcagtactagtggagtgggtgtgggctggatccgtcagcccccaggaatggccctggagtggcttgcactcatttattgggatgacgataggcgctacagcccatctctggggagcaggctcaccatcaccaaggacacctccaaaaaccaggtggtccttacactgaccaacgtggaccctgtggacacagccacatattactgtgcacacagaccgagccaacgtcacagtgggtggtaccccaactggttcgacccctggggccagggaaccctggtcactgtctcctca

SEQ ID NO: 5728 - DNA, 336 bp, Homo sapiens
  source 1..336: mol_type = other DNA
acacagaccctcacgctgacctgcaccttctctggattctcaatcggcactagtggagtgggtgtgggctggatccgccagcccccaggaaaggccctggagtggcttgcgctcatttattgggataatgataaattctatagcccatctctgaggaataggatcaccatcatgaaggactcctccagaaaccaggtggtccttacaatgaccaatacggaccctgtggacacagccacatattactgtgcacacagaccttctcaacgtcacagtggctggtacccgaattggttcgacccctggggccagggaatcctggtcaccgtctcctca

SEQ ID NO: 5729 - DNA, 298 bp, Homo sapiens
  source 1..298: mol_type = other DNA
tgcagcctctggattcacctttagcagctatgccatgagctgggtccgccaggctccagggaaggggctggagtgggtctcagctattagtggtagtggtgctaccacatactacgcagactccgtgaagggccggttcaccatctccagagacaatttaaagtacgcactgtatctgcaaatgaacagcctgagagccgaggacacggccgtatattactgtgcgaaagatgggcagcaactggtatctgatgcttttgatatctggggccaagggacaatggtcaccgtctcttca

SEQ ID NO: 5730 - DNA, 298 bp, Homo sapiens
  source 1..298: mol_type = other DNA
tgcagcctctaaattcacctttagcagttatgccctgagctgggtccgccaggctccagggaagggactggagtgggtctcagctattagtagtagtggtggtaccacatactacgcagactccgtgaagggccggttcaccatctccagagacaattacgagaacatgttgtatctgcaaatgaacagcctgagagccgaggacacggccgtatattactgtgcgaaagatgggcagcagctggtctctgatgcttttgatatctggggccaagggacaatggtcaccgtctcttca

SEQ ID NO: 5731 - DNA, 295 bp, Homo sapiens
  source 1..295: mol_type = other DNA
tgcagcgtctggattccccttcagtacctacggcatgcactgggtccgccaggctccaggcaaggggctggagtgggcagcagttatatggtctgatggaggtaaagaatcttatgcagactccgtgaagggccgattcaccatctccagagacaatttcaagaacacgctgtatctgcaaatgaacagcctgagagtcgaggacacggctgtctatttctgtgcgagagatcgattcggtggctggttccatatggacgtctggggcccagggaccacggtcaccgtctcctca

SEQ ID NO: 5732 - DNA, 295 bp, Homo sapiens
  source 1..295: mol_type = other DNA
tgcagcgtctggattccccttcagtacctatggcatgcactgggtccgccaggctccaggcaaggggctggagtgggtggcagttatatggtctgatggaaataaaaagtcctatgtagactccgtgaagggccgattcaccatctccagagacaattttaagaacacgttggatctgcaaatgaacagcctgagagccgacgacacggctgtgtattactgtgcgagagatcgtttcggtggctggttccatatggacgtctggggccaagggaccacggtcaccgtctcctca

SEQ ID NO: 5733 - DNA, 283 bp, Homo sapiens
  source 1..283: mol_type = other DNA
tgcagcgtatggactctccttcagcagctcctggatgcactgggtccgccaagctccagggaagggactggtgtgggtgtcacgtattaatcatgatgcgactaccataaactacgcggactccgtgaagggccgattcaccatctccagagacaacgccaagaacacactgtatctgcaaatgaacagtctcagagaggacgacacggctgtatattactgtgcgagagtcgtaagctggttcgacccctggggccagggaaccctggtcaccgtctcctca

SEQ ID NO: 5734 - DNA, 283 bp, Homo sapiens
  source 1..283: mol_type = other DNA
tacactttctggattcaccttcagcagttattggatgcactgggtccgccaagctccggggaaggggctagtgtgggtctcacgtattaagagtgatgggagtgacacaacttacgcggactccgtgaagggccgattcaccatctccagagacaacgccaagaacatggtgtatctgcaaatgaacagtctgagagtcgaagacacagctatatattactgtgcaagagtcgtaagttggttcgacccttggggccagggaaccctggtcaccgtctcctca

SEQ ID NO: 5735 - DNA, 286 bp, Homo sapiens
  source 1..286: mol_type = other DNA
tgcagcctctggattcaccttcagtacctactggatgcactgggtccgccaagctccagggaaggggctggtgtgggtctcacatgttaatggtgatgggagtaccacaacctacgcggactccgtgaagggccgattctccatctccagagactacgccaagaacacgctgtttctgcaaatggacggtctgagaaccgaggacacggctgtgtattactgtgcaaggggctggtctcacggtctggacgtctggggccaagggaccacggtcaccgtctcctca

SEQ ID NO: 5736 - DNA, 286 bp, Homo sapiens
  source 1..286: mol_type = other DNA
tgcagcctctgaattcaccttcactacctactggatgcactgggtccgccaagctccagggaaggggctggtgtgggtctcacatattaatagtgatctgagtgtcattaattatgtggactccgtgaagggccgattcaccatctccagagacaacgccaagaacacgctgtatctacaaatgaacagtctgagagccgaggacacggctgtctattattgtgcaagagggtggtcacacggtttggacgtctggggccaagggaccacggtcaccgtctcctca

SEQ ID NO: 5737 - DNA, 286 bp, Homo sapiens
  source 1..286: mol_type = other DNA
tgcagcctctgaattcaccttcactagctactggatgcactgggtccgccaagctccagggaaggggctggtgtgggtctcacatattaatagtgatctgagtgtcattaattatgtggactccgtgaagggccgattcaccatctccagagacaacgccaagaacacggtgtatctacaaatgaacagtctgagagccgaggacacggctgtctattattgtgcaagagggtggtcacacggtttggacgtctggggccaagggaccacggtcaccgtctcctca

SEQ ID NO: 5738 - DNA, 286 bp, Homo sapiens; identical to SEQ ID NO: 5737
  source 1..286: mol_type = other DNA

SEQ ID NO: 5739 - DNA, 301 bp, Homo sapiens
  source 1..301: mol_type = other DNA
tgcagcctctggattcacctttgatgattatgccatgcactgggtccggcaagctccagggaagggcctggagtgggtctcaggtattagttggaacagtggtaccataggttatgcggactctgtgaagggccgattcaccatctccagagacaacgccaagaactccctgtacctgcaaatgaacagtctgagagctggggacacggccttatattactgtgcaaaggggtataccagcagctggtaccacgaaccgtttgactactggggccagggaaccctggtcaccgtctcctca

SEQ ID NO: 5740 - DNA, 301 bp, Homo sapiens
  source 1..301: mol_type = other DNA
tgcagcctctggattcacctttgatgattatgccatgcactgggtccggcaagctccagggaagggcctggagtgggtctcaggtattagttggaacagtggtaccataggttatgcggactctgtgaagggccgattcaccatctccagagacaacgccaagaactccctgtatctgcaaatgaacagtctgagagctggggacacggccttatattactgtgcaaaggggtataccagcagctggtaccacgaaccgtttgactactggggccagggaaccctggtcaccgtctcctca

SEQ ID NO: 5741 - DNA, 301 bp, Homo sapiens; identical to SEQ ID NO: 5740
  source 1..301: mol_type = other DNA

SEQ ID NO: 5742 - DNA, 300 bp, Homo sapiens
  source 1..300: mol_type = other DNA
tgcagcctctggattcacctttgatgattatgccatgcactgggtccggcaagctccagggaagggcctggagtgggtctcaggtattagttggaacagtggtaccataggttatgcggactctgtgaagggccgattcaccatctccagagacaacgccaagaactccctgtatctgcaaatgaacagtctgagagctggggacacggccttatattactgtgcaaaggggtataccagcagctggtaccacgaaccgtttgactactggggccagggaccctggtcaccgtctcctca

SEQ ID NO: 5743 - DNA, 301 bp, Homo sapiens
  source 1..301: mol_type = other DNA
tgcagcctctggattcacctttgatgattatgccatgcactgggtccggcaagctccagggaagggcctggagtgggtctcaggtattagttggaacagtggtaccataggttatgcggactctgtgaagggccgattcaccatctccagagacaacgccaagaactccctgtatccgcaaatgaacagtctgagagctggggacacggccttatattactgtgcaaaggggtataccagcagctggtaccacgaaccgtttgactactggggccagggaaccctggtcaccgtctcctca

SEQ ID NO: 5744 - DNA, 301 bp, Homo sapiens
  source 1..301: mol_type = other DNA
tgcagcctctggattcacctttgatgattatgccatgcactgggtccggcaagctccagggaagggcctggagtgggtctcaggtattagttggaacagtggtaccataggttatgcggactctgtgaagggccgattcaccatctccagagacaacgccaagaactccccgtatctgcaaatgaacagtctgagagctggggacacggccttatattactgtgcaaaggggtataccagcagctggtaccacgaaccgtttgactactggggccagggaaccctggtcaccgtctcctca

SEQ ID NO: 5745 - DNA, 301 bp, Homo sapiens
  source 1..301: mol_type = other DNA
tgcagcctctggattcacctttgatgattatgccatgcactgggtccggcaagctccagggaagggcctggagtgggtctcaggtattagttggaacagtggtaccataggttatgcggactctgtgaagggccgattcaccatctccagagacaacgccaagaactccctgtatctgcaaatgaacagtctgagagctggggacacggccttatattactgtgcaaaggggtacaccagcagctggtaccacgaaccgtttgactactggggccagggaaccctggtcaccgtctcctca

SEQ ID NO: 5746 - DNA, 301 bp, Homo sapiens
  source 1..301: mol_type = other DNA
tgcagcctctggattcacctttgatgattatgccatgcactgggtccggcaagctccagggaagggcctggagtgggtctcaggtattagttggaacagtggtaccataggttatgcggactctgtgaagggccgattcaccatctccagagacaacgccaagaactccctgtatctgcaaatgaacagtctgagagctggggacacggccttatattactgtgcaaaagggtataccagcagctggtaccacgaaccgtttgactactggggccagggaaccctggtcaccgtctcctca

SEQ ID NO: 5747 - DNA, 300 bp, Homo sapiens
  source 1..300: mol_type = other DNA
tgcagcctctggattcacctttgatgattatgccatgcactgggtccggcaagctccagggaagggcctggagtgggtctcaggtattagttggaacagtggtaccataggttatgcggactctgtgaagggccgattcaccatctccagagacaacgccaagaactccctgtatctgcaaatgaacagtctgagagctggggacacggccttatattactgtgcaaaggggtataccagcagctggtaccacgaaccgtttgactactggggccagggaaccctgtcaccgtctcctca

SEQ ID NO: 5748 - DNA, 283 bp, Homo sapiens
  source 1..283: mol_type = other DNA
tgcagcctctggattcacctttaccaactatgccatgacctgggtccgccaggctccagggaaggggctggagtgggtctcaactattggtggtagtggtgccacatactacgcagactccgtgaagggccggttcaccatctccagggacaattccaagaacacgctgtatctgctaatgaacagcctgacagtcgcggacacggccgactattactgtgcgaaaggtcccccattatactttgactcctggggccagggaaccctggtcaccgtctcctca

SEQ ID NO: 5749 - DNA, 286 bp, Homo sapiens
  source 1..286: mol_type = other DNA
tgcagcctctggattcacctttaccagctatgccatgacctgggtccgccaggctccagggaaggggctggagtccgtctcaactattagtggtagtggtggtcaaacatactacgcagactccgtgaagggccgattcaccatctccagagacaattccaggaacacactatatctgcaaatgaacagcctgagagccgaggacacggccctatattactgtgcgaaaggtccccctctctactttgactcctggggccagggatccctggtcaccgtctcctca

SEQ ID NO: 5750 - DNA, 286 bp, Homo sapiens; identical to SEQ ID NO: 5749
  source 1..286: mol_type = other DNA

SEQ ID NO: 5751 - DNA, 285 bp, Homo sapiens
  source 1..285: mol_type = other DNA
gcatctggatacaccttcagcacctaccttctacactgggtgcggcaggcccctggacaaggacttgagtggatggcactgatcaaccctggcgatggtgggacaatctacgcacagaatttccggggcagaatcaccgtgaccaaggacacgtccgcgagcacagtctacatggagctgagcagcctgagatctgacgatatggccgtgtattactgtgcgcgagagttccatgggggacactttgactactggggccggggaaccctggtcaccgtctcctca

SEQ ID NO: 5752 - DNA, 286 bp, Homo sapiens
  source 1..286: mol_type = other DNA
ggcatccgggtactccctcacctcctactatatgcactgggtgcgacaggtccctggacaggggcctgagtggatgggaataatctactctcccggtggtggcgccgcctcctcacagaggttccagggcagactcaccatgaccatggacacgtccacgagcacagtttatatggagctgagcagcctgacctctgacgactcggccgtctattactgtgcgcgagagtttcatggtgggcactttgactactggggccagggaaccctggtcaccgtctcctca

SEQ ID NO: 5753 - DNA, 300 bp, Homo sapiens
  source 1..300: mol_type = other DNA
acttctgggtacagctttacccaccacggtgtcacctgggtgcggcaagcccctggacaagggcttgagtggatgggatggatcagcggttataatagtgacacacactatgcgcagaaggtccagggcagggtcaccatgactgtagacagatccacgagcacaggttacatggaactgaggagcctaacatctgacgacacggccgtatattactgtgcgagagatccctccaataccagtggcttttacgcctactttgactactggggccagggagtcttggtcaccgtctcctca

SEQ ID NO: 5754 - DNA, 300 bp, Homo sapiens
  source 1..300: mol_type = other DNA
gcttctggttacacctttacccaccatggtatcagttgggtgcgacaggcccctggacaaggaattgagtggatgggatggatcagcgcctacaatggtgacacaaaatatgcacagaagctccagggcagagtcaccatgaccacagacacatccacgaccacagcctacatggagctgaggagcctacaatctgacgacacggccgtatattactgtgcgagagatccctcgaataccagtggcttctacgcatactttgactattggggccagggaaccctggtcaccgtctcctca

SEQ ID NO: 5755 - DNA, 300 bp, Homo sapiens
  source 1..300: mol_type = other DNA
acttctgggtacacctttacccaccatggtgttgcctgggtgcggcaagcccctggacaaggccttgagtgggtgggatggatcagctgtttcaatggtgacacacactatgcgcagaagttccagggcagggtcaccatgaccacagacagatccacgagtacagcctacatggaactgaggagcctaagatctgacgacacggccgtatatttctgtgcgagagatccttccaataccagtggcttttacgcctactttgactactggggccagggagtcttggtcaccgtctcctca

SEQ ID NO: 5756 - DNA, 292 bp, Homo sapiens
  source 1..292: mol_type = other DNA
tgcagcctctggattcagcatcagtgactactggatgcactgggtccgccaagttccagggaagggcctggtgtgggtctcagaaattaatcgtgatgcgagaaccaaaacttacgcggactccgtgaagggccgattcaccatctccagagacaacaccaggaacactctgtttctgcaaatgaatagtctgagagtcgaggacacggctgtctattactgtgtaaggggtaccattggctggaatggggttgactactggggccagggaaccctggtcaccgtctcctca

SEQ ID NO: 5757 - DNA, 292 bp, Homo sapiens
  source 1..292: mol_type = other DNA
tgcagcctctgaattcaccttcagaagttactggatgcactgggtccgccgagctccagggaaggggctggtgtgggtctcacatattagtgaagatgggaatcacacagcctacgcggactccgtgaagggccgattctccatctccagagacaacgccaagaacaccctgtatctgcaaatgaacagtctgagagtcgaggacacggcagtgtattattgtgtcagagggaccattggctggaacggggtagactactggggccagggaaccctggtcaccgtctcctca

SEQ ID NO: 5758 - DNA, 292 bp, Homo sapiens
  source 1..292: mol_type = other DNA
tgcagcctctgaattcaccttcagaagttactggatgcactgggtccgccgagctccagggaaggggctggtgtgggtctcacatattagtgaagatgggagtcacacagcctacgcggactccgtgaagggccgattctccatctccagagacaacgccaagaacaccctgtatctgcaaatgaacagtctgagagtcgaggacacggcagtgtattattgtgtcagagggaccattggctggaacggggtagactactggggccagggaaccctggtcaccgtctcctca

SEQ ID NO: 5759 - DNA, 292 bp, Homo sapiens
  source 1..292: mol_type = other DNA
tttaggctctggattcactttcaggaatgcctggatgagttgggtccgccaggcttcagggaaggggctggagtgggttggccgtattaaaagtgaaattaacggtgggacagcagactacggtgcagccgtgagaggcagattcttcatctcaagagatgattcacaaaacacactgtatctgcaaatgaatagcctgaaaaccgaggacacagccgtgtactactgtactacagttactgatggtggtcttgactactggggccagggaaccctggtcactgtctcctca

SEQ ID NO: 5760 - DNA, 292 bp, Homo sapiens
  source 1..292: mol_type = other DNA
tgcagcctctggattcactttcagtaacgcctggatgagctgggtccgccaggctccagggaaggggctggagtgggttggccgtattaaaaggaaaagtgatggtgggacagcagaccacgctgtacccgtgaaaggcagattcaccatctcaagagatgattcaaacaacacgctgtatttgcaaatgaacagcctgaaaagtgaagacacagccgtatattactgtaccacagtcaccgatggcggccttgactactggggccagggaaccctggtcaccgtctcctca

SEQ ID NO: 5761 - DNA, 292 bp, Homo sapiens
  source 1..292: mol_type = other DNA
tgcagcctctggattcattttcagtaacgcctggatgagctgggtccgccaggctccagggaaggggctggagtggattggccgcattaagagtaagactcatggtgggacagcagactccgctgcacccgtgaaaggcagattcaccatctcaagagatgattcaaaaaacacgctgtatctgcaaatgaacagcctgacaaccgaggacacagccctgtattactgtaccacagtcactgatggcggccttgactactggggccagggaaccctggtcaccgtctcctca

SEQ ID NO: 5762 - DNA, 292 bp, Homo sapiens
  source 1..292: mol_type = other DNA
tgcagcctctggattcactttcagtaacgcctggatgagctgggtccgccagggtccagggaaggggctggagtgggttggccgtattaaaagaaaaagtgatggtgggacagcagactccgctgcacccgtgaaaggcagattcaccatctcaagagatgattcaaaaaacacgctgtatctgcaaatgaacagcctgaaaaccgaggacacagccgtgtatttctgtaccacagtcaccgatggcggccttgactactggggccagggaatcctggtcaccgtctcctca

SEQ ID NO: 5763 - DNA, 292 bp, Homo sapiens
  source 1..292: mol_type = other DNA
tgcagcctctggattcactttcagtaacgcctggatgagctgggtccgccagggtccagggaaggggctggagtgggttggccgtattaaaaggaaaagtgatggtgggacagcagactccgctgcacccgtgaaaggcagatttaccatctcaagagatgattcaaaaaacacgctgtatttgcaaatgaacagcctcaaaaccgaggacacagccgtgtatttctgtaccacagtcaccgatggcggccttgactactggggccagggaatcctggtcaccgtctcctca

SEQ ID NO: 5764 - DNA, 292 bp, Homo sapiens
  source 1..292: mol_type = other DNA
tgcagcctctggattcattttcagtaacgcctggatgagctgggtccgccaggctccagggaaggggctggagtggattggccgcattaaaagtaagactcatggtgggacagcagactccgctgcacccgtaaaaggcagattcaccatctcaagagatgattcaaaaaacacgctgtatctgcaaatgaacagcctgacaaccgaggacacagccctgtattactgtaccacagtcactgatggcggccttgactactggggccagggaaccctggtcaccgtctcctca

SEQ ID NO: 5765 - DNA, 292 bp, Homo sapiens
  source 1..292: mol_type = other DNA
tgcagcctctggattcactttcagtaacgcctggatgagctgggtccgccagggtccagggaaggggctggagtgggttggccgtattaaaaggaaaagtgatggtgggacagcagactccgctgcacccgtgaaaggcagattcaccatctcaagagatgattcaaaaaacacactgtatttgcaaatgaacagcctcaaaaccgaggacacagccgtgtatttctgtaccacagtcaccgatggcggccttgattactggggccagggaatcctggtcaccgtctcctca

SEQ ID NO: 5766 - DNA, 292 bp, Homo sapiens
  source 1..292: mol_type = other DNA
tgcagcctctggattcattttcagtaacgcctggatgagctgggtccgccaggctccagggaaggggttggagtggataggccgcattaaaagtaagactcatggtgggacagcagactccgctgcacccgtgaaaggcagattcaccatctcaagagatgattcaaaaaacacactatatctgcaaatgaacagcctgacaaccgaggacacagccctgtattactgtaccacagtcactgatggcggccttgactactggggccagggaaccctggtcaccgtctcctca

SEQ ID NO: 5767 - DNA, 292 bp, Homo sapiens; identical to SEQ ID NO: 5762
  source 1..292: mol_type = other DNA

SEQ ID NO: 5768 - DNA, 292 bp, Homo sapiens
  source 1..292: mol_type = other DNA
tgcagcctctggattcactttcattaacgcctggatgagctgggtccgccaggctccagggaaggggctggagtgggttggccgtattaaaaggaaaagtgatggtgggacagcagaccacgctgtacccgtgaaaggcagattcaccatctcaagagatgattcagacaacacgctgtatttgcaaatgaacagcctaaaaagtgaagacacagccgtatattactgtaccacagtcaccgatggcggccttgactactggggccagggaaccctggtcaccgtctcctca

SEQ ID NO: 5769 - DNA, 292 bp, Homo sapiens
  source 1..292: mol_type = other DNA
tgcagcctctggattcactttcagtaatgcctggatgagctgggtccgccaggctccagggaaggggctggagtgggttggccgtattaaaagtaaaaagaatggtgggacagcagaccacgctgcacccgtgaaaggcagattcagcatgtcaagagaagattcaaaaaatatgttgtatctgcaaatgaacagcctggaaaccgaagacacagccgtgtatttctgtaccacagtcaccgatggcggccttgactactggggccagggaaccctggtcaccgtctcctca

SEQ ID NO: 5770 - DNA, 310 bp, Homo sapiens
  source 1..310: mol_type = other DNA
cggtgttgatggtgcgtcccttagtggcttcttctggacctggatccgccagccctcagggaaggggctggagtggattgggcagatcaattatagtggtggaaccacccaccacaacccgtccctcaagggtcgagtcaccttttcactggacacgtcgaataagcagttctccctgcgtctgacctctgtgaccgccgcggacacggctatttattactgtgcgagatatagtagcaactggtacgggactgggtactactacggtatggacgtctggggcgaagggaccacggtcaccgtctcctca

SEQ ID NO: 5771 - DNA, 307 bp, Homo sapiens
  source 1..307: mol_type = other DNA
cggtgtccatggtgcgtccttcagtggattcttctggacttggattcgccagcccccagggaagggtctggaatggattggagaaatctatcatagtggaaacaccaattataacccgtccctcaggagtcgagtcaccatgtcgatagacacgtccaggaaacagttttccctggacctgacctctgtgaccgccgcggatacggccatatactactgtgcgaggtatagtagtaattggtatgggactggctactactacggaatggacgtctggggccaagggaccgcggtcaccgtctcctca

SEQ ID NO: 5772 - DNA, 300 bp, Homo sapiens
  source 1..300: mol_type = other DNA
aaggcttctggatacacctttcgcaactactggatcggctgggtgcgccagaagcccgggaaaggcctggagtggatgggaatcatctatcctggtgactatgataccagatacagtccgtccttcagaggccaggtcaccatatcagtcgacaagtccatcacgtccgccttcctgcagtggaacagcctgaaggcctcggacaccgccatgtattactgtgcgagagcccccacaagtgtgtcgaatccctaccactttgactcctggggccagggaaccccggtcaccgtctcctca

SEQ ID NO: 5773 - DNA, 300 bp, Homo sapiens
  source 1..300: mol_type = other DNA
aagggttctggatacagtttttccacttactggatcggctgggtgcgccagatgcccgggaaaggcctggagtggatcgggattatatatcctggtgactctgataccagatacagcccgtcctttaagggccaggtcaccatttcagtcgacaggtccatctccaccgcctacctgcagttgaggaccctgagcacctcggacaccgccatattttactgtgcgagggcccctacgagtgtctctaacccataccactttgactcttggggccagggaaccctggtctccgtctcctca

SEQ ID NO: 5774 - DNA, 289 bp, Homo sapiens
  source 1..289: mol_type = other DNA
tacagcctctggattcaccttcaatacctactggatgcactgggtccgccaagctccagggaaggggctggtgtgggtctcacgtattaatagtgatgggagtatcacaaactacgcggactccgtgaagggccgattcaccatctccagagacaacgccaagaacaccctgtatctgcaaatgaacagtctgagagccgaggacacggctgtttattactgtgctagggaagcggtggtgggagggtttgactactggggcctgggaaccctggtcaccgtctcctca

SEQ ID NO: 5775 - DNA, 289 bp, Homo sapiens
  source 1..289: mol_type = other DNA
tgtagcctctggattcaccttcagtaactactggatgcactgggtccgccaagctccagggaaggggctggtgtgggtctcacgtattaataataatggacttaccacaaactacgcggactccgtgaggggccgattcaccatctcccgagacaacgccaagaacacactgtatctggaaacgaacagcctgggagccgaggacacggctgtctatttctgtgcaagagaagcagttgtgggcgggtttgactactggggccagggagccctggtcaccgtctcctca

SEQ ID NO: 5776 - DNA, 286 bp, Homo sapiens
  source 1..286: mol_type = other DNA
cgtagcctctggattcatcttcaggaactatgccatgctctgggtccgccaggctccagggaaggaactggaatgggtctcaactattgatggtcctactactaacacacactacgcagactccgtgcagggccggttcaccattttcagagacaattccaggaacactgtttatctgcaaatgaacagtctgagggccgacgacacggccatctattactgttccacctggcttacgggtcactttgactactggggccagggaaccctggtcaccgtctcctca

SEQ ID NO: 5777 - DNA, 286 bp, Homo sapiens
  source 1..286: mol_type = other DNA
cgtagcctctggattcatcttcaggaactatgccatgctctgggtccgccaggctccagggaaggaactggaatgggtctcaactattgatggtcctactactaacacacactacgcagactccgtgcagggccggttcaccattttcagagacaattccaggaacactgtttatctgcaaatgaacagtctgagggccgacgacacggccttctattactgttccacctggcttacgggtcactttgactactggggccagggaaccctggtcaccgtctcctca

SEQ ID NO: 5778 - DNA, 286 bp, Homo sapiens
  source 1..286: mol_type = other DNA
cgtagcctctggattcatcttcaggaactatgccatgctctgggtccgccaggctccagggaaggaactggaatgggtctcaactattgatggtcctactactaacacacactacgcagactccgtgcagggccggttcaccattttcagagacaattccaggaacactgtttatctgcaaatgaacagtctgagggccgacgacacggccatctattactgttccacctggcttacgggtcactttgactactggggccagggaaccctggtcaccgcctcctca

SEQ ID NO: 5779 - DNA, 280 bp, Homo sapiens
  source 1..280: mol_type = other DNA
ctcagcctctggattcacgttcgctgacggcatgcactgggtccgccaggctccagggaggggaccagaatatgttgcctttatcagtcgttatgggaatatcacatattacgcagactccgtgaggggcagattcaccatctccagagacaattccaagaaaatggtgtttcttcaaatggccagtctgcgaactgatgacacggctgtttattactgtgtgagagactggtatggttttgactcttggggccagggaaccctggtctccgtctcctca

SEQ ID NO: 5780 - DNA, 280 bp, Homo sapiens
  source 1..280: mol_type = other DNA
ttcagcctctggattcagcttcaatgatggaatgcactgggtccgccaggctcctgggaagggactggaatatgtttcattcataagtcgttatggcgacaagacatactacttagactccgtgaagggcagattcaccatctccagagacaattcgaagaagatgttgtatctccaaatgaacaatctgagagttgacgacacgggtgtttatttttgtgtgagagactggtatggatttgactcctggggccagggcaccctggtcaccgtctcctca

SEQ ID NO: 5781 - DNA, 298 bp, Homo sapiens
  source 1..298: mol_type = other DNA
caatgtctctggttcatccatcaccatgagtaactattactggggctggatccgccagcccccagggaagggcctggagtggattgggagtatgttttctcgtgggaccacctactacaacccgtccctcaagagtcgagtcagcatatctgtggacacgtccaagaatcaattctccctgaggttgagctctgtgaccgccgcagacacggctgtgtattattgtgcgagacattgttatggtggctgcgggtggttcgacccctggggccagggaaccctggtcaccgtctcctca

SEQ ID NO: 5782 - DNA, 301 bp, Homo sapiens
  source 1..301: mol_type = other DNA
cactgtctctggtggctccatcagcagcaatagtaactactactggggctggatccgccaggccccagggaaggggctggagtggattgggagtagctattacagtgggactacatactatcacgcgtccctcaagagtcgactcaccatttcagtagacacgtccaagagccagttcttcttgaggctgacctctgtgaccgcctcagacacggctgtatattattgtgcgagacattgttatggtgggtgcggctggttcgacccctggggccagggaatcgtggtcaccgtctcctca

SEQ ID NO: 5783 - DNA, 289 bp, Homo sapiens
  source 1..289: mol_type = other DNA
tgtggcctctggattctcatttagtggcaatgccatgtgctgggtccgccaggctccagggaaggggctggagtgggtctcaggcattggtggcgatggtggcgcatactacgcagactccgtgaagggccggttcaccatctccagagtcaattccgagaacacggtgtctttgcaaatgaacagtctgaccgccgaggacacggccatatatttctgtgcgaaagatctctatgatttctcgggcatggacgtctggggtcaagggaccacggtcaccgtctcctca

SEQ ID NO: 5784 - DNA, 289 bp, Homo sapiens; identical to SEQ ID NO: 5783
  source 1..289: mol_type = other DNA

SEQ ID NO: 5785 - DNA, 289 bp, Homo sapiens; identical to SEQ ID NO: 5783
  source 1..289: mol_type = other DNA

SEQ ID NO: 5786 - DNA, 289 bp, Homo sapiens
  source 1..289: mol_type = other DNA
tgtagcctctggattctcatttagtggcaatgccatgtgctgggtccgccaggctccagggaaggggctggagtgggtctcaggcattggtggcgatggtggcgcatactacgcagactccgtgaagggccggttcaccatctccagagtcaattccaagaacacggtgtctctgcaaatgaacagcctgagcgccgaggacacggccatatattactgtgcgaaagatctctatgacttctccggtatggacgtctggggccaagggaccacggtcaccgtctcctca

SEQ ID NO: 5787 - DNA, 289 bp, Homo sapiens
  source 1..289: mol_type = other DNA
tgtagcctctggattcgaatttcctggcaatgccatgtgctgggtccgccaggctccagggaaggggctggagtgggtctcaggtattggtggcgacggtggcacacactacgcagactccgtgaagggccgattcaccatgtccagagacaattccaagaacacggtgtctctgcaaatgaacagcctgagagccgaggacacggccgtatattactgtgcgaaagatctctatgatttctccgggatggacgtctggggccaagggaccacggtcaccgtctcctca

SEQ ID NO: 5788 - DNA, 289 bp, Homo sapiens
  source 1..289: mol_type = other DNA
tgtggcctctggattctcatttagtggcaatgccatgtgctgggtccgccaggctccagggaaggggctggagtgggtctcaggcattggtggcgatggtggcgcatactacgcagactccgtgaagggccggttcaccatctccagagtcaattccgagaacacggtgtctttgcaaatgaacagtctgaccgccgaggacacggccatatatttctgtgcgaaagatctctatgatttctcgggcatggacgtctggagtcaagggaccacggtcaccgtctcctca

SEQ ID NO: 5789 - DNA, 289 bp, Homo sapiens
  source 1..289: mol_type = other DNA
tgtagcctctggattcgaatttcctggcaatgccatgtgctgggttcgccaggctccagggaaggggctggagtgggtctcaggtattggtggcgacggtggcacacactacgcagactccgtgaagggccgattcaccatgtccagagacaattccaagaacacggtgtctctgcaaatgaacagcctgagagccgaggacacggccgtatattactgtgcgaaagatctctatgatttctccgggatggacgtctggggccaagggaccacggtcaccgtctcctca

SEQ ID NO: 5790 - DNA, 289 bp, Homo sapiens
  source 1..289: mol_type = other DNA
tgtagcctctggattcgaatttcctggcaatgccatgtgttgggtccgccaggctccagggaaggggctggagtgggtctcaggtattggtggcgacggtggcacacactacgcagactccgtgaagggccgattcaccatgtccagagacaattccaagaacacggtgtctctacaaatgaacagcctgagagccgaggacaccgccgtatattactgtgcgaaagatctctatgatttctccgggatggacgtctggggccaagggaccacggtcaccgtctcctca

SEQ ID NO: 5791 - DNA, 289 bp, Homo sapiens
  source 1..289: mol_type = other DNA
tgtagtctctggattcaccattcacgggaatgccatgggctgggtccgtcaggctccggggaaggggccggagtgggtctgcggtattggctctgacttcagcacacactacggaggcaccgtgaagggccggttcaccgtctctagagacaactccaggagcacgatttatctgcaaatgaacagcctgacagccgaggacacggccgtatattactgtgcgaaagacttatatgacttctccggcatggacgtctggggcccagggaccacggtcaccgtctcctca

SEQ ID NO: 5792 - DNA, 289 bp, Homo sapiens
  source 1..289: mol_type = other DNA
tgtagtctctggattcaccattcatgggaatgccatgggctgggtccgccaggctccagggaaggggccggagtgggtctgcggaattggcactgactttagcacacactatgcaggcgccgtgaagggccgattcaccgtctccagagacaattcgaagaacacagtttacctgcaaatgaatagcctgacggccgaggacacggccatatattattgtgcgaaagacttatatgacttctccgggatggacgtctggggcccagggaccacggtcaccgtctcctca

SEQ ID NO: 5793 - DNA, 289 bp, Homo sapiens
  source 1..289: mol_type = other DNA
tgttgtctctggattcaccattcatgggaatgccatgggctgggtccgccaggctccagggatggggccggagtgggtctgcggaattggcactgactttagtacacactatggaggcgccgtgaagggccgattcaccgtctccagagacaattcgaagaacacagtttacctgcaaatgaatagcctgacggccgaagacacggccatatattactgtgcgaaagacttgtatgacttctccgggatggacgtctggggcccagggaccacggtcatcgtctcctca

SEQ ID NO: 5794 - DNA, 289 bp, Homo sapiens
  source 1..289: mol_type = other DNA
tgtagcctccggattcatgtttactggcaatgccatgtgctgggtccgccaggctccagggaaggggctggagtgggtctcaggtattggtggcgatggtggcacacactacgcagactccgtgaagggccggttcaccgtctccagagacaattccaagaacacgctgtctctgcaaatgaacagcctgagagccgaggacacggccgtatattattgtgcgaaagatctctatgatttctccggtatggacgtctggggccaagggaccacggtcaccgtctcctca

SEQ ID NO: 5795 - DNA, 310 bp, Homo sapiens
  source 1..310: mol_type = other DNA
cgctgtgtatggtgggtccttcagggactactggtggagctggatccgccagtccccaggaaggggcctggagtgggttgcagagattaattctgatggcaagaccaacttcaatccgtccctcaagagtcgagtcgccatctcagtggacccgtccaaggtccagttctccctgaggctgggcactgtgaccgccgcggacacggccctatattattgtgcgagaggccttccctatggttcgggagttcatcacaatttttggacctttgactactggggccagggagacctggtcaccgtctcctca

SEQ ID NO: 5796 - DNA, 310 bp, Homo sapiens
  source 1..310: mol_type = other DNA
cgctgtgtatggtgggtctttcagtgactactggtggagctggatccgccagtccccaggcaggggcctggagtgggttgcagagattaattctgacggcaagaccaacttcaatccgtccctcaagagtcgagtcgccatctcagtggacccgtccaagctccagttctccctgaggctgggcattgtgaccgccgcggactcggccctatattactgtgcgagaggccttccgtatggttcgggagttcatcataatttttggacctttgactattggagccagggagacctggtcaccgtctcctca

SEQ ID NO: 5797 - DNA, 286 bp, Homo sapiens
  source 1..286: mol_type = other DNA
cactgtctctggtgactccatcactagttactactggagctggattcggcagcccccagggaagggactggagtggattgggtatatctataacagtgggagcaccaactacaacccctccctcaagagtcgagtcaccatatctgtagacacggccaagaaccagttttccctgaggctgacctctgtgaccgctgcggacacggccgtatattactgtgcgagaccctactacttttacgctatggacgtctggggccaagggaccacggtcaccgtctcctca

SEQ ID NO: 5798 - DNA, 286 bp, Homo sapiens
  source 1..286: mol_type = other DNA
cactgtctctggtggctccatcagtacttcctactggagctggatccgacagcccccagggaaggcactggagtggattggctatatccattacagtgggagcaccaactacaacccctccctcaagagtcgagtcaccatatcagtagacacgtccaagaaccacttgtccctgaggctgaggtctgtgaccgctgcggacacggccgtgtattactgtgcgagaccatactacttctacgctatggacgtctggggccaagggaccacggtcactgtctcctca

SEQ ID NO: 5799 - DNA, 286 bp, Homo sapiens
  source 1..286: mol_type = other DNA
cactgtctctggtgactccgtcagtcattcctactggagctgggtccggcagcccccggggaagggactggagtggattggatacatctatgatcgtgtgagccccaactacagtccgtccctcaagagtcgagtctccatttcagtcgacacgtccaagaaccagttctccctgaagttgacctctgtgaccgctgcggacacggccatttattactgtgcgagaccttactacttctacgctatggacgtctggggcccagggaccacggtcaccgtctcctct

SEQ ID NO: 5800 - DNA, 286 bp, Homo sapiens
  source 1..286: mol_type = other DNA
tgaggcctcaggattcggctttagtggaaatgccatgggatgggtccgccagagtccagggaagggtctggagtgggtcgcagccatcggtagtgacggaaacagactatatggagaccccgtgaggggccgattcaccgtctctagagacaactccaagaacgcgctgtttttggaaatgcacagcctgagagccgaggacacggccctgtattattgtgtcaaagatatactcggctgggcgtttgacttctggggccagggaaccctggtcaccgtctcctca

SEQ ID NO: 5801 - DNA, 286 bp, Homo sapiens
  source 1..286: mol_type = other DNA
tgcagcctctggattcagcttcagcggcaatgccatggcttgggtccgccaggctccagggcagggcctagagtgggtctcaggaagtggtagtgatggaaacacactctatgcaaactccgtgaagggccggttcaccatctccagagacaattcccagagcacgctatatctgcagatgaacagcctgagagccgaagacacggccgtgtattactgtgtgaaagatattctggggtgggcctttgacttctggggccagggaaccctggtcaccgtctcctca

SEQ ID NO: 5802 - DNA, 297 bp, Homo sapiens
  source 1..297: mol_type = other DNA
gcttctggaggcacctccagcacgcataccatcaactgggtgcggcaggcccctggacaagggcttgagtggatgggaaggatcatccctactcttggtataacaaactacgcacagaagttccagggcagagtcaccattaccgcggacaaatccacgaccacagcctacatggaactgaacagtctgagatctgaggacacggccatatatttctgtgcgagagtgcttgggggagttatcgctaggggtgggttcgacccctggggccagggaaccctggtcaccgtctcgtca

SEQ ID NO: 5803 - DNA, 297 bp, Homo sapiens
  source 1..297: mol_type = other DNA
gcttctggaggcacctccagcacgcataccatcaactgggtgcggcaggcccctggacaagggcttgagtggatgggaaggatcatccctactcttggtataacaaactacgcacagaagttccagggcagagtcaccattaccgcggacaaatccacgaccacagcctacatggaactgaacagtctgagatctgaggacatggccatatatttctgtgcgagagtgcttgggggagttatcgctaggggtgggttcgacccctggggccagggaaccctggtcaccgtctcgtca

SEQ ID NO: 5804 - DNA, 307 bp, Homo sapiens
  source 1..307: mol_type = other DNA
tgcagcctctggattcacctttagtagctatgccatgagctgggtccgccaggctccagggaaggggctggagtgggtctcagttattagtggtagtggtggtagcacatacaacgcagactccgtgaagggccggttcaccatctccagagacaattccaagagcacgctgtatctgcaaatggacagcctgagagtcgaggacacggccgtatattactgtgcgaaaagaagggtagtagtgacggaagactacagctacggtatggacgtctggggccaagggaccacggtcatcgtctcctca

SEQ ID NO: 5805 - DNA, 307 bp, Homo sapiens
  source 1..307: mol_type = other DNA
tgcagcctctggattcacctttagtagctatgccatgagctgggtccgccaggctccagggaaggggctggagtgggtctcagttattagtggtagtggtggtagtacatacaacgcagactccgtgaagggccggttcaccatctccagagacaattccaagagcacgctgtatctgcaaatggacagcctgagagtcgaggacacggccgtatattactgtgcgaaaagaagggtagtagtgacggaagactacagctacggtatggacgtctggggccaagggaccacggtcatcgtctcctca

SEQ ID NO: 5806 - DNA, 304 bp, Homo sapiens
  source 1..304: mol_type = other DNA
cactgtcgccagtggctctatcagcagcagttctcattactggggctggatccgccagcccccagggaaggggctggagtggattggtgtctctgctagtgggaccgcctacttcaacccgtccctcaagagtcgggcctccatttccgtagacacgtccaagaatcaactctccctgaatctgcactctgtgaccgccgctgacacggctgtgtatttctgtgcgagacgagtgtattactttgatagtagtggttatttttttgattattggggccagggaatcctcgtcatcgtctcctca

SEQ ID NO: 5807 - DNA, 307 bp, Homo sapiens
  source 1..307: mol_type = other DNA
cagcatttctgatggctccatcagaagcagtaatttctacgggggctggattcgccagcccccagggaaggggctggagctgattgggactcttcatcatagtgggaacacctactacaacccgtccctcaagagtcgagtccgcatgtccgtagacacgaccaagaatcacttttccctgagtgtgacttcagtgaccgccgcagacacggctgtttattactgcgcgagacgggtctattactttgatagcagtggttatttctttgactattggggccagggagccctggtcaccgtctcctca

SEQ ID NO: 5808 - DNA, 289 bp, Homo sapiens
  source 1..289: mol_type = other DNA
ttcagcgtctggattcaccttcagttcctatgccatgcactgggtccgccaggctccaggcaagggactggagtgggtgtcttatatatggtatgatgcaagtaacaagtactatgcagattccgtgaggggccgcttcaccatctccagagacaactccaagaacacggtgtatctggaaatgagcagcctgagagccgaggatacggctgtgtattactgtgcgagaggcggctctgaggggtggctcgacccctggggccagggaaccctggtcaccgtctcctca

SEQ ID NO: 5809 - DNA, 289 bp, Homo sapiens
  source 1..289: mol_type = other DNA
ttcagcgtctggattcaccttcagttcctatgccatgcactgggtccgccaggctccaggcaagggactggagtgggtgtcttatatatggtatgatgcaagtaacaagtactatgcagattccgtgaggggccgcttcaccatctccagagacaactccaagaacacggtgtatctggaaatgaccagcctgagagccgaggatacggctgtgtattactgtgcgagaggcggctctgaggggtggctcgacccctggggccagggaaccctggtcaccgtctcctca

SEQ ID NO: 5810 - DNA, 295 bp, Homo sapiens
  source 1..295: mol_type = other DNA
tgcaacctctggattcagctttaagacctatgccatgacctgggtccgccaggctccagggaagggcctggagtgggtctcagctattagtggtgatggcttttatatatatcatacagagtccgttaagggccgattctccacctccagagacaattccaggagcaccctgtatttgcaaatgaattacctgagagccgaggacacggccgtatattactgtgcgaaaaacttagtagatggccaagcgctgtatgaatactggggccagggaaccctggtcaccgtctcctca

SEQ ID NO: 5811 - DNA, 295 bp, Homo sapiens
  source 1..295: mol_type = other DNA
tgcagcctctggattcacctttagcaaatatgccatgacctgggtccgccaggctccagggaaggggctggagtgggtctcggctattagtggtgttggggctcacgtgtaccacgcagactccgtgaagggccgcttcaccatgtccagagacaataccaagaacacggtgcatctgcaaatggtcagcctgagagccgaggacacggccgtatattactgtgcaaagaatttagtagatggccaagccctatatgagtattggggccaggggaccctggtcaccgtctcctca

SEQ ID NO: 5812 - DNA, 295 bp, Homo sapiens
  source 1..295: mol_type = other DNA
tgcagcctctggattcacctttagcaaatatgccatgacctgggtccgccaggctccagggaaggggctggagtgggtctcggctattagtggtgttggggctcacgtgtaccacgcagactccgtgaagggctgcttcaccatgtccagagacaataccaagaacacggtgcatctgcaaatggtcagcctgagagccgaggacacggccgtatattactgtgcaaagaatttagtagatggccaagccctatatgagtattggggccaggggaccctggtcaccgtctcctca

SEQ ID NO: 5813 - DNA, 295 bp, Homo sapiens
  source 1..295: mol_type = other DNA
tgcaacctctggattcacctttaagacctatgccatgacctgggtccgccaggctccagggaaggggctggagtgggtctcagctattagtggtgatgccttttatatatattatacagagtccgttaagggccgattcaccacctccagagacaattccaggagcaccctgtatctgcaaatgaacaacctgagagccgaggacacggccgtatattactgtgcgaaaaacttagtagatggccaagcgctgtatgagtactggggccagggaaccctggtcaccgtctcctca

SEQ ID NO: 5814 - DNA, 295 bp, Homo sapiens
  source 1..295: mol_type = other DNA
tgcagcctctggattcacctttagcaagtatgccatgacctgggtccgccaggctccagggaaggggctggagtgggtctcggctattagtggtgttggggctcacgtgtaccacgcagactccgtgaagggccgcttcaccatgtccagagacaataccaagaacacggtgcatctgcaaatggtcagcctgagagccgaggacacggccgtatattactgtgcaaagaatttagtagatggccaagccctatatgagtattggggccaggggaccctggtcaccgtctcctca

SEQ ID NO: 5815 - DNA, 295 bp, Homo sapiens; identical to SEQ ID NO: 5811
  source 1..295: mol_type = other DNA

SEQ ID NO: 5816 - DNA, 280 bp, Homo sapiens
  source 1..280: mol_type = other DNA
cagtgtgactgatggctccatgactgaacactactggagttggcttcggcagtccccagggaaggacctggagtggattgggtttattcatcacagtgggagcaccgactacaacccctccctcaagagtcgagtgaccctgtcaatggaaacatcttggaagcggttttcccttatactgacgtccgtgagcgccgcggacacggccgtgtattactgtgcgagtggggcacactactttggctcctggggccagggagccctggtcaccgtctcctca

SEQ ID NO: 5817 - DNA, 280 bp, Homo sapiens
  source 1..280: mol_type = other DNA
cactgtctctggtgactccatgagtaatcactactggagctggatccggcagcccccagggaagggactggaatggattggatttatctatcaccgtgggagcaccagctacaacccctccctcaagagtcgagtcaccatatcagtagacacgtccaagaacaagttctccctgaagctaagctctgtgaccgctgcggacacggccatgtatttctgtgcgagtggggctcactactttgggtcctggggccagggaaccctggtcaccgtctcctca

SEQ ID NO: 5818 - DNA, 295 bp, Homo sapiens
  source 1..295: mol_type = other DNA
tgtagcctctggattcacctttagcagcaatgccatgagctgggtccgccaggctccagggaaggggctggagtgggtctcaactattagtggtactggtgggagcacatactacgcagactccgtgaagggccggttcaccatctccagagacaattccaggaacaccctgtatctgcaaatgaccagcctgagagccgaggacacggccatatattactgtgcgaaagtccgtatatcagcagctggctcgtttgactactggggccagggaaccctggtcaccgtctcctca

SEQ ID NO: 5819 - DNA, 295 bp, Homo sapiens
  source 1..295: mol_type = other DNA
tgcagcccctggattcagctttagcaacaatgccatgagctgggtccgccaggctccagggaagggactggagtgggtctcaggtattagtggcagtggtactttcacatactacgcagactccgtgaagggccggttcaccatctccagagacatttccaagaacacactgtatctgcaaatgaacagcctgagagccgaggacacggccgtatattactgtgcgaaagttcgtatatcagcagctggtagctttgactactggggccagggaaccctggtcaccgtctcctca

SEQ ID NO: 5820 - DNA, 286 bp, Homo sapiens
  source 1..286: mol_type = other DNA
tgcagcctctggattcagtttcagtaattactggatgcactggatccgccaaactccagggaaggggctgatgtgggtctcacgtctcaatgaagatgggagttggacaacctacgcggactccgtgaagggccgattcaccatctccagagacaacgccaagaacacactggatctgcaaatgaacagtctgagagccgaggacacgggtttgtattactgtgcaagagatgtcagtggccgggacgactactggggccagggagtcctggtcaccgtctcctca

SEQ ID NO: 5821 - DNA, 286 bp, Homo sapiens; identical to SEQ ID NO: 5820
  source 1..286: mol_type = other DNA

SEQ ID NO: 5822 - DNA, 286 bp, Homo sapiens
  source 1..286: mol_type = other DNA
tgaagcctctggattcatcttcagtagatattggatgcactgggtccgccaagctccagggaaggggctggtgtgggtctcacgtagtaatgaagttgggagtgtcacaaactacgcggactccgtgaagggccgattcaccatctccagagacaacaacaagaacatgctgtatttggaaatgagcagtctaagagccgaggacacggctgtatattactgtgcaagagatgtcagtggccgcgatgactactggggccagggaaccctggtcaccgtctcctca

SEQ ID NO: 5823 - DNA, 286 bp, Homo sapiens
  source 1..286: mol_type = other DNA
tgaagcctctggattcatcttcagtagatattggatgcactgggtccgccaagctccagggaaggggctggtgtgggtctcacgtagtaatgaagttgggagtgtcacaaactacgcggactccgtgaagggccgattcaccatctccagagacaacaacaagaacatgctgtatttggaaatgagcagtttaagagccgaggacacggctgtatattactgtgcaagagatgtcagtggccgcgatgactactggggccagggaaccctggtcaccgtctcctca

SEQ ID NO: 5824 - DNA, 286 bp, Homo sapiens
  source 1..286: mol_type = other DNA
tgcagcctctggattcagcttcagtaattactggatgcactgggtccgccaaactccagggaaggggctgatgtgggtctcacgtctcaatgaagatgggagttggacaacctacgcggactccgtgaagggccgattcaccatctccagagacaacgccaagaacacactggatctgcaaatgaacagtctgagagccgaggacacgggtttgtattactgtgcaagagatgtcagtggccgggacgactactggggccagggagtcctggtcaccgtctcctca

SEQ ID NO: 5825 - DNA, 286 bp, Homo sapiens
  source 1..286: mol_type = other DNA
tgcagcctctggattcagcttcagtaattactggatgcactgggtccgccaagctccagggaaggggctgatgtgggtctcacgtctcaatgaagatgggagtacgacaacctacgcggactccgtgaagggccgattcaccatctccagagacaacgccaagaacacactggatctgcaaatgaacagtctgagagccgaggacacgggtttgtattactgtgcaagagatgtcagtggccgggacgactactggggccagggagtcctggtcaccgtctcctca

SEQ ID NO: 5826 - DNA, 289 bp, Homo sapiens
  source 1..289: mol_type = other DNA
tgcagcctctggattcacctttaccacctatgccatgagctgggtccgccaggctccagggaaggggctggaatgggtctcagctattagtggtggtggtggtagcacatattacgcagactccgtgaagggccggttcaccatctccagagacaattccaggaatactctatatctgcaagtaaacagcctgagagccgacgacacggccgtatattactgtgcgaaagggagcctcggtcgttactttgactactggggccagggaaccctggtcaccgtctcctca

SEQ ID NO: 5827 - DNA, 289 bp, Homo sapiens
  source 1..289: mol_type = other DNA
tgcagcctctggattcatctttagcagctatgtcatgagatgggtccgccaggctccagggaaggggctggagtgggtctcagccattgatggaagtggtgataaaacatactacgcagactccgtgaagggccggttctccatctccagagacaattccaagaacactctgtatctgcaaatgaacagcctgagagccgaggacacggccgtatattactgtgcgaaagggagtctggggaggtactttgactactggggccagggaaccctggtcaccgtctcctca

SEQ ID NO: 5828 - DNA, 288 bp, Homo sapiens
  source 1..288: mol_type = other DNA
gcttctggttacacctttattagttatggtatcacttgggtgcgacaggcccctggacaagggcttgagtggatgggatggatcagctcttacgatggtaacacaaacgatgcacagaagtttcagggcagaatcaccatgaccacagacacagccacgaccacagcctacatggagctgaggagcctgagatctgacgacacggccgtctattactgtgcgagagaagggtatagtgcctacgattttgcctactggggccagggaaccctggtcaccgtctcctca

SEQ ID NO: 5829 - DNA, 288 bp, Homo sapiens
  source 1..288: mol_type = other DNA
gcctatggttacacgtttattaggtacggcatcagctgggtgcgacaggcccctggacaagggcttgagtggatgggatggatcagcggttacgatggtagcacaagctatgcccagaagttccagggcacagtcaccatgaccacagacacatccacgagcacagtctacatggaattgaggagcctgagatctgacgacacggccgtatattactgtgcgagagagggatatagtgcctatgattttgcctactggggccagggaaccctggtcaccgtctcctca

SEQ ID NO: 5830 - DNA, 273 bp, Homo sapiens
  source 1..273: mol_type = other DNA
gcttctggatacaccttcactaactatgctatgaattggatgcgacaggcccctggacaagggcttgagtggatgggacggatcaacaccaacactgggaacccaacgtatgcccagggcttcacaggacggtttgtcttctccttggacacctctgtcagcacggcatatctgcagatcagcagcctaaaggctgaggacactgccgtgtattactgtgcgagagggccggttgactactggggccagggaaccctggtcaccgtctcctca

SEQ ID NO: 5831 - DNA, 273 bp, Homo sapiens
  source 1..273: mol_type = other DNA
gcttctggatacaccttcactagctatgctatgaattgggtgcgacaggcccctggacaagggcttgagtggatggggtggatcaacaccaacactgggaacccaacgtttgcccagggcttcacaggacggcttgtcttctccttggacacctctgtcagcacggcatatctgcagatcagcagcctaaaggctgaggacactgccgtgtattactgtgcgagaggccccgttgactactggggccagggaaccctggtcaccgtctcctca

SEQ ID NO: 5832 - DNA, 298 bp, Homo sapiens
  source 1..298: mol_type = other DNA
cactgtctctggtggctccatcagtagttactactggagctggatccggcagcccccagggaagggactggagtggattgggtatatctattacagtgggagtaccaactataacccctccctcaagagtcgagtcaccatatcagtagacacgtccaagaaccagttctccctgaagctgagctctgtgaccgctgcggacacggccgtgtattactgtgcgagagctcgccttccttactactactactacggtatggacgtctggggccaagggaccacggtcaccgtctcctca

SEQ ID NO: 5833 - DNA, 298 bp, Homo sapiens
  source 1..298: mol_type = other DNA
ctctgtctctggtggctccattagtagttactactggagctggatccggcagcccccggggaagggactggagtggattggatatatctattatagtgggagcaccaactacaacccctccctcaagagtcgagtcaccatatcagtagacacgtccaagaaccagttctccctgaacctgacctctgtgaccgctgcggacacggccgtgtattactgtgcgagagcacgcctcccttattactactactacggtatggacgtctggggccaagggaccacggtcaccgtctcctca

SEQ ID NO: 5834 - DNA, 298 bp, Homo sapiens
  source 1..298: mol_type = other DNA
tgcggcctctggattcaccgtcagtaccaactacatgagctgggtccgccaggctccagggaaggggctggagtgggtctccgttattcatatcggtggtaacacatactacgcagactccgtgaagggcagattcagcgtctccagagacaattccaagaacacaatgtatcttcaaatgaacagcctgcgagccgaggacacggctgtgtattactgtgcgagagatggtggcagtggctactacgagggctactttgatctctggggccagggaaccctggtcaccgtctcctcg

SEQ ID NO: 5835 - DNA, 298 bp, Homo sapiens
  source 1..298: mol_type = other DNA
tgcggcctctggattcatcgtcagtagcaactacatgagctgggtccgccaggctccagggaaggggctggagtgggtctccgttattcatatcggtgataacacatactacgcagactccgtgaagggcagattcagcgtctccagagacaattccaagaacacaatgtatcttcaaatgaacagcctgcgagccgaggacacggctgtgtattactgtgcgagagatggtggcagtggctactacgagggctactttgatctctggggccagggaaccctggtcaccgtctcctcg

SEQ ID NO: 5836 - DNA, 298 bp, Homo sapiens
  source 1..298: mol_type = other DNA
tacagcatctggattcatctttaccaactatgccatgacctgggtccgccaggctccagggaaggggctggagtggatctcagttatttggggtggtagtggtaccacaaactccgcagactccgtgaagggccggttcaccctctccagagacacttccaagaacaccctgtatctccaaatgaacagcctgagagccgaggacacggccacatattactgtgcgaaacggtcgctctccggagctcctagtccccttgactgctggggccagggaaccctggtcagcgtctcctca

SEQ ID NO: 5837 - DNA, 298 bp, Homo sapiens
  source 1..298: mol_type = other DNA
tgcagcatctggcttcattataaccaactatgccatgacctgggtccgccaggctccagggaaggggctggagtggatctcagttacttggggctacagtggtagcacaaactccgcagactccgtgaagggccgcttcaccctctccagagacacttccaagaacaccctatatctacaaatgaacagcctgagagccgaggacacggccacatattactgtgcgaaacggtcgctctccggagctcctagtccccttgactgctggggccagggaaccctggtcaccgtctcctca

SEQ ID NO: 5838 - DNA, 298 bp, Homo sapiens
  source 1..298: mol_type = other DNA
tgcagcatctggattcatctttaccaactatgccatgacctgggtccgccaggctccagggaaggggctggagtggatctcagttatttggggttatagtggtaccacaaactccgcagactccgtgaagggccggttcaccctctccagagacacttccaagaacaccctgtatctccaaatgaacaacctgagagccgaggacacggccacatattactgtgcgaaacggtcgctctccggagctcctagtccccttgactgctggggccagggaaccgtggtcaccgtctcctca

SEQ ID NO: 5839 - DNA, 280 bp, Homo sapiens
  source 1..280: mol_type = other DNA
tgcagcctctggattcaccttcagtacctactggatgcactgggtccgccaagctccagggaaggggctggtgtgggtctcacgtattaaaagtgatgggagtagcacaaactacgcggactccgtgaagggccgattcaccatctccagagacaacgccaagaacacgctgtatctgcaaatgaacagtctgagagccgaggacacggctgtgtattactgtgcaagaggtgaggccttgggctgctggggccagggaaccctggtcaccgtctcctca

SEQ ID NO: 5840 - DNA, 280 bp, Homo sapiens
  source 1..280: mol_type = other DNA
tgcagcctctggattccccttcagtagccactggatgcactgggtccgccaagctccagggaaggggctggtgtgggtctcacgtatcagtagtgatgggagtaccgcaaactacgcggactctgtgaagggccgattcaccatctccagagacaacgccaagaacacgctgtatctgcaaatgaacagtctgagagtcgaggacacggctgtgtattactgtgcaagaggtgaagccttgggctgctggggccagggaaccctggtcaccgtctcctca

SEQ ID NO: 5841 - DNA, 280 bp, Homo sapiens
  source 1..280: mol_type = other DNA
tgcagcctctggattcaccttcaatagccactggatgcactgggtccgccaagctccagggaaggggctggtgtgggtctcacgtattaatagtgatgggagtagcacaagctacgcggactccgtgaagggccgattcaccatctccagagacaacgccaagaacacgctgtatctgcaaatgaacagtctgagagccgaggacacggctgtgtattactgtgcaagaggagaagccctcggctgctggggccagggaaccctggtcaccgtctcctca

SEQ ID NO: 5842 - DNA, 283 bp, Homo sapiens
  source 1..283: mol_type = other DNA
tgcagcctcgggattaactgtcagtgacacctggatggcctgggcccgccaggctccagggaaggggctggagtgggttggccatattacaagcaaaactgagggtgggacagcaaggtacgctgcgcccgtgaaggacagattcaccatctcaagagatgattccagaaatacgctgtatctgcaaatgaacagcctgaaacccgaggacacagccgtgtattattgtaccgggagttttttagcctactggggccagggaaccctggtcaccgtctcttca

SEQ ID NO: 5843 - DNA, 283 bp, Homo sapiens
  source 1..283: mol_type = other DNA
tgcagcctctggattcactttcagtaatgcctggatgagttgggcccgccaggctccagggaaggggctggagtgggttgcccttattcaaagtcagactgatggtgcgacagcagactacactgcacccgtgaaaggcagattcagcatctcaagagatgattcaaaaaacacactgtatctgcaaatgaacaacctacaaaccgaggacacagccgtctatttctgtacagggagtttcctggcctattggggccagggaaccctggtcaccgtctcctca

SEQ ID NO: 5844 - DNA, 283 bp, Homo sapiens
  source 1..283: mol_type = other DNA
tgtagtctctggattcactttcagtgacgcctggatgagttgggtccgccaggctccagggaaggggctggagtgggttggccatattcaaagccagactaatggtgcgactacactatatactgcacccgtgaagggccggtttaccatctcaagagatgattcaaaaaatacagtgtatctgcaaatgaacagtttgcaaatcgacgatacagccgtctattattgtacaggcagtttcctggcctattggggccagggaaccctggtcaccgtctcctca

SEQ ID NO: 5845 - DNA, 283 bp, Homo sapiens
  source 1..283: mol_type = other DNA
tgtagtctctggattcactttcagtaacgcctggatgagttggttccgccaggctccagggaaggggctggagtgggttggccatattcaaagccaaactaatggtgggactacagagtacactgcacccgtgaaaggcagattcaccatctcaagagatgattcaaaaaatacactgtatctgcaaatgaacagcctgagaaccgaggacacagccgtctactactgtacaggcagtttcctggcctattggggccagggaaccctggtcaccgtctcctca

SEQ ID NO: 5846 - DNA, 283 bp, Homo sapiens
  source 1..283: mol_type = other DNA
tggagcctctggattcactttcagtaatgcctggatgagctgggcccgccaggctccagggaagggactggagtgggtgggccatattcaaagtcagactgatggtgggacagcacagtacactgcacccgtgaaaggcagatttaccatctcaagagatgattcaaaaaacacactgtatctgcagatgaacaacctgcaaaccgaggacacagccgtctattactgtacagggagtttcttggcctattggggccagggaaccctggtcaccgtctcctca

SEQ ID NO: 5847 - DNA, 298 bp, Homo sapiens
  source 1..298: mol_type = other DNA
cactgtctctggtggctccatcagtggttactactggagctggatccggcagcccccagggaagggactggagtggattggatatatctattacagtgggagcaccaactacaacccctccctcacgagtcgggtcaccatatcagttgacacgtccaagaaccagttctccctgaaagtgagttctgtgaccgccgcagacacggccgtgtattactgtgcgagacatgggaagagtgggagctacaaccggtactttgactactggggccagggaaccctggtcaccgtctcctca

SEQ ID NO: 5848 - DNA, 298 bp, Homo sapiens
  source 1..298: mol_type = other DNA
cactgtctctggtggctccatcagtacttacttctggagctggatccggcagcccccagggaagggactggagtggattgggtatatctattacagtgggactaccaactacgacccctccctcaagagtcgagtcaccatctcagtagacacgtccaagaaccagttctccctgaggctgagctctgtgaccgccgcagacacggccgtgtattattgtgccagacacggaaaaagtgggagctacaaccgctactttgactactggggccagggaaccctggtcaccgtctcctca

SEQ ID NO: 5849 - DNA, 295 bp, Homo sapiens
  source 1..295: mol_type = other DNA
tgcagcctctggattcactttcagtaacgcctggatgagctgggtccgccaggctccagggaaggggctggagtgggttggccgtattaaaagcagaactgatggtgggacaacagactacgctgcacccgtgaaaggcagattcaccatctcaagagatgattcaaaaaacacgctgtatctgcaaatgaacagcctgaaaaccgaggacacagccctgtattattgtaccacagggttagtggctacgatttcggactactggggccagggaaccctggtcaccgtctcctca

SEQ ID NO: 5850 - DNA, 295 bp, Homo sapiens
  source 1..295: mol_type = other DNA
tgcagcctctggattcactttcaataacgcctggatgagctgggtccgccaggctccagggaaggggctggagtgggttggccgtattaaaagcaaaactgatggtgggacaacagactacgctgcacccgtgaaaggcagattcaccatctcaagagatgattcaaaaaacacgctgtatctgcaaatgaacagcctgcaaaccgaggacacagccgtgtattactgtaccacaggcctagtggctacgatctctgactactggggccagggaaccctggtcaccgtctcctca

SEQ ID NO: 5851 - DNA, 285 bp, Homo sapiens
  source 1..285: mol_type = other DNA
gcctctggttacacctttctcgactacggcattagctgggtgcgccaggcccctggacaagggcttgagtggatgggctggatcagtactaacagtcgaaacacgaaatctgctccgaagttccaggacagagtcaccatgaccaccgacacatccacgaccacagcctacatggagttgaggagtctaaactctgacgacacggccgtatactactgtgcgataagtggtgacggggcctactcccatgactggggccggggaaccctggtcatcgtctcctca

SEQ ID NO: 5852 - DNA, 285 bp, Homo sapiens
  source 1..285: mol_type = other DNA
gcttctggttacacctttaccgactttggtatcacctgggtgcgacaggcccctggacaagggcttgagtggatgggatggatcagcacttacaatggtgacacaaactatggactgaacctccagggcagagtcaccctgaccacagacacctccacgagcacagcctacatggagctgaggaacctgatgtctgacgacacggccgtgtattactgtgcgataagcggagatggtgcctacagtcatgactggggccagggaacccaggtcaccgtctcctca

SEQ ID NO: 5853 - DNA, 283 bp, Homo sapiens
  source 1..283: mol_type = other DNA
tgcagtctctggattcacctttagtagttattggatgagctgggtccgccaggctccagggcaggggctggagtgggtggccaacataaagcaagatggaaatgagaaatactatgtggactctgtgaagggccgattcaccatctccagagacaacgccaagaactcactgtatctgcaaatgaacagcctgagagccgaggacacggccgtctattactgtgcgagcggtagaactacgagtcattactggggccagggaaccctggtcaccgtctcctca

SEQ ID NO: 5854 - DNA, 283 bp, Homo sapiens
  source 1..283: mol_type = other DNA
tgcagcctctggattctcctttggcagttattggatgagttgggtccgccaggctccagggaaggggccggagtgggtggccaacatcaagcaagatggaagtgagaaaacctatgtgaactcggtgaagggccgattctccatctccagagacaacgccgagaactcactgtatctgcaaatgaacagcctgagagccgaggacacggctatctattactgtgcgagtgggaggactacgtcgcactactggggccagggaaccctggtcaccgtctcctca

SEQ ID NO: 5855 - DNA, 300 bp, Homo sapiens
  source 1..300: mol_type = other DNA
gcttctggatacatcttcattagatatgctatgcactgggtgcgccaggcccccggacaaaggcttgagtggatgggatggatcaaccctgtcaatggtgacgcactattttcacagaagttccagggcagagtcaccattaccagggacacatccgcgagcacagcctacatggagctgagcagcctgggatctgcagacacggctgtgtattactgtgcgagggctccgggtatagaagcagtggagggatactactttgactcctggggccagggaaccctggtcaccgtctcctca

SEQ ID NO: 5856 - DNA, 300 bp, Homo sapiens
  source 1..300: mol_type = other DNA
gcttctggatacaccttcactatctatgctatgcattgggtgcgccaggcccccggacaaaggcttgagtggatgggatggatcaacgctggcaatggtaacacaaaatattcacagaagttccaggacagagtcaccattaccagggacacatccgcgagcacagcctacatggagctgagcagcctgagatctgaagacacggctgtgtattactgtgcgcgggccccgggtatagaagcagtcgaaggatactactttgactcctggggccagggaaccctggtcaccgtctcctcc

SEQ ID NO: 5857 - DNA, 277 bp, Homo sapiens
  source 1..277: mol_type = other DNA
tgcagcctctggattcacctttagcaactatgccatgagctgggtccgccaggctccagggaaggggctggagtgggtctcagctatcagtgatagtggtggtaccacatactacgcagactccgtgaagggccggttcaccatctccagagacaattccaagaacacgctgtatctgcaaatgaacagcctgagagccgaggacacggccgtatattactgtgcgaaaagggaccaacacgactggggccagggaaccctggtcaccgtctcctca

SEQ ID NO: 5858 - DNA, 277 bp, Homo sapiens
  source 1..277: mol_type = other DNA
tgcagcctctggattcacctttggcacctatggcatgatctgggtccgccaggctccagggaaggggctggagtgggtctccggtattagtggtagtggtagtagcacatactacgcagactccgtgaagggccggttcaccatctccagagacaattcccagaacaccctctatctgcaaatgagcagcctgagagtcgaagacacggccgtatattactgtgcgaaacgggatcagcacgactggggccagggaaccctggtcaccatctcctca

SEQ ID NO: 5859 - DNA, 280 bp, Homo sapiens
  source 1..280: mol_type = other DNA
tgcagcctctggattcacctttagtaattattacatgggctgggtccgccaggctccagggaaggggctggagtggctggccaacacaaagcaagatggaagtgagaaatactatgtggactctgtgaagggccgattcaccatctccagagacaacgccaagaactcactgtatctgcaaatgaacagcctgagagccgaggacacggctgtgtattactgtgcgagagatagcagcagcccttactggggccagggaaccctggtcaccgtctcctca

SEQ ID NO: 5860 - DNA, 280 bp, Homo sapiens
  source 1..280: mol_type = other DNA
tgcagcctctggattcacctttagtaattattacatgggctgggtccgccaggctccagggaaggggctggagtggctggccaacataaagcaagatggaagtgagaaatactatgtggactctgtgaagggccgattcaccatctccagagacaacgccaagaactcactgtatctgcaaatgaacagcctgagagccgaggacacggctgtgtattactgtgcgagagatagcagcagcccttactggggccagggaaccctggtcaccgtctcctca

SEQ ID NO: 5861 - DNA, 280 bp, Homo sapiens
  source 1..280: mol_type = other DNA
tgcagcctctggattcacctttagtaattattacatgggctgggtccgccaggctccagggaaggggctggagtggctggccaacataaagcaagatggaagtgagaaatactatgtggactctgtgaagggccgattcaccatctccagagacaacgccaagaactcactgtatctgcaaatgaacagcctgagagtcgaggacacggctgtgtattactgtgcgagagatagcagcagcccttactggggccagggaaccctggtcaccgtctcctca

SEQ ID NO: 5862 - DNA, 280 bp, Homo sapiens
  source 1..280: mol_type = other DNA
tgcagcctctggattcacctttagtaattattacatgggctgggtccgccaggctccagggaaggggctggagtggctggccaacataaagcaagatggaagtgagaaatactatgtggactctgtgaagggccgactcaccatctccagagacaacgccaagaactcactgtatctgcaaatgaacagcctgagagccgaggacacggctgtgtattactgtgcgagagatagcagcagcccttactggggccagggaaccctggtcaccgtctcctca

SEQ ID NO: 5863 - DNA, 286 bp, Homo sapiens
  source 1..286: mol_type = other DNA
tgcagcctctggattcacttttagcagttatgtcatgatctgggtccgccaggctccagggaaggggctggagtgggtctcaggtatttttggcaatggtggttatgcagactacgcagactccgtgaagggccggttcaccatctccagagacaattccaagaatatgatgtatctggaaatgcacagcctgagagccgaggacacggccatatatttctgtgcgaatgatccgcgctttggtgggagctactggggccaagggaccacggtcaccgtctccgca

SEQ ID NO: 5864 - DNA, 286 bp, Homo sapiens
  source 1..286: mol_type = other DNA
tgcagcctctggattcacctttagcagctatatcatgacctgggtccgccaggctccagggaaggggctggagtgggtctcaggtattggtggtggtggtgggaccacatactacgcagactccgtgaagggccggttcaccatctccagagataattccaagaacacgctgtatctgcaaatgagcagcctgagagtcgaggacacggccgtttattactgtgcgaatgatcctcggtttggtgggagttactggggccagggaaccttggtcatcgtctcctca

SEQ ID NO: 5865 - DNA, 310 bp, Homo sapiens
  source 1..310: mol_type = other DNA
tgcagcctccggattcacctttagcaactttgccatgagctgggtccgccaggctccagggaaggggctggagtgggtctcagctattagtggaagtggtgatataacatattatgcagattatgtagactccgtgaagggccggttcaccatctccagagacaattccaagaacacggtgtatctgcaaatgaacagcctgagagtcgaggacacggccgtatatttttgtgcgaaagatcgagtggttcggggagttatgggggccttagggtactggggccagggaaccctggtcaccgtctcctca

SEQ ID NO: 5866 - DNA, 310 bp, Homo sapiens
  source 1..310: mol_type = other DNA
tgcagcctccggattcacctttagcaactttgccatgagctgggtccgccaggctccagggaaggggctggagtgggtctcagctattagtggaagtggtgatagtacatattatgcagataatgcagactccgtgaagggccaattcaccatctccagagacaattccaagaacacggtgtatctgcaaatgaacagcctgagagtcgaggacacggccgtatatttttgtgcgaaagatcgagtggttcggggagttatgggggccttagggtactggggccagggaaccctggtcaccgtctcctca

SEQ ID NO: 5867 - DNA, 301 bp, Homo sapiens
  source 1..301: mol_type = other DNA
tgcagcctctggattcacctttagcagctatgccatgagctgggtccgccaggctccggggaaggggctggagtgggtctcaactatgagtggtagtggtgatagtacatactacgcagactccgtgaagggccggttcaccatctccagagacagttccaagaacacactgtatttgcaaatgaacggcctgagagccgaggacacggccgtatattactgtgcgaaagatcgtgtggttcggggagttatgggggctttgggctactggggccagggaaccctggtcaccgtctcctca

SEQ ID NO: 5868 - DNA, 295 bp, Homo sapiens
  source 1..295: mol_type = other DNA
tgtagcctctggattcaccttcaacgaccacgccatgaactgggtccgccaggctccagggaaggggccggaatgggtctcaagtatcactggagatggttttgggtcatcctatggcgactccgtgaggggccggttcaccatctccagagacaattcgttgaccacgctgtatctgcacatgaggagcctgagagtcgacgacacggccgtctattattgtgcgaaagaccagaggggctacaatcgtcccgttgagtcctggggccagggaaccctggtcaccgtctcctca

SEQ ID NO: 5869 - DNA, 295 bp, Homo sapiens
  source 1..295: mol_type = other DNA
tgcagcctctggattcacctttaacacctgtgccatgacctgggtccgccaagctccagggaaggggctggagtgggtctcaactattggtggtggtggtaatagtaaatactacgcagactccgtgacgggccggttcaccgtctccagagacaattccatgaacacgctgtatttgcaaatgaacagcctgagagtcgaggacacggccatatattactgtgcgaaagatcaacgtggatataatagaccggttgagtcttggggccagggaaccctggtcaccgtctcctca

SEQ ID NO: 5870 - DNA, 298 bp, Homo sapiens
  source 1..298: mol_type = other DNA
tgtagcctctgcattcgcctttaacaattatgacatgacctgggtccgccaggctccagggaaggggctggagtgggtctcaactattaacattcttggtcatagtacattctacgcagactccgtgaagggccggttcaccatctccagagacaattccaagaacacggtgtatctgcaaatgaacagcctgagagccgaggacacggccgtttattactgtgcgaaaggaccgtttggttcgggaaataactttaatgacttctggggccggggaatcctggtcaccgtctcctca

SEQ ID NO: 5871 - DNA, 298 bp, Homo sapiens
  source 1..298: mol_type = other DNA
tgtagcctctgcattcgcctttaacaattatgacataacctgggtccgccaggctccagggaaggggctggagtgggtctcaactattaacattcttggtcataatacattctacgcagactccgtgaagggccggttcaccatctccagagacaattccaagagcacggtgtatctgcaaatgaacagcctgagagccgaggacacggccgtttattactgtgcgaaaggaccctttggttcgggaaataactttaatgacttctggggccggggaatcctggtcaccgtctcctca

SEQ ID NO: 5872 - DNA, 292 bp, Homo sapiens
  source 1..292: mol_type = other DNA
cactgtctctggtggctccatcagcagtagtagctactactggggctggatccgccagcccccagggaaggggctggagtggattgggagtatctattatagtgggagtacctactacaacccgtccctcaagagtcgagtcaccatatccgtagacacgtccaagaaccagttctccctgaagctgagctctgtgaccgccgcagacacggctgtgtattactgcgtggctgccccaaaccagtactactttgactactggggccagggaaccctggtcaccgtctcctca

SEQ ID NO: 5873 - DNA, 292 bp, Homo sapiens
  source 1..292: mol_type = other DNA
cactgtctctggtgactccatcagcagtagtccttactactggggctgcatccgccagcccccagggaaggggctggagtggattgggactatctcttatagtgggaacacctactacaacccgtccctcaagagtcgagtcaccatatcagtagacacgtccaaggaccagttctttctggacctgacctctgtgaccgccgcggacacggccgtgtattattgcgtagcagctcctaaccaatactacttcgactactggggccggggaaccctggtcaccgtctcctca

SEQ ID NO: 5874 - DNA, 298 bp, Homo sapiens
  source 1..298: mol_type = other DNA
tgcagcctctggattcacctttgatgattatgccatgcagtgggtccgtcaagctccggggaagggtctggagtgggtctctcttattagttgggatggtggtagcacctactatgcagactctgtgaagggtcgattcaccatctccagagacaacagcaagaactccctgtatctgcaaatgaacagtctgagagctgaggacaccgccttgtattactgtgcaaagccctcttgtagtagtaccagttgccccgcgggctactggggccagggaaccctggtcaccgtctcctca

SEQ ID NO: 5875 - DNA, 298 bp, Homo sapiens
  source 1..298: mol_type = other DNA
tgcagcctctggattcacctttgatgattatgccatgcagtgggtccgtcaagctccggggaagggtctggagtgggtctctcttattagttgggatggtggtagcacctactatgcagactctgtgaagggtcgattcaccatctccagagacaacagcaagaactccctgtatctgcaaatgaacagtctgagagctgaggacaccgccttgtattactgtgcaaagccctcttgtagcagtaccagctgccccgcgggctactggggccagggaaccctggtcaccgtctcctca

SEQ ID NO: 5876 - DNA, 289 bp, Homo sapiens
  source 1..289: mol_type = other DNA
cactgtctctggtggctccatcagttctttttactggagctggatccggcagcccccagggcagggactggagtggattggttatatttattccagcgggaacaccaagtacaattcctccctcaagagtcgagtcatcatatcagtagacacgtccaagaatcagttctccctgaggctgagctctgtgaccgccgcagacacggccgtctatttctgcgcgagacatggagggtggaggtcgccctttgactactggggccagggaatcctagtcaccgtctcctca

SEQ ID NO: 5877 - DNA, 289 bp, Homo sapiens
  source 1..289: mol_type = other DNA
cactgtctctggtggctccatcagttatttttactggagctggatccggcagcccccagggcagggactggagtggattggttatatttattccagcgggaacaccaagtacaattcctccctcaagagtcgagtcatcatatcagtagacacgtccaagaatcagttctccctgaggctgagctctgtgaccgccgcagacacggccgtctatttctgcgcgagacatggagggtggaggtcgccctttgactactggggccagggaatcctagtcaccgtctcctca

SEQ ID NO: 5878 - DNA, 289 bp, Homo sapiens
  source 1..289: mol_type = other DNA
cactgtctctggtggctccatcagtaattactactggagctggatccggcagcccccagggaagggactggagtggattgcatatatctattacagtgggagcaccaactacaacccctccctcaagagtcgagtcaccatatcagtagacacgtccaagaaccagttctccctgaagctgagctctgtgaccgccgcagacacggccgtctattactgtgcgagacatgggggttggaggagtccttttgactactggggccagggaaccctggtcaccgtctcctca

SEQ ID NO: 5879 - DNA, 307 bp, Homo sapiens
  source 1..307: mol_type = other DNA
tgcagcctctggattcagttttgatgactatggcatgcactgggtccgtcaagctccagggaagggtctggagtgggtctcccttattagtgggaatggtgcttccacatactatgcagtctctgtgaagggccgattcaccatctccagagacagcagcaaaaactccctgtctctgcaaatgaacagtctgagaacagaggacaccgccttgtattactgtgcaaaagatatcctacgtatatcagaacctggcacaagagggcttgactactggggccagggaaccctggtcaccgtctcctca

SEQ ID NO: 5880 - DNA, 307 bp, Homo sapiens
  source 1..307: mol_type = other DNA
tgcagcctctggattcacctttgataattatggcatgcactgggtccgtcaagctccagggaagggtctggagtgggtctctcttattagtggcaacggtattgccacatattatgcagagtctgtgaagggccgattcaccatctccagagacaacagcaaaaactccctgtatctgcaaatgaacagtctgagagctgaggacaccgccttgtattactgtgcaaaagatattctccgcatatcagagcctggtacaagggggcttgactactggggccagggaaccctggtcaccgtctcctca

SEQ ID NO: 5881 - DNA, 280 bp, Homo sapiens
  source 1..280: mol_type = other DNA
tgcagcctctggattcacctttagtacctattggatgaactgggtccgccaacctccagggaaggggctggagtgggtggccagtataaaacaagatggaagtgagaaatactatgtggactctgtgaagggccgattcaccatctccagagacaacgccaagaactcactgtatctgcaaatgaacagcctgagagccgaggacacggccgtgtattactgtgggagagttcgtgggatggacgtctggggccaagggaccacggtcaccgtctcctca

SEQ ID NO: 5882 - DNA, 280 bp, Homo sapiens
  source 1..280: mol_type = other DNA
tgtagcctctggattcacctttagaagttattggatgagctgggtccgccaggctccagggaaggggctggagtgggtggccagcataagtcaagatggaagtgacaaatactatttggactctgtgaagggccgattcaccatctccagagacaacgccaggaactcactgtatttgcaaatgaacggcctgagagtcgaggacacggctgtgtattactgtgggagagtcagaggtatggacgtctggggccaagggaccacggtcaccgtctcctca

SEQ ID NO: 5883 - DNA, 298 bp, Homo sapiens
  source 1..298: mol_type = other DNA
tacaacgtctggattcaccttcagtgcctttaccatgaactgggtccggcaggccccggggaagggcctggagtgggtctcatccattggtaagagtactagttacaaatattaccgcgagtcagtgaagggccgattcaccacctccagagacgacgccaggagttcattgtatctgcaaatgaacggcctgagagtggaggacacggctgtctattactgtgcgagagggaatgcttcggagagccattataactcgggctattggggccggggagtcctggtcaccgtctcctca

SEQ ID NO: 5884 - DNA, 298 bp, Homo sapiens
  source 1..298: mol_type = other DNA
tccaacctctggattcacttttactagatataccatgaactgggtccgccaggctccagggaaggggctggagtgggtctcatctattagtcctagtagtagtgacacttactacgcaggctcagtgaagggccgattcaccgtctccagagacaacgccaagagctcactgtttctgcaaatgaacagcctgagaaacgaggacacggctgtctactactgtgcgagggggaatgcatcggagagtcactataattctggctattggggccagggaaccctggtcaccgtctcctca

SEQ ID NO: 5885 - DNA, 283 bp, Homo sapiens
  source 1..283: mol_type = other DNA
tgcagcctctggattcacctttagtggctattggatgacctgggtccgccaggctccagggaaggggctggagtgggtgggcaacataaagggagatggaagtgagaaaaactatgtggcctctgcgaagggccgattcaccatctccagagacaacgccaagaactttgtgtatctgcaaatgaacagcctgagagccgaggacacggccgtgtattactgtgcgagaggaagcggctacaattactactggggccagggagccctggtcaccgtctcctca

SEQ ID NO: 5886 - DNA, 283 bp, Homo sapiens
  source 1..283: mol_type = other DNA
tgcagcctctggattcacctttaggacctattggatgaactgggtccgccaggctcccgggaaggggctggagtgggtggccaacataaagccagatggaagtgagaaatactatgtggactctgtgaagggccgattcaccatctccagagacaacgccaagaactcactatatctgcaaatgaacagcctgagagccgaagacacggctgtgtatttctgtgcgagagggagtggatacaattactactggggccagggaaccctggtcaccgtctcctca

SEQ ID NO: 5887 - DNA, 283 bp, Homo sapiens
  source 1..283: mol_type = other DNA
tgcagcctctggattcacctttgaagccattgggttgacctgggtccgccaggctccagggaaggggctgcagtgggtggccaacataaaccaagatggaagtgagaaaaactatgtggactctgtgaagggccgattcaccatctccagagacaacgccaagaactcactgtatctgcaaatgaacagcctgagagccgaggacacggccgtgtattactgtgcgagaacggcacgtggtttagactactggggccagggagccctggtcaccgtctcctca

SEQ ID NO: 5888 - DNA, 283 bp, Homo sapiens
  source 1..283: mol_type = other DNA
tgcagcctccggattcaactttagaagctattggatgagctgggtccgccaggctccagggaaggggctggagtgggtggccaccataaagcaagatggaagtgagaaatactatgtggactctgtgaagggccgattcaccgtctccagagacaacgccaagaattcactgtatatgcaaatgaacagcctgagagccgaggacacggctgtgtactactgtgcgagaacagctaggggcctggactattggggccagggaaccctggtcaccgtctcctca

SEQ ID NO: 5889 - DNA, 304 bp, Homo sapiens
  source 1..304: mol_type = other DNA
cgctgtctatggtgggtccttcagtggttactactggagctggatccgccagcccccagggaaggggctggagtggattggggaaatcaatcatggtggaggcaccaactacaacccgtccctgaagagtcgagtcaccatttcagtcgacacgtccaagaaccagttctccctgaagttgagctctgtgaccgccgcggacacggctgtgtattactgtgcgagaggctttacggtgactacgggctactactactacggtatggacgtctggggccaagggaccacggtcaccgtctcctca

SEQ ID NO: 5890 - DNA, 304 bp, Homo sapiens
  source 1..304: mol_type = other DNA
cgctgtctatggtgggtccttcagtggttattattggagctggatccgccagcccccagggaaggggctggagtggataggggaaatcaatcatagtggaagcaccaactacaacccgtccctcaagagtcgagtcaccatatcagtagacacgtccaagaaccagttctccctgaaactgagctctgtgaccgccgcggacacggctgtgtattactgtgcgagaggctttacggtgactacgggctactattattatggtatggacgtctggggccaagggaccacggtcaccgtctcctca

SEQ ID NO: 5891 - DNA, 289 bp, Homo sapiens
  source 1..289: mol_type = other DNA
tgcagcctctggattcaattttagcagctatggtatgagctgggtccgccaggctccagggaaggggctggagtgggtctcaggtattagtgttagtgggaccaccacatactacgcagactccgtgaagggccggttcaccatctccagagacaactccaagaacacgctctatctgcaaatgaacagcctgagagccgacgacacggccgtatattactgtgcgaaagtctgggtcaaactgggaggtgactactggggccagggaaccctggtcaccgtctcctca

SEQ ID NO: 5892 - DNA, 289 bp, Homo sapiens
  source 1..289: mol_type = other DNA
tggagcctctgggttcaactttagcaattatggcatgagctgggtccgccaggctccaggaaaggggctggagtgggtctcaggtattagtggtagtggtgatacgacgtactacgcagactccgtgaggggccggttcaccatctccagagacaattccaagaacacggtgtatctgcagatgaacagcctgagaggcggggacacggccgtctattactgtgcgaaagtttgggttaaattagggggggactactggggccaggggaccctggtcaccgtctcctca

SEQ ID NO: 5893 - DNA, 289 bp, Homo sapiens
  source 1..289: mol_type = other DNA
tgcagcctctggattcacattcagcaactatggcatgagctgggtccgccaggctccagggaaggggctggagtgggtctcaggtattagtggtagtggtaatactacgtcttacgctgactccgtgaagggccggttcaccatttccagagacaattccaacaacacggtgtatctgcaaatgaacagcctgagacgcgaggacacggccgtgtattactgtgcgaaagtttgggttaaattagggggggactactggggccagggagccctggtcaccgtctcctca

SEQ ID NO: 5894 - DNA, 292 bp, Homo sapiens
  source 1..292: mol_type = other DNA
tgcagcctctggattcaccttcactagctatagcatgaactgggtccgccaggctccagggaaggggctggagtgggtctcatccattagtagtactagtagttacatatactacgcagactcagtgaagggccgattcaccatctccagagacaacgccgagaactcattgtatctgcaaatgaacagcctgagagccgaggacacggctgtgtattactgtgcgagagatttctacggtgactacagttttgactactggggccagggaaccctggtcaccgtctcctca

SEQ ID NO: 5895 - DNA, 292 bp, Homo sapiens
  source 1..292: mol_type = other DNA
tgcagcctctggattcaccttcagtagctatagcatgaactgggtccgccaggctccagggaaggggctggagtgggtctcatccattagtggtaatagtggtcacatatactacgcagactcagtgaagggccgattcaccatctccagagacaacgccaagaactcactgtctctgcaaatgaacagcctgagagccgaggacacggctgtgtattactgtgcgagagatttctacggtgactactcctttgactactggggccagggaaccctggtcaccgtctcctca

SEQ ID NO: 5896 - DNA, 286 bp, Homo sapiens
  source 1..286: mol_type = other DNA
tgcggcctctggattcacttttagtcaacattggacgagctgggtccgccaggttccagggaaggggctggagtggctgaccaccataaacgattatggaagtgagaaatattatgtggactctgtgaagggtcgattcaccgtctccagagacaacgccaagaattcactgtatctgcaaatgaacagcctgagagtcgaggacacggccgtatattattgtgcgaggttcggtcactatgttatggacgtctggggccaagggaccacggtcaccgtctcctca

SEQ ID NO: 5897 - DNA, 286 bp, Homo sapiens
  source 1..286: mol_type = other DNA
tgcagcctctggattcacctttagtagccattggatgacctgggtccgccaggctccagggaaggggctggagtgggtggccaacataaaggaagatggaagtgcgaaatactatgtggactctgtgaggggccgattcaccatctccagagacaacgccaaaaactcactgtatctgcaaatgaacagcctgagagtcgaggacacggctgtatattactgtgcgagatttgggcattacgttatggacgtctggggccaagggaccacggtcaccgtctcctca

SEQ ID NO: 5898 - DNA, 286 bp, Homo sapiens
  source 1..286: mol_type = other DNA
tgcggcctctggattcacctttagtcaacactggatgagctgggtccgccaggctccagggaaggggctggagtggctgatcaccacaaacgattatggaagtgagaagtattatgtggactctgtgaagggtcgattcaccgtctccagagacaacgccaagaattcactgtatctgcaaatgaacagcctgagagtcgaggacacggccgtatattattgtgcgaggttcggtcactatgttatggacgtctggggccaagggaccatggtcaccgtctcctca

SEQ ID NO: 5899 - DNA, 295 bp, Homo sapiens
  source 1..295: mol_type = other DNA
tgcagcgtctggtttcaccttcaggagctatgccatgcactgggtccgccaggctccaggcaaggggctggagtgggtggcttttctatggtatgatggaagtaacaaacattatgcagactccgtgaagggccgattcaccatctccagagacaattccaagaacactgtttctctgcaaatggacagcctgagagccgaggacacggctgtctattactgtgtgggagatcctccgaatagtgggtatgcttttgatatctggggccaagggacaatggtcaccgtctcttca

SEQ ID NO: 5900 - DNA, 295 bp, Homo sapiens
  source 1..295: mol_type = other DNA
tgcagcgtctggtttcaccttcaggagctatgccatgcactgggtccgccaggctccaggcaaggggctggagtgggtggtttttctatggtatgatggaagtaacaaacattatgcagactccgtgaagggccgattcaccatctccagagacaattccaagaacactgtttctctgcaaatggacagcctgagagccgaggacacggctgtctattactgtgtgggagatcctccgaatagtgggtatgcttttgatatctggggccaagggacaatggtcaccgtctcttca

SEQ ID NO: 5901 - DNA, 295 bp, Homo sapiens
  source 1..295: mol_type = other DNA
tgtagcgtctgcattcagtttcagaacctatggcatgcactgggtccgccaggctccaggcaaggggctggagtgggtggcgtttatctggtctgatgaaattcatagatattatgcagactccgtgaaggaccgattcaccgtctccagagacaattccaagcacacactggatttgcaaatgaacagcctgagagtcgaggactccggtatttattactgtgtgggagatcccccgaatagtggttacgcttttgatatctggggccaagggacaacggtcaccgtctcttca

SEQ ID NO: 5902 - DNA, 295 bp, Homo sapiens
  source 1..295: mol_type = other DNA
tgcggcgtctggattcaacttcagaacctatggcatgcactgggtccgccaggctccaggcaaggggctggagtgggtggcattcatatggtttgatggagacaataaattctatgcagactccgtgaagggccgattcaccatctccagagacaattcgaagaactccctctatctacaaatgaacagcctgagagtcgaggacacggctgtatattactgtgtgggagaccccccaaatagcggctatgcttttgatatctggggccaagggacaatggtcaccgtctcctca

SEQ ID NO: 5903 - DNA, 276 bp, Homo sapiens
  source 1..276: mol_type = other DNA
gcttctggatacaccttcactacctatgttatccactggatgcgccaggcccccggacaaagccttgagtggatgggatgggtcagcactggcagtggcaacacaagatattcgcaaaagttccagggcagagtcacctttaccagggacacatccgcgaccacagcctacatggaactgagcagcctaagatctgaagacacggctgtatattactgtgcgagagggaacaaccttgactactggggccagggaaccctggtcaccgtctcgtca

SEQ ID NO: 5904 - DNA, 276 bp, Homo sapiens; identical to SEQ ID NO: 5903
  source 1..276: mol_type = other DNA

SEQ ID NO: 5905 - DNA, 276 bp, Homo sapiens
  source 1..276: mol_type = other DNA
gcttctggatacaccttcactaactatggtttacattggatgcgccaggcccccggacaagggcttgagtggatgggatggatcaacactgacagtggtaacacaaaatattcacagaagttccagggcagagtcgccattaccagggacacatccgcgagcacagcctacatggagctgagcagcctgagatctgaagacacggctgtgtattactgtgcgagaggcaacaatttggactactggggccagggatccctggtcaccgtctcctca

SEQ ID NO: 5906 - DNA, 277 bp, Homo sapiens
  source 1..277: mol_type = other DNA
tgtagcctctggattcacccttagcaaccatgccatgagttggttccgccagaccccagggaaggggctggagtgggtctcagttattggtgcgagtggtgctatcgtatattacgaagactccgtgaagggccggttcaccacctccagagacacttccaagaacatggcgtttttgcaaatgaatggcctgagagacgacgacacggccgtgtattactgtgcgaaagggcgcctcgactcgtggggccagggaaccctggtcatcgtctcgtca

SEQ ID NO: 5907 - DNA, 277 bp, Homo sapiens
  source 1..277: mol_type = other DNA
tgcagcctctggattcacctttagcagttatgccatgggctgggtccgccaggctccagggaaggggctggagtgggtgtcagttatcaataacggtggaagtagcacatactatgcagactccgtgaagggccggttcaccatctccagagataattccaagaacacgctatttctgcaaatgaacagcctgagagccgaggacacggccgtatattactgtgcgaaagggagactcgactcccggggccagggaaccctggtcaccgtctcctca

SEQ ID NO: 5908 - DNA, 283 bp, Homo sapiens
  source 1..283: mol_type = other DNA
cactgtctctggtgactccgtcagcagtgctagttactactggagctggatccggcagtccccagggaagggactggagtggattggatatgtctataatagaggcaacaccaactacaatccctccctcaagagtcgagtcgccatatcagtagacacgtccaagaaccagttctccctgaagctgaggtctgtgaccactgcggacacggccgtttattactgtgcgagaggtctgcaggttgactactggggcctggggaccctggtcaccgtctcctca

SEQ ID NO: 5909 - DNA, 283 bp, Homo sapiens
  source 1..283: mol_type = other DNA
ctctgtctctggtgactccgtcagcagtgctagttactactggagctggatccggcagcccccagggaagggactggagtggattggctatatctataacagtgggaccaccaactacaacccctccctcaagagtcgagtcaccatatcagtagacgcgtccaagaaccagttctccctgaaggtgagctctgtgaccgctgcggacacggccgtatattactgtgcgagaggtttgcaggttgactactggggccagggaaccctggtcaccgtctcctca

SEQ ID NO: 5910 - DNA, 283 bp, Homo sapiens
  source 1..283: mol_type = other DNA
cactgtctctagtgactccctcagcagtgctagttactactggagctggatccggcagcccccagggaagggactggagttcattgggtatacttattacggtgggagccccaactacaacccctccctcaagagtcgagtcaccatatcggtagacacgtccaagaaccagttctccctgaaactgagctctgtgaccgctgcggacacggccgtctattactgtgcgagaggtttgcaggttgactactggggccggggaaccctggtcaccgtctcctca

SEQ ID NO: 5911 - DNA, 283 bp, Homo sapiens
  source 1..283: mol_type = other DNA
cactgtctctggtgactccgtcagcagtgctagttactactggagctggatccggcagtccccagggaaggcactggagtggattggatatgtctataatagagacaccaccaactacaacccctccctcaagagtcgagtcgccatatcagtagacacgtccaagaaccagttctccctgaagctgaggtctgtgaccactgcggacacggccgtttattactgtgcgagaggtctgcaggttgactactggggccaggggaccctggtcaccgtctcctca

SEQ ID NO: 5912 - DNA, 283 bp, Homo sapiens
  source 1..283: mol_type = other DNA
cactgtctctggtgactccctcagcagtgctagttactactggagctggatccggcagcccccagggaagggactggagtggattgggtatacttattacggtgggagccccaactacaacccctccctcaagagtcgagtcaccatatcggtagacacgtccaagaaccagttctccctgaaactgagctctgtgaccgctgcggacacggccgtctattactgtgcgagaggtttgcaggttgactactggggccggggaaccctggtcaccgtctcctca

SEQ ID NO: 5913 - DNA, 283 bp, Homo sapiens
  source 1..283: mol_type = other DNA
cactgtctctggtgactctgtcagcagtcctagttactactggagctggatccggcagcccccagggaaggcactggagttcattggatatatctataacagtgggagtaccaactacaatccctccctcaagagtcgagtcaccatctcagtagacacgtccaagaaccagttctccctgaagctgagctctgtgaccgctgtagacacggccgtgtattactgtgcgagaggtctgcaggtcgactactggggccagggagccctggtcaccgtctcctca

SEQ ID NO: 5914 - DNA, 283 bp, Homo sapiens
  source 1..283: mol_type = other DNA
cactgtctctggtgactccgtcagcagtaatagttactactggagctggatccggcagcccccagggaagggactggagtggattgggtatatctattccattgtaaacagcaactacaatccctccctcaagagtcgagtcaccatatcagtagacacgtccaagaaccagttctccctgaaactgagctctgtgaccgctgcggacacggccgtttattactgtgcgagaggtctgcaggttgactactggggccagggaaccctggtcaccgtctcctca

SEQ ID NO: 5915 - DNA, 283 bp, Homo sapiens; identical to SEQ ID NO: 5909
  source 1..283: mol_type = other DNA

SEQ ID NO: 5916 - DNA, 283 bp, Homo sapiens
  source 1..283: mol_type = other DNA
cactgtctctggtgactccctcagcagtcctagttactactggagctggatccggcagcccccagggaagggactggagtggattgggtttactcattacggtgggagccccaactacaacccctccctcaagagtcgagtcaccatatcggtagacacgtccaagaaccagttctccctgaaactgagctctgtgaccgctgcggacacggccgtctattactgtgcgagaggtttgcaggttgactactggggccggggaaccctggtcaccgtctcctca

SEQ ID NO: 5917 - DNA, 292 bp, Homo sapiens
  source 1..292: mol_type = other DNA
tgtaggctctggattcacctttgacaatcatgccatgcactgggtccggcaagtcccagggaagggcctggagtgggtctcaggtataagttggaatagtggtactttaggctacgcggactctgtgaagggccgattcaccatctccagagacaacgccaagaactccctgtatttgcgaatgaacagtctgagacctgaggacacggccttgtattactgtgcaaaagatagtggtgggccctattactttgactcctggggccagggagccctggtcaccgtctcctca

SEQ ID NO: 5918 - DNA, 292 bp, Homo sapiens
  source 1..292: mol_type = other DNA
tgtaggctctggattcacttttgacaatcatgccatgcactgggtccggcaagtcccagggaagggcctggagtgggtctcaggtataagttggaatagtggtagtttaggctacgcggactctgtgaagggccgattcaccatctccagagacaacgccaagaactccctgtttttgcgaatgaacagtctgaaacctgaggacacggccttgtattactgtgcaaaagatagtggtgggccctactactttgactcctggggccagggagccctggtcaccgtctcctca

SEQ ID NO: 5919 - DNA, 292 bp, Homo sapiens
  source 1..292: mol_type = other DNA
tgtagcctctggattcacctttgacaatcatgccatgcactgggtccggcaagtcccagggaagggcctggagtgggtctcaggtattagttggaatagtggtactttaggctatgcggactctgtggagggccgattcaccatctccagagacaacgccaagaactccctgtttttgcgaatgaacagtctgagacctgaggacacggccttgtattactgtgcaaaagatagtggtgggccctactactttgactcctggggccagggagccctggtcaccgtctcctca

SEQ ID NO: 5920 - DNA, 292 bp, Homo sapiens
  source 1..292: mol_type = other DNA
tgtagcctctggattcacctttgacaatcatgccatgcactgggtccggcaagtcccagggaagggcctggagtgggtctcaggtattagttggaatagtggtactttaggctatgcggactctgtggagggccgattcaccatctccagagacaacgccaagaactccctgtatttgcgaatgaacagtctgagacctgaggacacggccttgtattactgtgcaaaagatagtggtgggccctactactttgactcctggggccagggagccctggtcaccgtctcctca

SEQ ID NO: 5921 - DNA, 292 bp, Homo sapiens; identical to SEQ ID NO: 5917
  source 1..292: mol_type = other DNA

SEQ ID NO: 5922 - DNA, 292 bp, Homo sapiens
  source 1..292: mol_type = other DNA
tgtaggctctggattcacctttgacaatcatgccatgcactgggtccggcaagtcccagggaagggcctggagtgggtctcaggtataagttggaatagtggtactttaggctacgcggactctgtgaagggccgattcaccatctccagagacaacgccaagaactccctgtatttgcgaatgaacagtctgagacctgaggacacggccttgtattactgtgcaaaagatagtggtgggccctactactttgactcctggggccagggagccctggtcaccgtctcctca

SEQ ID NO: 5923 - DNA, 292 bp, Homo sapiens; identical to SEQ ID NO: 5918
  source 1..292: mol_type = other DNA

SEQ ID NO: 5924 - DNA, 292 bp, Homo sapiens
  source 1..292: mol_type = other DNA
tgtaggctctggattcacttttgacaatcatgccatgcactgggtccggcaagtcccagggaagggcctggagtgggtctcaggtataagttggaatagtggtattttaggctacgcggactctgtgaagggccgattcaccatctccagagacaacgccaagaactccctgtttttgcgaatgaacagtctgagacctgaggacacggccttgtattactgtgcaaaagatagtggtgggccctactactttgactcctggggccagggagccctggtcaccgtctcctca

SEQ ID NO: 5925 - DNA, 292 bp, Homo sapiens; identical to SEQ ID NO: 5919
  source 1..292: mol_type = other DNA

SEQ ID NO: 5926 - DNA, 292 bp, Homo sapiens
  source 1..292: mol_type = other DNA
tgcagcctctggattcacctttaatgatcatgccatgcactgggtccggcaagctccagggaagggcctggagtgggtctcaggtattagttggaatagtggtaccctaggctatgcggactttgtgaagggccgattcaccatctccagagacaacgccaagaactccctatatctgcaaatgaacagtctgagacctgaggacacggccttttattactgtgcaaaagattcagggggaccttactactttgactcctggggccagggatccctggtcaccgtctcctca

SEQ ID NO: 5927 - DNA, 280 bp, Homo sapiens
  source 1..280: mol_type = other DNA
tgcagcctctggattcatttttagcaactatgccatgaactgggtccgccaggctccagggaaggggctggagtgggtctcaagtattaatgatggtggtgttggcacatactacgcagactccgtgaagggccggttcaccatctccagagacaattccaagaacacactgtatctgcaaatgagcagcctgagagccgacgacacggccgtatattactgtgcggccgggcggggctttgactactggggccagggaaccctggtcaccgtctcctca

SEQ ID NO: 5928 - DNA, 280 bp, Homo sapiens
  source 1..280: mol_type = other DNA
tgcagcctctggattcacctttagcaactatgccatgaactgggtccgccaggctccagggaaggggctggagtgggtctcatctattaatgatggtggtgttggcacatactacgcagactccgtgaagggccggttcaccatctccagagacaattccaagaacacactgtatctgcaaatgaacagcctgagagccgacgacacggccgtatattactgtgcggccgggcggggctttgactactggggccagggaaccctggtcaccgtctcctca

SEQ ID NO: 5929 - DNA, 280 bp, Homo sapiens
  source 1..280: mol_type = other DNA
tgcagcctctggattcatttttggcaactatgccatgaactgggtccgccaggctccagggaaggggctggagtgggtctcaagtattaatgatggtggtgttggcacatactacgcagactccgtgaagggccggttcaccatctccagagacaattccaagaacacactgtatctgcaaatgagcagcctgagagccgacgacacggccgtatattactgtgcggccgggcggggctttgactactggggccagggaaccctggtcaccgtctcctca

SEQ ID NO: 5930 - DNA, 280 bp, Homo sapiens
  source 1..280: mol_type = other DNA
tgcagcctctggattcacctttagcaactatgccatgaactgggtccgccaggctccagggaaggggctggagtgggtctcaagtattaatgatggtggtgttggcacatactacgcagactccgtgaagggccggttcaccatctccagagacaattccaagaacacactgtatctgcaaatgagcagcctgagagccgacgacacggccgtatattactgtgcggccgggcggggttttgactactggggccagggaaccctggtcaccgtctcctca

SEQ ID NO: 5931 - DNA, 280 bp, Homo sapiens
  source 1..280: mol_type = other DNA
tgcagcctctggattcacctttagcagctatgccatgaactgggtccgccaggctccagggaaggggctggagtgggtctcagctattaatggtggtggtggtagcccatactacgcagactccgtgaagggccggttcaccacctccagagacaattccaagaacacgctgtatctgcaaatgaacagcctgagagccgaggacacggccgtatattactgtgcggcagggcgcggttttgactactggggccagggagccctggtcaccgtctcctca

SEQ ID NO: 5932 - DNA, 298 bp, Homo sapiens
  source 1..298: mol_type = other DNA
tgcagccactggattcacgtttagttcctatgtcatgagctgggtccgccaggctccagggaagggcctggagtggttctcagctatcactggtggtagtgatgacacatactacgcagactacgtgaagggccgcttcaccatctccagagacaattccaggaacattctgtttctgcaaatgaacagcctgagagccgaggacacggccatatattactgtgcgaagggttcgggggattcaaggccctactactttgactactggggccagggaaccctggtcaccgtctcctca

SEQ ID NO: 5933 - DNA, 298 bp, Homo sapiens
  source 1..298: mol_type = other DNA
tgtagcctctggattcacctttagttattatgtcatgagttgggtccgccaggccccagggaaggggctggaatggatctcagcaattactggtgatggtggcagcacatactacgcagactccgtgaagggccgattcagcgtctccagagacagttccaagaacacgctgtttctgcagatgaacaacctgggaaccgaggacacggccatttattactgtgcgaaaggtagtggtgatagccgcccctactactttgactactggggccagggaaccctggtcaccgtctcctca

SEQ ID NO: 5934 - DNA, 298 bp, Homo sapiens
  source 1..298: mol_type = other DNA
tgtagcctctggattcacctttagtcattatgtcatgagttgggtccgccaggccccagggaaggggctggaatggatctcagcaattagtggtaatggtggctacacatactacgcagactccgtgaagggccgattcagcgtctccagagacagttccaagaacacgctgtttctgcagatgaacaacctgggaaccgaggacacggccatttattactgtgcgaaaggtagtggtgatagccgcccctactactttgactactggggccagggaaccctggtcaccgtctcctca

SEQ ID NO: 5935 - DNA, 271 bp, Homo sapiens
  source 1..271: mol_type = other DNA
cgctgtctatggtgggtccttcagttcttactactggagctggatccgccagcccccaggaaagggactggagtggattggggaaatcaattatagtggaagcaccaactacaacccgtccctcaagactcgactcaccatctcagtagacacgtccaagaaacaattgtccctgaggctggtttctgtgaccgccgcagacacggctgtatattactgtgccagagtccaagattactggggccagggaaccctggtcagcgtctcctca

SEQ ID NO: 5936 - DNA, 271 bp, Homo sapiens; identical to SEQ ID NO: 5935
  source 1..271: mol_type = other DNA

SEQ ID NO: 5937 - DNA, 271 bp, Homo sapiens
  source 1..271: mol_type = other DNA
cgctgtctatggtgggtccttcagtaattactactggagctggatccgccagcccccagggaagggtctggagtggattggggaaatcacacatagtggaagcaccatctacaccccgtccctcaagagtcgagtcaccatgtccctagacacgtccaacaaccagttctccctgaagctgacctctgtgaccgccgcggacacggctgtgtattactgtgcgagagtccaagattactggggccggggaaccctggtcaccgtctcctca

SEQ ID NO: 5938 - DNA, 271 bp, Homo sapiens
  source 1..271: mol_type = other DNA
cgctgtctatggtgggtccttcagttcgtactactggagctggatccgccagcccccaggaaagggactggagtggattggggaaatcaattatagtggaagcaccaactacaacccgtccctcaagactcgactcaccatctcagtagacacgtccaagaaacaattgtccctgaggctggtttctgtgaccgccgcagacacggctgtatattactgtgccagagtccaagattactggggccagggaaccctggtcagcgtctcctca

SEQ ID NO: 5939 - DNA, 289 bp, Homo sapiens
  source 1..289: mol_type = other DNA
tgtagcctctgggttcagcgtcagcaacaactacatgaactgggtccgccaggctccagggaaggggctggagtgggtctcagttctctacaacggagacagcagagactacgcagactccgtgaagggccgattcaccatctccggacacgattccaagaatattgtgtatttgcacatgaacagcctgagagatgacgacacggccgtgtattattgtgcgaggggggcatacagtggctacgactttgactactggggccagggatccctggtcaccgtctcctca

SEQ ID NO: 5940 - DNA, 289 bp, Homo sapiens
  source 1..289: mol_type = other DNA
tgcagcctctgggttcaccgtcagtagcaactacatgagctgggtccgccaggctccagggaaggggctggagtgggtctcagttatttatagcggtggtagtacagagcacgcagactccgtgaagggccgattcaccatctccagagacaattccaagaacacgctatatcttcaaataaagagtctgagagccgaggacacggccgtgtactactgtgcgagaggggcatatagtggctacgattttgactactggggccagggaaccctggtcaccgtctcctca

SEQ ID NO: 5941 - DNA, 289 bp, Homo sapiens
  source 1..289: mol_type = other DNA
tgcagcctctgagttcaccgtcagtagcaactacatgagctgggtccgccaggctccagggaaggggctggagtgggtctcagttatttatagcggtggtagcacaaactacgcagactccgtgaagggccgattcaccatctccagagacaattccaagaacacgctgtatcttcaaatgaacagcctgagagccgaggacacggccgtgtattactgtgcgagaggggcatatagtggctacgattttgactactggggccagggaatcctggtcactgtctcctca

SEQ ID NO: 5942 - DNA, 289 bp, Homo sapiens
  source 1..289: mol_type = other DNA
tgcagcctctgggttcaccgtcagtagcaactacatgagctgggtccgccaggctccagggaaggggctggagtgggtctcagttatttatagcggtggtagcacaaactacgcagactccgtgaagggccgagtcaccatctccagagacaattccaagaacacgctgtatcttcaaatgaacagcctgagagccgaggacacggccgtgtattactgtgcgagaggggcatatagtggctacgattttgactactggggccagggaaccctggtcaccgtctcctca

SEQ ID NO: 5943 - DNA, 271 bp, Homo sapiens
  source 1..271: mol_type = other DNA
cactgtctctggtggctccatcagtagttactactggacctggatccggcagcccccagggaagggactggagtggattgggtacatctattacagtgggagcaccaactacaacccctccctcaagagtcgagtcaccatgtcagtagacacgtccaagaaccagttctccctgaggctgagctctgtgaccgctgcggacacggccgtgtattactgtgcgggagagctggacgtctggggccaagggaccacggtcaccgtctcctca

SEQ ID NO: 5944 - DNA, 271 bp, Homo sapiens
  source 1..271: mol_type = other DNA
cacagtctctggtggctccatcaatacttactactggacctggatccggcagcccccagggaagggactggagtggattgggtacatctattacacggggagcaccaactacaacccctccctcaagagtcgagtcaccatatcagtagacacgtccaagaatgagttctccctgaaactgacctctgtgaccgctgcggacacggccgtgtattactgtgcgggagagctggacgtctggggccaagggaccacggtcaccgtctcctca

SEQ ID NO: 5945 - DNA, 271 bp, Homo sapiens
  source 1..271: mol_type = other DNA
cacagtctctggtggctccatcaatacttactactggacctggatccggcagcccccagggaagggactggagtggattgggtacatctattacacggggagcaccaactacaatccctccctcaagagtcgagtcaccatgtcagtagacacgtccaagaaccagttctccctggagctgagctctgtgaccgctgcggacacggccgtgtattactgtgcgggagagctggacgtctggggccaagggaccacggtcaccgtctcctca

SEQ ID NO: 5946 - DNA, 271 bp, Homo sapiens
  source 1..271: mol_type = other DNA
cacagtctctgggggctccatcaggacttactactggacctggatccggcagcccccagggaagggactggagtggattgggtacatctattacacggggagcaccaactacaacccctccctcaagagtcgactcaccatgtcagtagacatgtcgaagaaccagttctccctgaaactgagctctgtgaccgctgcggacacggccgtgtattactgtgcgggagagctggacgtctggggccaagggaccacggtcaccgtctcctca

SEQ ID NO: 5947 - DNA, 271 bp, Homo sapiens; identical to SEQ ID NO: 5943
  source 1..271: mol_type = other DNA

SEQ ID NO: 5948 - DNA, 271 bp, Homo sapiens
  source 1..271: mol_type = other DNA
cacagtctctggtggctccatcagtacttactactggacctggatccggcagcccccagggaagggactggagtggattgggtacatctattacacggggagcaccagctacaacccctccctcaagagtcgagtcaccatatcagtagacacgtccaagaaccagttctccctgaagctgagctctgtgaccgctgcggacacggccgtgtattactgtgcgggagagctggacgtctggggccaagggaccacggtcaccgtctcctca

SEQ ID NO: 5949 - DNA, 271 bp, Homo sapiens; identical to SEQ ID NO: 5948
  source 1..271: mol_type = other DNA

SEQ ID NO: 5950 - DNA, 271 bp, Homo sapiens
  source 1..271: mol_type = other DNA
cgctgtctctggtggctccatcagtagttactactggagctggatccggcagcccccagggaagggactggagtggattgggtatatctattacagtgggagcaccaactacaacccctccctcaagagtcgagtcaccatatcagtagacacgtccaagaaccagttctccctgaagctgaggtctgtgaccgctgcggacacggccgtttattactgtgcgggcgaactcgacgtctggggcaaagggaccacggtcaccgtctcctca

SEQ ID NO: 5951 - DNA, 271 bp, Homo sapiens; identical to SEQ ID NO: 5944
  source 1..271: mol_type = other DNA

SEQ ID NO: 5952 - DNA, 271 bp, Homo sapiens; identical to SEQ ID NO: 5945
  source 1..271: mol_type = other DNA

SEQ ID NO: 5953 - DNA, 280 bp, Homo sapiens
  source 1..280: mol_type = other DNA
cactgtctctggtggctccagcagtagtcataagtggagctggatccggcagtccccagggaagggactggagtggattggatatataactttttctgggagcaccaactacaacccctccctcacgagtcgagtctccatatcagtagacacgtccaagagccaggtcaccctgcacctgagttctgtgaccgctgcggacacggccgtctactactgtgcgagagaatggtccgcctttgacttttggggccagggcacccaggtcaccgtctcctca

SEQ ID NO: 5954 - DNA, 280 bp, Homo sapiens
  source 1..280: mol_type = other DNA
cactgtctctggtggctccagcagtagtcataagtggaactggatccggcagtccccagggaagggactggagtggattgggttgatatatttctctgggaccaccatctacaacccatccctcaggagtcgagtctccatgtcagtagacacgtccaagagccaggtcaccctgaacctgagttctgtgaccgctgcggacacggccgtgtactactgtgcaagagagtggtccgcctttgacttttggggccagggaacccaggtcaccgtctcctca

SEQ ID NO: 5955 - DNA, 280 bp, Homo sapiens
  source 1..280: mol_type = other DNA
tactgtctctggtggctccctcagtcattacaagtggagctggatccggcagcccccggggaagggactggagtggattggatatgtctacgctagtggggatatcaattacaacccttccctcaagggtcgagccaccatattagtagacacgtccaagaaccagttctccctgagggtactctctgtgactgcagcggacacggccgtctattattgtgcgagagaatggagcgcgtttgacttctggggccagggaaccctggtcaccgtctcctca

SEQ ID NO: 5956 - DNA, 280 bp, Homo sapiens
  source 1..280: mol_type = other DNA
cactgtctctggtggctccctcaatatttataagtggagctggatccggcagcccccagggaagggactggaatggcttgcatatgtctattccagtgggagcgccgcttacaacccctccctcgagaatcgactaagcgtgttggtagacacgtcgaagaaccagttctccctgaaactgaactctgtgaccgctgcggacacggccgtttattactgtgcgagagagtggagtgcttttgacttctggggccagggaatccttgtcaccgtctcctcc

SEQ ID NO: 5957 - DNA, 307 bp, Homo sapiens
  source 1..307: mol_type = other DNA
tgcagcctctggattcaccttcagtagctatagcatgaactgggtccgccaggctccagggaaggggctggagtgggtctcatccattagtagtagtagtagttacatatactacgcagactcaatgaagggccgattcaccatctccagagacaacgccaagaactcactgtttctgcaaatgaacagcctgagagccgaggacacggctgtgtattactgtgcgagagcttacgatttttggagtggttaccccgggggggcttttgatatctggggccaagggacaatggtcaccgtctcttca

SEQ ID NO: 5958 - DNA, 307 bp, Homo sapiens
  source 1..307: mol_type = other DNA
tgcagcctctggattcaccctcagtagctatagcatgaactgggtccgccaggctccagggaaggggctggagtgggtctcatccattagtagcaatagtaattacatatactacgcagactcagtgaagggccgattcaccatctccagagacaacgccaagaactcactgtatctgcaaatgaacagcctgagagccgaggacacggctgtgtattactgtgcgagagcttacgatttttggagtggttaccccgggggcgcttttgatatctggggccaagggacaatggtcaccgtctcttca

SEQ ID NO: 5959 - DNA, 298 bp, Homo sapiens
  source 1..298: mol_type = other DNA
tgcagcctctggattcaccttcagtagttatagtatgaactgggtccgccaggctccagggcaggggctggagtgggtctcagccatcagtagtagtagtagttacaaagactatgcagactctgtgaagggccgattcaccatgtccagagacaacgccaagaactcactgtatctgcaaatgagcagcctgagagccgaggacacggctgtctattactgtgcgagattctactatggttcggggagtccgcagacggactactggggccagggaaccctggtcaccgtctcctca

SEQ ID NO: 5960 - DNA, 298 bp, Homo sapiens
  source 1..298: mol_type = other DNA
tgcagcctctggattcaccttcagtagttatagcatgaactgggtccgccaggctccagggaaggggctggagtgggtctcagccatcagtagtagtagtagttacaaagactacgcagactcagtgaagggccgattcaccatgtccagagacaacgccaagaactcactgtatctgcaaatgagcggcctgagagccgaggacacggctgtctattactgtgcgagattctactatggttcggggagtccgcagacggactactggggccagggaaccctggtcaccgtctcctca

SEQ ID NO: 5961 - DNA, 298 bp, Homo sapiens; identical to SEQ ID NO: 5959
  source 1..298: mol_type = other DNA

SEQ ID NO: 5962 - DNA, 298 bp, Homo sapiens
  source 1..298: mol_type = other DNA
tgaagcctctggattcaccttcagtagctacagcatgaactgggtccgacaggctccagggaagggactggagtggatctcatccattactagcagtagtggttacagatcatacgcagactcactgaagggccgattcaccatctccagagacaacgccaagaactcactatatctgcacatgaacagcctgagagccgaggacacggctgtctattactgtgcgaggttttactatggttcggggagtccgcagactgactactggggcccgggaattatggtcaccgtctcctca

SEQ ID NO: 5963 - DNA, 298 bp, Homo sapiens
  source 1..298: mol_type = other DNA
tgaagcctctggattcaccttcagtagctacagcatgaactgggtccgacaggctccagggaagggactggagtgggtctcacacattactagcagtagtggctacagatcatatgcagactcattgaagggccgattcaccatctccagagacaacgccaagaactcactatatctgcacatgaacaacctgagagccgaggacacggctgtctattactgtgcgaggttttactatggttcggggagtccgcagactgactactggggccagggaattatggtcaccgtctcctca

SEQ ID NO: 5964 - DNA, 295 bp, Homo sapiens
  source 1..295: mol_type = other DNA
cactgtctctggtgactccatcagcagtggtgcttactactggggctggatccgccagtccccagggaagggcctggagtggattgggagtatctattttactgggagcacccactacaacccgtccctcgagagtcgactcaccatatccgtggacacgtcccagacccacttctccctgaaggtgagctctgtgaccgccgcagacacggctttgtattactgtgcgagacacggcggatcagcagctggctttgactactggggccagggaaccctggtcaccgtctcctca

SEQ ID NO: 5965 - DNA, 295 bp, Homo sapiens
  source 1..295: mol_type = other DNA
cagtgtctctgatgcctccatcagcagcagtaattactactggggctggatccgccagccccccgggaaggggctggagtggattgggagtatccattatactgggaccacctactacaacccgtccctcaagagtcgagtcaccatatccgcagacacgtccaagaaccaattctccctgaggctgagctctgtgaccgccgcagacaggtctctatattactgtgcgagacacggcggatcagcagctggttttgactactggggccagggaaccctggtcaccgtctcctca

SEQ ID NO: 5966 - DNA, 286 bp, Homo sapiens
  source 1..286: mol_type = other DNA
tgcagcctctggattcaccctcagaacgcactggatgcactgggtccgccaagctccagggaaggggctggtgtgggtctcagttattaacactgatgggagtagcacaaactacgcggactccgtgaagggccgattcaccatctccagagacaacgccaagaacacgctgtatctgcaaatgaacagtctgagagccgaggacacggctgtgtattactgtgcaagaggacgagctggttcccttgactactggggccagggaaccctggtcaccgtctcctca

SEQ ID NO: 5967 - DNA, 286 bp, Homo sapiens
  source 1..286: mol_type = other DNA
tgcagccgctggattcaccctcagtaactactggatgtactgggtccgccaaggtccagggaaggggctggtgtgggtctcacgtattaataatgatgggagtggcacaggccacgcggactccgtaaagggccgattcaccatctccagagacaacgccaagaacacgctgtatctgcaaatgaacagtctgagagacgaagacacggctgtgtattattgtgcaagggggagggctggttcccttgactactggggccagggaaccctggtcaccgtctcctca

SEQ ID NO: 5968 - DNA, 292 bp, Homo sapiens
  source 1..292: mol_type = other DNA
tgcaggctctgggttcacctttagtgactcggctatgcactgggtccgccaggcttccgggaaagggctggagtgggttggccgtattagaagcagagctaatggttacgcgacagactacgctgcgtcggtgaagggcaggttcaccatctccagagatgagtcaaagaacacggcgtatctgcaaatgaacagcctgaaaaccgaggacacggccgtgtattactgtaccagaccctactatgataatactggctattggggccagggaatcctggtcaccgtctcctca

SEQ ID NO: 5969 - DNA, 292 bp, Homo sapiens
  source 1..292: mol_type = other DNA
tgcaggctctgggttcaccttcagtgactctgctatgcactgggtccgccaggcttccgggaaggggctggagtgggttggccgtattagaagcagagctaatcgttacgcgacagactacgctgcgtcggtgatgggcaggttcaccatctctagagatgattcaaagaacacggcgtatctgcaaatgaacagcctgaaaaccgaagacacggccgtgtattattgtactagaccctactatgataatactggctattggggccagggaaccctggtcaccgtctcctcg

SEQ ID NO: 5970 - DNA, 292 bp, Homo sapiens
  source 1..292: mol_type = other DNA
tgcaggctctgggttcaccttcagtgactctgctatgcactgggtccgccaggcttccgggaaagggctggagtgggttggccgtattagaagcagacctaatggttacgcgacagactacgctgcgtcggtgaagggcaggttcaccatctccagagatgattcaaagaacacggcgtatctgcaaatgaacagcctgaaaagcgaggacacggccgtgtattattgtactagaccctactatgataatactggctattggggccagggaaccctggtcaccgtctcctca

SEQ ID NO: 5971 - DNA, 292 bp, Homo sapiens
  source 1..292: mol_type = other DNA
tgcaggctctgggttcacgttcagtgactctgctatacactgggtccgccaggcttccgggaaagggctggagtgggtcggccgtattagaagcagaccgaatgggtacgcgacagactacgctgcgtcggtgaagggcaggttcaccatctccagagatgattcaaagaacacggcgtatctgcaaatgaacagcctgaaaaccgaggacacggccgtatattattgtactagaccctactatgataatactggctattggggccagggaaccctggtcaccgtctcctca

SEQ ID NO: 5972 - DNA, 292 bp, Homo sapiens
  source 1..292: mol_type = other DNA
tgcaggctctgggttcaccttcagtgactctgctatgcactgggtccgccaggcttccgggaaggggctggagtgggttggccgtattagaagcagagctaatcgttacgcgacagactacgctgcgtcggtgatgggcaggttcaccatctctagagatgattcaaagaacacggcgtatctgcaaatgaacagcctgaaaaccgaagacacggccgtgtattattgtactagaccctactatgataatactggctattggggccagggaaccctggtcaccgtctcctca

SEQ ID NO: 5973 - DNA, 292 bp, Homo sapiens
  source 1..292: mol_type = other DNA
tgcaggctctgggttcaccttcagtgactctgctatccactgggtccgccaggcttccgggaaagggctggagtgggttggccgtattagaagcagagctaatggttacgcgacagactacgctgcgtcggtgatgggcaggttcagcatctctagagatgattcaaagaatacggcgtatctgcaaatgaacagcctgaaaaccgaagacacggccgtgtattattgtactagaccctactatgataatactggctattggggccagggaaccctggtcaccgtctcctca

SEQ ID NO: 5974 - DNA, 292 bp, Homo sapiens
  source 1..292: mol_type = other DNA
tgcggcctctggattcaccttcagtggctctgctatacactgggtccgccaggcttccgggaaagggctggagtgggttggccgtattagaagcaaacctaacaattacgcgacagactatgctgcgtcggtgacaggcaggttcaccatctccagagatgattcaaagaacacggcgtatctgcaaatgaacagcctgagaaccgaggacacggccatgtattactgtactagaccctactatgataatactggttactggggccagggaaccctggtcaccgtctcctca

SEQ ID NO: 5975 - DNA, 292 bp, Homo sapiens
  source 1..292: mol_type = other DNA
tgcggcctctggattcaccttcagtggctctgctatacactgggtccgccaggcttccgggaaagggctggagtgggttggccgtattagaagcaaacctaacaattacgcgacagactatgctgcgtcggtgacaggcaggttcaccatctccagagatgattcaaagaacacggcgtatctgcaaatgaacagcctgaaaaccgaggacacggccatgtattactgtactagaccctactatgataatactggttactggggccagggaaccctggtcaccgtctcctca

SEQ ID NO: 5976 - DNA, 292 bp, Homo sapiens; identical to SEQ ID NO: 5973
  source 1..292: mol_type = other DNA

SEQ ID NO: 5977 - DNA, 292 bp, Homo sapiens
  source 1..292: mol_type = other DNA
tgcaggctctgggttcaccttcagcgactcggctatgcactgggtccgccaggcttccgggaaagggctggagtgggttggccgtattagaagcagagctaatggttacgcgacagactacgctgcgtcggtgaagggcaggttcaccatctccagagataattcaaagaacacggcgtatctgcaaatgaacagcctgaaaaccgaggacacggccgtgtattactgtactagaccctactatgataacactggctattggggccagggaatcctggtcaccgtctcctca

SEQ ID NO: 5978 - DNA, 292 bp, Homo sapiens
  source 1..292: mol_type = other DNA
tgcaggctctgggttcacgttcagtgactccgctatgcactgggtccgccaggcttccgggaaagggctggagtgggttggccgtattagaagcagaccgaatgggtacgcgacagactacgctgcgtcggtgaggggcaggttcaccatctccagagatgattcaaagaacacggcgtatctgcaaatgaacagcctgaaaaccgaggacacggccgtatattattgtactagaccctactatgataatactggctattggggccagggaaccctggtcaccgtctcctca

SEQ ID NO: 5979 - DNA, 298 bp, Homo sapiens
  source 1..298: mol_type = other DNA
tgcagcctctggattcaccttcagaagctataccatgaactgggtccgccaggctccagggaaggggctggagtgggtctcatccataagtagtactgggacgttcacatactacgcagactcagtgcagggccgattcaccatctacagagacaacgccaagaattcactatatctgcaaatgaacaccctgagaaccgacgacacggctatttattactgtgcgagaggtggatgggaattacgctcggattacttccaacactggggccagggcaccctggtcaccgtctcctca

SEQ ID NO: 5980 - DNA, 298 bp, Homo sapiens
  source 1..298: mol_type = other DNA
tgcagcctctggattcaccttcagaagctataccatgaactgggtccgccaggctccagggaaggggctggagtgggtctcatccataagtagtactgggacgttcacatactacgcagactcagtgcagggccgattcaccatctacagagacaacgccaagaattcactatatctgcaaatgagcagcctgagaaccgacgacacggctatttattactgtgcgagaggtggatgggagttacgctcggattacttccaacactggggccagggcaccctggtcaccgtctcctca

SEQ ID NO: 5981 - DNA, 298 bp, Homo sapiens
  source 1..298: mol_type = other DNA
tgcagcctctggattcaccttcagtatctataacatgaactgggtccgccaggctccagggaaggggctggagtgggtctcaagtatcagtagtagtggaagttacaaaggatatgcagactcagtgaagggccgattcaccatctccagagacaacgccaagaattcactgtatctgcagatgaacagcctgagagccgacgacacggctgtgtattactgtgcgaggggcggatgggagttacggtctgattacttccagcactggggccagggcaccctggtcaccgtctcctca

SEQ ID NO: 5982 - DNA, 292 bp, Homo sapiens
  source 1..292: mol_type = other DNA
cactgtctctggtggctccatcagtagtcactactggagctggctccgtcagcccccagggaagggactggagtggattggctatatctattacagtgcgaacaccaactacaacccctccctcaagagtcgagtcaccatatcagtagacacgtccaagaaccagttctccctgaaactgagctctgtgaccgctgcggacacggccgtgtattactgtgcgagagggaccagtgactactactacggtatggacgtctggggccaagggaccacggtcaccgtctcctca

SEQ ID NO: 5983 - DNA, 292 bp, Homo sapiens
  source 1..292: mol_type = other DNA
cactgtctctggtggctccatcagtagtaactactggagctggatccggcagcccccggggaagggactggagtggattgggtatatctattacagtgggaacaccaactacaacccctccctcaagagtcgagtcaccatatcagtagacacgtccaagaaccagttctccctgaagctgagctctgtgaccgctgcggacacggccgtgtattactgtgcgagggggacctctgactactactacggtatggacgtctggggccaagggaccacggtcaccgtctcctca

SEQ ID NO: 5984 - DNA, 292 bp, Homo sapiens
  source 1..292: mol_type = other DNA
cactgtctctggtggctccatcagtagtcactactggagctggatccggcagcccccagggaagggactggagtggattgggtatatctattacagtgggaacaccaactacaacccctccctcaagagtcgagtcaccatatcagtagacacgtccaagaaccagttctccctgaaactgagctctgtgaccgctgcggacacggccgtgtattactgtgcgagagggactagtgactactactacggtatggacgtctggggccaagggaccacggtcaccgtctcctca

SEQ ID NO: 5985 - DNA, 301 bp, Homo sapiens
  source 1..301: mol_type = other DNA
tgcagcgtctggattcaccttcagtagctatggcatgcactgggtccgccaggctccaggcaaggggctgaaatgggtggcagttatctggtatgatggaagtaataaatactatgcagactccgtgaagggccgattcaccatctccagagacaattccaagaacacgctgtatctgcaaatgaacagcctgagagccgaggacacggctgtgtattactgtgcgagagatctatatagtggctacgattccaactggttcgacccctggggccagggaaccctggtcaccgtctcctca

SEQ ID NO: 5986 - DNA, 301 bp, Homo sapiens
  source 1..301: mol_type = other DNA
tgcagcgtctggattcatcttcagtagctatggcatgcactgggtccgccaggctccaggcaaggggctggagtgggtggcagttatatggtatgatggaagtaataaatattatgcagactccgtgaagggccgattcaccatctccagagacaattccaagaacacgctgtatctgcaaatgaacagcctgagagccgaggacacggctgtgtattactgtgcgagagatctttatagtggctacgattctaactggttcgacccctggggccagggaaccctggtcaccgtctcctca

SEQ ID NO: 5987 - DNA, 301 bp, Homo sapiens
  source 1..301: mol_type = other DNA
tgcagcctctggattcaccttcagtagctatggcatgcactgggtccgccaggctccaggcaaggggctggagtgggtggcagttatatggtatgatggaagtaataaatactatgcagactccgcgaagggccgattcaccatctccagagacaattccaagaacacgctgtttctgcaaatgaacagcctgagagccgaggacacggctgtgtattactgtgcgagagacctttatagtggctacgattccaactggttcgacccctggggccagggaaccctggtcaccgtctcctca

SEQ ID NO: 5988 - DNA, 298 bp, Homo sapiens
  source 1..298: mol_type = other DNA
tgcagcctctggattcgccttcagtagttatggcatacactgggtccgccaggctccaggcaaggggctggaatgggtggcactgatttcatatgatggaggtaataaatactacacagactccgtgaagggccgattcaccatctccagagacaattccaagaacacgctgtatctgcaaatgaacagcctgagagttgacgacacggctatttattactgtgcgagaggttcaattaatatgcttcggggagttcctgactactggggccagggaaccctggtcaccgtctcctca

SEQ ID NO: 5989 - DNA, 298 bp, Homo sapiens
  source 1..298: mol_type = other DNA
tgcagcctctggattcaccttcagtagttatgctatgcactgggtccgccaggctccaggcaaggggctggagtgggtggcaattatatcatatgatggaagtaataaatactatgcagactccgtgaagggccgattcaccatctccagagacaaatcgaagaacacggtgtatgtgcaaatgaacagcctgagagctgaggacacggctgtgtattactgtgcgcgtgggagtattaatatgcttcggggagtcccggactactggggccagggcaccctggtcaccgtctcctca

SEQ ID NO: 5990 - DNA, 298 bp, Homo sapiens
  source 1..298: mol_type = other DNA
tgcagcctctggattcgccttcagtagttatggcatacactgggtccgccaggctccaggcaaggggctggaatgggtggcactgatatcatatgatggaagtaataagtactacgcagactccgtgaggggccgattcaccatctccagagacaattccaagaacacgctgtctcttcaaatggacagcctgagagttgacgacacggctatttattactgtgcgagaggttcaattaatatgcttcggggagttcctgactactggggccagggaaccctggtcaccgtctcctca

SEQ ID NO: 5991 - DNA, 307 bp, Homo sapiens
  source 1..307: mol_type = other DNA
tgaagtctctggattcacgtttagtaggcattggatgagttgggtccgccaggctccagggaaggggctggagtgggtggccaccattaaccaagatggaagtgagacacactatgtggacgctgtgaagggccgattcaccatctcccgagacaacaccaagaactcactgaatctgcagatgaacatcctgagagccgaggactcggctgtctattactgtgcgaggaaactctattactatgatactagtgatagtgggtggttcgacccctggggccacggaaccctggtcaacgtctcctca

SEQ ID NO: 5992 - DNA, 307 bp, Homo sapiens
  source 1..307: mol_type = other DNA
tgaagtctctggattcacgtttagtaggcattggatgagttgggtccgccaggctccagggaaggggctggagtgggtggccaccattaaccaagatggaagtgagacacactatgtggacgctgtgaagggccgattcaccatctcccgagacaacaccaagaattcactgaatctgcagatgaacatcctgagagccgaggactcggctgtctattactgtgcgaggaaactctattactatgatactagtgatagtgggtggttcgacccctggggccacggaaccctggtcaacgtctcctca

SEQ ID NO: 5993 - DNA, 307 bp, Homo sapiens
  source 1..307: mol_type = other DNA
tgcagcctctggattcacctttgatagctattggatgagctgggtccgccaggctccagggaaggggctggagtgggtggccagcataaagcaagatggaagtgagaaatactatgtggactctgtgaagggccgattcaccatctccagagacaacgcccagaactcactgtttctgcaaatgaacagcctgagagccgaggacacggctatatattactgtgcgagaaaattgtattactatgatactagtgattcggggtggttcgacccctggggccagggaaccctggtcaccgtctcctca

SEQ ID NO: 5994 - DNA, 274 bp, Homo sapiens
  source 1..274: mol_type = other DNA
tgcagcctctggattcaccttcagtagctactggatgcactgggtccgccaagctccaggaaagggactggtgtgggtctcacgtattaatactgatgggagtaccacaacctacgcggactccgtgaacggccgattcaccatctccagagacaacgccaagaatatgctgtatctgcaaatgaacagtctgagagccgaggacacggctgtgtattactgtgcaagagattgggactactggggccagggaaccctggtcaccgtctcctca

SEQ ID NO: 5995 - DNA, 274 bp, Homo sapiens
  source 1..274: mol_type = other DNA
tgcagcctctggattcaccttcagtagttactggatgcactgggtccgccaagctccagggaaggggctggtgtgggtctcacgtattcacagtgatgggagtagcacaacctacgcggactccgtgaagggccgattcaccatctccagagacaacgccaagaacacgctgtatctgcaaatgaacagtctgagagccgaggacacggctgtgtattactgtgcaagagattgggactactggggccagggaaccctggtcaccgtctcctca

SEQ ID NO: 5996 - DNA, 286 bp, Homo sapiens
  source 1..286: mol_type = other DNA
tgcagcctctggattcaccctcagtagctactggctacactgggtccgccaaactccagagaaggggctggtgtgggtctcccgtataaacgaagatgggagaaccacaaactatgcggactccgtgaagggccgattcaccatctccagagacaacgccaaaaacacactgtatttacaaatgaacagtctgagagaagaggacacggctgtgtattactgtgcaagagacttaagtgggaagtttgactactggggccagggaaccctggtcaccgcctcctca

SEQ ID NO: 5997 - DNA, 286 bp, Homo sapiens
  source 1..286: mol_type = other DNA
tgcagcctctggattcaccttcagtagttactggatgcactgggtccgccaagttccagggaaggggctggtgtgggtctcacgtattgatgagtatgggactactataaattacgcggactccgtgaagggccgattcaccatctccagagacaacgccaagaacacgctgtatctgcaaatgaacagtctgagccccgaggacacggctgtgtattactgtgcaagagatctcagcggaaagtttgactactggggccatggaaccctggtcaccgtctcctca

SEQ ID NO: 5998 - DNA, 286 bp, Homo sapiens
  source 1..286: mol_type = other DNA
tgcagcctctggattcaccttcagaagttactggatgcactgggtccgccaagttccaggaaaggggctggtgtgggtctcacgtattgataacgatgggactattataaattacgcggactccgtggagggccgattcaccatctccagagacaacgccaagaacacgctgtatctgcaaatgaacagtctgagagccgaggacacggctgtgtattattgtgcaagagatctcagcggaaaatttgactactggggccagggaaccctggtcaccgtctcctca

SEQ ID NO: 5999 - DNA, 276 bp, Homo sapiens
  source 1..276: mol_type = other DNA
gcttctggatacaccttcactaactatgctatgaattgggtgcgacaggcccctggacaagggcttgagtggatgggatggatcaacaccaacactgggaacccaacgtatgcccagggcttcacaggacggtttgtcttctccttggacacctctgtcagtacggcatatctgcagatcagcagcctaaaggctgaggacactgccgtgtattactgtgcgagagatcgtataatggacgtctggggccaagggaccacggtcaccgtctcctca

SEQ ID NO: 6000 - DNA, 276 bp, Homo sapiens; identical to SEQ ID NO: 5999
  source 1..276: mol_type = other DNA

SEQ ID NO: 6001 - DNA, 276 bp, Homo sapiens
  source 1..276: mol_type = other DNA
gcttctggatacaccttcactcactatgctatgaattgggtgcgacaggcccctggacaagggcttgagtggatgggatggatcaacaccaacactgggaacccaacgtatgcccagggcttcgcaggacggtttgtcttctccttggacacctctgtcagcacggcatatctgcagatcagcagcctaaaggctgaggacactgccgtgtattactgtgcgagagatcgtataatggacgtctggggccaagggaccacggtcaccgtctcctca

SEQ ID NO: 6002 - DNA, 276 bp, Homo sapiens
  source 1..276: mol_type = other DNA
gcttctggatacaccttctccagtcatactatgagttgggtgcgacaggcccctggacaagggcttgagtggatgggatggatcaactgcaagtctgggaacccagcgtatgcccagggcttcataggacgatttgtcttctccttggacacctctgtcagcacggcatatctgcagatcagcagcctagaggctgaagacactgccgtgtattactgtgcgagagaccgcatcatggacgtctggggcagagggaccacggtcaccgtctcctca

SEQ ID NO: 6003 - DNA, 292 bp, Homo sapiens
  source 1..292: mol_type = other DNA
cactgtctctggtggctccatcagcggtagtagttactactggggctggatacgccagcccccagggaaggggctggagtggattggcagtatctatcatagggggagaaccaactacaacccgtccctcaagagtcgagtcaccatatccgtagacacgtccaagaaccagttctccctgaagctgagctctgtgaccgccgcagacacggctatatattactgtgcgagacgggggacgtgggagctactagactactggggccagggaaccctggtcaccgtctcctca

SEQ ID NO: 6004 - DNA, 292 bp, Homo sapiens
  source 1..292: mol_type = other DNA
cactgtctctggtggctccgtcagcagtagtagttactactggggctggatccgccagcccccagggaaggggctggagtggattggcagtatctattatagtgggaacacctactacaacccgtccctcaagagtcgagtcaccatctccgtagacacgtccaagaaccagttctccctgaagctgagctctgtgaccgccgcagacacggctgtgttttactgtgcgagacggggcacctgggagctgcttgactactggggccagggaaccctggtcaccgtctcctca

SEQ ID NO: 6005 - DNA, 292 bp, Homo sapiens; identical to SEQ ID NO: 6004
  source 1..292: mol_type = other DNA

SEQ ID NO: 6006 - DNA, 316 bp, Homo sapiens
  source 1..316: mol_type = other DNA
tgcagcctctggattcaccttcagtgaccacttcatggactgggtccgccaggctccagggaaggggctggagtgggttggccgcattagaaacaaagctaaaagttacgccacagagtatgtcgcgtctgtgaaaggcagattcaccatctcaagagatgattcaaagagctcactgtatctgcaaatgaacagcctgaaaaccgaggacacggccgtgtattattgtgttagagtaaattactttgatagaagtggttattcccttgatgcttttgatatctggggccaagggacaagggtcaccgtctcttca

SEQ ID NO: 6007 - DNA, 316 bp, Homo sapiens
  source 1..316: mol_type = other DNA
tgcagcctctggactcatcttcagtgattactattttgactgggtccgccaggctccagggaaggggctggagtgggttggccgtattagaaggaagcctaatggttacaccacaaattacgccgcgtctgtggaaggcagattcagcatctcaagagatgattcaaagaactcagcatatcttcaaatgaacagcctgaaaatcgaggacacggccgtttattactgtgttagagtgaattattttgacagaagtggttattccctcgatgcttttgatatctggggccaagggacactggtcaccgtctcttca

SEQ ID NO: 6008 - DNA, 283 bp, Homo sapiens
  source 1..283: mol_type = other DNA
tgcggcctctgggctcgttatcagtggctctgacatgcactgggtccgccaggcttccgggaaagggctggagtgggttggccgtattagaagcaaggctaataattacgcgacagtatatggtgcgtcgatgaaaggcaggatcagcatctccagagatgattcaaaggacacggcgtatctggaagtgaacagcctgaaagtcgaggacacggccgtgtattactgtactagaattccgtatgactactggggccagggaaccctggtcaccgtctcctca

SEQ ID NO: 6009 - DNA, 283 bp, Homo sapiens
  source 1..283: mol_type = other DNA
tgcagcctctgggttcaccttcagtgcctctgatatgcactgggtccgccaggcttccgggaaagggctggagtgggttggccgtattagaagcaaagctagcagttacgcgacagtatatgctgcgtcggtgaaaggcaggttcaccatctccagagatgattcaaagaacacggcatatttgcaaatggacagcctgaaaaccgaggactcggccgtgtatttttgtactagaattccttatgactactggggccagggaaccctggtcaccgtctccgca

SEQ ID NO: 6010 - DNA, 295 bp, Homo sapiens
  source 1..295: mol_type = other DNA
tacagcctctggattcgccttcagtagctataccatgaactggctccgccaggctccagggaaggggctggagtgggtcgcgtccattagtagtcaaagtggttacatatactacgcagactcagtgaagggccgattcaccatctccagagaaaacgccgagaactcactgtatctgcaaatgaacagactgagagccgaggacacggctgtgtatcactgtgcgagagatctaggccggagcggtgacaactttgactactggggccagggaaccctggtcaccgtgtcctca

SEQ ID NO: 6011 - DNA, 295 bp, Homo sapiens
  source 1..295: mol_type = other DNA
tgcagccactggattcaccttcagtagctataccatgaattgggtccgccaggctccagggaagggactggagtgggtctcatccattagtagtagtagtggttacatctactatgcagactcagtgaagggccgattcaccatctccagagacaacgccaagaactcactgtatgtgcaaatgagcagcctgagagacgaggacacggctgtatattactgtgcgagagatctcggtcgtagtggtgataactttgactactggggccagggaaccctggtcaccgtctcctca

SEQ ID NO: 6012 - DNA, 289 bp, Homo sapiens
  source 1..289: mol_type = other DNA
tgccgcgtctggattcatcttcagtacttatggcatgcactgggtccgccaggctccaggcgaggggctggagtgggtgggaattatatggtctgacggaagtcatgcacactatgcagactccgtgaagggccgattcatcatctccagagacaattccaagaacacactgtttctgcaaatgaacggcctgagagtcgaggacacggctgtgtattactgtgcgagagataccagcattggcgctccagattactggggccagggaaccctggtcaccgtctcctca

SEQ ID NO: 6013 - DNA, 289 bp, Homo sapiens
  source 1..289: mol_type = other DNA
tgccgcgtctggattcactttcagtagttttggcatgcactgggtccgccaggctccaggcgagggactggagtgggtggcaattatatggtctgatggaagtaatgcagagtatgaagactccgtgaagggccgattcaccatctccagagacaattccaggaacacactatttctgcaaatgaacggcctgagagtcgaggacacggctatgtattactgtgcgagagataccagcattggcgctccagattactggggccagggaaccctggtcatcgtctcctca

SEQ ID NO: 6014 - DNA, 289 bp, Homo sapiens
  source 1..289: mol_type = other DNA
tgcagcgtctggattcaccttcagtagctttggcatgcactgggtccgccaggctccaggcaaggggctggagtgggtggcgattatatggtatgatggaagtaataaatactatgcagactccgtgaagggccgattcaccatctccagagacaattccaagaacacgctgtatctgcaaatggacagcctgagagccgaggacacggctgtgtattactgtgcgagagatacctctataggggcacctgactactggggccagggaaccctggtcaccgtctcctca

SEQ ID NO: 6015 - DNA, 289 bp, Homo sapiens
  source 1..289: mol_type = other DNA
ttcagcctctggattcacgttcagtggctatgctatgcactgggtccgccaggctccagggaagggactggaatatgtttcatctatcaggcctagtggggataccacatactacgcagactccatgaggggcagattcaccgtctccagagacaattccaagaacaccctttatcttcaaatgagcagtctgagacctgaggacacggctgtgtattactgtgtgaaagagaccctccggctggcctttgactactggggccagggaaccctggtcaccgtctcctca

SEQ ID NO: 6016 - DNA, 289 bp, Homo sapiens
  source 1..289: mol_type = other DNA
ttcagcctctggattcgccttcagtaaccttgctatgcactgggtccgccaggctccagggaacggactggaatttgtttcagctattagtactaatggagataccacatactacggacactccgtgaagggcagattcaccgtctccagagacaattccaagaacacactgtatcttcaaatgagcagtctgagacctgaggacacggctgtgtattactgtgtcaaagagactttgagactcgcctttgactactggggccaggggaccctggtcaccgtctcctca

SEQ ID NO: 6017 - DNA, 297 bp, Homo sapiens
  source 1..297: mol_type = other DNA
ctctgtctctggtggctccatcacaaactactactggagctggatccggcagtccccggggaagggactggagtggatgggatatatgtattacggtgggactactaggtacaatccctccctcaagagtcgactcaccatatcagtagacacgtccaagaaccagtgtctcctgaagctgaactctgtgaccgctgcggacacggccgtgtattactgtgcgagacagtcgggtataattggaactacggactggttcgacccctgggccagggaacactggtcaccgtctcctca

SEQ ID NO: 6018 - DNA, 298 bp, Homo sapiens
  source 1..298: mol_type = other DNA
cagtgtctctggtggctccatcagtagtcactactggagttggatccggcagtccccagggaagggactggagtggattggatatatctcttacactgggagcaccaagtacaacgcctccctcaagagtcaagtcaccatatcgatagacacgtccaagaatcaggtctccctgaggctgagttctgtgaccgccgcagacacggccgtctactactgtgcgagacagtcaggtataattggaactacggactggttcgacccctggggccagggaaccctggtcaccgtctcctca

SEQ ID NO: 6019 - DNA, 301 bp, Homo sapiens
  source 1..301: mol_type = other DNA
tgtagcctctggattcacctttagtagttattggatgagctgggtccgccaggctccagggaaggggctggagtgggtggccaacataaagcaagatggaagtgagaaaaactatgtggactctgtgaagggccgattcaccatcttcagagacaacgccaaaaacttactgtatctgcaaatgaacagcctgagagtcgaggacacggccgagtattactgtgcgagagatgggtggggcagtacgtcctacaactggttcgacccctggggccagggaacccgggtcaccgtctcctca

SEQ ID NO: 6020 - DNA, 301 bp, Homo sapiens
  source 1..301: mol_type = other DNA
tgcagcctctggattcacctttagtagctattggatggcctgggtccgccaggctccagggaaggggctggagtgggtggccaacataaaccaagatggaagtgagagatactatgtggactctgtgaagggccgattcaccatctccagagacaacgccaagaattcaatgtatctgcaaatgaacagcctgagagccgaggacacggccgtgtattactgtgcgagagatgggtggggtagtaccagctacaactggttcgacccctggggccagggaaccttggtcaccgtctcctca

SEQ ID NO: 6021 - DNA, 301 bp, Homo sapiens
  source 1..301: mol_type = other DNA
tgcagcctcaggattcacttttagtagctattggatggcctgggtccgccaggctccagggagggggctggagtgggtggccaacataaaccaagatggaagtgagagatactatgtggactctgtgaagggccgattcaccatctccagagacaacgccaagaattcaatgtatctgcaaatgaacagcctgagagccgaggacacggccgtctattactgtgcgagagatgggtggggtagtaccagctacaactggttcgacccctggggccagggaaccctggtcaccgtctcccca

SEQ ID NO: 6022 - DNA, 286 bp, Homo sapiens
  source 1..286: mol_type = other DNA
caaagtctccggtggctccatcggcaatcactattggagctggctccggcagcccccagggaagggcctggagtggattgcatatatctattccagtggaagtaccaactacaacccctccctcaagagtcgagtcaccatatcagtagacacgtccaagaaccagttctccttgaggctgacctctgtgaccgctgcggacacggccctgtattactgtgcgaggggtccttggacggaatacttccaactctggggccagggcaccctggtcaccgtctcctca

SEQ ID NO: 6023 - DNA, 286 bp, Homo sapiens
  source 1..286: mol_type = other DNA
caaagtctccggtggctccatcggcaatcactattggagctggctccggcagcccccagggaagggcctggagtggattgcatatatctattccagtggaagtaccaactacaacccctccttcaggagtcgagtcaccatatcagtagacacgtccaagaaccagttctccttgaggctgacctctgtgaccgctgcggacacggccctgtatttctgtgcgaggggtccttggacggaatacttccaactctggggccagggcgccctggtcaccgtctcctca

SEQ ID NO: 6024 - DNA, 286 bp, Homo sapiens
  source 1..286: mol_type = other DNA
cactgtctctggtggctccatcagtagttactattggagctggatccggcagcccccagggaagggactggaatggattgcgtatatttattccagtgggagcaccaactacaacccctccctcaagagtcgagtcaccatatcagtggacacgtccaagaaccagttctccctgaggctgaactccgtgaccgctgcggacacggccgtgtattactgtgcgagaggtccctggaccgaatacttccagctctggggccagggcaccctggtcaccgtctcctca

SEQ ID NO: 6025 - DNA, 286 bp, Homo sapiens
  source 1..286: mol_type = other DNA
cactgtctctggtggctccatcagtagttactactggagctggatccggcagcccccagggaagggactggaatggattgcgtatatctattccagtgggagcaccaactacaacccctcccttaagagtcgagtcaccatatcagtggacacgtccaagaaccagttctccctgaggctgaactctgtgaccgctgcggacacggccgtgtattactgtgcgagaggcccctggaccgagtacttccagctctggggccagggcaccctggtcaccgtctccaca

SEQ ID NO: 6026 - DNA, 286 bp, Homo sapiens
  source 1..286: mol_type = other DNA
caaagtctccggtggctccatcggcaatcactattggagttggctccggcagcccccagggaagggcctggagtggattgcatatatctattccagtggaagtaccaactacaacccctccctcaagagtcgagtcaccatatcagtagacacgtccaagaaccagttctccttgaggctgacctctgtgaccgctgcggacacggccctgtattactgtgcgaggggtccttggacggaatacttccaactctggggccagggcaccctggtcaccgtctcctca

SEQ ID NO: 6027 - DNA, 286 bp, Homo sapiens
  source 1..286: mol_type = other DNA
cactgtctctggtggctccatcagtagttactattggagctggatccggcagcccccagggaagggactggaatggattgcgtatatttattccagtgggagcaccaactacaacccctccctcaagagtcgagtcaccatatcagtggacacgtccaagaaccagttctccctgaggctgaactccgtgaccgctgcggacacggccatgtattactgtgcgagaggcccctggaccgaatacttccagctctggggccagggcaccctggtcaccgtctcctca

SEQ ID NO: 6028 - DNA, 283 bp, Homo sapiens
  source 1..283: mol_type = other DNA
cgctgtatatggtggttcgtttactaattatcactggagttggatccgccagtctccggataagggcctggagtggattggtgacgtcaatccaagcggcacctccacctacaggccgtctctcaaaactcgggtctccatctcacgagatccttccaaaaatcagatctccttgaatctgcgttttgtcaccgccgcggactcggcagtttactactgcacgaggggcgtctttcatcgtttcgacccctggggccggggaaccccggtcatcgtctcttca

SEQ ID NO: 6029 - DNA, 283 bp, Homo sapiens
  source 1..283: mol_type = other DNA
cgctgtatatggtggttcgtttagtaattatcactggagttggatccgccagtctccggataagggcctggagtggattggtgacgtcaatccaagcggcacctccacctacaggccgtccctcaaaactcgggtctccatctcacgagatccatccaaaaatcagatctcgttgaatctgcattttgtcaccgccgcggactcggcagtttactactgcacgaggggcgtctttcatcgtttcgacccctggggccggggaaccccggtcatcgtctcttca

SEQ ID NO: 6030 - DNA, 283 bp, Homo sapiens
  source 1..283: mol_type = other DNA
cgctgtgtatggcacttcttttagtaattatcactggagttggatccgccagtccccaggaaagggcctggagtggattggtgacgtcaatccaagcggcacgtcctcctaccggccgtccctcaaaagtcgagtgtccatctcgcgagacccatccaagaatcagatttctttgagtctgcgttttgtcaccgccgcggacacggcagtctactattgtacgcggggcgtctttcatcgtttcgacccctggggccggggaaccccggtcaccgtctcttca

SEQ ID NO: 6031 - DNA, 283 bp, Homo sapiens
  source 1..283: mol_type = other DNA
cgctgtatatggtggttcctttagtaattatcactggagttggatccgccagtccccgggtaagggcctggagtggattggtgacgtcaatccaagcggcacctccacctacaggccgtccctcaaaactcgagtgtccatctcgcgagacgcatccaagaatcagatttcgttgaatctgcgttttgtcaccgccgcggacacggcagtctacttttgcacgaggggcgtctttcatcgtttcgacccctggggccggggaaccccggtcaccgtctcttca

SEQ ID NO: 6032 - DNA, 283 bp, Homo sapiens
  source 1..283: mol_type = other DNA
cgctgtctatcgtgggaccttcggtggctatcactggagttggctccgccagtccccggggaagggactggagtggattggcgacgtaaatggcagtggaactaccaactataattcgtccctcaaccgtcgagtcgtcatatcactggacgtgtccaagaatcagttctccctgaagatgacctcgatgaccgtcgcggacacggctgtgtattattgtacgagaggtgtttttcaccgcttcgacccctggggccagggaaccctggtcaccgtctcctca

SEQ ID NO: 6033 - DNA, 304 bp, Homo sapiens
  source 1..304: mol_type = other DNA
cactgtctctggtggctccatcagcagtagtaataactactggggctggatccgccagcccccagggaaggggctggagtggattgggagtatctattatagtgggaacacctaccacaacccgtccctcaagagtcgagtcaccatatccgtagacacgtccaagaaccagttctccctgaagctgagctctgtgaccgccgcagacacggctgtgtattattgtgcgagacattgtagtggtggtagctgctactcttgctctgactactggggccagggaaccctggtcaccgtctcctca

SEQ ID NO: 6034 - DNA, 304 bp, Homo sapiens; identical to SEQ ID NO: 6033
  source 1..304: mol_type = other DNA

SEQ ID NO: 6035 - DNA, 304 bp, Homo sapiens
  source 1..304: mol_type = other DNA
cactgtctctggtggctccatcagcggtaatagttactactggggctggatccgccagcccccagggaaggggctggagtggatagggagtatctattatagtgggagcacctactacaacccgtccctcaagagtcgagtcaccatatccgtagacacgtccaagacccagttctccctgaagctgacctctgtgaccgccgcagacacggctgtgtattactgtgcgagacattgtagtggtggtagctgctactcctgctctgactactggggccagggaaccctggtcaccgtctcctca

SEQ ID NO: 6036 - DNA, 298 bp, Homo sapiens
  source 1..298: mol_type = other DNA
tgcagcctctggattcagcttcagtgactactatatggactgggtccgccaggctccagggaaggggctggagtgggttggccgtagtagaaacaaagctaacagttacaccacagactacgccgcgtctgtgaaaggcagattcaccacctcaagagatgcttcaatgaattcattgtatctgcaaatgaatagcctgaaaaccgaggacacggccgtctattattgtgtaagagtgagtagtggcgggaactactttgactactggggccagggaaccctggtcaccgtctcctca

SEQ ID NO: 6037 - DNA, 298 bp, Homo sapiens
  source 1..298: mol_type = other DNA
tgtagcctctggattcatcttcagtgactattacatggactgggtccgccaggctccagggaaggggctggagtgggttggccgtagtagaaacaaagttaacagttacagcacagattacgccgcgtctgtgaaaggcagattcagcgtctcaagagatgtttcaaagaactcactgtatctgcaaatgagcagcctgaaaaccgaggacacggccgtgtattattgtgttagagtcagcagtggggggaactactttgactactggggccagggaaccctggtcaccgtctcctca

SEQ ID NO: 6038 - DNA, 298 bp, Homo sapiens
  source 1..298: mol_type = other DNA
tgcagcctctggattcatgttcagtgactattacatagactgggtccgccaggctccagggaaggggctggagtgggttggccgtagtagaaacaaagctaacagttacaccacagaatacgccgcgtctgtcaaaggcagattcagtgtctcaagagatgtttcaaagaactcactgtatctgcaaatgagcagcctgaaaaccgaggacacggccgtgtattactgtgttagagtcagcagtggggggaactactttgactactggggccagggaaccctggtcaccgtctcctca

SEQ ID NO: 6039 - DNA, 298 bp, Homo sapiens
  source 1..298: mol_type = other DNA
tgcagcctctggatttatcttcagtgactattacatggactgggtccgccacgctccagggaaggggctggagtggattggccgtagtagaaacaaagctaacagttacagcacagactacgccgcgtctgtgaaaggcagattcagcgtctcaagagatgtttcaaagaactcactgtatttgcaaatgagtggcctgaaaaccgaggacacggccgtgtattactgtgttagagtcagcagtggggggaactactttgactactggggccagggaaccctggtcaccgtctcctca

SEQ ID NO: 6040 - DNA, 298 bp, Homo sapiens
  source 1..298: mol_type = other DNA
tgcagcctctggatttatcttcagtgactattacatggactgggtccgccacgctccagggaaggggctggagtggattggccgtagtagaaataaagctaacagttacagcacagactacgccgcgtctgtgaaaggcagattcagcgtctcaagagatgtttcaaagaacgcactgtatttgcaaatgagtggcctgaaaaccggggacacggccgtgtattactgtgttagagtcagtagtggggggaactactttgactactggggccagggaaccctggtcaccgtctcctca

SEQ ID NO: 6041 - DNA, 298 bp, Homo sapiens
  source 1..298: mol_type = other DNA
tgcagcctctgggttcatcttcgttgactattacattgactgggtccgccaggctccagggaaggggctggagtgggttggccgtagcagaaacaaggctaatagttacagcacagaatatgccgcgtctgtgaaaggcagattcagcgtctcaagagatgtttcaatgaactcattgtatctgcaaatgagcagcctcaaaaccgaggacacggccgtgtattactgtgttagagtcagcagtggggggaactactttgactactggggccagggaaccctggtcaccgtctcctca

SEQ ID NO: 6042 - DNA, 298 bp, Homo sapiens
  source 1..298: mol_type = other DNA
tgcagcctctggattcatcttcagtgactattacatggactgggtccgccaggctccagggaaggggctggagtgggttggccgtagtagaaacaaagttaacagttacagcacagattacgccgcgtctgtgaaaggcagattcagcgtctcaagagatgtttcaaagaactcactgtatctgcaaatgagcagcctgaaaaccgaggacacggccgtgtattattgtgttagagtcagcagtggggggaactactttgactactggggccagggaaccctggtcaccgtctcctca

SEQ ID NO: 6043 - DNA, 289 bp, Homo sapiens
  source 1..289: mol_type = other DNA
tgcagcctctggattcaccttcagtgactatggcatgcactgggtccgccaggctccaggcaaggggctggagtgggtgtcagttatatcatatgatggaagtaataaatactatgcagactccgtgaagggccgaatcaccatctccagagacaattccaagaacacgctgtatctgcaaatgaacagcctgagagctgaggacacggctgtgtattactgtgtgaaaagcatgggagctatcgatcttgactactggggccagggaaccctggtcaccgtctcctca

SEQ ID NO: 6044 - DNA, 289 bp, Homo sapiens
  source 1..289: mol_type = other DNA
tgcagcctctggattcaccttcagtggctttgctatacactgggtccgccaggctccaggcaaggggctggagtgggtggcagttgtgtcatctgatggaactagtaaaaattacgcagactccgtgaagggccgattcaccatctccagagacaattccaagaacacgctgtttctgcaaatggacagcctgagacctgaggacacggctctatattactgtgtgaagtccatgggggcaatagaccttgactactggggccagggaaccctggtcaccgtctcctca

SEQ ID NO: 6045 - DNA, 290 bp, Homo sapiens
  source 1..290: mol_type = other DNA
ccatctccggggacagtgtctctgccaccagttctgcttggaactggatcaggcagtccccgtcgagaggccttgagtggctgggaaggacatactacaggaccaagtggaatactgattatgtagtttctgtgaaggggcggattaccatcagcccagacacatcgaagaaccagttctccctgcatctgaactctgttactcccgacgacacggctgtttactactgtgcaagaggcgactattactttgacttctggggccagggaaccctggtcaccgtctcctca

SEQ ID NO: 6046 - DNA, 290 bp, Homo sapiens
  source 1..290: mol_type = other DNA
ccatctccggggacagtgtctctgccaccagttctgcttggaactggatcaggcagtccccatcgagaggccttgagtggctgggaaggacatactacaggaccaagtggaataatgattatgtagtttctgtgaaggggcggattaccatcagcccagacacatccaagaaccagttctccctgcacctgaactctgttactcccgacgacacggctgtttactactgtgcaagaggcgactattactttgacttctggggccagggaaccctggtcaccgtctcctca

SEQ ID NO: 6047 - DNA, 290 bp, Homo sapiens
  source 1..290: mol_type = other DNA
ccatctccggggacagtgtctctagcatcagtgctgcttggaactggatcaggcagtccccatcgagaggccttgagtggctaggaaggacatactataggtccaagtggaataatgattatgcagtatctgtgaaaagtcgaataaccatcaacccagacacaaccaagaaccagttctccctgcagttgaactctgtgactcccgaggacacggctgtgtattactgtgcaaggggcgactactactttgacttctggggccagggaaccctagtcaccgtctcctca

SEQ ID NO: 6048 - DNA, 286 bp, Homo sapiens
  source 1..286: mol_type = other DNA
tgcagcctctggattcaccttcagtaattatgaaatgaactgggtccgccaggctccagggaaggggctggagtggatttcatatattactactagtgatagtaccagatactacgcagactctgtgaagggccgattcaccatctccagagacaacgccaagaagtcactgtatctgcaaatgaacaacctgagagccgaggacatggctgtctattactgtgcgagagatttcgggggctactctgactactggggccggggaaccctggtcaccgtctcctca

SEQ ID NO: 6049 - DNA, 286 bp, Homo sapiens
  source 1..286: mol_type = other DNA
tgtagcctctggattcaccttcagtcgatatgaaatgaagtgggtccgccaggctccagggaagggactggagtgggtttcatacattgatagtagtggtagtgtcgtgttttacggagactctgtggagggccgattcagaatctccagagacaacgccaggaattcgctgtatctgcagatgaacagcctgagagtcgaggacacggccgtttactactgcgcgagagatttcgggggttactctgactactggggccagggaaccctggtcaccgtttcctca

SEQ ID NO: 6050 - DNA, 301 bp, Homo sapiens
  source 1..301: mol_type = other DNA
cgctgtctctggtggctccatcagtccttactactggagctggatccgacagcccccagggaagggactggagtggattggctacatttattacagcgggagtaccaactacaacccctccctcaagagtcgagtcaccatgtcagtggacacgtccaagaaccagttctccctgaggctgaggtctctgacgactgcggacacggccctgtatttctgtgcgagaggtcccctgaggtatagcagtggctggtactactttgattattggggccagggaaccctgctcaccgtctcctca

SEQ ID NO: 6051 - DNA, 301 bp, Homo sapiens
  source 1..301: mol_type = other DNA
cactgtctctgctggctccatcagtaattattactggagctggatccggcagcccccagggaagggactggagtggattggctacatctattacagtgggagcaccaagtacaacccctccctcaagagtcgagtcaccatatcagtagacacgtccaagaaccagttctccctgaacctgagctctgtgaccgctgcggacacggccgtgtattactgtgcgagaggtcccctgaggtattccagtggctggtactactttgactactggggccagggaaccctggtcaccgtctcttca

SEQ ID NO: 6052 - DNA, 301 bp, Homo sapiens
  source 1..301: mol_type = other DNA
cactgtctctggtggctccatcagtccttactactggagctggatccggcagcccccagggaagggactggagtggattgggtatatttattacagcgggagcaccaactacaacccctccctcaagagtcgagtcaccatatcagtagacacgtccgagaaccacttctccctgaagctgaggtctctgagcactgcggacacggccctgtatttctgtgcgagaggtcccctgaggtatagcagtggctggtactactttgactactggggccagggaaccctggtcaccgtctcctca

SEQ ID NO: 6053 - DNA, 301 bp, Homo sapiens
  source 1..301: mol_type = other DNA
cagtgtctctggtggctcaatcagtagtttttactggagctggatccggcagcccccggggaaggcactggagtggattggctatatttattacagtgggagcaccaactacaacccctccctcaagagtcgagtcaccatattagtagacacgtccaagaaccagttctccctgaagctgagctctgtgaccgctgcggacacggccgtgtattactgtgcgagaggcccccttagatatagcagtggctggtattactttgactactggggccagggaaccctggtcaccgtctcctca

SEQ ID NO: 6054 - DNA, 301 bp, Homo sapiens
  source 1..301: mol_type = other DNA
cactgtctctggtggctccatcagtagttactactggagctggatccggcagcccccggggaagggactggagtggattggatatgtctattacagtgggagtaccaactacaagccctccctcaagagccgagtcaccatatcagtagacacgtccaagaaccagttctccctgaacttgatctctgtgaccgatgcggacacggccgtgtatttctgtgcgagaggccccctaaggtatagcagtggctggtactactttgactactggggccagggaaccctggtcaccgtctcctca

SEQ ID NO: 6055 - DNA, 298 bp, Homo sapiens
  source 1..298: mol_type = other DNA
cactgtctctggtggctccatcagcagtagtacttactactggggctggatccgccagccgccagggaaggggttggagtggattgggagtctctattatagtggaagctcatactatgacccgtccctcaagagtcgactcaccctatccgttgacacgtccaagaaccagttctccctgaagctgaactctgtgaccgccgcagacacggctgtgtatttctgtgcgagggcgagtgggagctattattcggactttgactactggggccagggaaccctggtcaccgtctcctca

SEQ ID NO: 6056 - DNA, 298 bp, Homo sapiens
  source 1..298: mol_type = other DNA
cactgtctctggtggctccatcagcagtagtagttattactggggctggatccgccaacccccagggaaggggctggagtggattgggagtatctattatagtgggagcacctactacaatgcgtccctcaagagtcgagtcaccatttcagtagacacgtccaagaatcagttctccctgagggtgagctctgtgaccgccgcggacacggccgtgtattactgtgcgagagcttccgggagctactactcggactttgactactggggccagggaaccctggtcaccgtctcctca

SEQ ID NO: 6057 - DNA, 286 bp, Homo sapiens
  source 1..286: mol_type = other DNA
tgcagcctctggattcacctttaataagtattggatgatgtgggtccgccaggctccagggaaggggctggagtgggtggccaacataaaggaagatggaagtgagaaatactatgtggactctgtgaagggccgattcaccatctccagagacaacgccaagaactcattgtatctgcaaatgagtagcctcagagccgaggacacggctgtgtattactgtgcgaagtacagaggatacgcttttgatatctggggccacgggacaatggtcaccgtctcttca

SEQ ID NO: 6058 - DNA, 286 bp, Homo sapiens
  source 1..286: mol_type = other DNA
tgcagcctctggattcacctttaataactattggatgagctgggtccgccaggctccagggaaggggctggagtgggtggcccacataaagcaggatggaagtgagaaatactatgtggactttgtgaagggccgattcaccatctccagggacaacaccaagaactcactgtatctgcaaatgaacagcctgagagccgaggacacggctgtgtattactgtgcgaagtatagaggatatgcttttgatatctggggccaagggacaatggtcaccgtctcttca

SEQ ID NO: 6059 - DNA, 289 bp, Homo sapiens
  source 1..289: mol_type = other DNA
cactgtctctggtggctccatcaatagttactcctggagctggatccggcagcccccagggaagggactggagtgcattgggtatatcaattacagtgggagcatcaactacagcccctccctcaagagtcgagtcaccatatcagtagacacgtccaagaaccagttctccctgaagctgagctctgtgaccgccgcagacacggccgtgtattactgtgcgagacggaccagcagctggtactactttgactactggggccagggaaccctggtcaccgtctcctca

SEQ ID NO: 6060 - DNA, 289 bp, Homo sapiens
  source 1..289: mol_type = other DNA
cactgtctctggtggctacatccaaacttactactgggcctggatccggcagaccccagggaagggactggagtggattggatatattcatcacggtgggagtaccaactacaacccctccctcgggagtcgaatcaccatatctgtagacacgtccaggaatcagttctccctgaaggtgacctctgtgaccgccgcggacacggccgtgtatttctgtgcgagaaggaccagcagttggtactactttgactactggggccagggaagcctggtcaccgtctcttca

SEQ ID NO: 6061 - DNA, 289 bp, Homo sapiens
  source 1..289: mol_type = other DNA
cactgtctctggtggcttcatcactacttactactggagctggatccggcagcccccagggaagggactggagtggattggctatgtctactacagagggagcaccaactacaacccctccctcaagagtcgactcaccatgtcagtagacacgtccaagaaccagttctccctgaccctgagctctgtgaccgccgcagacacggccgtgtatttctgtgcgagacgtaccagcagctggtactactttgactactggagcccgggaaccctggtcaccgtctcctca

SEQ ID NO: 6062 - DNA, 301 bp, Homo sapiens
  source 1..301: mol_type = other DNA
tgaagcctctgggttcaccttcgatgactctgctattcactgggtccgccaggctcccgggaaagggctggagtggattggccgtatgagaagcaaaagaaacaattacgcgacatcatatgctgggtcggtgaaaggcaggttcatcatctccagagatgattcaaaggacacggcgtatctacaaatgaacagcctgaaaaccgaggacacggccgtgtattattgtactagacgagagactacgtattactacggtatggacgtctggggccaagggaccacggtcaccgtctcctca

SEQ ID NO: 6063 - DNA, 301 bp, Homo sapiens
  source 1..301: mol_type = other DNA
tgcagcctctgggttcaccttcaataactctgctatacactgggtccgccaggcttccgggaaagggctggagtgggtaggccgtattagaagcaaagctaacaattacgcgacaacatatgctgcgtcggtgaaaggcaggttcaccatctccagcgatgattcaaagaacacggcgtatctgcaaatgaacagcctgaaaatcgaggacacggccgtgtattattgtacccgccgggagacgacctactactacggtatggacgtctggggccaagggaccacggtcaccgtctcctca

SEQ ID NO: 6064 - DNA, 304 bp, Homo sapiens
  source 1..304: mol_type = other DNA
tgcagcctctggattcagcttcagaagccatgccatccactgggtccgccaggctccaggcaaggggctggagtgggtggcacttatctcatataatggagataatgaatactatgcggactccgtgaagggccgattcaccatctccagagacaattccaaggacacgctgtatctgcaaatgagcagcctgagagctgaggacacggctgtgtattactgtgcgaaagatcggggctatggttcgggcagttaccgccaccttgactactggggccagggaaccctggtcaccgtctcctca

SEQ ID NO: 6065 - DNA, 304 bp, Homo sapiens
  source 1..304: mol_type = other DNA
tgcagcctctggattcagcttcagtagccatgctatgcactgggtccgccaggctccaggcaaggggctggagtgggtggcagttatctcatatgatgaaagtaataaatactactcagactccgtgaagggccgattcaccatctccagagacaattccaagaacacactgtatctgcaaatgaacagcctgagagctgaggacacggctgtcttttactgtgcgaaagataggggctatggttcggggagttacagacaccttgactactggggccagggaaccccggtcatcgtctcctca

SEQ ID NO: 6066 - DNA, 277 bp, Homo sapiens
  source 1..277: mol_type = other DNA
tgcagcctctggatttaatttcaaaaacgcctggatgagctgggtccggcaggctccagggaaggggctggagtgggttggccgcattaggagcaaaactgatggagggacagtagactacaccacacccgtggaaggcagatttactatctcaagagatgactcaacgaacacgctgtatctgcaaatgaacagactgacgaccgaggacacagccgtttattactgttccacagtcagggactggggccagggagccctggtcatcgtctcttca

SEQ ID NO: 6067 - DNA, 277 bp, Homo sapiens
  source 1..277: mol_type = other DNA
tgcagcctctggattcactttcgctaacgcctggatgtactggctccgccaggctccagggaaggggctggagtgcgttggccgtattaaaagtaaaactaatggtgggacagcagactacgctgcacccgtgaaaggcagattcaccatctcaagagacgattcagaaaatatgctgtatctgcaaatgaacaacctgaaaaccgaggacacagccgtctattactgttccacagtccgtgactggggccagggaaccctggtcaccgtctcctca

SEQ ID NO: 6068 - DNA, 282 bp, Homo sapiens
  source 1..282: mol_type = other DNA
gcttctggatacaccttcgctatgtatgctatttattgggtgcgacaggcccctggacaagggcttgagtggatgggatggatcaacaccaacaatgggttcccaacgtatgcccagggcttcgcaggacggtttgtcttctccttggacacctctgtcaccacggcatatgtggagatcaggagcctaaaggctgaggacactgccgtctattattgtgcgagagaaaagggggatgcttttgatatctggggccaagggacaatggtcaccgtctcttca

SEQ ID NO: 6069 - DNA, 282 bp, Homo sapiens
  source 1..282: mol_type = other DNA
gcttctggatacaccttcactacctatgctatgcattgggtgcgacaggcccctggacaagggcttgagtggatgggatggatcaacaccaacactgggaacccaacgtatgcccagggcttcacaggacggtttgtcttctccttggacacctctgtcagcacggcatctctccagatcagcagcctaaaggctgaggacactgccgtgtattactgtgcgagagaaaaaggggatgcttttgatatctggggccaagggacaatggtcaccgtctcttca

SEQ ID NO: 6070 - DNA, 282 bp, Homo sapiens; identical to SEQ ID NO: 6069
  source 1..282: mol_type = other DNA

SEQ ID NO: 6071 - DNA, 282 bp, Homo sapiens
  source 1..282: mol_type = other DNA
gcttctggatacaccttcactacctatgctatgcattgggtgcgacaggcccctggacaagggcttgagtggatgggatggatcaacaccaacactgggaacccaacgtatgcccagggcttcacaggacgttttgtcttctccttggacacctctgtcagcacggcatctctccagatcagcagcctaaaggctgaggacactgccgtgtattactgtgcgagagaaaaaggggatgcttttgatatctggggccaagggacaatggtcaccgtctcttca

SEQ ID NO: 6072 - DNA, 282 bp, Homo sapiens
  source 1..282: mol_type = other DNA
gcttctggatacaccttcactacctatgctatgcattgggtgcgacaggcccctggacaagggcttgagtggatgggatggatcaacaccaacactgggaacccaacgtatgcccagggcttcacaggacggtttgtcttctccttggacacctctgtcagcacggcatctctccagatcagcagcctaaaggctgaggacactgccgtgtattactgtgcgagagaaaaaggggatgcctttgatatctggggccaagggacaatggtcaccgtctcttca

SEQ ID NO: 6073 - DNA, 297 bp, Homo sapiens
  source 1..297: mol_type = other DNA
gcttctggttacacctttaccagttatggtatcagttgggtgcgacaggcccctggacaagggcttgagtggatggggtggatcagcccttacaatggtaacacaaactatgcacagaacctccagggcagagtcaccatgatcacagagacatccacgagcacagcctacatggagctgaggagcctgagatctgacgacacggccgtgtattactgtgcgagagacccgtattactatgatactagtggttattttgacccctggggccagggaaccctggtcaccgtctcctca

SEQ ID NO: 6074 - DNA, 297 bp, Homo sapiens
  source 1..297: mol_type = other DNA
gcttctggttacacctttaccagctatggtatcagttgggtgcgacaggcccctggacaagggcttgagtggatgggatggatcagccctaacaatggtaagacagaccttgcacagaagttccagggcagagtcaccatgtttgcagagacatatacgaacacagcctacatgcagctgaggagcctgacatctgacgacgcggccgtgtactactgtgcgagagatccctattactatgatactagtggttacttcgacccctggggccagggaaccctggtcaccgtctcctca

SEQ ID NO: 6075 - DNA, 297 bp, Homo sapiens
  source 1..297: mol_type = other DNA
gcttctggttacacctttaccagctatggtatcagttgggtgcgacaggcccctggacaagggcttgagtggatgggatggatcagccctaacaatggtaagacaaaccttgcacagaagttccagggcagagtcaccatgtttacagagacatccacgaacacagcctacatgcacctgaggagcctgacatctgacgacacggccgtgtactactgtgcgagagatccctattactatgatactagtggttacttcgacccctggggccagggaaccctggtcaccgtctcctca

SEQ ID NO: 6076 - DNA, 297 bp, Homo sapiens; identical to SEQ ID NO: 6074
  source 1..297: mol_type = other DNA

SEQ ID NO: 6077 - DNA, 297 bp, Homo sapiens
  source 1..297: mol_type = other DNA
gcttctggttacacctttaccagctatggtatcagttgggtgcgacaggcccctggacaagggcttgagtggatgggatggatcagccctaacaatggtaagacagaccttgcacagaagttccagggcagagtcaccatgtttgcagagacatatacgaacacagcctacatgcagctgaggagcctgacatctgacgacgcggccgtgtactactgtgcgagggatccctattactatgatactagtggttacttcgacccctggggccagggaaccctggtcaccgtctcctca

SEQ ID NO: 6078 - DNA, 297 bp, Homo sapiens
  source 1..297: mol_type = other DNA
gcttctggttacacctttaccagctatggtatcagttgggtgcgacaggcccctggacaagggcttgggtggatgggatggatcagccctaacaatggtaagacagaccttgcacagaagttccagggcagagtcaccatgtttgcagagacatatacgaacacagcctacatgcagctgaggagcctgacatctgacgacgcggccgtgtactactgtgcgagagatccctattactatgatactagtggttacttcgacccctggggccagggaaccctggtcaccgtctcctca

SEQ ID NO: 6079 - DNA, 280 bp, Homo sapiens
  source 1..280: mol_type = other DNA
tgcagcctctggattcacctttagcatctatgccatgagctgggtccgccaggctccagggaaggggctggagtgggtctcagctattaatggtaatggtgctggcacatactacgcagactccgtaaagggccggttcagcatctccagagacaattccaagaacacgctgtatctgcaaatgaacagcctgagagccgaggacacggccgtatattactgtgcgggtgggaggagctttgactactggggccagggaaccctggtcaccgtctcctca

SEQ ID NO: 6080 - DNA, 280 bp, Homo sapiens
  source 1..280: mol_type = other DNA
tgcagcctctggattcacctttagcatctatgccatgagctgggtccgccaggctccagggaaggggctggagtgggtcgcagctattggtggtagtggtgatagtacatactacggagactccgtgaagggccggttcaccatctccagagacaattccaagaacaccctgtatctgcaaatgaacaacctgagagacgaggacacggccgcttactactgtgcgggtggaagaagctttgactactgggcccagggaatcctggtcattgtctcctca

SEQ ID NO: 6081 - DNA, 280 bp, Homo sapiens
  source 1..280: mol_type = other DNA
tgcagcctctggattcacctttagcagctatgccatgagctgggtccgccaggccccagggaaggggctggagtgggtctcagcaattaatggcaatggtgagggtacatactacgcagactccgtgaagggccggttcagcatctccagagacaattccaagaacacgctgtatctgcaaatgaacagcctgagagccgaggacacggccgtatattactgtgcggggggaagaagctttgactactggggccagggaatccaggtcaccgtctcctca

SEQ ID NO: 6082 - DNA, 280 bp, Homo sapiens
  source 1..280: mol_type = other DNA
tgcagcctctgggttcacctttagcaactatgccatgaactgggtccgccaggccccagggaaggggctggagtgggtctcagcaattaatggcaatggtgagggtacatactacggagactccgtgaagggccggttcagcatctccagagacaactccaagaatatgctgtatctgcaaatgaacagcctgagagccgaggacacggccatatattactgtgcggggggaagaagctttgactactggggccagggaaccctggtcaccgtctcctca

SEQ ID NO: 6083 - DNA, 280 bp, Homo sapiens
  source 1..280: mol_type = other DNA
tgcagcctctggattcacctttagcagctatgccatgaactgggtccgccaggccccagggaaggggctggagtgggtctcagctattaatggtaatggtgatggtacatactacgcagactccgtgaagggccggttcagcatctccagagacaattccaagaacacgctgtatctgcaaatgcacagcctgagagccgaggacacggccgtatattactgtgcggggggaagaagctttgactactggggccagggaaccctggtcaccgtctcctca

SEQ ID NO: 6084 - DNA, 280 bp, Homo sapiens
  source 1..280: mol_type = other DNA
tgcagcctctggattcacctttagcagctatgccttgaactgggtccgccaggctccagggaaggggctggagtgggtctcaagtattaataatgttggtggtggcacatactacgcagactccgtgaagggccgattcaccatctccagggacaattcccagaatacgttgtatctgcaaatgaacagcctgagaggcgaggacacggccatttattactgtgctggtggccggtcgtttgactactggggccagggatccctggtcaccgtctcctca

SEQ ID NO: 6085 - DNA, 280 bp, Homo sapiens
  source 1..280: mol_type = other DNA
tgcagcctctggattcacctttagcagctatgccatgagctgggtccgccaggccccagggaaggggctggagtgggtctcagcaattaatggtaatggtgagggcacatactacgcagactccgtgaagggccggttcagcatctccagagacaattccaagaacacgctgtatctgcaaatgaacagcctgagagccgaggacacggccgtatattactgtgcggggggaagaagctttgactactggggccagggaaccctggtcaccgtctcctca

SEQ ID NO: 6086 - DNA, 280 bp, Homo sapiens; identical to SEQ ID NO: 6081
  source 1..280: mol_type = other DNA

SEQ ID NO: 6087 - DNA, 292 bp, Homo sapiens
  source 1..292: mol_type = other DNA
tgcagcctctggattcagcttcagtgaccactatatggactgggtccgccaggctccagggaaggggctggagtgggttggccgtattagaaacaaagctaacagttacaccacagaatacgccgcgtctgtgaaaggcagattcaccatctcaagagatgattcaaagaactcactgtatctgcaaatgaacagcctgaaaaccgaggacacggccgtgtattactgtgctagagtccgcggtgacccctatgactactggggccagggaaccctggtcaccgtctcctca

SEQ ID NO: 6088 - DNA, 292 bp, Homo sapiens
  source 1..292: mol_type = other DNA
tgcagcctctggattcagcttcagtgaccactacatagactgggtccgccaggctccagggaagggactggagtgggttgggcgtagtagagacagagcaaacggttacagcacagaattcgtcgcgtctgtgaaaggcagattcgccatcacaagagatgattcaaagaactcactggatctgcacatgaacagcctgcaaaccgaggacacggccgtatattactgtgccagagtgagaggcgacccctatgactactggggccagggaaccctggtcaccgtctcctca

SEQ ID NO: 6089 - DNA, 289 bp, Homo sapiens
  source 1..289: mol_type = other DNA
cgcagcgtctggattcaccttcaacaactatggcatgcactgggtccgccaggctccaggcaaggggccggagtgggtggcagttgtctggtttgatggaactaaaaaatactatgcagactccgtgaagggccgattcatcatctccagagacagttccgagaacacgctctatctggtaatgaacagcctgagagtcgaggacacggctgtatactactgtgcgcggggggggggtacggtgaccactgactactggggccacggaaccctggtcaccgtctcctca

SEQ ID NO: 6090 - DNA, 289 bp, Homo sapiens
  source 1..289: mol_type = other DNA
tgaagcgtccggattcaccttcagaaactttggcatgcactgggtccgccaggctccaggcaaggggctggagtgggtggcagttatatggtatgatggaagtaagaaatactatgcagactccgtgaagggccgattcaccatctccagagacagttccaagaacacgctgcatttgcaaatgaacagcctgagagtcgaggacacggctgtgtattactgtgcgagagggggggggacggtgactactgactattggggccagggaaccctggtcaccgtctcctca

SEQ ID NO: 6091 - DNA, 289 bp, Homo sapiens; identical to SEQ ID NO: 6090
  source 1..289: mol_type = other DNA

SEQ ID NO: 6092 - DNA, 289 bp, Homo sapiens
  source 1..289: mol_type = other DNA
cgcagcgtctggattcaccttcaacaactatggcatgcactgggtccgccaggctccaggcaaggggccggagtgggtggcagttgtctggtttgatggaactaaaaaatactatgcagactccgtgaagggccgattcatcatctccagagacagttccgagaacacgctctatctggtaatgaacagcctgagagtcgaggacacggctgtgtactactgtgcgaggggggggggtacggtgaccactgactactggggccacggaaccctggtcaccgtctcctca

SEQ ID NO: 6093 - DNA, 289 bp, Homo sapiens
  source 1..289: mol_type = other DNA
cgcagcgtctggattcaccttcaacaactatggcatgcactgggtccgccaggctccaggcaaggggccggagtgggtggcagttgtctggtttgatggaactaaaaaatactatgcagactccgtgaagggccgattcatcatctccagagacagttccgagaacacgctctatctggtaatgaacagcctgagagtcgaggacacggctgtgtactactgtgcgcggggggggggtacggtgaccactgactactggggccacggaaccctggtcaccgtctcctca

SEQ ID NO: 6094 - DNA, 289 bp, Homo sapiens
  source 1..289: mol_type = other DNA
cgcagcgtctggattcaccttaaacaactatggcatgcactgggtccgccaggctccaggcaaggggccggagtgggtggcagttgtctggtttgatggaactaaaaaatactatgcagactccgtgaagggccgattcatcatctccagagacagttccgagaacacgctctatctggtaatgaacagcctgagagtcgaggacacggctgtgtactactgtgcgaggggggggggtacggtgaccactgactactggggccacggaaccctggtcaccgtctcctca

SEQ ID NO: 6095 - DNA, 289 bp, Homo sapiens
  source 1..289: mol_type = other DNA
cgcagcgtctggattcaccttcaacaactatggcatgcactgggtccgccaggctccaggcaaggggccggagtgggtggcagttgtctggtttgatggaactaaaaaatactatgcagactccgtgaagggccgattcatcatctcccgagacagttccgagaacacgctctatctggtaatgaacagcctgagagtcgaggacacggctgtgtactactgtgcgcggggggggggtacggtgaccactgactactggggccacggaaccctggtcaccgtctcctca

SEQ ID NO: 6096 - DNA, 289 bp, Homo sapiens
  source 1..289: mol_type = other DNA
tgcagcgtctggattcaccttcactaactatggcatgcactgggtccgccaggctccaggcaaggggctggagtgggtggcagttatatggtatgatggaagtaataaatactatgcagactccgtgaagagccgattcaccatttccagagacaattccaagaacacgttgtatctgcaaatgaacagcctgagagccgaggacacggctgtatattactgtgcgagaggagggggtacggtgactacggactactggggccagggaaccctggtcaccgtctcctca

SEQ ID NO: 6097 - DNA, 289 bp, Homo sapiens
  source 1..289: mol_type = other DNA
tgcagcgtctggattcaccttcagtaattatggcatgcactgggtccgccaggctccaggcaaggggctggagtggttggcagttgtatggtatgacggaagtaataaatactatgcagactccgtgaagggccggttcaccatctccagagacagttccaagaacacgctgaatctgcaaatgaacagcctgagagtcgaagacacggctgtgtattactgtgcgagaggggggggaacggtgactaccgactactggggccagggaaccctggtcaccgtctcctca

SEQ ID NO: 6098 - DNA, 298 bp, Homo sapiens
  source 1..298: mol_type = other DNA
tgcagcctctggattcacctttagcagctatgccatgagctgggtccgccaggctccagggaaggggctggagtgggtctcagctattagtggtagtggtgatagcacatactacgcagactccgtgaagggccggttcaccatctccagagacaattccaagaacacgttgtatctgcaaataaacagcctgagagccgaggacacggccgtatattactgtgcgaaagagagatggctcggggagttattatctattgactactggggccagggaaccctggtcaccgtctcctca

SEQ ID NO: 6099 - DNA, 298 bp, Homo sapiens
  source 1..298: mol_type = other DNA
tgcagcctctggattcacctttagcagccatgccatgagctgggtccgccaggctccagggaaggggctggagtgggtctcagctattagtggtagtggtgatagcacatactacgcagactccgtgaagggccggttcaccatctccagagacaattccaagaacacgttgtatctgcaaataaacagcctgagagccgaggacacggccgtatattactgtgcgaaagagcgatggctcggggagttattatctattgactactggggccagggaaccctggtcaccgtctcctca

SEQ ID NO: 6100 - DNA, 276 bp, Homo sapiens
  source 1..276: mol_type = other DNA
gcctctggttacacctttaccaactatggtgtcacctgggtgcgacaggcccctggacaagggcttgagtggatgggatggatcagcccttacaatggtaacacaaactatgcacagaagttccagggcagagtcaccttgaccacagacacatccacgaccacagcctacatggagctgaggagcctgagatctgacgacacggccgtgtattactgtgcgagagatcgacaacagggctactggggccagggaaccctggtcaccgtctcctca

SEQ ID NO: 6101 - DNA, 276 bp, Homo sapiens
  source 1..276: mol_type = other DNA
gcttctggttacacctttaccaactatggtgtcacctgggtgcgacaggcccctggacaagggcttgagtggatgggatggatcagcccttacaatggtaacacaaactatgcacagaagttccagggcagagtcaccttgaccacagacacatccacgaccacagcctacatggagctgaggagcctgagatctgacgacacggccgtgtattactgtgcgagagatcgacaacagggctactggggccagggaaccctggtcaccgtctcctca

SEQ ID NO: 6102 - DNA, 276 bp, Homo sapiens
  source 1..276: mol_type = other DNA
gcctctggttacacctttaccaactatggtgtcacctgggtgcgacaggcccctggacaagggcttgagtggatgggatggatcagcccttacaatggtaacacaaactatgcacagaagttccagggcagagtcaccttgaccacagacacatccacgaccacagcctacatggagctgaggagcctgagatctgacgacacggccgtgtattactgtgcgagagatcgacaacagggctactggggccagggaaccctggtcacgatctcctca

SEQ ID NO: 6103 - DNA, 276 bp, Homo sapiens
  source 1..276: mol_type = other DNA
gcctctggttacacctttaccaactatggtgtcacctgggtgcgacaggcccctggacaagggcttgagtggatgggatggatcagcccttacaatggtaacacaaactatgcacagaagttccagggcagagtcaccttgaccacagacacatccacgtccacagcctacatggagctgaggagcctgagatctgacgacacggccgtgtattactgtgcgagagatcgacaacagggctactggggccagggaaccctggtcaccgtctcctca

SEQ ID NO: 6104 - DNA, 276 bp, Homo sapiens
  source 1..276: mol_type = other DNA
gcctctggttacacctttaccaactatggtgtcacctgggtgcgacaggcccctggacaagggcttgagtggatgggatggatcagcccttacaacggtaacacaaactatgcacagaagttccagggcagagtcaccttgaccacagacacatccacgaccacagcctacatggagctgaggagcctgagatctgacgacacggccgtgtattactgtgcgagagatcgacaacagggctactggggccagggaaccctggtcaccgtctcctca

SEQ ID NO: 6105 - DNA, 276 bp, Homo sapiens
  source 1..276: mol_type = other DNA
gcctctggttacacctttaccaactatggtgtcacctgggtgcgacaggcccctggacaagggcttgagtggatgggatggatcagcccttacaatggtaacacaaactatgcacagaagttccagggcagagtcaccttgaccacagacacatccacgaccacagcctacatggagctgaggagcctgagatctgacgacacggccgtgtattactgtgcgagggatcgacaacagggctactggggccagggaaccctggtcaccgtctcctca

SEQ ID NO: 6106 - DNA, 276 bp, Homo sapiens
  source 1..276: mol_type = other DNA
gcctctggttacacctttaccaactatggtgtcacctgggtgcgacaggcccctggacaagggcttgagtggatgggatggatcagcccttacaatggtaacacaaactatgcacagaagttccagggcagagtcaccttgaccacagacacatccacgaccacagcctacatggagctgaggggcctgagatctgacgacacggccgtgtattactgtgcgagagatcgacaacagggctactggggccagggaaccctggtcaccgtctcctca

SEQ ID NO: 6107 - DNA, 276 bp, Homo sapiens
  source 1..276: mol_type = other DNA
gcttctggctacaccttcaccaattatggcatcagctgggtgcgacaggcccctggacaagggcttgagtggatgggatggatcagcacttacaatggcaacacaaactatgcacagaagctccagggcagagtcaccatgaccacagacacaaccacgagcacagcctacatggagctgagcagcctgacatctgacgacacggccgtgtattactgtgcgagagatcggcagcagggctactggggccagggaaccctggtcaccgtctcctca

SEQ ID NO: 6108 - DNA, 276 bp, Homo sapiens
  source 1..276: mol_type = other DNA
gcttctggctacaccttcaccaattatggcgtcagctgggtgcgacaggcccctggacaagggcttgagtggatgggatggatcagtacgaacaatggcaacacaaactatgcacagaacctccagggcagagtcacgatgaccacagacacaagcacgagcacagcctacatggagctgagcagcctgacatctgacgacacggccatctattactgtgcgagagatcggcagcagggctactggggccagggaaccctggtcaccgtctcctca

SEQ ID NO: 6109 - DNA, 276 bp, Homo sapiens
  source 1..276: mol_type = other DNA
gcttctggctacaccttcaccaattatggcgtcagctgggtgcgacaggcccctggacaagggcttgagtggatgggatggatcagtaccaacaatggcaacacaaactatgcacagaacctccagggcagagtcacgatgaccacagacacaagcacgagcacagcctacatggagctgagcagcctgacatctgacgacacggccatctattactgtgcgagagatcgtcagcagggctactggggccagggaaccctggtcaccgtctcctca

SEQ ID NO: 6110 - DNA, 276 bp, Homo sapiens
  source 1..276: mol_type = other DNA
gcttctggctacaccttcaccaattatggcatcagctgggtgcgacaggcccctggacaagggcttgagtggatgggatggatcagcacttacaatggcaacacaaactatgcacagaagctccagggcagagtcaccatgaccacagacacaaccacgagcacagcctacatggagctgaccagcctcacatctgacgacacggccgtgtattactgtgcgagagatcgtcagcagggctactggggccagggaaccccggtcaccgtctcctct

SEQ ID NO: 6111 - DNA, 276 bp, Homo sapiens
  source 1..276: mol_type = other DNA
gcttctggctacaccttcaccaattatggcatcagctgggtgcgacaggcccctggacaagggcttgagtggatgggatggatcagtacgtacaatggcaacacaaactatgcacacaacctccagggcagagtcaccatgaccacagacacaagcacgagcacagcctacatggagctgagcagcctgacatctgacgacacggccatttattactgtgcgagagatcggcagcagggctactggggccagggaaccctggtcaccgtctcctca

SEQ ID NO: 6112 - DNA, 276 bp, Homo sapiens
  source 1..276: mol_type = other DNA
gcttctggctacaccttcaccaattatggcatcagctgggtgcggcaggcccctggacaagggcttgagtggatgggatggatcagtacgtccaatggcaacacatactatgcacagaaactccagggtagactcaccatgaccacagacacaaccacgagcacagcctacatggagctgagcagcctgacatctgacgacacggccatttattactgtgcgagagatcggcagcagggctactggggccagggagccctggtcaccgtctcctca

SEQ ID NO: 6113 - DNA, 276 bp, Homo sapiens
  source 1..276: mol_type = other DNA
gcttctggctacaccttcaccaattatggcatcagctgggtgcgacaggcccctggacaagggcttgagtggatgggatggatcagcacttacaatggcaacacaaactatgcacagaagctccagggcagagtcaccatgaccacagacacaaccacgagcaccgcctacatggagctgagaaccctgacatctgacgacacggccgtgtattactgtgcgagagatcggcagcagggctactggggccagggaaccctggtcaccgtctcctca

SEQ ID NO: 6114 - DNA, 276 bp, Homo sapiens
  source 1..276: mol_type = other DNA
gcctctggctacaccttcaccaattatggcgtcagctgggtgcgacaggcccctggacaagggcttgagtggatgggatggatcagtacgtacaatggcaacacaaactatgcacagaacctccagggcagagtcacaatgaccacagacacaagcacgagcacagcctacatggagctgaccagcctgacatctgacgacacggccatttattactgtgcgagagatcggcagcagggctactggggccagggaaccctggtcaccgtctcctca

SEQ ID NO: 6115 - DNA, 276 bp, Homo sapiens
  source 1..276: mol_type = other DNA
gcttctggctacaccttcaccaactatggcatcagctgggtgcgacaggcccctggacaagggcttgagtggatgggatggatcagcacttacaatggcaacacaaactatgcacagaagctccagggcagagtcaccatgaccacagacacaaccacgagcacagcctacatggagctgagcagcctgacatctgacgacacggccgtgtattactgtgcgagagatcggcagcagggctactggggccagggaaccctggtcaccgtctcctca

SEQ ID NO: 6116 - DNA, 276 bp, Homo sapiens
  source 1..276: mol_type = other DNA
gcctctggttacacctttaccaactatggtgtcacctgggtgcgacaggcccctggacaagggcttgagtggatgggatggatcagcccttacaatggtaacacaaactatgcacagaagttccagggcagagtcaccttgaccacagacacatccacgaccacaacctacatggagctgaggagcctgagatctgacgacacggccgtgtattactgtgcgagagatcgacaacagggctactggggccagggaaccctggtcaccgtctcctca

SEQ ID NO: 6117 - DNA, 292 bp, Homo sapiens
  source 1..292: mol_type = other DNA
tgcagcctctggattcacctttagtagcaattggatgagttgggtccgccaggctccagggaaggggctggagtgggtggccaacataaagaacgatggaagtgagggatactacgcggactcagtgaagggccggttcaccatctccagagacaatgctaagaactcactgtatcttcaaatgaacagcctgagagccgaagacacggcgctgtattactgtgcgagagatgtgggggacagggcggggttcgacccctggggccagggaaccctggtcaccgtctcttca

SEQ ID NO: 6118 - DNA, 292 bp, Homo sapiens; identical to SEQ ID NO: 6117
  source 1..292: mol_type = other DNA

SEQ ID NO: 6119 - DNA, 292 bp, Homo sapiens
  source 1..292: mol_type = other DNA
tgcagcctctggattcacctttagtagcaattggatgagttgggtccgccaggctccagggaaagggctggagtgggtggccaacataaagaacgatggaagtgagggatactacgcggactcagtgaagggccggttcaccatctccagagacaatgctaagaactcactgtatcttcaaatgaacagcctgagagccgaagacacggcgctgtattactgtgcgagagatgtgggggacagggcggggttcgacccctggggccagggaaccctggtcaccgtctcttca

SEQ ID NO: 6120 - DNA, 292 bp, Homo sapiens
  source 1..292: mol_type = other DNA
tgtagcctctggattcacctttagtagcaattggatgagttgggtccgccaggctccagggaaggggctggagtgggtggccaacataaagaacgatggaagtgagggatactacgcggactcagtgaagggccggttcaccatctccagagacaatgctaagaactcactgtatcttcaaatgaacagcctgagagccgaagacacggcgctgtattactgtgcgagagatgtgggggacagggcggggttcgacccctggggccagggaaccctggtcaccgtctcttca

SEQ ID NO: 6121 - DNA, 292 bp, Homo sapiens
  source 1..292: mol_type = other DNA
tgcagcctctggattcacccttagtagcaattggatgagttgggtccgccaggctccagggaaggggctggagtgggtggccaacataaagaacgatggaagtgagggatactacgcggactcagtgaagggccggttcaccatctccagagacaatgctaagaactcactgtatcttcaaatgaacagcctgagagccgaagacacggcgctgtattactgtgcgagagatgtgggggacagggcggggttcgacccctggggccagggaaccctggtcaccgtctcttca

SEQ ID NO: 6122 - DNA, 292 bp, Homo sapiens
  source 1..292: mol_type = other DNA
tgcagcctctggattcacctttagtagcaattggatgagttgggtccgccaggctccagggaaggggctggagtgggtggccaacataaagaacgatggaagtgagggatactacgcggactcagtgaagggccggttcaccatctccagagaaaatgctaagaactcactgtatcttcaaatgaacagcctgagagccgaagacacggcgctgtattactgtgcgagagatgtgggggacagggcggggttcgacccctggggccagggaaccctggtcaccgtctcttca

SEQ ID NO: 6123 - DNA, 290 bp, Homo sapiens
  source 1..290: mol_type = other DNA
cagcctctggattcacctttagtagcaattggatgagttgggtccgccaggctccagggaaggggctggagtgggtggccaacataaagaacgatggaagtgagggatactacgcggactcagtgaagggccggttcaccatctccagagacaatgctaagaactcactgtatcttcaaatgaacagcctgagagccgaagacacggcgctgtattactgtgcgagagatgtgggggacagggcggggttcgacccctggggccagggaaccctggtcaccgtctcttca

SEQ ID NO: 6124 - DNA, 277 bp, Homo sapiens
  source 1..277: mol_type = other DNA
tgaagcctctggattcaccttcagaaccattaggatgaactgggtccgccaggctccagggaagggactggagtgggtttcagacattgatggtattagtagtgtcaaacagtacgcagactctgtgaagggccgattcaccatctccagagacaacgccaagaaattactgtatctgcaaatgaacagcctgagagccgaggacacggctgtgtattactgtacgaggggggagtacggcgtctggggccaagggacagtggtcaccgtctcttca

SEQ ID NO: 6125 - DNA, 277 bp, Homo sapiens
  source 1..277: mol_type = other DNA
tgcagcctctggattcaccatcagcgcctttaggatgaactgggtccgccaggctccagggagggggctggaggtggtttcagagattaatggtgatggtaaaatcataaactacgcagactctgtgcggggccgattctccgtctccagagacaacgccaaggactcactgtttctgcaaatggacagcctaagagtcgaagacacggctatatactactgtacgaggggggaatacggcgtctggggccgagggacaatggtcaccgtctcttca

SEQ ID NO: 6126 - DNA, 277 bp, Homo sapiens
  source 1..277: mol_type = other DNA
tgcagcctctggattcaccttcagtctcttcaggatgaactgggtccgccaggctccagggaagggcctggagtgggtttcagacattggtgctaatcctagtatgataaactatgcagactctgtgcagggccgattcaccatctccagagacaacggcaagagctcactgtatttgcaaatgaacagcctgagagtcgaggacacggctatatattattgtacgaggggggaatacggcgtctggggccaaggggcaatggtcaccgtgtcttca

SEQ ID NO: 6127 - DNA, 277 bp, Homo sapiens
  source 1..277: mol_type = other DNA
tgcaacctctggattcaccttcagtgcctttagaattaactggatccgccaggctccagggagggggccggaagtggtttcagagactagtagtaacggtaaaagcacggaatatggagactctgtgcggggccgattcaccgtctccagagacaacgccaaggggtcgctgtttctacaaatggagagcctgagaggcgaagacacggctatgtactactgtacgaggggggagtacggcgtctggggccgggggacaatggtcatcgtctcctca

SEQ ID NO: 6128 - DNA, 277 bp, Homo sapiens
  source 1..277: mol_type = other DNA
tgtagcctctggattcaccttcacttacattaggatgaactgggtccgccaggctccagggaaggggctggagtgggtttcagagattagtggtagtagtactgtcaaacattacgcagactctgtgaggggccgatttaccatctccagagacaacgccaggaattcactgtttcttcaaatggacagcctgagagccgaggacacggctgtatattactgtacgaggggggaatatggcgtctggggccaagggacagtggtcaccgtctcttca

SEQ ID NO: 6129 - DNA, 277 bp, Homo sapiens
  source 1..277: mol_type = other DNA
tgcagcctctggattcaccttcagtaccattaggatgaactgggtccgccaggctccagggaaggggctggagtgggtttcagagattagtggtagtagtactgtcaaacactacgcagactctgtgaggggccgatttaccatctccagagacaacgccaggaactcactgtatcttcaaatggacagcctgagagccgaggacacggctgtatattactgtacgaggggggaatatggcgtctggggccaagggacagtggtcaccgtctcttca

SEQ ID NO: 6130 - DNA, 277 bp, Homo sapiens
  source 1..277: mol_type = other DNA
tgcagcctctggaatcaccatcagtggctttaggatgacctgggtccgccaggctccagggaggggactggaggtgatttcagaaattaataatgatggaaaaacgataaactacgcggactctgtgcggggccgattcaccgtctccagagacaacgccaaggactcaacgtggctgcaaatggagagtctgagagccgaagacacggctgtgtattactgtacgaggggggagtacggcgtctggggccaggggacaatggtcaccgtctcttca

SEQ ID NO: 6131 - DNA, 277 bp, Homo sapiens
  source 1..277: mol_type = other DNA
tgcagcctctggattcaccatcagtgcctttaggattaactgggtccgccaggctccagggagggggccggaagtggtttcagagactactagaaacggtgaaactacagactacggagactctgtgcggggccgattcaccgtctccagagacaacgccaaggagtcactgtatctacaaatggagagcctgagaggcgaagacacggctatgtactactgtacgaggggggagtacggcgtctggggccgggggacactggtcaccgtctcttca

SEQ ID NO: 6132 - DNA, 277 bp, Homo sapiens
  source 1..277: mol_type = other DNA
tgcagcctctggaatcaccataagtgcctctaggatgaactgggtccgccaggctccagggaggggactggaggtggtttcagagattaacaataacggtaaaaccgtaaactacgcagactctgtgcggggccgattcatcgtctccagagacaatgccaagggctcactgtatctacaaatggagagcctgagagtcgaagacacggctgtgtactactgtacgaggggggaatacggcgtctggggccaggggacaatggtcaccgtctcttca

SEQ ID NO: 6133 - DNA, 277 bp, Homo sapiens
  source 1..277: mol_type = other DNA
tgtagggtctggattcagaatcagtatccataggatgaattgggtccgccaggctccagggaaggggctggagtggatttcagacattagtgggaatagtgatgtgaaacgctacgcagactctgtaatgggccgattcaccatctccagagacaacgccaggaactcactgtatctgcaaatgaacagcctgagagtcgatgacacggctacatatttctgtacaaggggggagtacggcgtctggggcaaagggacaatggtcaccgtctcttcg

SEQ ID NO: 6134 - DNA, 277 bp, Homo sapiens
  source 1..277: mol_type = other DNA
tgcagcctctggattcaccatcagtgcctttaggattacttggatccgccaggctccagggagggggccggaagtggtttcagagactaataataatggtaaaaccacagactacggagactctgtgcggggccgattcaccgtctccagagacaacgccaaggagtcactgtatctacaaatggagagcctgagaggcgaagacacggctatgtactactgtacgaggggggagtacggcgtctggggccgggggacaatggtcaccgtctcttca

SEQ ID NO: 6135 - DNA, 277 bp, Homo sapiens
  source 1..277: mol_type = other DNA
tgcagcctctggattcaccatgagtgcctttaggatcaactgggtccgccaggctccagggagggggccggaagtggtttcagagactagtagagacggtaaaatcacatactacggagactctgtgcggggccgattcaccgtctccagagacattgccaaggagtcactgtatctacaaattgagagcctgagaggcgaagacacggctatgtactactgtacgaggggggagtacggcgtctggggccgggggacaatggtcaccgtctcttca

SEQ ID NO: 6136 - DNA, 277 bp, Homo sapiens
  source 1..277: mol_type = other DNA
tgcagcctctggattcacgttcagtacctctaggatgaactgggtccgccagactccagggaaggggctggagtcggtttcagagattagtggtagtagtactgacaaacaatacgcagactctgtgaggggccgatttaccatctccagagacaacgccaggaattcactgtatcttcaaatggacagcctgagagtcgaagacacggctatatattactgtacgaggggggaatatggcgtctggggccaagggacagtggtcaccgtctcttca

SEQ ID NO: 6137 - DNA, 277 bp, Homo sapiens
  source 1..277: mol_type = other DNA
tgcagcctctggattcaccttcagtctcttcaggatgaactgggtccgccaggctccagggaagggcctggagtggatttcagacattggtgctaatcctagtatgattaactatgcagactctgtgcagggccgattcaccatctccagagacaacggcaagagctcactgtatttgcaaatgaacagcctgagagtcgaggacacggctatatattattgtacgaggggggaatacggcgtctggggccaaggggcaatggtcaccgtgtcttca

SEQ ID NO: 6138 - DNA, 277 bp, Homo sapiens
  source 1..277: mol_type = other DNA
tgcagcctctggattcaccttcagtgcctttaggattaactgggtccgccaggctccagggagggggccggaagtggtttcagagactagtggtaacggtaaaaccacagactacggagactctgtgcggggccgattcatcgtctccagagacaacgccaaggagtcactatatctacaaatggagagcctgagaggcgaagacacggctatgtactactgtacgaggggggagtacggcgtctggggccgggggacaatggtcatcgtctcttca

SEQ ID NO: 6139 - DNA, 277 bp, Homo sapiens; identical to SEQ ID NO: 6124
  source 1..277: mol_type = other DNA

SEQ ID NO: 6140 - DNA, 277 bp, Homo sapiens
  source 1..277: mol_type = other DNA
tgtagcctctggattcagcatcagtgcctttagaatgaactgggtccgccaggctccagggagggggccggaggtggtttcagagactagtggtaatggtaaaaccacaaactacggagactctgtgcggggccgattcaccgtctccagagacaacgccaaggagtcactgtatctacaaatggagagcctgagaggcgaagacacggctatgtactactgtacgaggggggagtacggcgtctggggccaggggacaatggtcaccgtctcttca

SEQ ID NO: 6141 - DNA, 277 bp, Homo sapiens; identical to SEQ ID NO: 6136
  source 1..277: mol_type = other DNA

SEQ ID NO: 6142 - DNA, 277 bp, Homo sapiens
  source 1..277: mol_type = other DNA
tgcagcctctggattcaccatgagtgcctttagaattaactgggtccgccaggctccagggagggggccggaagtgatttcagagactagtggtaatggtaaaaccacagactacggagactctgtgcggggccgattcaccgtctccagagacaacgccaaggagtcactgtatctacaaatggagagcctgagaggcgaagacacggctatatactactgcacgaggggggagtacggcgtctggggccgggggacaatggtcatcgtctcttca

SEQ ID NO: 6143 - DNA, 277 bp, Homo sapiens
  source 1..277: mol_type = other DNA
tgtagcctctggattcaccatcagtgcctttagaattaactgggtccgccaggctccggggagggggccggaggtggtttcagagactagtggtaacggtaaaaccacagactacggagactctgtgcggggccgattcaccgtctccagagacaacgccaaggagtcactgtatctacaaatggagagcctgacaggcgaagacacggctatgtactactgtacgaggggggaatacggcgtctggggccgggggacaatggtcaccgtctcttca

SEQ ID NO: 6144 - DNA, 277 bp, Homo sapiens
  source 1..277: mol_type = other DNA
tgcagcctctggattcaccttcagtgcctttaggattaactggatccgccaggctccagggagggggccggaagtggtttcagagactagtagtaacggtaaaagcacagaatacggagactctgtgcggggccgattcaccgtctccagagacaacgccaaggggtcactgtttctacaaatggagagcctgagaggcgaagacacggctatgtactactgtacgaggggggagtacggcgtctggggccgggggacaatggtcatcgtctcttca

SEQ ID NO: 6145 - DNA, 277 bp, Homo sapiens
  source 1..277: mol_type = other DNA
tgcagcctctggattcagcttcagtgcctataggattagctgggtccgccaggctccagggagggggccggaagtgatttcagagaccagtggtaacggcaaaatcacagactacggagactctgcgcggggccgattcatcgtctccagagacaacgccaaggagtcattgtatctacaaatggagagcctgagaggcgaagacacggctatgtactactgtacgaggggggagtacggcgtctggggccgggggacaatggtcaccgtctcttca

SEQ ID NO: 6146 - DNA, 277 bp, Homo sapiens
  source 1..277: mol_type = other DNA
tgcagcctctggagtcaccatcagtggctttaggatgagctgggtccgccaggctccagggaggggactggaggtgatttcagagattaacaataacggcaaaaccgtgaattacgcagactctgtgcggggccggttcaccgtctccagagacaacgccaaggactcactatatctacaaatggagaggctgagagccgaagacacggctgtgtattactgtacgaggggggagtacggcgtctggggccaggggacaatggtcaccgtctcttca

SEQ ID NO: 6147 - DNA, 277 bp, Homo sapiens
  source 1..277: mol_type = other DNA
tgcaacctctggattcaccttcagtgcctttagaattaactggatccgccaggctccagggagggggccggaagtaatttcagagactagtagtaacggtaaaagcacggaatatggagactctgtgcggggccgattcaccgtctccagagacaacgccaaggggtcgctgtttctacaaatggagagcctgagaggcgaagacacggctatgtactactgtacgaggggggagtacggcgtctggggccgggggacaatggtcatcgtctcctca

SEQ ID NO: 6148 - DNA, 277 bp, Homo sapiens
  source 1..277: mol_type = other DNA
tgcagcctctggattcaccttcagtgccattaggatgaactgggtccgccaggctccagggaaggggctggagtgggtttcagagattagtggtagtagtactgtcaaacactacgcagactctgtgaggggccgatttaccatctccagagacaacgccaggaactcactgtatcttcaaatggacagcctgagagtcgaggacacggctgtatattattgtacgaggggggaatatggcgtctggggccaagggacagtggtcaccgtctcttca

SEQ ID NO: 6149 - DNA, 277 bp, Homo sapiens
  source 1..277: mol_type = other DNA
tgcagcctctggattcaccatcagtgcctttaggattacctggatccgccaggctccagggagggggccggaagtggtttcagagactaataataatggtaagaccacagactacggagactctgtgcggggccgattcaccgtctccagagacaaagccaaggagtcactgtatctacaaatggagagcctgagaggcgaagacacggctatgtactactgtacgaggggggagtacggcgtctggggccgggggacaatggtcaccgtctcttca

SEQ ID NO: 6150 - DNA, 277 bp, Homo sapiens
  source 1..277: mol_type = other DNA
tgcagcctctggattcaccttcagtgcctttaggattaactggatccgccaggctccagggagggggccggaagtggtttcagagaccagtagtaacggtaaaaccacagactacggagactctgtgcggggccgattcaccgtctccagagacaacgccaaggagtcactatatctacaaatggagagcctgagaggcgaagacacggctatgtactactgtacgaggggggagtatggcgtctggggccgggggacaatggtcaccgtctcttca

SEQ ID NO: 6151 - DNA, 277 bp, Homo sapiens
  source 1..277: mol_type = other DNA
tgtagggtctggattcagaatcagtatccataggatgaactgggtccgccaggctccagggaaggggctggagtgggtttcagacattagtgggaagagcgatgtgaaacgctacgcagactctgtaatgggccgattcaccatctccagagacaacgccaggaactcactgtatctgcaaatgaacagcctgagagccgatgacacggctatatatttctgtacaaggggggagtacggcgtctggggccaagggacaatggtcaccgtctcttcg

SEQ ID NO: 6152 - DNA, 277 bp, Homo sapiens
  source 1..277: mol_type = other DNA
tgtagggtctggattcagaatcagtatccataggatgaattgggtccgccaggctccagggaaggggctggagtggatttcagacattagtgggaatagtgatgtgaaacgctacgcagactctgtaatgggccgattcaccatctccagagacaacgccaggaactcactatatctgcaaatgaacagcctgagagtcgatgacacggctacatatttctgtacaaggggggagtacggcgtctggggcaaagggacaatggtcaccgtctcttcg

SEQ ID NO: 6153 - DNA, 277 bp, Homo sapiens
  source 1..277: mol_type = other DNA
tgcaacctctggattcaccatcagtgcctttaggattaactgggtccgccaggctccagggagggggccggaagtggtttcagagactagtggtaacggtaaaaccacagactacggagactctgtgcggggccgattcaccgtctccagagacaacgccaaggggtcactgtatctacaaatggagagcctgagaggcgaagacacggctatgtactactgtacgaggggggagtacggcgtctggggccgggggacaatggtcaccgtctcttca

SEQ ID NO: 6154 - DNA, 277 bp, Homo sapiens
  source 1..277: mol_type = other DNA
tgcagcctctggagtcaccatcagtggctttaggatgaactgggtccgccaggctccagggaggggactggaggtgatttcagagattaacaataacggcaaaaccgtgaattacgcagactctgtgcggggccggttcaccgtctccagagacaacgccaaggactcactgtatctacaaatggagaggctgagagccgaagacacggctgtgtattactgtacgaggggggagtacggcgtctggggccaggggacaatggtcaccgtctcttca

SEQ ID NO: 6155 - DNA, 277 bp, Homo sapiens
  source 1..277: mol_type = other DNA
tgcagcctctggcttcatcttcagtaccattagaatgaactgggtccgccaggctccggggaaggggctggagtgggtttcagacattagtggtagtagtactgtcaaacactacgcagactctgtgaggggccgatttaccatctccagagacaacgccaggaactcactgtatcttcaaatggacagcctgagagccgaggacacggctgtatattactgtacgaggggggagtatggcgtctggggccaagggacaatggtcaccgtctcttca

SEQ ID NO: 6156 - DNA, 277 bp, Homo sapiens
  source 1..277: mol_type = other DNA
tgcaacctctggattcaccatcagtgcctttaggattaactggatccgccaggctccagggagggggccggaagtggtttcagagactagtagtaacggtaaaaccacagactacggagactctgtgcggggccgattcaccgtctccagaaacaacgccaaggggtctctgtatctacaaatggagagcctgagaggcgaagacacggctatgtactactgtacgaggggggagtacggcgtctggggccgggggacaatggtcatcgtctcttca

SEQ ID NO: 6157 - DNA, 277 bp, Homo sapiens
  source 1..277: mol_type = other DNA
tgcagcctctggattcatttttagttcttatactatgagttgggtccgccaggctccagggaagggactggagtttgttgcattcattggtggtgctggcaggaccaaatactacgcggactctgtgaagggccgattcaccgtctccagagacaacgccaagaactcactgtatctccaaatgaacagcctgagcgccgaagacacggctgtttattattgtacgaggggggagtatggtgtctggggccaaggaacaatggtcaccgtctcttca

SEQ ID NO: 6158 - DNA, 277 bp, Homo sapiens
  source 1..277: mol_type = other DNA
tgcagcctctggattcaccatcagtgcctttaggattaactgggtccgccaggctccagggagggggccggaagtggtctcagagactagtagaaacggtaaaaccacagactacggagactctgtgcggggccgattcaccgtctccagagacaacgccaaggagtcactgtatctacaaatggagagcctgagaggcgaagacacggctatgtactactgtacgaggggggagtacggcgtctggggccgggggacaatggtcaccgtctcttca

SEQ ID NO: 6159 - DNA, 277 bp, Homo sapiens; identical to SEQ ID NO: 6130
  source 1..277: mol_type = other DNA

SEQ ID NO: 6160 - DNA, 277 bp, Homo sapiens
  source 1..277: mol_type = other DNA
tgcaacctctggattcaccatcagtgcctttaggattaactggatccgccaggctccagggagggggccggaagtggtttcagagactagtagtaacggtaaaaccacagactacggagactctgtgcggggccgattcaccgtctccagagacaacgccaaggggtctctgtatctacaaatggagagcctgagaggcgaagacacggctatgtactactgtacgaggggggagtacggcgtctggggccgggggacaatggtcatcgtctcttca

SEQ ID NO: 6161 - DNA, 277 bp, Homo sapiens
  source 1..277: mol_type = other DNA
tgcagcctctggattcaccatcagcgcctttaggatgaactgggtccgccaggctccagggagggggctggaggtggtttcagagattaatggtgatggtaaaatcataaactacgcagactctgtgcggggccgattctccgtttccagagacaacgccaaggactcactgtttctgcaaatggacagcctaagagtcgaagacacggctatatactactgtacgaggggggaatacggcgtctggggccgagggacaatggtcaccgtctcttca

SEQ ID NO: 6162 - DNA, 277 bp, Homo sapiens
  source 1..277: mol_type = other DNA
tgcagcctctggaatcaccatcagtggctttaggatgacctgggtccgccaggctccagggaggggactggaggtgatttcagaaattaataatgatggaaaaacgataaactacgcggactctgtgcggggccgattcaccgtctccagagacaacgccaaggactcaacgtggctgcaaatggagagtctgagagccgaagacacggctgtgtattactgtacgaggggggagtacggcgtctggggccagggggcaatggtcaccgtctcttca

SEQ ID NO: 6163 - DNA, 277 bp, Homo sapiens
  source 1..277: mol_type = other DNA
tgcagcctctggattcaccttcagtgcctttaggattacctggatccgccaggctccagggagggggccggaagtggtttcagagactagtagtaacggtaaaaccacagactacggagactctgtgcggggccgattcaccgtctccagagacaacgccaaggggtcactgtatctacagatggagagcctgagaggcgaagacacggctatgtactattgtacgaggggggagtacggcgtctggggccgggggacaatggtcatcgtctcttca

SEQ ID NO: 6164 - DNA, 277 bp, Homo sapiens
  source 1..277: mol_type = other DNA
tgcagcctctggattcacgttcagtacctctaggatgaactgggtccgccagactccagggaaggggctggagtcggtttcagagattagtggtagaagtactgacaaacaatacgcagactctgtgaggggccgatttaccatctccagagacaacgccaggaattcactgtatcttcaaatggacagcctgagagtcgaagacacggctatatattactgtacgaggggggaatatggcgtctggggccaagggacagtggtcaccgtctcttca

SEQ ID NO: 6165 - DNA, 277 bp, Homo sapiens
  source 1..277: mol_type = other DNA
tgcaacctctggattcaccttcagtgcctttagaattaactggatccgccaggctccagggagggggccggaagtggtttcagagactagtagtaacggtaaaagcacggaatatggagactctgtgcggggccgattcaccgtctctagagacaacgccaaggggtcgctgtttctacaaatggagagcctgagaggcgaagacacggctatgtactactgtacgaggggggagtacggcgtctggggccgggggacaatggtcatcgtctcctca

SEQ ID NO: 6166 - DNA, 277 bp, Homo sapiens
  source 1..277: mol_type = other DNA
tgcagcctctggattcaccatcagtgcctataggattaactgggtccgccaggctccagggagggggccggaagtggtttcagagactagtaggaacggtaaaagcacagactacggagactctgtgcggggccgattcatcgtctccacagacaacgccaaggagacactgtatctacaaatggagaacctgagaggcgaagacacggctatgtactactgtacgaggggggaatacggcgtctggggccgggggacaatggtcatcgtctcctca

SEQ ID NO: 6167 - DNA, 277 bp, Homo sapiens
  source 1..277: mol_type = other DNA
tgcagcctctggattcaccatcagtgcctttaggattaactggatccgccaggctccagggagggggccggaagtggtttcagagactagtagtaacggtaaaaccacagactacggagactctgtgcggggccgattcaccgtctccagagacaacgccaaggggtcactgtatctacaaatggagagcctgagaggcgaagacacggctatgtactactgtacgaggggggagtacggcgtctggggccgggggacaatggtcatcgtctcttca

SEQ ID NO: 6168 - DNA, 277 bp, Homo sapiens
  source 1..277: mol_type = other DNA
tgcaacctctggattcaccttcaggccctatacgatgaactgggtccgccaggctccagggaagggcctggagtgggtttcagatattagtggtagtggtactgtcatacactacgcagactctgtgaggggccgattcaccgtctccagagacagcgccaggaactcactatatctgcaaatgaacagcctgagtgccgaggacacggctgtctactactgtacgaggggggagtatggcgtctggggccaagggacaatggtcaccgtctcttca

SEQ ID NO: 6169 - DNA, 277 bp, Homo sapiens
  source 1..277: mol_type = other DNA
tgcagcctctggaatcaccatcagtggctttaggatgacctgggtccgccaggctccagggaggggactggaggtgatttcagaaattaataatgatggaaaaacgataaactacgcggactctgtgcggggccgattcaccgtctccagagacaacgccaaggactcaacgtggctgcaaatggagagtctgagagccgaggacacggctgtgtattactgtacgaggggggagtacggcgtctggggccagggggcaatggtcaccgtctcttca

SEQ ID NO: 6170 - DNA, 277 bp, Homo sapiens
  source 1..277: mol_type = other DNA
tgcagcctctggattcagcttcagtgcctataggattagctgggtccgccaggctccagggagggggccggaagtggtttcagagactagtggtaacggcaaaaccacagactacggagactctgtgcggggccgattcaccgtctccagagacaacgccaaggagtcactgtatctacaaatggagagcctgagaggcgaagacacggctatgtactactgtacgaggggggagtacggcgtctggggccgggggacaatggtcaccgtctcttca

SEQ ID NO: 6171 - DNA, 277 bp, Homo sapiens; identical to SEQ ID NO: 6125
  source 1..277: mol_type = other DNA

SEQ ID NO: 6172 - DNA, 277 bp, Homo sapiens
  source 1..277: mol_type = other DNA
tgcagcctctggattcagcttcaggactttcgcgatgaactgggtccgccaggctccagggaaggggctggagtggctttcagacattgatggtcgtggaagtgtcacacactacgcagactctgtgaagggccgattcaccatctccagagacaacgccaaaaacacattgtttctgcaattgagcagcctgagagacgaggacacggctgtttactactgtacgaggggggaatatggcgtctgggggcaggggacaatggtcaccgtctcttca

SEQ ID NO: 6173 - DNA, 277 bp, Homo sapiens
  source 1..277: mol_type = other DNA
tgtagggtctggattcagaatcagtatccataggatgaactgggtccgccaggctccagggaaggggctggagtgggtttcagacattagtgggaatagtgatgtgaaacgctacgcagactctgtaatgggccgattcaccatctccagagacaacgccaggaactcactgtatctgcaaatgaacagcctgagagccgatgacacggctatatatttctgtacaaggggggagtacggcgtctggggccaagggacaatggtcaccgtctcttcg

SEQ ID NO: 6174 - DNA, 277 bp, Homo sapiens; identical to SEQ ID NO: 6162
  source 1..277: mol_type = other DNA

SEQ ID NO: 6175 - DNA, 277 bp, Homo sapiens; identical to SEQ ID NO: 6127
  source 1..277: mol_type = other DNA

SEQ ID NO: 6176 - DNA, 277 bp, Homo sapiens
  source 1..277: mol_type = other DNA
tgaagcctctggattcaccttcagaaccattaggatgaactgggtccgccaggctccagggaagggactggagtgggtttcagacattgatggtattagtagtgtcaaacagtacgcagactctgtgaagggccgattcaccatctccagagacaacgccaagaaattactgtatctgcaaatgaacagcctgagagccgaggacacggctgcgtattactgtacgaggggggagtacggcgtctggggccaagggacagtggtcaccgtctcttca

SEQ ID NO: 6177 - DNA, 277 bp, Homo sapiens
  source 1..277: mol_type = other DNA
tgcagcctctggattcaccatcagtgcctttaggattaactgggtccgccaggctccagggagggggccggaagtggtctcagagactagtagaaacggtaaaaccacagactacggagactctgtgcggggccgattcaccgtctccagagacaacgccaaggagtcactgtatctacaaatggagagcctgagaggcgaagacacggctatgtactactgtacgaggggggagtacggcgtctggggccgggggacaatggtcaccgtctctcca

SEQ ID NO: 6178 - DNA, 277 bp, Homo sapiens
  source 1..277: mol_type = other DNA
tgcagcctctggattcaccatcagtgcctttaggattaactggatccgccaggctccagggagggggccggaagtggtttcagagactaatagtaatggtaaaaccacagcctacggagactctgtgcggggccgattcaccgtctccagagacaacgccaaggagtcactgtatctacaaatggagagcctgagaggcgaagacacggctatgtactactgtacgaggggggagtacggcgtctggggccgggggacaatggtcatcgtctcttca

SEQ ID NO: 6179 - DNA, 277 bp, Homo sapiens
  source 1..277: mol_type = other DNA
tgcagcctctggattcaccttcaggactttcgcgatgaactgggtccgccaggctccagggaaggggctggagtgggtttcagacattgatggacgtggaagtgtcacacactacgcagactctgtgaagggccgattcaccatctccagagacaacgccaggaatacactgtggctgcaattgagcagcctgagagacgaggacacggctgtttactactgtacgaggggggaatatggcgtctgggggcaggggacaatggtcaccgtctcttca

SEQ ID NO: 6180 - DNA, 277 bp, Homo sapiens
  source 1..277: mol_type = other DNA
tgcagcctctggattcacttttagtacctggaggatgaactgggtccgccaggctccagggaaggggctggagtccatttcagagattagtggtagtggtgctgtcaaacaatacgcagactctgtgaggggccgatttaccatctccagagacaacgccaggaattcactgtatcttcaaatggacagcctgagagtcgaggacacggctatatattactgtacgaggggggaatatggcgtctggggccaagggacagtggtcaccgtctcttca

SEQ ID NO: 6181 - DNA, 277 bp, Homo sapiens
  source 1..277: mol_type = other DNA
tgcaggctctggattcaccttcagtgcctataggattagttgggtccgccaggctccagggagggggccggaagtggtttcagagactagtggtaacggcaaaaccacagactacggagactctgtgcggggccgattcaccgtctccagagacaacgccaaggagtctctgtatctacaaatggagagcctgagaggcgaagacacggctatgtactactgtacgaggggggagtacggcgtctggggccgggggacaatggtcaccgtctcttca

SEQ ID NO: 6182 - DNA, 277 bp, Homo sapiens
  source 1..277: mol_type = other DNA
tgcagcctctggattcaccatcagtgcctttaggattaactgggtccgccaggctccagggagggggccggaagtggtttcagagactagtagaaacggtaaaaccacagactacggagactctgtgcggggccgattcaccgtctccagagacaacgccaaggagtcactgtatctacaaatggagagcctgagaggcgaagacacggctatgtactactgtacgaggggggagtacggcgtctggggccgggggacaatggtcaccgtctcttca

SEQ ID NO: 6183 - DNA, 277 bp, Homo sapiens
  source 1..277: mol_type = other DNA
tgcagcctctggattcaccatgagcgcctttaggcttaactggatccgccaggctccagggagggggccggaagtggtttcagagactagtggtaacggcaaaaccacagactacgcggactctgtgcggggccgattcaccgtctccagagacaacgccaaggagtcactatatctacaaatggagagcctgagaggcgaagacacggctatgtactactgtacgaggggggagtacggcgtctggggccgggggacaatggtcaccgtctcttca

SEQ ID NO: 6184 - DNA, 277 bp, Homo sapiens
  source 1..277: mol_type = other DNA
tgcagcctctggattcaccatcagtgcctttaggattaactgggtccgccaggctccagggagggggccggaagtggtttcagagactagtagtaacggtaaagccacatactacggagactctgtgcggggccgattcaccgtctccagagacaacgccaaggagtcactgtttctacaaatggagagcctgagaggcgaagacacggctatgtactactgtacgaggggggaatacggcgtctggggccgggggacaatggtcatcgtctcttca

SEQ ID NO: 6185 - DNA, 277 bp, Homo sapiens; identical to SEQ ID NO: 6129
  source 1..277: mol_type = other DNA

SEQ ID NO: 6186 - DNA, 277 bp, Homo sapiens
  source 1..277: mol_type = other DNA
tgcagcctctggaatcaccatcagtggctttaggatgacctgggtccgccaggctccagggaggggaccggagttgatttcagaaattaataatgatggaaaaacgataaactacgcggactctgtgcggggccgattcaccgtctccagagacaacggcaaggactcaacgtggctgcaaatggagagtctgagagccgaagacacggctgtgtattactgtacgaggggggagtacggcgtctggggccagggggcaatggtcaccgtctcttca

SEQ ID NO: 6187 - DNA, 277 bp, Homo sapiens
  source 1..277: mol_type = other DNA
tacagcctctggattcagcatcaatacctttaggatgaactgggtccgccaggctccagggggggggccggaggtggtctcagagactagtagtaatggtaaaaccacaaactacgtagactctgtgcggggccgattcaccgtctccagagacaacgccaaggagtcactgtatctacaaatggagagcctgagaggcgaagacacggctatgtacttctgtacgaggggggagtacggcgtctggggccgggggacaatggtcaccgtctcttca

SEQ ID NO: 6188 - DNA, 277 bp, Homo sapiens
  source 1..277: mol_type = other DNA
tgcagcctctggattcaccatcagtgcctttaggattaactgggtccgccaggctccagggagggggccggaagtggtttcagagactagtaggaacggtcaaaccacagactacggagactctgtgcggggccgattcaccgtctccagagacatccccaaggagtcactgtatctacaaatggagagcctgagaggcgaagacacggctatgtactactgtacgaggggggagtacggcgtctggggccgggggacaatggtcaccgtctcttca

SEQ ID NO: 6189 - DNA, 277 bp, Homo sapiens
  source 1..277: mol_type = other DNA
tgcagcctctggattcactttcagtatcattaggatgaactgggtccgccaggctccagggaaggggctggagtgggtttcagagattagtggtagtagtactgtcaaacactacgcagactctgtgaggggccgatttaccatctccagagacaacgccaggaactcactgtatcttcaaatggacagcctgagagccgaggacacggctatatattactgtacgaggggggaatatggcgtctggggccaagggacagtggtcaccgtctcttca

SEQ ID NO: 6190 - DNA, 277 bp, Homo sapiens
  source 1..277: mol_type = other DNA
tgcagcctctggaatcaccatcagtggctgtaggatgacctgggtccgccaggctccagggaggggactggaggtgatttcagaaattaataatgatggaaaaacgataaactacgcggactctgtgcggggccgattcaccgtctccagagacaacgccaaggactcaacgtggctgctaatggagagtctgagagccgaagacacggctgtgtattactgtacgaggggggagtacggcgtctggggccagggggcaatggtcaccgtctcttca

SEQ ID NO: 6191 - DNA, 277 bp, Homo sapiens
  source 1..277: mol_type = other DNA
tgcagcctctggaatcaccatcagaggctttaggatgacctgggtccgccaggctccagggaggggactggaggtgatttcagaaattaataatgatggaaaaacgataaactacgcggactctgtgcggggccgattcaccgtctccagagacaacgccaaggactcaacgtggctgcaaatggagagtctgagagccgaagacacggctgtgtattactgtacgaggggggagtacggcgtctggggccagggggcaatggtcaccgtctcttca

SEQ ID NO: 6192 - DNA, 277 bp, Homo sapiens
  source 1..277: mol_type = other DNA
tgcagcctctggattcaccttcagtaccattaggatgaactgggtccgccaggctccagggaaggggctggagtgggtttcagagattagtggtagtagtactgtcaaacactacgcagactctgtgaggggccgatttaccatctccagagataacgccaggaactcactgtatcttcaaatggacagcctgagagccgaggacacggctgtatattactgtacgaggggggaatatggcgtctggggccaagggacagtggtcaccgtctcttca

SEQ ID NO: 6193 - DNA, 277 bp, Homo sapiens
  source 1..277: mol_type = other DNA
tgtagggtctggattcagaatcaatatccataggatgaactgggtccgccaggctccagggaaggggctggagtgggtttcagacattagtgggagtagtgatgtgaaacactacgcagactctgtaatgggccgattcaccgtctccagagacaacgccaggaactcactgtatctacaaatgaacagcctgagagccgatgacacggctatatatttctgtacaaggggggagtacggcgtctggggccaagggacaatggtcaccgtctcttcg

SEQ ID NO: 6194 - DNA, 277 bp, Homo sapiens
  source 1..277: mol_type = other DNA
tgcagcctctggattcaccatcagtgcctttaggattaactgggtccgcctggctccagggaaggggccggaagtgatttcagagactagtggtaacggtaaaaccacagactacggagactctgtgcggggccgattcaccgtctccagagacaacgccaaggagtccctgtatctacaaatggagagcctgagaggcgaagacacggctatgtactactgtacgaggggggagtacggcgtctggggccgggggacaatggtcaccgtctcttca

SEQ ID NO: 6195 - DNA, 277 bp, Homo sapiens
  source 1..277: mol_type = other DNA
tgcagcctctggattcaccatcagtgcctttaggattaactgggtccgccaggctccagggagggggccggaagtggtttcagagactagtagtaacggtaaaaccacagactacggagactctgtgcggggccgattcaccgtctccagagacaacgccaaggagtcactgtatctacaaatggagagcctgagaggcgaagacacggctatgtactactgtacgaggggggagtacggcgtctggggccgggggacaatggtcaccgtctcttca

SEQ ID NO: 6196 - DNA, 277 bp, Homo sapiens
  source 1..277: mol_type = other DNA
tgcagcctctggattcaccatgagtgcctttagaattaactgggtccgccaggctccagggagggggccggaagtgatttcagagactagtggtaatggtaaaaccacagactacggagactctgtgcggggccgattcaccgtctccagagacaacgccaaggagtcactgtatctacaaatggagagcctgagaggcgaagacacggctatgtactactgcacgaggggggagtacggcgtctggggccgggggacaatggtcatcgtctcttca

SEQ ID NO: 6197 - DNA, 289 bp, Homo sapiens
  source 1..289: mol_type = other DNA
tgtagcctctggattcaccttgagcagttatgccatgtactgggtccggcagtctccggggaaggggctagaatggatctcagcaattaatgttgctggcacttccacaccctacggagactccgtgaagggccggttcaccatctccagagacaattccaagaacacactctatctgcaaatgaacagcctgagagccgacgacacggccctatattactgtgcgagaagaattcccggcggcccttttgactactggggccagggagccctggtcaccgtgtcctca

SEQ ID NO: 6198 - DNA, 289 bp, Homo sapiens
  source 1..289: mol_type = other DNA
tgcagcctctggattcacctttaccagctatgccatacactgggtccggcaggctccagggaaggggctggagtgggtctctggggtaaatgttgatggcagtttcgcaccctacggagactccgtgaagggccggttcaccgtctccagagacacttccaagcacacgctgtttctgcaaatgaacagcctgagagccgaagacacggccctatattactgtgcgagaagaattcccggcggcccctttgactattggggccggggagccctggtcaccgtgtcctcg

SEQ ID NO: 6199 - DNA, 289 bp, Homo sapiens
  source 1..289: mol_type = other DNA
ttcaggctctggattcacctttagcaattatgccatgttctgggtccggcaggctccagggaaggggctggagtgggtctcaggagttggttctactggtagtttcgcatactacggggactccgtgaagggccggttcaccatctccagagacaattccaagaacacggtgtatctgcaaatgaacagcctgagagccgaggacacggccctatattactgtgcgagaagaattcccggcggcccttttgactactggggccagggagtcctggtcaccgtgtcctca

SEQ ID NO: 6200 - DNA, 289 bp, Homo sapiens; identical to SEQ ID NO: 6197
  source 1..289: mol_type = other DNA

SEQ ID NO: 6201 - DNA, 289 bp, Homo sapiens
  source 1..289: mol_type = other DNA
ttcaggctctggattcacctttagcaattatgccatgttctgggtccggcaggctccagggaaggggctggagtgggtctcaggagttggttcgactggtagtttcgcatactacggggactccgtgaagggccggttcaccatctccagagacaattccaagaacacggtgtatctgcaaatgaacagcctgagagccgaggacacggccctatattactgtgcgagaagaattcccggcggcccttttgactactggggccagggagtcctggtcaccgtgtcctca

SEQ ID NO: 6202 - DNA, 289 bp, Homo sapiens; identical to SEQ ID NO: 6198
  source 1..289: mol_type = other DNA

SEQ ID NO: 6203 - DNA, 289 bp, Homo sapiens
  source 1..289: mol_type = other DNA
tgcagcctctggattcacctttaccagctatgccatacactgggtccggcaggctccagtgaaggggctggagtgggtctctggggtaaatgttgatggcagtttcgcaccctacggagactccgtgaagggccggttcaccgtctccagagacacttccaagcacacgctgtttctgcaaatgaacagcctgagagccgaagacacggccctatattactgtgcgagaagaattcccggcggcccctttgactattggggccggggagccctggtcaccgtgtcctcg

SEQ ID NO: 6204 - DNA, 289 bp, Homo sapiens
  source 1..289: mol_type = other DNA
cgcagcctctggattcacctttagcaactatgccatgagctgggtccgccaggctccagggaagggactggagtgggtctcaggaattgctattagtagttcttacacatcctacgcagactccgtgaagggccggttcaccgtctccagagacaattccaagaacacactatatctgcaaataaacagcctaagagccgaggacacggccctatattactgtgcgagaagaattcccggcggcccttttgactactggggccagggaaccctggtccccgtgtcctca

SEQ ID NO: 6205 - DNA, 289 bp, Homo sapiens
  source 1..289: mol_type = other DNA
tgtaatttctggattcagcttcagcaactatgccatgttttgggtccggcaggctccagggaaggggctggagtatgtctcaggaatttctgggagtggaacttctacactctacgtagacgccgtgaggggccggttcaccatttccagagacgcttccaagaacacgctgttcctccaaatgagcagcctgagagccgacgacacggccctatattactgtgcgagaagaattcccggcggcccttttgactactggggccggggaaccctggtcaccgtgtcctca

SEQ ID NO: 6206 - DNA, 289 bp, Homo sapiens
  source 1..289: mol_type = other DNA
tgtagcctctggattcagctttagcaactatgtcatgtattgggtccggcaggctccagggaaggggctggagtgggtctcaggaatttctagtagtggtacttctacaccctacgcagactccgtgaagggccggttcaccatctccagagacacttccaagaacacgctgttcctccaaatgagcagcctgagagccgacgacacggccctatattactgtgcgagaagaattcccggcggcccttttgactactggggccagggaaccctggtcaccgtgtcctca

SEQ ID NO: 6207 - DNA, 289 bp, Homo sapiens
  source 1..289: mol_type = other DNA
tgtagccgctggattcaccttgagcagttatgccatgtactgggtccggcagtctccggggaaggggctagaatggatctcagcaattaatgttgctggcacttccacaccctacggagactccgtgaagggccggttcaccatctccagagacaattccaagaacacactctatctgcaaatgaacagcctgagagccgacgacacggccctatattactgtgcgagaagaattcccggcggcccttttgactactggggccagggagccctggtcaccgtgtcctca

SEQ ID NO: 6208 - DNA, 289 bp, Homo sapiens
  source 1..289: mol_type = other DNA
tgtagcctctggattcaccttgagcagttatgccatgtactgggtccggcagtctccggggaaggggctagaatggatctcagcaattaatgttgctggcacttccacaccctacggagactccgtgaagggccggttcaccatctccagagacaattccaagaacacactctatctgcaaatgaacagcctgagagccgacgacacggccctatattactgtgcgagaagaattcccggcggcccttttgactactggggccagggagccctggtcaccgtctcctca

SEQ ID NO: 6209 - DNA, 289 bp, Homo sapiens; identical to SEQ ID NO: 6199
  source 1..289: mol_type = other DNA

SEQ ID NO: 6210 - DNA, 289 bp, Homo sapiens
  source 1..289: mol_type = other DNA
tgcaggctctggattcaccatcaccaactatggcatgttctgggttcggcagattccagggaaggggctagagtgggtctcaggaatttctggtagtggtgttactacacgctacgcagactccgtgaagggccgattcaccatctccagagacacttccaagaacacggtgtccctgcgagtgagcagcctgggagccgacgacacggccctatatcattgtgcgagaagaattcccggcggcccttttgactactggggccagggagccctggtcaccgtgtcctcc

SEQ ID NO: 6211 - DNA, 289 bp, Homo sapiens
  source 1..289: mol_type = other DNA
tgcagcctctggattcacctttagcagctatgccatgagctgggtccgccaggctccagggaaggggctggagtgggtctcagttattaatactggtggtgatattacatactacgcagactccgtgaagggccgtttcaccatctccagagacaattccaagaacacgctctatctgcaaatgaacagcctgagagccgaggacacggccatatattactgtgcgcgtcgaataccggggggtccttttgactactggggccagggaaccctggtctccgtctcctca

SEQ ID NO: 6212 - DNA, 289 bp, Homo sapiens; identical to SEQ ID NO: 6201
  source 1..289: mol_type = other DNA

SEQ ID NO: 6213 - DNA, 289 bp, Homo sapiens
  source 1..289: mol_type = other DNA
ttcaggctctggattcacctttagcaattatgccatgttctgggtccggcaggctccagggaaggggctggagtgggtctcaggagttggttcgactggtaatttcgcatactacggggactccgtgaagggccggttcaccatctccagagacaattccaagaacacggtgtatctgcaaatgaacagcctgagagccgaggacacggccctatattactgtgcgagaagaattcccggcggcccttttgactactggggccagggagtcctggtcaccgtgtcctca

SEQ ID NO: 6214 - DNA, 289 bp, Homo sapiens
  source 1..289: mol_type = other DNA
tgcagcctctggattcacctttagcaattatgccatgttctgggtccggcaggctccagggaaggggctggagtgggtctcaggagttggttctactggtagtttcgcatactacggggactccgtgaagggccggttcaccatctccagagacaattccaagaacacggtgtatctgcaaatgaacagcctgagagccgaggacacggccctatattactgtgcgagaagaattcccggcggcccttttgactactggggccagggagtcctggtcaccgtgtcctca

SEQ ID NO: 6215 - DNA, 289 bp, Homo sapiens
  source 1..289: mol_type = other DNA
tgtagcctctggattcagctttagcaactatgccatgttttgggtccggcaggctccagggaaggggctggaatatgtctcaggaatttttgggagtggaacttctgcaccctacatagacgccgtgaggggccgtttcaccgtttccagagacacttccaagaacacgctgttcctccaaatggacagcctgagagccgacgacacggccctatattactgtgcgagaagaattcccggcggcccttttgactactggggccggggaaccctggtcaccgtgtcctca

SEQ ID NO: 6216 - DNA, 289 bp, Homo sapiens
  source 1..289: mol_type = other DNA
tgcagcctctgggttcacctttaccaactttgccatgacctgggtccgtcaggctccagggaagggcctggagtggatatcaacaatggttggtggtggtgttaccgctgtctacgcagaccccgtaaagggccgattcaccatctccagagacacttacagcaggacgttgtttctgcaaatcaacaatttgggagtcgaggacacggccctatattactgtgcgagaagaattcccggcggcccttttgactattggggcccgggaaccctggtcaccgtgtcctca

SEQ ID NO: 6217 - DNA, 286 bp, Homo sapiens
  source 1..286: mol_type = other DNA
cactgtctctggtggctccatgattaactactactggggctggatccggcagtcccctacgaagggactggaatgggttggggatatctattacagtgggggtaccaagtacaacccctccctcaggagtcgagtcaccatatcagtagacacgtccaagaagcagttctccctggaagtgaactctgtgaccgccgcagacacggccgtatatttctgtgtgagacatattgggaagtggggatttgactactggggccagggaaccctggtcaccgtctcctca

SEQ ID NO: 6218 - DNA, 286 bp, Homo sapiens
  source 1..286: mol_type = other DNA
cactgtctctggtggctccatgattaattattactggggctggatccggcagtcccctacgaagggactggaatggattgggaatacctattacagtgggggtaccaagtacaacccctccctcaggagtcgagtcaccatatcagtagacacgtccaagaaccagttctccctggaagtgacctctatgaccgccgcagacacggccatatatttctgtgtgagacatattgggaagtggggatttgactactggggccagggaaccctggtcaccgtctcctca

SEQ ID NO: 6219 - DNA, 286 bp, Homo sapiens; identical to SEQ ID NO: 6217
  source 1..286: mol_type = other DNA

SEQ ID NO: 6220 - DNA, 286 bp, Homo sapiens
  source 1..286: mol_type = other DNA
cactgtctctggtggctccatgattaactactactggggctggatccggcagtcccctacgaagggactggaatgggttggggatatctattacagtgggggtaccaagtacaacccctccctcaggagtcgagtcaccatatcagtagacacgtccaagaagcagttctccctggaagtgaactcggtgaccgccgcagacacggccgtatatttctgtgtgagacatattgggaagtggggatttgactactggggccagggaaccctggtcaccgtctcctca

SEQ ID NO: 6221 - DNA, 286 bp, Homo sapiens
  source 1..286: mol_type = other DNA
cactgtctctggtggctacatgattaactactactggggctggatccggcagtcccctacgaagggactggaatgggttggggatatctattacagtgggggtaccaagtacaacccctccctcaggagtcgagtcaccatatcagtagacacgtccaagaagcagttctccctggaagtgaactctgtgaccgccgcagacacggccgtatatttctgtgtgagacatattgggaagtggggatttgactactggggccagggaaccctggtcaccgtctcctca

SEQ ID NO: 6222 - DNA, 286 bp, Homo sapiens
  source 1..286: mol_type = other DNA
cactgtctctggtggctccatgattaattattactggggctggatccggcagtcccctacgaagggactggaatggattgggaatacctattacagtgggggtaccaagtacaacccctccctcaggagtcgagtcaccatatcagtagacacgtccaagaaccagttctccctggaagggacctctatgaccgccgcagacacggccatatatttctgtgtgagacatattgggaagtggggatttgactactggggccagggaaccctggtcaccgtctcctca

SEQ ID NO: 6223 - DNA, 286 bp, Homo sapiens
  source 1..286: mol_type = other DNA
cactgtctctggtggctccatcagtagttactactggggctggatccggcagcccccagagaagggactggaatggattgggtatatctattacagtgggagcaccaactacaacccctccctcaagagtcgagtcaccatatcagtagacacgtccaagaaccagttctccctgaagctgagctctgtgagcgccgcagacacggccgtgtattattgtgtgagacatatcgggaaatggggttttgactactggggccagggaaccctggtcaccgtctcgtca

SEQ ID NO: 6224 - DNA, 288 bp, Homo sapiens
  source 1..288: mol_type = other DNA
gcatctggatacacctttaccagctaccatatgcactgggtgcgacaggcccctggacaagggcttgagtggatgggaataagcaagtctagtggtggaatcacaatctacgcacagaagttccagggcagagtcaccatgaccagggacacgtccacgagcacagtctatatggagctgagcagcctgagatctgatgacacggccgtgtattactgtgcgagagaaatgccgcacacctactactttgactactggggccagggaaccctggtcaccgtctcctca

SEQ ID NO: 6225 - DNA, 287 bp, Homo sapiens
  source 1..287: mol_type = other DNA
gcatctggatacacctttaccagctaccatatgcactgggtgcgacaggcccctggacaagggcttgagtggatgggaataagcaagtctagtggtggaatcacaatctacgcacagaagttccagggcagagtcaccatgaccagggacacgtccacgagcacagtctatatggagctgagcagcctgagatctgatgacacggccgtgtattactgtgcgagagaaatgccgcacacctactactttgactactgggccagggaaccctggtcaccgtctcctca

SEQ ID NO: 6226 - DNA, 288 bp, Homo sapiens
  source 1..288: mol_type = other DNA
gcatctggatataccttcaccagttactctatgcactgggtgcgacaggcccctggacaagggcttgagtgggtgggattaatcaaccctaatattagttacacaaactacgcacagaagttccagggcagagtcaccatgacctgggacacgtccacgaccacagtctacatggccctgagcagtctgacatctgaagacacggccgtttattactgtgcgagagagatgcctcacacctactactttgactactggggccagggaaccctggtcaccgtctcctca

SEQ ID NO: 6227 - DNA, 288 bp, Homo sapiens
  source 1..288: mol_type = other DNA
gcatctggatataccttcaccagttactctatgcactgggtgcgacaggcccctggacaagggcttgagtgggtgggattaatcaaccctaatattagttacacaaactacgcacagaagttccagggcagagtcaccatgacctgggacacgtccacgaccacagtctacatggccctgagcagtctgacatccgaagacacggccgtttattactgtgcgagagagatgcctcacacctactactttgactactggggccagggaaccctggtcaccgtctcctca

SEQ ID NO: 6228 - DNA, 286 bp, Homo sapiens
  source 1..286: mol_type = other DNA
tgcagcctctggattcaccttcaatatctatagcatgaactgggtccgccaggctccagggaaggggctggagtggatttcttacattactagtgatactcgtaccatatactacgcagactctgtgaagggccgattcaccatttccagagacaacgccaagaactcactgtctctgcaaatgaacagcctgagggtcgaggacacggctgtgtatttctgtgcgagatcagtgcaaggcgcatttgacaactggggccagggaaccctggtcaccgtctcctca

SEQ ID NO: 6229 - DNA, 286 bp, Homo sapiens
  source 1..286: mol_type = other DNA
tgcagcctctggattcaccttcaatatctatagcatgaattgggtccgccaggctccagggaaggggctggagtggatttcttacattactagtgatactcgtaccatatactacgcagactctgtgaagggccgattcaccatttccagagacaacgccaagaactcactgtctctgcaaatgaacagcctgagggtcgaggacacggctgtgtatttctgtgcgagatcagtgcaaggcgcatttgacaactggggccagggaaccctggtcaccgtctcctca

SEQ ID NO: 6230 - DNA, 286 bp, Homo sapiens
  source 1..286: mol_type = other DNA
tgcagcctctggattcaccttcaatatctatagcatgaactgggtccgccaggctccagggaaggggctggagtggatttcttacattactagtgatactcgtaccatatactacgcaggctctgtgaagggccgattcaccatttccagagacaacgccaagaactcactgtctctgcaaatgaacagcctgagggtcgaggacacggctgtttatttctgtgcgagatcagtgcaaggcgcatttgacaactggggccagggaaccctggtcaccgtctcctca

SEQ ID NO: 6231 - DNA, 286 bp, Homo sapiens
  source 1..286: mol_type = other DNA
tgcagcctctggattcatcttcagtcactatagcatgaactggatccgccaggctccagggaaggggctggagtggatctcatacattactagtgacatgaaaaccataaaatacgcagactctgtgaagggccgattcaccatctccagagacaatgccaagaactcagtgtatctgcaaatggacagcctgagagacgaggacacgtctatctactactgtgcgagatctgttcagggtgcttttgacaactggggccagggaaccctggtcaccgtctcccca

SEQ ID NO: 6232 - DNA, 286 bp, Homo sapiens
  source 1..286: mol_type = other DNA
tgcagcctctggattcaccttcagtccctatagcatgaactggatccgccaggctccagggaaggggctggagtggatttcatacattactggtgccagtaatatcataaaatacgcagactctgtgaagggccgattcaccatctccagagacaatgccaagaactcagtgtatctggaaatgagcagcctgagagacgaggacacgtctatctattactgtgcgagatctgttcagggtgcttttgacaactggggccagggaatcctggtcaccgtctcctca

SEQ ID NO: 6233 - DNA, 286 bp, Homo sapiens
  source 1..286: mol_type = other DNA
tgcagcctctggattcatcttcagtcactatagcatgaactggatccgccaggctccagggaaggggctggagtggatctcatacatgactagtgacatgaaaaccataaaatacgcagactctgtgaagggccgattcaccatctccagagacaatgccaagaactcagtgtatctgcaaatggacagcctgagagacgaggacacgtctatctactactgtgcgagatctgttcagggtgcttttgacaactggggccagggaaccctggtcaccgtctcccca

SEQ ID NO: 6234 - DNA, 286 bp, Homo sapiens
  source 1..286: mol_type = other DNA
tgcagcctctggattcaccttcagtccctatagtatgaactggatccgccaggctccagggaaggggctggagtggatttcatacattactggtggcagtaatatcataaattacgcagactctgtgaagggccgattcaccatctccagagacaatgccaagaactcagtgtatctgcaaatgagcagcctgagagacgaggacacgtctatctattactgtgcgagatctgttcagggtgcttttgacaactggggacagggaaccctggtcaccgtctcctca

SEQ ID NO: 6235 - DNA, 286 bp, Homo sapiens
  source 1..286: mol_type = other DNA
tgcagcctctggattcaccttcagtccctatagcatgaactggatccgccaggctccagggaaggggctggagtggatttcatacattaggggtgacagtaatatcatacagtacgcagactctgtgaggggccgattcaccatttccagagacaatgccaagaactcagtgtatctgcaaatgaccagcctgagagacgaggacacgtctatctattactgtgcgagatctgttcagggtgcttttgacaactggggccagggaaccctggtcaccgtctcctca

SEQ ID NO: 6236 - DNA, 286 bp, Homo sapiens
  source 1..286: mol_type = other DNA
tgcagcctctggattcaccttcagtccctatagcatgaactggatccgccaggctccagggaaggggctggagtggatttcatacattactggtgacagtaatatcataaactacgcagactctgtgaagggccgattcaccatctccagagacaatgccaagaactcagtgtatctgcaaatgagcagcctgagagacgaggacacgtctatctattactgtgcgagatctgttcagggtgcttttgacaactggggccagggaaccctggtcaccgtctcctca

SEQ ID NO: 6237 - DNA, 286 bp, Homo sapiens
  source 1..286: mol_type = other DNA
tgcagcctctggattcaccttcagtccctatagtatgaactggatccgccaggctccagggaaggggctggagtggatttcatacattactggtggcagtaatatcataaattacgcagactctgtgaagggccgattcaccatctccagagacaatgccaagaactcagtgtatctgcaaatgagcagcctgagagacgaggacacgtctatctattactgtgcgagatctgttcagggtgcttttgacaactggggccagggaaccctggtcaccgtctcctca

SEQ ID NO: 6238 - DNA, 286 bp, Homo sapiens
  source 1..286: mol_type = other DNA
tgcagcctctggattcatattcagtcactatagcatgaactggatccgccaggctccagggaaggggctggagtggatctcatacatgactagtgacatgaaaaccataaaatacgcagactctgtgaagggccgattcaccatctccagagacaatgccaagaactcagtgtatctgcaaatggacagcctgagagacgacgacacatctatctactactgtgcgagatctgttcagggtgcttttgacaactggggccagggaaccctggtcaccgtctcccca

SEQ ID NO: 6239 - DNA, 286 bp, Homo sapiens
  source 1..286: mol_type = other DNA
tgtagcctctggattcaccttcagtccctacagcatgaactggatccgccaggctccagggaaggggctggagtggatctcatacgtgaatagaaacacgaaaatcataaaatatgcagactctgtgaagggccggttcaccatctccagagacgatgccaagaactcagtgtatctgcaaatggacgacctgagagacgaggacacgtctatctactactgtgcgagatctgttcagggtgcttttgacaactggggccagggaaccctggtcaccgtctcccca

SEQ ID NO: 6240 - DNA, 286 bp, Homo sapiens
  source 1..286: mol_type = other DNA
tgcagcctctggattcaccttcagtccctatagcatgaactggatccgccaggctccagggaaggggctggagtggatttcatacattactggtggcagtaatatcataaactacgcagactctgtgaagggccgattcaccatctccagagacaatgccaagaactcagtgtatctgcaaatgagcagcctgagagacgacgacacgtctatctattactgtgcgagatctgttcagggtgcttttgacaactggggccagggaaccctggtcaccgtctcctca

SEQ ID NO: 6241 - DNA, 282 bp, Homo sapiens
  source 1..282: mol_type = other DNA
gcttctggttacacctttaccaactatggtatcacctgggtgcgacaggcccctggacaagggcttgagtggatgggatggatcagcgcttacaatggtaacacaaactatgcacagaagctccagggcagagtcaccatgaccacagacacatccacgagcatagcctacatggaggtgaggagcctgagatctgacgacacggccgtgtattactgtgcgagacatgtgggatactactttgactactggggccggggaaccctggtcaccgtctcctca

SEQ ID NO: 6242 - DNA, 282 bp, Homo sapiens; identical to SEQ ID NO: 6241
  source 1..282: mol_type = other DNA

SEQ ID NO: 6243 - DNA, 282 bp, Homo sapiens
  source 1..282: mol_type = other DNA
acttctggttacacctttaccagctatgatatcagctgggtgcgacaggcccctggacaagggcttgaatggatgggatggatcagcggttacaatggtaacacaaactatgcacagaagctccagggcagagtcaccatgaccacagacacatccacgagcacagcctacatggagctgaggagcctgagatctgacgacacggccgtctattactgtgcgagacatgttggatactactttgactactggggccagggaaccctggtcaccgtctcctca

SEQ ID NO: 6244 - DNA, 277 bp, Homo sapiens
  source 1..277: mol_type = other DNA
tgcagcctctggattcagcttcagtagctctacctggaactgggtccgccaggctccagggaaggggctggagtgggtttcatatattactagtggtagtactgtcagagaatatgcagactctctgaagggccgattcaccatttccagagacaacgccaagaactcactgtatctgcaaatgaacagccttagagccgaggacacggctatgtattactgtgcgaggggagcctttggcgtctggggccaagggacaatggtcatcgtctcttca

SEQ ID NO: 6245 - DNA, 277 bp, Homo sapiens
  source 1..277: mol_type = other DNA
tgtagcctctggcttcaccttcagtacctttgacatgaactgggtccgccaggccccggggaaggggctggagtgggtttctttcattactgctaatagtcgtatcgtgcactactcagactctgtgaagggccgattcaccgtctccagagacaacgccaagaactcactgtatctccaaatcaacagcctgagagtcgaggacacggctatatattactgtgcgaggggggcctttggcgtctggggccgggggacaatggtcaccgtctcttca

SEQ ID NO: 6246 - DNA, 278 bp, Homo sapiens
  source 1..278: mol_type = other DNA
gtgcagcctctggattcagcttcagtagctctacctggaactgggtccgccaggctccagggaaggggctggagtgggtttcatatattactagtggtagtactgtcagagaatatgcagactctctgaagggccgattcaccatttccagagacaacgccaagaactcactgtatctgcaaatgaacagccttagagccgaggacacggctatgtattactgtgcgaggggagcctttggcgtctggggccaagggacaatggtcatcgtctcttca

SEQ ID NO: 6247 - DNA, 274 bp, Homo sapiens
  source 1..274: mol_type = other DNA
tgcagcctctggattcaccttcagtaattttgatatgaactgggtccgccaggctccagggaaggggctggagtgggtttcatacattagtagtagtggtaccatatactacgcagactctgtgaagggccgattcaccatctccagagacaacgccaagaactcactgtatctgcaaatgaacagcctgagagtcgaggacacggctgtttattactgtgcgagaggggcttttggagtctggggccaagggacaatggtcagcgtctcttca

SEQ ID NO: 6248 - DNA, 286 bp, Homo sapiens
  source 1..286: mol_type = other DNA
tgtggcctctggattcacgtttagcagttatcacatgagctgggtccgccaggccccagggaaggggccggagtgggtcgcagctattaccagcactggcagcaacacatactacgcagagtccgtgaagggccggttcaccatctccagagacgactccaaagacacggtctatgtgcaaatgaacagactggaagccgaggactcggccatatattactgtgcgagagatggcggaggttcgtttgactactggggccagggaatcctggtcaccgtctcctca

SEQ ID NO: 6249 - DNA, 286 bp, Homo sapiens
  source 1..286: mol_type = other DNA
tgtggcctctggattcacgtttagtagttatcacatgagctgggtccgccaggccccagggaaggggccggagtgggtcgcagctattaccagcactggcagcaacacatactacgcagagtccgtgaagggccggttcaccatctccagagacgactccaaagacacggtctatgtgcaaatgaacagactggaagccgaggactcggccgtatattactgcgcgagagatggcggaggttcgtttgactactggggccagggaatcctggtcaccgtctcctca

SEQ ID NO: 6250 - DNA, 286 bp, Homo sapiens
  source 1..286: mol_type = other DNA
tgcggcctctggcctcacatttagcacttatcccatgagctgggtccgccagtctccagggggggggctggagtgggtctcagctattactggtactagtggtaacacatactacgcagactccgtcaagggccggttcaccatctccagagacaactccaaaaacacgctctatatgtacatgaacagactgaaagccgaggactcggccgtatattactgtgcgagagatggcggaggttcatttgactactggggccagggaaccctggtcaccgtctcctca

SEQ ID NO: 6251 - DNA, 286 bp, Homo sapiens
  source 1..286: mol_type = other DNA
tgcggcctctggactcacatttagcagttatcccatgagctgggtccgccaggctccagggaaggggctggagtgggtctcagcaattactggtagtggtgataacacatactacgcagactccgtgaagggccgcttcaccatctccagagacaactccaaaaagacactctatgtgcaaatgaacagactgaaagccgacgactcggccgtatattactgtgcgagagatggcggaggttcgtttgactactggggccagggaaccctggtcaccgtctcctca

SEQ ID NO: 6252 - DNA, 286 bp, Homo sapiens
  source 1..286: mol_type = other DNA
tgcggcctctggactcacatttagcagttatcccatgagctgggtccgccaggctccagggaaggggctggagtgggtctcagcaattactggaagtggtgataacacatactacgcagactccgtgaagggccgcttcaccatctccagagacaactccaaaaagacactctatgtgcaaatgaacagactgaaagccgacgactcggccgtatattactgtgcgagagatggcggaggttcgtttgactactggggccagggaaccctggtcaccgtctcctca

SEQ ID NO: 6253 - DNA, 286 bp, Homo sapiens
  source 1..286: mol_type = other DNA
tgcggcctctggactcacatttagcagttatcccatgagctgggtccgccaggctccagggaaggggctggagtgggtctcagctattactggtagtggtgataacacatactacacagactccgtgaagggccgcttcaccatctccagagacaactccaaaaacacaatctatgtgcaaatgaacagactgaaagccgaagactcggccgtatattactgtgcgagagatggcggaggttcgtttgactactggggccagggaaccctggtcaccgtctcctca

SEQ ID NO: 6254 - DNA, 286 bp, Homo sapiens
  source 1..286: mol_type = other DNA
tgcggcctctggactcccatttagcagttatcccatgagctgggtccgccaggctccagggaaggggctggagtgggtcgcagctattactggtagcagtgataacacatactacgcagactccgtgaagggccgcttcaccatctccagagacaactccaaaaacacactctatgtgcaaatgaacagactgaaagccgaggactcggccgtatattactgtgcgagagatggcggaggttcgtttgactactggggccagggaatcctggtcaccgtctcctca

SEQ ID NO: 6255 - DNA, 286 bp, Homo sapiens
  source 1..286: mol_type = other DNA
tgcggcctctggattcacatttagcagttatcacatgagctgggtccgccaggctccagggaaggggctggagtgggtctcagctattactcgtagtggtgataacacatactacgcagactccgtgaagggccgcttcaccatctcccgagacaactccaaaaacacattctatgtggaaatgaagagactgaaagccgaagactcggccgtatattactgtgcgagagatggcggaggttcgtttgactactggggccagggaacccgggtcaccgtctcctca

SEQ ID NO: 6256 - DNA, 286 bp, Homo sapiens
  source 1..286: mol_type = other DNA
tgtggcctctggattcacgtttagtagttatcacatgagctggatccgccaggccccagggaaggggccggagtgggtcgcagctattaccagcactggcagcaacacatactacgcagagtccgtgaagggccggttcaccatctccagagacgactccaaagacacggtctatgtgcaaatgaacagactggaagtcgaggactcggccgtatattactgtgcgagagatggcggaggttcgtttgactactggggccagggaatcctggtcaccgtctcctca

SEQ ID NO: 6257 - DNA, 286 bp, Homo sapiens
  source 1..286: mol_type = other DNA
tgcggcctctggattcacatttagcatttatcccatgagctgggtccgccaggctccagggaaggggctggagtgggtctcggcaattactggtagtggtgataacacatactacgcagagtccgtgaagggccgcttcaccatctccagagacaactccaaaaacacattctatgtgcaaatgaacagactgaaagccgaggactcggccgtatattactgtgcgagagatggcggaggttcgtttgactactggggcctgggaaccctggtcaccgtctcctca

SEQ ID NO: 6258 - DNA, 286 bp, Homo sapiens
  source 1..286: mol_type = other DNA
tgcggcctctggactcacatttagcagttatcccatgagctgggtccgccaggctccagggaaggggctggagtgggtctcagctattactggtagtggtgataacacatactacacagactccgtgaagggccgcttcaccatctccagagacaactccaaaaacacaatctatgtgcaaatgaacagactgaaagccgaggactcggccgtatattactgtgcgagagatggcggaggttcgtttgactactggggccagggaaccctggtcaccgtctcctca

SEQ ID NO: 6259 - DNA, 286 bp, Homo sapiens
  source 1..286: mol_type = other DNA
tgcggcctctggactcacatttagcagttatcccatgagctgggtccgccaggctccagggaaggggctggagtgggtctcagctattactggtagtggtgataacacattctacactgactccgtgaagggccgcttcaccatctccagagacaactccaaaaacacaatctatgtgcaaatgaacagactgaaagccgaggactcggccgtatattactgtgcgagagatggcggaggttcgtttgactactggggccagggaaccctggtcaccgtctcctca

SEQ ID NO: 6260 - DNA, 286 bp, Homo sapiens
  source 1..286: mol_type = other DNA
tgcggcctctggactcacatttagcacttatcccatgagctgggtccgccaggctccagggaagaggctggagtgggtctcagctattactggtagtggtgataacacatactacacagactccgtgaagggccgcttcaccatctccagagacaactccaaaaacacaatctatgtgcaaatgaacagactgaaagccgaggactcggccgtatattactgtgcgagagatggcggaggttcgtttgactactggggccagggaaccctggtcaccgtctcctca

SEQ ID NO: 6261 - DNA, 286 bp, Homo sapiens
  source 1..286: mol_type = other DNA
tgcggcctccggactcacgtttagcagttatcccatgagctggatccgacaggctccagggaaggggctggagtgggtcgcagctattactggaagcagtgataatacatactacgcagactccgtgaagggccggttcaccatctccagagacaactccaacaacatggtctatgtgcaaatgaacagactgaaagccgacgactcggccgtgtattactgtgcgagagatggcggaggttcgtttgactactggggccagggaaccctggtcaccgtctcctca

SEQ ID NO: 6262 - DNA, 286 bp, Homo sapiens
  source 1..286: mol_type = other DNA
tgcggcctctggactcatatttagcagttatcccatgagttgggtccgccaggctccagggaaggggctggagtgggtctcagccattactggtagcagtgataagacattctacgcagactccgtgaagggccgcttcaccatctccagagacaactccaagaatacaatttatatgcaaatgaacaggctgaaagccgaggactcggccgtatattactgtgcgagagatggcggaggttcgtttgactactggggccagggaaccctggtcaccgtctcctca

SEQ ID NO: 6263 - DNA, 286 bp, Homo sapiens
  source 1..286: mol_type = other DNA
tgtggcctctggattcacgtttagcagttatcacatgagctgggtccgccaggccccagggaaggggccggagtgggtcgcagctattaccagcactggcagcaacacatactacgcagagtccgtgaagggccggttcaccatctccagagacgactccaaagacacggtctatgtgcaaatgaacagactggaagccgaggactcggccgtatattactgtgcgagagatggcggaggttcgtttgactactggggccagggaatcctggtcaccgtctcctcg

SEQ ID NO: 6264 - DNA, 286 bp, Homo sapiens; identical to SEQ ID NO: 6248
  source 1..286: mol_type = other DNA

SEQ ID NO: 6265 - DNA, 286 bp, Homo sapiens
  source 1..286: mol_type = other DNA
tgcggcctctggattcacatttaccagttatcacatgagctgggtccgccaggctccggggaaggggctggagtgggtctcagctattacccgtagtggtgataacacatactacgcagactccgtgaagggccgcttcaccatctccagagacaactccaaaaacacattctatgtgcaaatgaacagactgaaagccgaggactcggccgtatattattgtgcgagagatggcggaggttcgtttgactactggggccagggaaccctggtcaacgtctcctca

SEQ ID NO: 6266 - DNA, 286 bp, Homo sapiens
  source 1..286: mol_type = other DNA
tgtggcctctggattcacgtttagcagttatcacatgagctgggtccgccaggccccagggaaggggctggagtgggtctcagctattactagcactggtagtaacacatactacgcagactccgtgaagggccggttcaccatctccagagacgactccaaagacacgctctatgtgcaaatgaacagactggaagccgaggactcggccgtatattactgtgcgagagatggcggaggttcgtttgactactggggccagggaaccctggtcaccgtctcctca

SEQ ID NO: 6267 - DNA, 286 bp, Homo sapiens
  source 1..286: mol_type = other DNA
tgcggcctccgggctcacgtttagcagttatcccatgagctggatccgccaggctccagggaagggcctggagtgggtcgcagctattactggaagtagtgctaatacatattacgcagactccgtgaagggccggttcaccatctccagagacaactccaaaaacatggtctttgtgcaaatgaacaatctggaacccgaggactcggccgtatatttctgtgcgagagatggcggaggttcgtttgactactggggccagggaaccctggtcgccgtctcctca

SEQ ID NO: 6268 - DNA, 286 bp, Homo sapiens
  source 1..286: mol_type = other DNA
tgcggcctctggattcacatttaccagttatcacatgagctgggtccgccaggctccggggaaggggctggagtgggtctcagctattacccgtagtggtgataacacatactacgcagactccgtgaagggccgcttcaccatctccagagacaactccaaaaacacattctatgtgcaaatgaacagactgaaagccgaggactcggccgtatattattgtgcgagagatggcggaggttcgtttgactactggggccagggaaccctggtcaccgtctcctca

SEQ ID NO: 6269 - DNA, 286 bp, Homo sapiens
  source 1..286: mol_type = other DNA
tgcggcctctggatttacatttagcatttatcccatgagttgggtccgccaggctccagggaaggggctggagtgggtctcagctatcactggtagtggtcatgacacatactacgcaaactccgtgaagggccgcttcaccatctccagagacaacttcaaaaacacaatctctatgcaaatgaacagactgaaagccgaggactcggccgtgtattactgtgcgagagatggcggaggttcgtttgactactggggccagggaatcctggtcaccgtctcctca

SEQ ID NO: 6270 - DNA, 286 bp, Homo sapiens
  source 1..286: mol_type = other DNA
tgcggcctctggactcacatttagcagttatcccatgagctggatccgccaggctccagggaaggggctggagtgggtctcagctattactggtagtggtgataacacatactacgcagactccgtgaagggccgcttcaccatctccagagacaactccaaaaaaacactctatgtgcaaatgaacagactgacagccgaggactcggccatatattactgtgcgagagatggcggaggttcgtttgactactggggccagggaaccctggtcaccgtctcctca

SEQ ID NO: 6271 - DNA, 286 bp, Homo sapiens
  source 1..286: mol_type = other DNA
tgcggcctctggactcacatttagcacttatcccatgagctgggtccgccaggctccagggaaggggctggagtgggtctcagctattactggtagtggtgataacacatactacacagactccgtgaagggccgcttcaccatctccagagacaactccaaaaacacaatctatgtgcaaatgaacagactgaaagccgaggactcggccgtatattactgtgcgagagatggcggaggttcgtttgactactggggccagggaaccctggtcaccgtctcctca

SEQ ID NO: 6272 - DNA, 286 bp, Homo sapiens
  source 1..286: mol_type = other DNA
tgcggcctctggactcacatttagcagttatcccatgagctgggtccgccaggctccagggaaggggctggagtgggtctcagctattactggtagcagtgataacacatactacgcagactccgtgaagggccgcttcaccatctccagagacaactccaaaaacacactctatgtgcaaatgaacagactgaaagccgacgactcggccgtatattactgtgcgagagatggcggaggttcgtttgactactggggccagggaaccctggtcaccgtctcctca

SEQ ID NO: 6273 - DNA, 286 bp, Homo sapiens
  source 1..286: mol_type = other DNA
tgcggcctctggactcacatttagcagttatcccatgagctgggtccgccaggctccagggaaggggctggagtgggtctcagctattactggtagcagtgataacacatactacgcagactccgtgaagggccgcttcaccatctccagagacaactccaaaaacacactctatgtgcaaatgaacagactgaaagccgaggactcggccgtatattactgtgcgagagatggcggaggttcgtttgactactggggccagggaaccctggtcaccgtctcctca

SEQ ID NO: 6274 - DNA, 286 bp, Homo sapiens
  source 1..286: mol_type = other DNA
tgtggcctctggattcacgttcagtagttatcacatgagctggatccgccaggccccagggaaggggccggagtgggtcgctgccattaccagtactggcagcaacacatactacctagagtccgtgaagggccggttcaccatctccagagacgactccaaagacacggtctatgtgcagatgaacagactggaagtcgaggactcggccatatattactgtgcgagagatggcggaggttcgtttgactactggggccagggaatcctggtcaccgtctcgtca

SEQ ID NO: 6275 - DNA, 286 bp, Homo sapiens
  source 1..286: mol_type = other DNA
tgtggcctctggattcacgtttagcagttatcacatgagctgggtccgccaggccccagggaaggggccggagtgggtctcagctattaccagcactggtagtaacacatactacgcagactccgtgaagggccggttcaccatctccagagacgactccaaagacacggtctatgtgcaaatgaacagactggaagccgaggactcggccgtatattactgtgcgagagatggcggaggttcgtttgactactggggccagggaatcctggtcaccgtctcctca

SEQ ID NO: 6276 - DNA, 286 bp, Homo sapiens
  source 1..286: mol_type = other DNA
tgcagcctctggattcgcttttggcatctatgccatgagctgggtccgccaggctccagggaaggggctggactgggtctcaggtattactgctgggagtagtagtacatactacgcagactccgtgaggggccggttcaccatctccagagacaattccaagaacacggtctatctgcaaatgaacagcctgacagccgaggacacggccatatattactgtgcgagagatggggggggtagctttgactactggggccagggaaccctggtcaccgtctcctca

SEQ ID NO: 6277 - DNA, 286 bp, Homo sapiens
  source 1..286: mol_type = other DNA
tgcggcctctgggctcacgtttagcacttaccccatgagctggatccgccaggctccagggaaggggctggagtgggtcgcagctattactggaagtagtgctaatacatactatgcagactccgtgaagggccggttcaccatctccagagacaactccaaaaacatggtctatgtgcaaatgaacaaactgcaagccgaggactcggccgtatattactgtgcgagagatggcggaggttcgtttgactactggggccagggaatcctggtcaccgtctcctca

SEQ ID NO: 6278 - DNA, 286 bp, Homo sapiens
  source 1..286: mol_type = other DNA
tgcggcctctggactcacatttagcagttatcccatgagctgggtccgccaggctccagggaaggggctggagtgggtctcagctattactggtagtggtgataacacatactacgcagactccgtgaagggccgcttcaccatctccagagacaactccaaaaacacactttatgtgcaaatgaacagactgaaagccgaggactcggccgtatattactgtgcgagagatggcggaggttcgtttgactactggggccagggaaccctggtcaccgtctcctca

SEQ ID NO: 6279 - DNA, 286 bp, Homo sapiens
  source 1..286: mol_type = other DNA
tgcggcctctggactcacatttagtaattatcccatgagctgggtccgccaggctccagggaaggggctggagtgggtctcagccattactggacattctggaagcacatactacgcagactccgtggagggccgcttcaccatctccagagacaactccagaaacacactctatatgcaaatgaacagactgatagccgaggactcggccgtatattactgtgcgagagatggcggaggttcgtttgactactggggccagggaaccctggtcaccgtctcctca

SEQ ID NO: 6280 - DNA, 286 bp, Homo sapiens
  source 1..286: mol_type = other DNA
tgcggcctctggactcacatttagcagttatcccatgagctgggtccgccaggctccagggaaggggctggagtgggtctcagcaattactggtagtggtgataacacatactacgcagaaatcgtgaagggccgcttcaccatctccagagacaactccaaaaagacagtctatgtgcaaatgaacagactgaaagtcgacgactcggccgtatattactgtgcgagagatggcggaggttcgtttgactactggggccagggaaccctggtcaccgtctcctca

SEQ ID NO: 6281 - DNA, 286 bp, Homo sapiens
  source 1..286: mol_type = other DNA
tgtggcctctggattcacgtttagcagttatcacatgagctgggtccgccaggccccagggaaggggccggagtgggtcgcagctattaccagcactggcagcaacacatactacgcagagtccgtgaagggccggttcaccatctccagagacgactccaaagacacggtctatgtgcaaatgaacagactggaagccgaggactcggccgtatattactgtgcgagagatggcggaggttcgtttgactactggggccagggaatcctggtcaccgtctcctca

SEQ ID NO: 6282 - DNA, 286 bp, Homo sapiens
  source 1..286: mol_type = other DNA
tgcggcctctggattcacatttagcatttatcccatgagctgggtccgccaggctccagggaaggggctggagtgggtctcggcaattactggtagtggtgataacacatactacgcagactccgtgaagggccgcttcaccatctccagagacaactccaaaaacacattctatgtgcaaatgaatagactgaaagccgaggactcggccgtatattactgtgcgagagatggcggaggttcgtttgactactggggcctgggaaccctggtcaccgtctcctca

SEQ ID NO: 6283 - DNA, 286 bp, Homo sapiens
  source 1..286: mol_type = other DNA
tgcggcctctggcctcacatttagcacttatcccatgagctgggtccgccagtctccagggggggggctggagtgggtctcagctattactggtactagtggtaacacatactacgcagactccgtcaagggccggttcaccatctccagagacaactccaaaaacacgctctatatgcacatgaacagactgaaagccgaggactcggccgtatattactgtgcgagagatggcggaggttcatttgactactggggccagggaaccctggtcaccgtctcctca

SEQ ID NO: 6284 - DNA, 286 bp, Homo sapiens
  source 1..286: mol_type = other DNA
tgcggcctctggattcacatttagcagttatcacatgagctgggtccgccaggctccggggaaggggctggagtgggtctcagctattacccgtagtggtgataacacatactacgcagactccgtgaagggccgcttcaccatctccagagacaactccaaaaacacattctatgtgcaaatgaacagactgaaagccgaggactcggccgtatattattgtgcgagagatggcggaggttcgtttgactactggggccagggaaccctggtcaccgtctcctca

SEQ ID NO: 6285 - DNA, 286 bp, Homo sapiens; identical to SEQ ID NO: 6279
  source 1..286: mol_type = other DNA

SEQ ID NO: 6286 - DNA, 301 bp, Homo sapiens
  source 1..301: mol_type = other DNA
tgcagcgtctggtttcaccctcagtgcctatggcattcactgggtccgccacactccaggcaaggggctggagtgggtggcagttttttggtctgatggaagtcagcagtactatgcagactccgtgaagggccgattcaccatctccagagacctttccaagagcaccgtggatcttcaaatgaacagcctgagacccgaggatacggctgtgtattattgtgcgagagattgtgacactactagtcattacagtcgcttcgacccctggggccagggaaccctggtcaccgtctcctca

SEQ ID NO: 6287 - DNA, 301 bp, Homo sapiens
  source 1..301: mol_type = other DNA
tgcagcgtctggtttcaccctcagtgcctatggcattcactgggtccgccacactccaggcaaggggctggagtgggtggcagttttttggtatgacggaagtcagcagtactatgcagactccgtgaagggccgattcaccatctccagagacctttccaagagcaccgtggatcttcaaatgaacagcctgagacccgaggatacggctgtgtattattgtgcgagagattgtgacactactagtcattacagtcgcttcgacccctggggccagggaaccctggtcaccgtctcctca

SEQ ID NO: 6288 - DNA, 301 bp, Homo sapiens; identical to SEQ ID NO: 6286
  source 1..301: mol_type = other DNA

SEQ ID NO: 6289 - DNA, 299 bp, Homo sapiens
  source 1..299: mol_type = other DNA
cagcgtctggatttaccttcagtaaatatggcatccactgggtccgccaggctccaggcaaggggctggagtgggtggcagttatttgggctggtacaaatgctaaatactacgcagactccgtgaagggccgattcaccgtctccagagacaattccaagaacatggtgtttctgcaaatggacagcctgagagccgaggacacggctctatattactgtgcgagagattgtgatactactagtcattatagtcgcttcgacccctggggccagggaaccctggtcaccgtctcctca

SEQ ID NO: 6290 - DNA, 286 bp, Homo sapiens
  source 1..286: mol_type = other DNA
tgcagcctctggattcacctttaggaactatcccatgaggtgggtccgtcaggctccagggaaggggctggactgggtctcaactattggtggtggtggcagcacatactacgcagactccgtgaagggccggttcaccgtctccagagacaattccgagaacacactgtatctgcaaatgaacaacctgagagccgaagacacggccgtatattactgtgcgacgaaatatagtggctacgatttcggctactggggccagggaaccctggtcaccgtcttctca

SEQ ID NO: 6291 - DNA, 286 bp, Homo sapiens
  source 1..286: mol_type = other DNA
tgcagcctctggattcacctttagcacctatgtcatgaggtgggtccgccaggctccagggaaggggctggagtgggtctcatctattggtgatggtggtaacgcatactacgcagactccgtgaagggccggttcaccatctccagagacaattccaagaacacactgtatctgcaaatgaacagcctgagagccgaggacacggccgtatattactgtgcgacgaaatacagtggctacgattttggctactggggccagggaaccctggtcaccgtctcctca

SEQ ID NO: 6292 - DNA, 286 bp, Homo sapiens
  source 1..286: mol_type = other DNA
tgcagcctctggattcacgtttagtggctatcccatgaggtgggtccgccaggctccagggaaggggctggaatgggtctcaacgattggtacttttagcagcacatactacgcagactctgtgaagggccggttcaccatctccagagacaattccaagaacacattctatttacaaatgaacagcctgagagtcgacgacacggccgtatattattgtgcgacgaaatatagtggctatgattttggctactggggccagggaaccctggtcaccgtctcctca

SEQ ID NO: 6293 - DNA, 286 bp, Homo sapiens; identical to SEQ ID NO: 6291
  source 1..286: mol_type = other DNA

SEQ ID NO: 6294 - DNA, 286 bp, Homo sapiens
  source 1..286: mol_type = other DNA
tgcagcctctggattcacctttagcacctatgtcatgaggtgggtccgccaggctccagggaaggggctggagtgggtctcatctattggtgatggtggtaacgcatactacgcagactccgtgaagtgccggttcaccatctccagagacaattccaagaacacactgtatctgcaaatgaacagcctgagagccgaggacacggccgtatattactgtgcgacgaaatacagtggctacgattttggctactggggccagggaaccctggtcaccgtctcctca

SEQ ID NO: 6295 - DNA, 286 bp, Homo sapiens
  source 1..286: mol_type = other DNA
tgcagcctctggattcacctttagcacctatgtcatgaggtgggtccgccaggctccagggaaggggctagagtgggtctcatctattggtgatggtggtaacgcatactacgcagactccgtgaagggccggttcaccatctccagagacaattccaagaacacactgtatctgcaaatgaacagcctgagagccgaggacacggccgtatattactgtgcgacgaaatacagtggctacgattttggctactggggccagggaaccctggtcaccgtctcctca

SEQ ID NO: 6296 - DNA, 286 bp, Homo sapiens
  source 1..286: mol_type = other DNA
tgcagcctctggattcacctttagcaccaatgccatggcctgggtccgccaggctccagggaaggggctggactgggtctcgagtgttgataatggtggtaacacattctacgcagactccgtgaagggccgcttcaccatctccagagacatttccaagaacacgctgtatctgcaaatgaacagcctgagagccgaggacacggccatatattactgtgcgaaagatatattttggtgggcctttgacttctggggccggggaaccctggtcaccgtctcctca

SEQ ID NO: 6297 - DNA, 286 bp, Homo sapiens
  source 1..286: mol_type = other DNA
tgcagcctctggattcacctttgccggaaatgccatggcctgggtccgccagcctccagggaagggcctggagtgggtctcatcttttggcaatggtgctgacacatattacgcagactccgtgaagggccggttcaccatctccagagacgattccaagaacacgctgtatctgcaaatgaacagcctcagagccgaggacacggccgtatattactgtgcgaaagatattttctggtgggcttttgacttctggggccagggaaccctggtcaccgtctcctca

SEQ ID NO: 6298 - DNA, 286 bp, Homo sapiens
  source 1..286: mol_type = other DNA
tgtagcctctggattcacctttgccggaaatgccatggcctgggtccgccagcgtccagggaagggcctggagtgggtctcatcttttggcaatggtgctgagacatattacgcagactccgtgaagggccggttcaccatctccagagacgattccaagaacacgctgtatctgcaaatgaacagcctcagagccgaggacacggccgtatattactgtgcgaaagatattttctggtgggcttttgacttctggggccagggaaccctggtcaccgtctcctca

SEQ ID NO: 6299 - DNA, 289 bp, Homo sapiens
  source 1..289: mol_type = other DNA
tgcagcctctggattcaccttcagcagctactggatgcactgggtccgccaagctccagggaaggggctggtgtgggtctcacgtattcatagtgatgggactagcacagtctacgcggactccgtgaggggccgattcaccatctccagagacaacgccaagaacacggtgtatttgcaaatgaacagtctgagagccgacgacacggctgtgtattactgtgcacgaggggggccttacggtgaccttgactactggggccagggaaccctggtcaccgtctcctca

SEQ ID NO: 6300 - DNA, 289 bp, Homo sapiens; identical to SEQ ID NO: 6299
  source 1..289: mol_type = other DNA

SEQ ID NO: 6301 - DNA, 289 bp, Homo sapiens
  source 1..289: mol_type = other DNA
tgcagcctctggattcaccttcagcagttactggatgcactgggtccgccaagctccagggaaggggctggtgtgggtctcacgtattcatagtgatgggagtagcacagtctacgcggactccgtgagggaccgattcaccatctccagagacaacgccaagaacacggtgtatttgcaaatgaacagtctgagagtcgacgacacggctatttactactgtgcacgaggggggccttacggtgaccttgactactggggccagggaaccctggtcaccgtctcctca

SEQ ID NO: 6302 - DNA, 289 bp, Homo sapiens
  source 1..289: mol_type = other DNA
tgcagcctctggattcaccttcagcagctactggatgcactgggtccgccaagctccagggaaggggctggtgtgggtctcacgtattcatagtgatgggagtcgcacagtctacgcggactccgtgagggaccgattcaccatctccagagacaacgccaagaacacggtgtatttgcaaatgaacagtctgagagtcgacgacacggctatttactactgtgcacgaggggggccttacggtgaccttgactactggggccagggaaccctggtcaccgtctcctca

SEQ ID NO: 6303 - DNA, 289 bp, Homo sapiens; identical to SEQ ID NO: 6302
  source 1..289: mol_type = other DNA

SEQ ID NO: 6304 - DNA, 289 bp, Homo sapiens
  source 1..289: mol_type = other DNA
tgcagcctctggattcaccttcagtagctactggatgcattgggtccgccaagctccagggaaggggctggtgtgggtctcacgcattaatagtgatgggagtgacacaacctacgcggactccgtgaagggccgattcaccatctccagagacagcgccaagaacacgctgtatctgcaaatgaacagtctgagagtcgaggacacggctgtgtattactgtgcaagagggggtccctacggtgatcttgactactggggccagggaaccctggtcaccgtctcctca

SEQ ID NO: 6305 - DNA, 304 bp, Homo sapiens
  source 1..304: mol_type = other DNA
tgtagcctctggattcactttcagtaacgcctggatgagctgggtccgccaggctccagggaaggggccggagtgggttggccgtattaaaagcaaagctgatggtgggacaacagactacgctgcacccgtaaaaggcagatttaccatctcaagagatgattcaaaaaacacgctatatctgcgaatgaacagcctgaaaaccgaggacacagccatgtatttctgtatcacagatcggggctacggtgacttcggcggcgaacccaactggggccagggaaccctggtcaccgtctcctca

SEQ ID NO: 6306 - DNA, 304 bp, Homo sapiens
  source 1..304: mol_type = other DNA
tgcagcctctggattcactttcagtattgcctggatgagctgggtccgccaggctccagggaaggggctggagtgggttggccgtattaaaagcaaaactgatggtgagacaacagactacgctgcacccgtaaaaggcagatttaccatctcaagagatgattcaaaaaacacgctatatctgcgaatgaacagcctgaaaaccgaggacacagccatgtatttctgtatcacagatcggggctacggtgacttcggcggcgaacccaactggggccagggaaccctggtcaccgtctcctca

SEQ ID NO: 6307 - DNA, 302 bp, Homo sapiens
  source 1..302: mol_type = other DNA
tagcctctggattcactttcagtaacgcctggatgagctgggtccgccaggctccagggaaggggccggagtggggtggccgtattaaaagcaaagctgatggtgggacaacagactacgctgcacccgtaaaaggcagatttaccatctcaagagatgattcaaaaaacacgctatatctgcgaatgaacagcctgaaaaccgaggacacagccatgtatttctgtatcacagatcggggctacggtgacttcggcggcgaacccaactggggccagggaaccctggtcaccgtctcctca

SEQ ID NO: 6308 - DNA, 286 bp, Homo sapiens
  source 1..286: mol_type = other DNA
tgcagcctctggattcaccttcagtagttatgaaatgaactgggtccgccaggctccagggaaggggctggagtgggtttcatacattggtactggtggcagtaccatattctacgcagactctgtgaagggccgattcaccatctccagagacaacgccaagaactcactgtatctgcaaatgaacagcctgagagccgaggacacggctgtttattactgtgcgagacgggggaggggctactttgactactggggccagggaaccctggtcaccgtctcctca

SEQ ID NO: 6309 - DNA, 286 bp, Homo sapiens
  source 1..286: mol_type = other DNA
tgcagcctctggattcaccttcagtacttatgaaatgaactgggtccgccaggctccagggaaggggctggagtgggtttcatacattggtgctgatggcagtaccatattctacccagactctgtgaagggccgattcaccatctccagagacaacgccaagaactcactgtttctgcaaatggacagcctgagagccgaggatacggctgtttattattgtgcgagacgggggaggggctactttgactactggggccagggaaccctggtcaccgtctcctca

SEQ ID NO: 6310 - DNA, 286 bp, Homo sapiens
  source 1..286: mol_type = other DNA
tgcagcctctggattcaccttcagtacttatgaaatgaactgggtccgccaggctccagggaaggggctggagtggctttcatacattggtactagtggtagtaccatattctacgcagactctgcgaagggccgattcaccatctccagagacaacgccaagaactcactgtatctacaaatgaacagcctgagagccgaggacacggctgtttattactgtgcgagacgggggaggggctactttgactactggggccagggaaccctggtctccgtctcctca

SEQ ID NO: 6311 - DNA, 286 bp, Homo sapiens
  source 1..286: mol_type = other DNA
tgcagcctctggattcaccttcagtacttatgaaatgaactgggtccgccaggctccagggaaggggctggagtggctttcatacattggtactagtggtagtaccatattctacgcagactctgcgaagggccgattcaccatctccagagacaacgccaagaactcactgtatctacaaatgaatagcctgagagccgaggacacggctgtttattactgtgcgagacgggggaggggctactttgactactggggccagggagccctggtctccgtctcctca

SEQ ID NO: 6312 - DNA, 286 bp, Homo sapiens
  source 1..286: mol_type = other DNA
tgcagcctctggattcaccttcagtagttatgaaatgaactgggtccgccaggctccagggaaggggctggagtggctttcatacattggtactagtggtagtaccatattctacgcagactctgcgaagggccgattcaccatctccagagacaacgccaagaactcactgtatctacaaatgaacagcctgagagccgaggacacggctgtttattactgtgcgagacgggggaggggctactttgactactggggccagggaaccctggtctccgtctcctca

SEQ ID NO: 6313 - DNA, 286 bp, Homo sapiens; identical to SEQ ID NO: 6310
  source 1..286: mol_type = other DNA

SEQ ID NO: 6314 - DNA, 286 bp, Homo sapiens
  source 1..286: mol_type = other DNA
cgcagcctctggattcacattcagtagttatgatatgaattgggtccgccaggctccagggaaggggctggagtggctttcacacattggcgccagtggtgttgccatattccacgcagacactgtgaagggtcgaatcaccatctccagagacaacgccaagaactcactgtatttacaaatggacagcctgagagccgaggacacggctgtttattactgtgcgagacgggggaggggctactttgactactggggccagggaaccctggtctccgtctcctca

SEQ ID NO: 6315 - DNA, 286 bp, Homo sapiens
  source 1..286: mol_type = other DNA
tgcagcctctggattcaccttcagtacttatgaaatgaactgggtccgccaggctccagggaaggggctggagtgggtttcatacattggtgctgatggcagtaccatattctacccagactctgtgaagggccgattcaccatctccagagacaacgccaagaactcactgtttctgcaaatggacagcctgagagccgaggatacggctgtttattattgtgcgagacgtgggaggggctactttgactactggggccagggaaccctggtcaccgtctcctca

SEQ ID NO: 6316 - DNA, 286 bp, Homo sapiens
  source 1..286: mol_type = other DNA
tgcagcctctggattcaccttcagtagttatgaaatgaactgggtccgccaggctccagggaaggggctggagtgggtttcatacattggtactagtggtagtaccatattctacgcagactctgtgaagggccgattcaccatctccagagacaacgccaagaactcactgtatctacaaatgaacagcctgagagccgaggacacggctgtttattactgtgcgagacgggggaggggctactttgactactggggccagggaaccctggtctccgtctcctca

SEQ ID NO: 6317 - DNA, 286 bp, Homo sapiens
  source 1..286: mol_type = other DNA
tgaagcctctggattcatcttcgacagttatgaaatgaactgggtccgccaggctccagggaaggggctggagtgggcttcatacattggcagtagtactgcttccatatattacgcagactctgtgaagggccgattcaccatctccagagacaacgccaaaaattcactgtacctacaaatggacagtctgagagtcgaggacacggctgtttattactgtgcgagacgtggccggggctactttgactactggggccagggaatcctggtcaccgtctcctca

SEQ ID NO: 6318 - DNA, 286 bp, Homo sapiens
  source 1..286: mol_type = other DNA
tgtaggatctggcttcaacttcaatatctatagcatgaactgggtccgccaggctccagggaagggcctggagtgggtgtcatacattactggtcctagtaatgtcattgactatggagactctgtgaagggccgattcaccatctccagggacaacgccaagaaatcagtgtatctgcaaatgaacagtctgagcgccgaagacacgggtgtatattactgtgcgaggagcactgagggagctttcgactactggggccagggagtcctcgtcaccgtctcctca

SEQ ID NO: 6319 - DNA, 286 bp, Homo sapiens; identical to SEQ ID NO: 6318
  source 1..286: mol_type = other DNA

SEQ ID NO: 6320 - DNA, 286 bp, Homo sapiens
  source 1..286: mol_type = other DNA
tgcagcctctggattcaccttcagtatctatagcatgaactgggtccgccaggctccagggaaggggctggagtgggtttcatacatgactagtgatactcgcaccatacactacgcagagtctgtgaagggccgattcaccatctccagagacaatgccaagaactcagtgtatctgcaaatgaacagcctcagagacgaggacacggctgtatattactgtgcgagaagcactgagggagcctttgactactggggccagggaaccctggtcaccgtctcctca

SEQ ID NO: 6321 - DNA, 286 bp, Homo sapiens
  source 1..286: mol_type = other DNA
tgcagcctctggattcaccttcagagtctatagcatgaactgggtccgccaggctccagggaaggggctggagtggatttcatacatgactagtgacatgcgcaccataaaatatgcagattctgtgaagggccgattcaccatctccagagacaatgacaagaactcagtgtatctgcaaatgaacagcctcagagacgaggacacggctatatattactgtgcgagaagcactgagggagcctttgactattggggccagggaaccctggtcaccgtctcctca

SEQ ID NO: 6322 - DNA, 286 bp, Homo sapiens
  source 1..286: mol_type = other DNA
tgcaggctgtggattcacctttaccaactatgccatgaggtgggtccgccaggctcctgggaaggggctggagtgggtctcaacgattagtggtagtggtgttggcacatactacgcagactccgtgaagggccggttcaccatctccagagacacttccaaggacacattgtatctgcaaatgaacagcctgagagccgacgacacggccctatatttctgtgcgagaggtcccggttattattttgactactgcggccagggaaccctggtcaccgtctcctca

SEQ ID NO: 6323 - DNA, 286 bp, Homo sapiens
  source 1..286: mol_type = other DNA
tgcagtctctggattcacccttagtggctatgtcatgaggtgggtccgccaggctccagggaaggggctggagtgggtctccactcttggtagtgatggtgaaagtacatactacacagactccgtgaggggccggttcaccatctccagagacagttccaagaacacactgtatctgcaaatgaacagcctgagagccgaggacgcggccgtttattactgtgcgagaggccccggctattactttgactactggggccagggaaccctggtcaccgtctcctca

SEQ ID NO: 6324 - DNA, 295 bp, Homo sapiens
  source 1..295: mol_type = other DNA
tgcaggctctggattcaccctcagtagcttctggatgcactgggtccgccaagttccagggaaggggctggtgtgggtctcacgtattaatagtgatgggagtagtacaagttacgcggactccgtgaagggccgattcaccatctccagagacaacgccaagaacacgctatatctgcaaatgaacagtctgagagccgaggacacggctgtgtattactgtgcaagggacggatatggttcggggattgactttgactactggggccagggaaccctggtcaccgtctcctca

SEQ ID NO: 6325 - DNA, 295 bp, Homo sapiens
  source 1..295: mol_type = other DNA
tgcagcctctggattcaccttcagtagccactggacgcactgggtccgccaagctccagggaaggggctggtgtgggtctcgcgtattaacactgatgggagtttcacaaactacgcggactccgtgaagggccgattcaccatctccagagacaacgccaagaacacgctgtatctgcaaatgaacagactgagagccgacgacacggctgtgtattactgtgcaagagacggctatggttcggggattgactttgactactggggccagggaaccctggtcaccgtctcctca

SEQ ID NO: 6326 - DNA, 292 bp, Homo sapiens
  source 1..292: mol_type = other DNA
tgcagcctctggattcacttttagtagttattggatgacctgggtccgccaggctccagggaaggggctggagtgggtggccaacataaaccaagatggaagtgagaagcactatgtggactctgtgaagggccgattcaccaactccagagacaacgccaagaactcactgtatctgcaaatgaacagcctgagagtcgaggacacggctgtgtattactgtgcgagagaagggggtagtggttattcttttgactactggggccagggaaccctggtcaccgtctcctca

SEQ ID NO: 6327 - DNA, 292 bp, Homo sapiens
  source 1..292: mol_type = other DNA
tgcagcctctggattcacttttagtagttattggatgacctgggtccgccaggctccagggaaggggctggagtgggtggccaacataaaccaagatggaagtgagaagcactatgtggactctgtgaagggccgattcaccaactccagagacaacgccaagaactcactgtatctgcaaatgaacagcctgagagccgaggacacggctgtgtattactgtgcgagagaagggggtagtggttattcttttgactactggggccagggaaccctggtcaccgtctcctca

SEQ ID NO: 6328 - DNA, 292 bp, Homo sapiens
  source 1..292: mol_type = other DNA
tgcagcctctggattcacttttagtagttattggatgacctgggtccgccaggctccagggaaggggctggagtgggtggccaacataaaccaagatggaagtgagaagcactatgtggactctgtgaagggccgattcaccaactccagagacaacgccaagaactcactgtatctgcaaatgaatagcctgagagccgaggacacggctgtttattactgtgcgagagaagggggtagtggttattcttttgactactggggccagggaaccctggtcaccgtctcctca

SEQ ID NO: 6329 - DNA, 292 bp, Homo sapiens
  source 1..292: mol_type = other DNA
tgcagcctctggattcagttttagtagctattggatgacctgggtccgccaggctccagggaaggggctggagtgggtggccaacataaaccaagatggaagtgagaaacactatgtggactctgtgaagggccgattcaccaactccagagacaacgccaagaactcactgtatctgcaaatgaacagcctgagagccgaggacacggctgtgtattactgtgcgagagaagggggtagtggttattcttttgactactggggccagggaaccctggtcaccgtctcctca

SEQ ID NO: 6330 - DNA, 292 bp, Homo sapiens
  source 1..292: mol_type = other DNA
tgcagcctctggattcagttttagtagctattggatgacctgggtccgccaggctccagggaaggggctggagtgggtggccaacataaaccaagatggaagtgagaaacactatgtggaccctgtgaagggccgattcaccaactccagagacaacgccaagaactcactgtatctgcaaatgaacagcctgagagccgaggacacggctgtgtattactgtgcgagagaagggggtagtggttattcttttgactactggggccagggaaccctggtcaccgtctcctca

SEQ ID NO: 6331 - DNA, 292 bp, Homo sapiens
  source 1..292: mol_type = other DNA
tgcagtgtctggaatcacctttagtagctattggatgacttgggtccgccaggctccagggaaggggctggagtgggtggccaacataaagcaagatggaagtgagaaacactatgtggactctgtgaagggccgattcaccatctccagagacaacgccaagaactcaatgtatctgcaaatgaacagtctgagagccgaggacacggctgtctattactgtgcgagagaagggggtagtggttattcgtttgactactggggccggggaaccctggtcaccgtctcctca

SEQ ID NO: 6332 - DNA, 292 bp, Homo sapiens
  source 1..292: mol_type = other DNA
tgtagcctctggattcacctttagtaattattggatgacctgggtccgccaggctccagggaaggggctggaatggctggccaacacaaagcaagatggaagtgagaaaaactatgtggactctgtgaagggccgattcaccatctccagagacaacgccaagaagtcactgtatctgcaaatgaacagcctgagaggcgaggacacggctgtgtattactgtgcgagagaagggggtagtggttattcgtttgactactggggccagggaaccctggtcaccgtctcctca

SEQ ID NO: 6333 - DNA, 292 bp, Homo sapiens
  source 1..292: mol_type = other DNA
tatagcctctggattcacctttagtaattattggatgacctgggtccgccaggctccagggaaggggctggagtggctggccaacataaagcaagatggaagtgagaaaaactatgtggactctgtgaagggccgattcaccatctccagagacaacgccaagaactcactatctctgcaaatgaacagcctgagagccgaggacacggctgtgtattactgtgcgagagaagggggtagtggttattcgtttgactactggggccagggaaccctggtcaccgtctcctca

SEQ ID NO: 6334 - DNA, 292 bp, Homo sapiens
  source 1..292: mol_type = other DNA
tgcagtctctggaatcacctttagtagctattggatgacctgggtccgccaggctccagggaaggggctggagtgggtggccaacataaaccaagatggaagtgagaaaaactatgtggcctctctgaagggccgattcaccatctccagagacaacgccaagaagtcactgtatctgcaattgaacagcctgcgagccgaggacacggccgtatattactgtgcgagagaggggggtagtggttattcctttgactactggggccagggaaccctggtcaccgtctcctca

SEQ ID NO: 6335 - DNA, 286 bp, Homo sapiens
  source 1..286: mol_type = other DNA
tgcagcctctggattctccttcagtacctatgctatgcactgggtccgccaggctccagggaagggactggaatatgtttcagctattaattataatgggggtaccacatattatacaaactctgtgaagggcagattcaccatctccagagacaattccaagaatatgctgtatcttcaaatgggcagcctgagagctgaggacatggctgtctattactgtgcgagatatcaaatgggagcccctgactactggggccagggaaccctggtcaccgtctcctca

SEQ ID NO: 6336 - DNA, 286 bp, Homo sapiens
  source 1..286: mol_type = other DNA
tgcagcctctggattcagcttcaatacatatgctatgcactgggtccgccaggctccaggcaagggactggaatatgtttcagctattaattataatgggggtaccacatattatgcaaactctgtgaagggcagattcaccatctccagagacaattccaagaatatgctatatcttcaaatgggcagcctgagacctgaggacatggctgtctatttctgtgcgagatatcaaatgggagcccctgactactggggccagggaaccctggtcaccgtctcgtca

SEQ ID NO: 6337 - DNA, 286 bp, Homo sapiens
  source 1..286: mol_type = other DNA
tgcagcctctggattcagcttcagtacctatgctatgcactgggtccgccaggctccaggcaagggactggaatatgtttcagctattaattataatgggcataacacatattatgtaagctctgtgacgggcagattcaccatctccagagacaattccaagaatatgctatatcttcaaatgggcagtctgagacctgaggacatggctgtctatttctgtgcgagatatcaaatgggagcccctgactactggggcccgggaaccctggtcaccgtctcctca

SEQ ID NO: 6338 - DNA, 286 bp, Homo sapiens; identical to SEQ ID NO: 6335
  source 1..286: mol_type = other DNA

SEQ ID NO: 6339 - DNA, 286 bp, Homo sapiens; identical to SEQ ID NO: 6336
  source 1..286: mol_type = other DNA

SEQ ID NO: 6340 - DNA, 286 bp, Homo sapiens
  source 1..286: mol_type = other DNA
tgcagcctctggattctccttcagtacctatgctatgcactgggtccgccaggctccagggaagggactggaatatgtttcagctattaattataatgggggtaccacatattatacaaactctgtgaagggcagattcaccatctccagagacaattccaagaatatgctatatcttcaaatgggcagcctgagagctgaggacatggctgtctattactgtgcgagatatcaaatgggagcccctgactactggggccagggaaccctggtcaccgtctcctca

SEQ ID NO: 6341 - DNA, 286 bp, Homo sapiens
  source 1..286: mol_type = other DNA
tgcagactctggattcacctttgggagttattggatggactgggtccgccaggctccagggaaggggctggagtgggtggccaacataaagcaagatggaagtgagacaggctatgtggactctgtcaagggccgattcaccatctccagagacaacgccaagagctcactgtatctgcaaatgaacagtctgagagtcgaggacacggctgtctattactgtgcgagagacgcttttggagtgggctcctactggggccagggaatcctggtcaccgtctcctca

SEQ ID NO: 6342 - DNA, 286 bp, Homo sapiens
  source 1..286: mol_type = other DNA
tgcagactctggattcagttttgggaattattggctggactgggtccgccaggctccagggaaggggctggagtgggtggccaacataaagcaagatggaagtgagacaggctatgtggactctgtcaagggccgattcaccatctccagagacaacgccaagagctcactgtatctgcaaatgaacagtctgagagtcgaggacacggctgtctattactgtgcgagagacgcttttggagtgggctcctactggggccagggaatcctggtcaccgtctcctca

SEQ ID NO: 6343 - DNA, 286 bp, Homo sapiens
  source 1..286: mol_type = other DNA
tgcagcctctggactcacttttagtagctactggctggactgggtccgccaggctccagggaaggggctggagtgggtggccaatgtaaggcaagacggaagtgagagaaattatgtggactctgtgaagggccgattcaccgtctcgagagacaacgccaagaactcattgtatctgcaaatgaacagcctgggagccgaagacacggctgtttattactgtgcgagagacgcgttcggggtaggttcctactggggccagggaatcctggtctccgtctcctca

SEQ ID NO: 6344 - DNA, 283 bp, Homo sapiens
  source 1..283: mol_type = other DNA
tgtagcctctggattcaccttcagttctcatgaaatgctctgggtccgccaggctccagggaaggggctggagcgggtttcatacattaatactggtgatagaaatatatggtacgcagactctgtgaagggccgattcaccatctccagagacgacgccaagaattcattgtatctgcaaatgaacagcctgagaaccgaggacatggctgtttactattgtgtgagaggttggagggaactaacccactggggccagggaaccctggtcaccgtctcctca

SEQ ID NO: 6345 - DNA, 283 bp, Homo sapiens
  source 1..283: mol_type = other DNA
tgcagcctctgggttcccattcagtagtcatgaaatgaactgggtccgccaggctccaggggaggggccggagtggatttcatacattggtgatagtggcggtaacataaaatacgccgactctgtgaagggccgattcaccatctccagagacaacgccaagaattcattgtatctgcaaatgaacagcctgagagccgaggacacggctgtttattactgtgtgagaggatggcgtgaactaactcactggggccagggaaccctggtcaccgtctcctca

SEQ ID NO: 6346 - DNA, 285 bp, Homo sapiens
  source 1..285: mol_type = other DNA
aagggttctggatacggctttaccagctactggatcgcctgggtgcgccagatgcccgggaaaggcctggagttgatggggatcatctatcctggtgactctgatactacatacagcccgtccttcgaaggccaggtcaccatgacagccgacaagtccatcaacaccgcctacctgcagtggagcagcctgaaggcctcggacaccgccctatattactgtgcgagaagagatgcctacagatttgactattggggccagggaaccctggtcaccgtctcctca

SEQ ID NO: 6347 - DNA, 285 bp, Homo sapiens
  source 1..285: mol_type = other DNA
cagggttctggatacagctttaccaactactggatcggctgggtgcgccagatgcccgggaaaggcctggagtggatggggatcatctatccttatgactctgataccagatacagcccgtccttccaaggccaggtcaccatctcagccgacaagtccatcagcaccgcctacctgcagtggagcagcctgaaggcctcggacaccgccatgtattactgtgcgagacgggatgcctacaggttcgactactggggccagggaaccctggtcaccgtctcctca

SEQ ID NO: 6348 - DNA, 285 bp, Homo sapiens
  source 1..285: mol_type = other DNA
gcttctggatacaccttcactaattatgctatacattgggtgcgccaggcccccggacaaagccttgagtggatgggatggatctacgctgccaatggtaacacacaatattcacagaagttccagggcagagtcaccattaccatggacacgttcacgaatacagcctacatggacctgagcagcctgagatctgaagacacggctatatattactgtgcgagattcgcagtagcagccccgcccgactactggggccagggaacccaggtcaccgtctcctca

SEQ ID NO: 6349 - DNA, 285 bp, Homo sapiens
  source 1..285: mol_type = other DNA
gcttctggatacaccttcagtgcctatgcaatacattgggtgcgccaggcccccggacaaaggcttgagtggttgggatggatcaacgttggcaagggtaacacaaaatattcagaggagttccagggcagagtcaccattaccagggacacatcagcgagcacagcctacatggaggtgagcagcctgagatctgaagacacggctgtctattactgtgcaagatttgcagtggcggccccaccagactactggggccagggaaccctggtcaccgtctcctca

SEQ ID NO: 6350 - DNA, 285 bp, Homo sapiens
  source 1..285: mol_type = other DNA
gcttctggatacaccttcactaattatgctatacattgggtgcgccaggcccccggacaaagccttgagtggatgggatggatctacgctgccgatggtaacacacaatattcacagaagttccagggcagagtcaccattaccatggacacgttcacgaatacagcctacatggacctgagcagcctgagatctgaagacacggctatatattactgtgcgagattcgcagtagcagccccgcccgactactggggccagggaacccaggtcaccgtctcctca

SEQ ID NO: 6351 - DNA, 285 bp, Homo sapiens
  source 1..285: mol_type = other DNA
gcttctggatacaccttcactaattatgctatacattgggtgcgccaggcccccggacaaagccttgagtggatgggatggatctacgctgccaatggtaacacacaatattcacagaagttccagggcagagttaccattaccatggacacgttcacgaatacagcctacatggacctgagcagcctgagatctgaagacacggctatatattactgtgcgagattcgcagtagcagccccgcccgactactggggccagggaacccaggtcaccgtctcctca

SEQ ID NO: 6352 - DNA, 283 bp, Homo sapiens
  source 1..283: mol_type = other DNA
tgtagcctctggattcaccttcagtggttactggatgcactgggtccgccaagctccagggaaggggctgatgtggatctcaggtattaataatgatggaagtcgcacaaaatatgtggactctgtgaggggccgcttcaccatctccagagacaacgccaagaacacactgtttctgcaagtgaacggtctgacagccgaggacacggctgtatattactgtgcaagagatttcttaactgggggctactggggccagggaaccccggtcaccgtctcctca

SEQ ID NO: 6353 - DNA, 283 bp, Homo sapiens
  source 1..283: mol_type = other DNA
tgcagcctctggattcaccttcagtaactactggatgcactgggtccgccaagctccagggaaggggctggtgtgggtctcacgcattaaaactgatgggagtagaacaagttacgcggactccgtgaagggccgattcaccatctccagagacaacgccaagaacaccctgtatctgcaaatgaacagtctgagagccgaggacacggctgtgtatttctgtgcaagagatttcctcactggcggctactggggccagggaaccgtggtcaccgtctcctca

SEQ ID NO: 6354 - DNA, 274 bp, Homo sapiens
  source 1..274: mol_type = other DNA
tgcagcctctggattcacctttagtaactcttggatgaactgggtccgccaggctccagggaaggggctggagtgcgtggccaatataaaccaagatggaactgacaaatactatgtggactctgtgaagggccgattcaccatctccagagacaacgccaagaactcactgtatctgcaaatgaacagcctgacagccgaggacacggctctatattactgtgtgagaagtctcgattcgtggggccagggaaccctggtcaccgtctcctca

SEQ ID NO: 6355 - DNA, 274 bp, Homo sapiens; identical to SEQ ID NO: 6354
  source 1..274: mol_type = other DNA

SEQ ID NO: 6356 - DNA, 274 bp, Homo sapiens
  source 1..274: mol_type = other DNA
tgtagcctctggattcacctttagtagttattggatgaactgggtccgccggactccagggaaggggctggaatgggtggccaacataaaggaagatggaagtgaggattactacatggactctatgaagggccgattcaccatctccagagacaacgccaagaacacagtgtatctgcaaatgaacagcctgagagccgaggacacggccctgtattattgtgtgagatccctagattcatggggccagggaatcctggtcaccgtctcctca

SEQ ID NO: 6357 - DNA, 295 bp, Homo sapiens
  source 1..295: mol_type = other DNA
tgcagcctctggattcacctttagcagctatgccatgagctgggtccgccaggctccaggggaggggctggagtgggtctcatctattcgtgttactggtagtagcacatattacgcaggctccgtgaagggccggttcaccatctccagagacagttccaagaacacgctgtatctgcaaatgaacagcctgagagccgaggacacggccttatattattgtgcgaaagggagtggctatgattggcggatctttgactactggggccagggaaccctggtcaccgtctcctca

SEQ ID NO: 6358 - DNA, 295 bp, Homo sapiens
  source 1..295: mol_type = other DNA
tgcagcctctggattcacctttagcagctatgccatgagctgggtccgccaggctccaggggaggggctggagtgggtctcatctattcgtgctagtggtagtagcacatattacgcaggctccgtgaagggccggttcaccatctccagagacagttccaagaacacgctgtatctgcaaatgaacagcctgagagccgaggacacggccttatattactgtgcgaaagggagtggctatgattggcggatctttgactactggggccagggaaccctggtcaccgtctcctca

SEQ ID NO: 6359 - DNA, 295 bp, Homo sapiens
  source 1..295: mol_type = other DNA
tacagcctctggattcacctttaacagctatgccatgagctgggtccgccaggctccaggggaggggctggagtgggtctcatctattcgtgctagtggaggcaacatattttacgcaggctccgtgaagggccggttcaccatctccagagacagttccaagaacacactatatctccaaatgaacagcctgagagccgaggacacggccttatattactgtgcgaaagggagtggctatgattggcggatctttgactactggggccagggaaccctggtcaccgtctcctca

SEQ ID NO: 6360 - DNA, 295 bp, Homo sapiens
  source 1..295: mol_type = other DNA
tgcagcctctggattcacctttagcagctatgccatgagctgggtccgccaggctccaggggaggggctggagtgggtctcatctattcgtgttagtggtagtaacatatattacgcaggctccgtgaagggccggttcaccatctccagagacaattccaagaacacgctgtttctgcaaatgaacagcctgagagccgaggacacggccttatattactgtgcgaaagggagtggctatgattggcggatctttgactactggggccagggaaccctggtcaccgtctcctca

SEQ ID NO: 6361 - DNA, 295 bp, Homo sapiens
  source 1..295: mol_type = other DNA
tgcagcctctggattcacctttaccagctatgccatgagctgggtccgccagactccaggggaggggctggagtggatctcaactattcgtgttagtggtggtaacatatactacgcaggctccgtgaagggccggttcaccatctccagagacacttccaagaacacgctgtatctgcaaatgaacagcctgagagccgaggacacggccttatattactgtgcgaaagggagtggctatgattggcggatctttgattactggggccagggaaccctggtcaccgtctcctca

SEQ ID NO: 6362 - DNA, 295 bp, Homo sapiens; identical to SEQ ID NO: 6358
  source 1..295: mol_type = other DNA

SEQ ID NO: 6363 - DNA, 295 bp, Homo sapiens; identical to SEQ ID NO: 6359
  source 1..295: mol_type = other DNA

SEQ ID NO: 6364 - DNA, 295 bp, Homo sapiens
  source 1..295: mol_type = other DNA
tgcagcctctggattcacctttagcgcctatgccatgagttgggtccgccagggtccagggaaggggctggagtgggtctcaggtattagtgggagtggtggtacgacacactacgcagactctgtgaagggccggttcaccatctccagagacaattcgaagaacaccctctatctacaaatgaatggcctgagagccgacgacacggccgtatattactgtgcgaaaggtagtggctacgattggcggatctttgactactggggccagggaaccctgatcaccgtctcctca

SEQ ID NO: 6365 - DNA, 295 bp, Homo sapiens
  source 1..295: mol_type = other DNA
tgcagcctctggattcacctttagtagctatgccatgagctgggtccgccaggctccaggggaggggctggaatgggtctcatctattcgtgttagtggtagtagcacatattacgcaggctccgtgaagggccggttcaccatctccagagacagttccaagaacacgctgtatctgcaaatgaacagcctgagagccgaggacacggccttatattactgtgcgaaagggagtggctatgattggcggatctttgactactggggccagggaaccctggtcaccgtctcctca

SEQ ID NO: 6366 - DNA, 295 bp, Homo sapiens
  source 1..295: mol_type = other DNA
tgcagcctctggattcacctttagcagctatgccatgagctgggtccgccaggctccaggggaggggctggagtgggtctcatctattcgtgttagtggtggtagcatatattacgcaggctccgtgaagggccggttcaccatctccagagacaattccaagaacacgctgtatctgcaaatgaacagcctgagagccgaggacacggccttatattactgtgcgaaagggagtggctatgattggcggatctttgactactggggccagggaaccctggtcaccgtctcctca

SEQ ID NO: 6367 - DNA, 268 bp, Homo sapiens
  source 1..268: mol_type = other DNA
tagaacctctggattcacgttcaacaacgccggcatgaactgggtccgccaggctccagggaggggactagagtggatttcatacattagtagtgatgccatcttctacggagactctgtgcagaaccgatttatcgtctccagagacagcgcccagaactcagtgtatcttcaaatgaattccctcagagtcgaagacacggctgtctatttctgcgcgagaggtggggaggactggggccagggaaccctggtcaccgtctcctca

SEQ ID NO: 6368 - DNA, 274 bp, Homo sapiens
  source 1..274: mol_type = other DNA
tgtagcctctggattgaccttcagtacctacaacatgaactgggtccgccaggctccagggaaggggctggagtgggtttcattcattagtggtagtgatagtaccatatattacgcagactctgtgaagggccgatttaccatctccagagacaatgccaagaactcactgtatctgcaaatgaacagcctgagagacgaggacacggctgtgtattattgtgcgagggggggggaagactggggcccgggaaccctggtcaccgtctcctca

SEQ ID NO: 6369 - DNA, 274 bp, Homo sapiens
  source 1..274: mol_type = other DNA
tgcagcctctggatttacctttaataccttttggatgagttgggtccgccagatttcagggaaggggctggagtgcctggccaacataagccctgatggcagtgcgaaattctatgcggactctgtgaagggccgaatcaccatctccagagacaatgccaagaattcgttgactttgcaaatgaacagcctcagagtcgacgacacggccgtgtattactgtgtgagaagtgtcgaccactggggccagggaaccctggtcaccgtctcctca

SEQ ID NO: 6370 - DNA, 274 bp, Homo sapiens
  source 1..274: mol_type = other DNA
tgcagcctctggattcacctttaacaccttttggatgagctgggtccgccagatttcagggaaggggctggagtgcctggccaacataagccctgatggcagtgcgaaattctatgcggactctgtgaagggccgaatcaccatctccagagacaacgccaagaattcgttgactttgcaaatgaacagcctcagagtcgacgacacgggtgtgtattactgtgtgagaagtgtcgaccactggggccagggaaccctggtcaccgtctcctca

SEQ ID NO: 6371 - DNA, 274 bp, Homo sapiens
  source 1..274: mol_type = other DNA
tgcagcctctggattcaggtttaataccttttggatgagctgggtccgccagacttcagggaaggggctggagtgcctggccaacataagccctgatggcagttcgaaattctatgcggactctctgaagggccgaatcaccatctccagagacaacgccaagaattcgttgaatttgcaaatgaacagcctcagagtcgacgacacggctgtgtattactgtgtgagaagtgtcgaccactggggccagggaaccctggtcaccgtctcctca

SEQ ID NO: 6372 - DNA, 274 bp, Homo sapiens
  source 1..274: mol_type = other DNA
tgaagcctctggattcacctttactaactactggatgagctgggtccgccagtctccagggaaggggctggagtgcgtggccaacataaagccagatggaagtgacaaattctatgtggactctctcaagggccgattcaccatctccagagacaacgccaagaactcactgtatctggaaatgaacagcctgagagccgaagacacggctgtgtattactgtgtgcgaagtgtcgaccactggggccagggaaccctggtcaccgtctcctca

SEQ ID NO: 6373 - DNA, 280 bp, Homo sapiens
  source 1..280: mol_type = other DNA
tgcagcctctggattcacttttagtaactactggatgagttgggtccgccaggctccagggaagaggctggagtgcgtggccaacataaagccagatggaagtgacaaattctatgtggactctgttaagggccgattcaccatctccagagacaacgccaagaactcactgtatctgcaaatgaacaacctgagagccgaggacacggctgtgtaccactgtgtgcgaagtgtcgaccactggggccagggaaccctggtcaccgtctcctcaggtgaa

SEQ ID NO: 6374 - DNA, 274 bp, Homo sapiens; identical to SEQ ID NO: 6372
  source 1..274: mol_type = other DNA

SEQ ID NO: 6375 - DNA, 274 bp, Homo sapiens
  source 1..274: mol_type = other DNA
tgtagcctctggattcacctttagtaacttctggatgagctgggtccgccaggctccagggaaggggctggagtgcgtggccaacataaagccagatggaagtgacaaattctatgtggactctctcaagggccgattcaccatctccagagacaacgccaagaactcactgtatctgcaaatgaacagcctgagagccgaagacacggctgtgtattactgtgtgcgaagtgtcgaccactggggccagggaaccctggtcaccgtctcctca

SEQ ID NO: 6376 - DNA, 274 bp, Homo sapiens
  source 1..274: mol_type = other DNA
tgcagcctccggattcacttttagtaactcctggatgagctgggtccgccagggtccagggaagaggctggagtgcgtggccaacataaaggaagatggaactgccacattctatgtggactctgtgaagggccgattcaccatctccagagacaacgccaagaactcgctgtttctgcaaatgaacagcctgagagtcgaggacacggctgtgtactactgtgtgcgcagtgtcgaccactggggccagggaaccctggtcaccgtctcctca

SEQ ID NO: 6377 - DNA, 274 bp, Homo sapiens
  source 1..274: mol_type = other DNA
tgcagcctctggattcacctttactaactactggatgagttgggtccgccaggctccagggaagaggctggagtgcgtggccaacataaagcctgatggaagtgacagcttctatgtggactctgtgaagggccgattcaccatctccagagacaacgccaagaattcactgtttctgcaaatgaacagcctgagagtcgaggacacggctgtctattactgtgtgcgaagtgtcgaccactggggccagggaaccctggtcaccgtctcctca

SEQ ID NO: 6378 - DNA, 274 bp, Homo sapiens
  source 1..274: mol_type = other DNA
tgcagcctctggattcacctttactaactactggatgagttgggtccgccaggctccagggaagaggctggagtgcgtggccaacataaagccagatggaagtgacaaattctatgtggactctgtgaagggccgattcaccatctccagagacaacgccaagaattcactgtttctgcaaatgaacagcctgagagtcgaggacacggctgtctattattgtgtgcgaagtgtcgaccactggggccagggaaccctggtcaccgtctcctca

SEQ ID NO: 6379 - DNA, 274 bp, Homo sapiens
  source 1..274: mol_type = other DNA
tgcagcctctggattcacatttcctgacttctggatgagttgggtccgccagactccagggaagaggctggagtgcgtggccaacataaggccagatggaggtgccaaattctatgtggactctgtggagggccgattcaccatctccagagacaacgccaagaattcactgtttctgcaaatgaacagcctgagagtcgaggacacggctgtctattactgtgtgcgaagtgtcgaccactggggccagggaaccctggtcaccgtctcctca

SEQ ID NO: 6380 - DNA, 280 bp, Homo sapiens
  source 1..280: mol_type = other DNA
tgtagcctctggattcacttttagcaactactggatgagctgggtccgccaggctccagggaagaggctggagtgcgtggccaacataaagccagatggaagtgacaaattctatgtggactctgttaagggccgattcaccatctccagagacaacgccaagaactcactgtatctgcaaatgaacaacctgagagccgaggacacggctgtctaccactgtgtgcgaagtgtcgaccactggggccagggaaccctggtcaccgtctcctcaggtgaa

SEQ ID NO: 6381 - DNA, 274 bp, Homo sapiens
  source 1..274: mol_type = other DNA
cgcagcctctggattcacttttagtagctcctggatgagctgggtccgccagggtccagggaagaggctggagtgcgtggccaacataaaggaagatggaagtgccaaattctatgtggactctgtgaagggccgattcaccatctccagagacaacgccaagaactcactgtatctgcaaatgaacagcctgagagccgaggacacggctgtgtactactgtgtgcgaagtgtcgaccactggggccagggaaccctggtcaccgtctcctca

SEQ ID NO: 6382 - DNA, 274 bp, Homo sapiens
  source 1..274: mol_type = other DNA
tgcagcctctggattcacctttcctaacttttggatgagttgggtccgccagactccagggaagaggctggagtgcgtggccaacataaaaccagatggcggtgccacattctatttggactctgtgaagggccgattcaccatctccagagacaacgcccagaattcactgtttctgcaaatgaacagcctgagagtcgaggacacggctgtctattactgtgtgcgaagtgtcgaccactggggccagggaaccctggtcaccgtctcctca

SEQ ID NO: 6383 - DNA, 274 bp, Homo sapiens
  source 1..274: mol_type = other DNA
tgcagcctctggattcacttttagtgactactggatgagttgggtccgccaggctccagggaagaggctggagtgcgtggccaacataaagccagatggaagtgacaaattctatatggactctgtgaagggccgattcaccatctccagagacaacgccaagaactcactgtatctgcaaatgtacagcctgacagtcgaggacacggctgtgtaccactgtgtgcgaagtgtcgaccactggggccagggaaccctggtcaccgtctcctca

SEQ ID NO: 6384 - DNA, 274 bp, Homo sapiens
  source 1..274: mol_type = other DNA
tgcagcctctggattcacttttagtaactactggatgagctgggtccgccagggtccagggaagaggctggagtgcgtggccaacataaaggaagatggaagtgccaaattctatgtggactctgtgaggggccgattcaccatctccagagacaacgccaagaactcagtgtatctgcaaatgaacagcctgagagccgaggacacggctgtgtactattgtgtgcgaagtgtcgaccactggggccagggaaccctggtcaccgtctcctca

SEQ ID NO: 6385 - DNA, 280 bp, Homo sapiens; identical to SEQ ID NO: 6373
  source 1..280: mol_type = other DNA

SEQ ID NO: 6386 - DNA, 274 bp, Homo sapiens
  source 1..274: mol_type = other DNA
tgcagcctctggattcacatttgctgacttctggatgagttgggtccgccaggctccagggaagaggctggagtgcgtggccaacataaggccagatggaggtgccaaattctatgtggactctgtggagggccgattcaccatctccagagacaacgccaagaattcactgtttctgcaaatgaacagcctgagagtcgaggacacggctgtgtattactgtgtgcgaagtgtcgaccactggggccagggaaccctggtcaccgtctcctca

SEQ ID NO: 6387 - DNA, 274 bp, Homo sapiens
  source 1..274: mol_type = other DNA
tgcagcctctggattcacttttagtaactactggatgagctgggtccgccagggtccagggaagaggctggagtgcgtggccaacataaaggaagatggaagtgccaaattctatgtggactctgtgaagggccgattcaccatctccagagacaacgccaagaactcactgtatctgcaaatgaacagcctgagagccgaggacacggctgtgtactattgtgtgcgaagtgtcgaccactggggccagggaaccctggtcaccgtctcctca

SEQ ID NO: 6388 - DNA, 278 bp, Homo sapiens
  source 1..278: mol_type = other DNA
cagcctctggattcacttttagtaactactggatgagctgggtccgccaggctccagggaagaggctggagtgcgtggccaacataaagccagatggaagtgacaaattctatgtggactctgttaagggccgattcaccatctccagagacaacgccaagaactcactctatctgcaaatgaacaacctgagagccgaggacacggctgtgtaccactgtgtgcgaagtgtcgaccactggggccagggaaccctggtcaccgtctcctcaggtgaa

SEQ ID NO: 6389 - DNA, 274 bp, Homo sapiens
  source 1..274: mol_type = other DNA
tgcagcctctggattcatctttagtgacttctggatgagttgggtccgccaggctccagggaggaggccggagtgcgtggccaacataaagccagatggaagtgaccaattctatgtggactctctgaagggccgattcaccatctccagagacaacgccaagaattcactgtttctgcaaatgaacagcctgagagtcgaggacacggctgtctattactgtgtgcgaagtgtcgaccactggggccagggaaccctggtcaccgtctcctca

SEQ ID NO: 6390 - DNA, 292 bp, Homo sapiens
  source 1..292: mol_type = other DNA
cactgtctctggtggctccatcagtagctactactggagctggatccggcagcccccagggaagggactggagtggattgggaatatctattacagtgggagcacccactacaacccctccctcaagagtcgagtcaccatatcagtagacacgtccaagaaccagttctccctgaagctgagctctgtgatcgttgcggacacggccgtgtattactgtgcgagaagtagcagtggctggtactggtacttcgatctctggggccgtggcaccctggtcactgtctcctca

SEQ ID NO: 6391 - DNA, 292 bp, Homo sapiens
  source 1..292: mol_type = other DNA
cgctgtctctggtggctccatcagtagttattactggaactggatccggcagcccccagggaagggactggagtggattgggtatatctattacagtgggaccaccaactacaacccctccctcaagagtcgagtcaccatatcagtagacacgtccaagaaccagttctccctgaagctgagctctgtgaccgctgcggacacggccgtgtattactgtgcgagaagtagcagtggctggtactggtacttcgatctctggggccgtggcaccctggtcactgtctcctcg

SEQ ID NO: 6392 - DNA, 292 bp, Homo sapiens
  source 1..292: mol_type = other DNA
cactgtctctggtggctccatcagtagttactactggaactggatccggcagcccccagggaagggactggagtggattgggtatatctattacagtgggaccaccaactacaacccctccctcaagagtcgagtcaccatatcagtagacacgtccaagaaccagttctccctgaagctgagctctgtgaccgctgcggacacggccgtgtattactgtgcgagaagtagcagtggctggtactggtacttcgatctctggggccgtggcaccctggtcactgtctcctca

SEQ ID NO: 6393 - DNA, 288 bp, Homo sapiens
  source 1..288: mol_type = other DNA
gcatctggatacatcttcagcacatactatgtgcactgggtgcgacaggcccctggacaagggcttgagtggatgggaagagtcagccctagtgatggctcgacacactacccacagaatttccagggcagagtcactatgaccaccgacacgtcctcgagcacagtatacatggacctgagcagcctgagatctgaagacacggccgtatattactgtgcgagagaatatcccggtcgttgttggttcgacccctggggtcagggaaccctggtcaccgtctcggcg

SEQ ID NO: 6394 - DNA, 288 bp, Homo sapiens
  source 1..288: mol_type = other DNA
gcatctggatacaccttcagcacatactatgtgcactgggtgcgacaggcccctggacaagggcttgagtggatgggaagagtcggccctaatgatggctcgacacactacccacagaatttccagggcagagtcaccatgaccaccgacacgtcctcgagcacagtgtacatggacctgagcagcctgagatctgaagacacggccgtatattactgtgcgagagaatatcccggtcgttgttggttcgacccctggggtcagggaaccctggtcaccgtctcgtca

SEQ ID NO: 6395 - DNA, 288 bp, Homo sapiens
  source 1..288: mol_type = other DNA
gcatctggatacaccttcaccaactactttatccactgggtgcgacaggcccctggacaagggcttgagtggctgggaatgatcagccctagtgatggtgctataaactatgcacagaggttccagggcagagtcaccatgaccagggacacgccgacgagcacggtctacatggagctgaacaccctgagatctgaggacacggccgtgtattactgtgcgagagagtatcccgggcgatgttggttcgacccctggggccagggaaccctggtcactgtctcctca

SEQ ID NO: 6396 - DNA, 288 bp, Homo sapiens
  source 1..288: mol_type = other DNA
gcgtctggatacaccttcagcacatactttgtgcactgggtgcgccaggcccctggacaagggcttgagtggatgggaagagtcaaccctaatggtggtgcgacacactacccacggaatttccagggcagaatcaccatgaccaccgacacgtcctcgagcacagtgtacatggacctgagcagcctgagatctgaagacacggccgtatattactgtgcgagagaatatcccggtcgttgttggttcgacccctggggtcagggaaccctggtcaccgtctcgtca

SEQ ID NO: 6397 - DNA, 280 bp, Homo sapiens
  source 1..280: mol_type = other DNA
tataggttctggattcagttttggtgatgaggctattagctgggtccgccaggctccagggaaggggctggagtgggtaggtttcattagaagcaaagtttatggtgggacaacagattacgccgcgtctgtgaaaggcagattcaccatctcaagagatgattccaaaagtatcgcctatctgcaaataaacaacctgaaagccgaggacacagccgtatacttttgtactagagatcaattatggtggggccagggaaccctggtcaccgtctcctca

SEQ ID NO: 6398 - DNA, 280 bp, Homo sapiens
  source 1..280: mol_type = other DNA
tgcaacttctggattcacctttgctgaagatggtctgagctgggtccgccaggctccagggaaggggctggagtgggtaggtttcgttagaccgaaagccaatggtgggacagcagaatacgccgcgtctgtgaaaggcagatgcatcatctcaagagatgattccaaaagcatcgtctatctgcaaatgaacagcctgaaagccgaggacacagccatgtattattgtactagagatcaattgtggtggggccagggaaccctggtcaccgtctcctca

SEQ ID NO: 6399 - DNA, 280 bp, Homo sapiens
  source 1..280: mol_type = other DNA
tacaacttctggattcacctttgatgaagatggtctgagctgggtccgccaggctccagggaaggggctggagtgggtaggtttcgttagaccgaaagcctatggtgggacagcagaatacgccgcgtctgtgaaaggcagattcatcatctcaagagatgattccagaagaatcgcctatctgcaaatgaacagcctgaaagccgaggacacagccgtgtattattgtactagagatcagttgtggtggggccagggaaccctggtcatcgtctcctca

SEQ ID NO: 6400 - DNA, 304 bp, Homo sapiens
  source 1..304: mol_type = other DNA
tacagcccctggattcattgtcggtgacgcctggatgggctgggtccgccaggctccagggacggggctggagtgggttggccgtattaaaagcaaggctgatggtgggacaacagactacgctgcacccgtggaaggcagattcaccatatcaagagatgattcaaagaatacgctgtatctgcaaatgaacagcctgagaagtgacgacacagccgtatattactgtaccacagaccgtggaatagcagctcgccccctctttgactcctggggcctggggaccctggtcaccgtctcctca

SEQ ID NO: 6401 - DNA, 304 bp, Homo sapiens
  source 1..304: mol_type = other DNA
tgcagcccctggattctctgtcagtaacgcctggatgggctgggtccgccaggctccagggacggggctgcagtgggttggccgtattaaaagcaggcctgatggtggaacaacagactacgccgcacccgtgaaaggcagattcaccatattcagagatgattcaaaaaacaccctgtatctgcaaatgaacagcctgaaaagtgaggacacagccgtgtattactgtaccacagaccgtgggatagcagctcgccccctctttgactcctggggccaggggaccctggtcaccgtctcctca

SEQ ID NO: 6402 - DNA, 304 bp, Homo sapiens
  source 1..304: mol_type = other DNA
tgcagcccctggattcactgtcagtgacgcctggatgggctgggtccgccaggctccagggacggggctggagtggattggccgtattaaaagcaagcgtgatggtgggacaacagactacgctgcacccgtgaaaggcagattcaccatatcaagagatgattcaaaaaatacgctgtatctgcaaatgaacagcctgaaaagtgaggacacagccgtatattactgtaccacagaccgtgggatagcagctcgccccctctttgactcctggggccaggggaccctggtcaccgtctcctca

SEQ ID NO: 6403 - DNA, 304 bp, Homo sapiens
  source 1..304: mol_type = other DNA
tgcagcctctggattcactttcaccaacgcctggatgggctgggtccgccaggctccagggaaggggctggagtggattggccgtcttaaaagcaagagtgatggtgggacaacagactacgcagcacccgtgaaaggcagattcatcatctcaagagatgattcgaaaaatatgctgtatctacaaatgagcagcctgaaaattgaggacacagccgtgtatttctgtaccacagatcggggtattgcagctcgtccgctctttgactcctggggccagggaaccctggtcaccgtctcctca

SEQ ID NO: 6404 - DNA, 304 bp, Homo sapiens
  source 1..304: mol_type = other DNA
tgcagcccctggattcactgtcgctgacgcctggatgggctgggtccgccaggctccagggacggggctggagtgggttggccgtattaaaagcaagcctgatggtggggcaacagactacgctgcacccgtgaaaggcagattcaccatatcaagagatgatttaaagaatacgttgtatctgcaaatgagcagcctgacaagtgaggacacagccgtatattactgtaccacagaccgtgggatagcggctcgccccctctttgactcctggggcctggggaccctggtcaccgtctcctca

SEQ ID NO: 6405 - DNA, 304 bp, Homo sapiens
  source 1..304: mol_type = other DNA
tgcagcccctggattcattgtcggtgacgcctggatgggctgggtccgccaggccccagggacggggctggagtgggttggccgtattaaaagcaaggctgatggtgggacaacagactacgctgcacccgtggaaggcagattcaccatatcaagagatgactcaaagaatacgctgtatctgcaaatgaacagactgagaagtgacgacacagccgtatattactgtaccacagaccgtggaatagcagctcgccccctctttgactcctggggcctggggaccctggtcaccgtctcctca

SEQ ID NO: 6406 - DNA, 304 bp, Homo sapiens
  source 1..304: mol_type = other DNA
tgtggcctctggattcagcttcaataatggctggatgggctgggtccgccaaattccagggaaggggctggagtgggttggccgtattaaacccagaagtgacggtgggacagaagactacgctgcacccgtgaaaggcagagtctccatctttagagatgattcaaaaaacacggtgattctgtacatgaacagcctgaaaatcgaggacaccgccatgtactactgcaccacagatcggggcatagcagctcgtccgctttttgactcctggggccagggaaccctggtcaccgtctcctca

SEQ ID NO: 6407 - DNA, 282 bp, Homo sapiens
  source 1..282: mol_type = other DNA
aagggttctggatacagctttaccagctactggatcggctgggtgcgccagatgcccgggaaaggtctggagtggatggggatcatctatcctggtgactctgataccagatacagtccgtccttccaaggccaggtcaccatctcagccgacaagtccatcagcaccgccttcctgcagtggagcagcctgaaggcctcggacaccgccatgtattactgtgcgagacgtaacggcggttttgatatctggggccaagggacaatggtcaccgtctcttca

SEQ ID NO: 6408 - DNA, 283 bp, Homo sapiens
  source 1..283: mol_type = other DNA
caaagcttctggatacagctttaccagctactggatcgcctgggtgcgccagatgcccgggaaaggcctggagtggatggggatcatctatcctggtgactctgataccagatacagcccgtccttccaaggccaggtcaccatctcagccgacaagtccatcttcaccgcctacctgcagtggagcagcctgaaggcctcggacaccgccatgtattactgtgcgagacgcaatgggggttttgatatctggggccgagggacaatggtcaccgtctcttca

SEQ ID NO: 6409 - DNA, 274 bp, Homo sapiens
  source 1..274: mol_type = other DNA
tgcagtctctggattcacatttagtaatcattggatgggctgggtccgccaggctccagggacggggctggagtgcgtggccaccataaacgaagatggaagtgagagatactatgtggactctgtgaagggccgattcacgatctccagagacaacgccaagaattcactgtctctggaaatgaacagcctgagagccgaggacacggctatctattattgtgtgagagccattgactcctggggccagggaaccctggtcaccgtctcctca

SEQ ID NO: 6410 - DNA, 274 bp, Homo sapiens
  source 1..274: mol_type = other DNA
tgcagcctctggattcacctttagtacttattggatgagttgggtccgccaggctccaggaaagggcccggagtgggcggccaagataaacgaagatgggagtacgatatactatgtggactctgtgaagggccgattcaccatctccagagacaacgccaggaactcactgactctacaaatgaacagcctgagagtcgaggacacggctgtgtattactgtgtgagagcaattgactcctggggccagggaacccgggtcaccgtttccgca

SEQ ID NO: 6411 - DNA, 274 bp, Homo sapiens
  source 1..274: mol_type = other DNA
tgcagcctctggattcacctttagtacttattggatgagttgggtccgccaggctccaggaaagggcccggagtgggcggccaaaataaacgaagatgggagtaggacatactatgtggactctgtgaagggccgattcaccatctccagagacaacgccaggaactcactgactttagaaatgaacagcctgagagtcgaggacacggctgtatattactgtgtgagagcaattgactcctggggccagggaacccgggtcaccgtttccgca

SEQ ID NO: 6412 - DNA, 274 bp, Homo sapiens
  source 1..274: mol_type = other DNA
tgcagcctctggattcacctttagtacttattggatgagttgggtccgccaggctccaggaaagggcccggagtgggcggccaagataaacgaagatgggagtacgatatactatgtggactctgtgaagggccgattcaccgtctccagagacaacgccaggaactcactgactctacaaatgaacagcctgagagtcgaggacacggctgtgtattactgtgtgagagcaattgactcctggggccagggaacccgggtcaccgtttccgca

SEQ ID NO: 6413 - DNA, 274 bp, Homo sapiens; identical to SEQ ID NO: 6411
  source 1..274: mol_type = other DNA

SEQ ID NO: 6414 - DNA, 274 bp, Homo sapiens
  source 1..274: mol_type = other DNA
tgcagcctctggattcacctttagtacttattggatgagttgggtccgccaggctccaggaaagggcccggagtgggcggccaagataaacgaagatgggagtacgatatactatgcggactctgtgaagggccgattcaccatctccagagacaacgccaggaactcactgactctacaaatgaacagcctgagagtcgaggacacggctgtgtattactgtgtgagagcaattgactcctggggccagggaacccgggtcaccgtttccgca

SEQ ID NO: 6415 - DNA, 274 bp, Homo sapiens
  source 1..274: mol_type = other DNA
tgcagcctctggattcacctttagtacttattggatgagttgggtccgccaggctccaggaaagggcccggagtgggcggccaaaataaacgaagatgggagtaggatatactatgtggactctgtgaagggccgattcaccatctccagagacaacgccaggaactcactgattctacaaatgaacagcctgagagtcgaggacacggctgtgtattactgtgtgagagcaattgactcctggggccagggaacccgggtcaccgtttccgca

SEQ ID NO: 6416 - DNA, 279 bp, Homo sapiens
  source 1..279: mol_type = other DNA
gcttctggatacagtttcactagctatgctatgcattgggtgcgccaggcccccggacaagggcttgagtggatgggatggatcaacgctggcaatggtaacacaaaatattcacagaagttccagggcagagtcaccattaccggggacacatccgcgagcacagcctacatggagctgagcagtctgagatctgaagacacggctgtgtattattgtgcgaggggtaatcacggtatggacgtctggggccaagggaccacggtcaccgtctcctca

SEQ ID NO: 6417 - DNA, 279 bp, Homo sapiens; identical to SEQ ID NO: 6416
  source 1..279: mol_type = other DNA

SEQ ID NO: 6418 - DNA, 276 bp, Homo sapiens
  source 1..276: mol_type = other DNA
gcttctggatacaccttcagtgcctataatgtacattgggtgcgccaggcccccggacaagggcttgagtgcatgggatggatcagcgctgggggtgacacaatatattcagagaagttccaggacagaatcaccattaccagggacacgtccgcgaccacagcctacgtggagttgagcagcctgcgacctgatgacacggctgtatattactgtgcgagagggaatcacggtatggacgtctggggccaagggaccacggtcaccgtctcctca

SEQ ID NO: 6419 - DNA, 274 bp, Homo sapiens
  source 1..274: mol_type = other DNA
tgcagcctctggattcaccttcagcagctactggatgcactgggtccgccaacctccagggaagggcctggtgtgggtctcaggtatcaatggtgatggcagtagtataagttacgcggactccgtgaagggccgattcaccatctcccgagacaacgccaagaacacgctgtttctgcaaatgaacagtctgagagccgaggacacggctgtgtattactgtgcaagagcatatgacttctggggccagggaaccctggtcaccgtctcctca

SEQ ID NO: 6420 - DNA, 274 bp, Homo sapiens
  source 1..274: mol_type = other DNA
tgcagcctctggattcaccttcagtagctactggatgcactgggtccgccaagctccagggaaggggctggtgtgggtctcacgtattaatggtgatgggagtagcacaagctacgcggactccgtgaagggccgattcaccatctccagagacaacgccaagaacacgctgtatttgcaaatgaacagtctgagagtcgaggacacggctgtgtattactgtgcaagggcctacgatttttggggccagggaaccctggtcaccgtctcctca

SEQ ID NO: 6421 - DNA, 289 bp, Homo sapiens
  source 1..289: mol_type = other DNA
caatgtctctggtggctccatcagtagttactactggagctggatccggctgcccccagggaagggactggagtggattggctatatctataacagtgggagcaccaactacaacccctccctcaagagtcgagtcaccgtgtcagtagacacgtccaagaaccagttctccctgaaactgagctctgtgagcgccgcagacacggccgtgtattactgtgcgagacaggggccgggtgggagagcgtatgactactggggccagggagccctggtcaccgtctcctca

SEQ ID NO: 6422 - DNA, 289 bp, Homo sapiens
  source 1..289: mol_type = other DNA
caatgtctctggtggctccatcagtagttactactggagctggatccggctgcccccagggaagggactggagtggattggctatatctataacagtgggagcaccaactacaacccctccctcaagagtcgagtcaccgtgtcagtagacacgtccaagaaccagttctccctgaagctgagctctgtgagcgccgcagacacggccgtgtattactgtgcgagacaggggccgggtgggagagcgtatgactactggggccagggagccctggtcaccgtctcctca

SEQ ID NO: 6423 - DNA, 289 bp, Homo sapiens
  source 1..289: mol_type = other DNA
cattgtctctagtggctccataagtagttactactggaactggatccggcagcccccagggaagggactggagtggattgggtatatctattacagtgggagcaccaactacaatccctccctcaagagtcgagtcaccatgtcattagacacgtccaagaaccagttctccctgaccctgagctctgtgaccgctgcggacacggccatgtattactgtgcgagacaaggcccggggggccgagcctatgactactggggccagggaaccctggtcaccgtctcctca

SEQ ID NO: 6424 - DNA, 276 bp, Homo sapiens
  source 1..276: mol_type = other DNA
gcttctggatacgccttcactaagtatgctatcaattgggtgcgacaggcccctggacaagggcttgagtggatgggatggatcaacaccaacactgggaacccaacgtatgcccagggcttcacaggacggtttgtcttctccttggacacctctgtcagtacggcatatctgcagatcagcagcctaaaggctgaggacactgccgtatattattgtgcgagattcgaggcttttgatatctggggccaagggacaatggtcaccgtctcttca

SEQ ID NO: 6425 - DNA, 276 bp, Homo sapiens
  source 1..276: mol_type = other DNA
gcttctggatacaccttcactaactatgctatgaattgggtgcgacaggcccctggacaagggcttgagtggatgggatggatcaacaccaaaactgggaacccaacgtatgcccaggacttcacaggacggtttgtcttctccttggacacctctgtcagcacggcatatctgcagatcagcagcctaaagggtgaggacactgccgtgtattactgtgcgagattcgaggcttttgatatctggggccaagggacaaaggtcaccgtctcttca

SEQ ID NO: 6426 - DNA, 295 bp, Homo sapiens
  source 1..295: mol_type = other DNA
tgcagcctctggatttaccttcagtagttatgctatgcactgggtccgccaggctccagggaagggactggaatatgtttcatctattaatgggaatggagattggacagcttatgcagactctgtgaagggcagattcaccatctccagggacaattccaggggctcactgtatcttcaaatgggcagcctgagagttgaggacacggcttggtattactgtgcgagagacagcggtctgacccagggctggttcgacccctggggccagggaaccctggtcaccgtctcctca

SEQ ID NO: 6427 - DNA, 295 bp, Homo sapiens
  source 1..295: mol_type = other DNA
tgcagcctctggattcacattcagtagctattatatgcactgggtccgcctggctccagggaagggactggaatatctttcatctattagtggtgatggggatcgcacatattatgcaaactctgtgaaggacagattcaccatctccagagacaattccaggaacaccctgtatcttcaaatgttcagcctgagacctgaggacatggctgtgtattactgtgcgagagattcgggacttacacagggctggttcgacccctggggccagggaaccctggtcaccgtctcctca

SEQ ID NO: 6428 - DNA, 295 bp, Homo sapiens
  source 1..295: mol_type = other DNA
tgcagcctctggattcacattcagtagctattatatgcactgggtccgcctggctccagggaagggactggaatatctttcatctattagtggtgatggggatcgcacatattatgcaaactctgtgaaggacagatccaccatctccagagacaattccaggaacaccctgtatcttcaaatgttcagcctgagacctgaggacatggctgtgtattactgtgcgagagattcgggacttacacagggctggttcgacccctggggccagggaaccctggtcaccgtctcctca

SEQ ID NO: 6429 - DNA, 289 bp, Homo sapiens
  source 1..289: mol_type = other DNA
tgcagcctctggcttcacctttagcagaaatggcatggcctgggtccgccaggctccagggaaggggctggagtgggtctcagcatttgatggcactggtgatggcacatactacgcagactccgtgaagggccggttcaccatctcccgagacaattccaagaacacactttatctgcagatgaacagcctgagagccgacgacacggccctgtattattgtgcaaaagatgtgtggcgctgggcctttgactactggggccagggagtccaggtcaccgtctcctca

SEQ ID NO: 6430 - DNA, 289 bp, Homo sapiens
  source 1..289: mol_type = other DNA
tgaagcctctggattcaggtttagcggaaatgccatggcctgggtccgccaggctccagggaaggggcttgagtgggtctcagcatttgatggcagtggtgatggcacatattatgcagactccgtgaagggccggttcaccatctccagagacaattccaagaacacactgtatctgcagatgaacagtctgagagccgacgacacggcccgatattattgtgcgaaagatgtgtggcgctgggcctttgactactggggccagggagtccaggtcaccgtctcctca

SEQ ID NO: 6431 - DNA, 289 bp, Homo sapiens
  source 1..289: mol_type = other DNA
tgcagcctctggcttcaactttggcggaaatgccatggcctgggtccgccaggctccagggaagggactggagtgggtcgcagcatttgatggcactggtgacggcacatactacgcagactccgtgaagggccggttcaccatttcccgagacaattccaggaacacactgtatctactaatgaacagcctgagagccgacgacacggccctgtattattgcgcaaaagatgtgtggcgctgggcctttgactactggggccagggagtccaggtcaccgtctcctca

SEQ ID NO: 6432 - DNA, 286 bp, Homo sapiens
  source 1..286: mol_type = other DNA
tgtagcctctggattcagttttagccacaatgccatggcctgggtccgccaggctccaggaaagggactggagtgggtctcaggtctcggtggtgatggcaggacatactacggagacttcgtgaagggccgcttcatcatctccagagacaatttcaagaacacgttgtatctggaaatgaacggcctgagagccgacgacacggccgtgtattactgtgcgaaagatgtctggcgctgggcctttgattactggggccagggaaccctggtcaccgtctcctca

SEQ ID NO: 6433 - DNA, 298 bp, Homo sapiens
  source 1..298: mol_type = other DNA
tgcagcctctgcattcaccgtcagttcctatgctatgcactgggtccgccaggctccaggcaaggggctggagtgggtggcagttatttcaattgatggaagtaggacacactacgcagactccctgaagggccgattcaccatctccaaagacaattccaagaatacgctgtatctgcacctggacagcctgagggctgaggacacggctgtctattattgtgcgaaagagggagatggcagcagctggtcgtcgtttgactactggggccagggaaccctggtcaccgtctcctca

SEQ ID NO: 6434 - DNA, 298 bp, Homo sapiens
  source 1..298: mol_type = other DNA
tgcagcctctggattcaccttgagtcgctatgccatgcactgggtccgccagcctccaggcaaggggctggagtgggtggcgattatttcatatgatggacgtgataaattctatgcagactccctgaagggccgattcaccatctccagagacaattccaagaacacgctgtctctgcaaatgaacagcctgacagctgaggacacggctgtgtattactgtgcgaaagagggggatggcagcagctggtcctcctttgactactggggccggggaaccctggtcagcgtctcctca

SEQ ID NO: 6435 - DNA, 291 bp, Homo sapiens
  source 1..291: mol_type = other DNA
gcttctggatacaccttcactagttatgctatacattgggtgcgccaggcccccggacaaaggcttgagtggatgggatggatcaacgctggcaatggtaacacaaaatactcacagaagtttcagggcagagtcaccattaccagggacacatccgcgagcacagcctacatggagctgaacagcctgagatctgaagacacggctgtgtattactgtgtccgttcggggagttactcggtggactggttcgacccctggggccagggaaccctggtcaccgtctcctca

SEQ ID NO: 6436 - DNA, 291 bp, Homo sapiens
  source 1..291: mol_type = other DNA
gcttctggatacaccttcactagctatgctatacattgggtgcgccaggcccccggacaaaggcttgagtggatgggatggatcaacgctggcaatggtaacacaaaatattcacagaagttccagggcagagtcaccattaccagggacacatccgcgagcacagcctacatggagctgagcagcctgagatctgaagacacggctgtgtattattgtgtccgttcggggagttactcggtggactggttcgacccctggggccagggaaccctggtcaccgtctcctca

SEQ ID NO: 6437 - DNA, 291 bp, Homo sapiens
  source 1..291: mol_type = other DNA
gcttctggatacaccttcagtagccatgctgtgcattgggtgcgccaggcccccggacaaaggcttgagtggatgggatggatcaacgctggcaatggtaacacaaaatattcacagaagttccagggcagagtcaccattaccagggacacatccgcgagcacagcctacatggagctgagcagcctgagatctgaagacacggctgtctattactgtgtgagaagtgggagctactctgtagactggttcgacccctggggccagggaaccctggtcaccgtctcctca

SEQ ID NO: 6438 - DNA, 292 bp, Homo sapiens
  source 1..292: mol_type = other DNA
tgcagcctctggattcacctttagtagcaattggatgagctgggtccgccaggctccagggaaggggctggagtgggtggccaacataaagcaagatggaagtgtgaaatactatgtggagtctgtgaagggccgattcaccatctccagggacaacgccaagagctcactgtatctgcaaatgaacagtctgagagccgaggacacggctgtgtattactgtgcgagagaagggggtgctggttattcttttgactactggggccagggaaccctggtcaccgtctcctca

SEQ ID NO: 6439 - DNA, 292 bp, Homo sapiens
  source 1..292: mol_type = other DNA
tgcagcctctggattcacttttagtagtttttggatgacctgggtccgccagactccagggaagggactggagtgggtggccaacataaagaaagatggaagtgagaaaaactatgtggactctttgaagggccgattcaccgtctccagagacaacgccaggaggtcattgtatctgcagatgaactccctgagagccgaggacacggctgtgtattactgtgcgagagaagggggtgctggttattcttttgactactggggccagggaacccgggtcaccgtctcctca

SEQ ID NO: 6440 - DNA, 292 bp, Homo sapiens
  source 1..292: mol_type = other DNA
tgcagcctctggattcacttttagtaactattggatgacctgggtccgccaggctccagggcaggggctggagtgggtggccaacataaagcagggtggaagggagcagaactatgtgggctctgtgaagggccgattcaccatctccagagacaacgccaagaactccctgtatctgcaaatgaacagcctgagagccgaggacacggctgtgtattactgcgcgagagagggaggtgctggttattcttttgactactggggccagggaaccctggtcgccgtctcctca

SEQ ID NO: 6441 - DNA, 280 bp, Homo sapiens
  source 1..280: mol_type = other DNA
tgcagcctctggattcatcttcagtacctatagcatgaactgggtccgccaggctccagggaaggggctggagtggctttcatacattagtagtagtggtaataccatatactacgcagactctgtgaagggccgattcaccatctccagagacaacgccaagaactcactgtatctgcaaatgaacagcctgagagccgaggacacggctgtgtattactgtgcgagagtcctgaaccttgactactggggccagggaaccctggtcaccgtctcctcg

SEQ ID NO: 6442 - DNA, 280 bp, Homo sapiens
  source 1..280: mol_type = other DNA
tgcagcctctggattcaccttcagtagttctgaaatgaactgggtccgccaggctccagggaaggggctggagtgggtttcatacatcagtagtagtggtagtaccatatactacgcagactctgtgaagggccgattcaccatctccagagacaacgccaagaactcactgtatctgcaaatgaacagcctgagagccgaggacacggctgtttattactgtgcgagagtgctgaatcttgactactggggccagggaaccctggtcaccgtctcctca

SEQ ID NO: 6443 - DNA, 295 bp, Homo sapiens
  source 1..295: mol_type = other DNA
tgcagcctctggattcacttttagtgtgttttggatgacttgggtccgccagtctccatcgaaagggctggagtgggtggccagcatagagcaagatggaagtgcaaagtactatgtagactctgtgaagggccgattcaccatctccagagacaacgtcgacgactcactgtatctgcaaatgaacaacctgagagtcgaggacacggcgacatattactgtgcgagaggggggtctgacagcagctggtactgggtccactggggccagggaaccctggtcaccgtctcctca

SEQ ID NO: 6444 - DNA, 295 bp, Homo sapiens
  source 1..295: mol_type = other DNA
tgcagcctctggattcaccttttgggactattggatgacctgggtccgccagtctccagggaaggggctggagtgggtggccaacataaaccaagatggaactgagaaatactatgtggactctgtgaagggccgattcaccatctccagagacaacgccaagaactcactgtatctccaaatgaacagcctgagagccgaggacaccaatgtgtattactgtgcgagagggggatctgacagcagctggtactgggttcactggggccagggaaccctggtcaccgtctcctca

SEQ ID NO: 6445 - DNA, 295 bp, Homo sapiens
  source 1..295: mol_type = other DNA
tggagactctggattcatctttaataacttatggatgacctgggtccgccaggctccagggaaggggctggagtgggtggccaacataaatcaagatggaagtgagacatactatgtggactctgtgaagggccgattcaccatctccagagacaacgccaaaaagtcattgtatctgcaaatgaacagcctgagacccgaggacacggccgtgtattattgtgcgagaggggggtctgacagcagttggtactgggtgcactggggccagggaacccagctaaccgtctcctca

SEQ ID NO: 6446 - DNA, 293 bp, Homo sapiens
  source 1..293: mol_type = other DNA
ccatctccggggacagtgtctctagcaacagtgttgcttggaactggatcaggcagtccccatcgagaggccttgagtggctgggaaggacatactacaagtccaagtggtataatgattatgcagtatctgtgaaaagtcgaataaccatcaacccagacacatccaagaaccagttctccctgcagctgaactctgtgactcccgaggacacggctgtgtattactgtgcaagaggcagcagcagctcttttggctactggggccagggaaccctggtcaccgtctcctca

SEQ ID NO: 6447 - DNA, 293 bp, Homo sapiens
  source 1..293: mol_type = other DNA
ccatctccggggacagtgtctctagcaacagtgctgcttggaactggatcaggcagtccccatcgagaggccttgagtggctgggaaggacatactacaagtccaagtggtataatgattatgcagtatctgtgaaaagtcgaataaccatcaacccagacacatccaagaaccagttctccctgctactgaactctgtgactcccgaggacacggctgtgtattactgtgcaagaggcagcagcagctcttttggctactggggccagggaaccctggtcaccgtctcctca

SEQ ID NO: 6448 - DNA, 293 bp, Homo sapiens
  source 1..293: mol_type = other DNA
ccatctccggggacagtgtctctagcaacagtgctgattggaactggatcaggcagtccccatcgagaggccttgagtggctgggaaggacatactacaagtccaagtggtataatgattatgcagtatctgtgaaaagtcgaataaccatcaacccagacacatccaagaaccagttctccctgcagctggcctctgtgactcccgacgacacggctgtgtattactgtgcaagaggcagcagcagctcttttggctactggggccagggagccctggtcaccgtctcctca

SEQ ID NO: 6449 - DNA, 293 bp, Homo sapiens
  source 1..293: mol_type = other DNA
ccatctccggggacagtgtctctagcaacagtgctgcttggaactggatcaggcagtccccatcgagaggccttgagtggctgggaaggacatactacaagtccaagtggtataatgattatgcagtatctgtgaaaagtcgaataaccatcagcccagacacatccaagaaccagttctccctgcagctgaactctgtgactcccgaggacacggctgtgtattactgtgcaagaggcagcagtagctcttttggctactggggccagggaaccctggtcaccgtctcctca

SEQ ID NO: 6450 - DNA, 293 bp, Homo sapiens
  source 1..293: mol_type = other DNA
ccatctccggggacagtgtctctagcaacagtgctgcttggaactggatcaggcagtccccatcgagaggccttgagtggctgggaaggacatactacaagtccaagtggtataatgattatgcagtatctgtgaaaagtcgaataagcatcaacccagacacatccaagaaccagttctccctgcagctgaactctgtgactcccgaggacacggctgtgtattactgtgcaagaggcagcagcagctcttttggctactggggccagggaaccctggtcaccgtctcctca

SEQ ID NO: 6451 - DNA, 293 bp, Homo sapiens
  source 1..293: mol_type = other DNA
gcatctccggggacagtgtctctagtaacagtgctgattggaactggatcaggcagtccccatcgagaagccttgagtggctgggaaggacatactacaagtctaagtggtataatgattatgcactatctgtgaaaagtcgaataaccatcaatgcagacacatccaagaaccagttctccctgcagctgaactctgtgactcccgaagacacggctgtgtattattgtgcaagaggttctagcagctcgtttggctactggggccagggaaccctggtcaccgtctcctca

SEQ ID NO: 6452 - DNA, 279 bp, Homo sapiens
  source 1..279: mol_type = other DNA
gcttctggatacaccttcaccagttatgatatcaactgggtgcgacaggccactggacaagggcttgagtggatgggatggatgaaccctaacagtggtaccacaggctatgcacagaagttccagggcagaatcaccatgaccaaaaacacctccataagcacagtctacatggagctgagcagcctgagatctgaggacacggccgtatattactgtgcgagaggcctggctggggctgactactggggccagggaaccctggtcaccgtctcctca

SEQ ID NO: 6453 - DNA, 279 bp, Homo sapiens
  source 1..279: mol_type = other DNA
gcttctggatacaccctcaccagttatgatatcaactgggtgcgacaggccactggacaagggcttgagtggatgggatacatgaaccctaacagtggtaacatcggctatgcacagaagttccagggcagagtcaccatgaccaggaacacctccataagcacagcctacatggagctgagcagcctgagatctgaggacacggccgtgtattactgtgcgagggggctggcaggcgctgactactggggccagggaaccctggtcaccgtctcctca

SEQ ID NO: 6454 - DNA, 279 bp, Homo sapiens
  source 1..279: mol_type = other DNA
gcttctggatacaccttcaccggttatgatatcaactgggtgcgacaggccactggacaagggcttgagtggatgggatggatgaaccctaacagtggttacacaggctctgcacagaagttccagggcagagtcaccatgaccatgaacacctccataagcacagtctacatggagctgagcagcctgagatctgaggacacggccgtgtattactgtgcgagaggcctcgctggggccgactactggggccagggaaccctggtcaccgtctccgca

SEQ ID NO: 6455 - DNA, 279 bp, Homo sapiens
  source 1..279: mol_type = other DNA
gcttctggatacaccttcaccagttatgatatcaactgggtgcgacaggccactggacaagggcttgagtggatgggatggatgaaccctaacagtggtaacacaggctatgcacagaagttccagggcagagtcaccatgagcaagaacacctccataagcacagccttcatggagctgagcagcctgagatctgaggacacggccgtgtattactgtgcgagggggctggcaggcgctgactactggggccagggaaccctggtcaccgtctcctca

SEQ ID NO: 6456 - DNA, 279 bp, Homo sapiens
  source 1..279: mol_type = other DNA
gcttctggatacaccttcaccggctatgatatcaactgggtgcgacaggccactggacaagggcttgagtggatgggatggataaaccctaacagtggtaacagaggctatacacagaagttccagggcagagtcaccatgaccaggaacacctccataagcacagcctacatggagctgaccagcctgagatctgaggacacggccgtgtattactgtgcgagaggattagctggtgcggactactggggccagggaaccctggtcaccgtctcctca

SEQ ID NO: 6457 - DNA, 286 bp, Homo sapiens
  source 1..286: mol_type = other DNA
tgcagtctctggattcagctttaggagctatgccatgagctgggtccgccaggctccagggaaggggctggagtgggtctcaagtattactgatagtggtggtaacacatactacgcagactccgtgaagggccggttcaccatctccagagacaattccaagagcacactgtatctgcaaatgagcaacctgagagtcgaggacacggccgtatatttctgtgcgagggggatcgcctccttgggtgcctactggggccagggaatcctggtcaccgtctcctca

SEQ ID NO: 6458 - DNA, 286 bp, Homo sapiens
  source 1..286: mol_type = other DNA
tgtagcctctggatttaggtttagcggctatgccatgagctgggtccgccagactccagggaagggactggagtgggtctcatctattactgataatggtggtgacacatactacgcagactccgtgaagggccgattcaccatctccagagacaattccaagaacacgctgtgtctgcagatgaacagcctgagagccgaggacacggccatatattactgtgcgagagggatagcatccctcggtgcctactggggccagggaaccctggtcaccgtctcctca

SEQ ID NO: 6459 - DNA, 295 bp, Homo sapiens
  source 1..295: mol_type = other DNA
tgttgcctctggctttacatttagaagttattggatgacttggggccgccaggctccagggaaggggctggagtgggtggccagcataaaggaggatggaagtgacaagtactatgtggactctgtgaagggccgattcaccatctccaaggacaacgccaggaactcagtgtctctgcaaatgaacaacctgagagccggcgacacggctacatattactgtgcgagaagacggtccggtgatggctggtcggtcgactactggggccggggaaccctggtcaccgtctcctca

SEQ ID NO: 6460 - DNA, 295 bp, Homo sapiens
  source 1..295: mol_type = other DNA
tgtagcctctggattcacgttcagtagttattggatgacctggggccgccagactccagggaagggcctggagtgggtggccagcataagcgaagatgggagtgacaaatattatgtggactcggcgaagggccgcttcaccatctccagagacaacgcccacaacacactctatctgcaaatgaccagcctgagagccgacgacacggctatttattactgtgcgagaagacggtctggcgatggctggtcggtcgactactggggcctgggaagtctggtcaccgtctcctca

SEQ ID NO: 6461 - DNA, 295 bp, Homo sapiens
  source 1..295: mol_type = other DNA
tgcagcctctggattcatttttaataactattggatgaactggatccgccagtctccagggaaggggctggagtgggtggccgccataaaagaagatggaagtgacagatattatgtagactctctgaagggccgattcaccatctccaaagacaattccaagaactcactgtatctggaaatgaacagcctgacagtcgaagacacggccgtgtattattgtgcgaggaggaggagtggcgatggctggtcggtcgactactggggccagggaaccctggtcaccgtctcctca

SEQ ID NO: 6462 - DNA, 295 bp, Homo sapiens
  source 1..295: mol_type = other DNA
tgcagcctctggattcacttttaataactattggatgaactgggtccgccaggctccagggaaggggctggagtgggtggccgccataaaggcagatggaagtgacgaatattatgtcgactctgtgaggggccgattcatcatttccaaagacaactccaacaattcactgtatctgaaaatgaacagcctgagagtcgaggacacggccacttattactgtgcgaggaggaggagtggcgatggctggtcggttgactactggggccagggaaccctggtcaccgtctcctca

SEQ ID NO: 6463 - DNA, 295 bp, Homo sapiens
  source 1..295: mol_type = other DNA
tgcagcctctggattcacctttaataactattggatgaactgggtccgccaggctccagggaaggggctggagtgggtggccgccataaaggaagatggaagtgacaaatattatgtagactctgtgaagggccgattcaccatctccaaagacaactccaagaactcactgtatctggacatgaacagcctgagagtcgaagacacggccgtgtattactgtgcgaggaggaggagtggcgatggctggtcggttgactactggggccagggaaccctggtcaccgtctcctca

SEQ ID NO: 6464 - DNA, 295 bp, Homo sapiens
  source 1..295: mol_type = other DNA
tgcagcctctggattcacttttaataactattggatgaactgggtccgccaggctccagggaaggggctggagtgggtggccgccataaaggcagatggaagtgacgaatattatgtcgactctgtgaggggccgattcatcatttccaaggacaactccaacaattcactgtatctgaaaatgaacagcctgagagtcgaggacacggccgtgtattactgtgcgaggaggaggagtggcgatggctggtcggttgactactggggccagggaaccctggtcaccgtctcctca

SEQ ID NO: 6465 - DNA, 280 bp, Homo sapiens
  source 1..280: mol_type = other DNA
tgcagcctctggattcaccttcagtgactactggatgcactgggtccgccaagatccagggaaggggctggtgtgggtctcacgtattagtaatgatgggagtaccacaacctacgcggactccgtgaagggccgattcaccatctccagagacaacgccaagaacacgctgtatctgcaaatgaacagtctgagagccgaggacacggctgtgtattactgtgcaagatctggtgggctcgacccctggggccagggaaccctggtcaccgtctcctca

SEQ ID NO: 6466 - DNA, 280 bp, Homo sapiens
  source 1..280: mol_type = other DNA
tgcagcctctggattcaccttcagtagctactggatgcactgggtccgccaagctccagggaaggggctggtgtgggtctcacgtattagtactgatgggagcagcacaacctatgcggactccgtgaagggccgattcaccatctccagagacaacaccaagaacacggtgtatctgcaaatgaacagtctgagagccgaggacacggctatatattactgtgcaagatcgggggggctcgacccctggggccagggaaccctggtcaccgtctcctca

SEQ ID NO: 6467 - DNA, 280 bp, Homo sapiens
  source 1..280: mol_type = other DNA
tgcagcctctggattcaccttcagtgactactggatgcactgggtccgccaaactccagggaaggggctggtgtgggtctcacgtatcagtggtgatgggagtgccacagactacgcggactccgtgaggggccgattcagcatctccagagacaacgccaagaacacggtgtatctgcaaatgaacagtctgagagccgaggacacggctgtgtattactgtgcaagatcggggggactggacccctggggccagggaaccctggtcaccgtctcctca

SEQ ID NO: 6468 - DNA, 280 bp, Homo sapiens
  source 1..280: mol_type = other DNA
tgcagcctctggattcaccttcagtgactcctggatgcactgggtccgccaagctccagggaaggggctggtgtgggtctcacgtattaatagtgatgggagtagcacaaactacgcggactccgtgaagggccgattcaccatctccagagacaacgccaagaacacggtgtatctgcaaatgaacagtctgagagccgaggacacggctgtgtattactgtgcaagaagtggagggctcgacccctggggccagggaaccctggtcaccgtctcctca

SEQ ID NO: 6469 - DNA, 280 bp, Homo sapiens
  source 1..280: mol_type = other DNA
tgcagcctctggattcaggttcagtgaatattggatgtactgggtccgccaagctccagggaaggggctggtgtgggtctcacgtattgaaggtgatgggaggagcacaacctacgcggactccgtgaagggccgattcaccatctccagagacaacgccaagaacacactgtatttgcaaatgaaccgtctgagagtcgaggacacggctgtgtattattgtgcaagatctggcggtctcgacccctggggccaaggaaccctggtcaccgtctcctca

SEQ ID NO: 6470 - DNA, 280 bp, Homo sapiens
  source 1..280: mol_type = other DNA
tgcagcctctggattcaggttcagtgaatattggatgtactgggtccgccaagctccagggaaggggctggtgtgggtctcacgtattgaaggtgatgggaggagcacaacctacgcggactccgtgaagggccgattcaccatctccagagacaacgtcaagaacacattgtatttgcaaatgaaccgtctgagagtcgaggacacggctgtgtattattgtgcaagatctggcggtctcgacccctggggccaaggaaccctggtcaccgtctcctca

SEQ ID NO: 6471 - DNA, 280 bp, Homo sapiens
  source 1..280: mol_type = other DNA
tgcagcctctggattcaggttcagtgaatattggatgtactgggtccgccaagctccagggaaggggctggtgtgggtctcacgtattgaaggtgatggcaggaccacaacctacgcggactccgtgaagggccgattcaccatctccagagacaacgccaagaacacactgtatttgcaaatgagccgtctgagagtcgaggacacggctgtgtattattgtgcaagatctggcggtctcgacccctggggccaaggaaccctggtcaccgtctcctca

SEQ ID NO: 6472 - DNA, 280 bp, Homo sapiens
  source 1..280: mol_type = other DNA
tgcagcctctggattcaccttcagtagttactggatgcactgggtccgccaagctccagggaaggggctggtgtgggtctcacgtgttgatagtgatgggagaggttcaacctacgcggactccgtgaagggccgattcaccatctccagagacaacgccaagaacacgctgtatctgcaaatgaatagtctgagagtcgaggacacggctgtgtattactgtgcaagatctggcggtctcgacccctggggccagggaaccctggtcaccgtctcctca

SEQ ID NO: 6473 - DNA, 280 bp, Homo sapiens
  source 1..280: mol_type = other DNA
tgcagcctctggattcaggttcagtgaatattggatgtactgggtccgccaagctccagggaaggggctggtgtgggtctcacgtattgaaggtgatgggaggagcacaacctacgcggactccgtgaagggccgattcaccatctccagagacaacgccaagaacacgctgttcctgcaaatgaacagtctgagagccgaggacacggctgtgtattactgtgcaagatctggcggtctcgacccctggggccagggaaccctggtcaccgtctcctca

SEQ ID NO: 6474 - DNA, 280 bp, Homo sapiens
  source 1..280: mol_type = other DNA
tgcagcctctggattcaggttcagtgaatattggatgtactgggtccgccaagctccagggaaggggctggtgtgggtctcacgtattgagggtgatgggaggaccacaacctacgcggactccgtgaagggccgattcaccatctccagagacaacgccaagaacacgctgtatctgcaaatgaacagtctgagagccgaggacacggctgtgtattactgtgcaagatctggcggtctcgacccctggggccagggaaccctggtcaccgtctcctca

SEQ ID NO: 6475 - DNA, 280 bp, Homo sapiens; identical to SEQ ID NO: 6469
  source 1..280: mol_type = other DNA

SEQ ID NO: 6476 - DNA, 280 bp, Homo sapiens
  source 1..280: mol_type = other DNA
tgcagcctctggattcaggttcagtgaatattggatgtactgggtccgccaagctccagggaaggggctggtgtgggtctcacgtattgaaggtgatgggaggaacacagcctacgcggactccgtgaagggccgattcaccatctccagagacaacgccaagaacacactgtatttgcaaatgaaccgtctgagagtcgaggacacggctgtgtattattgtgcaagatctggcggtctcgacccctggggccaaggaaccctggtcaccgtctcctca

SEQ ID NO: 6477 - DNA, 280 bp, Homo sapiens
  source 1..280: mol_type = other DNA
tgcagcctctggattcaccttcagtaactactggatgcactgggtccgccaacctccagggaaggggctggtgtgggtctcaggtattgatagtgatgagagaaccacaacctacgcggactccgtgaagggccgtttcaccatctccagagacaacgccaagaacgcggtgtacctgcaaatgaacagtctgagagtcgaggacacggctgtgtattattgtgcaagatctggcggtctcgacccctggggccagggaaccctggtcaccgtctcctca

SEQ ID NO: 6478 - DNA, 280 bp, Homo sapiens
  source 1..280: mol_type = other DNA
tgcagcctctggattcaggttcagtgaatatcggatgtactgggtccgccaagctccagggaaggggctggtgtgggtctcacgtattgaaggtgatgggaggagcacaacctacgcggactccgtgaagggccgattcaccatctccagagacaacgccaagaacacactgtatttgcaaatgaaccgtctgagagtcgaggacacggctgtgtattattgtgcaagatctggcggtctcgacccctggggccaaggaaccctggtcaccgtctcctca

SEQ ID NO: 6479 - DNA, 280 bp, Homo sapiens
  source 1..280: mol_type = other DNA
tgcagcctctgggttcaggttcagtgaatattggatgtactgggtccgccaagctccagggaagggtctggtgtgggtctcacgtattgaaggtgatggggggaacacagcctacgcggactccgtgaagggccgattcaccatctccagagacaacgccaagaacacactgtatttgcaaatgaaccgtctgagagtcgaggacacggctgtgtattattgtgcaagatctggcggtctcgacccctggggccaaggaaccctggtcaccgtctcctca

SEQ ID NO: 6480 - DNA, 280 bp, Homo sapiens
  source 1..280: mol_type = other DNA
tgcagcctctggattcaggttcagtgaatattggatgtactgggtccgccaagctccagggaaggggctggtgtgggtctcacgtattgaaggtgatgggaggagcacaacctacgcggattccgtgaagggccgattcaccatctccagagacaacgccaagaacacactgtatttgcaaatgaaccgtctgagagtcgaggacacggctgtgtattattgtgcaagatctggcggtctcgacccctggggccaaggaaccctggtcaccgtctcctca

SEQ ID NO: 6481 - DNA, 280 bp, Homo sapiens
  source 1..280: mol_type = other DNA
tgcagcctctggattcaggttcagtgaatattggatgtactgggtccgccaagctccagggaaggggctggtgtggctctcacgtattgaaggtgatgggaggagcacaacctacgcggactccgtgaagggccgattcaccatctccagagacaacgccaagaacacactgtatttgcaaatgaaccgtctgagagtcgaggacacggctgtgtattattgtgcaagatctggcggtctcgacccctggggccaaggaaccctggtcaccgtctcctca

SEQ ID NO: 6482 - DNA, 280 bp, Homo sapiens; identical to SEQ ID NO: 6479
  source 1..280: mol_type = other DNA

SEQ ID NO: 6483 - DNA, 280 bp, Homo sapiens
  source 1..280: mol_type = other DNA
tgcagcctctggattcaggttcagtgaatattggatgtactgggtccgccaagctccagggaaggggctggtgtgggtctcacgtattgagggtgatgggaggaccacaacctacgcggactccgtgaggggccgattcaccatctcccgagacaacgccaagaacacgctgtatctgcaaatgaacagtctgagagccgaggacacggctgtgtattactgtgcaagatctggcggtctcgacccctggggccagggaaccctggtcaccgtctcctcg

SEQ ID NO: 6484 - DNA, 280 bp, Homo sapiens; identical to SEQ ID NO: 6476
  source 1..280: mol_type = other DNA

SEQ ID NO: 6485 - DNA, 280 bp, Homo sapiens
  source 1..280: mol_type = other DNA
tgcagcctctggattcaggttcagtgaatattggatgtactgggtccgccaagctccagggaaggggctggtgtgggtctcacgtattgaaggtgatggcaggagcacaacctatgcggactccgtgaagggccgattcaccatctccagagacaacgccaagaacacactgtatttgcaaatgagccgtctgagagtcgaggacacggctgtgtattattgtgcaagatctggcggtctcgacccctggggccaaggaaccctggtcaccgtctcctca

SEQ ID NO: 6486 - DNA, 280 bp, Homo sapiens
  source 1..280: mol_type = other DNA
cgttgcctctggattcacgttcagtgactcctggatgcactgggtccgccaagcaccagggaagggactgatgtgggtctcacgtattgatcatgatgggagtaccacaaattacgcggactccgtgaggggccgattcaccatctccagagacaacgtcaagaacacggtatggctgcaaatgaacagtctgagagtcgaagatacggctttttattactgtgcaaggtcgggggggctcgacccctggggccagggaaccctggtcaccgtctcctca

SEQ ID NO: 6487 - DNA, 280 bp, Homo sapiens
  source 1..280: mol_type = other DNA
tgtagcctctggattcaccttcagtaccgactggatgcactgggtccgccaagctccagggaaggggctggtgtgggtctcacgtattaatggtgatgggagtgacacaacctacgcggactccgtgaagggccgattcaccatctccagagacaacgccaagaacacgctgtatctgcagatgaacagtcttagagccgaggacacggctgtatattactgtgcaagatcgggtgggctcgacccctggggccagggaacattggtcaccgtctcctca

SEQ ID NO: 6488 - DNA, 280 bp, Homo sapiens
  source 1..280: mol_type = other DNA
tgcagcctctggattcaaattcagtgaattttggatgtactgggtccgccaagctccagggaaggggctggtgtgggtctcacgtattgaaggtgatgggaggagcacaacctacgcggactccgtgaagggccgattcaccatctccagagacaacgccaagagcacgctgtatctgcaaatgaacagtctgagagccgaggacacggctgtgtattactgtgcaagatccggcggtctcgacccctggggccagggaaccctggtcaccgtctcctca

SEQ ID NO: 6489 - DNA, 280 bp, Homo sapiens
  source 1..280: mol_type = other DNA
tgcagcctctggattcaccttcagtacctactggatgcactgggtccgccaagctccagggaaggggctggtgtgggtctcacgtattgatagtgatgggagtaccacaacctacgcggactccgtgaagggccgtttcaccatctccagagacaacgccaagaacgcggtgtacctgcaaatgaacagtctgagagtcgaggacacggctgtgtattattgtgcaagatctggcggtctcgacccctggggccagggaaccctggtcaccgtctcctca

SEQ ID NO: 6490 - DNA, 280 bp, Homo sapiens
  source 1..280: mol_type = other DNA
tgcagcctctggattcaggttcagtgaatattggatgtactgggtccgccaagctccagggaaggggctggtgtgggtctcacgtattgaaggtgatgggaggagcacaacctacgcggactccgtgaagggccgattcaccatctccagagacaacgccaagaacacgctgtatctgcaaatgaacagtctgagagccgaggacacggctgtgtattattgtgcaagatctggcggtctcgacccctggggccagggaaccctggtcaccgtctcctca

SEQ ID NO: 6491 - DNA, 295 bp, Homo sapiens
  source 1..295: mol_type = other DNA
tgcagcctctggattcaccttcagtagttatgaaatgaactgggtccgccaggctccagggaagggactggagtggttttcatacattagtagtagtggtagtagtttttcttacgcagactctgtgaagggccgattcaccatctccagagacaacgccaagaactcactgtatctgcaaatgaacagcctgagagccgacgacacggctgtttactactgtgtgagagatggggggctggatggagatgcttttgatatctggggccaagggacaatggtcaccgtctcttca

SEQ ID NO: 6492 - DNA, 295 bp, Homo sapiens
  source 1..295: mol_type = other DNA
tgcagcctctggattcaccttcagtagttatgaaatgaactgggtccgccaggctccagggaagggactggagtggttttcatacattagtagtagtggtagtagtttttactacgcagactctgtgaagggccgattcaccatctccagagacaacgccaagaactcactgtatctgcaaatgaacagcctgagagccgacgacacggctgtttactactgtgtgagagatggggggctggatggagatgcttttgatatctggggccaagggacaatggtcaccgtctcttca

SEQ ID NO: 6493 - DNA, 295 bp, Homo sapiens
  source 1..295: mol_type = other DNA
tgcagcctctggattcgccttcagcacttatgaaatgaactgggtccgccaggctccagggaaggggctggagtgggtttcatacattaggagtagtggcactaccacatactacgcagactctgtgaagggccgattcgccatctccagagacaacgccaagaactcactgtatctgcaaatgaacagcctgagagccgaggacacggctgtttattactgtgtgagagacggtggattggacggcgacgcttttgacatctggggccaagggacaagggtcaccgtctcttca

SEQ ID NO: 6494 - DNA, 295 bp, Homo sapiens
  source 1..295: mol_type = other DNA
tggagcctctggattcgccttcagcacttatgaaatgaactgggtccgccaggctccagggaaggggctggagtgggtttcatacattaggagtagtggcactactacatactacgcagactctgtgaagggccgattcgccatctccagagacaacgccaagaactcactgtatctgcaaatgaacagcctgagagtcgaggacacggctgtttattactgtgtgagagacggtggattggacggcgacgcttttgacatctggggccaagggacaagggtcaccgtctcttca

SEQ ID NO: 6495 - DNA, 304 bp, Homo sapiens
  source 1..304: mol_type = other DNA
tgcagcctctggattcactctcaataatgtctggatgggctgggtccgtcagtcttcagagaagggactggagtggcttggccgtgttaaaagcaaagctgatggtgggacaatagactacgctgcgcccgtgaaaggcagattcttcatctcaagagatgattcaaagaacatcctttatctgcaaataaacaacctgaaaaccgaggacacaggcgtctattattgtaccacagatcggggaatcgcaagtcgtcctctctttgacttctggggccagggaaccctggtcaccgtctcctca

SEQ ID NO: 6496 - DNA, 304 bp, Homo sapiens
  source 1..304: mol_type = other DNA
tgcagcctctggattcactttcaataacgcctggatgagctgggtccgccaggctccagggaaggggctggagtgggttggccgtattaaaagcaagaccgatggtgggacaacagactacggtgcacccgtgaaaggcagattcttcatctcaagagatgaatcaaaaagcacggtgtatctgcaaatgaacagcctgaaaatcgaggacgcggccgtgtactactgtacgacagatcggggtatagcatctcgtcccctttttgacttctggggccagggaaccctagtcaccgtctcctca

SEQ ID NO: 6497 - DNA, 289 bp, Homo sapiens
  source 1..289: mol_type = other DNA
tgcagcctctggattcaccttcagtagctatgctatgcactgggtccgccaggctccagggaagggactggagtatgtttcagctattggtagtaatggggtcagcacatattatgcaaactctgtgaagggcagattcaccatctccagagacaattccaagaacacgctgtatcttcaaatgggcagcctgagagctgaggacatggctgtatattactgtgcgagggtgggaggtacttccgcttttgatatctggggccaagggacaatggtcaccgtctcttca

SEQ ID NO: 6498 - DNA, 289 bp, Homo sapiens
  source 1..289: mol_type = other DNA
tgcagcctctggattcagcttcagtggttattctatgcactgggtccgccaggctccagggaagggtctggaatatgtttcagctattgatcctagtgggggtggcacatattatgcaacctctgtgaaggacagattcaccatctccagagacaattccaagaacacgctgtatcttgaaatgggcagcctgagagctgaggacatggctgtgtattactgtgcgagagtgggaggtacttctgcttttgatatctggggccaagggacaatggtcaccgtctcttca

SEQ ID NO: 6499 - DNA, 298 bp, Homo sapiens
  source 1..298: mol_type = other DNA
tgcagcctctggattcaccttcgataactactggatgcactgggtccgccaagttccagggagggggctggaatggattgcacgtgttagttatgatgggaccaccacaacctacgcggactccctgaagggccgtttcaccatctccagagacaacgccaagaacgcggtatatctgcaaatgaacagtctgagagtcgaggacacggctatctattattgtgcaagaccgtataaaagtggctggtgcaattggttcgacccctggggccagggaaccctggtcaccgtctcctca

SEQ ID NO: 6500 - DNA, 298 bp, Homo sapiens
  source 1..298: mol_type = other DNA
tgcagcctctggattcaccttcgatagctactggatgcactgggtccgccaagttccagggagggggctggaatggattgcacgtattagtaatgatgggaccaccacaacctacgcggactccctgaagggccgtttcaccatctccagagacaacgccaagaacacgctgtatctgcaaatgaacagtctgagagtcgaggacacggctgtctattattgtgcaagaccctataaaagtggctggtgcaactggttcgacccctggggccagggaaccctggtcaccgtctcctca

SEQ ID NO: 6501 - DNA, 298 bp, Homo sapiens; identical to SEQ ID NO: 6500
  source 1..298: mol_type = other DNA

SEQ ID NO: 6502 - DNA, 298 bp, Homo sapiens
  source 1..298: mol_type = other DNA
tgcagcctctggattcaccttcagtacctactggatgttctgggtccgccaaactccagggaaggggctggtgtgggtctcacgtattagtcctgatggcagtgccacagtctacgcggactccgtgaagggccgattcaccatctccagagacaacaccaagaacacgctgtatctgcacatgaacagtctgagagccgaggacacggctgtgtattattgtgcaagaccctataaaagtggctggtgcaactggttcgacccctggggccagggaaccctggtcaccgtctcctca

SEQ ID NO: 6503 - DNA, 274 bp, Homo sapiens
  source 1..274: mol_type = other DNA
tgcagcctctggattcagtttcagcagttttgaaatgaattgggtccgccaggctccagggaaggggctggagtgggtttcatacatcactactggtggtgagaccgtgtactacgcagactctgtgcagggccgattcaccatctccagagacaacgccaagaactcactctttctacaaatgaacagcctgagagccgaagacacggctgtctatttttgtgcgagaaggtttaacctttggggccagggaaccctggtcaccgtctcctca

SEQ ID NO: 6504 - DNA, 274 bp, Homo sapiens
  source 1..274: mol_type = other DNA
tgcagcctctggattctccttcagtagttttgaaatgaactgggtccgccaggctccagggaaggggctggagtgggtttcattcatcactgttgatggaggtagtatgtactacgcagactctgtgaagggccgattcaccatttccagagacaacgccaagaactcactgtatctgcacatgaacagcctgcgagtcgaggatacggctgtatattattgtgcgaggcgctttaatctctggggccacggaaccctggtcaccgtctcctca

SEQ ID NO: 6505 - DNA, 289 bp, Homo sapiens
  source 1..289: mol_type = other DNA
ctctgtctctggtggctccatcagtagttacttctggacctggatccggctgcccccaggggggggactggagtggtttggaaatatctattacagtgggaataccaactacaatccctccctcaagagtcgagtcaccatgttagtagacacgtccaagaaccagttctccctgaaactgaactctgtgaccgccgcagacacggccgtatattactgtgcgagacgggcctccagtgagaactactttgactactggggccagggagccctggtcaccgtctcctca

SEQ ID NO: 6506 - DNA, 289 bp, Homo sapiens
  source 1..289: mol_type = other DNA
cactgtctctgatggctccttcagttcttactactggagctggatccggcagcccccagggaaggcactggagtggattgggtatatctattacagtggaggcaccaattacaacccctccctcacgagtcgagtcaccatatcagtagacacgtccaagaaccaattctccctgaagctgagctctgtgaccgccgcagacacggccatgtattactgtgcgagacgggcgtcatcagagaactactttgactactggggccagggaaccctggtcaccgtctcctca

SEQ ID NO: 6507 - DNA, 289 bp, Homo sapiens
  source 1..289: mol_type = other DNA
cactgtctctgatggctccttcagtacttactactggagctggatccggcagcccccagggaaggcactggagtggattgggtatatctattacagtggaagcaccaactacaacccctccctcacgagtcgagtcaccatatcagtagacacgtccaagaaccaattctccctgaagctgagctctgtgaccgccgcagacacggccatgtattactgtgcgagacgggcgtcatcagagaactactttgactactggggccagggaaccctggtcaccgtctcctca

SEQ ID NO: 6508 - DNA, 277 bp, Homo sapiens
  source 1..277: mol_type = other DNA
tgcagcctctggattctccattagtggtcactggatgcactgggtccgccaagctccagggaaggggctggtgtgggtctcacgcattaagaatgatgggactattacaaactacgcggactccgtgaagggccgattcaccatctccagagacaacgccaagaacacgctgtatctgcaaatgaacagtctgagagccgaggacacggctgtgtattattgtgcaagaggatataactggaactggggccagggaaccctggtcaccgtctcctca

SEQ ID NO: 6509 - DNA, 277 bp, Homo sapiens
  source 1..277: mol_type = other DNA
tgtaggttctggattcaccttcagtggagcctggatgcactgggtccgccaagctccagggaaggggctggagtgggtctcacgcattagtagtgatgccactaccacaagttatgctgactccgtgaagggccgattcaccgtctccagagacaacgccgagaacacgctgtatctgcaactgaacagtctgagagtcgaggacacggctgtatattactgtgcaagaggctataactggaattggggccagggaaccctggtcaccgtctcctca

SEQ ID NO: 6510 - DNA, 292 bp, Homo sapiens
  source 1..292: mol_type = other DNA
tgcagcctctggattcaccttcagtagctatagcttcaactgggtccgccaggctccagggcaggggctggagtgggtttcatacattagttttagtcgtaatatcatatactatgcagactctgtgaagggccgattcaccatctccagagacaacgccaacaacgcactgtttctgcaaatgaacagcctgagagccgaggacacggctgtgtattactgtacgagagatggaaacaggggatacgatatggacgtctggggccaagggaccacggtcaccgtctcctca

SEQ ID NO: 6511 - DNA, 289 bp, Homo sapiens
  source 1..289: mol_type = other DNA
tgcagcctctgggttcaccctcagctcctatagcatgaactgggtccgccaggctccagggaaggggctggagtggctttcatacattggttacggcggtaatatatactatgcagactctgtgaagggccgattcattagctccagagacaatgccgagaactcactgtatctgcaaatgaacagcctgagagacgaggacacggctatctattactgtacgagagatggaaataggggctacgatatggacgtctggggccaagggaccacggtcaccgtctcctca

SEQ ID NO: 6512 - DNA, 282 bp, Homo sapiens
  source 1..282: mol_type = other DNA
gcttctggatacaccttcacttcctatgctctgcattgggtgcgccaggcccccggacaaaggcttgagtggatgggatggatcaacgctggcaatggaaacacaaaatattcacagaagttccagggcagagtcaccttttccagtgacacatccgcgagcactgcccacatggaggtgagcagcctgagatctgaagacacggctgtatattactgtgcgagagacagagtacgggcttttgatatctggggccaagggacaatggtcaccgtctcttca

SEQ ID NO: 6513 - DNA, 282 bp, Homo sapiens; identical to SEQ ID NO: 6512
  source 1..282: mol_type = other DNA

SEQ ID NO: 6514 - DNA, 282 bp, Homo sapiens
  source 1..282: mol_type = other DNA
gcttctggatacaccttcactagttatgctatacattgggtgcgccaggcccccggacaaaggcctgagtggatgggatggatcaacgctggcagtgggaacacaagatattcacagaagttccagggcagagtcacctttaccacggacacatccgcgagcaccgcctacatggagatgagcagcctgagatctggagacacggctgtatattactgtgcgagggatcgggtgagggcttttgatatctggggccaagggacaatggtctccgtctcttca

SEQ ID NO: 6515 - DNA, 289 bp, Homo sapiens
  source 1..289: mol_type = other DNA
cagtgtctctggtggctccatcagtaattaccactggagctggatgcggcagtccccagggaagcaactggaatggattgcgtatatctattacactgggagtattacctacaacccctccctcaagagtcgagtcaccgtgtcagtagacacgtccaagaaccacttctccctgaagctgccctctgtgaccgccgcagacacggccgtgtattactgtgcgagacgggcctccgctgaaaactactttgactactggggccagggaaccctggtcaccgtctcctca

SEQ ID NO: 6516 - DNA, 274 bp, Homo sapiens
  source 1..274: mol_type = other DNA
cactgtctctggtggctccttcagtacttattcctggagctggatccggcagcccccagggaaggcactggagtggattgggtctatcagcaactacaacccctccctcacgagtcgagtcaccatgtcaatagacacgtccaagaatcaattctccctgaaactgagctctatgaccgccgcagacacggccatgtattactgtgcgagacgggcgtcagcagagaactactttgactactggggccagggagccctggtcaccgtctcctca

SEQ ID NO: 6517 - DNA, 293 bp, Homo sapiens
  source 1..293: mol_type = other DNA
ccatctccggggacagtgtctctagcagcagtgctgcttggagctggatcaggcagtccccatcgagaggccttgagtggctgggaaggacatactacaagtccaagtggcataatgattatgcaggatctgtgaaaagtcgaataaccatcaatccagacacatccaagaaccagttctccctgcagctgaactctgtgactcccgaggacacggctgtgtattattgtgtaagaggcagtagcagctcttttgactactggggccagggaaccctggtcaccgtctcctca

SEQ ID NO: 6518 - DNA, 293 bp, Homo sapiens
  source 1..293: mol_type = other DNA
ccatctccggggacagtgtctctagcaacagtgctgcttggaactggatcaggcagtccccatcgagaggccttgagtggctgggaaggacatactaccagtccaactggaataatgattatgcagtatctgtgaaaagtcgaataagcgtcaacccagacacatccaagaaccagttctccctgcagctgaactctgtgactcccgaggacacggctgtgtattattgtgttagaggaagtagtagcagcttcgactactggggccagggaaccctggtcaccgtctcctca

SEQ ID NO: 6519 - DNA, 288 bp, Homo sapiens
  source 1..288: mol_type = other DNA
gcttctggatacaccttcaccagttatgatatcaactgggtgcggcaggccactggacaagggcttgagtgggtgggatggatgaaccctaacagtggtaacacaggctatgcacagaagttccagggcagagtcaccatgaccaggagcacctccataagcacagcctacatggagctgagcagcctgagatctgaggacacggccgtgtattactgtgcgagaggcgaaggagtggctgcgatttctggctactggggccagggaaccctggtcaccgtctcctca

SEQ ID NO: 6520 - DNA, 288 bp, Homo sapiens
  source 1..288: mol_type = other DNA
gcttctggatacaccttcaccagttatgatatcaactgggtgcgacaggccactggacaagggcttgagtggatgggatggatgaaccctaacagtggtaacacaggctatgcacagaagttccagggcagagtcaccatgaccaggaacacctccataaatacagtctacatggagctgagcagcctgagatctgaggacacggccgtgtattactgtgcgagaggcgagggtgtggctgcgattagcggctactggggccagggaaccctggtcaccgtctcgtca

SEQ ID NO: 6521 - DNA, 292 bp, Homo sapiens
  source 1..292: mol_type = other DNA
tgcagcctctggattcaccttcagtgactactacatgacctggatccgccaggctccagggaaggggctggagtgggtttcatacatgagtagtagtgatagtatcataaagtacacagactctgtgaagggccgattcaccaactccagggacaactccaagaactcactgtatctgcaaatgaacagcctgagagccgaggacacggccgtgtatttctgtgccagagttcgtagttcggggagcccccttgactactggggccagggaaccctggtcaccgtctcctca

SEQ ID NO: 6522 - DNA, 292 bp, Homo sapiens
  source 1..292: mol_type = other DNA
tgcagcctctggattcaccttcagtgactactacatgacctggatccgccaggctccagggaaggggctggagtgggtttcatacatgagtagtagtgatagtatcataaagtacgcagactctgtgaagggccgattcaccaactccagggacaactccaagaactcactgtatctgcaaatgaacagcctgagagccgaggacacggccgtgtatttctgtgccagagttcgtagttcggggagcccccttgactactggggccagggaaccctggtcaccgtctcctca

SEQ ID NO: 6523 - DNA, 292 bp, Homo sapiens
  source 1..292: mol_type = other DNA
tgcagcctctggattcaccttcagtgactactacatgacctggatccgccaggctccagggaaggggctggagtgggtttcatacatgagtagtactgatagtatcataaagtacgcagactctgtgaagggccgattcaccaactccagggacaactccaagaactcactgtatctgcaaatgaacagcctgagagccgaggacacggccgtgtatttctgtgccagagttcgtagttcggggagcccccttgactactggggccagggaaccctggtcaccgtctcctca

SEQ ID NO: 6524 - DNA, 292 bp, Homo sapiens
  source 1..292: mol_type = other DNA
tgcagcctctggattcaccttcagtgactactacatgacctggatccgccaggctccagggaaggggctggagtgggtttcatacatgagtaataatgataatatcataaaatacacagactctgtgaagggccgattcaccaactccagggacaactccaagaactcactgtatctgcaaatgaacagcctgagagccgaagacacggccgtgtatttctgtgccagagttcgtagttcggggagcccccttgactactggggccagggaaccctggtcaccgtctcctca

SEQ ID NO: 6525 - DNA, 292 bp, Homo sapiens
  source 1..292: mol_type = other DNA
tgcagcctctggattcaccttcagtgactactacatgacctggatccgccaggctccagggaaggggctggagtgggtttcatacatgagtaatagtgatagtatcataaaatacgcagactctgtgaagggccgattcaccaactccagggacaactccaaaaactcactgtatctgcaaatgaacagcctgagagccgaagacacggccgtgtattattgtgcgagagttcgtagttcggggagcccccttgactactggggccagggaaccctggtcaccgtctcctca

SEQ ID NO: 6526 - DNA, 292 bp, Homo sapiens
  source 1..292: mol_type = other DNA
tgcagcctctggattcaccttcagtgactactacatgacctggatccgccaggctccagggaaggggctggagtgggtttcatacatgagtaataatgataatatcataaaatacacagactctgtgaagggccgattcaccaactccagggacaactccaagaactcactgtatctgcaaatgaacagcctgagagccgaggacacggccgtgtatttctgtgccagagttcgtagttcggggagcccccttgactactggggccagggaaccctggtcaccgtctcctca

SEQ ID NO: 6527 - DNA, 292 bp, Homo sapiens
  source 1..292: mol_type = other DNA
tgcagcctctggattcaccttcagtgactactacatgacctggatccgccaggctccagggaaggggctggagtgggtttcatacatgagtagtcgtgatagtatcatagagtacgcagactctgtgaagggccgattcaccaactccagggacaactccaagaactcactgtatctgcaaatgaacagcctgagagccgaggacacggccgtgtattactgtgcgagagttcgtagttcggggagcccccttgactactggggccagggaaccctggtcaccgtctcctca

SEQ ID NO: 6528 - DNA, 301 bp, Homo sapiens
  source 1..301: mol_type = other DNA
tgcagcctctggattcaccttcagtgactactacatgacctggatccgccaggctccagggaaggggctggagtgggtttcatacatttcatacatgagtactagtgatagtatcataaagtacgcagactctgtgaagggccgattcaccaactccagggacaactccaagaactcactgtttctgcaaatgaacagcctgagagccgaggacacggccgtgtatttctgtgccagagttcgtagttcggggagcccccttgactactggggccagggaaccctggtcaccgtctcctca

SEQ ID NO: 6529 - DNA, 292 bp, Homo sapiens
  source 1..292: mol_type = other DNA
tgcagcctctggattcaccttcagtgactactacatgacctggatccgccaggctccagggaaggggctggagtgggtttcatacatgagtaatagtgataatatcatagagtacgcagactctgtgaagggccgattcaccaactccagggacaactccaagaactcactgtatctgcaaatgaacagcctgagagccgaggacacggccgtgtattactgtgcgagagttcgtagttcggggagcccccttgactactggggccagggaaccctggtcaccgtctcctca

SEQ ID NO: 6530 - DNA, 292 bp, Homo sapiens
  source 1..292: mol_type = other DNA
tgcagcctctggattcaccttcagagactactacatgacttggatccgccaggctccagggaaggggctggagtgggtttcatacatgagtagtgatgatagtatcatagagtacgcagactctgtgaagggccgattcaccaactccagggacaactccaagaactcactgtatctgcaaatgaatggtctgagagtcgaggacacggccgtgtattactgtgcgagagttcgtagttcggggagcccccttgactactggggccagggaaccctggtcaccgtctcctca

SEQ ID NO: 6531 - DNA, 292 bp, Homo sapiens
  source 1..292: mol_type = other DNA
tgcagcctctggattcaccttcagtgactactacatgacctggatccgccaggctccagggaaggggctggagtgggtttcatacatgagtagtagtgatagtatcatagagtatgccgactctgtgaagggccgattcaccaactccagggacaactccaagaactcactgtatctgcaaatgaacagcctgagagccgaggacacggccgtgtattactgtgcgagagttcgtagttcggggagcccccttgactactggggccagggaaccctggtcaccgtctcctca

SEQ ID NO: 6532 - DNA, 292 bp, Homo sapiens; identical to SEQ ID NO: 6523
  source 1..292: mol_type = other DNA

SEQ ID NO: 6533 - DNA, 292 bp, Homo sapiens
  source 1..292: mol_type = other DNA
tgcagcctctggattcaccttcagtgactactacatgacctggatccgccaggctccagggaaggggctggagtgggtttcatacatgagtagtcgtgatagtatcataaaatacgcagactctgtgaagggccgattcaccaactccagggacaactccaagaactcactgtatctgcaaatgaacagcctgagagtcgaggacacggccgtatattactgtgcgagagttcgtagttcggggagcccccttgactactggggccagggaaccctggtcaccgtctcctca

SEQ ID NO: 6534 - DNA, 289 bp, Homo sapiens
  source 1..289: mol_type = other DNA
tgcagcctctggattcatattcagtgactactacatgagttggatcagccaggctccagggaaggggctggagtgggtttcatacactagtactggtggtactaccaaatacgcagactctgtgaagggccgattcaccgtctccagggacaacgccaagaactcactgtatctacaaatgaacagcctgagagccgaggacacggccgtctattactgtgcgagagtccgtagcagtggctctcccctggactactggggccagggaaccccggtcaccgtctcctca

SEQ ID NO: 6535 - DNA, 292 bp, Homo sapiens; identical to SEQ ID NO: 6533
  source 1..292: mol_type = other DNA

SEQ ID NO: 6536 - DNA, 292 bp, Homo sapiens
  source 1..292: mol_type = other DNA
tgcagcctctggattcaccttcagtgactactacatgacctggatccgccaggctccagggaaggggctggagtgggtttcatacatgagtagtagttatagtatcatagaatacgcagactctgtgaagggccgattcaccaactccagggacaactccaagaactcactgtatctgcaaatgaacagcctgagagccgaggacacggccgtgtattactgtgcgagagttcgtagttcggggagtccccttgactactggggccagggaaccctggtcaccgtctcctca

SEQ ID NO: 6537 - DNA, 292 bp, Homo sapiens
  source 1..292: mol_type = other DNA
tgcagcctctggattcaccttcactgactactacatgacctggatccgccaggctccagggaaggggctggagtgggtttcatatatgagtagtagtgatagtatcataaagtatgcagactctgtgaagggccgattcaccaactccagggacaactccaagaactcactgtatctgcaaatgaacagcctgagagccgaggacacggccgtgtattactgtgcgagagttcgtagttcggggagcccccttgactactggggccagggaaccctggtcaccgtctcctca

SEQ ID NO: 6538 - DNA, 286 bp, Homo sapiens
  source 1..286: mol_type = other DNA
tgcagcctctggattcgactttagtatctacagcatgaactgggtccgccaggctccagggaaggggctggagtgggttgcttacattactggtggaagtaacatcatctactacgcagactctgtgaggggccgattcacggtctccagagacaacgccagaaactcactgtatctgcagatggactacttgggagtcgaggacacggctgtcttttactgtgcgagaggcgttcaatggggttttgactcctggggcccgggaaccctggtcaccgtctcctca

SEQ ID NO: 6539 - DNA, 286 bp, Homo sapiens; identical to SEQ ID NO: 6538
  source 1..286: mol_type = other DNA

SEQ ID NO: 6540 - DNA, 286 bp, Homo sapiens
  source 1..286: mol_type = other DNA
tgcagcctctggattctccttcagtatatatagcatgaactgggtccgccaggctccagggaaggggctggagtgggtttcatacataactggtggttctaatattatatactatgcagactctgtgaagggccgattctccatctccagagacaatgcccagaactcactgtatctgcaaatgaacagcctgagagacgaggacacggctgtgtattactgtgcgaggggtgtgcagtggggctttgattcctggggccagggaatcctggtcaccgtctcctca

SEQ ID NO: 6541 - DNA, 286 bp, Homo sapiens
  source 1..286: mol_type = other DNA
tgcagcctctggattctccttcagtatatatagcatgaactgggtccgccaggctccagggaaggggctggagtgggtttcatacataactggtggtagtaatattatatactatgcagactctgtgaagggccgattctccatctccagagacaatgcccagaactcactgtatctgcaaatgaacagcctgagagacgaggacacggctgtatattactgtgcgaggggtgtgcagtggggctttgattcctggggccagggaatcctggtcaccgtctcctca

SEQ ID NO: 6542 - DNA, 280 bp, Homo sapiens
  source 1..280: mol_type = other DNA
tgcagcctctggattcacctttagtgactattggatgagttgggtccgccaggctccagggacgggcctggggtgggtggccaacataaagtacgatggaagtgagaaatactatgtggactctgtgaagggccgattcaccatctccagagacaacgccaagaactcactgtatctgcaaatggacagcctgagagccgaggacacggctgtgtattactgtgcgagagaggggaacttaggctcctggggccagggaaccctggtcaccgtctcctca

SEQ ID NO: 6543 - DNA, 280 bp, Homo sapiens
  source 1..280: mol_type = other DNA
tgcagcctctggattcacatttagtaactattggatgagttgggtccgccaggctccagggaagggactggagtgggtggccaacataaagcatgatggaagtaacaaatattatgtggactctgtgaagggccgattcaccatctccagagacaacgccaagagctcactgtatctgcaaatgaacagcctgagagtcgaggacacggctatatattactgtgcgagagaggggaacttgggctcctggggccagggaaccctggtcaccgtctcctca

SEQ ID NO: 6544 - DNA, 286 bp, Homo sapiens
  source 1..286: mol_type = other DNA
tgcagcctctggattcaccttcagttcctttaccatgaactgggtccgccaggctccagggaaggggctggaatggctttcatacattagtcgtagtggtgatgccatgttctacgcagactctgtgaagggccgattcaccatctccagagacaacgccaagaactctctgtttctgcaaatgaacagcctgagagccgaggacacggctgtatattactgtgcgagggaccttcactacgcctttgacttctggggccagggaaccctggtcaccgtctcctca

SEQ ID NO: 6545 - DNA, 286 bp, Homo sapiens
  source 1..286: mol_type = other DNA
cgcagcctctggattcaccttcagtagttatagcatgaactgggtccgccaggcaccggggaaggggctggagtgggtttcatacattagtggcagtggttaccccatctcctacgcaggctctgtgaagggccgattcaccatctccagagacaatgccaagaactcactgtttctgcaaatgagcagcctgagagacgaggacacggctgtttattactgtgcgagagatttgcactatgcatttgacttctggggccagggaatcatggtcaccgtctcctca

SEQ ID NO: 6546 - DNA, 285 bp, Homo sapiens
  source 1..285: mol_type = other DNA
gcttctggatacaccttcactaattatggtatgcattgggtgcgccaggcccccggacaaaggcttgagtggatgggatggatcaacgctggcagtggtgacacaaaatattcacagaagttccagggcagagtcaccattaccagggacacatccgcgagcacagcctacatggagctgagcagcctgagatctgaagacacggctgtgtattactgtgcgagcggtgcagggacttattcccccgactactggggccagggaaccctggtcaccgtctcctca

SEQ ID NO: 6547 - DNA, 285 bp, Homo sapiens
  source 1..285: mol_type = other DNA
gcttccagaaacatctcccctagttatactatacattgggtgcgccaggcccccggacaaaggcttgagtggatgggatggatcaacggcgacaatggtaacacaaaatattcacagaagttccagggcagagtcaccataaccagggacacacccgcgagcacaacctacatggaggtgagcagcctgagatctgaagacacggctgtgtattactgtgcttcgggtgcggggacttattcccctgactactggggccagggaaccctgctcaccgtctcctca

SEQ ID NO: 6548 - DNA, 296 bp, Homo sapiens
  source 1..296: mol_type = other DNA
ccatctccggggacagtgtctctagcaacagtgctacttggaactggatcaggcagtccccatcgagaggccttgagtggctgggaaggacatactacaggtccaagtggtataatgattatgcagtatctgtgaaaagtcgaataaccatcaacccagacacatccaagaaccaattctccctgcacctgaactctgtgactcccgaggacacggctgtgtattactgtgcaagagataggggtcagcagctgggcgactactggggccagggaaccctggtcaccgtctcctca

SEQ ID NO: 6549 - DNA, 296 bp, Homo sapiens
  source 1..296: mol_type = other DNA
ccatctccggggacactgtctctagcaacagtgctacttggaactggatcaggcagtccccatcgagaggccttgagtggctgggaaggacatactacaggtccacgtggtttaatgattatgcagtatctgtgaaaagtcgaataaccatcagcccagacacatccaagaaccagttctccctgcacctgagctctgtgactcccgaagacacggctgtgtattactgtgcaagagaccgggggcagcagctgggtgactactggggccagggaaccctggtcaccgtctcctca

SEQ ID NO: 6550 - DNA, 296 bp, Homo sapiens; identical to SEQ ID NO: 6549
  source 1..296: mol_type = other DNA

SEQ ID NO: 6551 - DNA, 296 bp, Homo sapiens
  source 1..296: mol_type = other DNA
ccatctccggggacactgtctctagcaacagtgctacttggaactggatcaggcagtccccatcgagaggccttgagtggctgggaaggacatactacaggtccacgtggtttaatgattatgcagtatctgtgaaaagtcgaataaccatcagcccagacacatccaagaaccagttctccctgcagctgagctctgtgactcccgaagacacggctgtgtattactgtgcaagagaccgggggcagcagctgggtgactactggggccagggaaccctggtcaccgtctcctca

SEQ ID NO: 6552 - DNA, 298 bp, Homo sapiens
  source 1..298: mol_type = other DNA
cactgtctctggtggctccatcagtagttactactggagctggatccggcagcccccagggaagggactggagtggattgggtacatctatgacagtgggaggaccaactacaacccctccctcaagagtcgagtcaccatatcagtagacacgtccaagaaccagttctccctgaaggtgagctctgtgaccgctgcggacacggccgtgtattactgtgcgagagatcggtatagcagtggctggtaccatggttttgatatctggggccaagggacaatggtcaccgtctcttca

SEQ ID NO: 6553 - DNA, 299 bp, Homo sapiens
  source 1..299: mol_type = other DNA
ccactgtctctggtggctccatcagtaattactactggagctggatccggcagcccccagggaagggactggagtggattgggtatatctcttacagtgggaccaccgactacaacccctccctcaagagtcgagtcaccatatcagtagacacgtccaggaaccagttctccctgaagctgagctctgtgaccgccgcagacacggccgtctattactgtgcccgagaccggtatagcagtggctggtaccacggtttcgatatctggggccaagggacaatggtcaccgtctcttca

SEQ ID NO: 6554 - DNA, 271 bp, Homo sapiens
  source 1..271: mol_type = other DNA
tgcagcctctggattcacctttaacagccatgccatgaactgggcccgccagcctccagggaaggggctggagtgggtctcgactattagtggaagtggtggtagcactttctacgcagcctccgtgaagggccggttcaccatctccagggacaattccaagaacacactgtatctgcagatgaacagcctgacagccgaggacacggccgtatattactgtgatggtgctaactactggggcctgggatccctggtcaccgtctcctca

SEQ ID NO: 6555 - DNA, 271 bp, Homo sapiens
  source 1..271: mol_type = other DNA
ttcagcctctggattaacatatagtacccatgtcatgaactgggcccgccgggctccagggaaggggctcgagtgggtctcaactatcaatggtcctggtgaatccacatactacgcagactttgtgaagggccggttcaccatctccagagacaatttcaagaacatgttgtatctgcaaatgaacagcctgacagccgaagacacggccgtatattattgtgatggggctaattactggggccggggaactcaggtcaccgtctcctcg

SEQ ID NO: 6556 - DNA, 277 bp, Homo sapiens
  source 1..277: mol_type = other DNA
tacagcctctgcattcacgtttagtagttattacatgagttgggtccgccaggctccggggaaggggctggagtgggtggccggcataaacaaagatggaagtgagaagtacttcgtggactctgtaaagggccgattcaccatctccagagacaataccaaaaactctctgtatttgcaaatgaacagcctgagagtcgcggacacggctgtgtattactgtgggagaggttcggggagtcttcggggtcagggaaccctggtcaccgtctcctca

SEQ ID NO: 6557 - DNA, 277 bp, Homo sapiens
  source 1..277: mol_type = other DNA
tacagcctctgcattcacgtttagtagttattacatgagttgggtccgccaggctccggggaaggggctggagtgggtggccggcataaacaaagatggaagtgagaagtacttcgtggactctgtaaagggccgattcaccatctccagagacaataccaaaaactcactgtatttgcaaatggacaacctgagagccgcggacacggctgtgtattactgtgggagaggttcggggagtcttcggggtcagggaaccctggtcaccgtctcctca

SEQ ID NO: 6558 - DNA, 277 bp, Homo sapiens
  source 1..277: mol_type = other DNA
tgcagcctctggattcacctttggtagtgattggatgacctgggtccgccaggctccagggaaggggctggagtgcgtggccagcatgaaccaagatggaagtgcgacatactatgtggactctgtgaagggccgattcaccgtctccagagacaacgccaagaactcagtgtatctgcaaatgaacagcctcagaaccgaggacacggctgtttatttttgtgggaggggtagtggttccctatggggccagggaaccctaatcaccgtctcctca

SEQ ID NO: 6559 - DNA, 280 bp, Homo sapiens
  source 1..280: mol_type = other DNA
tgcagcctctggattccccttcagcagttatgaaatgaactgggtccgccaggctccagggaaggggctagagtgggtttcatacattagtggtggtggtagtgccatatactacgcagactctgtgaagggccgattcaccatctccagagacaacgccaagaactcactgtatctgcaaatgaacagcctgagagccgaggacacggctgtttatttctgtgcgaggaggggaggctttgactgctggggccagggaaccctggtcaccgtctcctca

SEQ ID NO: 6560 - DNA, 280 bp, Homo sapiens
  source 1..280: mol_type = other DNA
tgtagcctctggattcaccttcagtaactatgacatgaactgggtccgccaggctccagggaaggggctggagtgggtttcatacattggtagtggtagtcgtaccatatactacgcagactctgtgaagggccggttcaccatctccagagacaatgccagggactcactgtatctgcaaatgaacagcctgagagacgaggacacggctgtgtattactgtgcgagaagaggtggctttgactgctggggccggggaaccctggtcaccgtctcctca

SEQ ID NO: 6561 - DNA, 280 bp, Homo sapiens
  source 1..280: mol_type = other DNA
tgcagcctctggattcagcttcagcagttatgaaatgaactgggtccgccaggctccagggaaggggctagagtggatttcatacataagtagtggtggtagtaccatatactacgcagactctgtgaagggccgattcaccatctccagagacaacgcccaaaacacactgtatctgcaaatgaacagcctgagagccgaagacacggctgtttattactgtgcgaggaggggaggctttgactgctggggccagggaaccctggtcaccgtctcctca

SEQ ID NO: 6562 - DNA, 277 bp, Homo sapiens
  source 1..277: mol_type = other DNA
cactgtctcccgtggctccatcagcacttactactggagctggatccggcagcccccagggaagggactggagtggattgggtatatctcttacagtgggggcgcctactacgacccctccctcaagagtcgagtcaccatatcagtagacgcgtccaagaaccagttctccctgatggtgacctctgtgaccgctgcggacacggccgtgtattactgtgcgagaggtccttcctttgactactggggcctgggaaccctggtcaccgtctcctca

SEQ ID NO: 6563 - DNA, 277 bp, Homo sapiens
  source 1..277: mol_type = other DNA
tactgtctctggtggctctatgactagttactattggagttggattcggcagcccccggggaagacactggagtggattgggtatatctattacactgggattagtttttacaacccctccctcaagagtcgagtcgccatatcagtagacacgtccaagaaccagttctccctggagctgacgtctgtgaccgctgcggacacggccgtgtattactgtgcgagaggcccttcttttgactactggggccagggaaccctggtcaccgtctcctca

SEQ ID NO: 6564 - DNA, 277 bp, Homo sapiens
  source 1..277: mol_type = other DNA
tactgtctctggtgcctctatgggtggttactattggagttggattcggcaacccccggggaagggactggagtggattgggtatatctattacactgggattagtctttacaatccctccctcaagagtcgagtcgccatgtcagtcgacacgtccaagaaccagttctccctggagctgacgtctgtgaccgctacggacacggccgtctattactgtgcgagaggcccttcttttgactactggggccggggaaccctggtcaccgtctcctca

SEQ ID NO: 6565 - DNA, 277 bp, Homo sapiens
  source 1..277: mol_type = other DNA
cactgtctctggtgactccatcggtggtcactcctggagctgggtccggcagcccccggggaagggactggagtggattgcatatatctactatggtggaagcacctcctataatccttccctcaagagtcgagtcaccatatcagtagaaatgtccaagagccagttctccctgaagttgacctctgtgaccgctgcagacacggccgtatattactgtgccagaggaccttcttttgactactggggccagggaaccctggtcatcgtctcctca

SEQ ID NO: 6566 - DNA, 274 bp, Homo sapiens
  source 1..274: mol_type = other DNA
cactgtctctggtgactccatcggtggtcactcctggagctgggtccggcagcccccggggaagggactggagtggattgcatatatctactatggtggaagcacctataatccttccctcaagagtcgagtcaccatatcagtagaaatgtccaagagccagttctccctgaagttgacctctgtgaccgctgcagacacggccgtatattactgtgccagaggaccttcttttgactactggggccagggaaccctggtcatcgtctcctca

SEQ ID NO: 6567 - DNA, 277 bp, Homo sapiens
  source 1..277: mol_type = other DNA
tactgtctctggtggctctatgactagttactattggagttggattcggcagcccccggggaagacactggagtggattgggtatatctattacactgggattagtttttacaacccctccctcaagagtcgagtcaccatatcagtagacacgtccaagaaccagttctccctggagctgacgtctgtgaccgctgcggacacggccgtgtattactgtgcgagaggcccttcctttgactactggggccagggaaccctggtcaccgtctcctca

SEQ ID NO: 6568 - DNA, 277 bp, Homo sapiens; identical to SEQ ID NO: 6563
  source 1..277: mol_type = other DNA

SEQ ID NO: 6569 - DNA, 277 bp, Homo sapiens
  source 1..277: mol_type = other DNA
tactgtctctggtggctctatgactagttactattggagttggattcggcagcccccggggaagacaccggagtggattgggtatatctattacactgggattagtttttacaacccctccctcaagagtcgagtcgccatatcagtagacacgtccaagaaccagttctccctggagctgacgtctgtgaccgctgcggacacggccgtgtattactgtgcgagaggcccttcttttgactactggggccagggaaccctggtcaccgtctcctca

SEQ ID NO: 6570 - DNA, 276 bp, Homo sapiens
  source 1..276: mol_type = other DNA
actgtctctggtggctctatgactagttactattggagttggattcggcagcccccggggaagacactggagtggattgggtatatctattacactgggattagtttttacaacccctccctcaagagtcgagtcgccatatcagtagacacgtccaagaaccagttctccctggagctgacgtctgtgaccgctgcggacacggccgtgtattactgtgcgagaggcccttcttttgactactggggccagggaaccctggtcaccgtctcctca

SEQ ID NO: 6571 - DNA, 286 bp, Homo sapiens
  source 1..286: mol_type = other DNA
tgcagcctctggattctcctttggaagttatgccatgggctgggtccgccaggctccagggaagggactggagtgggtctcaggtattagtgccactggtgaaagtacatactacgcggactccgtgaagggccggttcaccatctccagagacaattccaagaacacggtccatttgcaaatgaatagcctgagagccgaggacacggccatttattactgtgcgaaagagaaaagtggttgctttgactactggggccagggaaccctggtcaccgtctcctca

SEQ ID NO: 6572 - DNA, 286 bp, Homo sapiens
  source 1..286: mol_type = other DNA
tgcagcctccggattctccttcagtagttatgccatgggttgggtccgccagtctccagggaaggggctagaatgggtctcaagtataagtgctagtggcggcgccacattctacgcagactctgtgaagggccggttcatcatttccagagacggatccaagaacatcctgtctctgcaaatgaacagcctgaggggcgaggacacggcccgatattactgtgcgaaagaaaaatcagggtgttttgactattggggccagggaattttggtctccgtctcgtca

SEQ ID NO: 6573 - DNA, 286 bp, Homo sapiens
  source 1..286: mol_type = other DNA
tgcaggctctggattctcctttggaagttatgccatgggctgggtccgccaggctccagggaagggactggagtgggtctcaggtattagtgccactggtgaaagtacatattacgcggactccgtgaagggccgcttcaccatctccagagacaattccaagaactcgctccatctgcaaatgaatagcctgagagccgaggacacggccatttattactgtgcgaaagagaaaagtggttgctttgactactggggccagggaaccctggtccccgtctcctca

SEQ ID NO: 6574 - DNA, 280 bp, Homo sapiens
  source 1..280: mol_type = other DNA
tgcagcctctgaattcatgtttagtaactattggatgagctgggtccgccaggctccagggaaggggctggagtgcgtggccaacataaaacgagatggaagtgagaaatactatgtggactctgtgaagggccgattcaccatctccagagacaacgccaagaactcattgtatttgcaaatgaacagcctgagagccgaggacacggctgtgtattactgtacgagagcccgcggtatggacgtctggggccaagggaccacggtcaccgtctcctca

SEQ ID NO: 6575 - DNA, 280 bp, Homo sapiens; identical to SEQ ID NO: 6574
  source 1..280: mol_type = other DNA

SEQ ID NO: 6576 - DNA, 280 bp, Homo sapiens
  source 1..280: mol_type = other DNA
tgcagcctctggattcacctttagtaattatgggatgacctgggtccgccagactccagggaaggggctggagtgggtggcctacataaagccagatggaagtgaggcgttctatgtggactctgtgaagggccgattcaccatgtccagagacaacgccagggactcactgtatctgcaaatgaacagcctgagagtcgaggacacggctgtctattcctgtacgagagctaggggtatggacgtctggggccaagggaccacggtcaccgtctcctca

SEQ ID NO: 6577 - DNA, 280 bp, Homo sapiens
  source 1..280: mol_type = other DNA
tgcagcctctggattcacctttagtggcttttggatgacctgggcccgccaggctccagggaaggggctggagtgggtggccaacatgaatcaagatggaagtgaggaacactatctggattctgtgaagggccgattcaccatttccagagacaacgccaagaactcactgtatctgcaaatgaacagcctgagagccgaggacacggctgtgtattattgtgtgagagatcggggctcttcgtactggggccagggaaccctggtcaccgtctcctca

SEQ ID NO: 6578 - DNA, 280 bp, Homo sapiens
  source 1..280: mol_type = other DNA
tgcagcctctggattcacctttagtacctcttggatgacctgggtccgccaggctccagggaaggggctggagtgggtggccaacataaaggaagatggaagtgagaaatactatgtggactctgtgaagggccgattcaccaactccagagacaacgcccagaactcactgtatttgcaaatgaacagcctgagagtcgaggacacggctgtgtattattgtgtgagagaccgtggcagctcttactggggccagggaaccctggtcaccgtctcctca

SEQ ID NO: 6579 - DNA, 316 bp, Homo sapiens
  source 1..316: mol_type = other DNA
tgcagcctctggattcactttcagtaacgcctggatgagctgggtccgccaggctccagggcagggactggagtgggttggccgtattaaaagcaagactgatggtgggacaacagactacgccgcacccgtgaaaggcagattcaccatctcaagagatgattcaaaaaacacgctgtatctgcaaatggacagcctgaaaaccgaggacacagccgtgtattactgtaccacagagggttgtagtagcaccaggtgctattcgccgaatgcttttgatatctggggccaagggacaaaggtcaccgtctcttca

SEQ ID NO: 6580 - DNA, 316 bp, Homo sapiens
  source 1..316: mol_type = other DNA
tgcagcctctggattcactttcagtaacgcctggatgaactgggtccgccaggctccagggaaggggctggagtgggttggccgtattaaaaccaaaactaatggtgggacaacagactaccctgcacccgtgaaaggcagattcaccatctcaagagatgattcaaaaaacatgctgtatctgcaaatgaacagcctggaaaccgaggacacagccgtgtattactgtaccacagagggttgttctagtaccaggtgctattctcctaatgcttttgatatctggggccaagggacaatggtcaccgtctcttca

SEQ ID NO: 6581 - DNA, 307 bp, Homo sapiens
  source 1..307: mol_type = other DNA
cactgtctctggtggctccatcagtagttactactggagctggatccggcagcccccagggaagggactggagtggattgggtatatctattacagtgggagcaccaactacaacccctccctcaagagtcgagtcaccatatcagtagacacgtccgagaaccagttctccctgaagctgaggtctgtgaccgctgcggacacggccgtgtattactgtgcgagagacagatattgtagtcgtggtagttgcttcgactggtacttcgatctctggggccgtggcaccctggtcactgtctcctca

SEQ ID NO: 6582 - DNA, 307 bp, Homo sapiens
  source 1..307: mol_type = other DNA
cactgtctctggtggccccatcagtagttactactggagctggatccggcagcccccagggaagggactggagtggattgggtacatctattacagtgggagcaccaactacaacccctccctcaagagtcgagtcaccatgtcagtagacacgtccaagaatcagttctccctgaagctgagctctgtgaccgctgcggacacggccatgtattactgtgcgagagataggtattgtagtcgtggcagctgcttcgactggtacttcgatctctggggccgtggcaccctggtcactgtctcctca

SEQ ID NO: 6583 - DNA, 288 bp, Homo sapiens
  source 1..288: mol_type = other DNA
aaggcttccggatacagctttaccaactcctggatcggctgggcgcgccagatgcccgggaaaggcctggagtggatggggatcatcaatcctggtgactctggtaccagatacagcccgtccttccaaggccaggtcaccatctcagccgacaagtccatcagcaccgcctacctacagtggagcagcctgaaggcctcggacaccgccatatattactgtgcgagacaaccaggatcggggtggttcgacccctggggccagggaaccctggtcaccgtctcctca

SEQ ID NO: 6584 - DNA, 288 bp, Homo sapiens
  source 1..288: mol_type = other DNA
aaggcttctggatacagctttaccagcaattggatcggctgggtgcgccagatgcccgggaaaggcctggagtggatggggatcatcaatcctggtgactctgatactagatatagcccgtccttccaaggccaggtcaccatgtccgtcgacaagtccatcagcaccgcctacctgcagtggagcagcctgaaggcctcggacaccgccatgtattattgtgcgagacagccagggtcaggctggttcgacccctggggccagggaaccctggtcaccgtctcctca

SEQ ID NO: 6585 - DNA, 288 bp, Homo sapiens
  source 1..288: mol_type = other DNA
aaggcttctggatacagccttaccagcaattggatcggctgggtgcgccagatgcccgggaaaggcctggagtggatggggatcatcaatcctggtgactctgatactagatatagcccgtccttccaaggccaggtcaccatgtccgtcgacaagtccatcagcaccgcctacctgcagtggagcagcctgaaggcctcggacaccgccatgtattattgtgcgagacagccagggtcaggctggttcgacccctggggccagggaaccctggtcaccgtctcctca

SEQ ID NO: 6586 - DNA, 288 bp, Homo sapiens
  source 1..288: mol_type = other DNA
aaggcttctggatacagctttaccagcaattggatcggctgggtgcgccagatgcccgggaaaggcctggagtggatggggatcatcaatcctggtgactctgatactagatatagcccgtccttccaaggccaggtcaccatgtccgtcgacaagtccatcagcaccgcctacctgcagtggagcagcctgaaggcctcggacaccgccatgtattattgtgcgagacagccagggtcaggctggttcgacccctggggccagggaaccctagtcaccgtctcctca

SEQ ID NO: 6587 - DNA, 295 bp, Homo sapiens
  source 1..295: mol_type = other DNA
cactgtctctggtggctccatcagtacttactactggagctggatccggcagcccccagggaagggactggagtggattgcatatatatataacagtgggagcaccaagtacaacccctccctcacgagtcgagtcaccatatcagtagacacgtccaagaaccagttctccctgcagctgagctctgtgaccgctgcggacacggccgtgtattactgtgcgagaggcggggatagtagtggttattacgcctatgactattggggccagggaaccctggtcaccgtctcctca

SEQ ID NO: 6588 - DNA, 295 bp, Homo sapiens
  source 1..295: mol_type = other DNA
cagtgtctttggtggctccatcagtaattattactggggctggatccggcagcccccagggaagcgactggagtggattgggtatatctattacagtgggagcaccaactacaacccctccctcaagagtcgagtcaccatatcactcgacacgcccaagaagcagttttacctgaagttgagctctgtggccgctgcggacacggccgtgtattactgtgcgagaggaggggatagtagtggttattacgcctatgactattggggccagggaaccctggtcaccgtctcctca

SEQ ID NO: 6589 - DNA, 292 bp, Homo sapiens
  source 1..292: mol_type = other DNA
cactgtctctggtggctccatcagcagtaatagttactactggggctggatccggcagcccccagggaaggggctggagtggattgggagtatctattatagtgggggcacctacgacaacccgtccctcaaaagtcgagtcaccatatccgtagacaggtccaagaaccagttctccctgagactgagttctgtgaccgccgcagacacggctgtgtattactgtgcgagaaccctcagcgctaactggttcgacccctggggccatggaaccctggtcaccgtctcctca

SEQ ID NO: 6590 - DNA, 292 bp, Homo sapiens
  source 1..292: mol_type = other DNA
cactgtctctggtggctccatcagcagtaatagttactactggggctggatccggcagcccccagggaaggggctggagtggattgggagtatctattatagtgggggcacctacgacaacccgtccctcaaaagtcgagtcaccatatccgtagacaggtccaagaaccagttctccctgagactgagttctgtgaccgccgcagacacggctgtgtattactgtgcgagaaccctcagcgctaactggttcgacccctggggccagggaaccctggtcaccgtctcctca

SEQ ID NO: 6591 - DNA, 298 bp, Homo sapiens
  source 1..298: mol_type = other DNA
cactgtctctggtggctccgtcagcagtactagttaccactggggctggctccgccagcccccagggatggggctggagtggattgcgaatatttattatactgggaccacctactacaacccgtccctcaagagtcgagtcaccgtgtccgtagacacgtccaagaaccagttctccctgaagctgtactctgtgaccgccgcagacacggctgtgtattactgtgcgggacgaataacagtggcgggcggctggttcgacccctggggccagggaaccctggtcaccgtctcctca

SEQ ID NO: 6592 - DNA, 298 bp, Homo sapiens
  source 1..298: mol_type = other DNA
cactgtctctggtgactccatcagcagtggtcattaccactggggctggatccgccagcccccaggggagggcctggagtggattgggactatgtctgttggtgggagcaccttctacaacccgtccctcagcagtcgagtcatcatatccgtggacacgtccaggactcagttctccctgaagttgagctctgtgaccgccgcagacacgggtgtctattactgtgcgggacgtataacggtagcggggggctggttcgacccctggggccagggaaccctggtcaccgtctcctca

SEQ ID NO: 6593 - DNA, 277 bp, Homo sapiens
  source 1..277: mol_type = other DNA
tgcagcctctggattcacctttagtaactattggatggcttgggtccgccagcctccagggaaggggctggagtgggtggccagcctaaagaaagatggagatgggaaatactatgtggactctgtgaagggccgattcaccatcaccagagacatcgccgagaacttactgtatctgcaaatgaacaacctgggagccgcggacacggctgtgtattactgtgtgagaggctctatggacgtctggggccaaggaaccacggtcaccgtctcctca

SEQ ID NO: 6594 - DNA, 277 bp, Homo sapiens
  source 1..277: mol_type = other DNA
tgcagcctctggattcacctttactagatattggatgaattgggtccgccaaactccagggaaggggctggagtgggtggccagtataaaaccagaaggaaatgacaaatatcatgtggactctgtgaagggccgattcaccatctccagagacaacgccaagaactcacagtatttgcaaatgaacagcctgagggccgaggacacggctgtctattactgtgtgagagggagcatggacgtctggggccaagggaccacagtcaccgtctcctca

SEQ ID NO: 6595 - DNA, 289 bp, Homo sapiens
  source 1..289: mol_type = other DNA
tgcagcgtctggattcgccttcagtagatatggcatgcactgggtccgccaggctccaggcaaggggctggagtgtgtggcaactgtatggtatgatggaagtaataaatactatgcagactccgtgaagggccgattcaccgtctccagagacaattccaagaactcgctgtatctccaagtgaacagcctgagagccgaggacacggctctgtattactgtgcgagagatcggggtggctggtcaattgacttctggggccagggaaccctcgtcaccgtctcctca

SEQ ID NO: 6596 - DNA, 289 bp, Homo sapiens
  source 1..289: mol_type = other DNA
tgcagcctctggattcaccttcagtagctttggcatgcactgggtccgccaggctccaggcaaggggctggagggggtggcaactatttggtatgacggaagtgagaaatactatgcagactccgtgaagggccgattcaccatctccagagacaactccaagaacacgatgtatctgcaaatgaacagcctgagagccgaagacatggctgtgtattcctgtgcgagagatcgcggtggctggtccattgacttctggggccagggaaccctggtcagcgtctcctca

SEQ ID NO: 6597 - DNA, 295 bp, Homo sapiens
  source 1..295: mol_type = other DNA
cactgtctctggtgactccatcagcagtggtggtttcttctggagttggatccgccagcgcccaggggaggccctggagtggattggatacacctattacggtggaaccacccactacagtccgtccctccagagtcgagtctccatttcggtagactcgtctaaggaccagttctccctgaggctgagctctgtgactgccgcggacacggccgtgtattactgtgcgagagatgtgactgggaagtactactttgactactggggccagggaaccctggtcaccgtctcctca

SEQ ID NO: 6598 - DNA, 295 bp, Homo sapiens
  source 1..295: mol_type = other DNA
cactgtctctggtgacttcctcagcagcggtggttacttctggagctggatccgccaacacccagggaagggcctggagtggattgggtacacctattacggtgggaccacccactacaatccgtccctcgagagtcgagttagcatctcagtagacgcgtctaagaaccagttctccctgaagctgacctctgtgactgccgcggacacggccatgtattactgtgcgcgagatgttacggggaaatattactttgactactggggccagggaaccccggccttcgtctcctca

SEQ ID NO: 6599 - DNA, 295 bp, Homo sapiens
  source 1..295: mol_type = other DNA
cactgtctctggtgacttcctcagcagcggtggttacttctggagctggatccgccaatacccagggaagggcctggagtggattgggtacacctattacggtgggaccacccactacaatccgtccctcgagagtcgagttagcatctcagtagacgcgtctaagaaccagttctccctgaagctgacctctgtgactgccgcggacacggccatgtattactgtgcgcgagatgttacggggaaatattactttgactactggggccagggaaccccggccttcgtctcctca

SEQ ID NO: 6600 - DNA, 283 bp, Homo sapiens
  source 1..283: mol_type = other DNA
tgcagcctctggcttcaccttcagtaactatgctatacagtgggtccgccaggccccagggaagggactggaatttgtttcagctattagtactagtgggtataccacatattatgcaacctctgtgaagggcagattcaccatctccagagacaattccaagaacacgctgtatcttcaaatgggcagcctgagaggcgaggacatggctgtatattactgtgcgagagcagctggctaccttgactactggggccagggaaccctggtcaccgtctcctca

SEQ ID NO: 6601 - DNA, 283 bp, Homo sapiens
  source 1..283: mol_type = other DNA
tgcagcctctggattcaccttcagtagctatgctatgcactgggtccgccaggctccagggaagggactggaatatgtttcagctattagtagtaatgggggtagcacatattatgcaatctctgtgaagggcagattcaccatctccagagacaattccaagaacacactatatcttcaaatgggcagcctgagagctgaggacatggctgtgtattactgtgcgagagccgcggggtacttagactactggggccagggaaccctggtcaccgtctcctca

SEQ ID NO: 6602 - DNA, 292 bp, Homo sapiens
  source 1..292: mol_type = other DNA
tgcagcctctggattcaggtttagtagcaattggatgagctgggtccgccagactccagggggggggctggagtgggtggccaccataaagcaagatggaagtcagaaatactatgtggactctgtgaagggccgattcaccatctccagagacaacgccaagacctcagtgtatttgcaaatgaacagtctgagagccgaggacacggctatctattactgtgtgagagatgatcgggggagctacctctttgactactggggccagggaaccctggtcaccgtctcctca

SEQ ID NO: 6603 - DNA, 292 bp, Homo sapiens
  source 1..292: mol_type = other DNA
tgcagcctctggattcaccttcagtaccaactggatgacctgggtccgccaggctccagggaaggggctggagtgggtggccaacatgaaccagggtggaagtgagaaacactatgtggactctgtgaagggccgattcaccatctccagagacaacgccaagaagtcactgtatctgcaaatgaacagcctgagagccgaggacacggctgtgtattactgtgtgagagatgatcgggggagctatttatttgactactggggccagggaaccctggtcaccgtctcctca

SEQ ID NO: 6604 - DNA, 310 bp, Homo sapiens
  source 1..310: mol_type = other DNA
cgctgtctctggtggctccatgaccagtcctaactggtggagttgggtccgccagcccccagggaaggcactggagtggattggggaaattcttcatactgggaccgcccactccagcccgtccctcaggagtcgagtcaccgtatcactagacaagtccaagaaccaattctccctgaatttgaactctgtgaccgccgcggacacggccgtgtattattgtgcgagactgggccccggggcgactacaccaaccacgggggcggcttttgatatctggggccaagggacaatggtcaccgtctcttca

SEQ ID NO: 6605 - DNA, 310 bp, Homo sapiens
  source 1..310: mol_type = other DNA
cgctgtctcgggtggctccatcagcagtcttaactggtggacttgggtccgccagcccccagggaagggactggagtggattggagagatctatcatagtgggaccacccactacagcccgtccctctggagtcgagccaccatatcattagacaagtccaagacccgcttctccctaaacctgagctctgtgaccgccgcggacacggccgtttattactgtgcgagactgggccccggggcgaccacaccaactacgggggcggcttttgatatctggggccaagggacaatggtcaccgtctcttca

SEQ ID NO: 6606 - DNA, 310 bp, Homo sapiens
  source 1..310: mol_type = other DNA
cagtgtctctggtgactccatggtcggtcctaactggtggacttgggtccgccagcccccagggaaggggctggagtggattggggagatccgtcacactgggaccgcccactacagtccggccctcaggagccgagtcaccataacctcagacaactccatgcagcgcttcttcctgacactgagttctctgaccgccgcggacacggccgtatattactgtgcgagactaggtccgggggcgactacaccgactacgggggctgcttttgatatctggggccagggggctgtggtcaccgtctcttca

SEQ ID NO: 6607 - DNA, 310 bp, Homo sapiens
  source 1..310: mol_type = other DNA
cagtgtctctggtgactccatggtcggtcctaactggtggacttgggtccgccagcccccagggaaggggctggagtggattggggagatccgtcacactgggaccgcccactacagtccggccctcaggagccgagtcaccataacctcagacaactccatgcagcgcttcttcctgacactgagttctctgaccgccgcggacacggccgtatattactgtgcgagactaggtccgggggcgactaccccgaccacgggggctgcttttgatatctggggccagggggctgtggtcaccgtctcttca

SEQ ID NO: 6608 - DNA, 282 bp, Homo sapiens
  source 1..282: mol_type = other DNA
aagggttctggatacagctttgccacccactggatcggctgggtgcgcctgatgcccgggaaaggcctggagtggatggggatcatctatcctggtgactctgataccagatacagcccgtccttccaaggccaggtcaccatctcagccgacaagtccatcagcaccgccttcctgcagtggagcagcctgaaggcctcggacaccgccatgtattactgtgcgaggcgtggtacctctcttgactactggggccagggaaccctggtcaccgtctcctca

SEQ ID NO: 6609 - DNA, 282 bp, Homo sapiens
  source 1..282: mol_type = other DNA
aagggttctggatacagctttaccacctactggatcgcctgggtgcgccagatgcccgggaaaggcctggagtacatggggatcatctatcctggtgactctgataccagatacagcccgtccttccaaggccaggtcaccatctcagccgacaagtccctcaccaccgcctacctggaatggagcagcctgaaggcctcggacaccgccatgtactactgtgcgagacgcggcacctcgcttgactactggggccaggggaccctggtcaccgtctcctca

SEQ ID NO: 6610 - DNA, 280 bp, Homo sapiens
  source 1..280: mol_type = other DNA
tgcagcctctggattcaccttcagtaacagctggatgcagtgggtccgccaagctccagggaaggggctggtgtgggtctcacgtataaatgctgatgggagcagcacaacctacgcggactccgtgaagggccgattcaccatctccagagacaacgccaagaaaactctgtatctgcaaatgaacagtctgagagccgaggacacggctatatattactgtgtaagagatagcagtgccacctactggggccagggaaccctggtcaccgtctcctca

SEQ ID NO: 6611 - DNA, 277 bp, Homo sapiens
  source 1..277: mol_type = other DNA
tgcagtctctggattcagtctcagaggtcactggatgtactgggtccgccaagctccagggaaggggctgatgggggtctcccgtattagtgctactgggaccacagagtacgcggactccgtgaagggccgattcaccatctccggagacaacgccaagaacacgctgtttttacaaatgaacagtctgagagtcgaggacacgggtgtttattactgtgtaagagacagtagtgctacctactggggccggggaaccctggtccacgtctcctca

SEQ ID NO: 6612 - DNA, 280 bp, Homo sapiens
  source 1..280: mol_type = other DNA
tgcagcctctggattcagttttaaagactattggatgagctgggtccgccaggctccagggaaggggctggagtgggtggccaacataaacgaaggtggaagtcagaaaaactatgtggactctgtgaagggccgattcaccatctccagagacaacgccaagaactcactgtatctgcaaatgaacagcctgagagccgaggacacggctgtgtattactgtacgaatcgggcatggctggagtcctggggccagggaaccctggtcaccgtctcctca

SEQ ID NO: 6613 - DNA, 280 bp, Homo sapiens
  source 1..280: mol_type = other DNA
tgaagcctctggattccccttcagtagtcattggatgagttgggtccgccaggctccaggaaaggggctggagtgggtggccaacataaacgaggatggaagtcagaaaaactatgtggactccgtgaagggccgattcaccatctccagagacaacgccaagaacgcactgcatctgcaaatgagcagcctgagagccgaggacacggccgtatattattgtactaacagggcctggttagagtcctggggtcagggaaccctggtcgccgtctcctca

SEQ ID NO: 6614 - DNA, 294 bp, Homo sapiens
  source 1..294: mol_type = other DNA
aagggttctggatacagctttagaagttactggatcgcctgggtgcgccagatgcccgggaaaggcccggagtggatgggaatcatccagcctggtgactctgataccagatacagcccgtccttccagggccaggtcaccatctcagccgacaagtccatcagcaccgcctacctgcagtggagcagcctgaaggcctcggacaccgccatgtactactgtgcgaggcaagatggggctgctgaatactactttgactactggggccagggaaccctggtcaccgtctcctca

SEQ ID NO: 6615 - DNA, 294 bp, Homo sapiens
  source 1..294: mol_type = other DNA
aagggttctggatacgactttaacttctattggatcgcctgggtgcgccagatgcccgggaaaggcctggagtggatggggatcatctatcctggtgactctaaaagtagatacagtccgtccttccaaggccaggccaccatttcagtcgacaagtccatcaacaccgcctacctgcagtggaggagcctgaaggcctcggacaccgccatttatttctgtgcgagacaggatggggcagcagaatactactttgactactggggccagggaaccctggtcaccgtctcctca

SEQ ID NO: 6616 - DNA, 289 bp, Homo sapiens
  source 1..289: mol_type = other DNA
tgcagcctctggattcacctttagtacttattggatgagttgggtccgcctgactccaggggaggggctggagtgggtggccaacttagaccaagatgcaagtgagaaaaactatgtggactctgtgaagggccgattcaccatctccagagacaacgccaagagctcactttatctgcagatgaacagcctgagagtcgacgacacggctctctattactgtgcgagagatcgtggctattcgacttttgacttctggggccagggagccctggtcaccgtctcctca

SEQ ID NO: 6617 - DNA, 289 bp, Homo sapiens
  source 1..289: mol_type = other DNA
tgcagcctctgggttcacctttggtacctattggatgagttgggtccgccaggctccagggaaggggctggagtgggtggccaacatgcaggaagatggaactgaaataaactatgttgactctgtgaggggccgattcaccatctccagagacaacgccagggactcactgtatctgcaaatgaccagcctgagagccgaggacacggctgtctattattgtgcgagagatcgcggatacagcacctttgacttctggggccagggaatcctggtcaccgtctcctca

SEQ ID NO: 6618 - DNA, 286 bp, Homo sapiens
  source 1..286: mol_type = other DNA
cgctgtctctggtgcctccttcagcaataataactggtggagttgggtccgccagtccccagagaagggactggagtggattggggagatccatcatagtgacggcaccaactataacccgtccctcaggagtcgagtcaccatgtcattagacacgtctaagaatcagttttccctgaggctgacctctgtgaccgccgcggacacggccgtgtattattgtacgagaccttattcctactacatggacgtctggggcaaagggaccacggtcaccgtctcctca

SEQ ID NO: 6619 - DNA, 286 bp, Homo sapiens
  source 1..286: mol_type = other DNA
ctctgtctctgatggctccatcagcaataataactggtggggttgggtccgccagcccccagggaaggggctggagtggattggggaaatctatcatagtgggagcaccaactacaacccgtccctcaagagtcgagtcaccatatcagtagacaagtccaagaaccttttctccctgaacctgagttctgtgaccgccgcggacacggccgtatattactgtacgagaccctactcctactacatggacgtctggggcaaagggaccacggtcaccgtctcctca

SEQ ID NO: 6620 - DNA, 280 bp, Homo sapiens
  source 1..280: mol_type = other DNA
tgcagcctctggattcaccttcagtagttatgaaatgaactgggtccgccaggctccagggaaggggctggagtgggtttcatatattagtagtagtggtggtaccatatactacgcagactctgtgaagggccgattcaccatctccagagacaacgccaagaactcactgtatctgcaaatgaacagcctgagagccgaggacacggctgtttattactgtgcgagaggctctagcagctcatcttggggccggggaaccctggtcaccgtctcctca

SEQ ID NO: 6621 - DNA, 280 bp, Homo sapiens
  source 1..280: mol_type = other DNA
tgcagcctctggattcaccttcactacctatgtcatgaactgggtccgccaggctccagggaaggggctggagtgggtttcattcattagtagtgggagtaaaaccatatactacgcagactctgtgaagggccgattcaccatctccagagacaatgccaacaactcactgtatctccaaatgaacagcctgagagacgaggacacggctgtgtattactgtgcgagaggaagcagcagctccagctggggccagggaaccctggtcaccgtctcctca

SEQ ID NO: 6622 - DNA, 315 bp, Homo sapiens
  source 1..315: mol_type = other DNA
acccagaccctaacactgacctgcgccttctctggcttctcactcaccactagtggagtggctgtgggctggttccgccagcccccaggaaaggccctagagtggcttgcacacatttattgggataatgacaagcgccacagtccttctctgaggaccagactcaccatcaccaaggccgcctccaaaaaccaggtggtcctcacactgaccaacgtgggccctttggacacagccacatatttctgtgcacacagacttagagccgatgctttcgatgtctggggccaggggaccctggtcgccgtctcttca

SEQ ID NO: 6623 - DNA, 315 bp, Homo sapiens
  source 1..315: mol_type = other DNA
acacagaccctaactctgacctgcaccttttctggattctcactcagtacttctggagtggctgtgggctggctccgtcagccccccggaaaggccctggaatggcttgcacacgtttattgggatgatgataagcgttacagccgatctctcaggaacagactcacgatcaccaaggccacctccagaaaccaggtggtcttgacattgaccaacatgggccctctggacacagccacatatttctgtgcccacagactaagagctgatgcttttgatgtctggggccgagggacaatggtcgccgtctattca

SEQ ID NO: 6624 - DNA, 315 bp, Homo sapiens
  source 1..315: mol_type = other DNA
acccagaccctaacactgacctgcaccttctctggcttctcactcaccactagtggagtggctgtgggctggttccgccagcccccaggaaaggccctagagtggcttgcacacatttattgggataatgacaagcgccacagtccttctctgaggaccagactcaccatcaccaaggccgcctccaaaaaccaggtggtcctcacactgaccaacgtgggccctttggacacaggcacatatttctgtgcacacagacttagagccgatgctttcgatgtctggggccaggggaccctggtcgccgtctcttca

SEQ ID NO: 6625 - DNA, 315 bp, Homo sapiens
  source 1..315: mol_type = other DNA
aaacaaaccctcacgctgacctgcgccttttctgggttctcactcaaaactagtggagtggctgtgggctggctccgtcagcccccaggaaaggccctagaattccttgcactcatttattgggacgatgataagcgctacagcccatctctgaagaacaggctcaccatcatgaaggactcctccagaaatcaggttgtccttacaatgaccaacgtggaccgtgtggacacagccacctatttctgtgcacacagacttagagcggacgcttttgatgtctggggccaagggacaatggtcaccgtcgcttca

SEQ ID NO: 6626 - DNA, 315 bp, Homo sapiens
  source 1..315: mol_type = other DNA
acacagaccctaacgctgacctgcaccttctccggattttcactcagcagtagtggagtggccgtggggtggctccgtcagccccccggaaaggccctggaatggcttgcacacatttattgggatgatgataagcgcttcagtctatctctgaggaacagactcaccatcaccaaggccacccccagaaaccaggtggtccttacaatgacaaacgtgggccctgtggacacagccacatatttctgtgcgcacaggctccgcgctgatgcttttgatgtctggggccaagggacaagagtcaccgtctcttca

SEQ ID NO: 6627 - DNA, 280 bp, Homo sapiens
  source 1..280: mol_type = other DNA
tgcagcctctggattcacctttagtagctattggatgagctgggtccgccaggctccagggaaggggctggagtgggtggccaacataaagcaagatggaagtgcgaaatattatgtggactctgtgaagggccgattcaccatctccagagacaacgccaagaactcactgtatctgcaaatgaacagcctgagagccgaggacacggctgtgtattactgtgcgagaggcttgccagatccccactggggccagggaaccctggtcaccgtctccgca

SEQ ID NO: 6628 - DNA, 280 bp, Homo sapiens
  source 1..280: mol_type = other DNA
tgtcgcctctggattcatctttagtgactattggatcaactgggtccgccgggctccagggaaggggctggagtgggtggccaacataaagaaagatggaagtgagaaatactttgcggactctgtgaagggccgattcaccatctccagagacaacggcaagaactcagtgtatctgcaaatgagtagcctgagagccgaggacacggctgtgtatttctgtgcgagagggttacctgacccccactggggccagggaaccctggtcaccgtctcctca

SEQ ID NO: 6629 - DNA, 289 bp, Homo sapiens
  source 1..289: mol_type = other DNA
cagtgtctccggtggctccatcaataattaccactggagttggatgcggcagtccccagggaaggagccggaatggattgcgtatatcttttacagcgggattattacttacaacccctccctcaagagtcgagtcaccatatcaatagacacgtccaagtatcacttctccctgaagctgcgctctgtgaccgccgcagacacggccgtgtattactgtgcgaggcgggcctccggtgaaaactactttgactattggggccagggaaccctggtcaccgtctcctca

SEQ ID NO: 6630 - DNA, 289 bp, Homo sapiens
  source 1..289: mol_type = other DNA
cactgtctctggtggctccatcagtttttaccactggagctggatgcggcagtccccagggaaggaactggaatggattgcctatatctattacagtgggactattacttacaacccctccctcaagagtcgagtcaccatatccgtggacacgtccaagaaccacttctccctgacgctgccctctgtgaccgccgcagacacggccatatattactgtgcgagacgggcctccggtgaaaactactttgactactggggccagggaaccctggtcaccgtctcctca

SEQ ID NO: 6631 - DNA, 289 bp, Homo sapiens
  source 1..289: mol_type = other DNA
cagtgtctctggtggctccaccagtggttatcactggagctggatgcggcagtccccagagaagggaatagaatggattggatatatccactacagtgggaccaccacctacaacccctccctcaagagtcgactcaccataacagtcgacacgcccaagaatcagttctccctaaacttgaggtcggtgaccgccgcggacacggccgtctatttctgtgcgagacgagcatctggggaaaactattttgactactggggccagggaaccctggtcaccgtctcctca

SEQ ID NO: 6632 - DNA, 298 bp, Homo sapiens
  source 1..298: mol_type = other DNA
tgcgacctctggattcacctttagcacctatgccatggcctgggtccgccaggctccagggaagggtctggagtggctctcagccattggtgatagaagtcactacacatactacgcagactccgtgaagggccggttcaccatctccagagacaattccgagaacactctgtatctgcaaatgaacaccctgacagccgaggacacggccatatatttctgtgcgaaagagttggtgtcacgacagtctctttcttttgacttctggggccagggaaccctggtcaccgtctcctca

SEQ ID NO: 6633 - DNA, 298 bp, Homo sapiens
  source 1..298: mol_type = other DNA
tgcagcctctggattcacctttggcaactatgccatggcctgggtccgccaggctccaggaaaggggctggagtggctctcagctattggtggtagtagtgagtacacattttacgcagactccgtgaagggccggttcaccttcacaagagacaattccaaaaacacactctatctgcaaatgaacagcctgagagccgaggacacggccgtatatttctgtgcgaaagaattggtgtcgagacaatcgctgagttttgacttctggggccagggaaccctggtcaccgtctcctca

SEQ ID NO: 6634 - DNA, 280 bp, Homo sapiens
  source 1..280: mol_type = other DNA
cgctatttatggtgggtctttcagtacttactactggagctggatccgccagtccccagaaaagggactggagtggattggggaaatcaatcatcgtggaagcaccaattataacccgtccctcgacagtcgagtcaccatatcagtagacacgtccaacaaccagttctccctgaggctgacctctgtgaccgccgcagacacggctgtgtattactgtgcgagaggccccggaacgacctcggactggggccggggaaccctggtcaccgtctcctca

SEQ ID NO: 6635 - DNA, 280 bp, Homo sapiens
  source 1..280: mol_type = other DNA
cgctgtctctggtgggtccttcagtgattactactggagttggatccgccagtccccagggaaggggctggagtggattggggaaatcaatcacagtggcagcaccagctacaacccgtccctcaagagtcgagtcgccatctcagttgacacgtccaagaaccagttctccctgaagctgacctctgtgaccgccgcggatacggctgtttatttctgtgcgcgaggccccggaaccacgtcggactggggccagggaaccctggtcaccgtctcctca

SEQ ID NO: 6636 - DNA, 280 bp, Homo sapiens
  source 1..280: mol_type = other DNA
cgctgtctatggtgggtccttcagtgattactactggagctggatccgccagcccccagggaaggggctggagtggattggggaaatcaatcacagtggaagcaccacctacaacccgtcccttaagagtcgagtcgccatgtcagttgacacgtccaagaaccagttctccctgaagctgacctctgtgaccgccgcggacacggctgtgtatttctgtgcgagaggccccggaactacgtcggactggggccagggaaccctggtcagcgtctcctca

SEQ ID NO: 6637 - DNA, 280 bp, Homo sapiens
  source 1..280: mol_type = other DNA
cgctgtctctggtgggtccttcggtgattactactggagttggatccgccagcccccagggaaggggctggagtggatcggggaaattaatcacagtggaaacaccaactacaacccgtccctcaagagtcgagtcgccatctcaattgacacgtccaagaaccagttctccctgaaagtgacttctgtgaccgccgcggacacggctgtgtatttctgtgcgagaggccccggaactacgtcggactggggccagggaaccctggtcagcgtctcctca

SEQ ID NO: 6638 - DNA, 280 bp, Homo sapiens
  source 1..280: mol_type = other DNA
cgctgtctatggtgggtccttcagtgattactactggagctggatccgccagcccccagggaaggggctggagtggattggggaaatcaatcacagtggaaccaccaactacaacccgtccctcaagagtcgagtcgccatctcagttgacacgtccaagaaccagttctccctgaaggtgacctctgtgaccgccgcggacacggctatttacttctgtgcgagaggccccggaactacgtcggactggggccagggaaccctggtcagcgtctcctca

SEQ ID NO: 6639 - DNA, 280 bp, Homo sapiens
  source 1..280: mol_type = other DNA
cgctgtctatggtgggtccttcagtgattactactggagctggatccgccagcccccagggaaggggctggagtggattggggaaatcaatcacagtggaaccaccaactacaacccgtccctcaagagtcgagtcgccatctcagttgacacgtccaagaaccagttctccctgaaggtgacctctgtgaccgccgcggacacggccatttacttctgtgcgagaggccccggcactacgtcggactggggccagggaaccctggtcaccgtctcctca

SEQ ID NO: 6640 - DNA, 280 bp, Homo sapiens
  source 1..280: mol_type = other DNA
cgctgtctatgatgggtccttcgctgaatactactggagctggatccgccagcccccagggggggggctggagtggattggggaaatcaatcacagcggaaacaccaactacaacccgtccctcaagggtcgagtcgccatttcaattgacacgtccaagaaccaattctccctgaaactgacctctgtgaccgccgcggacacggctgtatatttctgtgcaagaggccccggaactacgtcggactggggccagggaaccctggtcagcgtctcctca

SEQ ID NO: 6641 - DNA, 280 bp, Homo sapiens
  source 1..280: mol_type = other DNA
cgctgtctatggtgggtccttcggcacttactattggagctggatccgccagcccccagggaaggggctggagtggattggagaaatcaatcatagtggaagaaccaactacaacccgtctctcgagagtcgagtcaccatatcaatagacacgtccaagaaccaattctcccttaaactgacctctgtaacagccgcggacacggctgtctattactgtgcgcgaggccctggaactacgtcggactggggccagggaaccctgatcaccgtctcctca

SEQ ID NO: 6642 - DNA, 280 bp, Homo sapiens
  source 1..280: mol_type = other DNA
cgctgtctctggtgggtccttcggtgattactactggagttggatccgccagcccccagggaaggggctggagtggatcggggaaattaatcacagtggaaacaccaactacaatccgtccctcaagagtcgagtcgccatctcaattgacacgtccaagaaccagttctccctgaaagtgacttctgtgaccgccgcggacacggctgtgtatttctgtgcgagaggccccggaactacgtcggactggggccagggaaccctggtcagcgtctcctca

SEQ ID NO: 6643 - DNA, 280 bp, Homo sapiens
  source 1..280: mol_type = other DNA
cgctgtgtatggtgggtccttcagtgattactactggagctggatccgccagcccccagggaaggggccggagtggattggggaaatcaatcacagtggaaacaccaactacaacccgtccctcaagagtcgagtcgccatctcaattgacacgtccaagaaccaattctccctcaaactgacctctgtgaccgccgcggacacggctgtgtatttctgtgcaagaggccccggaactacgtcggactggggccagggaaccctggtcagcgtctcctca

SEQ ID NO: 6644 - DNA, 286 bp, Homo sapiens
  source 1..286: mol_type = other DNA
tgcagcctctggattcaccttcagcgcctatagcatgaactgggtccgccaggctccaggggaggggctggagtggatttcaaaggtgagtgccagtggtattaacacatactacgcagactctgtgaggggccgactctccgtctccagagacaacgccaaggactcactatatctgcaaatgaacagcctgagagccgaggacacggctttatattactgtgcgagagatcacaactatggttttgattactggggccagggagccctggtcaccgtctcctca

SEQ ID NO: 6645 - DNA, 286 bp, Homo sapiens
  source 1..286: mol_type = other DNA
tacagcctctggattcatcttcagtcgatatagcatgaactgggtccgccaggctccagggaaggggctggagtgggtttcatacattagaactagtgatagtgtcatatactacgcagactctgtgaggggccgattcaccatctccagagacattgccgagaactcactgtatctgcaaatgaacagcctgagagacgaggacacggctgtatattactgtgcgagagatcacaattacggttttgactactggggccagggaatcccggtcaccgtctcctca

SEQ ID NO: 6646 - DNA, 315 bp, Homo sapiens
  source 1..315: mol_type = other DNA
acacagaccctcacgctgacctgcaccttctctgggttctcactcagcactagtggagtgggtgtgggctgggtccgtcagcccccaggaaaggccctggagtggcttgcactcatttattgggatgatgataagcgctacaggccatctctgaagagcaggctcaccatcaacaaggacacctccagaaaccaggtggtccttataatgaccaacatggaccctgtggacacagccacatattactgtgcacacctgtacaactatggtcggtttgactactggggccagggagccctggtcaccgtctcctca

SEQ ID NO: 6647 - DNA, 315 bp, Homo sapiens
  source 1..315: mol_type = other DNA
acacagaccctcacgctgacctgcaccttctctgggttctcactcaacactagtggagtgggtgtgggctggatccgtcagcccccaggaaagcccctggagtggcttgcgctcgtttattgggatgatgatcagcgctacagaccatctctgaagagcaggctcaccatcaccaaggacacctccaaagaccaggtggtccttacaatgaccaacatggaccctgtggacacagccacatattactgtgcacacttatacaactatggacgttttgactactggggccagggaaccctggtcaccgtctcctca

SEQ ID NO: 6648 - DNA, 315 bp, Homo sapiens
  source 1..315: mol_type = other DNA
acacagaccctcacgctgacctgcaccttctctgggttctcactcagcacgagtggagtgggtgtgggctggatccgtcagaccccaggaaagcccctggagtggcttgcactcatttattgggatgatgataagcgctacagcccatctctgaagaccaggctcaccatcagcaaggacacctccaaaagccaggtagtccttacaatgaccaacatggaccctttagacacagccacatattcctgtgcacacctatacaactatggccgatttgactactggggccagggaaccctggtcaccgtctcctca

SEQ ID NO: 6649 - DNA, 291 bp, Homo sapiens
  source 1..291: mol_type = other DNA
aagggttctggatacacctttaccagctactggatcggctgggtgcgccagatgcccgggaaaggcctggagtggatggggatcatctatcctggtgactctgataccagatacagcccgtcgttccaaggccaggtcaccatctcagccgacaagtccatcaacaccgcctacctgcagtggagcagcctgaaggcctcggacaccgccatgtattactgtgcgagatctatagtgggggccaccccttttgactactggggccagggaaccccggtcgccgtctcctca

SEQ ID NO: 6650 - DNA, 291 bp, Homo sapiens
  source 1..291: mol_type = other DNA
aagggttctggatacagctttaccagttactggatcggctgggtgcgccagatgcccgggaaaggcctggagtggatggggatcatccatcctagtgactctgataccagatacagcccgtccttccaaggccaggtcaccatctcagccgacaagtccatcagcaccgcctacctgcagtggagcagcctgaaggcctcggacaccgccatgtattactgtgcgaggagtatagtgggagctaccccctttgactactggggccagggaaccctggtcaccgtctcctca

SEQ ID NO: 6651 - DNA, 283 bp, Homo sapiens
  source 1..283: mol_type = other DNA
cgctgtctatggtgggtccttcagtggttactactggagctggatccgtcagcccccagggaaggggctggagtggattggggaaatcaatcatagtggaagcaccaactaccacccgtccctcaagagtcgagtcaccatgtcaatagacacgtccaagaatcagttctccctgaaactgagctctgtgaccgccgcggacacggctgtgtattactgtgcgagaggcgcgagtagatatagcggcacctggggccagggaaccctggtcaccgtctcctca

SEQ ID NO: 6652 - DNA, 283 bp, Homo sapiens
  source 1..283: mol_type = other DNA
cgctgtctatggtgggtccttcagtggttactactggagctggatccgccagcccccagggaaggggctggagtggattggggaaatcaatcatagtggaagcaccaactaccacccgtccctcaagagtcgagtcaccatgtcaatagacacgtccaagaatcagttctccctgaaactgagctctgtgaccaccgcggacacggctgtgtattactgtgcgagaggcgcgagtagatatagcggcacctggggccagggaaccctggtcaccgtctcctca

SEQ ID NO: 6653 - DNA, 283 bp, Homo sapiens
  source 1..283: mol_type = other DNA
cgctgtctatggtgggtccttcagtggttactactggagctggatccgccagcccccagggaaggggctggagtggattggggaaatcaatcatagtggaagcaccaactaccacccgtccctcaagagtcgagtcaccatgtcaatagacacgtccaagaatcagttctccctgaaactgagctctgtgaccgccgcggacacggctgtgtattactgtgcgagaggcgcgagtagatatagcggcacctggggccagggaaccctggtcaccgtctcctca

SEQ ID NO: 6654 - DNA, 283 bp, Homo sapiens
  source 1..283: mol_type = other DNA
cgctgtctatggtgggtccttcagtacttactactggacctggatccgccagcccccagggaaggggctggagtggattggggaaatcgatcctagtggaagcgccaactacaacccgtccctcaagagtcgagtcaccatatcagcagacacgtccaagaaccagctctccctgaagttgcgctctgtgaccgccgcggacacggctgtgtactactgtgcgagaggagcgtctcgctatagcggcacctggggccagggaaccctggtcaccgtctcctca

SEQ ID NO: 6655 - DNA, 283 bp, Homo sapiens
  source 1..283: mol_type = other DNA
cgctgtctatggtgggtccttcagtggttactactggacctggatccgccagcccccagggaaggggctggagtggattggggaaatcaatcatagtggaagcaccaactaccacccgtccctcaagagtcgagtcaccatgtcaatagacacgtccaagaatcagttctccctgaaactgagctctgtgaccgccgcggacacggctgtgtattactgtgcgagaggcgcgagtagatatagcggcacctggggccagggaaccctggtcaccgtctcctca

SEQ ID NO: 6656 - DNA, 277 bp, Homo sapiens
  source 1..277: mol_type = other DNA
tgcagcctctggatacacccttagcaacaatggcatgacctgggtccgccaggctccagggaaggggctggagtgggtctcagatataaccggtcgtggtggcacgtactacgcagactccgtgaagggccggttcaccatctccagagacaattccaagaacacgctgaatctccaaatgaacagcctgagagccgaagacacggccgtatattactgtgttggtcatggttcagggagttattggggccagggaaccctggtcaccgtctcctca

SEQ ID NO: 6657 - DNA, 280 bp, Homo sapiens
  source 1..280: mol_type = other DNA
tgcagtctctggattaacctttaacaaccatggcatgacctgggtccgcctggctccagggaaggggttggagtgggtctcagatattagcagtagtggtggtggcacatactacgcagactccgtgaagggccggttcaccatctccagagacaattccaagaacacactgtatctgcaaatggacagcctgagagccgaggacacggccgtatattattgtgtgggccatggttcggggagttattggggccagggaaccctggtcaccgtctcctca

SEQ ID NO: 6658 - DNA, 280 bp, Homo sapiens
  source 1..280: mol_type = other DNA
tgcagtctctggattaacctttaacaatgttggcatgacctgggtccgcctggctccagggaaggggttggagtgggtctcagatattagcagtagtggtgggggcacatactacgcagactccgtgaagggccggttcaccatctccagagacaattccaagagcacactgtatctgcaaatggacagcctgagagccgaggacacggccgtatattattgtgtgggccatggttcggggagttattggggccagggaaccctggtcaccgtctcctca

SEQ ID NO: 6659 - DNA, 280 bp, Homo sapiens
  source 1..280: mol_type = other DNA
tgcagtctctggattaacctttaagaatgttggcatgacctgggtccgcctggctccagggaaggggttggagtgggtctcagatattagcagtagtggtgggggcacatactacgcagactccgtgaagggccggttcaccatctccagagacaattccaagagcacactgtatctgcaaatggacagcctgagagccgaggacacggccgtatattattgtgtgggccatggttcggggagttattggggccagggaaccctggtcaccgtctcctca

SEQ ID NO: 6660 - DNA, 280 bp, Homo sapiens
  source 1..280: mol_type = other DNA
tgcagtctctggattaacctttaacaacgttggcatgacctgggtccgcctggctccagggaaggggttggagtgggtctcagatattagcagtagtggtgggggcacatactacgcagactccgtgaagggccggttcaccatctccagagacaattccaagagcacactgtatctgcaaatggacagcctgagagccgaggacacggccgtatattattgtgtgggccatggttcggggagttattggggccagggaaccctggtcaccgtctcctca

SEQ ID NO: 6661 - DNA, 280 bp, Homo sapiens
  source 1..280: mol_type = other DNA
tgcagtctctggactcacctttaccagagttgccatgagttgggtccgccaggctccagggaaggggctgaagtgggtcgcagacattagtggtggtggtgagagcacatactacgcagactccgtgaagggccggttcaccgtctccagagacaattccaagaatacactgtctctgcaaatgaacagcctgagagccgaggacacggccgtatactactgtgtggggcatggttcggggagttatgggggccagggaaccctggtcaccgtctcctca

SEQ ID NO: 6662 - DNA, 286 bp, Homo sapiens
  source 1..286: mol_type = other DNA
tgcagtctctggattcacctttagtagctattggatgagctgggtccgccaggctccagggaaggggctggagtgggtggccaatataaagcaagatggaagtgacaaatactatgtggactctgtgaagggccgattcaccatctccagagacaacgccaagaactcactgtatctgcaaatgaacagcctgagagtcgcggacacggctgtatattactgtgcgagattagtggctgggccctttgactcctggggccagggaaccctggtcaccgtctcctca

SEQ ID NO: 6663 - DNA, 286 bp, Homo sapiens
  source 1..286: mol_type = other DNA
tgcagcctctatattcagcattagtaagtattggatgagttgggtccgccaggctccagggaaggggctggagtgggtggccaacataaagcaagatggaagtgagaagttctatgtggactctgtgaggggccgattcaccatctccagagacaacgccaagaactcactgtatctgcaaatgaacagcctgagagtcgaggacacggctgtgtattactgtgcgagattggtggctggtccttttgactcctggggccagggaaccctgctcaccgtctcctca

SEQ ID NO: 6664 - DNA, 295 bp, Homo sapiens
  source 1..295: mol_type = other DNA
tgcagtctctggattcaccttcagtagttactggatgcactgggtccgccaagctccagggaaggggctggtgtgggtctcacgtattaatagtgatgggagtagcacaagctacgcggactccgtgaagggccgattcaccatctccagagacaacgccaagaacacgctgtatctgcaaatgaacagtctgagagccgaggacacggctgtgtattactgtgcaagaggcgggcgatacagctatggtgcttttgatatctggggccaagggacaatggtcaccgtctcttca

SEQ ID NO: 6665 - DNA, 295 bp, Homo sapiens
  source 1..295: mol_type = other DNA
tgcagcctctggaatcaccttcagtagctactggatgcactgggtccgccaagctccagggaaggggctggtgtgggtctcacgtattaatagtgatgggagtagcacaagttacgcggactccgtgaagggccgattcaccatctccagagacaacgccaagaacacgctgtttctgcaaatgaacagtctgagagccgaggacacggctatgtattactgtgcaagaggagggagatacagctatggtgcttttgatatctggggccaagggacaatggtcaccgtctcttca

SEQ ID NO: 6666 - DNA, 283 bp, Homo sapiens
  source 1..283: mol_type = other DNA
tgtagcctctggattcaccttcagaagcaactggatgcagtgggtccgccaagctccagggaaggggctggtgtgggtctcacgtagtaatcctgatgggagtagtacagattacgcggactccgtgaagggccgattcaccatctccagagacaacgccaagaacacactatatctgcaaatgaacagtctgagagccgaggacacggctgtgtattattgtgcaagaagtagagagggctttgatatctggggccacgggacaatggtcaccgtctcttca

SEQ ID NO: 6667 - DNA, 283 bp, Homo sapiens
  source 1..283: mol_type = other DNA
tgcagcctctggattcaccttttctaccaactggatgcagtgggtccgccaagctccagggaaggggctggagtgggtctcgaacagtaatcctgatgggagtcaaacaaagtacgcggactccgtgaagggccgattcaccatctccagagacaacgccaagaacacactctatttgcaaatgaacagtctgagagtcgatgacacggctgtttattactgtgcaagaagtagggaagggtttgatatctggggccaagggacaatggtcaccgtctcttca

SEQ ID NO: 6668 - DNA, 283 bp, Homo sapiens
  source 1..283: mol_type = other DNA
tgcagcctctggattcaccttcagtaactcctggatgcactgggtccgccaagctccagggaaggggctgctgtgggtctcaggtattaatcctgatgggagttggataaactacgcggactccgtgaagggccgattcaccatctccagagacagcgccaagaacacgttgtatctgcaaatgatcagtctgagagtcgaggacacggctgtttattactgtgcaagatctcgtgagggttttgatatctggggccaagggacaatggtcaccgtctcttca

SEQ ID NO: 6669 - DNA, 289 bp, Homo sapiens
  source 1..289: mol_type = other DNA
cagtgtctctggtggctccatcagtaattaccactggagctggatgcggcagtccccagggaaggaactggaatggattgcgtatatctattacactgggagtattacctacaacccctccctcaagagtcgagtcaccatgtcagtagacatgtccacgaacaacttctccctgaagctgccctttgtgaccgccgcagacacggccgtgtattactgtgcgagacgggcctccgctgagaactactttgaccactggggccagggaaccctggtcaccgtctcctca

SEQ ID NO: 6670 - DNA, 289 bp, Homo sapiens
  source 1..289: mol_type = other DNA
ctctgtctctgatgactccttcagctctcactactggagctggatccggcagcccccagggaaggcactggagtggattggttatgtccattacactggaagtacccactacaacccctccctcacgagtcgagtcactatatcactggacacctccaaaaatcaattctccctgaaattgacttctgtgaccgccgcagacacggccatgtatttctgtgcgagacgggcgtcagcagagaactactttgaccactggggccagggatccctggtcaccgtctcctca

SEQ ID NO: 6671 - DNA, 280 bp, Homo sapiens
  source 1..280: mol_type = other DNA
cactgtctctggtggctccatcaatagttactactggagctggatccggcagcccccagggaagggactggagtggattggatatatctattacagtgggagcaccaactacaacccctccctcaagagtcgagtcaccatatcagtagacacgtccaagaaccagttctccctgaagctgagctctgtgaccgctgcggacacggccgtgtattactgtgcgaggggaactacttactttgactactggggccaaggaaccctggtcaccgtctcctcg

SEQ ID NO: 6672 - DNA, 277 bp, Homo sapiens
  source 1..277: mol_type = other DNA
cagtatttctggtggctccatcagtagttactactgtacctggatccggcagtccccagggaagggactggagtggattgggtacatctatggtgggagcaccaactacaacccctccctcgagagtcgagtcgccatatcaatagacacgtccaagaaccatttctccctggagttgagttctgtgacctctacggacacggccatttattactgtgcgagggggactacgtactttgactactggggccagggagtcctggtcaccgtctcctca

SEQ ID NO: 6673 - DNA, 286 bp, Homo sapiens
  source 1..286: mol_type = other DNA
tgcagcctctggattcacttttactagtcattggatgacctgggtccgccaggctccagggaaggggctggagtgggtggccgtcatcaagccagatggaactgaaaaatactatatggactctgtgaagggccggttcaccatctccagagacaacggcaagaactcagtgtatttgcaaatgaacaccctgagagccgaggactcggctctgtattactgtgcgagagatctaagctggaactttgactactggggcgagggaaccctggtcaccgtctcccca

SEQ ID NO: 6674 - DNA, 286 bp, Homo sapiens
  source 1..286: mol_type = other DNA
tgcagcctctggattcacctttagtcgcgattggctgacctgggtccgccagcctccagggaaggggctggagtgggtggccaacataaagccagatggaagtgagaaatactatatggactctgtgaagggccggttcaccatctccagagacaacaccaggaactcagtgtatctgcaaatgaacagcctgagagtcgaggacacggctgtatattactgtgcgagagatttaagctggaactttgactactggggccagggcaccctggtcaccgtctcctca

SEQ ID NO: 6675 - DNA, 286 bp, Homo sapiens
  source 1..286: mol_type = other DNA
tgcagcctctggactcacctttagtcgcgattggatgacctgggtccgccagcctccagggaaggggctggagtgggtggccaacataaagccagatggaagtgagacatactatgtggactctgtgaagggccggttcaccatctccagagacaacgccaggaactcagtgtatctgcagattaacagcctgagagtcgaggacacggctgtatattattgtgcgagagacctaagttggaactttgactactggggccagggcaccctggtcaccgtctcctca

SEQ ID NO: 6676 - DNA, 286 bp, Homo sapiens
  source 1..286: mol_type = other DNA
cgcagcctctggattcacctttagtcgcgattggatggcctgggtccgccagcctccagggcaggggctggagtgggtggccaacataaagccagatggaagtgaaaaatactatgtggattctgtgaagggccggttcaccatctccagagacaacgccaggatctcagtgtatctgcagatgaacagcctgagagtcgaggacacggctgtatattactgtgcgagagatttaagctggaactttgactactggggccagggcatactggtcaccgtctcctca

SEQ ID NO: 6677 - DNA, 286 bp, Homo sapiens
  source 1..286: mol_type = other DNA
tgcagcctctggactcacctttagtcgcgattggatgacctgggtccgccagcctccagggatggggctggagtgggtggccaacataaagccagatggaactgagaagtactatgtggactctgtgaagggccggttcaccatctccagagacaacgccaggaactcagtgtatctgcacatgaacagcctgagagtcgaggacacggctgtatattactgtgcgagagatttaagctggaactttgactactggggccagggcaccctggtcaccgtctcctca

SEQ ID NO: 6678 - DNA, 286 bp, Homo sapiens
  source 1..286: mol_type = other DNA
tgcagcctctggattcacctttagtcgcgattgggtgacctgggtccgccagcctccagggaaggggctggagtgggtggccaacataaagccagatggaagtgagaaatactatgtggactctgtgaagggccggttcaccatctccagagacaacgccaggaattcagtgtatctgcagatgaacagcctgagagtcgaggacacggctgtatattactgtgcgagagatttaagctggaactttgactactggggccagggcaccctggtcaccgtctcctca

SEQ ID NO: 6679 - DNA, 288 bp, Homo sapiens
  source 1..288: mol_type = other DNA
gcctctggttatacctttcccacctatggtatcagctgggtgcgacaggcccctggacaaggccttgagtggatgggatggatcagcgtttataatggtaacacaaactatgcacagaagctccaagacagagtcacgatgaccacagacacatccacgagtacagcctacatggagctgaggagcctgacgtctgacgacacggccatgtactactgtgcgagaggcccgccgtcacctcaatacttccagtactggggccagggcaccctggtcaccgtctcctca

SEQ ID NO: 6680 - DNA, 288 bp, Homo sapiens
  source 1..288: mol_type = other DNA
gcttctggttatacctttaccagctatggtatcagctgggtgcgacaggcccctggacaagggcttgagtatatgggatggatcaccactggcaatggtaacacaaactatgcacagaagttgcagggcagagtcaccatgaccacagacacatccacgagcacagtctacatggagctgacgagcctgagatctgacgacacggccgtgtattactgtgcgagaggccccccctcaccacaatacttccagtactggggccagggcaccctggtcaccgtctcctca

SEQ ID NO: 6681 - DNA, 288 bp, Homo sapiens
  source 1..288: mol_type = other DNA
gcttctggttatacctttaccagctatggtatcagctgggtgcgacaggcccctggacaagggcttgagtacatgggatggatcaccactggcaatggtaacacaaactatgcacagaagttgcagggcagagtcaccatgaccacagacacatccacgagcacagtttacatggagctgacgagcctgagatctgacgacacggccgtgtattactgtgcgagaggccccccctcaccacaatacttccagtactggggccagggcaccctggtcaccgtctcctca

SEQ ID NO: 6682 - DNA, 292 bp, Homo sapiens
  source 1..292: mol_type = other DNA
tgcaacctctgggttcaccttcagtggctctcctatgcactgggtccgccaggcttccgggaaagggctggagtgggttggccatgttagacacaaagcttacaattacgagacagcatatgctgagtccgtgaagggcaggttcaccatctccagagatgactcaaagaacacggcgtatctgcaaatgaacaccctgaaaaccgaggacacggccatatattattgtgttgcacagactgttagtgtttccgactactggggccagggaaccctggtcaccgtctcctca

SEQ ID NO: 6683 - DNA, 291 bp, Homo sapiens
  source 1..291: mol_type = other DNA
gcagcctctgggttcgacttcagtgactctcatatgcactgggtccgccaggcttccgggaaagggctggagtgggttggccatattagagccagacgtgacggttattcgacagcatatattgagtcggcgagaggcaggttcagcatctccagagatgattcaaagaacatgttgtttctgcaaatgaacagtctgaaaaccgaggacacggccgtctattattgtgttgcacagactgtgtcggtgtccgactattggggccggggaaccctggtcaccgtctcctca

SEQ ID NO: 6684 - DNA, 292 bp, Homo sapiens
  source 1..292: mol_type = other DNA
tgcagcctctgggttcgacttcagtgactctcatatgcactgggtccgccaggcttccgggaaagggctggagtgggttggccatattagagccaaacgtgacagttatgcgacagcgtatactgagtcggcgagaggcaggttcaccatctccagagatgattcaaagaacatggtgtttctgcaaatgaacagtatgaaaaccgaggacacggccgtctattattgtgttgcacagactgtgtcggtgtccgactattggggccagggaaccctggtcaccgtctcctca

SEQ ID NO: 6685 - DNA, 298 bp, Homo sapiens
  source 1..298: mol_type = other DNA
tgcagcctctggattcacctttagcagctatgccatgagctgggtccgccaggctccagggaaggggctggagtgggtctcagctattagtggtagtggtggtagcacatactacgcagactccgtgaagggccggttcaccatctccagagacaattccaagaacacgctgtatctgcaaatgaacagcctgagagccgaggactcggccgtatattactgtgcgaagggacgtttggcggactactactactacatggacgtctggggcaaagggaccacggtcaccgtctcctca

SEQ ID NO: 6686 - DNA, 298 bp, Homo sapiens
  source 1..298: mol_type = other DNA
tgcagcctctggattcacctttagcagctatgccatgagctgggtccgccaggctccagggaaggggctggagtgggtctcagctattggtggtagtggtggtagcacatactacgcagactccgtgaagggccggttcaccatctccagagacaattccaagaacacgctgtatctgcaaatgaacagcctgagagccgaggactcggccgtatattactgtgcgaagggacgtttggcggactactactactacatggacgtctggggcaaagggaccacggtcaccgtctcctca

SEQ ID NO: 6687 - DNA, 277 bp, Homo sapiens
  source 1..277: mol_type = other DNA
tgcagcctctggattcagcttcagtagttatgaaatgaactgggtccaccaggctccagggaaggggctggagtgggtttcatacattagtagtagtggtagtaccatatactacgcagactctgtgaagggccgattcaccatctccagagacaaccccaagaattcactgtatctgcaaatgaacagcctgagagccgaggacacggctgtttattactgtgcgagagatctggggctgtactggggccagggaaccctggtcaccgtctcctca

SEQ ID NO: 6688 - DNA, 277 bp, Homo sapiens
  source 1..277: mol_type = other DNA
tgcagcctctggattcagcttcagtagttatgaaatgaactgggtccgccaggctccagggaaggggctggagtgggtttcatacattagtagtagtggtagtaccatatactacgcagactctgtgaagggccgattcaccatctccagagacaaccccaagaattcactgtatctgcaaatgaacagcctgagagccgaggacacggctgtttattactgtgcgagagatctggggctgtactggggccagggaaccctggtcaccgtctcctca

SEQ ID NO: 6689 - DNA, 277 bp, Homo sapiens
  source 1..277: mol_type = other DNA
tagaggctctggattcaccttcagtacttctgaaataaactgggtccgccaggctccagggaaggggctggagtgggttgcatacattagtagtagtggtagtgacgtatactacccagactctgtgaagggccgcttcaccatctccagagacaacgccaagaactcagtttatctgcaaatgaacagcctgagagccgaggacacggctgtttatttctgtgcgagagatctcggcctctactggggccagggaaccctggtcaccgtctcctca

SEQ ID NO: 6690 - DNA, 296 bp, Homo sapiens
  source 1..296: mol_type = other DNA
ccatctccggggacagtgtctctagcaacagtgctgcttggcactggatcaggcagtccccatcgagaggccttgagtggctgggaaggacatactacaggtccaagaggtataatgattatgcagtatctgtgaaaagtcgaataaccatcaacccagacacatccaagaaccagttctccctgcagctgaactctgtgactcccgaggacacggctgtgtattactgtgcaagagttggtagcagtggctcccttgactactggggccagggaaccctggtcaccgtctcctca

SEQ ID NO: 6691 - DNA, 296 bp, Homo sapiens
  source 1..296: mol_type = other DNA
ccatctccggggacagtgtctctagcaacagtgctgcttggaactggatcaggcagtccccatcgagaggccttgagtggctgggaagggcatactacaggtccaagtggtattataattatgcagtatctgtgaaaagtcgaataacaatcagcccagacacatccaagaaccagttctccctgcagctgaactctgtgactcccgaggacacggctatgtattactgtgcaagagtcggtagttcagggagtcttgactactggggccagggaaccctggtcaccgtctcctca

SEQ ID NO: 6692 - DNA, 296 bp, Homo sapiens; identical to SEQ ID NO: 6691
  source 1..296: mol_type = other DNA

SEQ ID NO: 6693 - DNA, 296 bp, Homo sapiens
  source 1..296: mol_type = other DNA
ccatctccggggacagtgtctctagcaacagtgctgcttggcactggatcaggcagtccccatcgagaggccttgagtggctgggaaggacatactacaggtccaagtggtctagggattatgcagtatctgtgaaaagtcgaataaccatcaacccagacacatccaagaaccagttctccctgcagctgaactctgtgactcccgacgacacggctgtgtattactgtgcaagagttggtagtagtggttcgcttgactactggggccagggaaccctggtcaccgtctcctca

SEQ ID NO: 6694 - DNA, 296 bp, Homo sapiens
  source 1..296: mol_type = other DNA
ccatctccggggacagtgtctctagcaacagtgctgcttggcactggatcaggcagtccccatcgagaggccttgagtggctgggaaggacatactacaggtccaagtggtataaggattatgcagtgtctgtgaaaagtcgaataaccatcaacccagacacattcaagaaccagttctccctgcagctgaactctgtgactcccgacgacacggctgtgtattactgtgcaagagttggtagtagtggttcgcttgactactggggccagggaaccctggtcaccgtctcctca

SEQ ID NO: 6695 - DNA, 289 bp, Homo sapiens
  source 1..289: mol_type = other DNA
tgcagcctctggattcacctttagtaactatgccatgtcctgggtccgccaggctccagggaaggggctggagtgggtctcagctattaccggtagtggtgatagcacatactacgcagactccgtgaagggccggttcaccagctccagagacaattccaagaacacactgtttctgcaaatgagcggcctgagagtcgaggacacggccctatattactgtgcgaggggtgatcgctacagtggctggggctactggggcctgggaaccctggtcaccgtctcctca

SEQ ID NO: 6696 - DNA, 289 bp, Homo sapiens
  source 1..289: mol_type = other DNA
tgcagcctctggattcacctttggcagctatgccatgagctgggtccgccaggctccaggaaaggggctggagtgggtctcagccattagtaatgatggtcgtggcacacactacgcagactccgtgaagggccggttcaccatctccagagacaattccaagagcacactatatctgcaaatgaacaacctgagagccgaggacacggccgtatattactgtgcgagaggtgacaggtacagtggctggggatactggggccagggaaccctggtcaccgtctcctca

SEQ ID NO: 6697 - DNA, 292 bp, Homo sapiens
  source 1..292: mol_type = other DNA
tgcagcctctggattcaccttcagtgaccactacataaactgggtccgccaggctccagggaaggggctggagtgggttggccttactagaaacaaagctaatcgttacaccacacaatacgccgcgtctgtgaaaggcagattcaccatttcaagagatgcttcagagaattcagtgtatctccaaatgaacagcctgaaaaccgaggacacggccgtgtattactgtgttagaaccagggctgatgcttttgatatctggggccaagggacaatggtcaccgtctcttca

SEQ ID NO: 6698 - DNA, 292 bp, Homo sapiens; identical to SEQ ID NO: 6697
  source 1..292: mol_type = other DNA

SEQ ID NO: 6699 - DNA, 292 bp, Homo sapiens
  source 1..292: mol_type = other DNA
tgcagcctctggactcaccttcagtgaccactacatgaactgggtccgccaggctccagggaaggggctggagtgggttggccttactagaaacaaagctaatcgttacaccacacaatacgccgcgtctgtgaaaggcagattcaccatttcaagagatgattcagagaactcactgtatctcgaaatgaacagcctgaaaaccgaggacacggccgtgtattactgtgttagaaccagggctgatgcttttgatatctggggccaagggacaatggtcaccgtctcttca

SEQ ID NO: 6700 - DNA, 292 bp, Homo sapiens
  source 1..292: mol_type = other DNA
tgcagcctctggattcaccttaagtgaccactacatcgactgggtccgccaggctccagggaaggggctggagtgggttggccgtactagaaacaaagttaacagttacaccacagaatacgccgcgtctgtgaaaggcagattcaccatctcaagagatgattcaaagaactcactgtatctgcaaatgaacagcctgaaaagcgaggacacggccgtgtattattgtgtcaggactcgggccgatgcttttgatatctggggccaagggacaatggtcaccgtctcttca

SEQ ID NO: 6701 - DNA, 292 bp, Homo sapiens
  source 1..292: mol_type = other DNA
tgaagtctctggattcgatttcactaacgcctggatgagttgggtccgccaggctccagggaagggtctggagtgggttggccgtattaaaaggaatgctgatggtgcgacaagagactacgctgcacccgtgaaaggcagattcaccatctcaagagatgattcaaagaatacattgtttttgcaaatgaacaatttgaagaccgaggacacaggcgtgtattactgtaccacagatccgccgggaggcactgacttctggggccagggaaccctggttaccgtctcttca

SEQ ID NO: 6702 - DNA, 292 bp, Homo sapiens
  source 1..292: mol_type = other DNA
tgcagcctctggattcagtttcaccaacgcctggatgagttgggtccgccaggctccagggaaggggctggagtgggttggccgtattaaactcaacactgatggtgggacaacagactacgctgcacccgtgagaggcagattcaccatctcaagagatgattcaaaaaacacgctgtttcttcaaatgaacagcctgaaaaccgaggacacagccatgtattattgtaccacagatcctccgggtgggaccgacttctggggtcaggggacactggtcaccgtctcctca

SEQ ID NO: 6703 - DNA, 286 bp, Homo sapiens
  source 1..286: mol_type = other DNA
tgcagcctctggattcaccgtcagtaccaactacatgagctggctccgccaggctccagggaaggggctggagtgggtctcagttatttatgccaatggtcgcacatactacgcagactccgtgaagggcagattcagcatctccagagacgattccaagaacactctgtatcttcaaatgaacagcccgagagccgaggacacggctgtgtattactgtgcgagaggcggggcagtagctgggttcgacccctggggccagggaaccctggtcaccgtctcctcc

SEQ ID NO: 6704 - DNA, 286 bp, Homo sapiens
  source 1..286: mol_type = other DNA
tgcagcctctggattcaccgtcagtagcaattacatgagctgggtccgccaggctccagggaaggggctggagtgggtctcagttatttatagcgatggtagcacatactacgcaggctccgtgaagggcagattcaccatctccagagacaattccaagaacacgctgtatcttcaaatgaacaacctgagagccgaggacacggctgtgtattactgtgccagagggggggcagtggctgggttcgacccctggggccagggaaccctggtcaccgtctcctca

SEQ ID NO: 6705 - DNA, 313 bp, Homo sapiens
  source 1..313: mol_type = other DNA
tgcagcctctggattcacctttagcagctttgccatgagctgggtccgccaggctccagggaaggggctggagtgggtctcaggtattagtggtagtggtggtagcacatactacgcagactccgtgaagggccggttcaccatctccagagacaattccaagaacacgctgtatctgcaaatgaacagcctgagagccgaggacacggccgtatattactgtgcgaaagatcccgcaaaacgacagactacggtggtaactatcctaaactttgactactggggccagggaatcctggtcaccgtctcctca

SEQ ID NO: 6706 - DNA, 313 bp, Homo sapiens
  source 1..313: mol_type = other DNA
tgcagcctctggattcacctttagcagctatgccatgagttgggtccgccaggctccagggaaggggctggagtgggtctcagctattagtggtagtggtggtagcacatactacgcagactccgtgaagggccggttcaccatctccagagacaattccaagaacacgctgtatatgcaaatgaacagcctgagaggcgaggacacggccgtatattactgtgcgaaagatcccgcaaaacgacagactacggtggtcactatcctaaactttgactactggggccagggaaccctggtcaccgtctcctca

SEQ ID NO: 6707 - DNA, 313 bp, Homo sapiens
  source 1..313: mol_type = other DNA
tgcagcctctggattcaccttcagcagctatgccatgagctgggtccgccaggctccagggaaggggctggagtgggtctcagctattagtggtagtggtggtagcacatactacgcagactccgtgaagggccggttcaccatctccagagacacttccaagaacacgctgtatctgcaaatgaacagcctgagagccgaggacacggccttatattactgtgcgaaagatcccgcaaagcgacagactacggtggtaactatcctaaactttgactactggggccagggaaccctggtcaccgtctcctca

SEQ ID NO: 6708 - DNA, 271 bp, Homo sapiens
  source 1..271: mol_type = other DNA
cactgtctctggtgcctccatcagtagttactactggagctggatccggcagcccccagggaagggactggagtggattgggtatatctattacagtgggaccaccaactacaacccctccctcaagagtcgagtcaccatatcagtggacacgtccaagaaccaattctccctgaagctgatctctgtgaccgccgcagacacggccgtgtattactgtgcgagtctcccaaaagactggggccagggaaccctggtcaccgtctcctca

SEQ ID NO: 6709 - DNA, 271 bp, Homo sapiens
  source 1..271: mol_type = other DNA
cactgtctctggtggctccatcagtagttcctactggagctggatccggcagcccccagacaagggactggagtggattgggtatatctattacactgggagcaccaactacaacccctccctcaagagtcgagtcaccctatcagtagacacgtccaagaaccagttctccctgaaactgaactctgtgaccgctgcggacacggccgtgtattactgtgcgagtcttccgaaagactggggcaagggaaccctggtcaccgtctcctca

SEQ ID NO: 6710 - DNA, 271 bp, Homo sapiens
  source 1..271: mol_type = other DNA
cactgtctctggtgcctccatcagtagttactactggagctggatccggcagcccccagggaagggactggagtggattgggtatatctattacagtgggaccaccaactacaacccctccctcaagagtcgagtctccatatcagtagacacgtccaagaaccagttctccctgaagctgatctctgtgaccgccgcagactcggccgtatattactgtgcgagtctcccaaaggactggggccagggaaccctggtcaccgtctcctca

SEQ ID NO: 6711 - DNA, 292 bp, Homo sapiens
  source 1..292: mol_type = other DNA
tgcagcgtctggattcaccttcagtagatatggcatgcactgggtccgccaggctccaggcaaggggctggagtgggtgacagttatatggaatgatggaagtaataaatactttgcagactccgtgaatggccgattcaccatctccagagacaattccaagaacacgctgtatctgcaaatgaacagcctgagagccgaggacacggctgtctattactgtgcgcgaggagcggggttcagggagttaattgactactggggccagggaaccctggtcaccgtctcctca

SEQ ID NO: 6712 - DNA, 292 bp, Homo sapiens
  source 1..292: mol_type = other DNA
tgcagcgtctggattcaccttcagtagatatggcatgcactgggtccgccaggctccaggcaaggggctggagtgggtgacagttatatggaatgatggaagtaataaatactttgcagactccgtgaagggccgattcaccatctccagagacaattccaagaacacgctgtatctgcaaatgaacagcctgagagccgaggacacggctgtctattactgtgcgcgaggagcggggttcagggagttaattgactactggggccagggaaccctggtcaccgtctcctca

SEQ ID NO: 6713 - DNA, 295 bp, Homo sapiens
  source 1..295: mol_type = other DNA
tgcagcctctggtttcatattcagtacttatgagatgaactgggtccgccaggctccagggaagggactggagtgggtttcatacattagtggtagtggtagtagttttttctacgcagactctgtgaagggccgattcaccgtgtccagagacaacgccaagaactcactgtttctgcaaatgaacagcctgagagccgacgacacggctctttactattgtgtcagagatgggggcctaggtggagatgcttttgatgtctggggccaagggacaatggtcgccgtgtcttca

SEQ ID NO: 6714 - DNA, 295 bp, Homo sapiens
  source 1..295: mol_type = other DNA
tgcagcctctggattcaccttcacttcttatgagatgaactgggtccgccaggcaccagggaaggggctggagtgggtttcatacattagtggtagtggcagcaccatgttctacgcagactctgtcaagggtcgattcaccatctccagagacaacgccagggaatcactgtatctgcaaatgaacgacctgagagtcgaggacacggccatttattactgtgtgagagatggtggattgggcggcgacgcctttgatgtctggggccaagggacaatggtcaccgtctcttca

SEQ ID NO: 6715 - DNA, 289 bp, Homo sapiens
  source 1..289: mol_type = other DNA
tgcagcctctggattcatcttcagtagttatgaaatgaactgggtccgccaggctccagggaaggggctggagtggatttcatacattagtagtcgtgggacttccatatactacgcagactctgtggagggccgattcaccatctccagagacaacgccgagaactcactgtatctgcaaatgaacagcctgagagccgaggacacggctgtttattactgtgcgagagatagggctacagtaacctttgacttctggggccagggaaccctggtcaccgtctcctca

SEQ ID NO: 6716 - DNA, 289 bp, Homo sapiens
  source 1..289: mol_type = other DNA
tgcagcctctggattcctcttcagcagttttcaaatgaactgggtccgccaggctccagggaaggggctggaatggatttcatacattagtgctgatggcgtgaccaaatactacgcagactctgtgcagggccgattcaccatctccagagacaacggcaagaactcactctttttgcaaatgcacagtctgagagtcgaggacacggctctttattactgtgcgagagaccgtgctacggtgacctttgacttctggggcctgggaaccctagtctccgtctcttca

SEQ ID NO: 6717 - DNA, 295 bp, Homo sapiens
  source 1..295: mol_type = other DNA
tgcagcctctggattcacctttgggacttatgccatgggctgggtccgccaggctccagggaaggggctggactgggtctcaggtattagtggtagtggtggtagcacatactacgcagactccgtgaagggccggttcaccatctccagagacaattccaagaacacgttgtatctgcaaatgagcagtctgagagccgaggacacggccgtatattactgtgcgaaagagcctcccaggagtggctgggcatttgactactggggccagggaaccctggtcaccgtctcctca

SEQ ID NO: 6718 - DNA, 292 bp, Homo sapiens
  source 1..292: mol_type = other DNA
tgcagcatctggattcacttttagcagctattgcatgggctgggtccgccaggctccagggaaggggctggattgggtctcaactattgatcttagtgatggcacaaactacgcagactccgtgaagggccggttcaccatctccagagacaattccaagagcacgctgtatttgcaaatgaacagcctgagagccgaggacacggccgtctattactgtgcgaaagaacctccgcggtcgggctgggcctttgactactggggccagggaaccctggtcaccgtctcctca

SEQ ID NO: 6719 - DNA, 313 bp, Homo sapiens
  source 1..313: mol_type = other DNA
tgcagcctctggattaaccgtcaggagcaactacatgagctgggtccgccaggctccagggaaggggctggagtgggtctctggtgttaccggtcgcgctgacagtacacaccacgcagactccgtgaagggccggttcaccatctccagagacaattccaagaacacgctgtatctgcaaatgaacagcctgagagccgaggacacggccatatattactgtgcgaaagagggcgttcccacaccagctgcccacggctacttttatcacatggacatctggggcaaagggaccacggtcatcgtctcctca

SEQ ID NO: 6720 - DNA, 313 bp, Homo sapiens
  source 1..313: mol_type = other DNA
tgcagcctctggattcacctttagaggctatgccatgaactgggtccgtcaggctccagggaagggcctggagtgggtctctggtgttaccggtcgcgctgacagtacacaccacgcagactccgtgaagggccggttcaccatctccagagacaattccaagaacacgctgtatctgcaaatgaacagcctgagagccgaggacacggccatatattactgtgcgaaagagggcgttcccacaccagctgcccacggctacttttatcacatggacatctggggcaaagggaccacggtcatcgtctcctca

SEQ ID NO: 6721 - DNA, 292 bp, Homo sapiens
  source 1..292: mol_type = other DNA
tgcaacctctggattcacctttagtttctattggatgagctgggtccgccaggctccagggaaggggctggagtggatggccaacataaagcaagatggaggtgagaaatactatgtggactctgtgaagggccgattcaccatctccagagacaacgccaagaattcactgtatctgcaaatgaacagcctgagagccgaggacacggctgtgtattactgtgcgagactctctggcagcagctgggactttgactactggggccagggaaccctggtcatcgtctcctca

SEQ ID NO: 6722 - DNA, 292 bp, Homo sapiens
  source 1..292: mol_type = other DNA
tgcagtctccggattcagttttagtaattactggatgagttgggtccgccaggctccagggaagaggctggagtgggtggccaatataaagcaagatggaggtgagaaatactacgtggcctcagtgaggggccgattcaccatctccagagacaacgccaagaattcattgtatctgcaaatgaacagactgagagtcgaggacacggctgtgtattactgtgcgagactttctggcagcagttgggactttgactactggggccagggaacccaggtcaccgtctcctca

SEQ ID NO: 6723 - DNA, 283 bp, Homo sapiens
  source 1..283: mol_type = other DNA
tgcagcctctggattcacctttagcacctattggatgagctgggtccgccaggctccagggaaggggctggagtgggtggccaacataaagccagatggaagtgagatgtactatgtggactctgtgaagggccgattcaccatctccagagacgacgccacgaattcactgtatctgcaaatgaacagcctgagagccgaggacacggctgtgtattactgtgtgagaggtgggggtaactttgcttactggggccagggaaccctggtcaccgcctcctca

SEQ ID NO: 6724 - DNA, 283 bp, Homo sapiens
  source 1..283: mol_type = other DNA
tgcagcctctggattcacctttaccacgtactggatgagttgggtccgccaggctccagggaaggggctggagtgggtggccaacataaaacacgatggaagtgagaaaaactatgtggactctgtgaagggccgattcaccatctccagagaaaacgtcaagaattcactgtatttgcaaatgaacagcctgagagtcgaggatacggctgtgtattactgtgtgaggggtgggggcaactttgcctactggggccagggaaccctggtcaccgtctcctca

SEQ ID NO: 6725 - DNA, 286 bp, Homo sapiens
  source 1..286: mol_type = other DNA
tgcagcctctggattcacctttagtagttattggatgagttgggtccgccaggctccagggaaggggctggagtgggtggccaacataaagcaagatggaagtgagaaatactatgtggactctgtgaagggccgattcaccatctccagagacaacgccgggaactcactgtatctgcaaatgaacaccctgagagccgaggacacggctgtgtattactgtgcgagccacagtggctggaggcttgactactggggccagggaaccctggtcaccgtctcctca

SEQ ID NO: 6726 - DNA, 286 bp, Homo sapiens
  source 1..286: mol_type = other DNA
tgcagcctctggattcacctttagtaactattggatggcctgggtccgccaggctccagggaaggggctggagtgggtggccaacataaaacaagatggaagtgcgaaatactatgtggactctgtgaagggccgattcaccatctccagagacaacgccaagaactcactgtttctgcaaatgaacagcctgggagccgaggatggggctgtatattattgtgcgagtcacagtggctggcgccttgactactggggccagggaaccctggtcaccgtctcctca

SEQ ID NO: 6727 - DNA, 286 bp, Homo sapiens
  source 1..286: mol_type = other DNA
tgcagcctctggattcacctttagtagctattggatgagttgggtccgccaggctccagggaaggggctggaatgggtggccaacataaagcaagatggaagtgagaaatactatgtggactctgtgaagggccgattcaccatctccagagacaacgccaagaactcactgtatctgcaaatgaacagcctgagagccgaggacacggctgtgtattactgtgcgagtcacagtggctggaggcttgactactggggccagggaaccctggtcaccgtctcctca

SEQ ID NO: 6728 - DNA, 286 bp, Homo sapiens
  source 1..286: mol_type = other DNA
tgcagcctctggattcacctttagtagctattggatgagctgggtccgccaggctccagggaaggggctggagtgggtggccaacataaagcaagatggaagtgagaaatactatgtggactctgtgaagggccgatgcaccatctccagagacaacgccaagaactcactgtatctgcaaatgaacagcctgagagccgacgacacggctgtctattactgtgcgagccacagtggctggaggcttgactactggggccagggaaccctggtcaccgtctcctca

SEQ ID NO: 6729 - DNA, 286 bp, Homo sapiens; identical to SEQ ID NO: 6728
  source 1..286: mol_type = other DNA

SEQ ID NO: 6730 - DNA, 295 bp, Homo sapiens
  source 1..295: mol_type = other DNA
cactgtctctggtggctccatcagaagtggtggttactactggagttggatccgccagcacccagggaagggcctggagtggattgggcacatctattacagtgggagtacctactacaacccgtccctcaagagtcgagttaccatatcagtagacacgtctaagaaccagttctccctgaggctgagttctgtgactgccgcggacacggccgtgtattactgtgcgagagacatagatagtagtggttaccttgactattggggtcagggaaccctggccaccgtctcctca

SEQ ID NO: 6731 - DNA, 295 bp, Homo sapiens
  source 1..295: mol_type = other DNA
cactgtctctggtggctccatcagcagtggtggttactactggaactggatccgccagcacccagggatgggcctggagtggattgggtacatctattacagtgggaacacctactacaacccgtccctcaagagtcgagttaccatttcagtagacacgtctaagaaccagttctccctgaagctgagctctgtgactgccgcggacacggccgtctattactgtgcgagagacatcgatagtagtggttaccttgactactggggccagggaaccctggtcaccgtctcctca

SEQ ID NO: 6732 - DNA, 295 bp, Homo sapiens
  source 1..295: mol_type = other DNA
cactgtctctggtggctccatcagcagtggtggttactactggaactggatccgccagcacccagggaagggcctggagtggattgggtacatctattacagtgggagcacctactacaacccgtccctcaagagtcgagttaccatattagtagacacgtctaagaaccagttctccctgaagctgagctctgtgactgccgcggacacggccgtgtattactgtgcgagagacatcgatagtagtggttaccttgactactggggccagggaaccctggtcaccgtctcctca

SEQ ID NO: 6733 - DNA, 277 bp, Homo sapiens
  source 1..277: mol_type = other DNA
tgcagcctctggattcagcttcagtagttatgaaatgaattgggtccgccaggctccagggaaggggctggagtgggtttcaaacattggtcgtagtggtagtaccaaatactacgcagactctgtgaagggccgattcaccatctccagggacaacgccgacaactcactgtatctgcaaatgaacagcctgagagccgaggacacggctgtttattattgtacgagaggcctggggggctactggggccagggaaccctggtcaccgtctcctca

SEQ ID NO: 6734 - DNA, 277 bp, Homo sapiens
  source 1..277: mol_type = other DNA
tgcagcctctggattcaccttcagtagttttgaaatgaactgggtccgccaggttccagggaaggggctggagtgcatttcatacattagtagtagtggtagtaccatatactacgcagactctgtgaagggccgattcaccatctccagagacaacgccaagaactccctgtatctgcaaatgaacagcctgagagccgaggacacggctgtttattactgtacgagaggtctggggggctactggggccagggaaccctggtcaccgtctcctca

SEQ ID NO: 6735 - DNA, 292 bp, Homo sapiens
  source 1..292: mol_type = other DNA
tgcagcctctggattcacctttagcagctatgccatgagctgggtccgccaggctccagggaaggggctggagtgcgtctcaactattagtggtagtggtggtagcacatactacacagactccgtgaagggccggttcaccatctccagagacaattccaagaacaccctgtatctgcaaatgaacagcctgagagacgaggacacggccgtatattactgtgcgaaaggtttgtctcgttttggggactttgactactggggccagggaaccctggtcaccgtctcctca

SEQ ID NO: 6736 - DNA, 292 bp, Homo sapiens
  source 1..292: mol_type = other DNA
tgcagcctctggattcacctttaggagttatgccatgagctgggtccgccaggctccaggggaggggctggagtgggtctcctgtattagtggtagtggtagtagcacatactacgcagactccgtgaagggccggttcaccatctccagagacaattccaagaacacggtgtatctgcaaatgaacagcctgagagccgacgacacggccgtatattactgtgcgaaaggcctctccaggttcggggactttgactactggggccagggaaccctggtcaccgtctcctca

SEQ ID NO: 6737 - DNA, 286 bp, Homo sapiens
  source 1..286: mol_type = other DNA
tttagcctctgtcatctctggtgaccatgccatgcactgggtccggcaacgtccagggaagggcctggagtgggtctcaggttttcatttgattactgaagcgataggttatgcggactctgtgaagggccgattcaccacctccagagacaacgccaggaactccctgtatctggaaatgaacagtctgagagctgaggacacggccttatatttctgtgtaaaagatcttaaagcggggggtgcggacgtctggggccaagggaccacggtcaccgtctcctca

SEQ ID NO: 6738 - DNA, 289 bp, Homo sapiens
  source 1..289: mol_type = other DNA
tgaagtctctggagtcacgtttcatgaccatggcatgcactgggtccgacaaactccagggaggggcctggagtgggtctcaggtattatttggaatagaggtgatgtaggctatggggactctgtgaagggccgattcaccatctccagagacaacgccaagaactccgtgtatctggaaatgcacagtctgagagttgaggacacggccttgtattattgtgtaaaagatttgaaggcgggcggtgcggacgtctggggccaagggaccacggtcatcgtctcctca

SEQ ID NO: 6739 - DNA, 301 bp, Homo sapiens
  source 1..301: mol_type = other DNA
tgtagcctctggattcacctttagcgcctatcccatgacctgggtccgccaggctccagggaaggggctggagtgggtctcctctgttagtaatactggtgtcagtaaatactacgcggactccgtgaaggggcggttcagcatctccagagacaattccaggaacacgctgtatctgcaaatgaacagcctgagagtcgacgacacggccgtatattactgtgcgagagatttgggtggagacaactatgcctacttacctgacttttggggtcagggagccctggtcaccgtctcctca

SEQ ID NO: 6740 - DNA, 301 bp, Homo sapiens
  source 1..301: mol_type = other DNA
tgtagcctctggattcacctttagcgcctatcccatgacctgggtccgccaggctccagggaaggggctggagtgggtctcctctgttagtaatactggtgtcagtaaatactacgcggactccgtgaaggggcggttcagcatctccagagacaattccaggaacacgctgtatctgcaaatgaacagcctgagagtcgacgacacggccgtatattactgtgcgagagatttgggtggagacaactatgcctacttacctgacttttggggccagggagccctggtcaccgtctcctca

SEQ ID NO: 6741 - DNA, 301 bp, Homo sapiens
  source 1..301: mol_type = other DNA
tgtagcctctggattcacctttagcgcctatcccatgacctgggtccgccaggctccagggaaggggctggagtgggtctcctctgttagtaatactggtgtcagtaaatactacgcggactccgtgaaggggcggttcagcatctccagagacaattccaggaatacgctgtatctgcaaatgaacagcctgagagtcgacgacacggccgtatattactgtgcgagagatttgggtggagacaactatgcctacttacctgacttttggggccagggagccctggtcaccgtctcctca

SEQ ID NO: 6742 - DNA, 301 bp, Homo sapiens
  source 1..301: mol_type = other DNA
tgtagcctctggattcacctttgatgattatggcatgagctgggtccgccaggctccagggaaggggctggagtgggtctctggaattaattgggatggtggtagcacaggttatgcagactctgtgaagggccgattcaccatctccagagacaacgccaagaactccctgtatctgcaaatgaacagtctgagagccgaggacacggccttctatcactgtgcgagagtccctgatagtagtggttacctctactactttgactactggggccagggaaccctggtcaccgtctcctca

SEQ ID NO: 6743 - DNA, 301 bp, Homo sapiens
  source 1..301: mol_type = other DNA
tgcagcctctggattcagctttgatgattatgccatgagctgggtccgccaagctccagggaaggggctggagtgggtctctggtactagttggaacggtggtagcacagcttatgcagactctgtgaagggccgattcaccatctccagagacaacgccaagaactccctgtatctgcaaatgaacagtctgagcgccgaggagacggccttgtattactgtgcgagagtgcctgatagtagtggttatttgtactactttgactactggggccagggaaccctggtcaccgtctcctca

SEQ ID NO: 6744 - DNA, 301 bp, Homo sapiens
  source 1..301: mol_type = other DNA
tgcagcctctggattcaccttcagtagctatgctatgcactgggtccgccaggctccaggcaaggggctggagtgggtggcagttatatcatatgatggaagtaataaatactacgcagactccgtgaagggccgattcaccatctccagagacaattccaagaacacgctgtttctgcaaatgaacagcctgagagctgaggacacggctgtgtattactgtgcgggagggggtcaaatgaggactacggaagctgcttttgatatctggggccaagggacaatggtcaccgtctcttca

SEQ ID NO: 6745 - DNA, 300 bp, Homo sapiens
  source 1..300: mol_type = other DNA
tgcagcctctggattcaccttcagtagctatgctatgcactgggtccgccaggctccaggcaaggggctggagtgggtggcagttatatcatatgatggaagtaataaatactacgcagactccgtgaagggccgattcaccatctccagagacaattccaagaacacgctgtttctgcaaatgaacagcctgagagctgaggacacggctgtgtattactgtgcgggagggggtcaaatgaggactacggaagctgcttttgatatctggggccaagggacaatgtcaccgtctcttca

SEQ ID NO: 6746 - DNA, 301 bp, Homo sapiens
  source 1..301: mol_type = other DNA
tgcagcctctggattcaccttcagtagttatgctatgcactgggtccgccaggctccaggcaaggggctggagtgggtggcagttatatcatatgatggaagtaataaatactacgcagactccgtgaagggccgattcaccatctccagagacaattccaagaacacgctgtttctgcaaatgaacagcctgagagctgaggacacggctgtgtattcctgtgcgggagggggtcaaatgaggactacggaagctgcttttgatatctggggccaagggacaatggtcaccgtctcttca

SEQ ID NO: 6747 - DNA, 295 bp, Homo sapiens
  source 1..295: mol_type = other DNA
tgcagcctctggattcaccttcagtgacttctacatgagctggatccgccaggctccaggggaggggctggagtgcgtttcgtacattagtttcagtggtagtaccatatactacgcagactctgtgaagggccgattcaccatctccagggacgacgccaagaactccctgtatctgcaaatgaacagcctgagagccgaggacacggccttttattactgtgcgagagatataccagcagctggtttgttccttgactactggggccggggaaccctggtcaccgtctcctca

SEQ ID NO: 6748 - DNA, 292 bp, Homo sapiens
  source 1..292: mol_type = other DNA
tgcagcctctggattcaccttcagtgacttctacatgagctggatccgccaggctccagggaaggggctggagtgggtttcgtacattagttatagtggcaccatatactacgcagactctgtgaagggccgattcaccatctccagggacaacgccaagagcgcactgtatctgcaaatggacagcctgagagccgaggacacggccatgtattactgtgcgagagatataccagcagctggcctcttccttgactactggggccagggaaccctggtcaccgtctcctca

SEQ ID NO: 6749 - DNA, 295 bp, Homo sapiens
  source 1..295: mol_type = other DNA
tgcagcctctggattcaccttcagtgacttctacatgacctggatccgccaggctccagggaaggggctggagtgggtttcctacattcattatagtggaacgcccatatactacgcagactctgtgaagggccgattcaccatctccagggacaacgccaagaactcactgtatctgcaaatgaacagcctgagagccgacgacacggccgtgtattactgtgcgagagatataccagcggctggcctctttcttgactactggggccagggaaccctggtcaccgtctcctca

SEQ ID NO: 6750 - DNA, 289 bp, Homo sapiens
  source 1..289: mol_type = other DNA
tgcagcctctggattcacctttggtgattatgccatacactgggtccggcaagctccaggaaagggcctggagtgggtctcaggtatttatttggagagtggtagggtaggctatgtggactctgttaagggccgcttcaccatctccatagacaaggccaagaactccctgtttctccaaatgaacagtctgagagctgaagacacggccttctattattgtggaaaagatctaaagccgggggggcttgactactggggccagggaatcctggtcaccgtctcctca

SEQ ID NO: 6751 - DNA, 289 bp, Homo sapiens
  source 1..289: mol_type = other DNA
tgcaggctctggattcacctgtgatgaatttgccatgcactgggtccggcaaggtccaacaaagggcctggagtgggtcgcaggtattttttgcgaaggaggtggggtgggctatgcggactctgtgaatggccgattcacgatctccatagacaacgacaagagctccctctatctacaaatgaacaatctgaaaactgaggacacggccgtgtattattgtggaaaagatcttaagcctgggggtcttgactactggggccagggaatcctggtcaccgtctcctca

SEQ ID NO: 6752 - DNA, 280 bp, Homo sapiens
  source 1..280: mol_type = other DNA
tgcagtctctggattcgccgtcagcaacaactacatgagttgggtccgccgggcttcagagacggggctggagtggatctcagtcattcacaaagatggtcttatacactacgcagactccgtgaggggcagattcaccatctccagagacaactctaagaacactttgtatcttcagatgaacagcctgagagtcgaagacacggctatatattactgtgtgagacaggcctccggttttgactattggggccaggggaccctggtcaccgtctcctca

SEQ ID NO: 6753 - DNA, 280 bp, Homo sapiens
  source 1..280: mol_type = other DNA
tgcagcctctggattcaccgtcagcaacaactacttgagctgggtccgccaggctccagggaaggggctggagtgggtctcagttattcataatgatggtaaaatatactacgcagactccgtgaggggccgattcaccatctccagagacaattccaggaacacactgtatcttcaaatgaacagcctgagagccgaggacacggccatatattactgtgtgagacaggcgtcgggatttgactactggggccagggaaccctggtcaccgtctcctca

SEQ ID NO: 6754 - DNA, 280 bp, Homo sapiens
  source 1..280: mol_type = other DNA
tgcagcctctggattcaccgtcagcagcaactacatgagctgggtccgccaggctccagggaaggggctggaatgggtctcagttattcataatgatggtaaaatatattacgcagactccgtgaggggccgattcaccatctccagagacaattccaagaacacactgtatcttcaaatgaacagcctgagagccgaggacacggccgtatattactgtgtgagacaggcgtcgggatttgactactggggccagggaaccctggtcaccgtctcctca

SEQ ID NO: 6755 - DNA, 280 bp, Homo sapiens; identical to SEQ ID NO: 6754
  source 1..280: mol_type = other DNA

SEQ ID NO: 6756 - DNA, 294 bp, Homo sapiens
  source 1..294: mol_type = other DNA
gcttctggatacaccttcactagctatgctatgaattgggtgcgacaggcccctggacaagggcttgagtggatgggatggatcaaccccaacactgggaacccaacatatgcccagggcttcacaggacgatttgtcttctccttggacacctctgtcaacacggcatatctgcagatcagcagcctacaggctgaggacactgccatttattactgtgcgagagggacctcagcagctggtacagattggttcgacccctggggccagggaaccctggtcaccgtctcctca

SEQ ID NO: 6757 - DNA, 294 bp, Homo sapiens; identical to SEQ ID NO: 6756
  source 1..294: mol_type = other DNA

SEQ ID NO: 6758 - DNA, 294 bp, Homo sapiens
  source 1..294: mol_type = other DNA
gcttctggatacactttcactaactatgctatgaattgggtgcgacaggcccctggacaacgacctcagtggatggggtggataaaccccaccactgggaacccaacctatgcccagggcttcacaggacggtttgtcttctccttggacacctctgtcagcacggcatatctacagatcagcagcctgaagcctgaggacaccgccgtatattactgtgcgagagggacatcagcagctggtactgactggttcgacccctggggccagggaaccctggtcaccgtctcctca

SEQ ID NO: 6759 - DNA, 294 bp, Homo sapiens
  source 1..294: mol_type = other DNA
gcttctggatacaccttcaaaagctacgctatgaattgggtgcgacaggcccctggacaagggcctgagtggatgggatggatcaatgtcaatagtgggaatccaacctatgggccgggcttcacaggacggtttgtcttctccttggacacctctgtcaatacggcatatctacagatcaatagcctaagggctgaggacaccgccgtgtattactgtgcgaggggcacaagtgcggctggaacggactggttcgacccctggggccagggaaccctggtcatcgtctcctca

SEQ ID NO: 6760 - DNA, 280 bp, Homo sapiens
  source 1..280: mol_type = other DNA
tgaaggctctggattcatctttaggaactattggatgacatgggtccgccaggctccagggaaggggctggagtgggtggccaacatgaaccaagatggaagtgagagatactatgtagactctgtgaagggccgattcaccatctccagagacaacgccatgacctcactgtatctgcaaatgaacagcctgagagccgaggacacggctgtatattactgtgtcacgggtagagactcgtcacactggggccagggaaccgtggtcaccgtctcctca

SEQ ID NO: 6761 - DNA, 280 bp, Homo sapiens
  source 1..280: mol_type = other DNA
tgcagcctctggattcatttttaggaactattggatgacctgggtccgccaggctccagggaaggggctggagtgggtggccaacatgaaccaagatggaagtgagagatactatgtggactctgttaagggccgattcaccatctccagagacaacgccaagaactcagtgtatcttcaaatgagcagcctgagagtcgaggacacggctgtctatttttgtgtgacagggagagatagcagccactggggccagggaaccctggtcaccgtctcctca

SEQ ID NO: 6762 - DNA, 280 bp, Homo sapiens; identical to SEQ ID NO: 6761
  source 1..280: mol_type = other DNA

SEQ ID NO: 6763 - DNA, 280 bp, Homo sapiens
  source 1..280: mol_type = other DNA
tgcagcatctggattcacctttagtacctattggatgaactgggtccgccaggctccagggaaggggctggagtgggtggccaacatgaaccaagatggaagtgagagatactatgtggactctgttaagggccgattcaccatctccagagacaacgccaagaactcagtgtatcttcaaatgagcagcctgagagtcgaggacacggctgtctatttttgtgtgacagggagagatagcagccactggggccagggaaccctggtcaccgtctcctca

SEQ ID NO: 6764 - DNA, 292 bp, Homo sapiens
  source 1..292: mol_type = other DNA
ggcctctggatacaccttcaaggcctactatatacattgggtgcgacaggcccctgggcaagggcttgagtggatgggacggatcaaccctaacattggtgacacagactacgcacagaaatttcagggcagggtcaccctgaccagggacacgtccatcaggacagcctacatggaactgaacggactgagatctgacgacgcggtcgtttattactgtgcgagaggaggtggatatactggctacgacattgactattggggccagggaaccctggtcaccgtctcctca

SEQ ID NO: 6765 - DNA, 292 bp, Homo sapiens
  source 1..292: mol_type = other DNA
gggttctggatacaccttcaccgcctactatatacattgggtgcgacaggcccctggacaagggcttgagtggatgggacggatcaatcctaagactggtgtcacagagtatgcacagaactttcagggcagggtcaccatgaccagggacacctccatcagcacagcctacgtggagctgaagagactgaggtctgacgacacggtcgtttatttttgtgcgagaggaggtggatatactggctacgatattgactactggggccagggaaccctggtcaccgtctcctca

SEQ ID NO: 6766 - DNA, 292 bp, Homo sapiens; identical to SEQ ID NO: 6764
  source 1..292: mol_type = other DNA

SEQ ID NO: 6767 - DNA, 292 bp, Homo sapiens
  source 1..292: mol_type = other DNA
cactgtctctggtggctccatcagtggttactactggagctggatccggcagcccccaggggagggactggagtggattggttatatccattacagtgggggcaccaactacaacccctccctcgcgagtcgagtcaccatgtcagtggacacgtccaagaaccagttgtctctgaggctgacctctgtgaccgccgcagacacggccgtgtatttctgtgcgaggctccatagtctttattctgaggagttcgacccctggggccagggaagcctggtcaccgtctcctca

SEQ ID NO: 6768 - DNA, 292 bp, Homo sapiens
  source 1..292: mol_type = other DNA
cactgtctctggtgcctccgtcactggttcttactggagctggatccggcagcccccagggaagggactggagtggcttggttacatctattccactgggtccaccaactacaacccctccctcgtgagtcgactcaccctattaggagacacaaacaagaaccagctctccctgattctgacctctgtgacctctgcggacacggccgtttactactgtgcgagattgcactccctctactcggaagagttcgacccctggggccaggggaccctcgtcaccgtctcctca

SEQ ID NO: 6769 - DNA, 289 bp, Homo sapiens
  source 1..289: mol_type = other DNA
cactgtctctggtggccccatcagcagtggtgattactactggagctggatccgccagcacccagggaagggcctggagtggattgcgtacatctatcacagtgggagcacctactatagtccgtccctgaagagtcgagctatcatatcagtcgacacatctaagaaccagatctccctgatgctgagctctgtgactgccgcggacacggccgtgtattactgtgcgagtctacgtggctatcgatttgactactggggccagggaaccctggtcaccgtctcctca

SEQ ID NO: 6770 - DNA, 289 bp, Homo sapiens
  source 1..289: mol_type = other DNA
cactgtctctggtggctccgtcagcagtggtccttactactggagctggatccgccagcacccagggaagggcctggagtggattgggtacatctattacagtgggagcacctactacaacccgtccctcaagagtcgagttaccatatcagtagacacgtctaagaaccagtgctccctgaagttgagctctgtgactgccgcggacacggccgtgtattactgcgcgagcctccgtggttatcgctttgactactggggccagggaaccctggtcaccgtctcctca

SEQ ID NO: 6771 - DNA, 289 bp, Homo sapiens; identical to SEQ ID NO: 6770
  source 1..289: mol_type = other DNA

SEQ ID NO: 6772 - DNA, 289 bp, Homo sapiens
  source 1..289: mol_type = other DNA
tgcagcgtctggattcaccttcagcaactattggatgacctgggtccgccaggctccagggaagcggctggaattcgtggccaacatagatctcaatggaggtacaagaaattatgtggactctgtgaagggccgattcaccatctccagagacaacgccaagagctcagtttatctgcaaatgaacagcctgagagtcgaggactcggctctatattactgtgcgagagatcccttttacagcgcttttgatatctggggccaagggacaatggtcgccgtctcttca

SEQ ID NO: 6773 - DNA, 289 bp, Homo sapiens
  source 1..289: mol_type = other DNA
tgcagcctctgcattcacctttagtaactcttggatggcctgggtccgccaggctccagggagggggttggagtgcgtggccaaaataaatccagatggaagtggaaaaggctatgtagactctgtgaagggccgattcaccatctccagagacaacgccaagaactcactgtatctgcaaatgaacagcctgacagccgaggacacggctgtttattattgtgcgagagatcccttctattccgcttttgatatctggggccaagggacagtggtcaccgtctcttca

SEQ ID NO: 6774 - DNA, 301 bp, Homo sapiens
  source 1..301: mol_type = other DNA
tgcagtctctggagtcacctttagtgagtatcccatgagctgggtccgccaggctccagggaaggggctggagtgggtctcatttattagtggaagtggtggtagtacatatcatgcagactccgtgaagggccggttcaccatctccagagacaattccaagaacacgctgtatctgcaaatgaacagcctgagagtcgaggacacggccatatattactgtgcgaaagatagatattgtcctggtggtatatgtcccgtcgactactggggccagggaaccctggtcaccgtctcctca

SEQ ID NO: 6775 - DNA, 301 bp, Homo sapiens
  source 1..301: mol_type = other DNA
tgcaggctctggattcacctctagcgaatatgccatgaactgggtccgccaggctccagggaagggactggaatgggtctcaattattagtggtagtggtggcacctcatactacgcagactccgtgaagggccggttcaccatctccagagaccattccaagaacaccctgtatctgcaaatgaacagcctgagagccgaggacacggccgtgtattactgtgcgaaagataggtattgtcctggtggtatctgtccagttgactactggggccagggcaccctggtcaccgtctcctca

SEQ ID NO: 6776 - DNA, 299 bp, Homo sapiens
  source 1..299: mol_type = other DNA
caggctctggattcgcctctagcgaatatgccatgaactgggtccgccaggctccagggaagggactggaatgggtctcaactattagtggtagtggtggcacctcagactacgcagactccgtgaagggccggttcaccatctccagagaccatttcaagaacaccctgtatctgcaaatgaacagcctgagagccgaggacacggccgtgtattactgtgcgaaagataggtattgtcctggtggtatctgtccagttgactactggggccagggcaccctggtcaccgtctcctca

SEQ ID NO: 6777 - DNA, 301 bp, Homo sapiens
  source 1..301: mol_type = other DNA
tgcaggctctggattcacctctaccgaatatgccatgaactgggtccgccaggctccagggaagggactggaatgggtctcaactattagtggtagtggtgactcctcagactacgcagactccgtgaagggccggttcaccatctccagagaccatttcaagaacatactgtatctgcacatgcacagtctgagagccgaggacacggccgtgtattactgtgcgaaagataggtattgtcctggtggtatctgtccagttgactactggggccagggcaccctggtcatcgtctcctca

SEQ ID NO: 6778 - DNA, 301 bp, Homo sapiens
  source 1..301: mol_type = other DNA
tgcgggctccggattcacctctaccgaatatgccatgaactgggtccgccaggctccagggaagggactggaatgggtctcaactattagtggcagtggtgactcctcagactacgcagactccgtgaagggccggttcaccatttccagagaccttttcaggaacatactgtatctgcacatgcacagcctgagagccgaggacacggccgtgtattactgtgcgaaagataggtattgtcctggtggtatctgtccagttgactactggggccagggtaccctggtcatcgtctcctca

SEQ ID NO: 6779 - DNA, 301 bp, Homo sapiens
  source 1..301: mol_type = other DNA
tgcaggctctggattcacctctagcgaatatgccatgaactgggtccgccaggctccagggaagggactggaatgggtctcaactattagtggtagtggtggcacctcagactacgcaaactccgtgaagggccggttcaccatctccagagaccatttcaagaacatactgtatctgcacatgaacagtctgagagccgaggacacggccgtgtattactgtgcgaaagataggtattgtcctggtggtatctgtccagttgactactggggccagggcaccctggtcaccgtctcctca

SEQ ID NO: 6780 - DNA, 301 bp, Homo sapiens
  source 1..301: mol_type = other DNA
tgcaggctctggattcacctctagcgaatatgccatgaactgggtccgccaggctccagggaagggactggaatgggtctcaactattagtggtagtggtggcacctcagactacgcagactccgtgaagggccggttcaccatctccagagaccttttcaagaacaccctgtatctgcaaatgaacagcctgagagccgaggacacggccgtgtattactgtgcgaaagataggtattgtcctggtggtatctgtccagttgactactggggccagggcaccctggtcaccgtctcctca

SEQ ID NO: 6781 - DNA, 301 bp, Homo sapiens
  source 1..301: mol_type = other DNA
tgcaggctctggattcacctctagcgaatatgccatgaactgggtccgccaggctccagggaagggactggaatgggtctcaactattagtggtagtggtggcacctcagactacgcagactccgtgaagggccggttcaccatctccagagaccatttcaagaacaccctgtatctgcaaatgaacagcctgagagccgaggacacggccgtgtattactgtgcgaaagataggtattgtcctggtggtatctgtccagttgactactggggccagggcaccctggtcaccgtctcctca

SEQ ID NO: 6782 - DNA, 301 bp, Homo sapiens
  source 1..301: mol_type = other DNA
tgcaggctctggattcacctctagcgaatatgccatgaactgggtccgccaggctccagggaagggactggaatgggtctcaactattagtggtagtggtggcacctcagactacgcagactccgtgaagggccggttcaccatctccagagaccatttcaagaacaccctgtatctgcaaatgaacagcctgagagccgaggacacggccgtgtattactgtgcgaaagataggtattgtcctggtggtatctgtccagttgactactggggccagagcaccctggtcaccgtctcctca

SEQ ID NO: 6783 - DNA, 301 bp, Homo sapiens
  source 1..301: mol_type = other DNA
tgcaggctctggattcacctctaccgaatatgccatgaactgggtccgccaggctccagggaagggactggaatgggtctcatttattagtggtagtggtggcaccgcaggctacgcagactccgtgaagggccggttcaccatctccagagaccatttcaagaacattctgtatctgcacatcaacagtcttagagccgaggacacggccgtgtattattgtgcgaaagataggtattgtcctggtggtatctgtccagttgactactggggccagggcaccctggtcatcgtctcctca

SEQ ID NO: 6784 - DNA, 301 bp, Homo sapiens
  source 1..301: mol_type = other DNA
tgcaggctctggattcgcctctagcgaatatgccatgaactgggtccgccaggctccagggaagggactggaatgggtctcaactattagtggtagtggtggcacctcagactacgcagactccgtgaagggccggttcaccatctccagagaccatttcaagaacaccctgtatctgcaaatgaacagcctgagagccgaggacacggccgtgtattactgtgcgaaagataggtattgtcctggtggtatctgtccagttgactactggggccagggcaccctggtcaccgtctcctca

SEQ ID NO: 6785 - DNA, 277 bp, Homo sapiens
  source 1..277: mol_type = other DNA
tgcagcctctggattctccttcagtagctactggatacactgggtccgccaagctccagggaaggggctggtgtgggtctcacgtattaatagtgatgggagtagcacaagttacgcggactccgtgaagggccgattcaccatctccagagacaacgccaagaacacgctttatctgcaaatgaacagtctgagagccgaggacacggctgtgtattactgtgcaagagaaggaatggcttactggggccagggaaccctggtcaccgtctcctca

SEQ ID NO: 6786 - DNA, 277 bp, Homo sapiens
  source 1..277: mol_type = other DNA
tgcagtctctggattcaccctcagtgaatactggatgcactgggtccgccaagctccagggaaggggctgctgtgggtctcacggattaatagtgatgggagtagtacaggctacgcggactccgtgaagggccgattcaccatctccagagacaacgccaagaacacggtgtatctgcaaatgaacagtctgagagtcgaggacacggctgtatattattgtgcaagagaaggaatggcctactggggccagggaaccctggtcagcgtctcctca

SEQ ID NO: 6787 - DNA, 298 bp, Homo sapiens
  source 1..298: mol_type = other DNA
tgcagcctctggattcaccttcagtagctactggatgcactgggtccgccaagttccagggaaggggctggcgtgggtctcacgtttggataatgatgggactaccacaatctacgcggactccgtgaagggccgattcaccatttcccgagacaacgccaagaacacgctgtttctgcaaatgaacagtctgacagccgaggacacggctgtgtattactgtgcaagagaggtgactacgatcggggcttactactttgactactggggtcggggaatcctggtcaccgtctcctca

SEQ ID NO: 6788 - DNA, 298 bp, Homo sapiens
  source 1..298: mol_type = other DNA
tgcagcctctggattcaccttcagtaactactggatgcactgggtccgccaagctccagggaaggggctggtgtgggtctcacgtattcacaatgatgggagcggtacaatgtatgaggactccgtgaaggggcgattcaccatctccagagacaacgccaagaacacgctctatctgcaaatgaacagtctgagagccgaagacacggctgtgtattactgtgcaagagaggtgactacaataggggcgtactactttgactactggggccagggaaccctggtcaccgtctcctca

SEQ ID NO: 6789 - DNA, 294 bp, Homo sapiens
  source 1..294: mol_type = other DNA
gaggcttctggatacacctttaccaactactggatcggctgggtgcgccagatgcccgggaaaggcctggagtggatggggatcatctatcctggtgactctgataccagatatagtccgtccttccaaggtcaggtcaccatctcagccgacaagtccatcaacaccgcctacctgcagtggagcagcctgaaggcctcggacaccgccatgtattactgtgcgagagttgggacagctgggacgcggtggttcgacccctggggccagggaactctggtcaccgtctcctca

SEQ ID NO: 6790 - DNA, 294 bp, Homo sapiens
  source 1..294: mol_type = other DNA
aagggttctggatacagttttaccaactactggatcgcctgggtgcgccagatgcccgcgaaaggcctggagtggatggggatcatctatcctggtgactctgacaccagatacagcccgtccttccaaggccaggtcaccatctcagccgacaagtccatcggcaccgcctacttgcagtggagcagcctgacggcctcggacaccgccatgtattactgtgcgagagttgggacagctggtacacggtggttcgacccctggggccagggaaccctagtcactgtcttctca

SEQ ID NO: 6791 - DNA, 282 bp, Homo sapiens
  source 1..282: mol_type = other DNA
caggcttctggatacaggttttccacctcctggatcggctgggtgcgccacatacccgggaaaggcctggagtggatgggaaacatatatcctggtgactctgatacgaaatacagcccgtccttccaagggcaggtcaccttctcagccgacacgtccatcactaccgcctatctgcagtgggggagcctgaaggcctcggacaccgccatttattactgtgctaagaaggggggtggctttgactcctggggccagggaaccctggtcaccgtctcctca

SEQ ID NO: 6792 - DNA, 282 bp, Homo sapiens
  source 1..282: mol_type = other DNA
aaggcctctggctacaggttcggcacgtcctggatcggctgggtgcgccagatgtccgggagaggcctggagtggatgggaatcgtctatcctgatgactctgacaccagatacagcccgtccttccaaggccacgtcaccttctcagtcgacatgtccacaaacaccgcctttctgcggtggaggagcctgggggcctcggacaccgccatatattactgtgcgaaaaaaggagggggatttgactcgtggggccagggaactcgggtcaccgtctcctca

SEQ ID NO: 6793 - DNA, 282 bp, Homo sapiens
  source 1..282: mol_type = other DNA
aaggcttctggatacagcttcactaactcctggatcgcctgggtgcgccagatgcccgggaaaggcctggagtggatgggtgtcatctatcctggtgactctgaaagcagatacagcccgctcttccaaggccaagtcaccttctcagtcgacacgtccatcaacaccgcctacctgcactggagcagcctgaaggcctcggacagcgccatgtattactgtgcgaagaagggagggggctttgattcctggggccggggaactctggtcaccgtctcctcg

SEQ ID NO: 6794 - DNA, 282 bp, Homo sapiens
  source 1..282: mol_type = other DNA
aaggctgccgggtacaggtttggcacttcctggatcggctgggtgcgccagaagcccgggaaaggcctggagtggatgggaatcatctatcctgatgactctgacaccaagtacagcccgtccctccaagggcaggtcaccttctcagtcgacatgtccaaaaccaccgcctatttgcagtggcgtagcctgagggcctcggacaccgccatctattattgtgcgaagaaaggaggggggtttgactcgtggggccagggaaccctggtcaccgtctcctca

SEQ ID NO: 6795 - DNA, 283 bp, Homo sapiens
  source 1..283: mol_type = other DNA
cactgtctctggtggctccatcagtagttactactggagctggatccggcagcccccagggaagggactggagtggattggatatactgattacagtgcaaacgccaattacaaccccgccctcaagggtcgagtcaccatgtcagtagacacgtccacgaaccggttcttcctgaaagtgaactctgtgacggctgcggacacggccgtgtatttttgtgcgagaggaagggagtgggaactggccaactggggccagggagccctggtcaccgtctcgtca

SEQ ID NO: 6796 - DNA, 283 bp, Homo sapiens
  source 1..283: mol_type = other DNA
tagtgtctctggtgtctccgtcgggactcatttctggagctggatccggcagcccccagggcagggactggagtggattggatatactgattacagtgcaaacgccaattacaaccccgccctcaagggtcgagtcaccatgtcagtagacacgtccacgaaccggttcttcctgaaagtgaactctgtgacggctgcggacacggccgtgtatttttgtgcgagaggaagggagtgggaactggccaactggggccagggagccctggtcaccgtctcgtca

SEQ ID NO: 6797 - DNA, 283 bp, Homo sapiens
  source 1..283: mol_type = other DNA
tagtgtctctggtgtctccgtcgggactcatttctggagctggatccggcagcccccagggcagggactggagtggattggatatactgattacagtgcaaacggcaattacaaccccgccctcaagggtcgagtcaccatgtcagtagacacgtccacgaaccagttcttcctgaaagtgaactctgtgacggctgcggacacggccgtgtattattgtgcgagaggaagggagtgggaactggccaactggggccagggagccctggtcaccgtctcgtca

SEQ ID NO: 6798 - DNA, 283 bp, Homo sapiens
  source 1..283: mol_type = other DNA
tagtgtctctggtgtctccgtcgggactcatttctggagctggatccggcagcccccagggcagggactggagtggattggatatactgattacagtgcaaacgccaattacaaccccgccctcaagggtcgagtcaccatgtcagtagacacgtccacgaaccagttcttcctgaaagtgaactctgtgaccgctgcggacacggccgtgtattattgtgcgagaggaagggagtgggaactggccaactggggccagggagccctggtcaccgtctcgtca

SEQ ID NO: 6799 - DNA, 283 bp, Homo sapiens
  source 1..283: mol_type = other DNA
tagtgtctctggtgtctccgtcgggactcatttctggagctggatccggcagcccccagggcagggactggagtggattggatatactgattacagtgcaaacgccaattacaaccccgccctcaagggtcgagtcaccatgtcagtagacacgtccacgaaccagttcttcctgaaagtgaagtctgtgaccgctgcggacacggccgtgtattattgtgcgagaggaagggagtgggaactggccaactggggccagggagccctggtcaccgtctcgtca

SEQ ID NO: 6800 - DNA, 283 bp, Homo sapiens
  source 1..283: mol_type = other DNA
taatgtctctggtgtctccgtcgggactcatttctggagctggatccggcagcccccagggcagggactggagtggattggatatactgattacagtgcaaacgccaattacaaccccgccctcaagggtcgagtcaccatgtcagtagacacgtccacgaaccagttcttcctgaaagtgaactctgtgaccgctgcggacacggccgtgtattattgtgcgagaggaagggagtgggaactggccaactggggccagggagccctggtcaccgtctcgtca

SEQ ID NO: 6801 - DNA, 282 bp, Homo sapiens
  source 1..282: mol_type = other DNA
agtgtctctggtgtctccgtcgggactcatttctggagctggatccggcagcccccagggcagggactggagtggattggatatactgattacagtgcaaacgccaattacaaccccgccctcaagggtcgagtcaccatgtcagtagacacgtccacgaaccggttcttcctgaaagtgaactctgtgacggctgcggacacggccgtgtatttttgtgcgagaggaagggagtgggaactggccaactggggccagggagccctggtcaccgtctcgtca

SEQ ID NO: 6802 - DNA, 282 bp, Homo sapiens
  source 1..282: mol_type = other DNA
agtgtctctggtgtctccgtcgggactcatttctggagctggatccggcagcccccagggcagggactggagtggattggatatactgattacagtgcaaacgccaattacaaccccgccctcaagggtcgagtcaccatgtcagtagacacgtccacgaaccagttcttcctgaaagtgaactctgtgaccgctgcggacacggccgtgtattattgtgcgagaggaagggagtgggaactggccaactggggccagggagccctggtcaccgtctcgtca

SEQ ID NO: 6803 - DNA, 283 bp, Homo sapiens
  source 1..283: mol_type = other DNA
tagtgtctctggtgtctccgtcgggactcatttctggagctggatccggcagcccccagggcagggactggagtggattggatatactgattacagtgcaaacgccaattacaaccccgccctcaagggtcgagtcaccatgtcagtagacatgtccacgaaccggttcttcctgaaagtgaactctgtgacggctgcggacacggccgtgtatttttgtgcgagaggaagggagtgggaactggccaactggggccagggagccctggtcaccgtctcgtca

SEQ ID NO: 6804 - DNA, 283 bp, Homo sapiens
  source 1..283: mol_type = other DNA
tagtgtctctggtgtctccgtcgggactcatttctggagctggatccggcagcccccagggcagggactggagtggattggatatactgattacagtgcaaacgccaattacaaccccgccctcaagggtcgagtcaccatgtcagtagacacgtccacgaaccggttcttcctgaaagtgaactctgtgacggctgcggacacggccgtgtatttttgtgcgagaggaagggagtgggaactggccaactggagccagggagccctggtcaccgtctcgtca

SEQ ID NO: 6805 - DNA, 283 bp, Homo sapiens
  source 1..283: mol_type = other DNA
tagtgcctctggtgtctccgtcgggactcatttctggagctggatccggcagcccccagggcagggactggagtggattggatatactgattacagtgcaaacgccaattacaaccccgccctcaagggtcgagtcaccatgtcagtagacacgtccacgaaccagttcttcctgaaagtgaactctgtgaccgctgcggacacggccgtgtattattgtgcgagaggaagggagtgggaactggccaactggggccagggagccctggtcaccgtctcgtca

SEQ ID NO: 6806 - DNA, 283 bp, Homo sapiens
  source 1..283: mol_type = other DNA
tagtgtctctggtgtctccgtcgggactcatttctggagctggatccggcagcccccagggcagggactggagtggattggatatactgattacagtgcaaacgccaattacaaccccgccctcaagggtcgagtcaccatgtcagtagatacgtccacgaaccggttcttcctgaaagtgaactctgtgacggctgcggacacggccgtgtatttttgtgcgagaggaagggagtgggaactggccaactggggccagggagccctggtcaccgtctcgtca

SEQ ID NO: 6807 - DNA, 283 bp, Homo sapiens
  source 1..283: mol_type = other DNA
tagtgtctctggtgtctccgtcgggactcatttctggagctggatccggcagcccccagggcagggactggagtggattggatatactgattacagtgcaaacgccaattacaaccccgccctcaagggtcgagtcaccatgtcagtagacacgtccacgaaccggttcttcctgacagtgaactctgtgacggctgcggacacggccgtgtatttttgtgcgagaggaagggagtgggaactggccaactggggccagggagccctggtcaccgtctcgtca

SEQ ID NO: 6808 - DNA, 283 bp, Homo sapiens
  source 1..283: mol_type = other DNA
tagtgtctctggtgtctccgtcgggactcatttctggagctggatccggcagcccccagggcagggactggagtggattggatatactgattacagtgcaaacgccaattacaaccccgccctcaagggtcgagtcaccatgtcagtagacacgtccacgaaccggttcttcctgaaagtgaactccgtgacggctgcggacacggccgtgtatttttgtgcgagaggaagggagtgggaactggccaactggggccagggacccctggtcaccgtctcgtca

SEQ ID NO: 6809 - DNA, 283 bp, Homo sapiens
  source 1..283: mol_type = other DNA
tagtgtctctggtgtctccgtcgggactcatttctggagctggatccggcagcccccagggcagggactggagtggattggatatactgattacagtgcaaacgccaattacaaccccgccctcaagggtcgagtcaccatgtcagtagacacgtccacgaaccggttcttcctgaaagtgaactctctgacggctgcggacacggccgtgtatttttgtgcgagaggaagggagtgggaactggccaactggggccagggagccctggtcaccgtctcgtca

SEQ ID NO: 6810 - DNA, 283 bp, Homo sapiens
  source 1..283: mol_type = other DNA
tagtgtctctggtgtctccgtcgggactcatttctggagctggatccggcagcccccagggcagggactggagtggattggatatactggttacagtgcaaacgccaattacaaccccgccctcaagggtcgagtcaccatgtcagtagacacgtccacgaaccggttcttcctgaaagtgaactctgtgacggctgcggacacggccgtgtatttttgtgcgagaggaagggagtgggaactggccaactggggccagggagccctggtcaccgtctcgtca

SEQ ID NO: 6811 - DNA, 283 bp, Homo sapiens
  source 1..283: mol_type = other DNA
tagtgtctctggtgtctccgtcgggactcatttctggagctggatccggcagcccccagggcagggactggagtggattggatatactgattacagtgcaaacgccaattacaaccccgccctcaaaggtcgagtcaccatgtcagtagacacgtccacgaaccagttcttcctgaaagtgaactctgtgaccgctgcggacacggccgtgtattattgtgcgagaggaagggagtgggaactggccaactggggccagggagccctggtcaccgtctcgtca

SEQ ID NO: 6812 - DNA, 283 bp, Homo sapiens
  source 1..283: mol_type = other DNA
tagtgtctctggtgtctccgtcgggactcatttctggagctggatccggcagcccccagggcagggactggagtggattggatatactgattacagtgcaaacgccaattacaaccccgccctcaagggtcgagtcaccatgtcagtagacacgtccacgaaccggttcttcctgaaagtgaactctgtgacggctgcggacacggccgtgtatttttgtgcgagaggaagggagtgggaactggccaactggggccagggaaccctggtcaccgtctcctca

SEQ ID NO: 6813 - DNA, 283 bp, Homo sapiens
  source 1..283: mol_type = other DNA
tagtgtctctggtgtctccgtcgggactcatttctggagctggatccggcagcccccagggcagggactggagtggattggatatactgattacagtgcaaacgccaattacaaccccgccctcaagggtcgagtcaccatgtcagtagacacgtccacgaaccggttcttcctgaaagtgaactcggtgacggctgcggacacggccgtgtatttttgtgcgagaggaagggagtgggaactggccaactggggccagggagccctggtcaccgtctcgtca

SEQ ID NO: 6814 - DNA, 283 bp, Homo sapiens
  source 1..283: mol_type = other DNA
tagtgtctctggtgcctccgtcgggactcatttctggagctggatccggcagcccccagggcagggactggagtggattggatatactgattacagtgcaaacgccaattacaaccccgccctcaagggtcgagtcaccatgtcagtagacacgtccacgaaccggttcttcctgaaagtgaactctgtgacggctgcggacacggccgtgtatttttgtgcgagaggaagggagtgggaactggccaactggggccagggagccctggtcaccgtctcgtca

SEQ ID NO: 6815 - DNA, 283 bp, Homo sapiens
  source 1..283: mol_type = other DNA
tagtgtctctggtgtctccgtcgggactcatttctggagctggatccggcagcccccagggcagggactggagtggattggatatactgattacagtgcaaacgccaattacaaccccgcccccaagggtcgagtcaccatgtcagtagacacgtccacgaaccagttcttcctgaaagtgaagtctgtgaccgctgcggacacggccgtgtattattgtgcgagaggaagggagtgggaactggccaactggggccagggagccctggtcaccgtctcgtca

SEQ ID NO: 6816 - DNA, 283 bp, Homo sapiens
  source 1..283: mol_type = other DNA
tagtgtctctggtgtctccgtcgggactcatttctggagctggatccggcagcccccagggcagggactggagtggattggatatactgattacagtgcaaacgccaattacaaccccgcccccaagggtcgagtcaccatgtcagtagacacgtccacgaaccggttcttcctgaaagtgaactctgtgacggctgcggacacggccgtgtatttttgtgcgagaggaagggagtgggaactggccaactggggccagggagccctggtcaccgtctcgtca

SEQ ID NO: 6817 - DNA, 283 bp, Homo sapiens
  source 1..283: mol_type = other DNA
tagtgtctctggtgtctccgtcgggactcatttctggagctggatccggcagcccccagggcagggactggagtggattggatatactgattacagtgcaaacgccaattacaaccccgccctcaagggtcgagtcaccatgtcagtagacacgtccacgaaccggttcttcctgaaagtgaactctgtgacggctgcggacacggccgtgtatttttgcgcgagaggaagggagtgggaactggccaactggggccagggagccctggtcaccgtctcgtca

SEQ ID NO: 6818 - DNA, 284 bp, Homo sapiens
  source 1..284: mol_type = other DNA
ttagtgtctctggtgtctccgtcgggactcatttctggagctggatccggcagcccccagggcagggactggagtggattggatatactgattacagtgcaaacgccaattacaaccccgccctcaagggtcgagtcaccatgtcagtagacacgtccacgaaccggttcttcctgaaagtgaactctgtgacggctgcggacacggccgtgtatttttgtgcgagaggaagggagtgggaactggccaactggggccagggagccctggtcaccgtctcgtca

SEQ ID NO: 6819 - DNA, 283 bp, Homo sapiens
  source 1..283: mol_type = other DNA
tagtgtctctggtgtctccgtcgggactcatttctggagctggatccggcagcccccagggcagggactggagtggattggatatactgattacagtgcaaacgccaattacaaccccgccctcaagggtcgagtcaccatgtcagtagacacgtccacgaaccagttcttcctgaaagtgaagtctgtgaccgctgcggacacggccgtgtattattgtgcgagaggaagggagtgggaactggccaactggggccagggagccctggtcaccgtctcctca

SEQ ID NO: 6820 - DNA, 283 bp, Homo sapiens
  source 1..283: mol_type = other DNA
cactgtctctggtggctccatcagtagttactactggagctggatccggcagcccccagggaagggactggagtggattggatatactgattacagtgcaaacggcaattacaaccccgccctcaagggtcgagtcaccatgtcagtagacacgtccacgaaccagttcttcctgaaagtgaactctgtgacggctgcggacacggccgtgtattattgtgcgagaggaagggagtgggaactggccaactggggccagggagccctggtcaccgtctcgtca

SEQ ID NO: 6821 - DNA, 283 bp, Homo sapiens
  source 1..283: mol_type = other DNA
cactgtctctggtggctccatcagtagttactactggagctggatccggcagcccccagggaagggactggagtggattgggtatactgattacagtgcaaacggcaattacaaccccgccctcaagggtcgagtcaccatgtcagtagacacgtccacgaaccagttcttcctgaaagtgaactctgtgacggctgcggacacggccgtgtattattgtgcgagaggaagggagtgggaactggccaactggggccagggagccctggtcaccgtctcgtca

SEQ ID NO: 6822 - DNA, 283 bp, Homo sapiens
  source 1..283: mol_type = other DNA
tagtgtctctggtgtctccgtcgggactcatttctggagctggatccggcagcccccagggcagggactggagtggattggatatactgattacagtgcaaacgccaattacaaccccgccctcaagggtcgagtcaccatgccagtagacacgtccacgaaccagttcttcctgaaagtgaactctgtgaccgctgcggacacggccgtgtattattgtgcgagaggaagggagtgggaactggccaactggggccagggagccctggtcaccgtctcgtca

SEQ ID NO: 6823 - DNA, 283 bp, Homo sapiens
  source 1..283: mol_type = other DNA
tagtgtctctggtgtctccgtcgggactcatttctggagctggatccggcagcccccagggcagggactggagtggattggatatactgattacagtgcaaacgccaattacaaccccgccctcaagggtcgagtcaccatgtcagtagacacgtccgcgaaccggttcttcctgaaagtgaactctgtgacggctgcggacacggccgtgtatttttgtgcgagaggaagggagtgggaactggccaactggggccagggagccctggtcaccgtctcgtca

SEQ ID NO: 6824 - DNA, 283 bp, Homo sapiens
  source 1..283: mol_type = other DNA
tagtgtctctggtgtctccgtcgggactcatttctggagctggatccggcagcccccaggacagggactggagtggattggatatactgattacagtgcaaacgccaattacaaccccgccctcaagggtcgagtcaccatgtcagtagacacgtccacgaaccagttcttcctgaaagtgaagtctgtgaccgctgcggacacggccgtgtattattgtgcgagaggaagggagtgggaactggccaactggggccagggagccctggtcaccgtctcgtca

SEQ ID NO: 6825 - DNA, 283 bp, Homo sapiens
  source 1..283: mol_type = other DNA
tagtgtctctggtgtctccgtcgggactcatttctggagctggatccggcagcccccagggcagggactggagtggattggatatactgattacagtgcaaacgccaattacaaccccgccctcaagggtcgagtcaccatgtcagtagacacgtccacgaaccggttcttcctgaaagtgaactctgtgacggctgcggacacggccgcgtatttttgtgcgagaggaagggagtgggaactggccaactggggccagggagccctggtcaccgtctcgtca

SEQ ID NO: 6826 - DNA, 283 bp, Homo sapiens
  source 1..283: mol_type = other DNA
tagtgtctctggtgtctccgtcgggactcatttctggagctggatccggcagcccccagggcagggactggagtggattggatatactgattacagtgcaaacgccaattacaaccccgccctcaagggtcgagtcaccatgtcagtagacacgtccacgaaccggttcttcctgaaagtgagctctgtgacggctgcggacacggccgtgtatttttgtgcgagaggaagggagtgggaactggccaactggggccagggagccctggtcaccgtctcgtca

SEQ ID NO: 6827 - DNA, 283 bp, Homo sapiens
  source 1..283: mol_type = other DNA
tagtgtctctggtgtctccgtcgggactcacttctggagctggatccggcagcccccagggcagggactggagtggattggatatactgattacagtgcaaacggcaattacaaccccgccctcaagggtcgagtcaccatgtcagtagacacgtccacgaaccagttcttcctgaaagtgaactctgtgacggctgcggacacggccgtgtattattgtgcgagaggaagggagtgggaactggccaactggggccagggagccctggtcaccgtctcgtca

SEQ ID NO: 6828 - DNA, 283 bp, Homo sapiens
  source 1..283: mol_type = other DNA
tagtgtctctggtgtctccgtctggactcatttctggagctggatccggcagcccccagggcagggactggagtggattggatatactgattacagtgcaaacggcaattacaaccccgccctcaagggtcgagtcaccatgtcagtagacacgtccacgaaccagttcttcctgaaagtgaactctgtgacggctgcggacacggccgtgtattattgtgcgagaggaagggagtgggaactggccaactggggccagggagccctggtcaccgtctcgtca

SEQ ID NO: 6829 - DNA, 283 bp, Homo sapiens
  source 1..283: mol_type = other DNA
tagtgtctctggtgtctccgtcgggactcatttctggagctggatccggcagcccccagggcagggactggagtggattggatatactgattacagtgcaaacggcaattacaaccccgccctcaagggtcgagtcaccatgtcagtagacacgtccacgaaccagttcttcctaaaagtgaactctgtgacggctgcggacacggccgtgtattattgtgcgagaggaagggagtgggaactggccaactggggccagggagccctggtcaccgtctcgtca

SEQ ID NO: 6830 - DNA, 283 bp, Homo sapiens
  source 1..283: mol_type = other DNA
tagtgtctctggtgtctccgtcgggactcatttctggagctggatccggcagcccccagggcagggactggagtggattggatatactgattacagtgcaaacgccaattacaaccccgccctcaagggtcgagtcaccatgtcagtagacacgtccacgaaccggttcttcctgaaagtgaactcagtgacggctgcggacacggccgtgtatttttgtgcgagaggaagggagtgggaactggccaactggggccagggagccctggtcaccgtctcgtca

SEQ ID NO: 6831 - DNA, 283 bp, Homo sapiens
  source 1..283: mol_type = other DNA
tagtgtctctggtgtctccgtcgggactcatttctggagctggatccggcagcccccagggcagggactggagtggattggatatactgattacagtgcaaacgccaattacaaccccgccctcaagggtcgagtcaccatgtcagtagacacgtccacgaaccggttcttcctgaaagtgaactctgtgacggctgcggacatggccgtgtatttttgtgcgagaggaagggagtgggaactggccaactggggccagggagccctggtcaccgtctcgtca

SEQ ID NO: 6832 - DNA, 283 bp, Homo sapiens
  source 1..283: mol_type = other DNA
tagtgtctctggtgtctccgtcgggactcatttctggagctggatccggcagcccccagggcagggactggagtggattggatatactgattacagtgcaaacgccaattacaaccccgccctcaagggtcgagtcaccatgtcagtagacacgtccacgaaccagttcttcctgaaagtgaactctgtgaccgctgcggacacggccgtgtattattgtgcgagaggaagggagtgggaactggccaactggggccagggagccctggtcaccgtctcttca

SEQ ID NO: 6833 - DNA, 283 bp, Homo sapiens
  source 1..283: mol_type = other DNA
tagtgtctctggtgtctccgtcgggactcatttctggagctggatccggcagcccccagggcagggactggagtggattggatatactgattacagtgcaaacgccaattacaaccccgccctcaagggtcgagtcaccatgtcagtagacacgtccacgaaccggttcttcctggaagtgaactctgtgacggctgcggacacggccgtgtatttttgtgcgagaggaagggagtgggaactggccaactggggccagggagccctggtcaccgtctcgtca

SEQ ID NO: 6834 - DNA, 283 bp, Homo sapiens
  source 1..283: mol_type = other DNA
tagtgtctctggtgtctccgtcgggactcatttctggaactggatccggcagcccccagggcagggactggagtggattggatatactgattacagtgcaaacgccaattacaaccccgccctcaagggtcgagtcaccatgtcagtagacacgtccacgaaccggttcttcctgaaagtgaactctgtgacggctgcggacacggccgtgtatttttgtgcgagaggaagggagtgggaactggccaactggggccagggagccctggtcaccgtctcgtca

SEQ ID NO: 6835 - DNA, 283 bp, Homo sapiens
  source 1..283: mol_type = other DNA
tagtgtctctggtgtctccgtcgggactcatttctggagctggatccggcagcccccagggcagggactggagtggattggatatactgattacagtgcaaacggcaattacaaccccgccctcaagggtcgagtcaccatgtcagaagacacgtccacgaaccagttcttcctgaaagtgaactctgtgacggctgcggacacggccgtgtattattgtgcgagaggaagggagtgggaactggccaactggggccagggagccctggtcaccgtctcgtca

SEQ ID NO: 6836 - DNA, 310 bp, Homo sapiens
  source 1..310: mol_type = other DNA
tgcagcctctggattcacctttagcagctatgccatgagctgggtccgcctgactccagggaagggactggagtgggtctcttctattagtggcagtggtgatagcacatactacgcagactccgtgaagggccggttcaccatctccagagacaattccaagaacacggtatatctgcaaatgaacaacctgagagtcgacgacacggccgtatatcactgtacgaaagggactctaccatattgtactagtggtagatgctacccctttgactactggggccagggaaccctggtcaccgtctcctca

SEQ ID NO: 6837 - DNA, 310 bp, Homo sapiens
  source 1..310: mol_type = other DNA
tgcagcctctggattcacctttagcagctatgccatgacctgggtccgccagactccagggaaggggctggagtgggtctcagctattactaatagtggtgataactcagtctacgcagactccgtgaagggccggttcaccatgtccagagacaattccaagaacacactgtatctgcaactgaacagcctgagagccgaggacacggccatatattactgtacgaaagggactctaccatattgtactagtggtaggtgctacccctttgactactggggccagggagccctggtcaccgtctcctca

SEQ ID NO: 6838 - DNA, 285 bp, Homo sapiens
  source 1..285: mol_type = other DNA
aagggttcaggatacatctttacaagttattggatcggctgggtgcgccagacgcccgggaaaggcctggagtggatggggatcatctatcctggtgactctgataccagatacagcccgtccttccaaggccaggtcaccttctcagccgacaagtccatcagcaccgcctacttgcagtggagcagcctgaaggcctcggacaccgccatgtattactgtgcgaggcgcagcggtcttacggttgattactggggccagggaaccctggtcaccgtctcctca

SEQ ID NO: 6839 - DNA, 285 bp, Homo sapiens
  source 1..285: mol_type = other DNA
aagggttcaggatacatctttacaagttattggatcggctgggtgcgccagacgcccgggaaaggcctggagtggatggggatcatctatcctggtgactctgataccagatacagcccgtccttccaaggccaggtcaccttctcagccgacaagtccatcagcaccgcctacttgcagtggagcagcctgaaggcctcggacaccgccatgtattactgtgcgaggcgcagcggtcttacggttgattactggggccagggaaccctagtcaccgtctcctca

SEQ ID NO: 6840 - DNA, 285 bp, Homo sapiens
  source 1..285: mol_type = other DNA
aagggttttggatacaactttgccaactactggatcggctgggtgcgccagatgcccgggataggcctggagtggatggggatcatctatcctggtgactctgataccacatacagcccgtccttccaaggccaggtcaccatgtcagccgacaagtccatcagcaccgcctacctgcagtggagtagtctgaaggcctcggacaccgccatgtattactgtgcgcgacgatcggggttgaccgttgactactggggccagggaaccctggtcaccgtctcctca

SEQ ID NO: 6841 - DNA, 292 bp, Homo sapiens
  source 1..292: mol_type = other DNA
tgcagcctctggattcacctttagcagctatgccatgagctgggtccgccaggctccagggaaggggctggagtgggtctcagctattagtggtagtggtggtagcacatactacgcagactccgtgaagggccggttcaccatctccagagacaattccaagaacacgctgtatctgcaaatgaacagcctgagagccgaggacacggccgtatattactgtgcgaaagaggggtatagcagctcgccctttgactactggggccagggaaccctggtcaccgtctcctca

SEQ ID NO: 6842 - DNA, 292 bp, Homo sapiens
  source 1..292: mol_type = other DNA
tgcagcctctggattcacctttagcagctatgccatgagctgggtccgccaggctccagggaaggggctggagtgggtctcagctattagtggtagtggtggtagcacatactacgcagactccgtgaagggccggttcaccatctccagagacaattccaagaacacgctgtatctgcaaatgaacagcctgagagctgaggacacggctgtgtattactgtgcgaaagaggggtatagcagcagcccctttgactactggggccagggaaccctggtcaccgtctcctca

SEQ ID NO: 6843 - DNA, 298 bp, Homo sapiens
  source 1..298: mol_type = other DNA
tgcagcctctggattcacctttagcagctatgccatgagctgggtccgccaggctccagggaaggggctggagtgggtctcagctattagtggtggtggtggtagcacattctacgcagactccgtgaagggccggctcaccatctccagagacaattccaagaacacggtgtatctgcaaatgaacagcctgagagccgaggacacggccgtatattactgtgcgaaaggcgggggcagctcctactcctactacatggacgtctggggcgaagggaccacggtcaccgtctcctca

SEQ ID NO: 6844 - DNA, 298 bp, Homo sapiens
  source 1..298: mol_type = other DNA
tgcagcctccggattcacctttagcagctatgccatgtcctgggtccgccaggctccagggaaggggctggagtgggtcttagtcattactggtagtggtgatactacatactatgcagactccgtgaagggccggttcaccatctccagagacaattccaagaacacgctgtatctgcaaatgaacagcctgagagccgaggacacggccgtatattactgtgcgaaaggggggggatcgtcctattcgtattacatggacgtctggggcaaagggaccacggtcaccgtctcctca

SEQ ID NO: 6845 - DNA, 286 bp, Homo sapiens
  source 1..286: mol_type = other DNA
tgcagcctctggattcacctttagtagctattggatgaactgggtccgccaggctccagggaaggggctggagtgggtggccaacataaagcaagatggaagtgagaaatcctatgtggactctgtgaagggccgattcaccatctccagagacaacgccaagagctcactgtatctgcaaatgaacagcctgagagccgaggacacggctgtgttttactgtgcgagagatcgcggggggggctttgactcctggggccagggaaccctggtcaccgtctcctca

SEQ ID NO: 6846 - DNA, 286 bp, Homo sapiens
  source 1..286: mol_type = other DNA
tgcagcctctgatttcccctttagcatctattggatgaattgggtccgccaggctccagggaaggggctggagtgggtggccaacataaagccagatggaactgagatgtactatatggactctgtgaagggccgattcaccatctccagagacaacgccgggaactcactgtttctgcaaatgaacaccctgagagtcgaagacacggccgtctattactgtgcgagagatcgtggtgggggatttgactcctggggccggggaaccctggtcaccgtctcctca

SEQ ID NO: 6847 - DNA, 298 bp, Homo sapiens
  source 1..298: mol_type = other DNA
tgcagcctctggattcacctttagcaactatgccatgagctgggtccgccaggctccagggaaggggctggagtgggtctcatttatccgtggtggtggtggtgtgacagcctactcagactccgtgaagggtcgcttcaccatctccagagacaattccaagaacacgctgtatttgcacatgaacagcctgagagccgaggacacggccctgtattattgtgcgaaatcgtcttcgagctacggaaatgatgcttttgatgtctggggccaagggacaatggtcaccgtctcttca

SEQ ID NO: 6848 - DNA, 298 bp, Homo sapiens
  source 1..298: mol_type = other DNA
tgcagcctctggattcacctttggcgactttgccatgagctgggtccgcctggctccagggaaggggctggagtgggtctcttatattaagggtggtggaggtaactcattttacggagactccgtgaagggccgcttcgccatctccagagacaattccaagaacacgctgtttctgcaaatgaacgacctgagagccgaggacacggccgtatactattgtgccaagtcgagcagttcgtacgggaatgatgcctttgatgtctggggccaagggacaatggtcaccgtctcttca

SEQ ID NO: 6849 - DNA, 298 bp, Homo sapiens
  source 1..298: mol_type = other DNA
tgcagcctctgggttcacctttggcgactttgccatgagctgggtccgcctggctccagggaaggggctggagtgggtctcatatattaaaggaggtggtggtaacacattctacgtagactccgtgaagggccggttcgccatctccagagacaattccaaggacacgctgtttctgcaaatgaacagcctgagagccgaggacacggccgtatattactgtgccaagtcgagcagctcgtacgggaatgatgcatttgatgtctggggccaagggacaatggtcaccgtctcgtca

SEQ ID NO: 6850 - DNA, 298 bp, Homo sapiens
  source 1..298: mol_type = other DNA
tgcagcctctggattcacctttggcgactttgccatgagctgggtccgcctggctccagggaaggggctggagtgggtctcttatattaagggtggtggaggtaactcattttacggagactccgtgaagggccgcttcgccatctccagagacaattccaagaacacgctgtttctgcaaatgaacgacctgagagccgaggacacggccgtatactattgtgccaagtcgagcagttcgtacgggaatgatgcctttgatgtccggggccaagggacaatggtcaccgtctcttca

SEQ ID NO: 6851 - DNA, 298 bp, Homo sapiens; identical to SEQ ID NO: 6848
  source 1..298: mol_type = other DNA

SEQ ID NO: 6852 - DNA, 298 bp, Homo sapiens
  source 1..298: mol_type = other DNA
tgcagcctctggattcacctttggcgactttgccatgagctgggtccgcctggctccagggaaggggctggagtgggtctcttatattaagggtggtggaggtaactcattttacggagactccgtgaagggccgcttcgccatctccagagacaattccaagaacacgctgtttctgcaaatgaacgacctgagggccgaggacacggccgtatactattgtgccaagtcgagcagttcgtacgggaatgatgcctttgatgtctggggccaagggacaatggtcaccgtctcttca

SEQ ID NO: 6853 - DNA, 298 bp, Homo sapiens
  source 1..298: mol_type = other DNA
tgcagcctctggattcacctttggcgactttgccatgagctgggtccgcctggctccagggaaggggctggagtgggtctcttatattaagggtggtggaggtaactcattttacggagactccgtgaagggccgcttcgccatctccagagacaattccaagaacacgctgtttctgcaaatgaacgacctgagagccgaggacacggccgtatactattgtgccaagtcgagcagttcgtacgggaatgatgcctttgatgtctggggccaagggacaatggtcaccgtctcctca

SEQ ID NO: 6854 - DNA, 298 bp, Homo sapiens
  source 1..298: mol_type = other DNA
tgcagcctctggattcacctttgacaactatgccatgagctgggttcgccaggctccagggaaggggctggagtgggtctcatatataagtggtggtggtgctaagagattctacgcagactccgtgaggggccggttcaccatctcccgagacaattccaagaacaccctgtatctacaaatggacagcctgagagccgaggactcggccgtatattactgtgcgaaatcgagcagctcctacgggaacgatgcttttgatgtctggggccgagggacaatggtcaccgtctcttca

SEQ ID NO: 6855 - DNA, 298 bp, Homo sapiens
  source 1..298: mol_type = other DNA
tgcagcctctggattcgccttcggcagctatgccatgagctgggtccgccaggctccagggaaggggctggaatgggtctcatatgttagaggtggtggtgccaacgcaggctacgcagactccgtcaggggccggttcaccatctccagagacaattccaagaatacactgtatctgcaaatgaacagcctaagagccgaggacacggccgtatattactgtgcgaaatcgtcttcgagctacggtaacgatgcttttgatgtctggggccaagggacaatggtcaccgtctcttca

SEQ ID NO: 6856 - DNA, 295 bp, Homo sapiens
  source 1..295: mol_type = other DNA
tccagcccctggattcacctttggcaccttttccatgagctgggtccgccaggctccaggaaaggggctggagtgggtctcaactattagtggtagtggtggtggcacatactacgcagacgccgtgaagggccggttcaccatctccagagacaattccaagaacacactgtatctgcagatgaacagcctgagaggcgaggacacggccctatattactgtgcgaaaccagtgattggtacctactggtacttcgatctctggggccgtggcaccctggtcactgtctcctca

SEQ ID NO: 6857 - DNA, 295 bp, Homo sapiens
  source 1..295: mol_type = other DNA
tccagcctctggattcacctttggcaccttttccatgagctgggtccgccaggctccaggaaaggggctggagtgggtctcaactattagtggtagtggtggtggcacatactacgcagacgccgtgaagggccggttcaccatctccagagacaattccaagaacacactgtatctgcagatgaacagcctgagaggcgaggacacggccctatattactgtgcgaaaccagtgattggtacctactggtacttcgatctctggggccgtggcaccctggtcactgtctcctca

SEQ ID NO: 6858 - DNA, 295 bp, Homo sapiens
  source 1..295: mol_type = other DNA
tgcagcctctggattcacctttagcagctatgccatgagctgggtccgccaggctccagggaaggggctggagtgggtctcaactattagtggtagtggtgatggcacatactacacagactccgtgaagggccggttcaccatctccagagacaattccaagaatacgctgtatctgcaaatgaacagcctgagagccgacgacacggccgtatattactgtgcgaaacctgtgattggtacctactggtacttcgatctctggggccgtggcaccctggtcactgtctcctca

SEQ ID NO: 6859 - DNA, 271 bp, Homo sapiens
  source 1..271: mol_type = other DNA
tgcagcctctggattcaccgtcagtaacaactacatgagctgggtccgccaggctccagggaaggggctggagtgggtctcagttatttatagcggtggtagcacatactacgcagactccgtgaagggcagattcaccatctccagagacaattccaagaacacgctgtatcttcaaatgaacagcctgagagccgaggacacggctgtgtattactgtgtgagagatacgggctactggggccagggaaccctggtcaccgtctcctca

SEQ ID NO: 6860 - DNA, 271 bp, Homo sapiens
  source 1..271: mol_type = other DNA
tgcagcctctggattcatcgtcagtagcaactacatgagttgggtccgccaggctccagggaaggggctggagtgggtctcaattattcatagtgatggtactacacactacgcagactccgtgaagggcagattcaccatctctagagacaattccaagaacacgctgtatcttcaaatgaacagcctgagaaccgaggacacggctgtgtattactgtgtgagagatacggggtactggggccagggaaccctggtcaccgtctcctca

SEQ ID NO: 6861 - DNA, 283 bp, Homo sapiens
  source 1..283: mol_type = other DNA
tgcagcctctggattcacctttagtagctatgccatgacctgggtccgccaggctccagggaaggggctggaatgcgtctcagccatgagtagccgtggtgataacacctacaacgcagactccgtgaagggccggttcaccatctccagagacaattccaagaacacactgtatctgcaaatgaacagcctgagagccgaggacacggccgtatattactgtgcgaagaggggcgactggttcgattcctggggccagggaaccctggtcaccgtctcctca

SEQ ID NO: 6862 - DNA, 283 bp, Homo sapiens
  source 1..283: mol_type = other DNA
tgcagcctctggattcacctttagcagctatgccatgagctgggtccgccaggctccagggaaggggctggagtgggtctcaactatcagtggtagtggtggtggcacatactacgcagactccgtgaagggccggttcaccatctccagagacaattccaagaacacgctgtatcttcaactgaacagcctgagagccggggacacggccgtatattgctgtgcgaaacgcggggactggtttgactcctggggccagggaaccctggtcaccgtctcctca

SEQ ID NO: 6863 - DNA, 289 bp, Homo sapiens
  source 1..289: mol_type = other DNA
tgcagcctctggcttcaccttcagtagctatagcatgaactgggtccgccaggctccagggaaggggctggagtgggtttcatacattagtagtagtaataccatatactacgcagactctgtgaagggccgattcaccatctccagagacaacgccaagaactcactgtatctgcaaatgaacagcctgagagccgaggacacggctgtgtattactgtgcgagagatcggggagatggttacatctttgactactggggccagggaaccctggtcaccgtctcctca

SEQ ID NO: 6864 - DNA, 292 bp, Homo sapiens
  source 1..292: mol_type = other DNA
tgcagcctctggattctcctttagtacttataagatgaactgggtccgccaggctccagggaaggggctggaatgggttgcatacattaatttcactagtactcccaaatactacgcagactctgtgaagggccgattcaccatctccagagacaatgccaagaactcactgtacctgcaaatgagcggcctgagagacgaagacacggctgtgtattactgtgcgagagatcggggtgatggctacatttttgactactggggccagggaaccctggtcaccgtctcctca

SEQ ID NO: 6865 - DNA, 301 bp, Homo sapiens
  source 1..301: mol_type = other DNA
tgcagcgtctggattcgtcttcagtacctatggcattcactgggcccgccaggctccaggcaaggggctggagtgggtggcagctgtatcgtatgaaggaaggaataaatggtatgcagactccgtgaagggccgattcaccacctccagagacgattccaagaacacggtgtatttgcaaatgaatagcctgagagccgaggacacggctgtgtatcactgtgcgagggatcgggatactagcggtcattatgggtggctcgacccctggggccagggaaccctggtcaccgtcgcctca

SEQ ID NO: 6866 - DNA, 301 bp, Homo sapiens
  source 1..301: mol_type = other DNA
tgcagcgtctggattcaccctcagtgactatggcatgcactgggtccgccaggctccaggcaaggggctggagtgggtggtagttatatactatcatggaagtaaggaattctatgcggactccgtgaagggccgattcaccatctccagagacatttccaagaacacggtgtttctgcaaatgaacagcctgagagccgaggacacggctgtgtattactgtgcgagagatagggatactagtggtcattacggctggttggacccctggggccagggaaccctggtcaccgtctcctca

SEQ ID NO: 6867 - DNA, 301 bp, Homo sapiens
  source 1..301: mol_type = other DNA
tgcagcgtctggattcgtcttcagttcctttggcattcactgggtccgccaggctccgggcaaggggctggagtgggtggcagtagtaacgtatgatggaaggaatcaatggtatgcagactccgtgaagggccgattgaccacctccagagaccagtccaagaatacggtgtatttgcaaatgaatagcctgagagtcgaggacacggctgtgtatcactgtgcgagggatcgggatactagcggtcactatgggtggctcgacccctggggccagggaaccctggtcaccgtcgcctca

SEQ ID NO: 6868 - DNA, 292 bp, Homo sapiens
  source 1..292: mol_type = other DNA
tgcagcctctggattcacctttagtgactattggatgagctgggtccgtcaggctccagggaaggggctggagtgggtggccaacataaatcacggtggaagtgagaagtattatgtggactctgtgaagggccgattcaccatctccagagacaacgccgaaaactcactgtatctgcaaatgaacagcctgagagtcgaggacacggctgtgtattactgtgcgagagtggcgggtagcagtggctgtccaggctactggggccagggaaccctggtcaccgtctcctca

SEQ ID NO: 6869 - DNA, 292 bp, Homo sapiens
  source 1..292: mol_type = other DNA
tgaagcctctggattcattttcagtaattattggatgagttgggtccgccaggctcctggaaaggggctggaatgggtggccaatataagacaagatggaattgagaaatactatgtggactctgtgaagggccgattcaccatttccagagacaacgccaagaactcactgtatttgcaaatgaacagcctgacagtcgaagacacggctctttattactgcgcgagagtggcggggagcagtggctgccccggctactggggccagggaaccctggtcaccgtcccctca

SEQ ID NO: 6870 - DNA, 283 bp, Homo sapiens
  source 1..283: mol_type = other DNA
tgcagcctctggattcacctttacagcctattggatgacctgggtccgccaggctccagggaaggggctggagtgggtggccaacataaaccaggatggaagtgagaagcactatgtggactctgtgaagggccgattcaccatctccagagacaacgccaacaactcactgtatctgctaatgaacagcctgagagtcgaagacacggctgtctattattgtctgcgagggggtgagagctacggctactggggccagggaaccctggtcgccgtctcctca

SEQ ID NO: 6871 - DNA, 283 bp, Homo sapiens
  source 1..283: mol_type = other DNA
tgcagcctctggattctccttgagtacctattggatgacttgggtccgccaggctccaggggaggggctggagtgggtggccaacataaatcaagatggaaatgagagacactatgtggactctgtgaagggccgattcaccatctccagagacaacgccaggaactcaatgtatctgcaaatgaacagcctgagagccgaggacacggctgtctattattgtctgagaggaggtgagagctacggctactggggccagggaaccctggtcaccgtctcctca

SEQ ID NO: 6872 - DNA, 292 bp, Homo sapiens
  source 1..292: mol_type = other DNA
cactgtctctggtggctccatcagcagtagtacttactactggggctggatccgccagcccccagggaaggggctagagtggattgcgaatatctattatagtggtgccacctactacaacccgtccctcaagagtcgagtcaccatatccgtagacacgtccaagaaccagttctccctgaagctgagctctgtgaccgccgcagacacggctgtgtattactgtgcgaggcgttatggttcaggcccttttgactactggggccagggaaccctggtcaccgtctcctca

SEQ ID NO: 6873 - DNA, 292 bp, Homo sapiens
  source 1..292: mol_type = other DNA
cactgtctctggcggccccatcatcggaacttattactactggggctgggtccgccagtccccagggaagggcctggagttcattgggattatctatcataatgggaacacctactacagcccgtccctcaggagtcgagtcaccatgtccgtagacacgtccaagagccagttctccctggagctgaggtctgtgaccgccgcagacacggctgtgtattactgtgcgagacgatatggttcggggccctttgactactggggccagggaaacatggtcatcgtctcctca

SEQ ID NO: 6874 - DNA, 292 bp, Homo sapiens
  source 1..292: mol_type = other DNA
cactgtctctggtggctccatcaccagtagtagttcctactgggcctggatccgccagcccccagggaaggggctggagtggattgggagtatctattatagtgggagcacctactacaacccgtccctcaagagtcgagtcaccatatccgtagacacgtccaagaaccacttctccctgaagctgagctctgtgaccgccgcagacaccactgtgtattactgtgcgagacgttatggttcggggccctttgactactggggccagggaaccctggtcaccgtctcctca

SEQ ID NO: 6875 - DNA, 292 bp, Homo sapiens; identical to SEQ ID NO: 6874
  source 1..292: mol_type = other DNA

SEQ ID NO: 6876 - DNA, 292 bp, Homo sapiens
  source 1..292: mol_type = other DNA
cattgtctctggtggctccatcagtggtagtacttactactggggctggatccgtcagcccccagggaaggggctggagtggattgggagtatgtcttatagtgggagcacctactacaacccgtccctcaagagtcgagtcaccatatccgtagacacgtccaacaaccagttctccctgaaggtgaactctatgaccgccgcagacacggctgtgtattactgtgcgagacggtatggttcggggccctttgactactggggccagggaaccctggtcatcgtctcctca

SEQ ID NO: 6877 - DNA, 297 bp, Homo sapiens
  source 1..297: mol_type = other DNA
aaggcttctggatacagctttaccagctactggatcggctgggtgcgccagatgcccgggaaagacttggagtggatggggctcatctatcctggtgactctgataccagagacagctcgtccttccaaggccaggtcaccatgtcagtcgacaagtccatcagcaccgcctatctgcagtggagcagcctgaaggcctcggacaccgccatatattactgtgcgagactaaggggcgcctataaccatgaagactttgactactggggccagggaaccgtggtcaccgtctcctca

SEQ ID NO: 6878 - DNA, 298 bp, Homo sapiens
  source 1..298: mol_type = other DNA
caagggttctggatactcctttagcacctactggatcggctgggtgcgccagatgcccgggaaaggcctggagtggctggggctcatctatcctggtgactctgataccagagacaacccgtccttccagggccaggtcaccctctcagtcgacaagtccatcagcaccgcctacctgcagtggagcagcctgaaggcctcggacaccgccatgtattactgtgcgagacttagaggtgcctacaatcacgaggactttgactactggggccagggaaccctggtcaccgtctcctca

SEQ ID NO: 6879 - DNA, 298 bp, Homo sapiens
  source 1..298: mol_type = other DNA
tgcagcctctggattcccctttagcagctatgccatgagctgggtccgccaggctccagggaaggggctggagtgggtctcaggtgttagtgatagtggtggaagcacatactacgcagactccgtgaagggccggttcaccatctccagagacaattccaagaacacagtgtatctgcaaatgaacaccctgagagccgaggacacggccgtattttactgtgcgaaatcgggtggtagccgtcactactacggtttggacgtctggggtcaagggaccacggtcaccgtctcctca

SEQ ID NO: 6880 - DNA, 298 bp, Homo sapiens
  source 1..298: mol_type = other DNA
tgcagcctctggattcccctttagcagctatgccatgagctgggtccgccaggctccagggaaggggctggagtgggtctcaggtgttagtgatagtggtggaagcacatactacgcagactccgtgaagggccggttcaccatctccagagacaattccaagaacacagtgtatctgcaaatgaacaccctgagagccgaggacacggccgtattttactgtgcgaaatcgggtggtagccgtcactactacggtttggacgtctggggccaagggaccacggtcaccgtctcctca

SEQ ID NO: 6881 - DNA, 283 bp, Homo sapiens
  source 1..283: mol_type = other DNA
tgtagcctctggattcaccttcaggacctataccatgaactgggtccgccaggctccagggaagaggctggagtggatttcatacatcaatactggtagtagtaccatatactacgcagactctgtgaagggccgattcaccatctccagagacaacgccaagaactcactgtatctgcaaatgaacagcctgagagccgaggacacggctgtgtattactgtgcgagagatcgaactgcttttgatatctggggcccagggacaatggtcaccgtctcttta

SEQ ID NO: 6882 - DNA, 283 bp, Homo sapiens
  source 1..283: mol_type = other DNA
tgcagcctctggattcaccttcagtaggtacagcatgaactgggtccgccaggctccagggaaggggctggagtggatttcatacattagtcctagtagtggcaccatatactacgcagactctgtgaagggccgattcaccatatccagagacaatgccaagaactcactgtatctgcaaatgaacagcctgaaagatgaggacacggctgtgtattactgtgcgagagatcgaactgcttttgatatctggggccaagggacaatggtcaccgtctcttca

SEQ ID NO: 6883 - DNA, 274 bp, Homo sapiens
  source 1..274: mol_type = other DNA
tgtagactccggattcacgtttagtaactcttggatgaactgggtccgccaggctccagggaaggggctggagtgggtggccaacataaagccagacggaactcagacatcctatgtggactctgtgaagggccgattcaccatctccagagacaacgccaagaactcactatatctgcaaatgaacagcctgcgagccgaggacacggctctatattactgttcgagaggtctcgatccctggggccagggaaccctggtcaccgtatcgtca

SEQ ID NO: 6884 - DNA, 274 bp, Homo sapiens
  source 1..274: mol_type = other DNA
tgtagcctctggattcacttttagtactcaatggatgagctgggtccgccaggctccagggaaggggctggagtgggtggccaacataaagccagacggaactgaggagttctatttggactctgtgaagggccgactcaccatctccagagacaacgccctcaacacactttatcttcaaatgaacagcctgcgggccgaggacacggctgtttattactgttcgagagggctcgacccttggggccagggaacccttgtcagcgtctcctca

SEQ ID NO: 6885 - DNA, 274 bp, Homo sapiens
  source 1..274: mol_type = other DNA
tgtagcctctggattcacctttagtagtcaatggatgagctgggtccgccaggctccagggaaggggctggagtgggtggccaacataaagccagacggaagtgacaagtactatttggactctgtgaagggccgactcaccatctccagagacaacgcccgcaacacactctatctgcaaatgaacagcctgagagccgaagacacggctatatattactgttccagagggctcgacccctggggccagggaaccctggtcgccgtctcctca

SEQ ID NO: 6886 - DNA, 298 bp, Homo sapiens
  source 1..298: mol_type = other DNA
tgcagcctctggattcaccttcagtgactacgacatgcactgggtccgccaagcaacaggaacaggtctggaatgggtctcagcaattggcattcgtgatgacacacattattcagactccgtggagggccgattcaccatctccagagaaaatgccaagaacaccttgtatcttcaaatgaacagtctgagagtcggggacacgggtgtatattactgtgtaagaggcggtatacaagtgtccggtattgatgagtttgacatatggggccaagggacgatggtcaccgtctctcca

SEQ ID NO: 6887 - DNA, 298 bp, Homo sapiens; identical to SEQ ID NO: 6886
  source 1..298: mol_type = other DNA

SEQ ID NO: 6888 - DNA, 298 bp, Homo sapiens
  source 1..298: mol_type = other DNA
tgcagcctctggattcaccttcagtgactacgacatgcactggatccgccaagcaacaggaacaggtctggaatgggtctcagcaattggcattcgtgatgacacacattattcagactccgtggagggccgattcaccatctccagagaaaatgccaagaacaccttgtatcttcaaatgaacagtctgagagtcggggacacgggtgtatattactgtgtaagaggcggtatacaagtgtccggtattgatgagtttgacatatggggccaagggacgatggtcaccgtctctcca

SEQ ID NO: 6889 - DNA, 298 bp, Homo sapiens
  source 1..298: mol_type = other DNA
tgcagcctctggattcaccttcagtgactacgacatgcactgggtccgccaagcaacaggaacaggtctggaatgggtctcagcaattggcattcgtgatgacacacattattcagactccgtggagggccgattcaccatctccagagaaaatgccaagaacaccttgtatcttcaaatgaacagtctgagagtcggggacacgggtgtatattattgtgtaagaggcggtatacaagtgtccggtattgatgagtttgacatatggggccaagggacaatggtcaccgtctctcca

SEQ ID NO: 6890 - DNA, 298 bp, Homo sapiens
  source 1..298: mol_type = other DNA
tgcagcctctggattcacattcaggaactatgacatacactgggtccgccaagttacaggaagacgtctggagtgggtctcagctattggaactggcggtgatacacactatgcagactccgtgaagggccgacacattatttccagagaaaattccaagaattctgtgtatcttcaaatgaacagtttgagagccgaggacacggctgtatattattgcgtaagaggggggatacaagtgtctggtattgatgaatttgatatctggggccaagggacaacggtcaccgtctcttca

SEQ ID NO: 6891 - DNA, 298 bp, Homo sapiens
  source 1..298: mol_type = other DNA
tgcagcctctggattcacattcagcaactatgacatacactgggtccgccaagttacaggaagacgtctggagtgggtctcagctattggaactggcggtgatacacactatgcagactccgtgaagggccgacacattatctccagagaaaattccaagaattctgtgtatcttcaaatgaacagtttgagagccgaggacacggctgtatattattgcgtaagaggggggatacaagtgtctggtattgatgaatttgatatctggggccaagggacaacggtcaccgtctcttca

SEQ ID NO: 6892 - DNA, 286 bp, Homo sapiens
  source 1..286: mol_type = other DNA
tgcagcctccggattcaccttcagagcctactggatgcactgggtccgccaagctccagggaaggggctggtgtgggtctcacgtattgacaacgatggaggtatcacaaactacgcggactccgtgaagggccgattcaccatctacagagacaacgccaagaacatgctgtttctgcaaatgaacaatctgagagtcgaggacacggctgtatattattgtacaagagacattggtggaaggtacggcttctggggccagggaaccctggtcaccgtctcctca

SEQ ID NO: 6893 - DNA, 286 bp, Homo sapiens
  source 1..286: mol_type = other DNA
tacagcctctggttacaccttcagtaccttctggatgcactgggtccgccaaaccccagggaaggggctggtgtgggtctcacgtattgatgaatctggaagtatcacaaactacgcggactccgtgaagggccgattcaccatctacagagacaacgccaagaacacactgtatctccaaatgaacagtctgagcgtcgaggacacggctgtgtattattgtacaagagacattggtgggagatacggcttctggggcccgggaaccctggtcgccgtctcctca

SEQ ID NO: 6894 - DNA, 286 bp, Homo sapiens
  source 1..286: mol_type = other DNA
tacagcctctggtttcaccttcagaacctactggatgcactgggtccgccaaactccggggaaggggctggtgtgggtctcacgtattgataatgatggaagtatcacaaactacgcggactccgtgaagggccgattcaccatctacagagacaacgccaagaatacgctgtatctgcaaatgaacagtctgagcgtcgaggacacggctatttattattgtacaagagacattggtgggaggtacggcttctggggcccgggaaccctggtcaccgtctcctca

SEQ ID NO: 6895 - DNA, 286 bp, Homo sapiens
  source 1..286: mol_type = other DNA
tacagcctctggatacagcttcagtacctactggatgcactgggtccgccaagttccagggaaggggccgatatgggtctcacgtattgatactgatggaagtgtcacagactacgcggactccgtgaagggccgattcaccatctacagagacaacgccaagaacacgctgtatctgcaaatgaacagtctgagagtcgaggacacggctgtctattattgtacaagagacattggtgggaggtacggcttctggggccggggaaccctggtcaccgtctcctca

SEQ ID NO: 6896 - DNA, 286 bp, Homo sapiens
  source 1..286: mol_type = other DNA
tgtaggctctggatacaccttcagcagctattggatgcactgggtccgccaggctccagggaaggggctggagtgggtctcccgcattgatgaacatgggaggatcacaacatacgcggactccgtgaagggccgattcaccatatacagagacaactccgggaacactttgtatctgcaaatgaatagtctgagagccgacgattcggctgtatatttctgtacaagagacattggtgggagatatggcttctggggccagggaaccctggtcaccgtctcctca

SEQ ID NO: 6897 - DNA, 286 bp, Homo sapiens; identical to SEQ ID NO: 6896
  source 1..286: mol_type = other DNA

SEQ ID NO: 6898 - DNA, 286 bp, Homo sapiens
  source 1..286: mol_type = other DNA
tgtaggctctggatacaccttcagcagctattggatgcactgggtccgccaggctccagggaaggggctggagtgggtctcccgtattgatgaacatgggaggatcacaacatacgcggactccgtgaagggccgattcaccatatacagagacaactccgggaacactttgtatctgcaaatgaatagtctgagagccgacgattcggctgtatatttctgtacaagagacattggtgggagatatggcttctggggccagggaaccctggtcaccgtctcctca

SEQ ID NO: 6899 - DNA, 301 bp, Homo sapiens
  source 1..301: mol_type = other DNA
tgcagcctctgaattcaccctcagtagcttctgcatgcactgggtccgccaagttccagggaagggactcgagtgggtcgcacgtatttgtcatgatgcgagacgcacaggctacgcggagtccgtgaagggccgattctccatctccagagacagcgccaggaacacgttgtatctgcaaatggactatctgagcggcgacgacacggccgtgtacttttgtgtaagagatcctggcggcgaccggcacgactggtacttcgatctctggggtggcggcaccctggtcactgtctcctca

SEQ ID NO: 6900 - DNA, 301 bp, Homo sapiens
  source 1..301: mol_type = other DNA
tgcagcctctgaattcaccctcagtagcttctgcatgcactgggtccgccaagttccagggaagggactcgagtgggtcgcacgtatttgtcatgatgtgagacgcacaggctacgcggagtccgtgaagggccgattcaccatctccagagacagcgccaacaacacgttgtctctggaaatgaactatctgagaggcgacgacacggctgcatacttttgtgtaagagatcctggcggcgaccggcacgactggtacttcgatctctggggttgcggcaccctggtcactgtctcatca

SEQ ID NO: 6901 - DNA, 301 bp, Homo sapiens
  source 1..301: mol_type = other DNA
tatagtctctgaatcactctctagtgagtcctgcatacattgggtccgccaagctccagggaaggggctggtttggattacacgcatttgtgaagataggagacgcacaaattacgggggctccgtgaagggccgatacaccatctcccgagacaacgtcaagaatacggtgtttttgcaaatgaacaatctgagagtcgacgacacggctgtatattattgtgtaagagatcctggaggtgaccgtcatgattggtacttcgatctctggggccgtggcaccctggtcactgtctcctca

SEQ ID NO: 6902 - DNA, 301 bp, Homo sapiens
  source 1..301: mol_type = other DNA
tgtagcctctgaatcaccctctagtaggtcctgcatacattgggtccgccaagctccagggaaggggctggtttgggtttcacgcatttgtgctgataggagacgcacaaactacggagactccgtgaagggccgctacatcatctcccgagacaatgtcaagaacacggtgtttctacaaatgaacagtctgagagccgacgacacggctgtatattattgtgtgagagaccctggaggcgaccgtcatgattggtacttcgatctctggggccgtggcaccctggtcactgtctcctca

SEQ ID NO: 6903 - DNA, 301 bp, Homo sapiens
  source 1..301: mol_type = other DNA
tgaagtctctgaagtactctcaagtaggtcctgcatccattgggtccgccaagctccagggaaggggctggtttgggtttcacgcctttgtgctgatgcgagacgcacaaattatggagactccgtgaggggccgctatagcatctcccgagacaatgtcaagaacacggtgtttctgcaaatgaacagtctgagagccgacgacacggctatatattactgtgtgagagaccctggaggcgaccgtcatgattggtatttcgatctctggggccgtggcaccccagtcactgtctcctca

SEQ ID NO: 6904 - DNA, 286 bp, Homo sapiens
  source 1..286: mol_type = other DNA
tgcaggctctgaattcacctttggtgactattggatgaactgggtccgccaggctccagggaaggggctggagtgggtggccaacataaagcaagatggaactgtaaaaaactatgtggactctgtgaacggccgattcaccatcgccagagacaacgccaagaactcactgtttctgcaaatgagcggcctgcgagccgacgacacggccgtgtatttctgtgtgagaggtctaggctggttcttcgatctgtggggccgtggcaccctggtcactgtctcctca

SEQ ID NO: 6905 - DNA, 286 bp, Homo sapiens
  source 1..286: mol_type = other DNA
cgcagcctctcaattcacctttggtgactattggatgaactgggtccgccaggctccagggaaggggctggagtgggtggccaacataaacaaagatggaactgtaaagtactatgtggactctgtgaagggccgattcaccatctccagagacaacgccaagaactcactgtttctgcaaatgagcagcctgagagccgacgacacggccgtgtattactgtgtgagaggtctaggctggttcttcgatctgtggggccgtggcaccctggtcactgtctcctca

SEQ ID NO: 6906 - DNA, 286 bp, Homo sapiens
  source 1..286: mol_type = other DNA
tgcagcctctgaattcacctttggtgactattggatgaactgggtccgccaggctccagggaaggggctggagtgggtggccaacataaacaaagaaggaactgtaaaatattatgtggactctgtgaacggccgattcaccatctccagagacaacgccaagaactcagtttttctgcaaatgagcagcctgagggccgacgacacggccgtgtatttctgtgtgagaggtctaggctggttcttcgatctgtggggccgtggcaccctggtcactgtctcctca

SEQ ID NO: 6907 - DNA, 286 bp, Homo sapiens
  source 1..286: mol_type = other DNA
tgcagcctctggattcacgtttagtgccctttggatgagctgggtccgccaggctccagggaagggtctggagtgggtggcccacgtaaagggagatggaactgtaattaactatgttgagtccgtgaagggtcgattcaccatctccagagacaacgccaagaatatactctatctacaaatgaccagcctgagagccgaagacacggccctctattattgtgtgagaggattggggtggttcttcgatctctggggccgtggcaccctggtcactgtctcctca

SEQ ID NO: 6908 - DNA, 292 bp, Homo sapiens
  source 1..292: mol_type = other DNA
tgaaggctctggattcacgtttaggaactatggcatgagctgggtccgccaggctccagggaaggggctggagtgggtctcaggtattagtgataatggtcgtgacacatactacccagactccctgaagggccggttcaccatctccagagacaattccaagaacacgctgtatctgcaattgaacagcctgagagccgaggacacggccgtatatttctgtgcgaaagaccgcctaaccatagatgcttttgatatctggggccaagggacaatggtcactgtctcttca

SEQ ID NO: 6909 - DNA, 292 bp, Homo sapiens
  source 1..292: mol_type = other DNA
tgtaggctctggattcacctttagaaactatggcatgagctgggtccgccaggctccagggaaggggctggagtgggtctcaggtattagtgataatggtcgtgacacatactacgcagactccgtgaagggccggttcatcatcaccagagacaattccaagaacacgctgtatctgcaaatgaacagccagagagccgaggacacggccgtatatttctgtgcgaaagaccgcctaaccatagatgcttttgatatctggggccaagggacaatggtcactgtctcttca

SEQ ID NO: 6910 - DNA, 292 bp, Homo sapiens
  source 1..292: mol_type = other DNA
tgtaggctctggattcacctttagaaactatggcatgagctgggtccgccaggctccagggaaggggctggagtgggtctcaggtattagtgataatggtcgtgacacatactacgcagactccgtgaagggccggttcatcatcaccagagacaattccaagaacacactgtatctgcaaatgaacagccagagagccgaggacacggccgtatatttctgtgcgaaagaccgcctaaccatagatgcttttgatatctggggccaagggacaatggtcactgtctcttca

SEQ ID NO: 6911 - DNA, 292 bp, Homo sapiens
  source 1..292: mol_type = other DNA
tgcagtctctggattcacgtttagaaactatggcatgagctgggtccgccaggctccagggaaggggctggagtgggtctcaggtattagtgataatggtcgtgacacatactacgcagactccgtgaagggccggttcaccatctccagagacaattccaagaacacgctgtatctgcaaatgaacagcctgagagccgaggacacggccgtatatttctgtgcgaaagaccgcctaaccatagatgcttttgatatctggggccaagggacaatggtcactgtctcttca

SEQ ID NO: 6912 - DNA, 292 bp, Homo sapiens
  source 1..292: mol_type = other DNA
tgcagcctcaggcttcccctttagtagctctggcatgagttgggtccgccaggctccagggaaggggctggagtgggtctcaggtatcagcagtagtggtgagtacacatactacgcagactccgtgaaggggcgggtcaccatctccagagacaattccagggaaatgctgttcctggaaatgaacagcctgagagccgaggacacggccgaatattactgtgcgaaagatcgactcaccatcgatgcttttgatatctggggccaagggacgatggtcaccgtctcttca

SEQ ID NO: 6913 - DNA, 274 bp, Homo sapiens
  source 1..274: mol_type = other DNA
tgcagcctctggattcaccttcactaactactggatgcactgggtccgccaagttccagggaaggggctggtgtgggtttcacgtgttgatcttgatgggagtggcacaagctacgcggactccgtgaggggccgattcaccatgtccagagacaacgccaagaacgcgctgagtctgcaaatgaacagtctgacagtcgacgacacggctgtctattactgtacaaccgtctttgaacactggggccagggaattctggtcaccgtctcctca

SEQ ID NO: 6914 - DNA, 274 bp, Homo sapiens
  source 1..274: mol_type = other DNA
tgcagcctctggaatcacgttcatgaattactggatgcactgggtccgccaagttccagggaaggagctggtatgggtctcaggcattaatagtgatgggagtggaacatattacgcggactccgtgaagggccgattcaccatctccagagacaacgccaagaatacgctgtatctgcaaatgaacagtctgagagccgaggacacggctgtgtattactgcacaaccgtctttgaacactggggccagggagccctggtcaccgtctcctca

SEQ ID NO: 6915 - DNA, 283 bp, Homo sapiens
  source 1..283: mol_type = other DNA
tgcagcctctggaatcagctttagtacccattggatgagctgggtccgccaggcgccagggaaggggctggagtgggtggccaacataaacgaagatgggagtgcgaaatactatggagactctgtgaagggccgattcaccatcgccagagacaacgccaagagttcactgtttctgcaaatggacagcctgagagccgaggacacgggtgtctattattgtgcgagagactcccttggctacgactattggggccagggaagcctggtcaccgtctcctca

SEQ ID NO: 6916 - DNA, 283 bp, Homo sapiens
  source 1..283: mol_type = other DNA
tgtagcctctggattcagcttcacaacccattggatgagttgggtccgcctgactccaggggggggactggagtgggtggccaatataaaggaggatggaagtgcgacatattatgcgggctttgtgggggaccgcttcaccatctccagagacaacgccaaaaattcactgttcctggaaatgaacaacttgcgatccgaagatgcggctgtctattactgtgcgcgagactcccttggctacgactattggggccagggaagccaggtcaccgtctcctca

SEQ ID NO: 6917 - DNA, 283 bp, Homo sapiens
  source 1..283: mol_type = other DNA
tgcaacctctggaatcagctttagtacccattggatgagctgggtccgccaggctccagggaaggggctggagtgggtggccaacataaacgaagatggaagtgcgaaatactatgtggactctgtgaagggccgattcaccatctccagagacaacgccaggagctcactatatctgcaaatgaacaccctgagagccgaggacacggctgtgtattactgtgcgagagatagtctgggttatgactactggggccagggaaccctggtcaccgtctcctca

SEQ ID NO: 6918 - DNA, 283 bp, Homo sapiens
  source 1..283: mol_type = other DNA
tgcaacctctggaatcagctttagtacccattggatgagctgggtccgccaggctccagggaaggggctggagtgggtggccaacataaacgaagatggaagtgcgaaatactatgtggactctgtgaagggccgattcaccatctccagagacaacgccaggagctcactgtatctgcaaatgaacaccctgagagccgaggacacggctgtgtattactgtgcgagagatagtctgggttatgactactggggccagggaaccctggtcaccgtctcctca

SEQ ID NO: 6919 - DNA, 283 bp, Homo sapiens
  source 1..283: mol_type = other DNA
tgcaacctctggaatcagctttagtacccattggatgagctgggtccgccaggctccagggaaggggctggagtgggtggccaacataaacgaagatggaagtgcgaaatactatgtggactctgtgaagggccgattcaccatctccagagacaacgccaggagctcactgtatctgcaaatgaacaccctgagagccgaggacacggctgtgtattattgtgcgagagatagtctgggttatgactactggggccagggaaccctggtcaccgtctcctca

SEQ ID NO: 6920 - DNA, 285 bp, Homo sapiens
  source 1..285: mol_type = other DNA
gcttctggttacacctttagcaactatggtatcagctgggtgcgacaggcccctggacaagggcttgagtggatgggatggatcagcactgacaatggtaagacaatctatacacagaagttccagggcagagtcatcatgaccattgacacatccgcgagcatagcctatatggagctgaggagcctgagatctgacgacacggccatttattactgtgcgagagcgccccaccgggactggttcgacccctggggccagggaaccctggtcaccgtctcctca

SEQ ID NO: 6921 - DNA, 285 bp, Homo sapiens
  source 1..285: mol_type = other DNA
gcttctggttacacctttttgagctatggtatcagctgggtgcgacaggcccctggacaagggcttgagtggttggggtggatcagcactgataatgggaacacaaggtatgcacagaacctccagggcagagtcaccatgaccacagacacatccacgagcaccgcgtacttggagctgaggaccctgaaatctgacgacacggccgtgtattattgtgcgagagccccccatagggactggttcgacccctggggccagggaacccaggtcatcgtatcctca

SEQ ID NO: 6922 - DNA, 286 bp, Homo sapiens
  source 1..286: mol_type = other DNA
tgcagcctctggattcaccttcagtaggttctggatgcactgggtccgccaaacttcaaccaaggggctggtgtgggtcgcacgtactaatgaggatgggacttggataaattacgcggactccgtcaagggccgattcaccatctccagagacaacgccaagaacacgctgtatttgcagatgaacagactgagagtcgaggacacggctctctattactgtgcgacagatctcagtggccgatatgactactggggccagggaaccctggtcaccgtctcctca

SEQ ID NO: 6923 - DNA, 286 bp, Homo sapiens
  source 1..286: mol_type = other DNA
tgcagcctctggattcgccttcagtagctactggatgcactgggtccgccaagttccagggaaggggctggtgtgggtctcacgtattaatgaagatgggagtataacaaactacgcggactccgtgaagggccgattcaccatctccagagacaacgccaagaacacactgtatttgcaaatgaacagtctgagaggcgaagacacggctgtatattactgtgcaacagatcttagtgggaggtatgactactggggccagggaaccctggtcaccgtctcctca

SEQ ID NO: 6924 - DNA, 286 bp, Homo sapiens; identical to SEQ ID NO: 6923
  source 1..286: mol_type = other DNA

SEQ ID NO: 6925 - DNA, 283 bp, Homo sapiens
  source 1..283: mol_type = other DNA
tgcagcctccggatccagcatcggaatggatgccatgcactgggtccgccaggctccggggcaggggctggagtgggtctcaagcattgataagaggggtgatagagcggactacaaagactccgtgaagggccggttcaccatctccagagacaattctaagaatacagtgtatctcacgatggacggcctgagaggcgacgacacggccctttattattgtgtcttgagggggtctgcttttgacatctggggccaagggacaatggtcaccgtctctgca

SEQ ID NO: 6926 - DNA, 283 bp, Homo sapiens
  source 1..283: mol_type = other DNA
tgcggcctccggatccagcatcggcacggatgccatgcactgggtccgccaggctccagggaaggggctggagtgggtctcaagtattagtggcaggggtgatagaacagattacgcagactccgtgaagggacggttctccatctccagagacaattccaagaatgcgctgtatctgtcaatggacggcctgacaggcgacgacacggccgtttattactgtgtcttgaggggctccgcttttgacatctggggccacgggacagtggtcaccgtctcttca

SEQ ID NO: 6927 - DNA, 283 bp, Homo sapiens
  source 1..283: mol_type = other DNA
tgcggcctccggatccagcatcggcatggatgccatgcactgggtccgccaggctccagggaaggggctggaatgggtctcaagtataagtgacaggggtgatagaattgtgtacgcagactccgtgaagggccggttctccatctctagagacaattccaagaatactctctatctgtcgatggacggcctgacaggcgacgacacggccgtttattactgtgtcttgaggggctctgcttttgatatctggggccaggggacagtggtcaccgtctcttca

SEQ ID NO: 6928 - DNA, 283 bp, Homo sapiens
  source 1..283: mol_type = other DNA
tgcagcctccggactcagcatcggcttggatgccatgcactgggttcgccagggtccagggaaggggctggagtgggtctcaagtatcagtggcaggggtgaaagaacagactacgcaggctccgtgaagggtcggttcatcgtctctagagacaattccaagaataagctatttctgacaatggacggcctgagaggcgacgacacggccgtatacttttgtgtcctgaggggatctgcatttgatatctggggccaagggacagtggtcaccgtctcttca

SEQ ID NO: 6929 - DNA, 283 bp, Homo sapiens; identical to SEQ ID NO: 6926
  source 1..283: mol_type = other DNA

SEQ ID NO: 6930 - DNA, 283 bp, Homo sapiens
  source 1..283: mol_type = other DNA
tgcggcctccggatccagcatcggcacggatgccatgcactgggtccgccaggctccagggaaggggctggagtgggtctcaagtattagtgacaggggtgatagaacaggttacgcagactccgtgaagggccggttctccatctccagagacaattccaagaatgcactgtatctgtcgatggagggcctgacaggcgacgacacggccgtttattactgtgtcttgaggggctccgcttttgacatctggggccacgggacagtggtcaccgtctcttca

SEQ ID NO: 6931 - DNA, 283 bp, Homo sapiens
  source 1..283: mol_type = other DNA
tgcagcatccggatccagcatcgccatggatgtcatgcattgggttcgccagggcccggggaaggggctggagtgggtctcaagtataagtggcgggggtgataggagagactacgcagactccgtgaagggccgattcatcatctccagagacaactctaagaatacattgtttctggaaatggacggcctgagaggcgaggacacggccatctattattgtgtcctgagggggtctgcttttgatatttggggccaagggacagtggtcaccgtctcttca

SEQ ID NO: 6932 - DNA, 283 bp, Homo sapiens
  source 1..283: mol_type = other DNA
tgaaacctctggactcaggttcagcagatatgccatggtttgggtccgccaggctccagggaaggggctggagtgggtctcaactataagtggaagtggtgatgacacatattacgcagactccgtgaggggccgcttcaccatctccagagacaattccaagaatacgctgtatcttcagatgagcagcctgagagccgaagacacggccctacattactgtgtcctaaggggaagtgcttttgatatctggggccaagggacaatggtcaccgtctcttca

SEQ ID NO: 6933 - DNA, 310 bp, Homo sapiens
  source 1..310: mol_type = other DNA
tgtagcctctggactcacccttagcagcaatgccatgagctgggtccgccaggctccagggaaggggctggagtgggtctcagctattagtggtagtggtggtagcacatattacagtggtagtggtggtagtacatactacgcagactccgtgaagggccggttcaccatcttcagagacaattccaggaacaccttgtttctgcaaatgagcagcctgagagccgaggacacggccgtgtattattgtgtcctgcggggcagtgcttttgatatctggggccaagggacaatgatcaccgtctcttca

SEQ ID NO: 6934 - DNA, 283 bp, Homo sapiens
  source 1..283: mol_type = other DNA
tgcagcctctgaattccccttcagcaaatacgccatgagttgggtccgccaggctccagggaaggggctggagtgggtctcaactattagtggtcgtggtgagagtacattctacgcagactcagtgaagggccggttcactatctccagagacaattccagggacacactatatctgcaaatgaacagcgtgagagccgaagactcggccgtctattattgtgttctgcggggtagcgcttttgatatctggggccaagggacaatggtcaccgtctcttca

SEQ ID NO: 6935 - DNA, 283 bp, Homo sapiens
  source 1..283: mol_type = other DNA
tgtagcctctggattcaccttcagcacctttgccatgagctgggtccgccagcctccagggaagggcctggagtgggtctcagctattagtggtgatggtggtgacacattctacgcagactccgtgaagggccggttcaccatctccagagacagttccgggaacacactatatctacacatgaacagcctgagagacgaggacacggccgcattttattgtgtcttacgggggagcgcttttgatatctggggccaagggacaatggtcaccgtctcttca

SEQ ID NO: 6936 - DNA, 283 bp, Homo sapiens
  source 1..283: mol_type = other DNA
tgtagcctctggattcagtcttagaaacgaggccatgacgtgggtccgccagcctccagggaaggggctggagtgggtctcagtcattagtgggagcgctgaaaatacatactacgcagactccgtgaagggccgggtcaccatctccagagacaagtccaaaaataccctccatctacagatgaacaacctgaaagtcgaggacacggccatattttattgtgtcctgcggggtagtgcttttgacatctggggccaagggacaatggtcaccgtctcttcc

SEQ ID NO: 6937 - DNA, 283 bp, Homo sapiens
  source 1..283: mol_type = other DNA
tgtagcctctggattcagtcttagaaacgaggccatgacgtgggtccgccagcctccagggaaggggctggagtgggtctcagtcattagtgggagcgctgaaaatacatactacgcagactccgtgaagggccgggtcaccatctccagagacaagtccaaaaataccctccatctacagatgaacaacctgaaagtcgaggacacggccatatattattgtgtcctgcggggtagtgcttttgacatctggggccaagggacaatggtcaccgtctcttcc

SEQ ID NO: 6938 - DNA, 283 bp, Homo sapiens
  source 1..283: mol_type = other DNA
tgtagcctctgaattccccttcagcaaatacgccatgagctgggtccgccaggctccagggaaggggctggagtgggtctcagctattactggtcgtggtgagactacattctacgcagactcagtgaggggccggttcactatctccagagacaattccagagacacactatatctgcagatgaacagcgtgagagccgaagactcggccgtctattattgtgttctgcggggtagcgcttttgatatctggggccaagggacaatggtcaccgtctcttca

SEQ ID NO: 6939 - DNA, 283 bp, Homo sapiens
  source 1..283: mol_type = other DNA
tgcagcctctgaagtcaccttcaggaaatatgccatgagttgggtccgccaggctccaggggaggggctggagtgggtctcagctattagtgacagtggtgatagcacatactacgcagactccgtgaagggccggttcactatctccagagacaattccagggacacactatatctgcaaatgaacagcgtgagagccgaagacacggccgtatattattgtgttctgcggggtagcgcttttgatatctggggccaagggacaatggtcaccgtctcttca

SEQ ID NO: 6940 - DNA, 283 bp, Homo sapiens; identical to SEQ ID NO: 6939
  source 1..283: mol_type = other DNA

SEQ ID NO: 6941 - DNA, 283 bp, Homo sapiens
  source 1..283: mol_type = other DNA
tgtagcctctggattcacctttagcacctttgccatgagctgggtccgccaggctccagggaagggcctggagtgggtctcaggtattagtggtagtggtagtaacacattctatgcagactccgtgaagggccggttcaccgtctccagagacacttccaggaacacactgtatctgcaaattaacagtctgagagtcgaggacacggccgcattttattgtgttttacggggcagtgcttttgatatttggggccaagggacagtggtcactgtctcttca

SEQ ID NO: 6942 - DNA, 283 bp, Homo sapiens
  source 1..283: mol_type = other DNA
tgttgcctctggattcacctttagcacctatgccatgacctgggtccgccaggctccagggaaggggctggagtgggtctcagctattagtggtagtgggggtagcactttttacgcagagtccgtgaagggccgtttcaccatctccagagacaggtccaggaacacactgtttctgcaaatgaacagcctgagagacgaggacacggccacatattattgtgtattacgggggagcgcttttgatatctggggccaagggacaatggtcagcgtctcttca

SEQ ID NO: 6943 - DNA, 283 bp, Homo sapiens
  source 1..283: mol_type = other DNA
tgcagcctctggattccccttcagtacttattccatgacttgggtccgccaggctccagggagggggctggagtgggtggccaacatgaacggggatggaagtgagcgaaactatctgcactccgtgaagggccgattcaccatctccagagacaacgccaagaactcattgtttctgcaaatgaacagcctgagagccgaggacacggccgtatattactgtgcgacaagaggccaagcgccggctgactggggccagggaaccctggtcaccgtctcctca

SEQ ID NO: 6944 - DNA, 283 bp, Homo sapiens
  source 1..283: mol_type = other DNA
tgcagcctctggattccccttcagttcttattggatgacctgggtccgccaggctccagggagggggctggagtgggtggccaacataaacgaatatggaaatgagcagaactatctggactccgtgaagggccgattcaccatctccagagacaacgccaagaactcattgtttctgcaaatgaacagcctgagagccgaggacacggccgtgtattactgtgcgacaagaggccaagcgccggctgactggggccagggaaccctggtcaccgtctcctca

SEQ ID NO: 6945 - DNA, 283 bp, Homo sapiens
  source 1..283: mol_type = other DNA
tgcagcctctggattccccttcactacttattggatgacctgggtccgccaggctccagggagggggctggagtgggtggccaacataaacgaagatggaagtgagcaaaactatctggactccgtgaagggccgattcaccatctccagagacaaccccacgaactcattgtttctgcaaatgaacagcctgagagccgaggacacggccgtgtattactgtgcgacaagaggccaagcgccggctgactggggccagggaaccctggtcaccgtctcctca

SEQ ID NO: 6946 - DNA, 283 bp, Homo sapiens
  source 1..283: mol_type = other DNA
tgcagtctctggattcaccttcagaacttattggatgagctgggtccgccaggctccagggaaggggctggagtgggtggccaacataaaggaagatggaagtgaggaaaattatgtggactctgtgaacggccgattcaccatctccagagacaacgcgaagaactcattatttttgcaaatgaacagcctgagagccgaggacacggccatgtattactgtgcgacaagaggccaagcgccggctgactggggccagggaaccctggtcaccgtctcctta

SEQ ID NO: 6947 - DNA, 283 bp, Homo sapiens
  source 1..283: mol_type = other DNA
tgtaggctctggattcaccttcagtagttattggatgagttgggtccgccaggctccagggaaggggctggagtgggtggccaacataaacgaagatggaagtgaggaaaactatgtggcctctgtgaggggccgattcaccatttccagagacaacgccaagaactcattgtttctacaaatggacagcctgagaggcgaggacacggccatgtactactgtgcgacaaggggccaagcgccggctgactggggccagggaagcctggtcaccgtctcctct

SEQ ID NO: 6948 - DNA, 283 bp, Homo sapiens
  source 1..283: mol_type = other DNA
tgcagcctctggattccccttcagtacttggggcatgacctgggtccgccaggctccggggagggggctggagtgggtgggcaacataaacggtcggggagatgaacaaaattatctggactccgtgaagggccgattcaccatctccagagacaacgccaagaactcattgtttctgcaaatgaacagcctgagatccgaggacacggccgtgtattactgtgcgacaagaggccaagcgccggctgactggggccagggaaccctggtcaccgtctcctca

SEQ ID NO: 6949 - DNA, 283 bp, Homo sapiens
  source 1..283: mol_type = other DNA
tgcagcctctggattccccttcagttcttattggatgacctgggtccgccaggctccagggagggggctggagtgggtggccaacataaacgaatatggaaatgagcagaactatctggactccgtgaagggccgattcaccatctccatagacaacgccaagaactcattgtttctgcaaatgaacagcctgagagccgaggacacggccgtgtattactgtgcgacaagaggccaagcgccggctgactggggccagggaaccctggtcaccgtctcctca

SEQ ID NO: 6950 - DNA, 283 bp, Homo sapiens
  source 1..283: mol_type = other DNA
tgcagtctctggattcaccttcagcacttattggatgagctgggtccgccaggctccagggaaggggctggagtgggtggccaacataaaggaagatggaagtgaggaaaattatgtggactctgtgaagggccgattcaccatctccagagacaacgcgatgcactcattatttttgcaaatgaacagcctgagagccgaggacacggccatgtattactgtgcgacaagaggccaagcgccggctgactggggccagggaaccctggtcaccgtctcctta

SEQ ID NO: 6951 - DNA, 283 bp, Homo sapiens
  source 1..283: mol_type = other DNA
cgaagtctctggattcaccttcagcaggtactggatgacttgggtccgccagactccagggaaggggctgcagtgggtggccagcataaacgaagatggaagtgagagacattacttggactctgtgaagggccgattcaccatctccagagacaacgccaagaactcattgcttctgcaaatgaacagcctgacagccgaagacacggccatgtatttctgtgcgacaagaggccaggcgccggctgactggggccagggaaccctggtcaccgtctcctca

SEQ ID NO: 6952 - DNA, 283 bp, Homo sapiens
  source 1..283: mol_type = other DNA
tgcagcctctggattccccttcagtacttactccatgacttgggtccgccaggctccagggagggggctggagtgggtggccaacataaacggggatggaagtgagcaaaactatctggactccgtgaagggccgattcaccatctccagagacaacgccaggaactccttgtttctgcaaatgaacagcctgagagtcgaggacacggccgtatattactgtgcgacaagaggccaagcgccggctgactggggccagggaaccctggtcaccgtctcctca

SEQ ID NO: 6953 - DNA, 283 bp, Homo sapiens
  source 1..283: mol_type = other DNA
tgcagcctctggattccccttcagtacttggtggatgacctgggtccgccaggctccagggagggggctggagtgggtggccaacataaacgaagatgggactgagcaaaactatctggactccgtgaagggccgattcaccatctccagagacaacgccaagaactcattgtttctgcaaatggacagcctgagagtcgaggacacggccgtgtattattgtgcgacacggggccaagcgccggctgactggggccagggaaccctggtcaccgtctcctca

SEQ ID NO: 6954 - DNA, 283 bp, Homo sapiens
  source 1..283: mol_type = other DNA
tgcagcctctggattccccttcaatacttattggatgacctgggtccgccaggctccagggagggggctggagtgggtggccaacatagacggacatggaggtgagcgacactatctggactccgtgaagggccgattcaccatctccagagacaacgccaagaactctttgtttctgcaaatgaacagcctgagagccgaggacacggccgtgtattactgtgcgacaagaggccaagcgccggctgactggagccagggaaccctggtcaccgtctcctca

SEQ ID NO: 6955 - DNA, 283 bp, Homo sapiens
  source 1..283: mol_type = other DNA
cgcagcctccggattccccttcagggattattggatgacctgggtccgccaggctccagggagggggctggaatgggtggccaacatagacggacctgcaagtgagcaaaactatctggactccgtgaagggccgattcaccatctccagagacaacgccaagaactcattgtttctgcaaatgaacagcctgagagccgaggacacggccgtgtattactgtgcgacaagaggccaagcgccggctgactggggccagggaaccctggtcaccgtctcctca

SEQ ID NO: 6956 - DNA, 283 bp, Homo sapiens
  source 1..283: mol_type = other DNA
tgcagcctctggattccccttcagtacttattccatgacttgggtccgccaggctccagggagggggctggagtgggtggccaacatgaacggggatggaagtgagcgaaactatctggactccgtgaagggccgattcaccatctccagagacaacgccaagaactcattgtttctgcaactgaacagcctgagagccgaagacacggccgtatattactgtgcgacaagaggccaagcgccggctgactggggccagggaaccctggtcattgtctcctca

SEQ ID NO: 6957 - DNA, 283 bp, Homo sapiens
  source 1..283: mol_type = other DNA
tgcagcctctggattcaccttcagctcttatcggatgagttgggtccgccaggctccagggaaggggctggagtgggtggccaacattaacgaagatggaagtgcgaaaaactatgcggactctgtgaagggccgattcaccatctccagagacaacgccaagaactctttgttcctgcaaatgaacagcctgagagccgaagacacggccatgtattactgtgcgacaagaggccaagcgccggctgactggggcgagggaaccctggtcaccgtctcctca

SEQ ID NO: 6958 - DNA, 283 bp, Homo sapiens
  source 1..283: mol_type = other DNA
cgaagtctctggattcaccttcagcaggtactggatgacttgggtccgccagactccagggaaggggctgcagtgggtggccagcataaacgaagatggaagtgagagacattacttggactctgtgaaggaccgattcaccatctccagagacaacgccaagaactcattgcttctgcaaatgaacagcctgacagccgaagacacggccatgtatttctgtgcgacaagaggccaggcgccggctgactggggccagggaaccctggtcaccgtctcctca

SEQ ID NO: 6959 - DNA, 283 bp, Homo sapiens
  source 1..283: mol_type = other DNA
tgcagcctctggattcaccttcagtacctattggatgacctgggtccgccaggctccagggaaggggctggagtgggtgggcaacataaacgaagatgggggtgataagaactatgtggactctgtgaggggccgcttcaccatctccagagacaatgccaagagctcactgtttctccaaatgaacagcctgagagccgaggacacggctgtgtattactgtgcgacacgcgggcaagcaccagcagactggggccagggaatcctggtcaccgtctcctca

SEQ ID NO: 6960 - DNA, 283 bp, Homo sapiens
  source 1..283: mol_type = other DNA
tgcagtctccggatccagaatcggcatggatgccatgcactgggtccgccaggctcctgggaaggggctggagtggatctcaagtattagtggaaggggtgatgcaagggactacgcagattccgtgaagggccggttcaccgtctccagagacaattccaagaacacactctttttgtccatggacggcctgagagacgacgacacggccgtatatcattgcgtcctgagggggtcgtcttttgatgtctggggccaagggacagtggtcaccgtctcttcg

SEQ ID NO: 6961 - DNA, 283 bp, Homo sapiens
  source 1..283: mol_type = other DNA
tgcagcctccggatccagcatcggcatggatgccatgcactgggtccgccaggctccagggaaggggctggagtgggtctcaactattactggaaggggtgatagaagagactacgcagactccgtgaaggggcggttcaccgtctccagagacaattccaggaacacactgtctctgacgatggacggcctgaaagacgacgacacggccgtatatttttgtgtcctgagggggtcttcttttgatgtctggggccgggggacagtggtcagcgtctcttcg

SEQ ID NO: 6962 - DNA, 283 bp, Homo sapiens
  source 1..283: mol_type = other DNA
tgtagcctccggatccagcattggcatggatgccatgcactgggtccgccaggcgccagggaaggggctggagtgggtctcaagtattaatgcaaggggtgacagaagagactacgcagactccgtgaagggccgattcaccgtctccagagacaattctaggaatacactgtctctgacgatggacggcctgagagacgacgacacggccgtttattattgtgtcctgagggggtcttcctttgatgtctggggccgaggaacagtggtcaccgtctcttcg

SEQ ID NO: 6963 - DNA, 283 bp, Homo sapiens
  source 1..283: mol_type = other DNA
tgcagtctccggatccagaatcggcatggatgccatgcactgggtccgccaggctcctgggaaggggctggagtggatctcaagtattagtggaaggggtgatgcaagggactacgcagattccgtgaagggccggttcaccgtctccagagacaattccaagaacacactctttttgtccatggacggcctgagagacgacgacacggccgtatatcattgcgtcctgagggggtcgtcttttgacgtctggggccaagggacagtggtcaccgtctcttcg

SEQ ID NO: 6964 - DNA, 283 bp, Homo sapiens
  source 1..283: mol_type = other DNA
tgtagcctccggatccagcattggcatggatgccatgcactgggtccgccaggcgccagggaaggggctggagtgggtctcaagcattactggaaggggtgacagaagagagtacgcagactccgtgaagggccgattcaccgtctccagagacaattctaggaatacactgtctctgacgatggacggcctgagagacgacgacacggccgtatattattgtgtcctgagggggtcttcttttgatgtctggggccgagggacagtggtcaccgtctcttcg

SEQ ID NO: 6965 - DNA, 283 bp, Homo sapiens
  source 1..283: mol_type = other DNA
tgtagcctccggatccagcattggcatggatgccatgcactgggtccgccaggcgccagggaaggggctggagtgggtctcaagcattactggaaggggtgacagaagatattacggagactccgtgaagggccgattcaccgtctccagagacaattctaggaatacactgtctctgacgatggacggcctgagagacgacgacacggccgtatattattgtgtcctgagggggtcttcttttgatgtctggggccgagggacagtggtcaccgtctcttcg

SEQ ID NO: 6966 - DNA, 283 bp, Homo sapiens
  source 1..283: mol_type = other DNA
tgtaatctctgaattcatccctgataagtatgccatgagttgggtccgccaggctcctgggaaggggctggagtgggtctcttccattagtggtggtggtgttaacacaaactacgcagactccgtgcagggccggttcaccatctccagagacaggtccaagaacacactgtatctgcaaatgagtagactgagaggcgacgacacggccatgtattactgtgtcctgcggggtagttcttttgatgtctggggccacgggacactggtgaccgtctcttca

SEQ ID NO: 6967 - DNA, 283 bp, Homo sapiens
  source 1..283: mol_type = other DNA
tgtagcctctggattcacctttggcaattttgccatgagttgggtccgccaggctccagggaagggactagagtgggtctcatctattagtggcaatggtggcgattcagactacgcagactccgtgaagggccggttcaccatctccagagacacttccaagactattttgtatctacaaatgaagagcctgagagccgacgacacggccatgtataattgtgtcctgcggggtagttcttttgatgtctggggcctagggacaatggtcaccgtctcttca

SEQ ID NO: 6968 - DNA, 289 bp, Homo sapiens
  source 1..289: mol_type = other DNA
tgcagcctctggattcaccttcagtagttatgacatgaactgggtccgccaggctccagggaaggggctggagtgggtttcctacattagtactagtagtagttccatatactacgcagactctgtgaagggccgattcaccatctccagagacaatgccgagaactcactgtatctgcaaatgaacagcctgagagacgaggacacggctgtgtattactgtgcgagagataggcatggtggctcttttgactactggggccagggaaccctggtcaccgtctcctca

SEQ ID NO: 6969 - DNA, 289 bp, Homo sapiens
  source 1..289: mol_type = other DNA
tgcagcctctggattcaccttcagtagttatgacatgaactgggtccgccaggctccagggaaggggctggagtgggtttcctacattagtactagtagtagttccatatactacgcagactctgtgaagggccgattcaccatctccagagacaatgccgagaactcactgtatctgcaaatgaacagcctgagagacgaggacacggctgtgtattactgtgcgagagataggcatggtggctcttttgactactggggccagggaaccctgatcaccgtctcctca

SEQ ID NO: 6970 - DNA, 289 bp, Homo sapiens
  source 1..289: mol_type = other DNA
tgcagcctctggattcaccttcagtgcctttgacatgaattgggtccgccaggctccagggaaggggctggagtggctttccttcattagtactagtagtactaccatctactacgcagactctgtgaagggccgattcaccatctccagagacaatgccgagaactcactgtatctgcaaatgagcagcctgagagacgaggacatggctgtgtattactgtgcgagagataggcatggtggctcttttgactactggggccagggaaccctggtcaccgtctcctca

SEQ ID NO: 6971 - DNA, 289 bp, Homo sapiens; identical to SEQ ID NO: 6970
  source 1..289: mol_type = other DNA

SEQ ID NO: 6972 - DNA, 289 bp, Homo sapiens
  source 1..289: mol_type = other DNA
tgcagcctctgacttcaccttcagtagttacgacatgaactgggtccgccaggctccagggaagggcctggagtgggtttcatacattaatactgctagtactaccatacactacgcagactctgtgaagggccgattcaccatgtccagagacaatgccaagaactcactgtttctgcaactgaacagcctgagagacgaggacacggctgtttattactgtgcgagagatcggcacggtgggagctttgactactggggccagggaaccctagtcaccgtctcctca

SEQ ID NO: 6973 - DNA, 289 bp, Homo sapiens
  source 1..289: mol_type = other DNA
tgcagcctctgacttcaccttcagtggttacgacatgaactgggtccgccaggctccagggaagggcctggagtgggtttcatacattaatactgctagtactaccatatactacgcagactctgtgaagggccgattcaccatgtccagagacaatgccaagaactcactgtttctgcaactgaacagcctgagagaagaggacacggctgtttattactgtgcgagagatcggcacggtgggagctttgactactggggccagggaaccctagtcaccgtctcctca

SEQ ID NO: 6974 - DNA, 283 bp, Homo sapiens
  source 1..283: mol_type = other DNA
tgcagcctccggactcagcatcggcttggatgccatgcactgggttcgccagggtccagggaaggggctggagtgggtctcaagtatcagtggcaggggtgaaagaacagactacgcagactccgtgaagggtcggttcatcgtctctagagacaattccaagaataaactgtttctgacaatggacggcctgagaggcgacgacacggccgtatatttttgtgccctgagggggtctgcatttgatatctggggccaagggacagtggtcaccgtctcttca

SEQ ID NO: 6975 - DNA, 283 bp, Homo sapiens
  source 1..283: mol_type = other DNA
tgcagcctccggagttagcatcgccatggatgccatgcactgggtccgtcagggtccggggaaggggctggagtgggtctcaagtataagtggtaggggtgatagaagagactacgcagactccgtgaagggccggttcaccatctccagagacaattctaagaatacattgtttctggaaatggacggcctgagaggcgaggacacggccatctattattgtgccctgagggggtctgcttttgatatttggggccaagggacagtggtcaccgtctcttca

SEQ ID NO: 6976 - DNA, 283 bp, Homo sapiens
  source 1..283: mol_type = other DNA
tgcagcctccggactcaacatcggcttggatgccatgcactgggttcggcagggtccagggaaggggctggagtgggtctcaagtattagtggcaggggtgaaagaaaagactacgcagactccgtgaagggtcggttcaccatttctagagacaattccaagaattcagtgtttctgacaatggacggcctgagaggcgacgacacggccgtttatttttgtgccctgagggggtctgcatttgatatctggggccgagggacagtggtcaccgtctcttca

SEQ ID NO: 6977 - DNA, 283 bp, Homo sapiens
  source 1..283: mol_type = other DNA
cgccgcttccggagtcagaatcggcatggatgtcatgcactgggtccgccaggctccagggagggggctagagtgggtctcaagtattagtggcaggggtgatagaataaactacgcggactccgtgaggggccggttcaccatgtccagagacaactctaagaatacactgtttctgacaatggacggcctgagaggcgacgacacggccgtttatttttgtgccctgagggggtctgcttttgatatctggggccaagggacagtggtcaccgtctcttca

SEQ ID NO: 6978 - DNA, 283 bp, Homo sapiens
  source 1..283: mol_type = other DNA
tgcagcctccggagttagcatcgccatggatgtcatgcactgggtccgtcagggtccggggaaggggctggagtgggtctcaagtataagtggcaggggtgatagaagacactacgcagactccgtgaagggccggttcaccatctccagagacaattctaagaatacactgtttctggaaatggacggcctgagaggcgaggacacggccatctattattgtgccctgagggggtctgcttttgacatctggggccaagggacagtggtcaccgtctcttca

SEQ ID NO: 6979 - DNA, 283 bp, Homo sapiens
  source 1..283: mol_type = other DNA
cgcagcctccggagtcagaatcggcatggatgccatgcactgggtccgccaggctccagggagggggctagagtgggtctcaagtattagtggcaggggtgatagaacagactacgcagactccgtgaggggccggttcaccatctccagagacaactctaagaatacactttttctgacaatggacggcctgagaggcgacgacacggccgtttatttttgtgccctgagggggtctgcttttgatatctggggccctgggacagtggtcaccgtctcttca

SEQ ID NO: 6980 - DNA, 283 bp, Homo sapiens
  source 1..283: mol_type = other DNA
tgcagcctccggactcagcatcggcttggatgccatgcactgggttcgccagagtccagggaaggggctggagtgggtctcaagtatcagtggcaggggtgaaagaacagactacgcagactccgtgaagggtcggttcatcatctccagagacaattccaagaataaactgtttctgacaatggacggcctgagaggcgacgacacggccgtatatttttgtgccctgagggggtctgcttttgatatctggggccaagggacagtggtcaccgtctcttca

SEQ ID NO: 6981 - DNA, 283 bp, Homo sapiens
  source 1..283: mol_type = other DNA
tgcagcctccggactcagcatcggcttggatgccatgcactgggttcgccagggtccagggaaggggctggagtgggtctcaagtatcagtggaaggggtgaaagaacagactacgcagactccgtgaagggtcggttcatcgtctctagagacaattccaagaataaactgtttctgacaatggacggcctgagaggcgacgacacggccgtatatttttgtgccctgagggggtctgcatttgatatctggggccaagggacagtggtcaccgtctcttca

SEQ ID NO: 6982 - DNA, 283 bp, Homo sapiens
  source 1..283: mol_type = other DNA
tgcagcctctggattcacctttaacagagaagccatgagctgggtccgccaggctccagggaagggcctggagtgggtctcaggtgatagtggtagtggtggaagtacatactacgcagactccgtgaagggccgcttcaccatctccagagacaattccaggaacactctgtatcttcaaatgaacagtctgagagacgaggacacggccgtatattattgcgcccttcggggtagtgcttttgatatctggggccacgggacaatggtcaccgtctcttca

SEQ ID NO: 6983 - DNA, 283 bp, Homo sapiens
  source 1..283: mol_type = other DNA
tgcagcctctggattcacctttaacagagatgccatgagctgggtccgccaggctccagggaaggggctggagtgggtctcaggtgatagtggtcgtggtgatagtacatactacgcagactccgtgaagggccgattcaccatctccagagacagttccaggagcactctgtatctgcaaatgaaaagtctgagagacgaggacacggccgtatattattgcgcccttcggggtagtgcttttgatatctggggccacgggacactggtcaccgtctcttca

SEQ ID NO: 6984 - DNA, 283 bp, Homo sapiens
  source 1..283: mol_type = other DNA
tggagcctctgggttcacccttagaagtgacgccatgacttgggtccgccgggctccagggaagggcctggagagggtcgcggttattagtggtggcggtgagacaacatactacgcagactccgtgaagggccggttcaccatatccagagacaaatcgaagaacacactgtatctgcaaatgaacaacctgagaggcgaggacacggccatgtattattgtgccctgcggggtagtgcctttgacatctggggccacgggacaaatgtcatcgtcctttta

SEQ ID NO: 6985 - DNA, 283 bp, Homo sapiens
  source 1..283: mol_type = other DNA
tggagcctctgggttcacccttagaaatgacgccatgacttgggtccgccgggctccagggaagggcctggagagggtcgcggttattagtggtggtggtgagacaacatactacgcagactccgtgaagggccggttcaccatatccagagacacatcgaagaacacactgtatctgcaaatgaacaacctgagaggcgaggacacggccatgtattattgtgccctgcggggtagtgcctttgacatctggggccacgggacaaatgtcatcgtcctttta

SEQ ID NO: 6986 - DNA, 283 bp, Homo sapiens
  source 1..283: mol_type = other DNA
tgcagcctctggattcacccttaggaacgaggccatgacctgggtccgccagcctccagggaaggggctggaatgtgtctcagtcattagtggtagtggtgaaaacacatactacgcagactccgtgaagggccgattcaccatctccagagacaattccaagaacaccctctatctgcagatgaacagcctgagagccgaggacacggccgtatattactgtgccctgcggggtagtgcttttgatatctggggccaagggacaatggtcaccgtctcttcc

SEQ ID NO: 6987 - DNA, 283 bp, Homo sapiens
  source 1..283: mol_type = other DNA
tgtagcctctggattcacccttaggaacgaggccatgacctgggtccgccagcctccagggaaggggctggagtgggtctcagtcattagtgggagtgctgaaaacacatactacgcagactccgtgaagggccgggtcaccatctccagagacaattccaagaatacgctctatctgcagatgaacagcctgagagccgaggacacggccgtatattactgtgccctgcggggtagtgcttttgatatctggggccaagggacaatggtcaccgtctcttcc

SEQ ID NO: 6988 - DNA, 283 bp, Homo sapiens; identical to SEQ ID NO: 6982
  source 1..283: mol_type = other DNA

SEQ ID NO: 6989 - DNA, 289 bp, Homo sapiens
  source 1..289: mol_type = other DNA
tgcagcctctggattcacctttagcagatatgccatcagttgggtccgccaggctccagggaaggggctggagtgggtctcaggtgatagtggtagtggtggtggtggtaccacatactacgcagactccgtgaagggccggttcaccatctccagagacaattccaggaacactctgtatctacaaatgaagagcctgagaggcgaggacacggccgtatattattgcgcccttcggggtagtgcttttgatatctggggccaagggacaatggtcaccgtctcttca

SEQ ID NO: 6990 - DNA, 279 bp, Homo sapiens
  source 1..279: mol_type = other DNA
gcttctggatacaccttcactaactatgctatgaattgggtgcgacaggcccctggacaagggcttgagtggatgggatggatcaacaccaacactgggagtccaacatatgcccagggcttcacaggacggtttgtcttctccgtggacacctctgtcagcacggcatatctgcagatcagcagcctaaaggctgaagacgctgccttatattactgtgcgagaggattaatagattttgactactggggccagggaaccctggtcaccgtctcctca

SEQ ID NO: 6991 - DNA, 279 bp, Homo sapiens
  source 1..279: mol_type = other DNA
gcttctggatacagcttcactaacattgctatgaattgggtgcgacaggcccctggacaaggacttgagtggatgggatggatccacaccaacactgggaacccaacatatgcccagggcttcacaggacggtttgtcttctccttggacacctctgtcaccacggcatatctgcagatcagcagccttaagcctgaggacactgccgtatattactgtgcgagaggactgatagactttgactactggggccagggaaccctggtcaccgtctcctca

SEQ ID NO: 6992 - DNA, 301 bp, Homo sapiens
  source 1..301: mol_type = other DNA
tgcaacctctagattcacctttagcaactatgccatgagctgggtccgccaggctccagggaaggggccggagtgggtctcagctattagtggtcgtggtgaaaccacatactacgcagactccgtgaagggccgcttcaccatttccagagacaattccaagaacacgctgtatctgcaaatgagcagcctgagagacgatgactcggccgtatatcactgtgcgaaagcaggtgtagtgggagctaccatacgctactttgactactggggccagggaaccctggtcaccgtctcctcg

SEQ ID NO: 6993 - DNA, 301 bp, Homo sapiens
  source 1..301: mol_type = other DNA
tgcagcctctggattcacctttgacagttatgtcatgagctgggtccgccaggctccagggaaggggctggagtgggtctcagctattagtggaagtggtgacagcacatactacgcaaactccgtgaagggccggttcaccatctccagagacaattccaagaacacgctgtatctgcaaatgaacagcctaagagccgaggacacggccctatattactgtgcgaaagcgggagtggtgggagctactattcgttactttgattactggggccagggaaccctggtcaccgtctcctca

SEQ ID NO: 6994 - DNA, 283 bp, Homo sapiens
  source 1..283: mol_type = other DNA
tgtagtgtccggatccagtatcggcatggacgccatgcactgggtccgccaggctccagggaagggactggagtgggtctcaacgattagtggaaggggtaatggaagaaactacgcagactccgtgaagggccgatgcaccgtctccaaagacagtttcaagaatacgatttatctgacgatggacggcctgagagacgacgacacggccgtatatcattgtgtcctgagggggtcttcttttgatatttggggccaagggacagtggtcaccgtctcttcg

SEQ ID NO: 6995 - DNA, 283 bp, Homo sapiens
  source 1..283: mol_type = other DNA
tgcagcctccggatccagcatcggcatggatgccatgcactgggtccgccaggctgcagggagggggctggagtgggtctcaagtattagtggaaggggtgacagaagagactacgcaggctccgtgaggggccggttcaccgtctccagagacaataccaggaacacactgtctctgacgatggacggcctgagagacgacgacacggccgtatatttttgtgtcctgagggggtcttcttttgatatctggggccgagggacagtggtcaccgtctcttcc

SEQ ID NO: 6996 - DNA, 283 bp, Homo sapiens
  source 1..283: mol_type = other DNA
tgtagtctccggatccagtatcggcatggacgccatgcactgggtccgccaggctccagggaaggggctggagtgggtctcaacaattagtggaaggggtgatggaagaaattatgcagactccctgaggggccgatgcaccgtctccaaagacagtttcaagaacacattgtatctgacgatggacggcctgagagacgacgatacggccgtatatcattgtgtcctgagggggtcttcttttgatatttggggccaagggacagtggtcaccgtctcttcg

SEQ ID NO: 6997 - DNA, 283 bp, Homo sapiens
  source 1..283: mol_type = other DNA
tgtagcctccggatccagtatcgccatggatgccatgcactgggtgcgccaggttccagcgaaggggctggagtgggtctcaagcataagcaatagggctgataaagcagactacgcagactccgtgaagggccggttcaccatctccagagacaattccaagaatacagtgtatctgaacatggacgacctgagaggcgacgacacggccgtatattattgtgtcttgagggggtcttcttttgatatttggggccaagggacagtggtcaccgtctcttca

SEQ ID NO: 6998 - DNA, 283 bp, Homo sapiens; identical to SEQ ID NO: 6997
  source 1..283: mol_type = other DNA

SEQ ID NO: 6999 - DNA, 283 bp, Homo sapiens
  source 1..283: mol_type = other DNA
tgcagcctccggatcccgcatcggcatggatgccatgcactgggtccgccaggctccagggaaggggctggagtgggtctcaagtatcagtggatcgggtgatggaagaaattatgcagattccgtgaagggccggttcaccgtctccagagacaattccaagaacacactatatctgacgatggacggcctgagaggcgacgacacggccgtatatcattgtgtcctgagggggtcttcttttgatatttggggccaagggacagtggtcaccgtctcttcg

SEQ ID NO: 7000 - DNA, 283 bp, Homo sapiens
  source 1..283: mol_type = other DNA
tgtagtctccggatccagcatcggcatggacgccatgcactgggtccgccaggctccagggaaggggctggagtgggtctcaacaattagtggaaggggtgatggaagaaactacgcagactccgtgaagggccgatgcaccgtctccaaagacagtttcaagaacacactgtatctgacgatggacggcctgagagacgacgacacggccgtatatcattgtgtcctgagggggtcttcttttgatatttggggccaagggacagtggtcaccgtctcttcg

SEQ ID NO: 7001 - DNA, 283 bp, Homo sapiens
  source 1..283: mol_type = other DNA
tgtggtctccggctccaggatcggcatggacgccatgcactgggtccgccaggctccagggagggggctggagtgggtctcaacaattagtggaaggggtgatggaagaaactacgcagactccgtgaagggccgatgcaccgtctccaaagacagtttcaagaacacattgtatctgacgatggacggcctgagagacgacgacacggccgtatatcattgtgtcctgagggggtcttcttttgatatttggggccaagggacagtggtcaccgtctcttcg

SEQ ID NO: 7002 - DNA, 283 bp, Homo sapiens
  source 1..283: mol_type = other DNA
tgtagtctccggatctagcatcggcatggacgccatgcactgggtccgccaggctccagggaaggggctggagtgggtctcaacaattagtggaaggcgtgatgaaagaaacttcgcagactccgtgaagggccgatgcaccgtctccaaggacacttttaagaacacattctatctgacgatggacggcctgagagacgacgacacggccgtatatcattgtgtcctgagggggtcttcttttgatatttggggccaagggacagtggtcaccgtctcttcg

SEQ ID NO: 7003 - DNA, 283 bp, Homo sapiens
  source 1..283: mol_type = other DNA
tgtagtctccggatccagcatcggcatggacgccatgcactgggtccgccaggctccagggaaggggctggagtgggtcgcaacaattagtggaaggggtgatggaagaaactacgcagactccgtgaagggccgatgcaccgtctccaaagacagtttcaagaacacattgtatctgacgatggacggcctgagagacgacgacacggccgtatatcattgtgtcctgagggggtcttcttttgatatttggggccaagggacagtggtcaccgtctcttcg

SEQ ID NO: 7004 - DNA, 283 bp, Homo sapiens
  source 1..283: mol_type = other DNA
tgtagcctccggatccagtatcgccatggatgccatgcactgggtgcgccaggttccaacgaagggactggagtgggtctcaagcattagtcctacggctgacagaacacactacgcagagtccgtgaagggccggttcaccatctccagagacaattccgagaatacgttgtttctgaccatggacggcctgagaggcgacgacacggccatatattattgtgtcctgagggggtcttcttttgatatctggggccaaggggcagcggtcaccgtctcttca

SEQ ID NO: 7005 - DNA, 283 bp, Homo sapiens
  source 1..283: mol_type = other DNA
tgtagcctctgagaccattcttggcaactttgccatgagttgggtccgccaggctccaggggaggggctggagtgggtctcatctgtcagtggtaacagtattaccacacactattcagactccgtgaagggccgcttcaccgtctccagagacagatccaggaacaccctctttctgcaaatgaacggcctgacagccgacgacacggccagatactattgtgtcctgcgtggcagttctttcgatatatggggccaagggacaatggtcaccgtctcttca

SEQ ID NO: 7006 - DNA, 283 bp, Homo sapiens
  source 1..283: mol_type = other DNA
tgtaccctctgaaatcatccttggcaactatgccatgagttgggtccgccaggctccaggggaggggctggagtgggtctcatctattagtggtaacggtgttaccacacactatgcagactccgtgaagggccggttcaccatctccagagacagatccaggaacacactctttctgcaaatgagcagcctgacagccgacgacacggccaaatattattgtgtcctgcgtggtagttcttttgatatatggggccaagggacaatggtcaccgtctcttca

SEQ ID NO: 7007 - DNA, 283 bp, Homo sapiens
  source 1..283: mol_type = other DNA
tgtaccctctgaaatcatccttggcaactatgccatgagttgggtccgccaggctccaggggaggggctggagtgggtctcatgtgtaagtggtaacggtgttgccacacactatgcagactccgtgaagggccggttcaccatttccagagacagatccaggaacacgctctttctgcaaatgaacagcctgacagccgacgacacggccaaatattattgtgtcctgcgtggtagttcttttgatatttggggccaggggacaatggtcaccgtctcttca

SEQ ID NO: 7008 - DNA, 283 bp, Homo sapiens
  source 1..283: mol_type = other DNA
tgtaccctctgaaatcatccttggcaactatgccatgagttgggtccgccaggctccaggggaggggctggagtgggtctcatgtgttagtggtaacggtattaccacacactatacagactccgtgaagggccggttcaccatctccagagacagatccaggaacacgctctttctgcaaatgagcagcctgacagccgacgacacggccaaatattattgtgtcctgcgtggtagttcttttgatatatggggccaagggacaatggtcaccgtctcttca

SEQ ID NO: 7009 - DNA, 283 bp, Homo sapiens
  source 1..283: mol_type = other DNA
tgtgccgtctggactcgtccttggcaactctgacatgagttgggtccgccaggctccagggaagggactggagtgggtctcatctattagtggtgatggtgttaatacatactacgccgactccgtgaagggccggttcaccatctccagagacagttccaggaacaggctgtctctccaaatggacaccctgagagacaacgacacggccgtatattactgtgtcctgcggggtagttcttttgatatctggggccaagggacaatggtcagcgtctcttca

SEQ ID NO: 7010 - DNA, 283 bp, Homo sapiens
  source 1..283: mol_type = other DNA
tgtaccctctgaaatcatccttggcaactatgccatgagctgggtccgccaggctccaggggaggggctggagtgggtctcatctgttagtggtaacggtgttaccacacactatgcagactccgtgaagggccggttcaccatctccagagacagatccaggaacacgctctttctgcaaatgaacagcctgacagccgacgacacggccaaatattattgtgtcctgcgtggtagttcttttgatatatggggccaagggacaatggtcaccgtctcttca

SEQ ID NO: 7011 - DNA, 283 bp, Homo sapiens
  source 1..283: mol_type = other DNA
tgtaccctctgaaatcatccttggcaactatgccatgagttgggtccgccaggctccaggggaggggctggagtgggtctcatctgttagtggtaacggtgttaccacacactatgcagactccgtgaagggccggttcaccatctccagagacagatccaggagcactctcttactgcaaatgagcagcctgacagccgacgacacggccaaatattattgtgtcctgcgtggtagttcttttgatatatggggccaagggacaatggtcaccgtctcttca

SEQ ID NO: 7012 - DNA, 283 bp, Homo sapiens
  source 1..283: mol_type = other DNA
tgtgccgtctggactcgtccttggcaactctgacatgagttgggtccgccaggctccagggaagggactggagtgggtctcatctattagtggtagtggtgttaatacatactacgccgactccgtgaagggccggttcaccatctccagagacagttccaggaacaggctgtctctccaaatggacaccctgagagacaacgacacggccgtatattactgtgtcctgcggggtagttcttttgatatctggggccaagggacaatggtcagcgtctcttca

SEQ ID NO: 7013 - DNA, 283 bp, Homo sapiens
  source 1..283: mol_type = other DNA
tgtaccctctgaagtcatccttggcaactatgccatgagttgggtccgccaggctccaggggaggggctggagtgggtctcatctgttagtggtaacgctgttaccacacactatgcagactccgtgaagggccggttcaccatctccagagacagatccaggaacacgctctttctgcaaatgagcagcgtgacagccgacgacacggccaaatattattgtgtcctgcgtggtagttcttttgatatatggggccaagggacaatggtcaccgtctcttca

SEQ ID NO: 7014 - DNA, 281 bp, Homo sapiens
  source 1..281: mol_type = other DNA
taccctctgaaatcatccttggcaactatgccatgagttgggtccgccaggctccaggggaggggctagagtgggtctcatctgttagtggtaacggtgttaccacacactatgcagactccgtgaagggccggttcaccatctccagagacagatccaggaacacactctttctgcaaatgagcagcctgacagccgacgacacggccaaatattattgtgtcctgcgtggtagttcttttgatatatggggccaagggacaatggtcaccgtctcttca

SEQ ID NO: 7015 - DNA, 283 bp, Homo sapiens
  source 1..283: mol_type = other DNA
tgtaccctctgaaatcatccttggcaactatgccatgagttgggtccgccaggctccaggggaggggctggagtgggtctcatctgttagtgggaacgatgttaccacacactacgcagactccgtgaagggccggttcaccatctccagagacagatccaggaacacgctctttctgcaaatgagcagcctgacagtcgacgacacggccaaatattattgtgtcctgcgtggtagttcttttgatatatggggccaagggacaatggtcaccgtctcttca

SEQ ID NO: 7016 - DNA, 283 bp, Homo sapiens
  source 1..283: mol_type = other DNA
tgtagcctctgaggccatccttggcaactatgccatgagttgggtccgccaggctccaggggaggggctggagtgggtctcatctgtcagtggtaacggtattagcacacactatgcagactccgtgaagggccggttcaccatctccagagacagatccaggaacaccctctttctgcaagtgagcagcctgacagccgacgacacggccaaatattattgtgtcctgcgtggtagttcttttgatatatggggccaagggacaatggtcaccgtctcttca

SEQ ID NO: 7017 - DNA, 283 bp, Homo sapiens
  source 1..283: mol_type = other DNA
tgtagcctctgagaccatccttggcaactatgccatgagttgggtccgccaggctccaggggaggggctggagtgggtctcatctgtcagtggtaacggtattaccacacactatgcagactccgtgaagggccgcttcaccgtctccagagacagatccaggaacaccctctttctgcaaatgaacggcctgacagccgacgacacggccagatattattgtgtcctgcgtggcagttcttttgatatatggggccaagggacaatggtcaccgtctcttca

SEQ ID NO: 7018 - DNA, 295 bp, Homo sapiens
  source 1..295: mol_type = other DNA
tgcagcctctggattcagtttcagtaactatgctatgcactgggtccggcaggctccaggcaaggggctggactgggtggcacttatctcttttgatggaagcaatagaaactatgcagactccctgaagggccgattcaccatctccagagacaattccaggaacaccgtgtttcttcagatgaacggcctgagacctgaggacacggctgtctatttctgtgcgagaggattcggtagaggcagctggtcctttgactactggggccagggaaccctggtcaccgtctcctca

SEQ ID NO: 7019 - DNA, 295 bp, Homo sapiens
  source 1..295: mol_type = other DNA
tgcagcctctggattcatctttgacaactatgctatgcactgggtccgccaggctccaggcaaggggccggagtgggtggcatttttaaaatttgatggaacagaagaaatctacgcagactccgtgaagggccgattcaccgtttccagagacaattccaagaacacactgtatctgcaaatgaatagcctgagacctgaggacacggctcaatattattgtgcgagaggattcggccgtggaagctggtcctttgactactggggccagggaaccctggtcactatttcctca

SEQ ID NO: 7020 - DNA, 295 bp, Homo sapiens
  source 1..295: mol_type = other DNA
tgcagcctctggattcatctttcacaactatgctatgcactgggtccgccaggctccaggcaaggggccggagtgggtggcatttttaaaatttgatggaacagaagaaatctacgcagactccgtgaagggccgattcaccgtttccagagacaattccaaggacacactgtatctgcaaatgaatagcctgagacctgaggacacggctgaatattactgtgcgagaggattcggccgtggaagctggtctttcgactactggggccagggaaccctggtcactatctcctca

SEQ ID NO: 7021 - DNA, 301 bp, Homo sapiens
  source 1..301: mol_type = other DNA
tgcagcctctggattcaggtttaatacctattggatgagctggggtcgccaggctccagggaaggggctggagtgggtggccaatataaaggaagatggaagcgagaaatactatgtggagtctgtgaagggccgattcaccatctccagagacaacgccaagaactcattgtatctgcaaatgaacagcctgagaggcgaggacacggccgtgtattactgtgcgagaggcccaactggaacgaccggctactacggtatggacgtctggggccaagggaccacggtcaccgtctcctca

SEQ ID NO: 7022 - DNA, 310 bp, Homo sapiens
  source 1..310: mol_type = other DNA
tgtagcctctggattcacctttagtggctataatagttattggatgagctgggtccgccaggctccaggtaaggggctggagtgggtggccaacataaaggaagatggaagtgagaagtactatgtggactctgtgaagggccgattcaccatctccagagacaacgccaagaattcactgtatctgcaaatgaacagcctgagagccgaggacacggctgtgtatcactgtgcgagaggtccaactggaacgaccggatactacggtatggacgtctggggccaagggaccacggtcaccgtctcctca

SEQ ID NO: 7023 - DNA, 289 bp, Homo sapiens
  source 1..289: mol_type = other DNA
tgcagcctctggattcacctgtagaaataattggatgggctgggtccgccagtctccagggagggggctcgagtgggttgccaatataaaacaagatgacagtgagagactctatggggactctgtgcggggccgcttcaccatctccagagacagcgccaggaactcactgcatctgcaaatgaccgccctcacagccgaagacgcgggcgtatattactgtgcggcctggtgttggagccactggtttgactactggggccagggaaccctggtcgccgtctcctca

SEQ ID NO: 7024 - DNA, 289 bp, Homo sapiens
  source 1..289: mol_type = other DNA
tgcagcctctggattcacctgcagtaataattggatgggctgggtccgccaggtaccagggaagggactggagtgggtggccaacataaagcaagatgagagcgagaaatattatatggactctgtgaagggccgattcaccatctccagggacgacgccaggaactcaatgtatcttcaaatgaacaacctgagagccgaggacacggctgtctattactgtgcggcatggtgttggagccactggtttgactactggggccagggaaccctggtcaccgtctcctca

SEQ ID NO: 7025 - DNA, 289 bp, Homo sapiens
  source 1..289: mol_type = other DNA
tacagcctctggattcacctgtagtaataattggatgggctgggtccgccaggtaccagggaagggactggagtgggtggccaacataaagcaagatgggagcgagaaatcctatgtggactctgtgaggggccgattcaccatctccagggacgacgccaggaactcactatatcttcaaatgaacaacctgagagccgaggacacggctgtctattactgtgcggcatggtgttggagccactggtttgactactggggccagggaaccctggtcaccgtctcctca

SEQ ID NO: 7026 - DNA, 289 bp, Homo sapiens
  source 1..289: mol_type = other DNA
tgtagcctctggattcacctgtagtaacaattggatgggctgggtccgccagctaccagggaagggactggagtgggtggccaacataaagcaaggtgagaccgagaaatcctatgtggactctgtgaagggccgattcaccatctccagggacgacaccaggaactcactatatcttcaaatgaatagcctgagagccgaggacacggctgtctattactgtgcggcgtggtgttggagccactggtttgactactggggccagggaaccctggtcaccgtctcctca

SEQ ID NO: 7027 - DNA, 289 bp, Homo sapiens
  source 1..289: mol_type = other DNA
tgcagcctctggattcacctgtagtaacaattggatgggctgggtccgccagctaccagggaagggactggagtgggtggccaacataaagcaaggtgagaccgagaaatcctatgtggactctgtgaagggccgattcaccatctccagggacgacaccaggaactcactatatcttcaaatgaatagcctgagagccgaggacacggctgtctattactgtgcggcatggtgttggagccactggtttgactactggggccagggaaccctggtcaccgtctcctca

SEQ ID NO: 7028 - DNA, 289 bp, Homo sapiens
  source 1..289: mol_type = other DNA
tgcagcctctggattcacctgcaataataattggatgggctgggtccgccaggtaccagggaagggactggagtgggtggccaacataaagcaagatgagagcgagaaatattatatggactctgtgaagggccgattcaccatctccagggacgacgccaggaactcaatgtatcttcaaatgaacaacctgagagccgaggacacggctgtctattactgtgcggcatggtgttggagccactggtttgactactggggccagggaaccctggtcaccgtctcctca

SEQ ID NO: 7029 - DNA, 286 bp, Homo sapiens
  source 1..286: mol_type = other DNA
tgcagcctctggattcacctgcagtaataattggatgggctgggtccgccaggtaccagggaagggggagtgggtggccaacataaagcaagatgagagcgagaaatattatatggactctgtgaagggccgattcaccatctccagggacgacgccaggaactcaatgtatcttcaaatgaacaacctgagagccgaggacacggctgtctattactgtgcggcatggtgttggagccactggtttgactactggggccagggaaccctggtcaccgtctcctca

SEQ ID NO: 7030 - DNA, 289 bp, Homo sapiens
  source 1..289: mol_type = other DNA
tgcagcctctggattcacctgcagtaataattggatgggctggatccgccaggtaccagggaagggactggagtgggtggccaacataaagcaagatgagagcgagaaatattatatggactctgtgaagggccgattcaccatctccagggacgacgccaggaactcaatgtatcttcaaatgaacaacctgagagccgaggacacggctgtctattactgtgcggcatggtgttggagccactggtttgactactggggccagggaaccctggtcaccgtctcctca

SEQ ID NO: 7031 - DNA, 289 bp, Homo sapiens; identical to SEQ ID NO: 7025
  source 1..289: mol_type = other DNA

SEQ ID NO: 7032 - DNA, 293 bp, Homo sapiens
  source 1..293: mol_type = other DNA
gcatctccggggagagtgtctctagcaacagtgctcgttggcactggatcagggagtccccatcgagaggccttgagtggctggggaggacattctacgagtccaggtggcatagtgattatgcagtctctgtgaaaagtcgaataaccttcatcgcagacacatccaagaaccaggtctccctgcagctgaactctgtgactcccgaggacacggctgtctattactgtgcaagaggtgagaactacgcgtttgagtactggggccagggaaccccggtcaccgtctcctca

SEQ ID NO: 7033 - DNA, 293 bp, Homo sapiens
  source 1..293: mol_type = other DNA
acatctccggggacagtgtctctagcaacagtgttggttggcactggatcaggcagtccccatcgagaggccttgagtggctgggaaggacatattacaggtccaagtggtataatgattatgcagtatctgtgaaaagtcgaataaccatcaacccagacacatccaagaaccagttctccctgcagctgaactctgtgactcccgaggacacggctgtgtattattgtgcaagaggtgagaactacgcgtttgagtactggggccagggaaccctggtcagcgtctcctca

SEQ ID NO: 7034 - DNA, 286 bp, Homo sapiens
  source 1..286: mol_type = other DNA
tgcagtccccggattcttatttcagaacaaccatatgagttgggtccgccaggctccagggaaggggctggagtgggtggccagcatagataacgatggaagtagaaaatactatgtggactctgtgacgggccgattcaccatctccagagacaacaccaagaactcgctatctctgcaaatggacagcctgagagtcgaggacacggctattttttattgtgcgagaggaggttacaaccgatttgacttctggggccagggaaccctcgtcatcgtctcctca

SEQ ID NO: 7035 - DNA, 286 bp, Homo sapiens
  source 1..286: mol_type = other DNA
tgcagcctctggattcacctttagtcactattggatgagctgggtccgccaggctccagggaaggggctggagtgggtggtcagcatgagggaagatggaagtgagaaatattatgtagattctgtgaagggccgattcaccatctccagagacaacgccaagaactcactgtatctgcaaatgaatagcctgagagccgaggacagggccgtgtattattgtgcgagaggagggtacaaccgatttgacttctggggccagggagccgtggtcaccgtttcctca

SEQ ID NO: 7036 - DNA, 280 bp, Homo sapiens
  source 1..280: mol_type = other DNA
tgcagtgtctggatacaccttcagcagttcctggatggcctgggtccgccaagctccagggaaggggctggtgtgggtctcacgtattagttctgatgggagtagtataacctatgcggactccgtgaagggtcgattcaccatctccagagacaacgccaagaacacactgtatctgcaaatgcacagtctgagagccgaagacacggctgtctactactgtataagagggcggccctgggactactggggccaggggaccctggtcaccgtctcctca

SEQ ID NO: 7037 - DNA, 277 bp, Homo sapiens
  source 1..277: mol_type = other DNA
tgcagcctctggattcaccttcagtacctactggatggactgggtccgccaagctcctgggaaggggctggtgtgggtctcagctataactaggaatggaattacaagttacgcggactccgtgaagggccgattcaccatctccagagacaacgccaagaacacggtgtatctgcaaatgaatggtctgagaggcgaggacacggctgtatactactgtataagaggtcgtccctgggactattggggccagggaaccctggtcaccgtctcctca

SEQ ID NO: 7038 - DNA, 298 bp, Homo sapiens
  source 1..298: mol_type = other DNA
tgcagcctctggattcactttcagtaacgcctggatgagctgggtccgccaggctccagggaaggggctggagtgggttggccatattaaaaggaaaactgatggtgggacaacagactacgctgcacccgtgaaaggcagattcaccatctcaagagatgattcaaaaaccacactctatctgcaaatggacagcctgaaaaccgaggacacagccgtgtattactgtaccacagaacctaggggataccggttgtttgactactggggccagggaaccctggtcaccgtctcctca

SEQ ID NO: 7039 - DNA, 298 bp, Homo sapiens
  source 1..298: mol_type = other DNA
tgcagcctctgggttcagtttcactaaagcccggatgagctgggtccgccaggctccagggaaggggctggagtgggttggccgtattgaaaccaaagctgaaggtgagacaaaagactacgctgcgcccgtggcaggcagattcaccatcttgagagatgatgcagaaagcactttgtatctgcaaatgaacaccctgaaaattgaggacacagccgtttattactgcaccaccgagccgcggggctaccgtttgtttgactattggggccagggagccctggtcaccgtctcctca

SEQ ID NO: 7040 - DNA, 280 bp, Homo sapiens
  source 1..280: mol_type = other DNA
ttcagtctctggattcaccttcagtagcaatcatatgcactgggtccgccaggctccagggaagggactgcaatatgtttcatctattagtcctaatggggataggacatactatacagactccgtgaagggcagattctccatctccagagacaactacaataatatgttgtatcttcaaatgagcagtctgagagctgaggacacggctgtgtattactgtgtgaaagatcaatatattgactactggggccagggaaccctggtcaccgtctcctca

SEQ ID NO: 7041 - DNA, 280 bp, Homo sapiens
  source 1..280: mol_type = other DNA
ttcagtctctggattcaccttcagtaactatttcatgcactgggtccgccaggctccagggaagggactgcaatatgtttcatctattagtactaatggggatagcaaatactacccagactccgtgaagggcagattcaccatctccagggacaattccaagaacacactgtatcttcaaatgagcagtctgagagctgaggacacggctgtatattactgtgtgaaagatcagtatattgattattggggccagggaaccctggtcaccgtctcgtca

SEQ ID NO: 7042 - DNA, 289 bp, Homo sapiens
  source 1..289: mol_type = other DNA
tgcagcctctggattcacctttagtacctcttggatgagctgggtccgccaggctccagggaaggggctggagtgggtggccaacataaagccagatggtgagagacactgtgtggactctgtgacgggccgattcaccatctccagagacaacgccaagaactcactgtatctgcaaatgaacagcctgagagccgaggacacggccgtgtattactgtgcgagagatggggggcgcggtggcgaccttgactactggggccagggaaccctggtcaccgtctcctca

SEQ ID NO: 7043 - DNA, 292 bp, Homo sapiens
  source 1..292: mol_type = other DNA
tggagcctctggattcacctttagtaggcattggatgagttgggtccgccagactccagggaaggggctggagtgggtggccaagataaagtttgatggaagttatatacgctatgtggacactgtgaagggccgattcaccatctccagagacaacgccaaggagtccctgtttctgcaaatgagcagcctgagagccgaggacacggctttgtattactgtgcgagagatgggggccgtggtggtgaccttgactactggggcctgggaaccctggtcaccgtctcctca

SEQ ID NO: 7044 - DNA, 283 bp, Homo sapiens
  source 1..283: mol_type = other DNA
tgcagcctctggattcacctttagtagttattggatgaactgggtccgccagtctccagggaaggggctggagtgggtggccaacataaagccagatggaagtgacaaaaattatgtggactctgtgaagggccgattcaccatctccagagacaacgccaagaactcactgtatctgcaaatgaacagcctgagagtcgaggacacggctgtatattactgtgcgagagacaagcacccccctacttactggggccagggaaccctggtcaccgtctcctca

SEQ ID NO: 7045 - DNA, 283 bp, Homo sapiens
  source 1..283: mol_type = other DNA
tgcagcctctggattcacctttagtagttattggatgaactgggtccgccaggctccagggaaggggctggaatgggtggccaacataaagcaagatggaagtgacaaaaattatgtggactctgtgaagggccgattcaccatctccagagacaacgccaagaactcactgtatctgcaaatgaacagcctgagagtcgaggacacggctgtttattactgtgcgagagacaagcacccccctacttactggggccagggaaccctggtcaccgtctcctca

SEQ ID NO: 7046 - DNA, 283 bp, Homo sapiens
  source 1..283: mol_type = other DNA
tgcagcctctggattcaccttcagcacctattggatgaactgggtccggcaggctccagggaaggggctggagtgggtggccaacataaagccagatggaagtgaggcaaactatgtggactctgtgaagggccgattcaccatctccagagacaacgccaagaattcactgtatctgcaaatgcacagcctgagagccgaggacacggctgtgtattattgtgcgagagacaaacatccgccgacctactggggccagggaaccctggtcaccgtctcctca

SEQ ID NO: 7047 - DNA, 292 bp, Homo sapiens
  source 1..292: mol_type = other DNA
cactgtctctcgtggctccctcgatggttactactgcaactggatccggcagcccccagggaagggactggagtggattggatatatctattccattgggagcaccaactacaacccctccctcaagagtcgagtcaccatttctatagacacgtctcagaatcagtgctccctgaagctgagctctgtgaccgctgcggacacggcattatattactgtgcgagaggtcaagcgggagctactaccctttttgactactggggccagggaaccctggtcaccgtctcctca

SEQ ID NO: 7048 - DNA, 292 bp, Homo sapiens
  source 1..292: mol_type = other DNA
cactgtctctggtgcctccatcactacttactactggaactggatccggcagcccccagggaagggactggagtggattggatatatctattacagtgggagcaccaactacaacccctccctcaagagtcgagtcaccatatcagtagacacgtccaagaaccagttctccctgaagctgagctctgtgaccgctgcggacacggccgtgtattactgtgcgagaggtcaagcgggagctactaccctctttgactactggggccagggaaccctggtcaccgtctcctca

SEQ ID NO: 7049 - DNA, 295 bp, Homo sapiens
  source 1..295: mol_type = other DNA
tgcagcctctggattcaccttcaattactactggatgcactgggtccgccaagctccagggaaggggctggtgtgggtctcacgtattcatggtgatgagagtaggacaaactacgcggactccgtgaagggccgattcaccatctccagagacaacgccaagaacacggtgtatctgcaaatgaacaatctaagagccgaggacacggctgtgtattactgtgcaagggacggccatggttcggggattgactttgactactggggccagggaaccctggtcaccgtctcctca

SEQ ID NO: 7050 - DNA, 295 bp, Homo sapiens
  source 1..295: mol_type = other DNA
tgcaggttctggattcgccttcagtacccactggatgcactgggtccgccaagctccagggaaggggctggtgtgggtcgcacatattaatggtgatgggagtaggacaaactatatggattccgtgaagggccgattcaccatctccagagacaacgccaagaacacgctgtatctgcaaatgaatagtctgagagccgaggacacggctgtatattactgtgcaagagatggacatggttcggggatcgattttgattactggggccagggaaccctgatcaccgtctcctca

SEQ ID NO: 7051 - DNA, 295 bp, Homo sapiens
  source 1..295: mol_type = other DNA
tgcaggttctggattcgccttcagtacccactggatgcactgggtccgccaagctccagggaaggggctggtgtgggtcgcacatattaatggtgatgggagtaggacaaactatatggattccctgaagggccgattcaccatctccagagacaacgccaagaacacgctgtatctgcaaatgaatagtctgagagccgaggacacggctgtatattactgtgcaagagatggacatggttcggggatcgattttgattactggggccagggaaccctgatcaccgtctcctca

SEQ ID NO: 7052 - DNA, 295 bp, Homo sapiens
  source 1..295: mol_type = other DNA
tgcaggttctggattcgccttcagtacccactggatgcactgggtccgccaagctccagggaaggggctggtgtgggtcgcacatattaatgatgatgggagtaggacaaactatatggattccgtgaagggccgattcaccatctccagagacaacgccaagaacacgctgtatctgcaaatgaatagtctgagagccgaggacacggctgtatattactgtgcaagagatggacatggttcggggatcgattttgattactggggccagggaaccctgatcaccgtctcctca

SEQ ID NO: 7053 - DNA, 295 bp, Homo sapiens
  source 1..295: mol_type = other DNA
tgcagcctctgggttcagcgtcagcacgagctacatgacctgggtccgccaggctccagggagggggctggagtgggtctcatttatttatagggatggtagcacattctacgcagactccgtgaggggccgattcaccatctccagagacaattccaagaacacgctatatcttcaaatgaacagcctgagcgccgacgacacggccgtgtattactgtgcgagtcgcccccccgacttcgatgtgggtgtcttagactactggggccagggaaccctggtcaccgtctccgca

SEQ ID NO: 7054 - DNA, 295 bp, Homo sapiens
  source 1..295: mol_type = other DNA
tgcagtctctgggttcagcgtcagcacgaactacatgacctgggtccgccgggctccagggagggggctggagtgggtctcatttatttatagggatggtagtgtatactacgcagactccgtgaggggccgattcaccatctccagagacaattccaagaacactctgtatcttcaaatgaacagcctgagcgccgacgacacggccgtgtattattgtgcgagtcgcccccctgacttcgatgtgggtgtcttagactactggggccagggaaccctggtcaccgtctcctca

SEQ ID NO: 7055 - DNA, 295 bp, Homo sapiens
  source 1..295: mol_type = other DNA
tgcagcctctgggttcagcgtcagcacgaactacatgacctgggtccgccaggctccagggagggggctggagtgggtctcatttatttatagggatggtaggacattctacgcagactccgtgaggggccgattcaccgtctccagagacagttccaagaacaccctgtatcttcaaatgaacagcctgagcgccgacgacacggccgtgtattactgtgcgagtcgcccccctgacttcgatgtgggtgtcttagactactggggccagggaaccctggtcaccgtctcctca

SEQ ID NO: 7056 - DNA, 295 bp, Homo sapiens
  source 1..295: mol_type = other DNA
tgcagcctctgggctcaccgtcacttcgaattacatgacctgggtccgccaggctccagggagggggctggagtgggtctcatttatttatagggatggtagcacatactacgcagactccgtgaggggccggttcaccatttccagagacaattccaagaacacactgtatcttcacatgaagagcctgagcgccgacgacacggccgtgtattactgtgcgagtcgcccccctgacttcgatgtgggtgtcttagactactggggccagggaaccctggtcaccgtctcctca

SEQ ID NO: 7057 - DNA, 295 bp, Homo sapiens
  source 1..295: mol_type = other DNA
tgcagtctctgggctcaccgtcagtagccactacatgagctgggtccgcctggctccagggaagggactggagtgggtctcatttatttatagaggtggtaacacatactacgcagactccgtgcagggccgattcaccatctccagagacacttccaagaacacgctgtttcttcaaatgaacagcctgagagccgaagacacggccgtatattactgtgcgagtcgcccacctgacttcgatgtaggggtccttgactactggggccagggaaccctggtcaccgtctcctca

SEQ ID NO: 7058 - DNA, 279 bp, Homo sapiens
  source 1..279: mol_type = other DNA
ttcagtctctggattcaccctcagtgattattttatgcactgggtccgccaggctccagggaagggactgcaatatgtttcatctattagtcgtaatggggatagcacatactacgcagactccgtgaagggcagattcaccatctccagagacaattacaagaatatgctgtatcttcaaatgaacagtctgagagctgaggacacggctgtgtattactgtgtgaaagatcagtatgttgactattggggccagggaaccctggtcaccgtctcctc

SEQ ID NO: 7059 - DNA, 280 bp, Homo sapiens
  source 1..280: mol_type = other DNA
ttcagtctctggattcaccctcagtgattattttatgcactgggtccgccaggctccagggaagggactgcaatatgtttcatctattagtcgtaatggggatagcacatactacgcagactccgtgaagggcagattcaccatctccagagacaattaccagaatatgctgtatcttcaaatgagcagtctgagagctgaggacacggctgtgtattactgtgtgaaagatcagtatgttgactattggggccagggaaccctggtcaccgtctcctca

SEQ ID NO: 7060 - DNA, 280 bp, Homo sapiens
  source 1..280: mol_type = other DNA
ttcagtctctggattcaccctcagtgattattttatgcactgggtccgccaggctccagggaagggactgcaatatgtttcatctattagtcgtaatggggatagcacatactacgcagactccgtgaagggcagattcaccatctccagagacaattacaagaatatgctgtatcttcaaatgaacagtctgagagctgaggacacggctgtgtattactgtgtgaaagatcagtatgttgactattggggccagggaaccctggtcaccgtctcctca

SEQ ID NO: 7061 - DNA, 280 bp, Homo sapiens
  source 1..280: mol_type = other DNA
ttcagcctctggattcaccttcagtaactatgctatgcactgggtccgccaggctccagggaagggactggaatatgtttcatctattagtagtaatggggatagaacatactacagagactccgtgaagggcagattcaccatctccagagacaatttcaagaacacactgtatcttcaaatgagcagtctgagagctgaggacacggctctttattactgtgtgaaagatcagtatgttgattactggggccagggaaccctggtcaccgtctcctca

SEQ ID NO: 7062 - DNA, 283 bp, Homo sapiens
  source 1..283: mol_type = other DNA
tgtagcctccggactcagcatcggtttggatgtcatgcactgggttcgccagggtccagggaaggggctagagtgggtctcaagtattagtggcaggggcgaaagaagagactacgcagattccgtgaagggtcgattcatcgtctctagagacaattctaagaataaattgtttctgacaatggacggcctgagagacgacgacacggccgcatatttttgtgccctgagggggtctgcatttgacatctggggccaagggaccgtggtcaccgtctcctca

SEQ ID NO: 7063 - DNA, 283 bp, Homo sapiens
  source 1..283: mol_type = other DNA
tgcagcctctggattcacccttaggaacgaggccatgacctgggtccgccagcctccagggaaggggctggaatgtgtctcagtcattagtggtagtggtgaaaacacatactacgcagactccgtgaagggccgattcaccatctccagagacaattccaagaacaccctctatctgcagatgaacagcctgagagccgaggacacggccgtatattactgtgccctgcggggtagtgcttttgatatctggggccagggaaccctggtcaccgtctcctca

SEQ ID NO: 7064 - DNA, 298 bp, Homo sapiens
  source 1..298: mol_type = other DNA
cactgtctctggtgcctccatcagcagtagtagttactactggggctggatccgccagcccccagggaaggggctggagtggattgggagtatttattatagtgggagcacctactacaacccgtccctcaagagtcgagtcaccatatccgtagacacgtccaagaacaaggtctccctgaaggtgagctctgtgaccgccgcagacacggctgtgtattactgtgcgagacagccctcgctggtccgagggcattttgaccactggggccagggaaccctggtcaccgtctcctca

SEQ ID NO: 7065 - DNA, 298 bp, Homo sapiens
  source 1..298: mol_type = other DNA
cactgtctctggtggctccatcagcagtagtacttactactggggctgggtccgccaccccccaggaaaggggctggagtggattgggagtatctattatagtgggaacacctactacaacccgtccctcaagagtcgagtcaccatatccgtagacacgtccaagaaccacttctccctgaagctgagctctgtgaccgccgcagacacggctgtctattactgtgcgagacaaccaagtctggtgcgtggccactttgaccactggggccagggaaccctggtcaccgtctcctca

SEQ ID NO: 7066 - DNA, 321 bp, Homo sapiens
  source 1..321: mol_type = other DNA
actcagaccctcacgctgacctgcaccttctctggtttctcactcaccactactggagtaggtgtgggctggatccgtcagcccccaggaaaggccctggagtggcttgcagtcatattttgggataatgataagcgctacagcccatctctgaagagtaggctcaccatcaccaaggacacctccaaaaaccaggtggtccttacaatgacctacatggagcctgtggacacagccacatattactgtgtgcgcagacccctcagggggcagaactggttcgacccctggggccagggaatcttggtcaccgtctcctca

SEQ ID NO: 7067 - DNA, 321 bp, Homo sapiens
  source 1..321: mol_type = other DNA
acacagaccctcacgctgacctgcaccttctctgggttctcactcagaactactggagtgggtgtgggctggattcgtcagcccccaggagaggccctggaataccttgtagtcatttattgggatgatgataagcgctacaacccatctctgaagagcaggctcaccgtcaccaaggacacctccaaaaatcaggtggtccttacaatgaccaatatggaccctgtggacacagccacatattattgtgtacgtaggccccttcggggccagaattggttcgacccctggggccagggaaccctggtcaccgtctcctca

SEQ ID NO: 7068 - DNA, 321 bp, Homo sapiens
  source 1..321: mol_type = other DNA
acacagaccctcacgctgacctgcaccttctctgggttctctctcaccactactggagtgggtgtgggctggattcgtcagcccccaggaggggccctggaataccttgtaatcgtttattgggatgatgaaaaccgctacaacccatctctggagagcaggctcaccatcaccaaggacacctccaaaaatcaggtggtccttacaatgaccaacatggaccctatggacacagccacatattactgtgtacgtaggccccttcggggccagaactggttcgacccctggggccagggaaccctggtcaccgtctcctcg

SEQ ID NO: 7069 - DNA, 321 bp, Homo sapiens
  source 1..321: mol_type = other DNA
acacagaccctcacgctgacctgcaccttctctgggttctcactcagcactactggagtgggtgtgggctggattcgtcagcccccaggagaggccctggaataccttgtagtcgtttattgggatgatgataagcgctacaacccatctctgaagaacaggctcgccgtcaccaaggacacctccaaaaatcaggtggtccttacaatgaccaatatggaccctgtggacacagccacatattattgcgtacgtaggccccttcggggccagaattggttcgacccctggggccagggaaccctggtcaccgtctcctca

SEQ ID NO: 7070 - DNA, 321 bp, Homo sapiens
  source 1..321: mol_type = other DNA
acacagaccctcacgctgacctgcaccttctctgggttctcactcagcacttctggagtgggtgtgggctggattcgtcagcccccaggagaggccctggagtaccttgtagtcatttattgggatgatgataagcgctacaacccatctctgaagagcaggctcaccatcaccaaggacacctccaaaaatcaggtggtccttacaatgaccaacatggaccctatggacacagccacatattattgtgtacgtaggccccttcggggccagaattggttcgacccctggggccagggaaccctggtcaccgtctcctca

SEQ ID NO: 7071 - DNA, 321 bp, Homo sapiens
  source 1..321: mol_type = other DNA
acacagaccctcacgctgacctgcaccttctctgggttctcactcagcactactggagtgggtgtgggctggattcgtcagcccccaggagaggcactggaataccttgtagtcatttattgggatgatgataagcgctacaacccatctctgaagaacaggctcaccatcaccaaggacacctccaaaaatcaggtgttccttacaatgaccaacatggaccctatggacacagccacatattattgtgtacgtaggccccttcggggccagaattggttcgacccctggggccagggaaccctggtctccgtctcctca

SEQ ID NO: 7072 - DNA, 321 bp, Homo sapiens
  source 1..321: mol_type = other DNA
acacagaccctcacgctgacctgcaccttctctgggttctcactcagcactactggagtgggtgtgggctggattcgtcagcccccaggagaggccctggagtaccttgtagtcgtttattgggatgatgataagcgctacaacccctctctgaagaacaggctcaccatcaccaaggacacctccaaaaatcaggtggtccttacaatgaccaacatggacccaatggacacagccacatattattgtgtacgtaggccccttcggggccagaattggttcgacccctggggccagggaaccctggtcaccgtctcctca

SEQ ID NO: 7073 - DNA, 303 bp, Homo sapiens
  source 1..303: mol_type = other DNA
gcttctggatacaccttcaacagttatgatatcaactgggtgcgacaggccactggacaagggcttgagtggatgggatggatgaaccctaacagtggtaacaccggctatgcacagaagttccagggcagggtcaccatgaccaggaacacctccattagtacaggctacatggagctgagcagcctgagtactgaggacacggccgtgtattactgtgcgagagggccggggtgtactagtaccacctgcccgtattattttgactactggggccagggaaccctggtcaccgtctcctca

SEQ ID NO: 7074 - DNA, 303 bp, Homo sapiens
  source 1..303: mol_type = other DNA
gcttctggatacaccttcaccagttatgatatcaactgggtgcgacaggccactggacatgggcttgagtggatgggatggatgaaccctaacagtggtaacacaggctatgcacagaaattccagggcagagtcaccatgactaggaacacctccataagcacagcctacatggagctgagcagcctgagatctgaggacacggccatatattactgtgcgagaggccctggctgtactagtaccacctgcccgtactactttgactactggggccagggaaccctggtcaccgtctcctca

SEQ ID NO: 7075 - DNA, 277 bp, Homo sapiens
  source 1..277: mol_type = other DNA
tgcagtctctggattcacatttagcactaattggatgagctgggtccgccaggctccagggaaggggctggagtgggtggccaacataaagcaagatggaagtgagaaatactatgtggactctgtgaagggccgattcaccatctccagagacaacgccaagaactcactgtatctacaaatgaacagcctgagagccgaggacacggccatgtattactgtgcgagtccccgtctcgacccctggggccagggaaccctggtcaccgtctcctca

SEQ ID NO: 7076 - DNA, 277 bp, Homo sapiens
  source 1..277: mol_type = other DNA
tgcagtctctggattcacatttaccactaattggatgagctgggtccgccaggctccagggaaggggctggagtgggtggccaacataaagcaagatggaagtgagaaatactatgcggactctgtggagggccgattcaccatctccagagacaacgccaagaactcactgtatctgcaaatgaacagcctgagagccgaggacacggccgtgtattactgtgcgagtccccgtctcgacccctggggccagggaaccctggtcaccgtctcctca

SEQ ID NO: 7077 - DNA, 277 bp, Homo sapiens
  source 1..277: mol_type = other DNA
tgcagtctctggattcacatttagcactaattggatgagctgggtccgccaggctccagggaaggggctggagtgggtggccaacataaagcaagatggaagtgacaaaaactatgtggactctgtgaagggccgattcaccatctccagagacaacgccaagaactcactgtatctacaaatgaacagcctgagagccgaggacacggccatgtattactgtgcgagtccccgtctcgacccctggggccagggaaccctggtcaccgtctcctca

SEQ ID NO: 7078 - DNA, 277 bp, Homo sapiens
  source 1..277: mol_type = other DNA
tgcaacctctggattcatcttttctaacgattggatgagttgggtccgccaggctccagggaaggggctggagtgcgtggccaacataaatgaagatggaagtgtgaaatactatatggactctgtgaagggccgattcaccatctccagagacaacgcccagaattcattgtatctgcaaatgaacagtctgaaagtcgaggacacggctgtctactactgtgcgagtccccgcctcgacccctggggccagggaaccctggtcaccgtctcctca

SEQ ID NO: 7079 - DNA, 277 bp, Homo sapiens
  source 1..277: mol_type = other DNA
tgcaacctctggattcatcttttctaacgattggatgagttgggtccgccaggctcctgggaaggggccggagtgcgtggccaacataaataaagatggaagtctgaaatactatgtggactctgtgaagggccgattcaccatctccagagacaacgcccagaattcattgtatctgcaaatgaacagtctgaaagtcgaggacacggctgtctattactgtgcgagtccccgcctcgacccctggggccagggaaccctggtcaccgtctcctca

SEQ ID NO: 7080 - DNA, 277 bp, Homo sapiens
  source 1..277: mol_type = other DNA
tgcaacctctggattcatcttttctaacgattggatgagttgggtctgccaggctccagggaaggggctggagtgcgtggccaacataaatgaagatggaagtgtgaaatactatatggactctgtgaagggccgattcaccatctccagagacaacgcccagaattcattgtatctgcaaatgaacagtctgaaagtcgaggacacggctgtctactactgtgcgagtccccgcctcgacccctggggccagggaaccctggtcaccgtctcctca

SEQ ID NO: 7081 - DNA, 289 bp, Homo sapiens
  source 1..289: mol_type = other DNA
ttcagcctctggattcacttttagtgacgcctggatgagttgggtccgccagactccaggcaaggggctggagtgggttgcccgtcttaaaagcaaaagggacggtgggacaagagactacgctgcgcccgtgaaagggagattcatcgtctcaagagatgattcaaaaaacaccctatatctcgaaatgaacagcctgaaaagcgaggacacaggcaggtattactgcaccacagatcaggctatctttgactattggggcctgggaaccctggtcaccgtctcctca

SEQ ID NO: 7082 - DNA, 289 bp, Homo sapiens
  source 1..289: mol_type = other DNA
ttctgcctctggattcactttcagagacgcctggatgagttgggtccgccaggctccagggaaggggctagaatgggttggccgtatcaaaagtgaaactgatggggggacaagagactacgctgcacccgtgagaggcagatttagcatctcaagagatgattcaaaagacaccctgtatctgcaaatgaacagcctgaaaatcgaggacacagccatgtacttctgtaccacagatcaggcgatatttgattactggggccccggaatccaggtcaccgtctcgtcg

SEQ ID NO: 7083 - DNA, 285 bp, Homo sapiens
  source 1..285: mol_type = other DNA
acttctggttatatttttaccacctttggtctcacctgggtgcgacaggcccctggacaagggcttgagtggctgggatggatcaacaataaagatggtcacacacagtatggacagatggtccaaggcagagtcaccatgaccacagacacatccacgaccacagcctacatggagttgaggagcctgacatctggcgacacggccatgtattactgtgcgcgatccggggacggggggtatagtcacgactggggccggggaaccctggtcaccgtctcctca

SEQ ID NO: 7084 - DNA, 285 bp, Homo sapiens
  source 1..285: mol_type = other DNA
gcttctggttacagcttcaccaactttggtatcacctgggtgcgacaggcccctggacaaggacttgagtggatgggatggatcagcacttacaatggtaacacaaactatgcacacaagttccaggacagagtcaccctgaccacagacacatccacaaacacagcctacatggaactgaggagcctgagttctgacgacacggccgtgtattactgtgcgaggtccggagatgggggctactcccacgactggggccagggaaccctggtcaccgtctcctca

SEQ ID NO: 7085 - DNA, 280 bp, Homo sapiens
  source 1..280: mol_type = other DNA
cactgtctctggtggctccgtcagtagtgatactttctactggggctggatccggcagccccccgggaagggattagagtggatcgggatgatgtcttatagtgggagaacctactacaacccctccctcaagagtcgggtcaccatttcagtggacacgtccaggaaccagttctccctgaacttgaactctgtgaccgctgcggacacggccgtttattactgtgcgagaagccatgggacctattggggccagggaatgctggtcaccgtctcctca

SEQ ID NO: 7086 - DNA, 280 bp, Homo sapiens
  source 1..280: mol_type = other DNA
cactgtctctggtggctccgtcagcagtggcaattttctctgggcctggatccggcagcccccaggggaggcactggagtggattggacatatctttaatagtgggagcaccacctacaacccctccctcaagagtcgagtcatcatatcaagagacacgtccaagaaccagttctccctgaaggtgacctctgtgagcgctgcggacacggccgtctattattgtgcgcgatcccatggtacctactggggccagggaaccctggtcaccgtctcttca

SEQ ID NO: 7087 - DNA, 280 bp, Homo sapiens
  source 1..280: mol_type = other DNA
cactgtctctggtggctccgtcagcagtggcaattttctctgggcctggatccggcagcccccaggggaggcactggagtggattggacatatctgtaatagtgggagcaccacctacaacccctccctcaagagtcgagtcatcatatcaagagacacgtccaagaaccagttctccctgaaggtgacctctgtgagcgctgcggacacggccgtctattattgtgcgcgatcccatggtacctactggggccagggaaccctggtcaccgtctcttca

SEQ ID NO: 7088 - DNA, 289 bp, Homo sapiens
  source 1..289: mol_type = other DNA
cagtgtcactactgaatccttcaatgattactcgtggagttgggtccgccagcccccgggaaagggtctggagtggattggcgaaatcactcacactggaagcacctattacagcccgtccctccagagtcgagtctccatctttctggacacgcccaagaaggtggtcttcctgaacctgacctctgtgaccgccgcggacacggctttgtactactgcgcgagagtccggggagctgcggctggtgcggactactggggccaaggatccctggtcaccgtctcctca

SEQ ID NO: 7089 - DNA, 289 bp, Homo sapiens
  source 1..289: mol_type = other DNA
cggtgtctctggtggggccatgactgattactcctggggctgggtccgccagccccccgggaaggggctggagtggcttggggaaatgactcatgctggaaaaactcattacacgccgtccctgaagagtcgtacctcgatttcagtggacacgtccaagagccaagtttctcttaatctgacctctgtgaccgccgcggacacggctatttatttctgtgcgagagtccggggggcagcggctggtgctgactactggggccagggaatcctggtcaccgtctcttca

SEQ ID NO: 7090 - DNA, 301 bp, Homo sapiens
  source 1..301: mol_type = other DNA
tgcaacctctggattcccctttagtgaatattggatgacgtgggtccgccaggttccagggaaggggctggagtgggtcgccaacattaaacaagacggaagtgaaggaaactatgcagcctctgtgaggggccgattcaccatctccagagagaacgccaagaactcaatgtttttgcaaatgaatggcctgagagccgacgacgcgggtgtatattcctgtgcgagagataaagggactacgttgacctcctatggaatggacgtctggggccgagggaccaaggtcaccgtctcctca

SEQ ID NO: 7091 - DNA, 301 bp, Homo sapiens
  source 1..301: mol_type = other DNA
tgcaacctctggattccccttcagtaaatattggatgacgtgggtccgccaggttccagggaaggggctggagtgggtcgccaacattaaacaagacggaagtgaaggaaactatgcaacctctgtgaggggccgattcaccatctccagagagaacgccaagaactcagtgtttttgcaaatgaatgacctgagagtcgacgacgcgggtgtatattcctgtgcgagagataaaggaactacattgacctcctatggaatggacgtctggggccgagggaccaaggtcaccgtctcctca

SEQ ID NO: 7092 - DNA, 301 bp, Homo sapiens
  source 1..301: mol_type = other DNA
tacagcctctggattcatctttaggacctattggatgacctggatccgccaggctccagggaaggggctggagtgggtggccaatataaagcaagatggcagtgaaaaaaactatgtggactctgtgaaaggccgattcaccatctccagagacaacgccaagaactcaatttatctgcaaatggacggcctgcgagccgacgacacggctctttactactgtgcgagagacaaggggactacattgacctcctatggtatggacgtctggggccaagggaccacggtcaccgtctcgtca

SEQ ID NO: 7093 - DNA, 301 bp, Homo sapiens
  source 1..301: mol_type = other DNA
tacagcctctggattcatctttaggacttattggatgacctggatccgccaggctccagggaaggggctggagtgggtggccaatataaaacatgatggaagtgagacaaactatgtagattctgtgaggggccgattcaccatctccagagacaacgccaagaactcaatttatctgcaaatgaatggcctgagagccgacgacacggctctttattactgtgcgagagacaaggggactacgttgacctcctacggtatggacgtctggggccaggggaccacggtcaccgtctcgtca

SEQ ID NO: 7094 - DNA, 301 bp, Homo sapiens
  source 1..301: mol_type = other DNA
tacagcctctggattcatctttaggacttattggatgacctggatccgccaggctccagggaaggggctggagtgggtggccaatataaaacatgatggaagtgagaaaaactatgtagattctgtgaagggccgattcaccatctccagagacaacgccaagaactcaatttatctgcaaatgaacggcctgagagccgacgacacggctctttactactgtgcgagagacaaggggactacgttgacctcctacggtatggacgtctggggccaggggaccacggtcaccgtctcgtca

SEQ ID NO: 7095 - DNA, 301 bp, Homo sapiens
  source 1..301: mol_type = other DNA
tggagcctctggattcatctttagtacctattggatgacctgggtccgccaggctccagggaaggggctggagtgggtggccaacataaaacaagatggaagtgagaaatactatgtggactctgtgaagggccgattcaccgtctccagagacaacgccaagaactcactatatctgcagatgaacagcctgagagccgaggacacggctctttattattgtgcgagagataaggggactacgttgacctcctacggcatggacgtctggggccaagggacgacggtcaccgtctcccca

SEQ ID NO: 7096 - DNA, 301 bp, Homo sapiens
  source 1..301: mol_type = other DNA
tgcagcctctggattcacctttagtacctattggatgacctgggtccgccaggctccagggaaggggctggagtgggtggccaacataaagcaagatggaagtgagaaatactatgtggactctgtgaagggccgattcaccatctccagagacaacgccaagaactcagtatatctgcaaatgaacagcctgagagccgaggacacggctctttactactgtgcgagagataaggggactacgttgacctcctacggcatggacgtctggggccaagggaccacggtcaccgtctcctca

SEQ ID NO: 7097 - DNA, 274 bp, Homo sapiens
  source 1..274: mol_type = other DNA
tgcagcctctggattcaccttcagtagttatgaaatgaactgggtccgccaggctccagggaaggggctggagtggatttcattcattagtggtagtggtagtaccatctactacgcagactctgtgaagggccgattcaccatctccagagacaacgccaagaactcactgtatctgcaaatgaacagcctgagagccgaagacacggctgtttattattgtgccagcttcagcgacccctggggccagggaaccctggtcaccgtctcctca

SEQ ID NO: 7098 - DNA, 274 bp, Homo sapiens
  source 1..274: mol_type = other DNA
tgcagcctctggattcaccttcagtaattatgaaatgaactgggtccgccaggctccagggaaggggctggagtgggtttcatacattactggtagtggtagtgccatatactacgcagactctgtgaagggccgattcaccatctccagagacaacgccaagaactcattgtatctgcaaatgaacagcctgagagccgaggacacggctatttattactgtgcgagtttctccgacccctggggccagggaaccctggtcaccgtctcctca

SEQ ID NO: 7099 - DNA, 295 bp, Homo sapiens
  source 1..295: mol_type = other DNA
tacagcctctggattaaccttcagtaactattggatgacttgggtccgccaggctccagggaaggggctggagtgggtggcccacatagacgaggttggcagggacacatactatctggactctgtgaagggccgattcaccatctccagagacaacgccgagacctccctgtatctgcaaatgaacagcctgagaatggaggacaccgctgtatattactgtgcgagagatctccccatagcgggagctggcttcgactactggggccagggagccctggtcaccgtctcctca

SEQ ID NO: 7100 - DNA, 295 bp, Homo sapiens
  source 1..295: mol_type = other DNA
tgcagcctctggattcagttttagcgggtcttggatgacttgggtccgccaggctccagggaaggggctggagtgggtggcccacatacaggaagatggaagtcggaaattctatgtggactctgtgaagggccgattcaccatctccagagacaacgccgagaactcactgtatctgcaaatgaacagcctgagagtcgacgacacggctatatattactgtgcgagagatctgcctatagcaggagctgggtttgactactggggccagggaaccatggtcaccgtctcctca

SEQ ID NO: 7101 - DNA, 295 bp, Homo sapiens
  source 1..295: mol_type = other DNA
tgcagcctctggattcagttttagcgggtcttggatgacttgggtccgccaggctccagggaaggggctggagtgggtggcccacatacaggaagatggaagtcggaaattctatgtggactctgtgaagggccgattcactatctccagagacaacgccgagaactcactgtatctgcaaatgaacagcctgagagtcgacgacacggctatatattactgtgcgagagatctgcctatagcaggagctgggtttgactactggggccagggaaccatggtcaccgtctcctca

SEQ ID NO: 7102 - DNA, 295 bp, Homo sapiens
  source 1..295: mol_type = other DNA
tgcagcctctggattcacctttagtgggtcttggatgacttgggtccgccaggctccagggaaggggctggagtgggtggcccacatacaggaagatggaagtcagaaattctatgtggactctgtgaagggccgattcaccatctccagagacaacgccaagaactcactgtctctgcaaatgaacagcctgagagtcgaggacacggccgtatattactgtgcgagagatctgcctatagcaggagctgggtttgactactggggccagggaaccctggtcaccgtctcctca

SEQ ID NO: 7103 - DNA, 288 bp, Homo sapiens
  source 1..288: mol_type = other DNA
gcttctggttacagctttcccacctttggtatcagttgggtgcgacaggcccctggacaagggcttgaatggatgggatggatcagccctaacaatggagccacaaactatgcacggaaattccggggcagagccaccatgaccacggacgcatccacgaccacagcctacctggaactgaggagcctgacatctgacgacacggccgtcttttactgtgcgagagatcctgggggggggtcgggttttgactcctggggccagggaaccctggtcaccgtctcctca

SEQ ID NO: 7104 - DNA, 288 bp, Homo sapiens
  source 1..288: mol_type = other DNA
gcttctggttacacctttaccacctatggtatcagttgggtgcgacaggcccctggacaagggcttgaatggatgggatggatcagccctaacaatggaaacacaaactatgcacagaaattccggggcagagtcaccatgaccacggacgcatccacgactacagcctacctggaactgaggagcctgacatctgacgacacggccgtcttttactgtgcgagagatcctgggggggggtcgggttttgactcctggggccagggaaccctggtcaccgtctcctca

SEQ ID NO: 7105 - DNA, 288 bp, Homo sapiens
  source 1..288: mol_type = other DNA
gcttctggttacacctttaccacctttggaatcagctgggtgcgacaggcccctggacaagggcttgagtggatgggatggatcagcccttacaatggtaacacaaactatgcacagaagttccggggcagagtcaccatgaccacagacacatccacgagcacagcctacttggacctgaggagcctgacatctgacgacacggccttgtattactgtgcgagggaccccgggggtggctccggctttgactcctggggccagggaaccctggtcaccgtctcctca

SEQ ID NO: 7106 - DNA, 285 bp, Homo sapiens
  source 1..285: mol_type = other DNA
acttctggttatagatttaccaactttggtctcacctgggtgcgacaggcccctggacaagggcttgagtggctgggatggatcagcactgaatctggtcacacacagtatgggcagatgatccagggcagaggcaccatgaccgctgacacatccacggccacagcctacatggaactgaggagcctgacatcagacgacacggccatgtattactgtgcgctatccggggacggggcctacagtcacgactggggccggggaaccctggtcaccgtctcctca

SEQ ID NO: 7107 - DNA, 285 bp, Homo sapiens
  source 1..285: mol_type = other DNA
gcttctggttacacctttaccaggtttggtctcacctgggtgcgacaggcccctggaaaagggcttgagtggatgggatggatcaacactgatgaaggtacttcaaagtatgcagagaagttccggggcagagtcaccctgaccacagacacatccgcgaccacagcctatatggagctgaagagcctgaaatctgacgacacggccgtgtattactgtgcgctatccggggacggggcctacagtcacgactggggccagggaacccgggtcaccgtctcctca

SEQ ID NO: 7108 - DNA, 285 bp, Homo sapiens
  source 1..285: mol_type = other DNA
gcttctggtcacaccgtcaccaactttggtctcacctgggtgcgacaggcccctggacaaggccttgagtgggtgggatggatcagcttaattaatggtcatgcagaatacggacaggaactccagggcagagtcaccctgaccacagacacgcccgcgagcacggcctacatggagctgaggagcctgagatctgacgacacagccgtgtattactgtgcgttatccggggacggggcctacagtcacgactggggccagggaaccctggtcaccgtctcctca

SEQ ID NO: 7109 - DNA, 285 bp, Homo sapiens
  source 1..285: mol_type = other DNA
gcctctacttacctctttacaactttcggtgtcacctgggtgcgacaggcccctggacaagggctagagtggatggggtggatcagccctgacaatggtcacacaaactacgcacagaggctccaggacagaggcaccctgaccacagacacatctacgggcacagcctacatggagctgaggagactgcaatctgacgacacggccgtgtattactgtgcgctcagtggtgatggggcctacagtcatgactggggccagggaacccttgtcaccgtctccgca

SEQ ID NO: 7110 - DNA, 285 bp, Homo sapiens
  source 1..285: mol_type = other DNA
gcctctggttacccctttaaaagttttggtatcacctgggtgcgacaggcccctggacaagggcttgagtgggtgggatggatcagcactaacaatggagacgcaaactacgctcagacgttccagggcagagtcaccctgaccgcagacacatccacgagcacagcctacatggagctgaggagcctgagatctgacgacacggccatgtatttctgtgcgctttcgggtgatggggcctactcacacgactggggccagggaaccctggtcaccgtctcctca

SEQ ID NO: 7111 - DNA, 285 bp, Homo sapiens
  source 1..285: mol_type = other DNA
gcccctggtcacatctttaaaagctttggtatcacctgggtgcgacaggcccctggacaagggcttgagtggatgggatggatcagcacttacaatggaaacacaaactatgctcagaggatccagggcagagtcatcatgaccgcggacacatccacgagcacagcctacatggagctgaggaacctgagatctgacgacacggccatctattactgtgcgctttcgggtgatggggcctactcacacgactggggccagggaaccctggtcaccgtctcctca

SEQ ID NO: 7112 - DNA, 285 bp, Homo sapiens
  source 1..285: mol_type = other DNA
gcctctagttacatctttacaagtttcggtgtcacctgggtgcgacaggcccctggacaagggctagagtggatggggtggatcagccctcacaatggtaacacaaactacgcacagaggctccaggacagagtcaccatgaccacagacgcatctacgagcacagcctacatggagctgaggagcctgaaatctgacgacacggccgtgtattactgtgcgctcagtggggatggggcctacagtcatgactggggccagggaacccttgtcaccgtctccgca

SEQ ID NO: 7113 - DNA, 280 bp, Homo sapiens
  source 1..280: mol_type = other DNA
tgcagcctctggattcacttttactacctattggatgagctgggtccgccaggctccagggaaggggccggagtgggtggccaacataaagcaagatggaaatgagaaatactatgtggactctgtgaagggccgattcaccatctccagagacaacgccaggaactcactgtatctgcagatgagcagcctgagagccgaagacacggccatctattactgtgcgagaggaaggacctgtgacaactggggccagggaaccctggtcaccgtctcctcc

SEQ ID NO: 7114 - DNA, 280 bp, Homo sapiens
  source 1..280: mol_type = other DNA
tgcagcctctggattcacctttagtagctattggatgacctgggtccgccaggctccagggaagggactggagtgggtggccagcgtgaaccaatatggaagtgagaaatattatgtggactctgtgaggggccgattcaccatctccagagacaacgccaagaactcactgtatctgcaaatgaacagcctgagaggcgaggacacggctgtgtattactgtgcgagggggaggacctgtgacaactggggccagggaagcctggtcgacgtctcctca

SEQ ID NO: 7115 - DNA, 306 bp, Homo sapiens
  source 1..306: mol_type = other DNA
gcttctggttacacctttactagctatggtatcagctgggtgcgacaggcccctggacaagggcttgagtggatggcatggatcagcgcttacaatggtgacacaaactgtgcaccgaggctccagggcagagtcaccatgaccacagacacatccacgagtacagcttacttggaactgaggagcctgagatctgacgacacggccgtgtattactgtgcgagagatgagaagcggtcttgtagtggttccagctgctattactttgactactggggccagggaaccctggtcaccgtctcctca

SEQ ID NO: 7116 - DNA, 306 bp, Homo sapiens
  source 1..306: mol_type = other DNA
gcttctggttacacttttaccaactatggtatcagctgggtgcgacaggcccctggacaagggcttgagtggatgggatggatcagcggttacaggggtaacagaaactatgcacagaagctccagggcagagtcaccgtgaccacagacacatccacgggcacagcctacatggagctgaggagcctgagatctgacgacacggccgtgtattactgtgcgagagatgagaagcgttcgtgtagtggtagtagttgctactactttgactactggggccagggaaccctggtcaccgtctcctca

SEQ ID NO: 7117 - DNA, 295 bp, Homo sapiens
  source 1..295: mol_type = other DNA
tgcagcctctggattcaccttcagtagttatgaaatgaactgggtccgccaggctccagggaaggggctggagtgggtttcatacattaatagtcgtggtagtagcacatactacgcagactctgtgaggggccgaatcaccatctccagagacaacgccaagagctcactatatctgcaaatgaacagcctgagagccgaggacacggctgtttattactgtgcgagaggggtgtgggatagtagtggttatttccactactggggccagggaaccctggtcaccgtctcctca

SEQ ID NO: 7118 - DNA, 295 bp, Homo sapiens
  source 1..295: mol_type = other DNA
tgcagcctctggattcaccttcagtagttatgaaatgaactgggtccgccaggctccagggaaggggctggagtgggtttcatacattggtagtagtggtagtaccatatactacggagactctgtgaagggccgattcaccatctccagagacaacgccaagaactcactgtatctgcaaatgaacagcctgagagccgaggacacggctgtttattactgtgcgagaggggtttgggatagtagtggttatttccactattggggccggggaaccctggtcaccgtctcctca

SEQ ID NO: 7119 - DNA, 292 bp, Homo sapiens
  source 1..292: mol_type = other DNA
tgcagcctctagattcaccttcagtagttatgctatgcactgggtccgccaggctccaggcaagggactggaatgggtggcagttatatcatttgatggaaagaatacagactacacaggctccgtgaagggccgattcgccatctccagagacaattccaagaacaccctctacttgcaaatgaacagcctgagaactgaggacacggctgtgtattactgtgcgagaggccattattattcctccgactttgactactggggccagggaaccctggtcaccgtctcctca

SEQ ID NO: 7120 - DNA, 292 bp, Homo sapiens
  source 1..292: mol_type = other DNA
tgcagcctctggattccagttcggttcctatgctatgcactgggtccgccagtctccagtcaggggactggagtgggtggcagttatttcatttgatggaaaaactgaatcctacgcagactccgtgaagggccgattcaccatttccagagacaattcgaagaatattctctacctgcaaatgaacagtctgagacctggggacacggctctctattattgtgcgagaggccactactacagttccgactttgactattggggccagggaaccctggtcaccgtctcctca

SEQ ID NO: 7121 - DNA, 292 bp, Homo sapiens; identical to SEQ ID NO: 7120
  source 1..292: mol_type = other DNA

SEQ ID NO: 7122 - DNA, 286 bp, Homo sapiens
  source 1..286: mol_type = other DNA
tacagcctctggattcacctttagaagtttttggatgacctgggtccgccaggctccagggaaggggctggagtgggtggccaacataaaagaagatgcgagtgagagatactttctggactctgtgaagggccgattcaccatctccagagacaacgccaggaactcactgaatctgcaaatggacagcctgagagtcgacgacacggccgtgtactattgtgtgagaggggggtggacagcagttgactactggggccagggaaccctggtcaccgtctcctca

SEQ ID NO: 7123 - DNA, 286 bp, Homo sapiens
  source 1..286: mol_type = other DNA
tgcagcctctggattcatctttagtgattattggatgacctgggttcgccagtctccagggaaggggctggagtgggtggccaacataaagagcgatggaagtgagaaatactatctggactctgtgaggggccgattcaccatctccagagactacgccacgaactcactgtatctgcaaatgaacaccctgagagtcgaagatacggctctctattactgtgtgagggggggttggacagctgtcgactactggggcccgggaaccctggtcaccgtctcctca

SEQ ID NO: 7124 - DNA, 298 bp, Homo sapiens
  source 1..298: mol_type = other DNA
tgtagcctctggaatcactttcagtagcgccaggatgacctgggtccgccaggtcccagggagggggctggagtgggttggccgtattaaaagcaaaactgaaggtgggacaacagactacgctgcacccgtgaaaggcagattcgccatctcaagagatgattcaaaaaacacgctatatttgcaaatgaacagcctcaaaaccgaggacacaggcgtctattactgtatccattatggttcgggaagttatacaaccgactactggggccagggaaccctggtcaccgtctcctca

SEQ ID NO: 7125 - DNA, 298 bp, Homo sapiens
  source 1..298: mol_type = other DNA
tacagcctctggattctatttcactaacgcccggatgagctggttccgccaggctccagggaaggggctggagtgggttggccatattaaaaccaaaagtgacggtgggacaatggactacgctgcacccgtgaaaggcagattcaccatatcaagagatgattcaaaaaacacactgtatctgcaaatgaacagcctgaaaaccgaggacacagccgtgtattactgtatacactatggttcagggagttatacgactgactactggggccagggaaccctggtcaccgtctcctca

SEQ ID NO: 7126 - DNA, 298 bp, Homo sapiens
  source 1..298: mol_type = other DNA
tgcagcctctggattctttttccctagcgcccggatgagctggttccgccaggctccagggaaggggctggagtgggttggccatattagaaccaaaagtgacggtgggacaatagactacgctgcacccgtgacaggcagattcaccatatcaagagatgattcaaaaaacacactgtatctgcaaatgaacagcctgaaaaccgaggacacagccgtgtattactgtatacattatggttcagggagttatacgactgactactggggccagggaaccctggtcaccgtctcctca

SEQ ID NO: 7127 - DNA, 289 bp, Homo sapiens
  source 1..289: mol_type = other DNA
ttcagcctctggattcacattcaataattataatatgcactgggtccgccaggctccagggaagggactacaatatgttgcagcgatcagtggtaatgggggtagtgcatactatgcagactccgtgaaggccagattcaccatctccagagacaattccgcgaacacaatatatcttcaaatgaccagtctgagaactgaagacacggctgtatatttttgtgtgaaagacgttagcagtggctggtatgactactggggccagggaaccctggtcaccgtctcctca

SEQ ID NO: 7128 - DNA, 289 bp, Homo sapiens
  source 1..289: mol_type = other DNA
ttcagcctctggattcacgttcagtcggtacactatgcactgggtccgccaggctccagggaagggactggaatatgtttcagctattacctcaaatgggggtagcacatactacactgactccgtgaagggcagattcaccatctccagagacaattccaagaacacgttgtatcttcaaatgagcagtctgagagttgaggacacggctatatattactgtgtgaaagatgttagcagtggctggtatgactactggggccagggaaccctggtcaccgtctcctca

SEQ ID NO: 7129 - DNA, 282 bp, Homo sapiens
  source 1..282: mol_type = other DNA
gcttctggattcaccttttctggctctgctgtgcagtgggtgcgacaggctcgtggacaacgccttgagtggatagggtggatcgtcgttggcagtggcaacgcaaactacgcacagaagttccaggggagagtcaccattagtagggacaagtccacaagtacggcctttatggagctgagtaacctgagatccgaggacacggccatatattattgtgcggcggaggaagtggctactggagcctactggggccagggaaccctggttacggtctcctca

SEQ ID NO: 7130 - DNA, 282 bp, Homo sapiens
  source 1..282: mol_type = other DNA
acctctggattcaccttttctggctctgcagttcagtgggtgcgacaggcccgtggacagcgccttgagtggataggatggatcgtcgttggcagtggtaaggcaaactacgcacagaagttccaagaaagagtcgccattacaagggacatgtccacaagaacagcctacttggagatgagtagactgacatccgaagacacggccgtctattattgcgcggcggaggaagtggctactggagcctactggggccagggaaccctggtcaccgtctcctca

SEQ ID NO: 7131 - DNA, 282 bp, Homo sapiens
  source 1..282: mol_type = other DNA
gcttctggattcacgttttctggctctgctgtgcagtgggtgcgacaggctcgtggacaacgccttgagtggataggatggatcgtcgttggcagtggtaaggcaaattacgcaccgaagttccaacaaagagtcaccatcaccagggacaagtccacaaatacagcctatatggagttgaggaccctgagatacgacgacacggccgtgtattattgtgcggcggaggaagtggctactggagcctattggggccagggaaccctggtcaccgtctcctca

SEQ ID NO: 7132 - DNA, 282 bp, Homo sapiens
  source 1..282: mol_type = other DNA
acctctggattcaccttttctggctctgctgtgcagtgggtgcgacaggctcgtggacagcgccttgagtgggtaggatggatcgtcgttggcagtggttatacgaactacgcacagaagttccaggaaagagtcaccattgccagggacatgtccacaagcacagtctacttggagctgagtagcctgagatccgaggacacggccgtctatttttgtgcggcagaggaagtggctacgggggcctactggggcccggggaccctggtcaccgtctcctcc

SEQ ID NO: 7133 - DNA, 282 bp, Homo sapiens
  source 1..282: mol_type = other DNA
acctctggattcaccttctctggctctgctgtgcagtgggtgcgacaggctcgcggacagcgccttgagtgggtaggatggatcgtcgttggcagtgcttatacgaactacgcacagaagttccaggaaagagtcaccattgccagggacatgtccacaagcacagtctacttggagctgagtagcctgagatccgaggacacggccgtctatttttgtgcggcagaggaagtggctacgggggcctactggggcccggggaccctggtcaccgtctcctcc

SEQ ID NO: 7134 - DNA, 282 bp, Homo sapiens
  source 1..282: mol_type = other DNA
acttctggactcaccttctctggctctgctgtgcagtgggtgcgacaggctcgtggacaacgccttgagtggataggctggatcgtcgtcggcagtggttatacaaactacgcacagaagtttcaggaaagagtcaccatttccagggacatgtccacaaggacagcctacttggagctgagcagcctgacatccgacgacacggccgtctattactgtgcggcagaggaagtggctacgggggcctactggggccaggggaccctggtcaccgtctcctca

SEQ ID NO: 7135 - DNA, 282 bp, Homo sapiens
  source 1..282: mol_type = other DNA
acctctggattcaccttttctggcactgctgtgcagtgggtgcgacaggctcgtggacagcgccttgagtgggtaggatggatcgtcgctggcagtggctatacgaactacgcacagattttccaggaaagagtcaccattgccagggacatgtccacaagcacagtctacttggagctgagtagcctgagatccgaggacacggccgtctatttttgtgcggcagaggaagtggctacgggggcctactggggcccggggaccctggtcaccgtctcctcc

SEQ ID NO: 7136 - DNA, 292 bp, Homo sapiens
  source 1..292: mol_type = other DNA
tgcagcgtctggattcaccttcagcaccaatggcatgcactgggtccgccaggctccaggcaaggggctggagtgggtggcacttatattatatgatggaagtaataaatactatgcagactccgtgaagggccgattcaccatctccagagacaattccaagaacacgctgtatctgcagatggacagcctgagagccgaggacgcggctgtgtattactgtgcgagagataagagtaagggcagatactttgactactggggccagggaaccctggtcaccgtctcctca

SEQ ID NO: 7137 - DNA, 292 bp, Homo sapiens
  source 1..292: mol_type = other DNA
tgcagcgtctggattcaccttcagtacctctggcatgcactgggtccgccaggctccaggcaaggggctggagtgggtggcaattatatggtatgatggaaataataaatactattcagactccgtgaagggccgattcaccatctccagagacaattccaagaacacgctgtatctgcaaatgaacagcctgagagccgaggacacggctgtatattactgtgcgagagataaaagtaaaggtcgatactttgactactggggccagggaaccctggtcaccgtctcctca

SEQ ID NO: 7138 - DNA, 292 bp, Homo sapiens
  source 1..292: mol_type = other DNA
tgcagcctctggattcagcatcagtggctattggatgacctgggtccgccaggctccagggaaggggctggaattggtggccaacataaagggagatggcagtgacatattctattcggcctctgtgacgggccggttcaccgtctccagagacaacgccaagaacgcagtgtatctgcaaatgaacagcctgagagccgaggacacggctgtgtattactgtgcgagagatcgggggggagccactacccttgactactggggccagggaaccctggtcaccttctcctca

SEQ ID NO: 7139 - DNA, 292 bp, Homo sapiens
  source 1..292: mol_type = other DNA
tgcggcctctggcttcagttttagtaactattggatgccctgggtccgccaggccccagggaaggggctagagttggtggccaacatagagccagatggaagtcgacagttctacattggctctgtgaggggccgattcaccatctccagagacaacgccaagaactcagtgtatctgcaaatgaacagcctgagagacgaggacacggctgtgtattactgtgcgagagatagggggggagctacgactctcgactactggggccagggaaccctagtcaccgtctcctca

SEQ ID NO: 7140 - DNA, 283 bp, Homo sapiens
  source 1..283: mol_type = other DNA
tgcagcctccggatccagcatccgcatggatgccatgcactgggtccgccagggcccggggcaggggctggagtgggtctcaagtataagtggcaggggtgatagaacagactacgccgactccgtgaagggccgcttcaccatctccagagacaattctaagaatacattgtttctggaaatggacggcctaagaggcgaggacacggccatctattattgtatcctgagggggtctgcttttgatatctggggccaagggacagtggtcaccgtctcttca

SEQ ID NO: 7141 - DNA, 283 bp, Homo sapiens
  source 1..283: mol_type = other DNA
tgtagcctctggattcagttttagtaattatgccctgagctgggtccgccaggctccagggaaggggctggagtgggtctcagccattggtggcagcagtgttgacacattctacgctgcctccgtgaggggccgtttcaccatctccagagacagttccaggaatatattgtttctgcaaatgaagagcctgagagccgaggacacggcctcatattactgtatattacgggggagtgcttttgatatctggggccaagggacaagggtcaccgtctcttcc

SEQ ID NO: 7142 - DNA, 283 bp, Homo sapiens
  source 1..283: mol_type = other DNA
tgtagcctctggatttacctttactacctttgccatgagctgggtccgccaggctccaggggagggcctggagtgggtctccgccattagtggtagtggtgatgacacactctacgcagactccgtgaagggccggttctccgtctccagagacagttccaggagcacactctttctgcagatggacagcctgagagccgaggacacggccacattttattgtattttacgggggagcgcttttgatatctggggccgagggaccatggtcaccgtctcttca

SEQ ID NO: 7143 - DNA, 298 bp, Homo sapiens
  source 1..298: mol_type = other DNA
tgcagcctctggattcacctttggtggccattacatggcctgggtccgccaggctccagggaaggggctccagtgggtggccaagataaagatggatggaagtgagaaattctatgtggactctgtgaagggccgattcaccatctccagagacaacgccgagaactctctgtatctgcaaatgaacagcctgagagccgatgacacggctgtgtattactgtgcgagagagaataggtacagcattggctgggattttgactactggggccagggaaccctggtcaccgtctcctca

SEQ ID NO: 7144 - DNA, 298 bp, Homo sapiens
  source 1..298: mol_type = other DNA
tgcagcctctggattcacctttagtagccattacatgggctgggtccgccaggctccagggaaggggctggagtgggtggccaacataaagtatgatggaagtgacaaatactatgtggactctgtgaagggccggttcaccatctccagagacaacgccaagaactcactgtatctgcaaatgaacagcctgaaagtcgaggacacggctgtgttttactgtgcgagagagaataggtatagcattggctgggattttgactactggggccagggaaccctggtcaccgtctcctca

SEQ ID NO: 7145 - DNA, 298 bp, Homo sapiens
  source 1..298: mol_type = other DNA
tgaagcctctggattcacctttagtaggcattacatggcctgggtccgccaggctccagggaaggggctggagtggctggccaatataaagtatgatggaagtgacacattctatgtggactctgtgaagggccggttcaccatctccagagacaacgccaagaactcactgtatctgcaaatgaacagcctggaagtcgaggacacggctctattttactgtgcgagagagaataggtattccattggctgggattttgactactggggccagggaaccctggtcaccgtctcctca

SEQ ID NO: 7146 - DNA, 298 bp, Homo sapiens
  source 1..298: mol_type = other DNA
tgcagcctcaggattcaactttagtggccattggatgagctgggtccgccaggctccagggaaggggctggagtgggtggccaagataaagcaagatggaagtgatcaatactctgtggactctgtgaagggccgattcaccatgtccagagacaacgccaagaactcactgtatctgcaaatgaacagcctgagagccgaggacacggctgtttattactgtgcgagggaaaataggtatagcattggctgggattttgactactggggccagggaaccctggtcaccgtctcctca

SEQ ID NO: 7147 - DNA, 298 bp, Homo sapiens
  source 1..298: mol_type = other DNA
tgaagcctctggattccccttcagtggccattacatgggctgggtccgccaggctccagggaaggggctggagtgggtggccaagataaagtttgatggaagtgacaaacactatgtggactctgtgaagggccggttcaccatctccagagacaacgccaagaactcactgtatctgcaaatgaacagcctgaaagtcgaggacacggctgtgttttactgtgcgagagagaataggtatagcattggctgggattttgactactggggccagggaaccctggtcaccgtctcctca

SEQ ID NO: 7148 - DNA, 296 bp, Homo sapiens
  source 1..296: mol_type = other DNA
cagcctcaggattcaactttagtggccattggatgagctgggtccgccaggctccagggaaggggctggagtgggtggccaagataaagcaagatggaagtgatcaatactctgtggactctgtgaagggccgattcaccatgtccagagacaacgccaagaactcactgtatctgcaaatgaacagcctgagagccgaggacacggctgtttattactgtgcgagggaaaataggtatagcattggctgggattttgactactggggccagggaaccctggtcaccgtctcctca

SEQ ID NO: 7149 - DNA, 283 bp, Homo sapiens
  source 1..283: mol_type = other DNA
tgcagcctctggattcacctttagtagttattggatgaactgggtccgccaggctccagggaaggggctggagtgggtggccaacataaaccaagatggaagtgacaaaaattatgtggactctgtgaagggccgattcaccatctccagagacaacgccaagaattcattgtatctacaaatgaagagcctgagagtcgaggacacggctgtgtattactgtgcgagagacaagcgcccccctacttactggggccagggaaccctggtcaccgtctcctca

SEQ ID NO: 7150 - DNA, 283 bp, Homo sapiens
  source 1..283: mol_type = other DNA
tgcagcctctggattcaccttcagcaactattggatgaactgggtccggcaggctccagggaaggggctggagtgggtggccaacataaagccagatggaagtgaggcaaactatgtggactctgtgaagggccgattcaccatctccagagacaacgccaagaattcactgtatctgcaaatgcacagcctgagagccgaggacacggctgtttactactgtgcgagagacaaacgcccgccgacctactggggccagggaaccctggtcaccgtctcctca

SEQ ID NO: 7151 - DNA, 280 bp, Homo sapiens
  source 1..280: mol_type = other DNA
tgcagcctctggattcacctttagcacctatgtcatgacctgggtccgccaggctccagggaaggggctggagtgggtctcaggtattactggtagtagtggtgtcacatactacgcagactctgtgaggggccggttcaccatctccagagacaattccaagaacacactgtatctgcaaatgaacagcctgagagccgaggacacggccgtatattactgtgcgaagacgggccagtttgaaaactggggccagggaatcctggtcaccgtctcctca

SEQ ID NO: 7152 - DNA, 277 bp, Homo sapiens
  source 1..277: mol_type = other DNA
tgcagcctctggattcacctttagtacttatgccatgagctgggtccgccaagctccagggcaggggctggagtgggtctcaagtattactacaagtggtggcacatactacgcacagtccgtgaggggccggttcaccatttccagagacaattccaagaacacgctgtttctgcaaatgaacagcctgagagacgaagacacggccgtatattactgtgcgaaaactggtcaatttgaaaactggggcccgggaaccctggtcaccgtctcctca

SEQ ID NO: 7153 - DNA, 313 bp, Homo sapiens
  source 1..313: mol_type = other DNA
cactgtctctggtggctccgtcagcagtggtagttactactggagctggatccggcagaccccagggaagggactggagtggattgggtatatctattacagtgggagcaccaacgacaacccctccctcaagagtcgagtcaccatatcagtagacacgtccaagaaccagttctccctgaacctgagctctgtgaccgctgcggacacggccgtgtattactgtgcgagaggcctgtattactatgatagtagtggctattactactactttgactactggggccagggaaccctggtcaccgtctcctca

SEQ ID NO: 7154 - DNA, 313 bp, Homo sapiens
  source 1..313: mol_type = other DNA
cactgtctctggtgcctccatcagcagtactggttactactggacctggatccggcagcccgccgggaagggactggagtggattgggcgtatctataccagtgggagcaccaactacaacccctccctcaagagtcgagtcaccatatcagtagacacgtccaagaaccagttctccctgaagctgagctctgtgaccgccgcagacacggccgtgtattactgtgcgagaggtctctattactatgatagtagtggttattactactactttgactactggggccagggaaccctggtcaccgtctcctca

SEQ ID NO: 7155 - DNA, 283 bp, Homo sapiens
  source 1..283: mol_type = other DNA
tgcagtctccggatccagcatcgccatggatgccatgcactgggtccgccaggctccagggaaggggctggagtgggtctcaagcattactggaaggggagatggaagagagtacgcagactccgtgaagggccggttcaccgcctccagagacaactccaagaacaccctgtatttgtccatggacggcctgagagacgacgacacggccgtatattactgtgtcctgagggggtcttcttttgacctctggggccaggggacagtggtcaccgtctcttcg

SEQ ID NO: 7156 - DNA, 283 bp, Homo sapiens
  source 1..283: mol_type = other DNA
tgtaccctctgaaatcatccttggcaactatgccatgagttgggtccgccaggctccaggggaggggctggagtgggtctcatctattactggtaacggtgttaccacacactatgcagactccgtgaagggccggttcaccatctccagagacagatccaggaacacgctctttctgcaaatgagcagcctgacagccgacgacacggccaaatattattgtgtcctgcgtggtagttcttttgatttatggggccaagggacaatggtcaccgtctcttca

SEQ ID NO: 7157 - DNA, 286 bp, Homo sapiens
  source 1..286: mol_type = other DNA
tgcagcgtctggattcacctttagcagctatgtcatgacctgggtccgccaggctccagggaaggggctggagtgggtctcaactattggtggtggtggtgataacacatattacgcagactccgtgaggggccggttcaccatctccagagacaattccaggaacactctgcatctgcaaatgagcagcctgagagccgaggacacggccgtatattactgtgcgagtaagataacggacgactttgactactggggccagggaaccctggtcaccgtctcctcg

SEQ ID NO: 7158 - DNA, 286 bp, Homo sapiens
  source 1..286: mol_type = other DNA
tgcagcctctggattcacctttaggaagtctaccatgagctgggtccgccaggctccagggaaggggctgcagtgggtctcaactattagtagtcgtggtgatgccacgtactacgcagactccgtcaagggccggttcaccgtctctagagacaagtccgagaacacgctgtatctgcaaatgaacagcctgagaaccgacgacacggccctttactactgtgcgtccaagattacggacgactttgactactggagtcagggaaccctggtcaccgtctcctca

SEQ ID NO: 7159 - DNA, 286 bp, Homo sapiens
  source 1..286: mol_type = other DNA
tgcaggctctggattctcccttaggaagtctaccatgacctgggtccgccaggctccagggaaggggcttcagtgggtctcaactattagtagtcgtggtgatgccacatactacgcagactccgtgaggggccggttcaccatctttagagacaaatccgagaacacgatgcatctgcaaatgaacagcctgacaaccgacgacacggccgtttactactgtgcgtccaagatcacggacgactttgactactggggccaaggaaccctagtcaccgtctcctca

SEQ ID NO: 7160 - DNA, 286 bp, Homo sapiens
  source 1..286: mol_type = other DNA
tgcagtctctggattcacctttaggaagtctatcatgagctgggtccgccaggctccagggaaggggctgcagtgggtctcaactattagtagtcgtggtgatgccacgtactacgcagactccgtgaagggccggttcaccgtctctagagacaagtccgagaacacgctgtatctgcaaatgaacagcctgagaaccgacgacacggccctttactactgtgcgtccaagattacggacgactttgactactggagccagggaaccctggtcaccgtctcctca

SEQ ID NO: 7161 - DNA, 286 bp, Homo sapiens
  source 1..286: mol_type = other DNA
tgcagcctctggattcagtcttagcagatataccatgagctgggtccggcaggctccagggaaggggctggagtgggtctcaacgtttagtcctagtcgtgatagaacattctacgcagactccgtgaggggccgcttcaccatctccacagacaattccaagaacactctgtatctgcaaatggacagcctgagagccgaggacacggccatatattactgtgccagcaagattacagacgactttgactacgtgggccagggaaccctggtcaccgtctcctca

SEQ ID NO: 7162 - DNA, 286 bp, Homo sapiens
  source 1..286: mol_type = other DNA
tgcagcctctggattcacctttaggaagtctatcatgagctgggtccgccaggctccagggaaggggctgcagtgggtctcaactattagtagtcgtggtgatgccacgtactacgctgactccgtgaagggccggttcaccgtctctagagacaagtccgaggacacgctgtatttgcaaatgaatagcctgagaaccgacgacacggccctttactactgtgcgtccaagattacggacgactttgactactggagccagggaaccctggtcaccgtctcctca

SEQ ID NO: 7163 - DNA, 286 bp, Homo sapiens
  source 1..286: mol_type = other DNA
tgcagcctctggattcacctttaggaagtctaccatgagctgggtccgccaggctccagggaaggggctgcagtgggtctcaactattagtagtcgtaatgatgccacgtactacgcagactccgtgaagggccggttcaccgtctctagagacaagtccgagaacacgctgtatctgcaaatgaacagcctgagaaccgacgacacggccctttactactgtgcgtccaagattacggacgactttgactactggagccagggaaccctggtcaccgtctcctca

SEQ ID NO: 7164 - DNA, 288 bp, Homo sapiens
  source 1..288: mol_type = other DNA
gcttctggctacacctttaccagttatggtgtcagctgggtgcgacaggcccctggacaaggacttgagtggatgggatggatcaacgctcacaatggtaacacaaactatgcacagaagctccagggcagagtcaccatgaccacagacacatccacgaacacagcctacatggacctgaggagcctgagatctgacgacacggccgtttattactgtgcgagaggtggtaccagtggctggtatgtggactactggggccagggaaccctggtcaccgtctcctca

SEQ ID NO: 7165 - DNA, 288 bp, Homo sapiens
  source 1..288: mol_type = other DNA
gcttctggttacacctttaccagctatggtatcacctgggtgcgacaggcccctggacaagggcttgagtggatgggatggatcaaccctaacaatggtaacacaaactatgcacagaacctccaggacagagtcaccatgaccacagacacatccacgagcacagcctacatggacctgaggagcctgagatctgacgacacggccgtctattactgtgcgagagggggaaccagtggctggtacgttgactattggggccagggaaccctggtcaccgtctcctca

SEQ ID NO: 7166 - DNA, 301 bp, Homo sapiens
  source 1..301: mol_type = other DNA
cactgtctctggtgcctccatcactacttactactggagttggatccggcagcccccagggaagggactggagtggattgggtatatccatgacagtgggagcaccaactacaacccctccctcaagagtcgagtcatcatatcagtagacacgtccaagaaccagttctccctacagctgacctctgtgaccgctgcggacacggccgtgtattactgtgcgagagggggaaatgcggtggcaaattggagatactactttgactactggggccaggggaccctggtcaccgtctcctca

SEQ ID NO: 7167 - DNA, 301 bp, Homo sapiens
  source 1..301: mol_type = other DNA
cactgtctctggtggctccatcagtacttactacttgagctggatccggcagaccccagagaagggactggagtggattggatatatctattacgatgggagcacccaatacagcccctccctcgagggtcgagtcaccatttcactagacacgtccaagaaccagttctccctgaagttgtattctgtgaccgctgcggacacggccgtgtattactgtgcgagagggggtaacgccgtagcaaactggcgttactactttgactactggggcccgggaatgcaggtcaccgtctcgtca

SEQ ID NO: 7168 - DNA, 301 bp, Homo sapiens
  source 1..301: mol_type = other DNA
cactgtctctggtgactccatcagtacttactacttgagctggatccggcagaccccagagaagggactggagtggattgggtatatctattacgatgggggaacccagtacagcccctccctcgagggtcgagtcaccatttcactagacacgtccaagaaccagttctccctgaagttgtactctgtgaccgctgcggacacggccgtctattactgtgcgagagggggtaacgccgtagcaaactggcgttactactttgactactggggcccgggaatccaggtcaccgtctcctca

SEQ ID NO: 7169 - DNA, 292 bp, Homo sapiens
  source 1..292: mol_type = other DNA
cagtgtctctggtggctccatcagtagttactactggagctggatccggcagcccccagggaagggactggagtggattgggtatatttcttacagtgggatcaccaactacaacccctccctcaagagtcgagtcaccatatcactagacacgtccaagaaccagttctccctgaagctgagctctgtgaccgctgcggacacggccctgtattactgtgcgagagcggggcggggagcagcagctggctatgactactggggccagggaaccctggtcaccgtctcctca

SEQ ID NO: 7170 - DNA, 292 bp, Homo sapiens
  source 1..292: mol_type = other DNA
cactgtctctggtggctccatcagtagttactactggagctggatccggcagcccccagggaagggactggagtggattggctatatctattacagtgggagcacaaactacaacccctccctccagagtcgagtcaccatatcagtagacacgtccaagaaccagttctccctgaagctgacctctgtgaccgctgcggacacggccgtgtattactgtgcgagagcggggagaggagcagcagctggttatgactactggggccagggaaccctggtcaccgtctcctca

SEQ ID NO: 7171 - DNA, 289 bp, Homo sapiens
  source 1..289: mol_type = other DNA
tgcagcctctggattcactttcaatgacgcctggatgagctgggtccgccagcctccagggaaggggctggagtgggttggccgtattaaaagcaaaactcaaggtggggcaacagactacgctgcacccgtgacaggcagattcaccatctcaagagatgattcaaaaaacacgctgtatctgcaaatgaacagcctgaaaatcgaggacacagccgtgtattactgtaccacccgcccaacacaagggggctactggggccagggaaccctggtcaccgtctcatca

SEQ ID NO: 7172 - DNA, 289 bp, Homo sapiens
  source 1..289: mol_type = other DNA
tgcagcctctggattcactttcagtagcgcctggatgagctgggtccgccaggttccaggggaggggctggagtgggttggccgtattagaagcaaaactagtggtgagacaatagagtatgctgcacccgtggaaggcagattcagcatctcaagagatgattcaaaaaacacggtgtatctgcaaatgaacagcctgaaaaccgaggacacagccgtgtattattgtaccacccgcccaacacaagggggctactggggccagggaaccctagtcaccgtctcctca

SEQ ID NO: 7173 - DNA, 289 bp, Homo sapiens
  source 1..289: mol_type = other DNA
tgcagcctctggattcactttcaataacgcctggatgaactgggtccgccaggctccagggaaggggctggagtgggttggccgtattaaaaggaaaactgagggtgggacaacagaatacgctgcacccgtgaaaggcagattcaccatctcaagagacgattcaaaaaacacgctgtatctgcaaatgaacagcctgaaaaccgaagacacagccgtatattactgtaccacaaggcctacacaaggaggctactggggccagggaaccctggtcaccgtctcctca

SEQ ID NO: 7174 - DNA, 267 bp, Homo sapiens
  source 1..267: mol_type = other DNA
gtttccgggttctccctcactgatttatccatgcactggattcgacagtctactggcaaaggacttgagtggatgggaggttttgatcctgaatctggtaaaaccatctacgcacagaagtttcagggcagagtcaccatgaccgaggacacatatacagacacagcctacatggagatgcgtagcctcagatcggacgacacgtccatttatttctgtgcaacacacagggattggggccagggaaccccggtcaccgtctcctca

SEQ ID NO: 7175 - DNA, 267 bp, Homo sapiens
  source 1..267: mol_type = other DNA
gtttccggatacaccctcactgatttagccatgcactgggtgcgacagactcctggaaaagggcttgagtggatgggaggttttcatcctgaagatggtaaaacaatctacgcacagaagttccagggcagactcaccatgaccgaggacacatttacagacactgcctacatggaactgagcagcctgagatctgaggacacggccatatattactgtgcaactcatcgtgactggggccagggaaccctggtcaccgtctcctca

SEQ ID NO: 7176 - DNA, 298 bp, Homo sapiens
  source 1..298: mol_type = other DNA
tgtaggctctggattcaccttcagtggcaatgcaatgcactgggtccgccagcctccaggcaaagggctggagtggatggcgtttatttcatatgatggaagagataaatactacgcagactccgtgaagggccgattcaccatctccagagacaactccgagagcacgctgtatctgcagatgagtagcctgagttttgaggacacggctgtgtattactgtgcgagagaagctggggccgggggcagcagttcttttgactactggggccggggaaccctggtcaccgtctcctca

SEQ ID NO: 7177 - DNA, 298 bp, Homo sapiens
  source 1..298: mol_type = other DNA
tgaagactctggattcaccttcagtcgccatgctatgcactgggtccgccaggctccaggcagggggccggagtgggtggcatttatatcatatgatggaggaagtaaatgttacgcagactccgtgaagggccgattcaccatctccagagacaactccaagaacacgctatatttgcaaatgaatagcctgagagctgaggacacggctctgtactactgtgcgagagaggcgggagcaggaggtagtagttcgtttgactactggggccagggaaccctggtcaccgtctcctca

SEQ ID NO: 7178 - DNA, 294 bp, Homo sapiens
  source 1..294: mol_type = other DNA
aagggttctggatacacctttaccaactactggatcgcctgggtgcgccagatgcccgggaaaggcctggagtggatggggatcatctatcctggtgactttcataccagatacagcccgtccttccaaggccaggtcaccctctcagccgacaactccatctccaccgcctacctgcagtggagcagcctgaaggcctcggacaccgccatgtattactgtgcgagacaccggagcagctcgtccggctggctcgacccctggggccagggaaccctggtcaccgtctcctca

SEQ ID NO: 7179 - DNA, 294 bp, Homo sapiens
  source 1..294: mol_type = other DNA
aagggttctggatacagttttaccagctactggatcgcctgggtgcgccagatgcccgggaaaggcctggagtggatggggatcatctatcctggtgactctgataccagatacagcccgtccttccaaggccaggtcgccatctcagccgacaagtccatcagcaccgcctacctgcagtggagcagcctgaaggcctcggacagcgccatgtattactgtgcgagacatcgcagcagctcgtcaggttggctcgacccctggggccaggggaccctggtcaccgtctcctca

SEQ ID NO: 7180 - DNA, 295 bp, Homo sapiens
  source 1..295: mol_type = other DNA
tgcagcctctggattcacctttagcagctatggcatgacctgggtccgccaggctccagggaaggggctggagtgggtctcagctattagtggtagtggtggtaacacacactacgcagactccgtgaagggccggttcaccatctccagagacaattccaagaacacgctgtttctgcaaatgaacagcctgagagtcgaggacacggccgtatattactgtgcgaaattaatccccagcagtggctggccgtttgactactggggccagggaaccctggccaccgtctcctca

SEQ ID NO: 7181 - DNA, 295 bp, Homo sapiens
  source 1..295: mol_type = other DNA
tgcagcctctggattcacctttaccgcctatcccatgagctgggtccgccaggctccagggaaggggctgcagtgggtctcagctattagtattagtggtgataacacatactacgcagactccgtgaagggccggttcaccattttcagagacaattccaagaacacgctgtttctgcaaatgaacagcctgagagccgaggacacggccgtctattactgtgcgaaactcattccgagcagtggctggccctttgactactggggccagggaaccctggtcaccgtctcctca

SEQ ID NO: 7182 - DNA, 292 bp, Homo sapiens
  source 1..292: mol_type = other DNA
tgcagcgtctggattcaccttcagcaccaatggcatgcactgggtccgccaggctccaggcaaggggctggagtgggtggcacttatattatatgatggaagtaatgaatactatgcagactccgtgaagggccgattcaccatctccagagacaattccaagaacacgctgtatctgctgatggacagcctgagagccgaggacgcggctgtgtattactgtgcgagagataagagtaagggcagataccttgactactggggcctgggaaccctggtcaccgtctcctca

SEQ ID NO: 7183 - DNA, 292 bp, Homo sapiens
  source 1..292: mol_type = other DNA
tgcagcgtctggattcaccttcaatacccaaggcatgcactgggtccgccaggctccaggcaaggggccggagtgggtggcaattatacggtttgatggaagtaatatatactatgcagactccgtgaagggccgattcaccatctccagagacaactccaagaacacgctatatctgcaaatgaacagcctgagagccgaggacacggctatttattactgtgcgagagataaaagtaaaggtcgatatcttgactactggggccagggaaccctggtcaccgtctcctca

SEQ ID NO: 7184 - DNA, 265 bp, Homo sapiens
  source 1..265: mol_type = other DNA
tgtagtctctggattcgtttttagcagttatgaaatgggctggttccgccagggtccagggaaggggctggagtgggtctcaagcatcactagtagtggtgatcggacatactacgcagagtcggtgaagggccggttcattatctccagagacaattccaagaatgccctatatctgcaactgaacagcctgagagccgaggacacggccgtaaagtcctggttcgacccctggggccagggaaccctagtcaccgtctcgtca

SEQ ID NO: 7185 - DNA, 265 bp, Homo sapiens
  source 1..265: mol_type = other DNA
tgcagcctctggattcagctttagcaactatggcatgggctgggtccgccaggctccagggaaggggctggagtgggtctcagaagtttccactggtggtgatgttagatactacgcagactccgtgaagggccggttcaccatctccagagacaattccaagaacacactgtatcttcattactgtgcgaaagatgatggcgtgggacctaccacaaattatttcgacccctggggccagggaaccctggtcaccgtctcctca

SEQ ID NO: 7186 - DNA, 292 bp, Homo sapiens
  source 1..292: mol_type = other DNA
tgcagcctctggattcacctttagttacgattggatgagttgggtccgccaggctccagggaaggggctggaatgggtggccttcataacagcggacggcagtgcgaaaaagtatgtggactctgtggagggccgattcaccatctccagagacaacgccaagaactccctgtatctgcagatgaacggcctgagagccgaggacacggccgtctactactgtgcgagagacgttgtcggaggtaatacctttgactactggggccagggaacgctggtcaccgtctcctca

SEQ ID NO: 7187 - DNA, 292 bp, Homo sapiens
  source 1..292: mol_type = other DNA
cgcagtctctggattcacctttagcaattattggatggactgggtccgccaggctccagggaagggactggagtgggtggccaacataaagcaagatggaagtgagaaatactatgtggactctgtgaagggccgattcaccatctccagagacaacgccaagaactcactgtatctgcaaatgagcagcctgagagccgaggacacggctgtgtattactgtgcgagagatgtggtcggagggaacacatttgactactggggccagggaaccctggtcaccgtctcctca

SEQ ID NO: 7188 - DNA, 289 bp, Homo sapiens
  source 1..289: mol_type = other DNA
tgcagcctctggattcactttcagtgacgcctggatgagctgggtccgccaggctccaggaaaggggctggagtgggttggccgtattaaaagcaaaactagtggtgggacaacagactacgcggcacccgtgaaaggcagattcaccatctcaagagatgattcaagaaacacggcgtatctgcaaatgaacagcctgaaaaccgaggacacagccatatattactgtaccacccgtgcaactcaggggggctactggggccagggaaccctggtcaccgtctcctca

SEQ ID NO: 7189 - DNA, 289 bp, Homo sapiens
  source 1..289: mol_type = other DNA
tgtagcctctggattcacattcagtgacgcctggatgagttgggtccgccaggctccagggaaggggctggaatgggttggccgtagtaaaagtaaaactaatggtgggataatagactacgctgcacccgtgaatgacagattcaccatctcaagagatgattcagaaaacacgctgtatctgcaaatgaacagcctgaaaagcgaggacacagccgtttattactgtaccacccgggccacacaagggggctactggggccggggggccctggtcaccgtctcctca

SEQ ID NO: 7190 - DNA, 298 bp, Homo sapiens
  source 1..298: mol_type = other DNA
cactgtctctggtggctccatcagcagtagtagttactactggggctggatccgccagaccccagggaaggggctggagtggattgggagtatctactatagtgggagcacctactataacccgtccctcaagagccgagtcaccatgtccgtagacacgtccaacaaccagttctccctaaagctggggtctgtgaccgccgcagacacggctgtatattactgtgcgagacatccggccctagtggttatacactttgactactggggccggggaaccctggtcaccgtctcctca

SEQ ID NO: 7191 - DNA, 298 bp, Homo sapiens
  source 1..298: mol_type = other DNA
cactgtctctcgtggctccatcagcagtagcacttactactggggctggatccgccagcccccagggaaggggctggagtggattgggagtatctattatagtgggagcacctactacaacccgtccctcaagagtcgagtcaccatatccgtagacacgtccaggaaccacttctccctgaagctgagctctgtgaccgccgcagacacggctgtgtattactgtgcgagacatcccgccctagtggttatccactttgactactggggccagggaagcctggtcaccgtctcctca

SEQ ID NO: 7192 - DNA, 300 bp, Homo sapiens
  source 1..300: mol_type = other DNA
ccttttggatacacctttagtacttatgctatacactgggtgcgccaggcccccggacaaaggcttgagtggatgggatggatcaacgctggcaatggcgacacaaactattcacagaagtttcagggcagagtcaccattaccagagacacatccgcgagcacagcctacatggagctgagcggcctaagatctgaagacacgggtgtgtattactgtgcgacaggatattgtagtagtaccagctgccaatactactctgactactggggccagggaaccctggtcaccgtctcctca

SEQ ID NO: 7193 - DNA, 300 bp, Homo sapiens
  source 1..300: mol_type = other DNA
gcctctggatacaccttcactaccaaagctatacattgggtgcgccaggcccccggacaaaggcttgagtggatgggatggatcaacgctggcactggtgacacaaaatattcagaaaacttccagggcagagtcaccattaccagggactcagccgcgagcacagcctacatggagctgagcagcctgagatctgaagacacggctgtgtattactgtgcgacaggatattgtagtagtaccagttgccagtattactctgactactggggccagggaagcctggtcaccgtctcctca

SEQ ID NO: 7194 - DNA, 300 bp, Homo sapiens
  source 1..300: mol_type = other DNA
gcctctggatacaccttcaccaccaaagctatacattgggtgcgccaggcccccggacaaaggcttgagtggatgggatggatcaacgctggcactggtgacacaaaatattcagaaaacttccagggcagagtcaccattaccagggactcagccgcgagcacagcctacatggagctgagcagcctgagatctgaagacacggctgtgtattactgtgcgacaggatattgtagtagtaccagttgccagtattactctgactactggggccagggaagcctggtcaccgtctcctca

SEQ ID NO: 7195 - DNA, 292 bp, Homo sapiens
  source 1..292: mol_type = other DNA
tgcagcgtctggattcaccttcagtggccaaggcatgcactgggtccgccaggctccaggcaaggggctggagtgggtggcacttatatggtatgatggaagtaaaatatattatggagactccgtgaagggccgattcgccatctccagagacaattccaagaacaccctgtatctgcagatgaacaacctgagagccggggacacggctgtctattactgtgcgagagataaagggaaggggagttactttgactcctggggccagggaaccctggtcaccgtctcctca

SEQ ID NO: 7196 - DNA, 292 bp, Homo sapiens
  source 1..292: mol_type = other DNA
tgcagcgtctgcattcaccttcagtacctatggcatgcactgggtccgccaggctccaggcaaggggctggagtgggtggcaattatattatatgatggaagtaaagaatattatacagactccgtgaagggccgattcaccatctccagagacaattcgaagaacacactgtatttgcaaatgaacagcctgagagccgaggacacggctgtgtattattgtgcgagagataagggtaaagggagttattttgactcctggggccagggaaccctggtcaccgtctcctca

SEQ ID NO: 7197 - DNA, 292 bp, Homo sapiens; identical to SEQ ID NO: 7196
  source 1..292: mol_type = other DNA

SEQ ID NO: 7198 - DNA, 283 bp, Homo sapiens
  source 1..283: mol_type = other DNA
cgcagcctctggtttcagcgtcactttcaaatatatggcctgggtccgccaggctccagggaaggggctggagtgggtctcagttattcataacgatgggagcacatactacacagagtccgtgaagggccgattcaccatctccaaagacaattccaagaacacggtatatcttcaaatgaacagcctgagagccgaggacacggccgtgtattattgtgcgagagagtattactataaactggacgtctggggccaagggaccacggtcaccgtctcctca

SEQ ID NO: 7199 - DNA, 283 bp, Homo sapiens
  source 1..283: mol_type = other DNA
tgcagcctctagattcaccatcggtttcacttacatgaactgggtccgccaggctccagggaaggggctggagtgggtctcaggcatttatagcggtactaatacagactacgcagactccgtgaagggccgattcaccatctccagagacaattccaagaacacggtgtatcttcaaatgaacagcctgagagccgaggacacggccgtatattactgtgcgagagagtattactataaattggacgtctggggccaagggaccacagtcaccgtctcctca

SEQ ID NO: 7200 - DNA, 289 bp, Homo sapiens
  source 1..289: mol_type = other DNA
tgcagcctctggattcaccctcagtgaccacttcatggactgggtccgccaggctccggggaaggggctggagtgggttggccgtactagaagcaaaactagtggttacaccacggagtacgccgcgtctgtgaaaggcagattcaccgtctcaagagatgattcaacgaactcagtctatctgcaaatgaaaagcctggagaccgaggacacggccgtctattactgtgctagaggctacaatagctttgacaactggggccagggaaccctggtcaccgtctcctca

SEQ ID NO: 7201 - DNA, 289 bp, Homo sapiens
  source 1..289: mol_type = other DNA
tgcagcctctggattcaccttcagtgactactacatggactgggtccgccaggctccagggaaggggctggagtgggttggccgtgctggaaagaaagttaagagatataccacagactatgccgcgtctgtgaagggcagattcaccatctcaagagatgattcaaagaactcattgtttctgcaaatgaacagcctgaacaccgaggacacggccgtatattattgtgctagagggtacaactcctttgacaactggggccagggaaccctggtcaccgtctcctca

SEQ ID NO: 7202 - DNA, 283 bp, Homo sapiens
  source 1..283: mol_type = other DNA
tacagcctccggaaccaccttcagcagctactggatgcactgggtccgccaagctccggggaaggggctggtgtgggtctcacatattaacagtgacggaagtagcgaaacgtacgcggactccgtgaagggccgattcaccatctccagagacaacgccaagaatacgctgtatctgcaaatgcacagtctgagagtcgaggacacggctatctattactgtgcaaggtccatcggaggttttgactcctggggccagggaaccctggtcaccgtctcctca

SEQ ID NO: 7203 - DNA, 283 bp, Homo sapiens; identical to SEQ ID NO: 7202
  source 1..283: mol_type = other DNA

SEQ ID NO: 7204 - DNA, 283 bp, Homo sapiens
  source 1..283: mol_type = other DNA
tacagcctccggaaccaccttcagcagctactggatgcactgggtccgccaagctccggggaagggactggtgtgggtctcacatattaacagtgacggaagtagcgaaacgtacgcggactccgtgaagggccgattcaccatctccagagacaacgccaagaatacgctgtatctgcaaatgcacagtctgagagtcgaggacacggctatctattactgtgcaaggtccatcggaggttttgactcctggggccagggaaccctggtcaccgtctcctca

SEQ ID NO: 7205 - DNA, 283 bp, Homo sapiens
  source 1..283: mol_type = other DNA
tacagcctccggaaccaccttcagcagctactggatgcactgggtccgccaagctccggggaaagggctggtgtgggtctcacatattaacagtgacggaagtagcgaaacgtacgcggactccgtgaagggccgattcaccatctccagagacaacgccaagaatacgctgtatctgcaaatgcacagtctgagagtcgaggacacggctatctattactgtgcaaggtccatcggaggttttgactcctggggccagggaaccctggtcaccgtctcctca

SEQ ID NO: 7206 - DNA, 283 bp, Homo sapiens
  source 1..283: mol_type = other DNA
tacagcctccggaaccaccttcagcagctactggatgcactgggtccgccaagctccggggaaggggctggtgtgggtctcacatattaacagtgacggaagtagcaaaacgtacgcggactccgtgaagggccgattcaccatctccagagacaacgccaagaatacgctgtatctgcaaatgcacagtctgagagtcgaggacacggctatctattactgtgcaaggtccatcggaggttttgactcctggggccagggaaccctggtcaccgtctcctca

SEQ ID NO: 7207 - DNA, 283 bp, Homo sapiens
  source 1..283: mol_type = other DNA
cacagcctctggagccaccttcagtgactactggatgcactgggtccgccaagctccagggaaggggctggtgtgggtctcatatattactggtgatgggagtagtgcaagctacgcggactccgtgaagggccgattcaccatctccagagacaacgccaagaacacgctgtatctgcaaatgaacagtctgagagccgaggacacggctgtgtattactgtgcgaggtcgattggtgggtttgactcctggggccagggatccctggtcaccgtctcgtca

SEQ ID NO: 7208 - DNA, 289 bp, Homo sapiens
  source 1..289: mol_type = other DNA
tgcagcctctggattcacgtttagtaggtattggatgagctgggtccgccagggtccagacaaggggctggagttcgtgggcaacataaaccaggatgcaagttcgaaaaactacgtggactctgtgaagggccgattcaccatctccagagacaacgccaagaacacactacatctccaaatgaacagcctgagagtcgaggacacggctgtgtattactgtgcgagagatcccgactcttctgcttttgatatgtggggccaagggacaatggtcaccgtctcttca

SEQ ID NO: 7209 - DNA, 289 bp, Homo sapiens
  source 1..289: mol_type = other DNA
tgcaacctctggattcacgtttagtaggtattggatgagctgggtccgccagggtccagacaaggggctggagttcgtgggcaacataaaccaggatgcaagttcgaaaaactacgtggactctgtgaagggccgattcaccatctccagagacaacgccaagaacacactacatctccaaatgaacagcctgagagtcgaggacacggctgtgtattactgtgcgagagatcccgactcttctgcttttgatatgtggggccaagggacaatggtcaccgtctcttca

SEQ ID NO: 7210 - DNA, 290 bp, Homo sapiens
  source 1..290: mol_type = other DNA
atgcagcctctggattcacgtttagtaggtattggatgagctgggtccgccagggtccagacaaggggctggagttcgtgggcaacataaaccaggatgcaagttcgaaaaactacgtggactctgtgaagggccgattcaccatctccagagacaacgccaagaacacactacatctccaaatgaacagcctgagagtcgaggacacggctgtgtattactgtgcgagagatcccgactcttctgcttttgatatgtggggccaagggacaatggtcaccgtctcttca

SEQ ID NO: 7211 - DNA, 289 bp, Homo sapiens; identical to SEQ ID NO: 7208
  source 1..289: mol_type = other DNA

SEQ ID NO: 7212 - DNA, 289 bp, Homo sapiens
  source 1..289: mol_type = other DNA
tgcagcctctggattcacgtttagtaggtattggatgagctgggtccgccagggtccagataaggggctggagttcgtgggcaacataaaccaggatgcaagttcgaaaaactacgtggactctgtgaagggccgattcaccatctccagagacaacgccaagaacacactacatctccaaatgaacagcctgagagtcgaggacacggctgtgtattactgtgcgagagatcccgactcttctgcttttgatatgtggggccaagggacaatggtcaccgtctcttca

SEQ ID NO: 7213 - DNA, 289 bp, Homo sapiens
  source 1..289: mol_type = other DNA
tgtagcctctggattcagttttagcagctattggatgagttgggtccgccagactccagggcaggggctggagttcgtggccaacataaaccaagatggaagtgtgaaaaactatcaggactctgtgaagggccgattcaccatctccagagataacgccaagaattcattgtatctgcaaatgaacagcctgcgagtcgaggacgcggctgtgtattactgtgcgagagatcctgactcttccgcttttgatatgtggggccaagggacaatggtcaccgtctcttca

SEQ ID NO: 7214 - DNA, 294 bp, Homo sapiens
  source 1..294: mol_type = other DNA
acctctggatacaccttcaccggctattatatacagtgggtgcgacaggcccctggacaagggcttgagtggatggcatggaccaaccctatcagtggcaagacacagtatgcacagaagtttcagggcaaggtcaccatgaccagggacacgtccatcagcacagcctacatggagctgagcactctaacatctgacgacacggccgtatattactgtgcgagatctcctatggttcggggagcgggcggtatggacgtttggggccaagggaccacggtcaccgtctcctca

SEQ ID NO: 7215 - DNA, 294 bp, Homo sapiens
  source 1..294: mol_type = other DNA
acctctggatacaccttcaccagctattatatacagtgggtgcgacaggcccctggacaagggcttgagtggatggcatggaccaaccctatcagtggcaagacacagtatgcacagaagtttcagggcaaggtcaccatgaccagggacacgtccatcagcacagcctacatggagctgagcactctaacatctgacgacacggccgtatattactgtgcgagatctcctatggttcggggagcgggcggtatggacgtttggggccaagggaccacggtcaccgtctcctca

SEQ ID NO: 7216 - DNA, 294 bp, Homo sapiens; identical to SEQ ID NO: 7214
  source 1..294: mol_type = other DNA

SEQ ID NO: 7217 - DNA, 294 bp, Homo sapiens
  source 1..294: mol_type = other DNA
gcttctggatacaccttcaccggctactatatgcactgggtgcgacaggcccctggacaagggcttgagtggctgggatggatcaaccctaaaagtggtggcacaaattatgcacagaaattccagggcagagtcgacatgaccatggacacgtccatcagtacagtctatatggagctgagcaggctgacatttgacgacacggccctgtattactgtgcgagatcccccatggttcggggagcgggcggtatggacgtctggggccaagggaccacggtcaccgtctcctca

SEQ ID NO: 7218 - DNA, 282 bp, Homo sapiens
  source 1..282: mol_type = other DNA
gcctctggatacaccctcaccacctactatatgcactgggtgcgacaggcccctggacaagggcttgagtggatgggatggatcgaccctaacagtggtggcacaaactatgcacagaggtttcagggcagggtcaccatgaccagcgacacgtccgtcagcacagcctccatggacctgagcagtctgagatctgacgacacggccgtctattactgtgcgaggatggttgcaggcggtatggacgtctggggccaagggaccacggtcaccgtctcctca

SEQ ID NO: 7219 - DNA, 282 bp, Homo sapiens
  source 1..282: mol_type = other DNA
gcctctggatacaccctcaccacctactatatgcactgggtgcgacaggcccctggacaagggcttgagtggatgggatggatcgaccctaacagtggtggcacaaactatgcacagaggtttcagggcagggtcaccatgaccagcgacacgtccgtcagcacagcctccatggacctcagcagtctgagatctgacgacacggccgtctattactgtgcgaggatggttgcaggcggtatggacgtctggggccaagggaccacggtcaccgtctcctca

SEQ ID NO: 7220 - DNA, 282 bp, Homo sapiens
  source 1..282: mol_type = other DNA
gcctctggatacaccctcaccacctactatctgcactgggtgcgacaggcccctggacaagggcttgagtgggtgggatggatcgaccctaacagtggtggcacaaactatgcacagaggtttcagggcagggtcaccatgaccagcgacacgtccgtcagcacagcctccatggacctgagcagtctgagatctgacgacacggccgtctattactgtgcgaggatggttgcaggcggtatggacgtctggggccaagggaccacggtcaccgtctcctca

SEQ ID NO: 7221 - DNA, 282 bp, Homo sapiens
  source 1..282: mol_type = other DNA
gcctctggatataccctcaccacctactatatgcactgggtgcgacaggcccctggacaagggcttgagtggatgggatggatcgaccctaacagtggtggcacaaactatgcacagaggtttcagggcagggtcaccatgaccagcgacacgtccgtcagcacagcctccatggacctgagcagtctgagatctgacgacacggccgtctattactgtgcgaggatggttgcaggcggtatggacgtctggggccaagggaccacggtcaccgtctcctca

SEQ ID NO: 7222 - DNA, 282 bp, Homo sapiens
  source 1..282: mol_type = other DNA
gcctctggatacaccctcaccacctactatatgcactgggtgcgacaggcccctggacaagggcttgagtggatgggatggatcgaccctaacagtggtcgcacaaactatgcacagaggtttcagggcagggtcaccatgaccagcgacacgtccgtcagcacagcctccatggacctgaacagtctgagatctgacgacacggccgtctattactgtgcgaggatggttgcaggcggtatggacgtctggggccaagggaccacggtcaccgtctcctca

SEQ ID NO: 7223 - DNA, 282 bp, Homo sapiens
  source 1..282: mol_type = other DNA
gcctctggatacaccctcaccacctactatttgcactgggtgcgacaggcccctggacaagggcttgagtggatgggatggatcgaccctagcagtggtgccacaaagtatgcacagaggtttcagggcagggtcaccatgaccagcgacacgtccgtcagcacagcctccatggacctgagcagtctgagatctgacgacacggccgtctattactgtgcgaggatggttgcaggcggtatggacgtctggggccaagggaccacggtcaccgtctcctca

SEQ ID NO: 7224 - DNA, 282 bp, Homo sapiens
  source 1..282: mol_type = other DNA
gcctctggatacaccctcaccacctactatatgcactgggtgcgacaggcccctggacaagggcttgagtggatgggatggatcgaccctaacagtggtggcacaaactatgcacagaggtttcagggcagggtcaccatgaccagcgacacgtccgtcagcacagcctccatggacctgagcagtctgagatctgacgacacggccgtctattactgtgcgaggatggttgcaggcggtatggacgtctggggccaaggaaccacggtcaccgtctcctca

SEQ ID NO: 7225 - DNA, 282 bp, Homo sapiens
  source 1..282: mol_type = other DNA
gcctctggatacaccctcaccacttactatttgcactgggtgcgacaggcccctggacgagggcttgagtggatgggatggatcgaccctagcagtggtgccacaaagtatgcacagaggtttcagggcagggtcaccatgaccagcgacacgtccgtcagcacagcctccatggacctgagcagtctgagatctgacgacacggccgtttattattgtgcgaggatggttgcaggcggtatggacgtctggggccaagggaccacggtcaccgtctcctca

SEQ ID NO: 7226 - DNA, 282 bp, Homo sapiens
  source 1..282: mol_type = other DNA
acttctcgatacgccatcaccgaccactatatgcactgggtgcgacaggcccctggacaaggccttgagtggatgggatggatcaaccctaccaatggtggcacaaagtatgcacagaagtttcagggcagggtcaccatgaccagggacacgtccatcaacacagcctacatggagctgagcagtctgagatctgatgacacggccgtgtacttctgtgcgagaatggtggcagggggcatggacgtctggggccaagggaccacggtcaccgtctcctca

SEQ ID NO: 7227 - DNA, 282 bp, Homo sapiens
  source 1..282: mol_type = other DNA
gcctctggatacatcctcaccacctattatatgcactgggtgcgacaggcccctggacaagggcttgagtggatgggatggatcgaccctaaaagtggtggcacaaactatgcacagaggtttcaggacagggtcaccatgaccagcgacacgtccgtcagcacagtctccatggacttgagcagtctgagatctgacgacacggccgtctattattgtgcgaggatggttgcgggcggtatggacgtctggggccaagggaccacggtcaccgtctcctca

SEQ ID NO: 7228 - DNA, 282 bp, Homo sapiens
  source 1..282: mol_type = other DNA
gcctctggatacaccctcaccacctactatatgcactgggtgcgacaggcccctggacaagggcttgagtggatgggatggatcgaccctaacagtggtggcacaaactatgcacagaggtttcagggcagggtcaccatgaccagcgacacgtccgtcagcacagcctccatggacctgagcagtctgagatctgacgacacggccgtctattactgtgcgaggatggttgcaggcggtatggacgtcgggggccaagggaccacggtcaccgtctcctca

SEQ ID NO: 7229 - DNA, 282 bp, Homo sapiens
  source 1..282: mol_type = other DNA
gcctctggatacaccctcagcacctactatatgcactgggtgcgacaggcccctggacaagggcttgagtggatgggatggatcgaccctaagagtggtgacacaaactatgcacagaggtttcagggcagggtcagcatgaccagcgacacgtccgtcagcacagcctccatggacctgagtagtctgagatctgacgacacggccgtctattactgtgcgaggatggttgcaggcggtatggacgtctggggccaagggaccacggtcaccgtctcctca

SEQ ID NO: 7230 - DNA, 304 bp, Homo sapiens
  source 1..304: mol_type = other DNA
tgcagcctctggattcacctttagcagctatgccatgagctgggtccgccaggctccagggaaggggctggagtgggtctcaactattagtgctagtgctggtgacacattctacgcagactccgtgaagggccggttcaccatctccagagacaattccaagaacacggtgtatctgcaaatgaacagcctgagagccgaggacacgtccgtctattactgtgcaaaaaggggttaccatgatactagcgcttattactactttgactgctggggccagggaaccctggtcaccgtctcctca

SEQ ID NO: 7231 - DNA, 301 bp, Homo sapiens
  source 1..301: mol_type = other DNA
tgcagcctctggattcacctttgacagctatgccatgacctgggtccgccaggctccaggaaaggggctggagtgggttgcaactgtcgctgctggaggtaccacattctacgcagactccgtgaagggccggtttaccatctccagagacaattccaagagcatggtgcatctggagatgaacggcctgagagtcgaggacacggccgtatattattgtgcgaagaggggttaccatgatactagtgcatactactactttgactgctggggccagggaaccctggtcaccgtctcctca

SEQ ID NO: 7232 - DNA, 289 bp, Homo sapiens
  source 1..289: mol_type = other DNA
tgcagcctctggattcacctttaccaactatgccatgagctgggtccgccaggctccagggaaggggctggagtgggtctcagctattagtactagtggtgatgccacattctacgcagactccgtgaagggccggttcaccatctccagagacaatttcaagaacaccctgtatctgcgaatgaacaacctgagagccgaggacacggccatatattacggattggtagtgccagacccctacggtatggacgtctggggccaagggaccacggtcaccgtctcctca

SEQ ID NO: 7233 - DNA, 289 bp, Homo sapiens
  source 1..289: mol_type = other DNA
tgcagcctctggattcacctttagcgactatagcatgagctgggtccgccaggctccagggaagggtctggagtgggtctcagctattagtgctagtggtgacggcacattttacgcagactccgtgaagggccgattcaccatctcaagagacaattccgagaacacgctgagtctgcaaatgaacagcctgagagccgaggacacggccatatattactccttggtggtgcccgatccctatggtatggacgtctggggccaggggaccacggtcaccgtctcctca

SEQ ID NO: 7234 - DNA, 289 bp, Homo sapiens
  source 1..289: mol_type = other DNA
tgcagcctctggattcacctttagcaactatgccatgagctgggtccgccaggctccagggaaggggctggagtgggtctcagctattagtgttagtggtgacagtacattttacgcagactccgtgaagggccggttcaccatctcaagagacaattccaagaatacgctgcatctgcaaatgaacagcctgagagccgaggacacggccatatattactccttggtggtgcccgatccctacggtatggacgtctggggccaagggaccacggtcaccgtctcctca

SEQ ID NO: 7235 - DNA, 289 bp, Homo sapiens
  source 1..289: mol_type = other DNA
tgcagcctctggattcacttttagtaactttgccatgagctgggtccgccaggctccagggaaggggctggagtgggtctcagctattggtgttagtggtgacaatacattttacgcagactccgtgaggggccacttcaccatctcaagagacaattccaagaatacggtgcatctgcaaatgaacagcctgagagccgaggacacggccatatattactgcttggtggtgcccgatccctacggtatggacgtctggggccaagggaccacggtcaccgtctcctca

SEQ ID NO: 7236 - DNA, 289 bp, Homo sapiens
  source 1..289: mol_type = other DNA
tgcagcctctggattcacctttgccacctattccatgagctgggtccgccaggctccagggaaggggctggaatgggtctcagcaattagtgctactaatggtgccacatactacgcagactccgtgaagggccgattcaccatctccagagacaattccaggaacatgctgtggctgcaaatgaacagcctcagagccgacgacacggccatatattactccttggtggtgcccgatccctacggtatggacgtctggggccatgggaccgcggtcaccgtctcctca

SEQ ID NO: 7237 - DNA, 286 bp, Homo sapiens
  source 1..286: mol_type = other DNA
tgcagcctctggattcacctttagcgatttttgcatgagctgggtccgccaggctccagggagggggctggagtgggtctcagctattggtgttcgtggtactacattttacgcagactccgtgaagggccggttctccatctccagagacaattccaggaatacagtgtatctgcaaatgaacagcctgagagccgaggacacggccatatattactccctggtggtgcccgatccctacgggatggacgtctggggccaagggaccacggtcaccgtctcctca

SEQ ID NO: 7238 - DNA, 289 bp, Homo sapiens
  source 1..289: mol_type = other DNA
tgaaacctctggattcacctttagtgactattccatgagctgggtccgccaggctccagggagggggctggagtgggtctcagctattagtactagtggcgacgctacattctacgcagactccgtgaagggccggttcattatctcaagagacaattccaggaatacactgcatctgcaaatgaacagcctgagagccgaggacacggccatatattactctttggtggtgcccgatccctatggaatggacgtctggggccaagggaccacggtcaccgtctcccca

SEQ ID NO: 7239 - DNA, 289 bp, Homo sapiens
  source 1..289: mol_type = other DNA
tgcagcctctggattcaccttttccaattttgccatgagctgggtccgccaggctccagggaaggggctggaatgggtctcagctattagtactagtggtgacgccacgttctacgcagactccgtgaagggccggttcaccatctccagagacaattccaagaacaccctgtatctgcgaatgaacaacctgagagccgaggacacggccgtatattacggattagtagtaccagacccctacggtatggacgtctggggccaagggaccacggtcaccgtctcctca

SEQ ID NO: 7240 - DNA, 289 bp, Homo sapiens
  source 1..289: mol_type = other DNA
tgcagcctctggattcacctttaccaactatgccatgagctgggtccgccaggctccagggaaggggctggagtgggtctcagctattagcactagtggtgatgccacgttctacgcagactccgtgaagggccggttcaccatctccagagacaattccaagaacaccctgtatctgcgaatgaacagcctgagagccgaggacacggccgtatattacggattagtagtaccagacccctacggtatggacgtctggggccaagggaccacggtcaccgtctcctca

SEQ ID NO: 7241 - DNA, 289 bp, Homo sapiens
  source 1..289: mol_type = other DNA
tgcagcctctggattcacctttagcagctattccatgagctgggtccgccaggctccagggaaggggctggagtgggtctcagctattagtgttagtggtgacagtaccttctacgcagactccgtgaagggccggttcatcatctcaagagacaattccaagaatacactgcatctgcaaatgaacagcctgagagccgaggacacggccatatattactccttggtggtgcccgatccctacggtatggacgtctggggccaagggaccacggtcaccgtctcctca

SEQ ID NO: 7242 - DNA, 286 bp, Homo sapiens
  source 1..286: mol_type = other DNA
tgcagcctctggattcacctttagtaactttgccatgagctgggtccgccaggctccagggagggggctggagtgggtctcagctattggtgttcgtggtagtacattttacgcagactccgtgaagggccggttcaccatctccagagacaattccaagaacacggtgcatctgcaaatcaacagcctgagagccgaggacacggccgtatattactgcttggtggtgcccgatccctacggtatggacgtctggggccaagggaccacggtcaccgtctcctca

SEQ ID NO: 7243 - DNA, 289 bp, Homo sapiens
  source 1..289: mol_type = other DNA
tgcagcctctggattcacctttagcgactatagcatgagctgggtccgccaggctccagggaagggtctggagtgggtctcagctattagtgctagtggtgacggcacattttacgcagactccgtgaagggccgattcaccatctcaagagacaattccgagaacacgctgagtctgcaaatgaacagcctgagagccgaagacacggccatatattactccttggtggtgcccgatccctatggtatggacgtctggggccaggggaccacggtcaccgtctcctca

SEQ ID NO: 7244 - DNA, 298 bp, Homo sapiens
  source 1..298: mol_type = other DNA
tgcagcgtctggattcaccttcagtagacatgccatgcactgggtccgccaggctccaggcaaggggctggagtgggtggcacaagtatggcctgatgatactaataaatattatgctgactccgtggagggccgattcaccatctccagagataattccaggtccacacactacctgcaaatgaacttcctgagagccgaggacacggctgtgtattactgtgcgagagatggacagagtggggccccctatggtatggacgtctggggccaagggaccacggtcaccgtctcctca

SEQ ID NO: 7245 - DNA, 298 bp, Homo sapiens
  source 1..298: mol_type = other DNA
tgcagcgtctggattcaccttcactgggcatgccatgcactgggtccgccaggctccaggcaaggggctggaatgggtggcacaaatatggtctggtggaagcaatgaatattatgcagactccgtgaggggccgattcactatctccagagacaattccaagaccacggcgtacttgcaaatgaatagtctgagagccgaggacacggctgtgtattactgtgcgagagatggacagagtggggccccctatggtatggacgtctggggccaagggaccacggtcaccgtctcctca

SEQ ID NO: 7246 - DNA, 298 bp, Homo sapiens
  source 1..298: mol_type = other DNA
tgcagcgtctgggtttatcttcggtggccacgccatgcactgggtccgccaggctccaggcaaggggctggagtgggtggcacagatatggtctgatggaagtaataaatactatgtggattccgtggagggccgattcaccatctccagagacaattccaagaacacgctttatctgcaaatttacagcctgcgagccgaggacacggctatatattactgtgcgagagatggacaaagtggggcgccctacggcatggacgtctggggccaagggaccacggtaaccgtctcctca

SEQ ID NO: 7247 - DNA, 298 bp, Homo sapiens
  source 1..298: mol_type = other DNA
tgcagcgtctggattcaccttcagtagacatgccatgcactgggtccgccaggctccaggcaaggggctggagtgggtggcacaaatatggcctgatgtcagtaataaatattatgcagactccgtgaggggccgattcaccatctccagagacaatttcaagaccacggtgtatttggaaatgaataccatgagagccgaggacacggctgtgtattattgtgcgagagatggacagagtggggccccctatggtatggacgtctggggccaagggaccacggtcaccgtctcctca

SEQ ID NO: 7248 - DNA, 298 bp, Homo sapiens
  source 1..298: mol_type = other DNA
cactgtccctggtggctccatcagcagtagcagttactactggggctggatccgccagcccccagggaaggggctggagtggattgggagtatctcttctagtgggagcacctcttataatccgtccctcaagagtcgagtcaccatatccgtagacacgaccaagagccggctctccctgaagctgagctctgtgaccgccgcagacacggctgtgtattactgtgcgagtcctaatagtggcaggatgtactactttgactactggggccagggaaccctggtcaccgtctcctca

SEQ ID NO: 7249 - DNA, 298 bp, Homo sapiens
  source 1..298: mol_type = other DNA
cactgtccctggtggctccatcagcagtagtagttactactggggctggatccgccagcccccagggaaggggctggagtggattgggagtatctcttctcgtgggagcacctcttataacccgtccctcaagagtcgagtcaccatatccgtagacacgtccaagagccggctctccctgaagctgagctctgtgaccgccgcagacacggctgtgtattactgtgcgagtcctaatagtggcaggatgtactactttgactactggggccagggaaccctggtcaccgtctcctca

SEQ ID NO: 7250 - DNA, 298 bp, Homo sapiens
  source 1..298: mol_type = other DNA
cactgtccctggtggctccatcagcagtagtagttactactggggctggatccgccagcccccagggaaggggctggagtggattgggagtatctcttctagtgggagcacctcttataacccgtccctcaagagtcgagtcaccatatccgtagacacgtccaagagccggctctccctgaagctgagctctgtgaccgccgcagacacggctgtgtattactgtgcgagtcctaatagtggcaggatgtactactttgactactggggccagggaaccctggtcaccgtctcctca

SEQ ID NO: 7251 - DNA, 298 bp, Homo sapiens
  source 1..298: mol_type = other DNA
cactgtccctggtggctccatcagcagtagtagttactactggggctggatccgccagcccccagggaaggggctggagtggattgggagtatctcttctagtgggagcacctcttataacccgtccctcaagagtcgagtcatcatatccgtagacacgtccaagagccggctctccctgaagctgagctctgtgaccgccgcagacacggctgtgtattactgtgcgagtcctaatagtggcaggatgtactactttgactactggggccagggaaccctggtcaccgtctcctca

SEQ ID NO: 7252 - DNA, 298 bp, Homo sapiens
  source 1..298: mol_type = other DNA
cactgtctttggtggctccatcagcagtagtcgttactactggggctgggtccgccagtccccggggaaggggctggagtggattgggagtatggattatagtgggaacaccgactacaatccgtccctcaagagtcgagtcaccatattcttagacagggccaagaaccaattctccctgaggctgacctctgtgaccgccgcagacacggctatgtattactgtgcgagtcccaacagtgggaggatgtactactttgactattgggtccagggaaccctggtcaccgtctcctca

SEQ ID NO: 7253 - DNA, 283 bp, Homo sapiens
  source 1..283: mol_type = other DNA
tggaccctctggattcacctttattaggtattggatgagctgggtccgccaggctccagggaaggggctggagtgggtggccaacataaaccaagatggaagtgagaaatactatgtggactctgtgaagggccgattcaccatctccagagacaacgccaagaactcactgtatctgcaaatgaacagcctgagagccgaggacacggctgtgtattactgtgttcgtttggctgaatacttccagaactggggccagggcaccctggtcaccgtctcctca

SEQ ID NO: 7254 - DNA, 283 bp, Homo sapiens
  source 1..283: mol_type = other DNA
tgtagcctctggattcacctttagtaggtattggatgagctgggtccgccaggctccagggaaggggctggagtgggtggccaacataaagcacgatggcagtgaggaagactatgtggactctgtgaagggccgattcaccctctccagagacagcgccaagaactcactgtatctgcaaatgaacagcctgagagtcgaggacacggctatatattactgtgttcgtttggctgaatacttccagaactggggccagggcaccctggtcaccgtctcctca

SEQ ID NO: 7255 - DNA, 283 bp, Homo sapiens
  source 1..283: mol_type = other DNA
tgcagcctctggattcacctttagtaggtattggatgagctgggtccgccaggctccagggaaggggctggagtgggtggccaacataaaccaagatggaagtgagaaatactatgtggactctgtgaagggccgattcaccatctccagagacaacgccaagaactcactgtatttgcaaatgaacagtctgagagccgaggacacggccgtgtattactgtgtaaggctcgctgaatacttccagaactggggccagggcaccctggtcaccgtctcctca

SEQ ID NO: 7256 - DNA, 283 bp, Homo sapiens
  source 1..283: mol_type = other DNA
tgcagcctctggattcaccttttgtaggtattggatgagctgggtccgccaggctccagggaaggggctggagtgggtggccaacataaaccaagatggaagtgagaaatactatgtggactctgtgaagggccgattcaccatctccagagacaacgccaagaactcactgtatttgcaaatgaacagtctgagagccgaggacacggccgtgtattactgtgtaaggctcgctgaatacttccagaactggggccagggcaccctggtcaccgtctcctca

SEQ ID NO: 7257 - DNA, 283 bp, Homo sapiens
  source 1..283: mol_type = other DNA
tgcagccactggattcgtctttagtcgttattggatgagttgggtccgccaggctccagggaaggggctggagtgggtggccaatttaaaatatgatggaagtgataaacagtatgtggactctgtgaagggccgattcaccatctccagagacaacgccaagaactcagtctatctgcaaatgaacagcctgagagccgaggacacggccgtgtatttctgtgtaagactcgctgaatactttcagaactggggccagggcaccctagtcaccgtctcctca

SEQ ID NO: 7258 - DNA, 283 bp, Homo sapiens
  source 1..283: mol_type = other DNA
tgcagcctctggattcgtctttagtcgttattggatgagttgggtccgccaggctccagggaaggggctggagtgggtggccaatttaaaatatgatggaagtgagaaacactatgtggcctctgtgaagggccgattcaccatctccagagacaacgccaagaactcactctatctgcaaatgaatagcctgagagccgaggacacggccgtgtatttctgtgtgagactcgctgaatacttccaaaactggggccagggcaccctagtcaccgtctcctca

SEQ ID NO: 7259 - DNA, 283 bp, Homo sapiens
  source 1..283: mol_type = other DNA
tgtagcctctggattcacctttagtcgctattggatgagctgggtccgccaggctccagggaagggcctggagtgggtggccaacataaagcaagatggaagtgagaaatactatgtggactctgtgaagggccgattcaccatctccaaagacaacgccaagcactcactatatctgcaaatgaacagcctgagagccgaggacacggccgtctattactgtgtgaggctagctgaatacttccagaactggggccagggcaccctggtcaccgtctcctct

SEQ ID NO: 7260 - DNA, 283 bp, Homo sapiens
  source 1..283: mol_type = other DNA
tggaccctctggattcaccttttttaggtattggatgagctgggtccgccaggctccagggaaggggctggagtgggtggccaacataaaccaagatggaagtgagaaatactatgtggactctgtgaagggccgattcaccatctccagagacaacgccaagaactcactgtatctgcaaatgaacagcctgagagccgaggacacggctgtgtattactgtgttcgtttggctgaatacttccagaactggggccagggcaccctggtcaccgtctcctca

SEQ ID NO: 7261 - DNA, 283 bp, Homo sapiens
  source 1..283: mol_type = other DNA
tgcagccactggattcgtctttagtcgttattggatgagttgggtccgccaggctccagggaaggggctggagtgggtggccaatttaaaatatgatggaagtgagaaacactatgtggactctgtgaagggccgattcaccatctccagagacaacgccaagaactcagtctatctgcaaatgaacagcctgagagccgaggacacggccgtgtatttctgtgtaagactcgctgaatactttcagaactggggccagggcaccctagtcaccgtctcctca

SEQ ID NO: 7262 - DNA, 283 bp, Homo sapiens
  source 1..283: mol_type = other DNA
tgcagcctctggattcacctttagtaggttttggatgagttgggtccgccaggctccagggaaggggctggagtgggtggccaacataaaccaagatggaagtgagaaatactatgtggactctgtgaagggccgattcaccctctccagagacaacgccaagaactcactgtatttgcaaatgaacagtctgagagccgaggacacggccgtgtattactgtgtaaggctcgctgaatacttccagaactggggccagggcaccctggtcaccgtctcctca

SEQ ID NO: 7263 - DNA, 283 bp, Homo sapiens
  source 1..283: mol_type = other DNA
tgcagcctctggattcacctttagtagatattggatgagctgggtccgccaggctccagggaaggggctggagtgggtggccaacataaagcaagatggaagtgacaaatactatgtggactctgtgaagggccgagtcaccatctccagagacaacgccaagaactcactgtatctgcaaatgaacagcctgagagccgaggacacggctgtatattactgtgtgagactcgctgaatacttccagaactggggccagggcaccctggtcaccgtctcctca

SEQ ID NO: 7264 - DNA, 283 bp, Homo sapiens
  source 1..283: mol_type = other DNA
tgtagcctctggattcacctttagtcgctattggatgagctgggtccgccaggctccagggaagggcctggagtgggtggccaacataaagtatgatggaagtgagaaatactatgtggactctgtgaagggccgattcagcgtctccaaagacaacgccaagaactcactgtatctgcaaatgaacagcctgagagccgaggacacggccgtctattactgtgtgagactggctgaatacttccagaattggggccagggcactctggtcaccgtctcctct

SEQ ID NO: 7265 - DNA, 283 bp, Homo sapiens; identical to SEQ ID NO: 7264
  source 1..283: mol_type = other DNA

SEQ ID NO: 7266 - DNA, 304 bp, Homo sapiens
  source 1..304: mol_type = other DNA
cacagtttctggatttgagtttagtgcgtatgctatgagctgggtccgccaggctccagggaaggggctggagtgggttggcttcattagaagtaaatcgtatggtgcgacaagggattacgccccgtctgtgaaaggcagattcatcatctcaagaaatgattccgaaagtatcgcctatctgcaaatgaacagcctgaaaaccgacgacacaggcgtctattattgtactagagatcgccgcggatcggggactcatttttttgactactggggccagggaaccctggtcaccgtctcctcg

SEQ ID NO: 7267 - DNA, 304 bp, Homo sapiens
  source 1..304: mol_type = other DNA
cacagtttctggatttgagtttagtgcgtatgctatgagctgggtccgccaggctccagggaaggggctggagtgggttggcttcattagaagtaaatcgtatggtgcgacaagggattacgccccgtctgtgaaaggtagattcatcatctcaagaaatgattccgaaagtatcgcctatctgcaaatgaacagcctgaaaaccgacgacacaggcgtctattattgtactagagatcgccgcggatcggggactcatttttttgactactggggccagggaaccctggtcaccgtctcctcg

SEQ ID NO: 7268 - DNA, 304 bp, Homo sapiens
  source 1..304: mol_type = other DNA
tacagtgtccggatttgaatttgctgcttatgccttgagctgggtccgccaggctccagggaagggcctggagtgggtagggttcattagaagtaagtcttatggtgggaccacagattacaccgcgtctgtgaaaggccgattcaccatctcaagagacgactccaaaagcatcgcctatctgcaaatgaacagcctgaaagccgacgacacaggcgtctactactgtactagagatcgccgcggttcggggactcatttctttgactactggggccagggaaccctggtctccgtctcctcg

SEQ ID NO: 7269 - DNA, 304 bp, Homo sapiens
  source 1..304: mol_type = other DNA
cacagcctctggattcgaatttgatgcgtatgccatcagctgggtccgccaggctccggggaaggggctggagtgggttggtgtcatcagaatcaaaaggtctggtgcgacagcagactatgccgcgtctgtgaaaggcagattcgtcatctcaagagatgattcgaagaggatcgcctatctgcagatgaacagtcttaaagaagacgacactggcgtgtattactgtactagagaccggcgggggtctgggacccacttctttgactattggggccagggagccctggtcagcgtctcctca

SEQ ID NO: 7270 - DNA, 286 bp, Homo sapiens
  source 1..286: mol_type = other DNA
tgcagcctctggattcaactttaatgggaattggatgggctgggtccgccaggctgcagggaaggggccggagtgggtgggcaacataaagccagatggaaccgagaaatactacgtgggctctgtaaagggccgattcaccatctccagagacaacgccaagaactccctgtttttgcaactggacagcctgagagccgaggacacggctgtatattactgtgtgaaaggcggtacgatggaccttgactactggggccagggaaccctggtcaccgtctcctca

SEQ ID NO: 7271 - DNA, 286 bp, Homo sapiens
  source 1..286: mol_type = other DNA
tgcagcctctggattcacctttaatgggtattggatgggctgggtccgccaggctccagggaaggggctggagtgggtggccaacataaagccagatggaactgagaaatactacgtggactctgtgaagggccgattcaccatctccagagacaacgccaagaactcactgtttctgcaagtggacagcctgagagccgaggacacggctgtatattactgtgtgaaaggcggtacgatggaccttgactactggggccagggaaccctggtcaccgtctcctca

SEQ ID NO: 7272 - DNA, 286 bp, Homo sapiens
  source 1..286: mol_type = other DNA
tgcagcctctggattcacctttaatgggaattggatgggctgggtccgccaacttccagggaaggggctggagtgggtggccaacataaagccagatggaactcagaaattctacgtggactctgtgaagggccgattcagcatctccagagacaacaccaggaactcactgtttctgcaagtggacagcctgagagtcgaggacacggctgtatattactgtgtgaaaggcggtacgatggacctagactactggggccagggaaccctggtcaccgtctcctca

SEQ ID NO: 7273 - DNA, 286 bp, Homo sapiens
  source 1..286: mol_type = other DNA
tgtagcctctggattcacctttagaacctattgggtgggctggctccgccaggctccagagaaggggctggagtgggtggccaacataaagccggatggaagtgaggaatactatggggactctgtgaagggccgattcagcatctccagagacaacgcccagaactcactgtatctgcaaatgaacagcctgagagccgaggacacggctgtgtattattgtgtaaaaggtggtacaatggaccttgactactggggccagggaaccctggtcaccgtttcctca

SEQ ID NO: 7274 - DNA, 274 bp, Homo sapiens
  source 1..274: mol_type = other DNA
ttcagcctctgaattcacctggatgaactgggtccgccaggctccagggagggggctggagtgggtggccatcataaaggaagatggaagtgagaagttgtatgtggactctgtgaagggccgattcaccatctccagagacaacgccaagacatcattgtacctagaaatggaccgcctgagagtcgaggacacggctgtatattattgtgcggggggaagtggctggcgaattgactcctggggccagggaaccctggtcacggtctcctca

SEQ ID NO: 7275 - DNA, 274 bp, Homo sapiens; identical to SEQ ID NO: 7274
  source 1..274: mol_type = other DNA

SEQ ID NO: 7276 - DNA, 286 bp, Homo sapiens
  source 1..286: mol_type = other DNA
tgcagcctctggattcaatttttctacctactggatgaactgggtccgccaggctccagggaaggggctggagtgggtggccatcataaggcaagatggagcttggacatcctatgtggactctgtcaagggccgatccaccatttccagagacaacgcccacaactcactgttcctgcagctgaacagcctgagagccgaagacacggctgtttattactgtgcgggaggttctgggtggcgaattgactcatggggccagggaaccctggtcaccgtctcctca

SEQ ID NO: 7277 - DNA, 277 bp, Homo sapiens
  source 1..277: mol_type = other DNA
tgcagcctctggattcgacttcaggaccaactggatgcactgggtccgccaagttccagggaagggactagtgtgggtctcacgcattaatggcgatgggactatgtcaaccaatgcggactccgtgaagggccgattcaccatctccagagacaacgccaggaacactctgtatctacaaatgaacggtctgagaggcgaggacacggctgtatattactgtgcaaagggaatgggtgactcctggggccagggaaccctggtcgccgtctcctca

SEQ ID NO: 7278 - DNA, 277 bp, Homo sapiens
  source 1..277: mol_type = other DNA
tgcagcctccggattcaccttcagtacgtcatggatgcactgggtccgccaagttccggggaaggggctggtctgggtcgcacgtattaacagagatgggactctctcaacctgcgcggactccgtgaagggccgattcagcatctccagagacaacaccaagaacactctgtatctgcagatgaacagtctgagagccaccgacacggctatatattactgtgcaaaggggatgggtgactcctggggccagggaaccctggtcaccgtctcctca

SEQ ID NO: 7279 - DNA, 277 bp, Homo sapiens
  source 1..277: mol_type = other DNA
tgcagcctctggattcgacttcaggaccaactggatgcactgggtccgccaagttccagggaaggggctagtgtgggtctcacgcattaatggcgatgggactatgtcaaccaatgcgggctccgtgaggggccgattcaccatctccagagacaacgccaggaacactctctatctacaaatgaacggtctgagagccgaggacacggctgtatattactgtgcaaagggaatgggtgactcctggggccagggaaccctggtcgccgtctcctca

SEQ ID NO: 7280 - DNA, 277 bp, Homo sapiens
  source 1..277: mol_type = other DNA
tgcagcctctggattcaccttcagtagttattggatgcactgggtccgccaagttcctggtaaggggctggtgtgggtctcacgtatcaatagtggtggaagtatcactaactacgcggactccgtgaagggccgattcaccatctccagagacaacgccaagaatacgctatatctccaaatgaacaatttgagggccgaggacacggctttgtattattgtgccaaaggtatgggtgactcctggggccagggaagcctggttaccgtctcctca

SEQ ID NO: 7281 - DNA, 277 bp, Homo sapiens
  source 1..277: mol_type = other DNA
tgcagcctccggattcaccttcagtacgtcatggatgcactgggtccgccaagttccggggaaggggctggtctgggtcgcacgtattaacagagatgggactctctcaacctgcgcggactccgtgaagggccgattcagcatctccagagacaacaccaagaacactctgtatctgcagatgaacagtctgagagccaccgacacggctatgtattactgtgcaaaggggatgggtgactcctggggccagggaaccctggtcaccgtctcctca

SEQ ID NO: 7282 - DNA, 277 bp, Homo sapiens
  source 1..277: mol_type = other DNA
tgcagcctctggattcgacttcaggaccaactggatgcactgggtccgccaagttccagggaaggggctagtgtgggtctcacgcataaatggcgatgggactatgtcaaccaatgcggactccgtgaagggccgattcaccatctccagagacaacgccaggaacactctgtatctacaaatgaatggtctgagagtcgaggacacggctgtatattactgtgcaaagggaatgggtgactcctggggccagggaaccctggtcgccgtctcctca

SEQ ID NO: 7283 - DNA, 289 bp, Homo sapiens
  source 1..289: mol_type = other DNA
tgcagcctctggattcagctttagcgactacgccatgacctgggtccgccaggctccagggaaggggctggagtgggtctctgccatgaatagctatgctagtaccacattctacgcagactctgtgaagggccggttcaccatctccagcgacaatgccaagaacacgctgtatctgcaaatgaacagcctgagagccgatgacacggccgtctactactgtgcgaaatatagcagcaggtggtatgaggactactggggccagggaaccctggtcaccgtctcctca

SEQ ID NO: 7284 - DNA, 289 bp, Homo sapiens
  source 1..289: mol_type = other DNA
cgcagcctctggattcacctttagcacctatgccatgacctgggtccgccaggctccagggaaggggctggagtgggtctcagctattagtaatactattggcttcacattccacgcagactccgtgaagggccgattcagtatttccagggacaattccaagaacatcgtttatctgcaaatgaacagcctgagagccgaggacacggccgtatactactgtgcgaaatatagcagcaggtggtatgaggactactggggccagggaaccctggtcaccgtctcctca

SEQ ID NO: 7285 - DNA, 312 bp, Homo sapiens
  source 1..312: mol_type = other DNA
acacagaccctcacgctcacctgcagtttctctgggttctcactcaacagtcccgccgtgggtgtggcctggatccgtcagcccccaggcagggccctggagtggcttgcactcgtgtattggaatgatgataccgtctacagcccatctctgaggaccaggctcaccatcaccaaggacacctccagaaaccaggtggtccttacaatggtcaacatggagcctgtggacacagccacatattactgtgcacacacggctggctggttgcctgactcctggggccaggggaccctggtcaccgtgtcctca

SEQ ID NO: 7286 - DNA, 312 bp, Homo sapiens
  source 1..312: mol_type = other DNA
acacagaccctcacgctcacctgcagtttctctgggttctcactcaacagtcccgccgtgggtgtggcctggatccgtcagcccccaggcagggccctggagtggcttgcactcgtgtattggaatgatgataccgtctacagcccatctctgaggaccaggctcaccatcaccaaggacacctccagaaaccaggtggtccttacaatggtcaacatggagcctgtggacacagccacatattactgcgcacacacggctggctggttgcctgactcctggggccaggggaccctggtcaccgtgtcctca

SEQ ID NO: 7287 - DNA, 312 bp, Homo sapiens
  source 1..312: mol_type = other DNA
acacagaccctcacgctgacctgcgccttctctgggttctcactcagcagctatgcagtgggtgtgggctggatccgtcagcccccaggaaaggccccagagtggcttgcactcatttattgggatgatgataagcgctatagcccatctctggagaccagactcaccatcaccaaggacacctccagaaatcaggtggtgcttacgatgaccaacatggaccctattgacacaggcacatattactgtgcacacacggcgggatggctgccagactcctggggccagggaaccctggtcaccgtctcctca

SEQ ID NO: 7288 - DNA, 289 bp, Homo sapiens
  source 1..289: mol_type = other DNA
tgcagcctctggattcactttcagtaacgcctggatgaactgggtccgccaggctccagggaaggggctggagtgggttggtcgtattagaagcaaagctgatggtgggacaacagactacgctgcacccgtgagaggcagattcaccatctcaagagatgattcaaaggacacgctgtatctccaaatgaacagcctgaacatcgaggacacagccgtttattactgtgccacccaggggggatttttagacttctggggccagggaaccctggtcaccgtctcctca

SEQ ID NO: 7289 - DNA, 289 bp, Homo sapiens; identical to SEQ ID NO: 7288
  source 1..289: mol_type = other DNA

SEQ ID NO: 7290 - DNA, 289 bp, Homo sapiens; identical to SEQ ID NO: 7288
  source 1..289: mol_type = other DNA

SEQ ID NO: 7291 - DNA, 289 bp, Homo sapiens
  source 1..289: mol_type = other DNA
tgcagcctctggattcactttcagtaacgtctggatgacctgggtccgccagactccagggaaggggctggagtgggttggccgtattaaaagcaaagttgatggtgggacaacagactatgctgcattcgtgaaagacagattcaccatctcaagagatgattcaaaaaccacgctgtatctgcaaatgaacagcctgaaaaccgaggacacagccgtgtattattgtgccacacaaggggggtttcttgacttctggggccagggagtcctggtcaccgtctcctca

SEQ ID NO: 7292 - DNA, 289 bp, Homo sapiens
  source 1..289: mol_type = other DNA
tgcagcctctggattcactttcagtaacgtctggatgacctgggtccgccagactccagggaagggactggagtgggttggccgtattaaaagtaaagttgatggtgggacaacagactatgctgcattcgtgaaagacagattcaccatctcaagagatgattcaaaagccacggtgtttctgcaaatgagcagcctgaaaagcgaggacacagccctgtattattgtgccacacaagggggatttcttgacttctggggccagggagtcctggtcaccgtctcctca

SEQ ID NO: 7293 - DNA, 289 bp, Homo sapiens
  source 1..289: mol_type = other DNA
tgaagcctctggattcacattcaggaacgtctggatcagttgggtccgccaggctccagggaagggcctggagtgggttggtcgtattaagagtaaagctgacggtggcacagcggactacgctgcacccgtgaagggcagattcaccatctcaagagatgattcaaaaaaaacactgtatctccaaatgaacaacctgaaaagcgaggacacagccgtgtattattgtgccacacaggggggatttcttgacttctggggccagggaaccttggtcaccgtctcctca

SEQ ID NO: 7294 - DNA, 289 bp, Homo sapiens
  source 1..289: mol_type = other DNA
tgcagcctctggattcaccttcagtacctcctggatgtactgggtccgccaagctccagggaaggggctggtgtggctctcacatattaaaggtgatgacagaggcacaacctacgcggactcagtgaagggccgattcaccatctccagagacaacaccaagaacacgctgtatctgcaaatggacagtctgagagtcgaggacacggctatgtattactgtgcaagagatcttgcgcacgctgcttttgatctctggggccaagggacaatggtcaccgtctcttca

SEQ ID NO: 7295 - DNA, 289 bp, Homo sapiens
  source 1..289: mol_type = other DNA
tgcagcctctggattcaccttcagtaattactggatgtactgggtccgccaagctccagggaaggggctggtgtggttgtcacatattcaaagtgatgacaaacggacaacctacgcggactccgtgaagggccgattcaccatgtccagagacaacgccaagaacactctgtatctgcaaatggacggtctgagagtcgacgacacggctatatattactgtgcaagagatcttgcgcatgctgcttttgatctctggggccaagggacaatggtcaccgtctcttcg

SEQ ID NO: 7296 - DNA, 289 bp, Homo sapiens
  source 1..289: mol_type = other DNA
tgtagcctctggattcaccttcagtgaccgctggatgtactgggtccgccaagctccagggaaggggctggtgtggctatcacatattcaaaatgatgacagtagtacaatctatgcggactccgtgaagggccgattcaccatctccagagacaacgccaagaacacgctgtatctgcaaatgaacagtctgagagtcgaggacacggctatgtattactgtgcaagagatctggcccacgcggcttttgatctctggggccaagggacaatggtcaccgtctcttca

SEQ ID NO: 7297 - DNA, 283 bp, Homo sapiens
  source 1..283: mol_type = other DNA
tgcagcctctggatttacctttagaaactattggatgagctgggtccgccaggcaccagggaggggcctagagtgggtggccaacataaagtacgatggcagtgagaaatattatgtggactctgtgaagggccgattcaccatctccagagacaacgccaagaactcactgtatctacaaatgaacagcctgagagccgaggacacggctgtgtatcactgtgttcgtttggctgaatacttccaggactggggccagggcaccctggtcaccgtctcctca

SEQ ID NO: 7298 - DNA, 283 bp, Homo sapiens
  source 1..283: mol_type = other DNA
tacaacctctggattcacctttattagatattggatgagctgggtccgccaggctccagggagggggctggagtgggtggccaacataaatcaagatggaagtgacaagtactatgtggactctgtgaatggccgattcaccatctccagagacaacgcgaagaactcactgtatctgcaaatgaacagcctgagggccgacgacagggctgtgtattattgtgttcgtttggctgaatacttccaggactggggccagggcaccctggtcaccgtttcttca

SEQ ID NO: 7299 - DNA, 283 bp, Homo sapiens
  source 1..283: mol_type = other DNA
tgcagcctctggattcacctttagtaggtattggatgagctgggtccgccaggctccagggaagggtctggagtgggtggccaacataaaccaagatggaagtgacaaatactatgtggactctgtgaagggccgatgcatcatctccagagacaacgccaagaactcactgtatctgcaaatgaacagcctgagagccgccgacacggccgtgtattattgtgtaaggctcgctgaatacttccaggactggggccagggcaccctggtcaccgtctcctca

SEQ ID NO: 7300 - DNA, 283 bp, Homo sapiens
  source 1..283: mol_type = other DNA
tgcagcctctagattcacctttagtagatactggatgagttgggtccgccaggccccagggaaggggctggagtgggtggccaacataaagcaagatggaagtgacaaatactatgtggactctgtgaagggccgattcaccatctccagagacaacgccaagaactcactgtatctgcaaatgaacagcctgagagccgaggacacggccgtgtattactgtgtaaggctcgctgaatacttccaggactggggccagggcaccctggtcaccgtctcctca

SEQ ID NO: 7301 - DNA, 283 bp, Homo sapiens
  source 1..283: mol_type = other DNA
tgtagcctctggattcagctttaatcggtattggatgagttgggtccgccaggcaccagggagggggctggagtgggtggccaacataaagtacgatggcagtgaagaacgctatgtggacgctgtgaagggccgattcaccatctccagagacaacgccaagaactcactgtatctgcagatgaacagcctgagagccgaggacacgggtgtgtattactgtgttcgtttggctgaatacttccaggactggggccagggcaccctggtcaccgtctcctca

SEQ ID NO: 7302 - DNA, 283 bp, Homo sapiens
  source 1..283: mol_type = other DNA
tacaacctctggattcacctttattagatattggatgagctgggtccgccaggctccagggagggggctggagtgggtggccaacataaatcaagatggaagtgacaagtactatgcggactctgtgaatggccgattcaccatttccagagacaacgcgaagaactcactgtatctgcaaatgaacagcctgagggccgacgacagggctgtgtattattgtgttcgtttggctgaatacttccaggactggggccagggcaccctggtcaccgtttcctca

SEQ ID NO: 7303 - DNA, 283 bp, Homo sapiens
  source 1..283: mol_type = other DNA
tgcagcctctagattcacctttagtagatactggatgagctgggtccgccaggccccagggaaggggctggagtgggtggccaacataaagcaagatggaagtgacaaatactatgtggactctgtgaagggccgattcaccatctccagagacaacgccaagaactcactgtatctgcaaatgaacagcctgagagccgaggacacggccgtgtattactgtgtaaggctcgctgaatacttccaggactggggccagggcaccctggtcaccgtctcctca

SEQ ID NO: 7304 - DNA, 283 bp, Homo sapiens
  source 1..283: mol_type = other DNA
tgcagcctctggactaagcttcagtagttattggatgacttgggtccgccaggctccagggaaggggctggagtgggtggccaacataaaacacggtggaagtgagaaatattatgtggactctgtgaggggccgattcaccatctccagagacgacgccaagaattcagtgtatctacaaatgaacagcctgagagacgaggacacggctgtgtattactgtgcgacaggtagaataggtcgcgactactggggccagggaaccctggtcgccgtctcctca

SEQ ID NO: 7305 - DNA, 283 bp, Homo sapiens
  source 1..283: mol_type = other DNA
tgcagcctctggattcagcatcactaattattggatgacctgggtccgccaggctccagggaaggggctggagtgggtggccaacataaagcacggtggaggtgagaaatactatgtggactctgtgaagggccgattcaccatctccagagacgacgccaagaattcagtgtatctgcaaatgaacagcctgacagacgaagacacggctgtctattactgcgcgacaggtagaataggtcgcgactactggggccagggaaccctggtcgccgtctcctca

SEQ ID NO: 7306 - DNA, 283 bp, Homo sapiens
  source 1..283: mol_type = other DNA
tgcagcctctggattaagcttcagtagttattggatgacttgggtccgccaggctccagggaaggggctggagtgggtggccaacataaaacacggtggaagtgagaaatattatgtggactctgtgaggggccgattcaccatctccagagacgacgccaagaattcagtgtatctgcaaatgaacagcctgagagacgaggacacggctgtgtattactgtgcgacaggtagaataggtcgcgactactggggccagggaaccctggtcgccgtctcctca

SEQ ID NO: 7307 - DNA, 283 bp, Homo sapiens
  source 1..283: mol_type = other DNA
tgcagcctctggattcacctttcgtaactattggatgacctgggtccgccaggctccagggaaggggctggagtgggtggccaacataaaaatggctgggagtgagaagtattatgtggactctgtgaagggccgattcaccatctccagagacgacgcccagaactcagtgtttctgcaaatgaacagcctgagagtcgaagacacggctgtgtattactgtgcgacaggcagaataggaagggactactggggccagggaaccctggtcaccgtctcctca

SEQ ID NO: 7308 - DNA, 283 bp, Homo sapiens
  source 1..283: mol_type = other DNA
tgcagcctctggattcacctttcgtaactattggatgacctgggtccgccaggctccagggaaggggctggagtgggtggccaacataaaaatggctgggagtgagaagtgttatgtggactctgtgaagggccgattcaccatctccagagacgacgcccagaactcagtgtttctgcaaatgaacagcctgagagtcgaagacacggctgtgtattactgtgcgacaggcagaataggaagggactactggggccagggaaccctggtcaccgtctcctca

SEQ ID NO: 7309 - DNA, 301 bp, Homo sapiens
  source 1..301: mol_type = other DNA
tgcagcctctggattccccttcagtgactactacctgagctggatccgccaggctccagggaaggggctggagtgggtttcatacattggtagtagtggtaccatatactacggagactctgtgaagggccgattcaccatctccagggacaacgccaaaaactcactgtatctgcaaatgaacagcctgagagccgaggacacggccgtgtattactgtgcgagaggtttcgattgtagtagtaccagctgctatgcttttgatatctggggccaggggacaatggtcaccgtctcttca

SEQ ID NO: 7310 - DNA, 301 bp, Homo sapiens
  source 1..301: mol_type = other DNA
tgcagcctctggattccccttcagtgactactacctgagctggatccgccaggctccagggaaggggctggagtgggtttcatacattggtagtagtggtgccatatactacggagactctgtgaggggccgattcaccatctccagggacaacgccaaaaactcgctgtatctgcaaatgaacagcctgagagccgaggacacggccgtgtattactgtgcgagaggtttcgattgtagtagtaccagctgctatgcttttgatatctggggccgggggacaatggtcaccgtctcttca

SEQ ID NO: 7311 - DNA, 304 bp, Homo sapiens
  source 1..304: mol_type = other DNA
tgcagcctctggattcaccttcactgactactacatgagctggatccgccaggctccagggaaggggctggagtgggtttcctacattagtactagtggtagtaccatgtacaacgaagactctgtgaagggccgattcaccatctccagggacaacgccaagaatgtattgtatctgcaaatgaacagcctgagagtcgaggacacggccgtgtattactgtgcgagagggtttgattgtagtagtaccagctgctatgcttttgatatctggggccaagggacaatggtcaccgtctcttca

SEQ ID NO: 7312 - DNA, 280 bp, Homo sapiens
  source 1..280: mol_type = other DNA
cactgtctctggtggctccatcagtaattactactggagctggatccggcagcccccagggaagggactggagtggattgggtgtatctattccagtgggagcaccaactacaacccctccctgaagagtcgagtcaccgtatcagaagacacgtccaagaaccaggttttcctgaagttgacctctgtgaccgctgcggacacggccgtctattactgtgcgagaggtcgtggctggtcggattactggggccagggaaccctggtcaccgtctcctca

SEQ ID NO: 7313 - DNA, 286 bp, Homo sapiens
  source 1..286: mol_type = other DNA
cagtgtctctggtgtctccatcaataattggttctggagctggatccggcagccccccgggaagggactggagtggattgcgtctgtcgataacagtgggagcaccaactacaactacaacccctccctccagagccggctcgccatatcaagagacacgtccaagaatcagttgtccctgaacctgagctcggtgaccgctgcggacacggccgtgtattactgtgcgaggggccggggctggtcggactactggggccagggaaccctggtcatcgtctcctca

SEQ ID NO: 7314 - DNA, 304 bp, Homo sapiens
  source 1..304: mol_type = other DNA
tgcagcctctggattcaccttcagtggctactacatgagctggatccgccaggctccaggggaggggctgcagtgggtttcatacattggtggtagtggtactaccatatactacgcagactccgcgaagggccgattcaccatctccagggacaacgccaggaactcactgtatctgcaaatgaacagcctaggagccgaagacacggccgtgtattactgtgcgagaggtttcgattgtagtactaccagctgctatgcttttgatctctggggccaagggacaatggtcaccgtctcttca

SEQ ID NO: 7315 - DNA, 304 bp, Homo sapiens
  source 1..304: mol_type = other DNA
tgcagcctctggattcaccttcagtggctactacatgagctggatccgccaggctccaggggaggggctgcagtgggtttcatacattggtggtagtggtactaccatatactacgcagactccgcgaagggccgattcaccatctccagggacaacgccaggaactcactgtatctgcaaatgcacagcctaggcgccgaagacacggccgtgtattactgtgcgagaggtttcgattgtagtactaccagctgctatgcttttgatctctggggccaagggacaatggtcaccgtctcttca

SEQ ID NO: 7316 - DNA, 307 bp, Homo sapiens
  source 1..307: mol_type = other DNA
tgcagcctctggattcaccttcagtgactactacatgagctggatccgccaggctccagggaaggggctggagtgggtttcatatattagtagtagtagtggtagtgacatatattatgcagactctgtgaagggccgattcaccatctccagggacaacgccaagaactcactgtatctgcaaatgaacagcctgagagccgaggacacggccgtgtattactgtgcgagaggtttcgattgtagtaccaccagttgctatgcttttgatctctggggccaagggactatggtcaccgtctcttca

SEQ ID NO: 7317 - DNA, 307 bp, Homo sapiens
  source 1..307: mol_type = other DNA
tgcagcctctggattcaccttcagtgactactacatgagctggatccgccaggctccagggaaggggctggagtgggtttcatacatcagtagtggtggtggtagtatcatatattacggagactctgtgaagggccgattcaccatctccagggacaacgccaaaaactcactgtatctgcaaatgaacagcctgagagccgaggacacggccgtctattactgtgcgcgaggtttcgattgtagtactaccagctgctatgcttttgatctctggggccaggggacaatggtccccgtctcttca

SEQ ID NO: 7318 - DNA, 304 bp, Homo sapiens
  source 1..304: mol_type = other DNA
tgcagcctctggatttcccctcagtgactactacatgagctggatccgccaggctccagggaaggggctggagtgggtttcatacataggtggtagtggtattaccatatactacgcagactctgtgaagggccgattcaccatctccagggacaacgcccagaactcactgtatctgcaaatgaacagcctgagagccgaagacacggccctatattactgtgcgagaggattcgattgtagtactaccagctgctatgcttttgatttatggggccaagggacaatggtcaccgtctcttca

SEQ ID NO: 7319 - DNA, 304 bp, Homo sapiens
  source 1..304: mol_type = other DNA
tgcagcctcgggattcaccttcagtgactactacatgagctgggtccgcctggctccagggaaggggctggagtgggtttcatacattggtggtggtggaagttccatatactacggagactctgtgaagggccgattcaccatatccagggacaacgccaaaaagtcagtgtatctgcaaatgaacagcctgacagtcgaggacacggccgtgtattactgtgcgagaggtttcgattgcagtactaccagctgttatgcttttgatctctggggccaggggacaatggtcaccgtctcttca

SEQ ID NO: 7320 - DNA, 304 bp, Homo sapiens
  source 1..304: mol_type = other DNA
tgcagcctctggattccccctcagtgactactacatgagctggatacgccaggctccagggaagggactgcagtgggtttcatacgttagtgatagtggcacgaccatgcactacgcagactctgtgaagggccgattcaccatctccagggacaacgccaggaactcactgtatctgcaaatgaacagcctgagagtcgaagacacggccgtgtattactgtgcgagaggtttcgattgtagtactaccagttgctatgcttttgatctctggggccaagggacaatggtcaccgtctcttca

SEQ ID NO: 7321 - DNA, 304 bp, Homo sapiens
  source 1..304: mol_type = other DNA
tgcagcctctggattcagcatcagtgactactacatgagctgggtccgccaggctccagggaaggggctgcagtgggtttcgtacattagtggtagtggtactaccatatactacgcagactctgtgaagggccgattcaccatctccagggacaacgccaggaactcattgtatctgcaaatgaacagcctgggagccgacgacacggccctatattactgtgcgagaggtttcgattgtagtactaccagctgctatgcttttgatctctggggccaagggacaatggtcaccgtctcttca

SEQ ID NO: 7322 - DNA, 304 bp, Homo sapiens
  source 1..304: mol_type = other DNA
tgcagcctctggattcagcgtcagtgactactacatgagctggatccgccaggctccagggaaggggctggagtgggtctcatacgttagtgatagtggtagtatcctatactacggagactctgtgaagggccgatgcaccatctccagggacaccgccaaaaactcagtgtatctgcaaatgaacagcctgggagccgaggacacggccatgtattactgtgcgagaggtttcgattgtagtactaccagctgctatgcttttgatctctggggccaagggacaatggtcaccgtctcttca

SEQ ID NO: 7323 - DNA, 304 bp, Homo sapiens
  source 1..304: mol_type = other DNA
tgcagcctccggattcaccttcagtgtctactacatgagttggatccgccaggctccagggaaggggctgcagtgggtttcatacattagtggtagtggtacttccatctactacgcagactctgtgaagggccgattcaccatctccagggacaacgccaggaactcactgtatctgcaaatgaacagcctgggagccgaggactcggccatttattactgtgcgagaggtttcgattgtagtaccaccagctgctatgcttttgatctttggggccaagggacaatggtcaccgtctcttca

SEQ ID NO: 7324 - DNA, 304 bp, Homo sapiens
  source 1..304: mol_type = other DNA
tgcagcctctggattcaccttcagtgactactatatgagctggatccgccaggctccagggaaggggctgcagtgggtttcatacattagtggtagtgctactaccatatactacgcagactctgtgaagggccgattcaccatctccagggacaacgccaggaactcactgtatctgcaaatgaacagcctgggagccgaggacacggccgtgtattactgtgcgagaggtttcgattgtagtactaccagctgctatgcttttgatctctggggccaagggacaatggtcaccgtctcttca

SEQ ID NO: 7325 - DNA, 304 bp, Homo sapiens
  source 1..304: mol_type = other DNA
tgcagcctcgggattcagagtcagtgactactacatgagctggatccgccaggctccagggaaggggctggagtgggtctcatacattagtgatagtggtagtatcctatactacggagactctgtgaagggccgatgcaccatctccagggacaccgccaaaaattcactgtatctgcaaatgaacagcctgggagtcgaggacacggccatgtattactgtgcgagaggtttcgattgtagtactaccagctgctatgcttttgatctctggggccaagggacaatggtcaccgtctcttca

SEQ ID NO: 7326 - DNA, 304 bp, Homo sapiens; identical to SEQ ID NO: 7325
  source 1..304: mol_type = other DNA

SEQ ID NO: 7327 - DNA, 304 bp, Homo sapiens
  source 1..304: mol_type = other DNA
tgcagcctctggattcaccttcagtgactactacatgagctggatccgccaggctccagggaaggggctgcagtgggtttcatacattagtggtagtggtagtaccatatactacgcagactctgtgaagggccgattcaccatctccagggacaacgccaggaactcactgtatctgcaaatgaacagcctgggagccgacgacacggccgtgtattactgtgcgagaggtttcgattgtagtactaccagctgctatgcttttgatctctggggccaagggacaatggtcaccgtctcttca

SEQ ID NO: 7328 - DNA, 310 bp, Homo sapiens
  source 1..310: mol_type = other DNA
tgcagcctctagattcaccttcaccttcagtgactactacatgagctggatccgccaggctccagggaaggggctgcagtggatttcatacattgatggtagtggtagtaccatatactatgcagactctgtgaagggccgattcaccatctccagggacaacgccaggaactcactgtatctgcaaatgaacagcctgggagccgacgacacggccgtgtattactgtgcgagaggtttcgattgtagtactaccagctgctatgcttttgatctctggggccaagggacaatggtcaccgtctcttca

SEQ ID NO: 7329 - DNA, 304 bp, Homo sapiens
  source 1..304: mol_type = other DNA
tgcggcctctggattcaccaccagtggctactacatgagctggatccgccaggctccagggaaggggctgcagtgggtatcatatattagtggaagtggtgatatcatatattatgcagattctgtgaggggccgattcaccatctccagggacaacgccaggaactcactgtctctggaaatgaacagcctgggagccgaggacacggccttgtattactgtgcgagaggcttcgattgtagtactaccagctgctatgcttttgatctctggggccaagggacaagggtcaccgtctcttca

SEQ ID NO: 7330 - DNA, 304 bp, Homo sapiens
  source 1..304: mol_type = other DNA
tgtagcctctggattcagcatcagtgactactacatgagctgggtccgccaggctccagggaagggactgcagtgggtttcgtacattagtggtagtggtactaccatatactacgcagactctgtgaagggccgattcaccatctccagggacaacgccaggaactcattgtatctgcaaatgaacagcctgggagccgacgacacggccctatattactgtgcgagaggtttcgattgtagtactaccagctgctatgcttttgatctctggggccaagggacaatggtcaccgtctcttca

SEQ ID NO: 7331 - DNA, 304 bp, Homo sapiens
  source 1..304: mol_type = other DNA
tgcagcctctggattcagcgtcagtgactactacatgagttggatccgccaggctccagggaagggtctggagtgggtctcatacgttagtaatagtggtagtatcctatactacggagactctgtgaagggccgatgcaccatctccaggggcaccgccaaaaactcagtgtttctgcaaatgaacagcctgggagccgaggacacggccatgtattactgtgcgagaggtttcgattgtagtactaccagctgctatgcttttgatctctggggccaagggacaatggtcaccgtctcttca

SEQ ID NO: 7332 - DNA, 307 bp, Homo sapiens
  source 1..307: mol_type = other DNA
tgcagcctctggattcaccttcagtgactactacatgacctggatccgccaggctccagggaaggggctggagtgggtttcatacataagtggtagtggtattattaccatatactacgcagactctgtgaagggccgattcaccatctccagggacaacgcccagaactcactgtatctgcaaatgaacagcctgagagccgaagacacggccctgtattactgtgcgagaggattcgattgtagtactaccagctgctatgcttttgatttatggggccaagggacaatggtcaccgtctcttca

SEQ ID NO: 7333 - DNA, 304 bp, Homo sapiens
  source 1..304: mol_type = other DNA
tgcagcctcgggattcaccttcagtgactactacatgagctgggtccgcctggctccagggaaggggctggagtgggtttcatacattagtggtggtggtagtaccatatactacggagactctgtgaagggccgattcaccatctccagggacaacgccaaaaagtcactgtatctgcaaatgaacagcctgagagtcgaggacacggccgtgtattactgtgcgagaggtttcgattgcagtactaccagctgctatgcttttgatctctggggccaggggacaatggtcaccgtctcttca

SEQ ID NO: 7334 - DNA, 304 bp, Homo sapiens
  source 1..304: mol_type = other DNA
tgcagcctctggattctccgtcactgactactacgtgagctggatccgccaggctccagggaaggggctggagtgggtctcatacattagtgacagtggtgatatcctatactacggagactctgtgaagggccgatgcaccatctccagggacaccgccaaaaattcactgtatctgcaaatgaacagcctgggagccgacgacacggccatgtattactgtgcgagaggtttcgattgtagtactaccagctgctatgcttttgatctctggggccaagggacaatggtcaccgtctcttca

SEQ ID NO: 7335 - DNA, 301 bp, Homo sapiens
  source 1..301: mol_type = other DNA
tgcagcctctggattccccttcagtgactactacctgagctggatccgccaggctccagggaaggggctggagtgggtctcatacattggtagtagtggtaccatatactacggagactctgtgaagggccgattcaccatctccagggacaacgccaaaaactcactgtatctgcaaatgaacagcctgagagccgaggacacggccgtgtattactgtgcgagaggtttcgattgtagtactaccagctgctatgcttttgatctctggggccaggggacaatggtcaccgtctcttca

SEQ ID NO: 7336 - DNA, 304 bp, Homo sapiens
  source 1..304: mol_type = other DNA
tgcagcctctggattcaccctcagtgactactacatgagctggatccgccaggctccagggaaggggctgcagtgggtttcatacattagtggaagtggtagaaccatatactacgcagactctgtgaagggccgattcaccatctccagggacaacgccaggaactcagtgtctctgcaaatgaacagcctgggagccgaggacacggccgtgtattactgtgcgagaggtttcgattgtagtactaccagctgttatgcttttgatctctggggccaagggacgatggtcaccgtctcttca

SEQ ID NO: 7337 - DNA, 304 bp, Homo sapiens
  source 1..304: mol_type = other DNA
tgcagcctctggattcacttccagtgactactacatgagctggatccgccaggctccagggaaggggctgcagtgggtttcatacattagtggtagtggtggtagaatatactacgcggactctgtgaagggccgattcaccatctccagggacaacgccaggaactcactgtatctgcagatgaacagcctgggagccgaggacacggccgtgtattactgtgcgagaggtttcgattgtagtactaccagttgctatgcttttgatctctggggccaagggacaatggtcaccgtctcttca

SEQ ID NO: 7338 - DNA, 304 bp, Homo sapiens
  source 1..304: mol_type = other DNA
tgcagcctctggattcagcgtcagtgactactacatgagttggatccgccaggctccagggaaggggctggagtgggtctcatacgttagtaatagtggtagtatcctatactacggagactctgtgaagggccgatgcaccatctccaggggcaccgccaaaaactcagtgtatctgcaaatgaacagcctgggagccgaggacacggccatgtattactgtgcgagaggtttcgattgtagtactaccagctgctatgcttttgatctctggggccaagggacaatggtcaccgtctcttca

SEQ ID NO: 7339 - DNA, 304 bp, Homo sapiens
  source 1..304: mol_type = other DNA
tgcagcctctggattcagaatcagtgactactacatgagctggatccgccaggctccagggaaggggctggagtgggtctcatacattagtgacagtggtagtatcctatactacggagactctgtgaagggccgatgcaccatctccagggacaccgccaaaaactcagtgtttctgcaaatgaacagcctgggagtcgaggacacggccatgtattactgtgcgagaggtttcgattgcagtactaccagctgctatgcttttgatctctggggccaagggacagtggtcaccgtctcttca

SEQ ID NO: 7340 - DNA, 304 bp, Homo sapiens
  source 1..304: mol_type = other DNA
tgcagcctctggattcaccttcagtggctactacatgagctggatccgccaggctccagggaaggggctggagtgggtttcatacatcagtaatggtggtggtaccatatactacggagactctgtgaggggccgattcaccatctccagggacaacgccaaaaactcactgtatctgcaaatgaacagcctgagagccgaggacacggccgtgtattactgtgcgagaggtttcgattgtagtactaccagctgctatgcttttgatctctggggccaggggacaatggtcaccgtctcttca

SEQ ID NO: 7341 - DNA, 304 bp, Homo sapiens
  source 1..304: mol_type = other DNA
tgcagcctctggattcaccatcagtgactactatatgagctggatccgccaggctccagggaaggggctgcagtgggtttcatacattagtggtagtgctactaacatatatagcgcagactctgtgaagggccgattcaccatctccagggacaacgccaggaactcactgtatctgcaaatgaacagcctgggagccgaggacacggccgtgtattactgtgcgagaggtttcgattgtagcactaccagctgctatgcttttgatctctggggccaagggacaatggtcaccgtctcttca

SEQ ID NO: 7342 - DNA, 304 bp, Homo sapiens
  source 1..304: mol_type = other DNA
tgccgcctctgggttcacgttcagtgactactacatgagctggatccggcaggctccagggaaggggctggagtggatttcatacattagtggtagtgctactaccacatactacgcagactctgtgaggggccgattcaccatcttcagggacaacaccaggaagtcactgtatctgcaaatgaacaacctgagagccgaggacacggccgtgtatttctgtgcgagagggtttgattgtagtactaccagttgctatgcttttgatctctggggccaagggacactggtcaccgtctctcca

SEQ ID NO: 7343 - DNA, 304 bp, Homo sapiens; identical to SEQ ID NO: 7342
  source 1..304: mol_type = other DNA

SEQ ID NO: 7344 - DNA, 286 bp, Homo sapiens
  source 1..286: mol_type = other DNA
tgcagcctccggattcgcgttcggcaggtattggatgcactggctccgccagactccaggaaggggtctggtgtgggtctcacacattaattttgatggaactacgacagactacgcggactccgtgaggggccgattcaccatttccagagacaacgccaagaacacggtctatctgcaaatgaccagtctgagagtcgaggacacggcgacctattattgtgcaagaagtactgtgcttcggggagttcactggggccggggaacagcagtcaccgtttccaca

SEQ ID NO: 7345 - DNA, 286 bp, Homo sapiens
  source 1..286: mol_type = other DNA
tacagcctctggattcagcgtcataaaatactggatgcactgggtccgccaggcccctggcaaggggccggtgtgggtctcacgaattaatggtgatgcgacgactacaaactacgcggactccgtgaggggccgattcaccatctccagagacaacggcaagaacgcggtggacctagagatgaacagtctgagagtcgaagacacgggtgtctattattgtgcaaggagcacagtgcttcggggagtccactggggccagggaaccctggtcatcgtctcctca

SEQ ID NO: 7346 - DNA, 307 bp, Homo sapiens
  source 1..307: mol_type = other DNA
tgcagcctctggattcaccttcagtagctatagcatgaactgggtccgccaggctccagggaaggggctggagtgggtttcatatattagtagtagtagtagtaccatatactacgcagactctgtgaagggccgattcaccatctccagagacaatgccgagaactcactgtatctgcaaatgaatagcctgagagacgaggacacggctgtgtattactgtgcgagagattggagggtagagatggctacaaactactacggtatggacgtctggggccaagggaccacggtcaccgtctcctca

SEQ ID NO: 7347 - DNA, 307 bp, Homo sapiens
  source 1..307: mol_type = other DNA
tgcagtctctggattcaccttcagtcggtatagcatgaactgggtccgccaggctccagggaaggggctggagtgggtttcatatattagtagtagcagtagtaccatatactacgcagactctgtggagggccgattcaccatctccagagacaatgccgggaactcactgtatctgcaaatgaatagcctgagagacgaggacacggctgtgtattactgtgcgagagactggagggtagagatggctacaaattactacggtatggacgtttggggccaagggaccacggtcaccgtctcccca

SEQ ID NO: 7348 - DNA, 307 bp, Homo sapiens
  source 1..307: mol_type = other DNA
tgcagcctctggattcaccttcagtacttatagcatgaactgggtccgccaggctccaggaaaggggctggagtgggtttcatacattagtagtagtagtcgtaccatatactacgcagactctgtgaagggccgattcaccatctccagagacaatgccaagaactcactgaatctgcaaatgaacagcctgagagacgaggacacggctgtgtattactgtgcgagagattggagggtagagatggctacaaactactacggtatggacgtctggggccaagggaccacggtcaccgtctcctca

SEQ ID NO: 7349 - DNA, 283 bp, Homo sapiens
  source 1..283: mol_type = other DNA
cactgtctctggttcctccatcaaaaatcactactggagctggatcaggcagcccccagggacgggactggagtggattgggtatatccactacagtgggaccaccaactataacccctccctcaggagtcgagtcaccatatcagtagacacgtccgagacccagttctccctgaaactgagctctgtgactgctgcggacacggccgtgtattactgtacgagagggccggggtggttaccagactactggggccagggaatcctggtcaccgtctcctca

SEQ ID NO: 7350 - DNA, 283 bp, Homo sapiens
  source 1..283: mol_type = other DNA
cgctgtctctggtagtcccatcagtggtttgtactggagctggttccggcagcccccagggaagacactggagtggattgggtatttccatttcagtgggaccaccaactacaacccctccctccagagtcgagtcaccctatcagttgacacgtccaagaatcagttctccctgaagttgacctctgtgaccgctgcggacacggccgtgtactactgtacgaggggcccggggtggcttcccgactattggggccagggaaccctggtctccgtctcctca

SEQ ID NO: 7351 - DNA, 286 bp, Homo sapiens
  source 1..286: mol_type = other DNA
cactgtctctggtgactccatcagtagttactactggagctggatccggcagcccgccgggaagggactggagtggattgggcgtgtctatagcagtgggagcaccaactacaacccctccctcaagagtcgagtcaccatgtcagtagacacgtccaagaaccagttctccctgaagctgagctctgtgaccgccgcggacacggccgtgtattactgtgcgagaggaagaattggaagcggtctggacgtctggggccaagggaccacggtcaccgtctcctca

SEQ ID NO: 7352 - DNA, 286 bp, Homo sapiens
  source 1..286: mol_type = other DNA
cgctgtctctagtggctccatcagtagttactactggagctggatccggcagcccgccgggcagggactggaatggattgggcgtatctataccagtgggaacaccaactacaacccctccctcaagagtcgagtcaccatgtcagtggacacgtccaagaaccagttctccctgaagatgaactctgtgaccgccgcggacacggccatctatttctgtgcgagagggagaattgggagcggtctggacgtctggggccaagggaccacggtcaccatctcctca

SEQ ID NO: 7353 - DNA, 316 bp, Homo sapiens
  source 1..316: mol_type = other DNA
tgcagcctctggatttactttcagtagctatggcatgcactgggtccgccaggctccaggcaaggggctggagtgggtggcagttatatcatatgatggaagaaataagttttattcagactccgtgaagggccgactcaccatctccagagacaattccaagaacacgttgtatctggaaatgaacagcctgagaggtgaggacacggctgtctattactgtgcgaaagatcaatactatggttcggggagtccctactacgactattacggtatggacgtctggggccaagggaccacggtcaccgtctcctca

SEQ ID NO: 7354 - DNA, 316 bp, Homo sapiens
  source 1..316: mol_type = other DNA
tgcagcctctggattcaccttcagtagctatggcatgcactgggtccgccaggctccaggcaaggggctggagtgggtggcagttatatcatatgatggaaataataaatactatgccgactccgtgaagggccgattcaccatctccagagacaattccgagaacacgctgtttctgcaaatgaacagcctgagagctgaggacacggctgtgtattactgtgcgaaagatcaatactatgggtcggggagtccttattacgactactacggtatggacgtctggggccaagggaccacggtcaccgtctcctca

SEQ ID NO: 7355 - DNA, 285 bp, Homo sapiens
  source 1..285: mol_type = other DNA
gcttctggttatatctttaacacctatggtatcagctgggtgcgacaggcccctggacaagggcttgagtggatgggatggactaacacttacaaaggtgacgcaaactatgcacagaggttccagggcagagtcaccatgaccacagacacatccacaaccaccgcctacatggagctgaggagcctgagatctgacgacacggccgtgtattactgtgccagaggagggcggacgaatgcttttgatatctggggccaagggacaatggtcaccgtctcttcc

SEQ ID NO: 7356 - DNA, 285 bp, Homo sapiens
  source 1..285: mol_type = other DNA
gcttctggttacacctttaccagctatggtatcagctgggtgcgacaggcccctggacaagggcttgagtgggtgggatggatcggcgtttacagtggttacacaaactatgcacagaagttccagggcagagtcaccatgaccacagacacatccacgggcacagcctacatggaactgaggagcctgatatctgacgacacggccgtcttttactgtgcgagaggagggaggaccaatgcttttgatatctggggccaagggacaatggtcaccgtctcctca

SEQ ID NO: 7357 - DNA, 289 bp, Homo sapiens
  source 1..289: mol_type = other DNA
tgcagcctctggattcaccttcagtagttatgaaatgaactgggtccgccaggctccagggaaggggctggagtgggtttcatacattagtggtagtggtactaccatatactacgcagactctgtgaagggccgattcaccatctccagagacaacgccaagaactcactgtatctgcaaatgaacagcctgagagccgaggacacggctgtttattactgtgcgagagatagcggctggaactacgaagactactggggccagggaaccctggtcaccgtctcctca

SEQ ID NO: 7358 - DNA, 289 bp, Homo sapiens
  source 1..289: mol_type = other DNA
tgcagcctctggattcaccttcagtagctatagcatgaactgggtccgccaggctccagggaaggggctggagtgggtttcatacattattagtagtagtagtaccatatactacgcagactctgtgaagggccgattcaccatctccagagacaacgccaggaactcactgtttctgcaaatgaacagcctgagagtcgaggacacggctgtgtattactgtgcgagagattcgggctggaactacgaggactactggggccagggaaccctggtcaccgtctcctca

SEQ ID NO: 7359 - DNA, 307 bp, Homo sapiens
  source 1..307: mol_type = other DNA
tgcagcctctggatttacctttgctgatcatggtctgggctgggtccgccaggctccagggaaggggctggaatggattgccttcactagaagctacatttacggtgggtcaccagagtacgccgcgtctgtgagaggcagattcaccgtctcaagagatgattccagaagcgtcgcctacctgcaaatgaacagcctgagaaccgaggacacagccatttattactgtggtagagggctaactgtgaccggggcgaagtactactttgactcctggggccagggaattttggtcaccgtctcctca

SEQ ID NO: 7360 - DNA, 307 bp, Homo sapiens
  source 1..307: mol_type = other DNA
tacaacttctggattcacctttgctgattatggcttcagctgggtccgccaggctccagggaaggggctggagtgggtagctttcgctagaagcaaactttatggtggggcacctgaatacgccgcgtctgttaaaggcagatttaccgtctcaagagatgattccaagagtatcgcacatctgcaaatggacagcctgaagaccgacgacacagccgtctattactgtggtagaggacttactgtgacaggagcaaagtactactttgacagctggggccagggaaccctggtcaccgtctcctca

SEQ ID NO: 7361 - DNA, 298 bp, Homo sapiens
  source 1..298: mol_type = other DNA
cagtgtctctggtggctccatcagtaattactactggaactggatccggcagcccccagggaagggactggagtggattgggtatatctattacagtgggagcaccagctacaacccctccctcaagagtcgagtcaccatatcagtagacacgtccaagaaccagttctccctgaagctgagctctgtgaccgctgcggacacggccgtgtattactgtgcgagaggaggcagcaactggtacgcgaacaactggttcgacccctggggccagggaaccctggtcaccgtctcctca

SEQ ID NO: 7362 - DNA, 298 bp, Homo sapiens
  source 1..298: mol_type = other DNA
cactgtctctggtggctccatcagtagttactactggagctggatccggcagcccccagggaagggactggagtggattgggtatatctattacagtgggagcaccaactacaacccctccctcaagagtcgagtcaccatatcagtagacacgtccaagaaccagttctccctgaagctgacctctgtgaccgctgcggacacggccatatattactgtgcgagagggggcagcaactggtacgcaaacaactggttcgacccctggggccagggaaccctggtcaccgtctcctca

SEQ ID NO: 7363 - DNA, 298 bp, Homo sapiens
  source 1..298: mol_type = other DNA
cactgtctctggtggctccatcagtaattactactggaactggatccggcagcccccagggaagggactggagtggattgggtatatctattacagtgggagcaccagctacaacccctccctcaagagtcgagtcaccatatcagtagacacgtccaagaaccagttctccctgaagctgagctctgtgaccgctgcggacacggccgtgtattactgtgcgagaggaggcagcaactggtacgcgaacaactggttcgacccctggggccagggaaccctggtcaccgtctcctca

SEQ ID NO: 7364 - DNA, 280 bp, Homo sapiens
  source 1..280: mol_type = other DNA
tgcagcctctggattcaccttcagtgactactacatgagctggatccgccaggctccagggaaggggctggagtgggtttcatacattagtagtagtggtagtaccatatactacgcagactctgtgaagggccgattcaccatctccagggacaacgccaagaactcactgtatctgcaaatgaacagcctgagagccgaggacacggccgtgtattactgtgcaaaaggggactggttcgacccctggggccagggaaccctggtcaccgtctcctca

SEQ ID NO: 7365 - DNA, 280 bp, Homo sapiens
  source 1..280: mol_type = other DNA
tgcagcctctggattcaccttcagtgactacaacataaactggatccgccaggctccagggaaggggctggagtggatttcacacattaatcctaatggtaatatcagatactatgcagactctgtgaggggccgattcaccatctccagggacaacgccaagaactcactgtatctccaaatgaacagcctaagagccgaggacacggccgtctattactgtgcgaaaggggactggttcgacccctggggcctgggaaccctggtcaccgtctcctca

SEQ ID NO: 7366 - DNA, 292 bp, Homo sapiens
  source 1..292: mol_type = other DNA
tgcagcctccggattcacccttaggagttattggatgagttgggtccgccaggctccagggaaggggctggagtgggtggccaacataaaggaagatggaagtgagacatactatgtggactctgtggagggccgattcaccatctccagagacaacgccaagaacttactgtatctacaaatgaacagcctgagagtcgaagacacggctgtctattactgtgcgagagagaacgtggcagtgccagccggggactgctggggtcagggaaccctggtcaccgtctcctca

SEQ ID NO: 7367 - DNA, 292 bp, Homo sapiens
  source 1..292: mol_type = other DNA
tgcagcctctggattcagaattagtatgtattggatgagctgggtccgccagactccagggaaggggctggagtgggtggccaacataaagccagatggaactgagcaatactatgcggactctctgaagggtcgattcaccatctccagagacaacgccaagaacttagtctatctgcgaatgaacagcccgagagccgacgacacggctctctattactgtgcgagagagaatgtggctgtaccagccggggactgctggggccagggggccctggtcactgtctcctca

SEQ ID NO: 7368 - DNA, 280 bp, Homo sapiens
  source 1..280: mol_type = other DNA
tgcagcctctggattcaccttcagttcctatggcatacactgggtccgccaggctccaggcaaggggctggagtgggtggcaattatattaaaagatggaagtaataaattctatgcagactccgtgaagggccgattcaccatctccagagacaattccaagaacacgctgtttctgcaaatgaacagcctgagagctgaggacacggctatatattattgtgtgaaagggcccgactttgactactggggcccgggaaccctggtcaccgtctcctcg

SEQ ID NO: 7369 - DNA, 280 bp, Homo sapiens
  source 1..280: mol_type = other DNA
tgcagcctctggattcaccttcagtacctatggctttcactgggtccgccaggccccaggcaaggggctggagtgggtggcaattatattaaaagatgaaagaaataaattttatgcagactccgtgaagggccgattcaccatctccagagacaattccaagaacacgatttatctggaaatgaacagtctgagaggtgacgacacggctgtgtattactgtgtgaagggccccgactttgactactggggccagggaaccctggtcaccgtctcctca

SEQ ID NO: 7370 - DNA, 280 bp, Homo sapiens
  source 1..280: mol_type = other DNA
tgcagcctctggattcaccttcagttcctatggcatacactgggtccgccaggctccaggcaaggggctggagtgggtggcaattatattaaaagatggaagtaataaattctatgcagactccgtgaagggccgattcaccatctccagagacaattccaagaacacgctgtttctgcaaatgaacagcctgagagctgaggacacggctatatattattgtgtgaaagggcccgactttgactactgggacccgggaaccctggtcaccgtctcctcg

SEQ ID NO: 7371 - DNA, 291 bp, Homo sapiens
  source 1..291: mol_type = other DNA
gcttctggttacacctttaccagctatggtatcagctgggtgcgacaggcccctggacaggggcttgagtggatgggatggatcagcactcacaatggtctcacagtctatgcacggagcctccagggcagagtcaccatgaccacagacacatccacgagcacagcctatatggaggtgaggagcctgagatctgacgacacggccgtgtattactgtgtgagagatttttcaggggggacggactgcttcgacccctggggccagggaaccctggtcaccatctcctca

SEQ ID NO: 7372 - DNA, 291 bp, Homo sapiens
  source 1..291: mol_type = other DNA
gcttttgggtacacctttaccgactatggtatcagctgggtgcgacaggcccctggacaagggcttgagtggatgggatggatcagaacttacaatggtgacacaaggtttgcacagaacgtccaggacagagtcaccttgaccacagatacatccacgagcacagcctacatggagctgaggaccctgagacccgacgacacggccgtatattactgtgtgagagatttttcaggtggaaccgactgcttcgacccctggggccagggaaccctggttttcgtctcccca

SEQ ID NO: 7373 - DNA, 310 bp, Homo sapiens
  source 1..310: mol_type = other DNA
tatagcttctggattcgcctttggtgattatgctatgacctgggtccgccaggctccagggaagggtctggagtgggttggtttcattagaagcaaagcttatggtgggacaacagaatacgccgcgcctgtgaaaggcaggttcagcatctcaagggatgattccaaaagcatcgcctatctgcaaatgaacagcctgaaaaccgaggacacagccgtgtattactgtactcctacgtatgatagtagtggttattatccatactactttgactcctggggccagggaaccctggtcaccgtctcctca

SEQ ID NO: 7374 - DNA, 310 bp, Homo sapiens
  source 1..310: mol_type = other DNA
tacagcttctggattcagctttgctgattatgctatgacctgggtccgccaggccccagggaaggggctggagtgggtaggtttcattagaagcaaaccttatggtgggacaacacaatacgccgcgtctgtgaaaggcagattcaccatctcaagagatgattccaaaagcatcgcctatctgcaaatgaacagcctgaaaaccgaggacacagccgtgtattactgtacccccacctatgatagtagtggttattacccctactactttgactcctggggccagggaaccctggttaccgtctcctca

SEQ ID NO: 7375 - DNA, 280 bp, Homo sapiens
  source 1..280: mol_type = other DNA
tgaagcctctggattcgctttcaataccgcctggatgagctgggtccgccaggctccaggcaaggggctggagtgggttggccgtataaaaaccaaaactgatggtgagacaacagactacgccgcacccgtgaaaggcagattcaccatctcaagggatgattcaagaaacacactgtatctgcacatgaacaacctgaaaagcgaggacacagccgtttattactgtaccacaggttggcaggtttggggccagggaacccgggtcaccgtctcctca

SEQ ID NO: 7376 - DNA, 280 bp, Homo sapiens
  source 1..280: mol_type = other DNA
tgcagcctctggattcattttcagtaacgcctggatgagctgggtccgccaggctccagggaaggggctggagtgggttggccgcattaaaagcaatgctgatggtggggcaacagactacgccacacccgtgaaaggcagattcaccatctcaagagatgattcaaaaaccacgctgtttctgcaaatggacagcctgaaaaccgaggacacagccatgtattactgtaccacagggtggcaggtgtggggccagggaaccctggtcaccgtctcctca

SEQ ID NO: 7377 - DNA, 298 bp, Homo sapiens
  source 1..298: mol_type = other DNA
tgcagcctctggattcacctttagtagctattggatgatctgggtccgccaggctccagggaaggggctggagtgggtggccaacataaaggaagatggaagtgagaaatactatgtggactctgtgaagggccgattcaccatctccagagacaacgccaagaactcattgcatctgcaaatgaacagcctgagagccgaggacacggctgtgtattactgtgcgagagatctagatggctacaatccgggcccttttgactactggggccagggaaccctggtcaccgtctcctca

SEQ ID NO: 7378 - DNA, 298 bp, Homo sapiens
  source 1..298: mol_type = other DNA
tgcagcctctggattcagctttagttcctattggatgacctgggtccgccagtctccagtgaaggggctggagtgggtggccaacataaaggaagatgggagtgagaaatactatgtggactctgtgaagggccgattcaccatctccagagacaacgccaagaactcactgtatctgcaaatgaacagcctgagagccgaggaaacggctgtgtattactgtgcgagagacctggatggctacaaccccgggccttttgactactggggccagggaaccctcgtcaccgtctcctca

SEQ ID NO: 7379 - DNA, 298 bp, Homo sapiens
  source 1..298: mol_type = other DNA
tgcagcctctggattcagctttagtagttattggatgacctgggtccgccagtctgcagggaaggggctggagtgggtggccaacataaaggaagatgggagtgagaaatactatgtggactctgtgaagggccgattcaccatctccagagacaacgccaagaaaacactgtatctgcaaatgaacagcctgagagccgaggaaacggctgtgtattactgtgcgagagacctggatggctacaaccccgggccttttgactactggggccagggaaccctcgtcaccgtctcctca

SEQ ID NO: 7380 - DNA, 298 bp, Homo sapiens
  source 1..298: mol_type = other DNA
tgcagcctctggattcagctttagtaactattggatgacctgggtccgccagtctgcagggaaggggctggagtgggtggccaacataaaggaagatgggagtgagaaatactatgtggactctgtgaagggccgattcaccatctccagagacaacgccaagaaaacactgtatctgcaaatgaacagcctgagagccgaggaaacggctgtgtattactgtgcgagagacctggatggctacaaccccgggccttttgactactggggccagggaaccctcgtcaccgtctcctca

SEQ ID NO: 7381 - DNA, 298 bp, Homo sapiens
  source 1..298: mol_type = other DNA
tgcagcctctggattcatcctgagtaattattggatgtgctgggtccgccaggctccagggaaggggctggagtgggtggccaacataaaggaagatggaagtgagaaatattctgtggactctgtgaagggccgattcaccatttccagagacaacgccaagaactcactgtatctgcagatgaacagcctgagagtcgaagacacggctgtgtattactgtgcgagagatctggatggctacaaccccgggccctttgactactggggccagggaaccctggtcaccgtctccgca

SEQ ID NO: 7382 - DNA, 298 bp, Homo sapiens
  source 1..298: mol_type = other DNA
tgcagcctctggattcacctttagtcgctattggatgacctgggtccgccaggctccagggaaggggctggagtgggtggccaacataaaggaagatgcaagtgagagatactatgtggactttgtggagggccgattcaccatctccagagacaacgccaagaacctcttgcatctgcaaatgagcagcctgagagccgaggacacggctgtgtattactgtgcgagagatctggatggctacaatccgggcccttttgactactggggccagggaaccctggtcaccgtctcctca

SEQ ID NO: 7383 - DNA, 298 bp, Homo sapiens
  source 1..298: mol_type = other DNA
tgcagcctctggattcacctttagtcgctattggatggcctgggtccgccaggctccaggaaaggggctggagtgggtggccaacataaaggaagatggaagtgagaaatactatgtggactttgtggagggccgattcaccatctccagagacaacgccaagagcctcttgcatctggagatgggcagcctgagagtcgaggacacggctatgtattactgtgcgagagatctggatggctacaatccgggcccttttgactactggggccagggaattctggtcaccgtctcctca

SEQ ID NO: 7384 - DNA, 298 bp, Homo sapiens
  source 1..298: mol_type = other DNA
tgcagcctctggattcacctttagtaactattggatgatttgggtccgccaggctccagggaaggggctggagtgggtggccaacataaagcaagatggaagtgagaaatactatgtggattttgtggagggccgattcaccatctccagagacaacgccaagaactcattgcatctgcaaatgaacagcctgagagtcgaggacacggctgtgtattactgtgcgagagatctagatggttacaatccgggcccttttgactactggggccagggaagcctggtcaccgtctcctca

SEQ ID NO: 7385 - DNA, 298 bp, Homo sapiens
  source 1..298: mol_type = other DNA
tgcagcctctggattcacctttagtaactattggatgacctgggtccgccaggctccagggaaggggctggagtgggtggccaacataaagcaagatggaagtgagaaatactatgtggattttgtggagggccgattcaccatctccagagacaacgccaagaactcattgcatctgcaaatgaacagcctgagagccgaggacacggctgtgtattactgtgcgagagatctagatggctacaatccgggcccttttgactactggggccagggaagcctggtcaccgtctcctca

SEQ ID NO: 7386 - DNA, 298 bp, Homo sapiens
  source 1..298: mol_type = other DNA
tgcagcctctggattcagccttagtaactattggatgacctgggtccgccagtctgcagggaaggggctggagtgggtggccaacataaaggaagatgggagtgagaaatactatgtggactctgtgaagggccgattcaccatctccagagacaacgccaagaaaacactgtatctgcaaatgaacagcctgagagccgaggaaacggctgtgtattactgtgcgagagacctggatggctacaaccccgggccttttgactactggggccagggaaccctcgtcaccgtctcctca

SEQ ID NO: 7387 - DNA, 300 bp, Homo sapiens
  source 1..300: mol_type = other DNA
gcttcaggatacaggtttaccggctattacatacactgggtgcgacaggtccctggacaagggcttgagtggatgggatggatcaaccctgacagtggtggcacaaactatgcacagaagtttcagggcagggtcagcatgaccagagacaggtccatcagttcagcctacatggagctgagcgggctgagatctgacgacacggccgtgtattactgtgcgagagatctgaatttctatggttcggggagggggtacttcgacccctggggccagggaacccaggtcaccgtctcctca

SEQ ID NO: 7388 - DNA, 300 bp, Homo sapiens
  source 1..300: mol_type = other DNA
gcttctggatacaccttcaccggctactatatacactgggtacgacaggcccctggacaagggcttgagtggatgggatggatcgaccctaaaagtggtgccacaaattatgcacagaagtttcagggcagggtcaccgtgaccagggacacgtcaattaccacagcctacatggagctgagcagcctgagatctgacgacacggccgtgtatcactgtgcgagagaccttaatttctatggttcggggaggggctacttcgacccctggggccagggaaccctggtcaccgtctcctca

SEQ ID NO: 7389 - DNA, 283 bp, Homo sapiens
  source 1..283: mol_type = other DNA
tgcagcctctggattcaccttcagtagcaactggatgcactgggtccgccaagccccagggaaggggctggtgtgggtctcacgtattaacactgatgggagtaccacaacctacgcggactccgtgaagggccgagtcaccatctccagagacaacgccaagaacacgctgtatctgcaaatgaacagtctgagagccgaggacacggctgtatattactgtgtccgcaatgcctacttctttgactcctggggccagggaaccctggtcaccgtctcctca

SEQ ID NO: 7390 - DNA, 283 bp, Homo sapiens
  source 1..283: mol_type = other DNA
tgcagcctctggattcaccttcagtagcaactggatgcactggctccgccaagttccagggaaggggccggtgtgggtctcacgtattaaaggtgatggaagtcaaacagcttacgcggactccgtgaagggccgattcaccatctccagagacaacgccaagaacacggtgtatctacaaatgaacagtctgacagccgaggacacggctgtttattactgtgtaagaaatgcttacttctttgactcatggggccagggaaccccggtcaccgtctcctca

SEQ ID NO: 7391 - DNA, 298 bp, Homo sapiens
  source 1..298: mol_type = other DNA
tgtagcctctggatttacctttagcagttatgtcatgagctgggtccgccaggctccagggaaggggctggagtgggtctccaccatttaccataatggtgatagaatatactacgcggactccgtgaagggccggttcaccatgtccagagacaattcgaagaacacgctgtatctgcaaatgaacagcctgagagtcgaggacacggccatatattactgtgcgaaggacagagatgacgccggtgactactgctttgactcctggggccagggaaccctggtcaccgtctcctca

SEQ ID NO: 7392 - DNA, 298 bp, Homo sapiens
  source 1..298: mol_type = other DNA
tgcagcctctggattcaactttgccggctatgtcatgagctgggtccgccaagctccagggaaggggctggagtgggtctcaggtatttatagagatggtagttggacacattatgcagactccgtgaagggccggttcaccgtctccagagaaaattccaagaacacactgtatctacaaatgcacagcctgagagccgaggacacggccgtgtattattgtgcgaaagatcgagatgacgccggtgactactgctttgactcctggggccagggaaccctggtcaccgtctccaca

SEQ ID NO: 7393 - DNA, 286 bp, Homo sapiens
  source 1..286: mol_type = other DNA
tgcggcctctggattcaccttcagtacctacagcatgaactgggtccgccaggctccagggaaggggctggagtggatttcatacgttagaagtagtagtagttccatatattatgcagactctgtgaagggccgattcaccatctccagagacgatgacaagaattcactgtttttgcaaatgaacggcctgagagacgaggacacggctatatattattgtgcgagagacgacgtctatgcttttgatatatggggccaagggacaatggtcaccgtctcttcc

SEQ ID NO: 7394 - DNA, 289 bp, Homo sapiens
  source 1..289: mol_type = other DNA
tacagcctctggattcaccttcagtagttatagcttaaattgggtccgccaggctccagggaaggggctggagtgggtatcatatgttaggagtggtagtagtcctgccgtatggtacgcagactctgtgaagggccgattcatcatctcccgagacaatgccgaaaactcgctgtatctgcaaatgaacagcctgagagacgaggacacggctatatattactgtgcgcgagatgatgtctatgcttttgatatctggggccaagggacaatggtcaccgtctcttca

SEQ ID NO: 7395 - DNA, 307 bp, Homo sapiens
  source 1..307: mol_type = other DNA
cactgtctctggtggccccatcagtagttactactggagctggatccggcagaccccagggaagggaccggaatgggttgggtctatttattacactgggaggatcaactacaatcccaccctcaagagtcgagtcaccatatcaatagacacgtcgaagagccagttctccctgagactgagctctgtgaccgctgcggacacggccgtatactactgtgcgagagattcgtattgcagtcgtggcacctgcttcgactggtacttcgatctctggggccgtggcaccctggtcactgtctcctca

SEQ ID NO: 7396 - DNA, 307 bp, Homo sapiens
  source 1..307: mol_type = other DNA
cactgtctctggcggctccgtcaatagttacgcttggagttttatccgtcagcccccagggaagggactggagtggattggattcatctatcacagcgggcgcaccaactacaacccttccttccagagtcgaatcaccatgtcagtagacacgtccgacaatcacatctccctgaaactgagctctgtgaccgctgcggacacggccgtatattactgtgcgagagattcatattgtagtcgtggtacctgttttgactggtacttcgatctctggggccgtggcaccctggtcactgtctcctca

SEQ ID NO: 7397 - DNA, 292 bp, Homo sapiens
  source 1..292: mol_type = other DNA
cactgtctctggtggctccatcagcggtactagttactactggggctggatccgccagccccccgggaaggggctggaatggattgggaatatctattatagtgggagcacctactacaacccgtccctcaagagtcgagtcaccatatccgtagacccgtccaagaaccagttctccctgaagctgagctctgtgaccgccgcagacacggctgtgtattactgtgcgagacgagggtactactacgctatggacgtctggggccaagggaccacggtcaccgtctcctca

SEQ ID NO: 7398 - DNA, 292 bp, Homo sapiens
  source 1..292: mol_type = other DNA
cattgtctctggtgtctccatgagtagtgttacttactactggagctggatccgccagcccccagggaaggggctggagtggattggcagtgtctatcatagtgggactacctactacaacccgtcgctcaagagtcgagtcgccatatccatcgacacgtccgagaaccggttctccctgaacctgaactctgtgaccgccgcagacgcggctgtatattactgtgcgagacggggatattattacgccatggacgtctggggccaagggactacggtcaccgtctcctca

SEQ ID NO: 7399 - DNA, 271 bp, Homo sapiens
  source 1..271: mol_type = other DNA
tgcagcctctggattcagctttagtacctctgccatgagttgggtccgccaggctccagggaaggggctggaatgggtcgcagttattactgataatggcggtgacacatactacgcaggctccgtgaagggccggttcaccatctccagagacaattccaagaaaacgctgtatctgcaaatgaacagcctgagagtcgaggacacggccgtatattactgtgactctggggacgtctggggccaagggaccacggtcaccgtctcctca

SEQ ID NO: 7400 - DNA, 271 bp, Homo sapiens
  source 1..271: mol_type = other DNA
tgcagcctctggattcacctttaacacctatgccatgacttgggtccgccaggctccagggaaggggctggagtgggtctcaagtattagtggtaatggtggtcgcacatactacgcagactccgtgaagggccggttcaccatctccagagacaattccaagaacactctgtatctgcaaatgaacagcctgacagccgaggacacggccgtatattactgtgactccggggacgtctggggccaagggaccacggtcaccgtctcctca

SEQ ID NO: 7401 - DNA, 277 bp, Homo sapiens
  source 1..277: mol_type = other DNA
cactgtctcgggtggctccatcagtagttattactggagctggatccggcaggccccagggaagggactggagtggattggatatatcccttatggtgggcgccccaactacaatccctccctcgagagtcgagtcaccatagcagcggacacgtcgaaggaccagttctccctgaggctgacgtctgtgaccgctgcggacacggccgtctattactgtgccgggggctaccaatttgactactggggccagggaaccctggtcaccgtgtcctca

SEQ ID NO: 7402 - DNA, 277 bp, Homo sapiens
  source 1..277: mol_type = other DNA
cactgtctctggtggctccatcagtggttactactgtgcctgggtccggcagcccccagggaagggactggagtggattgggtctatatattacagtgggagcaccaactacaacccctccctcgagagtcgggtcaccatatcagcagacacgtccaagaaccagttctccctgaagctggcctctgtgaccgctgcggacacggccgtgtattactgtgcgggggggtaccagtttgactactggggccagggaaccctggtcaccgtctcctca

SEQ ID NO: 7403 - DNA, 304 bp, Homo sapiens
  source 1..304: mol_type = other DNA
tgcagcctctggattcgctttcagtaacgtctggatgaactgggtccgccaggctccagggaaggggctggagtggctttgccgtattaaaaccaaaagtgacggtgagacaacagactacgctgcagactacgctgcacccgcgaaaggcagattcaccatctcaagagatgattcaacaaggacagtatatctccaaatgaacagtctgagaatcgaggacacagccgtttattactgtacgtcccgggtactaacgaccaatgactactggggccagggaaccctggtcaccgtctcctca

SEQ ID NO: 7404 - DNA, 292 bp, Homo sapiens
  source 1..292: mol_type = other DNA
taaagcctctggattcactttcagtaacgcctggatgaactgggtccgccaggctccagggatggggctggagtggcttggccgcattaaaacaagatctgaaggtgagacaacagagtacgctgttcccatgagaggcagaatcaccatctcaagagatgattcaaaaaacacgctgtatctgcaactggacagcctgaaaaccgaggacacagccgtctattattgtacctcaagagtgctgaccaccaatgactattggggccagggagtcctggtcaccgtctcctca

SEQ ID NO: 7405 - DNA, 292 bp, Homo sapiens
  source 1..292: mol_type = other DNA
taaagcctctggattcactttcagtaacgcctggatgaactgggtccgccaggctccagggatggggctggagtggcttggccgcattaaaacaagatctgaaggtgagacaacagagtacgctgttcccatgagaggcagaatcaccatctcaagagatgattcaaaaaacacgctgtatctgcaactggacagcctgaaaaccgaggacacagccgtctattattgtacctcaagagtactgaccaccaatgactattggggccagggagtcctggtcaccgtctcctca

SEQ ID NO: 7406 - DNA, 292 bp, Homo sapiens
  source 1..292: mol_type = other DNA
tgcagcctctggattcactttcaataacgcctggatgaactgggtccgccaggctccagggcaggggctggagtggattggccgtattcaaaagaagactgagaatgaaaaaacagagtacgctgcaccctttgaaggcagattcaccatctcaagagatgattcaaaaagtactctgtttctgcaaatgaacagcctgaagaccgaggacacagccgtctattattgtacgtcgcgagtgttaaccaccaatgactactggggccagggaaccctggtcaccgtctcctca

SEQ ID NO: 7407 - DNA, 298 bp, Homo sapiens
  source 1..298: mol_type = other DNA
tgcagcttctggattcacctttagtagatatgccatgagctgggtccgccaggctccagggaaggggctggagtgggtctcaggtattagtggtagtggtggtaacacatactacgcagactccgtggagggccggttcaccatctccagagacaattccaggaacacactatatctgcaaatgaacagcctgagagccgaggacacggccatatattactgtgcgaaagtcgtggtggtgactgtctactggtacctcgatctctggggccgtggcaccctggtcactgtctcctca

SEQ ID NO: 7408 - DNA, 298 bp, Homo sapiens
  source 1..298: mol_type = other DNA
tgcagcctctggattcaccttttccaactatgccatgacttgggtccgccaggctccagggaaggggccggagtgggtctcaggtattagtgctaatggtggtaccacatactacgcagactccgtgaagggccggttcaccatctccagagacaattccaagaacaccctgtttctgcaaatgaacagcctgagagccgaggacacggccatatattactgtgcgaaagttgtggtggtgactgtttactggtatctcgatctctggggccgtggcacccaggtcactgtctcctca

SEQ ID NO: 7409 - DNA, 292 bp, Homo sapiens
  source 1..292: mol_type = other DNA
tgcagcctctggattcaccttaagtgactactacatgagctggatccgccaggctccagggaagggactggagtggatttcatacattagtactactggccgtaccatatactacacagactctgtgcagggccgattcaccatctccagggacagcgccaagaactcactgtatctgcaaatgaacagcctgagagccgaggacacggccgtctattactgtgcgagagacgaactggggacctacggtatggacgtctggggccaagggaccatggtcaccgtctcctcc

SEQ ID NO: 7410 - DNA, 292 bp, Homo sapiens
  source 1..292: mol_type = other DNA
tgcagcctctggattcaccctcagcgcctactacatgagctggatccgccaggctccagggaaggggctggagtgggtttcatacatcagtagtactggtaaaagtatgtactacgcagactctgtgaagggccgattcaccatctccagggacaacgccaagaactcgctgtatctgcaaatgaagagcctgacagccgaggacacggctgtctattactgtgcgagagacgaactggggacctatggtatggacgtctggggccaagggaccacggtcaccgtctcccca

SEQ ID NO: 7411 - DNA, 277 bp, Homo sapiens
  source 1..277: mol_type = other DNA
tgcagcctctggattcaccttcagtaattatggcatgaactgggtccgccaggccgcagggaaggggctggagtgggtttcatacatcagtggtagtactggtgtcgcgtactacgcagactctgtgaagggccgattcaccatctccagagacaatgccaagaactcactgtatctgcaaatgaatagcctgagggacgaggacacggctgtatattactgtgcgagggcagggggggcctactggggccagggaaccctggtcaccgtctcctca

SEQ ID NO: 7412 - DNA, 277 bp, Homo sapiens
  source 1..277: mol_type = other DNA
tgcagcctccggattcaccttcagtagctatagcatgaactgggtccgccaggctccagggaaggggctggagtggttttcacacattagtagtagtaggagtaccatatactacgcagagtctgtgaagggccgattcaccatctccagagacaatgccaagaactcagtgtatctgcaaatgaacagcctgagagacgaggacacggctgtgtattactgtgcgagagccgggggggcatactggggccagggaaccctggtcaccgtctcctca

SEQ ID NO: 7413 - DNA, 307 bp, Homo sapiens
  source 1..307: mol_type = other DNA
tgcagcctctggattcaccttcagtgactactacttgagttggatccgccaggctccagggaaggggctggagtggctttcatacattagtagtagtagtggtagtattacatactacggagtttcagtgaagggccgattcaccatctccagggacaacgccaaaaactcactgtatctgcaaatgaacagcctgagcgccgaggacacggccgtatattactgtgcgcgaggtttcgattgtagtagtgccagctgctatgcttttgatctctggggccaggggacaatggtcaccgtctcttca

SEQ ID NO: 7414 - DNA, 304 bp, Homo sapiens
  source 1..304: mol_type = other DNA
tgcagcctctggattcagcatcagtgactactacatgagctggatccgccaggctccagggaaggggctggagtgggtctcatacattagtgatagtggtagtatcctatactacggagactctgtgaagggccgatgcaccatctccagggacaccgccaaaaattcagtgtatctgcaaatgaacagcctgggagccgaggacacggccatgtattactgtgcgagaggtttcgattgtagtagtgccagctgctatgcttttgatctctggggccaagggacaatggtcaccgtctcttca

SEQ ID NO: 7415 - DNA, 304 bp, Homo sapiens
  source 1..304: mol_type = other DNA
tgcagcctctggattcagcatcagtgactactacatgagctggatccgccaggctccagggaaggggctggagtgggtctcatacattagtgatagtggtagtatcctatactacggagactctgtgaagggccgatgcaccatctccagggacaccgccaaaaactcagtgtatctgcaaatgaacagcctgggagccgaggacacggccatgtattactgtgcgagaggtttcgattgtagtagtgccagctgctatgcttttgatctctggggccaagggacaatggtcaccgtctcttca

SEQ ID NO: 7416 - DNA, 307 bp, Homo sapiens
  source 1..307: mol_type = other DNA
tgcagcctctggattcaccttcagtgattactacatgagttggatccgccaggctccagggaaggggctggagtgggtttcatatattagtagtagtagtggtagtaccatatactacggagactctgtgaagggccgattcaccatctccagggacaacgccaaaaactcactgtatctgcaaatgaacagcctgagagccgaagacacggccgtatattactgtgcgcgaggtttcgattgtagtagtgccagctgctatgcttttgatctctggggccaggggacaatggtcaccgtctcttca

SEQ ID NO: 7417 - DNA, 307 bp, Homo sapiens
  source 1..307: mol_type = other DNA
tgcagcctctggattcaccttcggtgattactacatgggctggatccgccaggctccagggagggggctggagtgggtttcatatattagtagtagtagtggtagtaccatatactacggagactctgtgaagggccgattcgccatctccagggacaacgccaaaaactcactgtatctgcaaatgaacagcctgagagccgaagacacggccgtctattactgtgcgcgaggtttcgattgtagtagtgccagctgctatgcttttgatctctggggccaggggacaatggtcaccgtctcttca

SEQ ID NO: 7418 - DNA, 304 bp, Homo sapiens
  source 1..304: mol_type = other DNA
tgccgcctctggattcaccttcagtgactactacatgagctggatccgccaggctccagggaaggggctggagtggatttcatacattagtggtagtggtactagcatatactacgcagactctgtgaagggccgattcaccatctccagggacaacgccaggaactcactgtatctgcaaatgaacagcctgagagccgaggacacggccgtgtatttctgtgcgagagggtttgattgtagtagtgccagctgctatgcttttgatctctggggccaagggacagtggtcaccgtctcttca

SEQ ID NO: 7419 - DNA, 307 bp, Homo sapiens
  source 1..307: mol_type = other DNA
tgcagcctctggattcgccttcagtggctactacatgagctggatccgccaggctccagggaaggggctggagtgggtttcatacattagtagtagtggtagtagtaccatatactacgcagactctgtgaggggccgattcaccatctccagggacaactccaagaactcattgtatctgcaaatgaacagcctgagagccgaggacacggccctgtattactgtgcgagagggtttgattgtagtagtgccagctgctatgcttttgatctctggggccaagggacaatggtcaccgtctcttca

SEQ ID NO: 7420 - DNA, 288 bp, Homo sapiens
  source 1..288: mol_type = other DNA
gcttctggatacaccttcaccaactatgatatcatctgggtgcggcaggccgctggacaagggcttgagtggatgggatggatgaaccctgacagtggtggcacaggctatgttcagaagttccagggcagagtcaccatgactagggacacctccataagcacagcctacatggagttgagcagcctgaggttagcggatatggccgtttattactgtgcgagagccgtcagggaccagctgctatcggactcctggggccagggaaccctggtcaccgtctcctca

SEQ ID NO: 7421 - DNA, 288 bp, Homo sapiens
  source 1..288: mol_type = other DNA
gcttctggatacaccttctccaactatgatatcacttgggtgcgacaggccactggacaagggcttgagtggatgggatggatgaacccctacagtggtaacagcggctttgtacgaaacttccgggacagagtcaccgtgaccacggacgcctccataaacacagtctacatggagctgagcagcctgacatctgacgacacggccgtctactactgtgcgagagccgtgcgggaccagctcctatctgactcctggggccagggaacccaggtcaccgtctcctca

SEQ ID NO: 7422 - DNA, 288 bp, Homo sapiens
  source 1..288: mol_type = other DNA
gcttctggatacaccttctccagctatgatatcacttgggtgcgacaggccactggacaagggcttgagtggatgggatggatgaacccctacagtggtaacagcggctttgcacaaaagttccgggacagagtcaccgtgaccacggacgcctccataaacacagcctacatggagctgagcagcctgacatctgaggacacggccgtctactactgtgcgagagccgtgcgggaccagctcctatctgactcctggggccagggaaccctggtcaccgtctcctca

SEQ ID NO: 7423 - DNA, 288 bp, Homo sapiens; identical to SEQ ID NO: 7421
  source 1..288: mol_type = other DNA

SEQ ID NO: 7424 - DNA, 288 bp, Homo sapiens
  source 1..288: mol_type = other DNA
gcttctggatacaccttctccagctatgatatcacttgggtgcgacaggccactggacaagggcttgagtggatgggatggatgaacccctacagtggtaacagcggctttgcacagaagttccgggacagagtcaccgtgaccacggacgcctccataaacacagcctacatggagctgagcagcctgacatctgaggacacggccgtctacttctgtgcgagagccgtgcgggaccaactcctgtctgactcctggggccagggaaccctggtcaccgtctcctca

SEQ ID NO: 7425 - DNA, 283 bp, Homo sapiens
  source 1..283: mol_type = other DNA
tgcagcctctggattcccgtttagcacctatcttatgagctgggtccgccaggctccagggaaggggctggagtgggtctcagccattagtggtagtggtgatagcacatattacgcagactccgtgaagggccggttcaccatctccagagacaattccaagagcacattgtatgtgcaaatgaacagcctgagagccgaggacacggccgtatattactgtgcgaaatggtcgactggttacgactattggggccagggaaccctggtcaccgtctcctca

SEQ ID NO: 7426 - DNA, 289 bp, Homo sapiens
  source 1..289: mol_type = other DNA
tgcagcctccgaattcacctttagcacctatgccatgagctgggtccgtcaggctccagggaaggggctggagtgggtctcatgtatttatagcgacagcgaacatagtaacacatactacgcagactccgtgaagggccggttcaccatctccagagataattccaagaacacgctgtatctgcaaatgaacagcctgagagtcgaggacacaggcatatattactgtgcgaagtggtccaccggctatgactactggggccagggaaccctggtcaccgtctcctca

SEQ ID NO: 7427 - DNA, 289 bp, Homo sapiens
  source 1..289: mol_type = other DNA
tatagcctccggatacagcttcagtagtaatgacatggcctgggtccgccaggctccagggaaggggctggagtgggtttcatacatagatgttagtagtagtagtgcaaactacgcagactctgtgaagggccgattcaccatctccagagacaatgccaagaactcagtgtatctgcaaatggacaggctgagagacgaggacacggctgtgtattattgtgcgcgaggttggggcagtggctggtacccctactggggccagggaaccctggtcaccgtttcctca

SEQ ID NO: 7428 - DNA, 289 bp, Homo sapiens
  source 1..289: mol_type = other DNA
tgcagcatctggatacacattcagtaatgaagacatgaactgggtccgccaggctccagggaaggggctggagtgggtctcatccattattataagtagtactagcgtatactacgcagactctgtgaagggccgattcaccatctccagagacaatggcaagagttcagtgtatctccaaatgaacagcctgagagacgaggacacggctgtatattactgtgcgagaggttggggcagtggctggtacccctactggggccagggaaccctggtcaccgtctcctca

SEQ ID NO: 7429 - DNA, 277 bp, Homo sapiens
  source 1..277: mol_type = other DNA
cactgtctctggtggctccatcagcagtagtacttacaactggaactggatccggcagcccgccgggaagggactggagtggattgggcgtatcttagccagtgggagcaccgactacaacccctccctcaagagtcgagtcgccatatcagtagacacgtccaagaaccagttctccctgaagctgagctctgtgaccgccacagacacggccgtgtattactgtgcgagggggatcgccgtctggggcccagggaccacggtcaccgtctcctca

SEQ ID NO: 7430 - DNA, 277 bp, Homo sapiens
  source 1..277: mol_type = other DNA
cactgtctctggtggctccatcagcagtggtagttactactggagctggatccggcagcccgccgggaagggactggagtggattgggcgtatctataccagtgggagcaccaactacaacccctccctcaagagtcgagtcaccatatcagttgacacgtccaagaaccagttctccctgaagctgagctctgtgaccgccgcagacacggccgtctattactgtgcgagaggtatagcagtctggggcaaagggaccacggtcaccgtctcctca

SEQ ID NO: 7431 - DNA, 277 bp, Homo sapiens
  source 1..277: mol_type = other DNA
tgtcgcctctgaattcacctttagcaactatgtcatgaactgggtccgccaggctccagggaaggggctggagtgggtctcagctattactaatagtggtgacagaacacactacgcagactccgtgaagggccggttcaccatctccagagacaattccaaggaaacactgtatctgcaaatgaacagtctgagagccgaggacacggcccgatattattgtgtgaaagacgagtgggacgtctggggccaagggaccacggtcaccgtctcctca

SEQ ID NO: 7432 - DNA, 277 bp, Homo sapiens
  source 1..277: mol_type = other DNA
tgcagcctctggattcaactttggcagctataccatgggctgggtccgccaggctccagggaaggggctggagtgggtctcaagtattcgtgaaagtggtgataatacatactacgcagactccgtgaagggccggttcaccatctccagagacgattccaagaacacgctgtatctgcaaatgaacagcctgagagccgacgacacggccgtatattactgtgtgaaagatgagtgggacgtctggggccaagggaccacggtcatcgtctcctca

SEQ ID NO: 7433 - DNA, 315 bp, Homo sapiens
  source 1..315: mol_type = other DNA
acacagaccctcacgctgacctgcaccttctctggattctcactgaacactcatggagtgggtgtgggctgggtccgtcagcccccaggaaagaccctggagtggcttgcacacgtttattgggatgatgacaagcgctacacgccttctctgattgggagactcaccatcaccaaggacacatccaggagccaggtggtcctcacactggccaatgtggaccctatagacacagccacatattactgtgtacataggccttattatgagcactttgactcctggagccagggaatcctggtcaccgtctcctca

SEQ ID NO: 7434 - DNA, 315 bp, Homo sapiens
  source 1..315: mol_type = other DNA
acacagaccctcacgctgacctgcaccttctctggattctcactcaccactggtggagtgggtgtgggctgggtccgtcagcccccaggagagaccctgcagtggcttgcacacatttattgggatgatgacacgcgctacaacccatctctgaggggcaggctcaccatcaccaaggacacctccaaaaaccaggtggtcctaacaattaccaacatggaccctgtcgacacagccaaatattactgtgtacaccggccttattatgaacattttgactcctggggccagggattgttggtcaccgtctcctca

SEQ ID NO: 7435 - DNA, 315 bp, Homo sapiens
  source 1..315: mol_type = other DNA
acacagaccctcacgctgacctgcaccttctctggattctcactgaacactcatggagtgggtgtgggctgggtccgtcagcccccaggaaagaccctggagtggcttgcacacggttattgggatgatgacaagcgctacacgccttctctgattgggagactcaccatcaccaaggacacatccaggagccaggtggtcctcacactggccaatgtggaccctatagacacagccacatattactgtgtacataggccttattatgagcactttgactcctggagccagggaatcctggtcaccgtctcctca

SEQ ID NO: 7436 - DNA, 314 bp, Homo sapiens
  source 1..314: mol_type = other DNA
acacagaccctcacgctgacctgcaccttctctggattctcactgaacactcatggagtgggtgtgggctgggtccgtcagcccccaggaaagaccctggagtggcttgcacacgtttattgggatgatgacaagcgctacacgccttctctgattgggagactcaccatcaccaaggacacatccaggagccaggtggtcctcacactggccaatgtggaccctatagacacagccacatattactgtgtacataggccttattatgagcactttgactcctggagccagggaatcctgtcaccgtctcctca

SEQ ID NO: 7437 - DNA, 315 bp, Homo sapiens
  source 1..315: mol_type = other DNA
acacagaccctcacgctgacctgcaccttctctgggttctcactcagcactgctggagtgggtgtgggctgggtccgtcagtcccccgggaaggccctagagtggcttgcacatatttattgggatgatgatacgcggtataacccatctctgaggggcaggctcaccatcaccaaggacacctccaaaaaccaggtggtccttacagtgaccaatatggtccctgtggacacagccacatattactgtgtacacagaccctactatgaacactttgactcctggggccagggaaccctcgtcaccgtttcctca

SEQ ID NO: 7438 - DNA, 315 bp, Homo sapiens
  source 1..315: mol_type = other DNA
acacagaccctcacgctgacctgcaccttctctggattctcactgaacactcatggagtgggtgtgggctgggtccgtcagcccccaggaaagaccctggagtggcttgcacacgtttattgggatgatgacaagcgctacacgccttctctgattgggagactcaccatcaccaaggacacatccaggagccaggtggtcctcatactggccaatgtggaccctatagacacagccacatattactgtgtacataggccttattatgagcactttgactcctggagccagggaatcctggtcaccgtctcctca

SEQ ID NO: 7439 - DNA, 292 bp, Homo sapiens
  source 1..292: mol_type = other DNA
tgcagcctctggattaactttcagtaacgcctggctgagctgggtccgccaggctccagggaaggggctggagtgggttggccgtatcaaaaccaaaactgagggtgggacaacagactacgctgcacccgtgaaaggcagattcaccatctcaagagatgattcaaaagacacggtgtttctgcaaatgaacagcctgaaaatcgaggacacagccgtctactactgtaccacagatggctactgggggtcagactactggggccagggaaccctggtcaccgtctcctca

SEQ ID NO: 7440 - DNA, 292 bp, Homo sapiens
  source 1..292: mol_type = other DNA
tgcagcctctggattaactttcagtaacgcctggctgagctgggtccgccaggctccagggaaggggctggagtgggttggccgtatcaaaaccaaaactgagggtgggacaacagactacgctgcacccgtgaaaggcagattcaccatctcaagagatgattcaaaagaaacggtgtttctgcaaatgaacagcctgaaaatcgaggacacagccgtctactactgtaccacagatggctactgggggtcagactactggggccagggaaccctggtcaccgtctcctca

SEQ ID NO: 7441 - DNA, 292 bp, Homo sapiens
  source 1..292: mol_type = other DNA
tgcagcctctggactcactttcagtaacgcctggatgagttgggtccgccaggctccggggagggggctggagtgggttggccgtattaaaaccaaaactgatggtgagacaacagactacgctgcactcgtgaaaggcagattcaccatctcaagagacgattcaaaaaccacagtgtatctggaaatgaacagcctgaaaaccgaggacacagccgtgtattactgtaccacagatggatattgggggtctgactactggggccagggaaccctggtcaccgtctcctca

SEQ ID NO: 7442 - DNA, 292 bp, Homo sapiens
  source 1..292: mol_type = other DNA
tgcagcctctggactcactttcagtaacgcctggatgagttgggtccgccaggctccggggagggggctggagtgggttggccgtattaaaaccaaatctgatggtgagacaacagactacgctgcactcgtgaaaggcagattcagcatctcaagagacgattcaaaaaccacagtgtatctggaaatgaacagcctgaaaaccgaggacacagccgtgtattactgtaccacagatggatattgggggtctgactactggggccagggaaccctggtcaccgtctcctca

SEQ ID NO: 7443 - DNA, 286 bp, Homo sapiens
  source 1..286: mol_type = other DNA
cattgtctctgctggctccatcagtagttactactggacctggatccggcagcccccagggaaggggctggaatggattgggaacgtccattccagtgggagcacccactggaacccctccctcaggagtcgagtctccatatcactagacacgtccaagaaccaggtctccctgaagctgagctctgtgaccgctgcggacacggccgtatattattgtttggggggacgttccggcgaaccttttgactactggggccagggaaccctggtcaccgtctcctca

SEQ ID NO: 7444 - DNA, 286 bp, Homo sapiens
  source 1..286: mol_type = other DNA
cattgtctctgctggctccatcagtagttactactggacctggatccggcagcccccagggaaggggctggaatggattgggaacgtccattccagtgggagcacccactggaacccctccctcaggagtcgagtctccatatcactagacacgcccaagaaccaggtctccctgaagctgagctctgtgaccgctgcggacacggccgtatattattgtttggggggacgttccggcgaaccttttgactactggggccagggaaccctggtcaccgtctcctca

SEQ ID NO: 7445 - DNA, 286 bp, Homo sapiens
  source 1..286: mol_type = other DNA
cactgtctccggtgcctccctcaattcttactactggacctggatccggcagcccccaaacaagggactggagtggattggaaatgtccattataccgagagctccagctacagcccctacctcaagagtcgactcaccctatcaatagacacatccacgaagcagatttccctgcagttgacctctgtgaccgttgcagacacggccgtatattactgtctgggcgggcggtccggggagccttttgactattggggccagggaaccctggtcatcgtctcttcg

SEQ ID NO: 7446 - DNA, 286 bp, Homo sapiens
  source 1..286: mol_type = other DNA
cactgtctccggtgactccctcaattcttactactggacctggatccggcagtccccagaaaaggggctggagtggattggaaatgcccattataccgagacgtccagctacagcccctccctcaggagtcgactcaccctatcaatagacaaatccacgaaccagatctccctgcaattgacctctgtgaccgttgcagacacggccgtgtattactgtctgggcggtcggtccggggagccttttgactattggggccggggaaccctggtcaccgtctcttca

SEQ ID NO: 7447 - DNA, 292 bp, Homo sapiens
  source 1..292: mol_type = other DNA
cacagtgtctggattcagtttgaggaaatatggcatgcactgggtccgccaggctccaggcaggggactggagtggctggcagtcatctactgggatgaaacttacaagaactgtgcagcctccgtgaggggccgatgcagcatctctagagacatattcgagaacactctccatctggaattgagtggtctgaccgccgaggacacgggtcgttacttctgtgcgagaagcagagatggctacaaccacggctatacctggggccagggaacccttgtcaccgtctcttca

SEQ ID NO: 7448 - DNA, 292 bp, Homo sapiens
  source 1..292: mol_type = other DNA
cacagtgtctggattcagtttgaggaaatatggcatgcactgggtccgccaggctccaggcaagggactggagtggctggcagtcatctactgggatgaaacttacaagaactgtgcagcctccgtgaggggccgatgcagcatctctagagacatattcgagaacactctccatctggaattgagtggtctgaccgccgaggacacgggtcgttacttctgtgcgagaagcagagatggctacaaccacggctatacctggggccagggaacccttgtcaccgtctcttca

SEQ ID NO: 7449 - DNA, 292 bp, Homo sapiens; identical to SEQ ID NO: 7447
  source 1..292: mol_type = other DNA

SEQ ID NO: 7450 - DNA, 292 bp, Homo sapiens
  source 1..292: mol_type = other DNA
tgcagcgtctggtttcagcttaaataactatggcatgcactgggtccgccaggctccaggcaaggggctggagtgggtggcagttatttggtatgatggaagtgttcaactctatgcagattccgtgaagggccgattcaccatctccagggacacttccaggaacatgctgtatctgcaaatgaacagcctgagacccgaggacacggctctatattactgtgcgaggagtagagatggctacaaccatggttatacctggggccagggaaccctggtcaccgtctcctca

SEQ ID NO: 7451 - DNA, 289 bp, Homo sapiens
  source 1..289: mol_type = other DNA
tgtagggtctggattcactttaacgaggcgttgggtgagctgggtccgccaggctccagggaagggactggagaccctggccagtataaatggagatgggagtgagagatactatgtgggctctgtgaagggccgatccaccatctccagagacaacgcccaggatgcagtgagtcttcaagtgaacagcctgagagtcgaggacacggctgtgtattactgtgcgaggtacgcctacaataacggaatggacgtctggggccaagggaccacggtcaccgtcgcctca

SEQ ID NO: 7452 - DNA, 289 bp, Homo sapiens
  source 1..289: mol_type = other DNA
tgtagcctctggattcacctttagtagacattgggtgagctgggtccgccaggctcccgggaagggactggagagcgtggccagcataaatggagatgggagtgagaaaaattatgtggactctgtgaagggccgatccaccatctccagagacaacgcccagaattcagtgtgtcttcaaatgaacagcctgagagtcgaggacacggctgtgtattactgtgcgaggtacgcctacaacaacggtatggacgtctggggccaagggaccacggtcaccgtctcctca

SEQ ID NO: 7453 - DNA, 289 bp, Homo sapiens
  source 1..289: mol_type = other DNA
tgcaggctctggattcacttttagtacctattgggtggggtgggcccgtcaggctccagggagggggctggagtgggtggccaacataaagggagatgagagtgcgaagcgctacgcggactcggtgaagggacgtttcaccatttccagagacaacgcccagaatctagcgtacctggaaatgaacagcctgagagccgaggacacggctgtatattattgtgcaagatatgcgtacaataacggtatggacgtctggggccaagggaccacggtcaccgtctcctca

SEQ ID NO: 7454 - DNA, 289 bp, Homo sapiens
  source 1..289: mol_type = other DNA
tgtaggctctggattcactttaacgaggcgttgggtgagctgggtccgccaggctccagggaagggactggagaccttggccagtataaatggagatgggagtgagaaaaactatgtggactctgtgaagggccgatccaccatctccagagacgacgcccagaattcagtgagtcttcaagtgaacagcctgagagtcgaggacacggctgtgtattactgtgcgaggtacgcctacaataacggtatggacgtctggggccaagggaccacggtcaccgtctcctca

SEQ ID NO: 7455 - DNA, 289 bp, Homo sapiens
  source 1..289: mol_type = other DNA
tgtaggctctggattcactttaacgaggcgttgggtgagctgggtccgccaggctccagggaagggactggagaccttggccagtataaatggagatgggagtgagaaaaactatgtgggctctgtgaagggccgatccaccatctccagagacgacgcccagaattcagtgactcttcaagtgaacagcctgagagtcgaggacacggctgtgtattactgtgcgaggtacgcctacaataacggtatggacgtctggggccaagggaccacggtcaccgtctcctca

SEQ ID NO: 7456 - DNA, 274 bp, Homo sapiens
  source 1..274: mol_type = other DNA
tgcagcctctggattcacctttaccaccgcttacatgaattgggtccgccaggcaccaggaaaggggctggagtgggtggccaacataaatccagatggaagtaagaaatactatgtggactctgtgaagggccgcttcaccatctccagagacaataccgggaactcattgtatctgcaaatggacagcctgagagtcgacgacacgggtctatattactgtgtgagaggtgcggacgtctggggccaagggactacggtcatcgtctcctta

SEQ ID NO: 7457 - DNA, 274 bp, Homo sapiens
  source 1..274: mol_type = other DNA
tgcggcctctggattcacctttagtggctattgggtgaattgggtccgccaggctccagggaagggactggagtgcgtggccagggtaaacgacgatggaagtgtcacatactatgtggactccgtgaggggccgattcaccgtctctagcgacagtgccaggacctcactgtatctgcaaatgaacagcctgagagtcgaggacacggctgtctattactgtgtgaggggggcggacgtctggggcaaagggaccacggtcaccgtctcctca

SEQ ID NO: 7458 - DNA, 274 bp, Homo sapiens; identical to SEQ ID NO: 7457
  source 1..274: mol_type = other DNA

SEQ ID NO: 7459 - DNA, 274 bp, Homo sapiens
  source 1..274: mol_type = other DNA
tgcagcctctggattcacctttaccatcgcttacatgaattgggtccgccaggcaccaggaaaggggctggagtgggtggccaacataaatccagatggaagtaagaaatactatgtggactctgtgaagggccgcttcaccatctccagagacaataccggcaactcaatgtatctgcaaatggacagcctgacagtcgacgacacgggtctatattactgtgtgagaggtgcggacgtctggggccaagggactacggtcatcgtctcctta

SEQ ID NO: 7460 - DNA, 274 bp, Homo sapiens
  source 1..274: mol_type = other DNA
tgcagcctctggattcacctttagcagcgcttacatgaattgggtccgccaggcaccaggaaaggggctggagtgggtggccaacatgaacccagatggaagtaagaaatactatgtggactctgtgaagggccgcttcaccatctccagagacaataccgggaactcattgtatctgcaaatggacagcctgagagtcgacgacacgggtctatattattgtgtgagaggtgcggacgtctggggccaagggactacggtcatcgtctcgtta

SEQ ID NO: 7461 - DNA, 274 bp, Homo sapiens
  source 1..274: mol_type = other DNA
tgcagcctctggattcacctttagcagcgcttacatgaattgggtccgccaggcaccaggaaaggggctggagtgggtggccaacataaagccagatggaagtaagaaatactatgtggactctgtgaagggccgcttcaccatctccagagacaataccgggaactcattgtatctgcaaatggacagcctgagagtcgacgacacgggtctatattattgtgtgagaggtgcggacgtctggggccaagggactacggtcatcgtctcctta

SEQ ID NO: 7462 - DNA, 274 bp, Homo sapiens
  source 1..274: mol_type = other DNA
tgcagcctctggattcacctttaccatcgcttacatgaattgggtccgccaggcaccaggaaaggggctggagtgggtggccaacataaatccagatggaagtaagaaatactatgtggactctgtgaagagccgcttcaccatctccagagacaataccggcaactcaatgtatctgcaaatggacagcctgacagtcgacgacacgggtctatattactgtgtgagaggtgcggacgtctggggccaagggactacggtcatcgtctcctta

SEQ ID NO: 7463 - DNA, 274 bp, Homo sapiens
  source 1..274: mol_type = other DNA
tgcagcctctggattcacctttaccatcgcttacatgaattgggtccgccaggcaccaggaaaggggctggagtgggtggccaacataaatccagatggaagtaagaaatactatgtggactctgtgaagggccgcttcaccatctccagagacaatactggcaactcaatgtatctgcaaatggacagcctgacagtcgacgacacgggtctatattactgtgtgagaggtgcggacgtctggggccaagggactacggtcatcgtctcctta

SEQ ID NO: 7464 - DNA, 280 bp, Homo sapiens
  source 1..280: mol_type = other DNA
tgcagcctctggattcaccttgagtacctattggatgagctgggtccgccaggctccagggaaggggctggaatgggtggccaacataaaccaagatggaagtgacaagtactatgtggactctgtgaagggccgattcaccatctccagagacaacgccaagaactcactgtatctgcaaatgaacagcctgagagccgaggatacggctgtctattactgtgcgagaggtgggaggcccgcggactggggccagggaaccctggtcaccgtctcctca

SEQ ID NO: 7465 - DNA, 280 bp, Homo sapiens
  source 1..280: mol_type = other DNA
tgcagcctctggattcacctttaataactattggatgacctgggtccgccaggctccagggaaggggctggagtgcgtggccaccataaaaggtgatggaagtgagaaaagttatgtggaatctgtgaagggccgattcaccatctccagagacaacgccaagaactcactgtatctgcaaatgaacagcctgagagccgacgacacggctgtgtattactgtgcgagagggggcagacctgccgactggggccagggaaccctggtcaccgtctcctca

SEQ ID NO: 7466 - DNA, 292 bp, Homo sapiens
  source 1..292: mol_type = other DNA
tgcagcctctggattcacctttagtaatttttggatgcactgggtccgccaaactccagagaaggggctagtgtgggtctcaaagattggacctgatgggacttacacaacttacgcggacttcgtgaagggccgattcaccatctccagagacaacgccaagaacacgttgtttctgcaaatgaacagtctcacagccgacgacacggctgtctattattgtgtaagggggagcagtgggtggagcggcgtggactactggggccagggaaccctggtcaccgcctcctca

SEQ ID NO: 7467 - DNA, 292 bp, Homo sapiens
  source 1..292: mol_type = other DNA
tgcagcctctggattcaccttcagttactactggatgcactgggtccgccaaactccagggacggggctgatgtggatttcacgtattagtggagatgggactagaacaaattacccggactcggtgaagggccgattcaccgtctccagagacaacgccaagaacacgttgtatctgcagatgaacagtctgagagccgaggacacggctctgtattactgtgtaagaggaagtagtggttggtcgggcgttgactactggggccagggaaccctggtcaccgtctcctca

SEQ ID NO: 7468 - DNA, 279 bp, Homo sapiens
  source 1..279: mol_type = other DNA
gcatctggatacactttcagcagcaactatttgagctgggtgcgacaggcccctggacaagggcttgagtgggttggactaatcaaccctagtggtggtgccacaacctacgcacagaagttccagggcagagtcaccatgaccagggacacgtccacgaccacagtctatatggatctgagcagcctgacatctgaggacacggccgtctattactgtgtgagagaagcgggtgcttttgatatctggggccgagggacaatggtcaccgtctcttca

SEQ ID NO: 7469 - DNA, 279 bp, Homo sapiens
  source 1..279: mol_type = other DNA
gcatctggatacactttcagcagcaactatatgagctgggtgcgacaggcccctggacaagggcttgagtgggtgggactaatcaaccctagtggtggtgccacaacctacgcacagaagttccagggcagagtcaccatgaccagggacacgtccacgaccacagtctatatggagctgagcagcctgacatctgaggacacggccgtctattactgtgtgagagaagcgggtgcttttgatatctggggccgagggacaatggtcaccgtctcttca

SEQ ID NO: 7470 - DNA, 279 bp, Homo sapiens
  source 1..279: mol_type = other DNA
gcatctggatacactttcagcagcaactatatgagctgggtgcgacaggcccctggacaagggcttgagtgggtgggactaatcaaccctagtggtggtgccacaacctacgcgcagaagttccagggcagagtcaccatgaccagggacacgtccacgagcacactctacatggagctgagcagcctgacatctgaggacacggccgtctattactgtgtgagagaagcgggtgcttttgatatctggggccgagggacaatggtcaccgtctcttca

SEQ ID NO: 7471 - DNA, 279 bp, Homo sapiens; identical to SEQ ID NO: 7468
  source 1..279: mol_type = other DNA

SEQ ID NO: 7472 - DNA, 279 bp, Homo sapiens
  source 1..279: mol_type = other DNA
gcatctggatacaccttcaccagtaactatatggactgggtgcgacaggcccctggacaagggcttgagtggatgggagtaatcaaccctagtggtggtagcacaacctacgcacagaagttccagggcagagtcaccatgaccagggacacgtccacgagcacagtctacatggagctgagcagcctgagatctgaggacacggccatgtattactgtgtgagagaagcgggtgcttttgatatctggggccaagggacaatggtcaccgtctcttca

SEQ ID NO: 7473 - DNA, 279 bp, Homo sapiens
  source 1..279: mol_type = other DNA
gcatctggatacacgttcaccagtaactatatggactgggtgcgacaggcccctggacaagggcttgagtggatgggagtaatcaaccctagtggtggtagcacaacctacgcacagaagttccagggcagagtcaccatgaccagggacacgtccacgagcacagtctacatggagctgagcagcctgagatctgaggacacggccatgtattactgtgtgagagaagcgggtgcttttgatatctggggccaagggacaatggtcaccgtctcttca

SEQ ID NO: 7474 - DNA, 279 bp, Homo sapiens; identical to SEQ ID NO: 7473
  source 1..279: mol_type = other DNA

SEQ ID NO: 7475 - DNA, 279 bp, Homo sapiens
  source 1..279: mol_type = other DNA
gcatctggatacaccttcaccagtaactatatggactgggtgcgacaggcccctggacaagggcttgagtggatgggagtaatcaaccctagtggtggtagcacaacctacgcacagaagttccagggcagactcaccatgaccagggacacgtccacgagcacagtctacatggagctgagcagcctgagatctgaggacacggccatgtattactgtgtgagagaagcgggtgcttttgatatctggggccaagggacaatggtcaccgtctcttca

SEQ ID NO: 7476 - DNA, 279 bp, Homo sapiens
  source 1..279: mol_type = other DNA
gcatctggatacaccttcaccagtaactatatggactgggtgcgacaggcccctggacaagggcttgagtggatgggagtaatcaaccctagtggtggtagcacaacctacgcacagaagctccagggcagagtcaccatgaccagggacacgtccacgagcacagtctacatggagctgagcagcctgagatctgaggacacggccatgtattactgtgtgagagaagcgggtgcttttgatatctggggccaagggacaatggtcaccgtctcttca

SEQ ID NO: 7477 - DNA, 283 bp, Homo sapiens
  source 1..283: mol_type = other DNA
tgcagcctctggattcacctttagcagtcatgccatgagctggctccgccaggctccagggaaggggctggagtggctctcaagtattagtgatagtggtggtgacacatcctacatagactccgtgaagggccggttcatcatctccagagacaattccaagaacacagtgtatctgcaaatgaacaccctgagagtcggggacacggccgtttattactgtgcgagagatcccccctggttccacccctggggccagggaaccctggtcaccgtctcctca

SEQ ID NO: 7478 - DNA, 283 bp, Homo sapiens
  source 1..283: mol_type = other DNA
tgcagcctctggattcacctttagcagtcatgccatggcctggctccgccaggctccagggagggggctggagtggctctcaagtattagtgatagtggtggtgacacatcctacatagactccgtgaagggccggttcatcatctccagagacaattccaagaacacagtgtatctgcaaatgaacaccctgagagtcggggacacggccgtttattactgtgcgagagatcccccctggttccacccctggggccagggaaccctggtcaccgtctcctca

SEQ ID NO: 7479 - DNA, 283 bp, Homo sapiens
  source 1..283: mol_type = other DNA
tgcagcctctggattcacctttagcagtcatgccatgagctggctccgccaggctccaggcaaggggctagagtgggtctcaagtattactgatagtggtggtgacacatcctacacagactccgtgaagggccggttcatcatctccagagacaattccaggaacacagtgtatctgcaaatgaacaccctgagagtcgaggacacggccgtatattactgtgcgagagatcccccctggttccacccctggggccagggaatcctggtcaccgtctcctca

SEQ ID NO: 7480 - DNA, 283 bp, Homo sapiens
  source 1..283: mol_type = other DNA
tgcagcctctggattcacctttagcagtcatgccatggcctggctccgccaggctccagggagggggctggagtggctctcaagtatcagtgatagtggtggtgactcatcctacatagactccgtgaagggccggttcatcatctccagagacaattccaagaacacagtgtatctgcaaatgaacaccctgagagtcggggacacggccgtttattactgtgcgagagatcccccctggttccacccctggggccagggaaccctggtcaccgtctcctca

SEQ ID NO: 7481 - DNA, 283 bp, Homo sapiens
  source 1..283: mol_type = other DNA
tgcagcctctggattcacctttagcagtcatgccatgagctgggtccgccaggctccagggaaggggctggagtgggtctcaagtattagtgatagtggtggtgacacatactacacagactccgtgaagggccggttcatcatctccagagacaattccaagaatacagtgtatctgcaaatgaacaccctgagagtcgaggacacggccgtatattactgtgcgagagatcccccctggttccacccctggggccagggaaccctggtcaccgtctcctca

SEQ ID NO: 7482 - DNA, 283 bp, Homo sapiens
  source 1..283: mol_type = other DNA
tgcagcctctggattcacctttaacagtcatgccatgagttggctccgccaggctccagggaaggggctggagtgggtctcatctattactgatagtggtggagacacatcctacacagactccgtgaagggccggttcatcatctccagagacaattccaagaacacggtgtatctgcaaatgaacaccctgagagccgaagacacggccgtatattactgtgcgagagatcccccctggttccacccctggggccagggaaccctggtcaccgtctcctca

SEQ ID NO: 7483 - DNA, 283 bp, Homo sapiens; identical to SEQ ID NO: 7481
  source 1..283: mol_type = other DNA

SEQ ID NO: 7484 - DNA, 283 bp, Homo sapiens
  source 1..283: mol_type = other DNA
tgcagcctctggattcacctttagtaaccatgccttgagctgggtccgccaggctccagggaaggggctggagtgggtctcatccatgagtggaaatggtgatgccatatactacgcagactccgtgaagggccggttcaccatctccagggacaattccaagaacacgctgtatctgcaactggacagcctgagagccgacgacacggccgtatactactgtgcgagagatcccccctggttccacccctggggccagggaaccctggtcaccgtctcctca

SEQ ID NO: 7485 - DNA, 284 bp, Homo sapiens
  source 1..284: mol_type = other DNA
tgcagcctctggattcacctttagcagtcatgccatggcctggctccgccaggctccagggagggggctggagtggctctcaagtattagtgatagtggtggtgacacatcctacatagactccgtgaagggccggttcatcatctccagagacaattccaagaacacagtgtatctgcaaatgaacaccctgagagtcggggacacggccgtttattactgtgcgagagatcccccctggttccacccctgggggccagggaaccctggtcaccgtctcctca

SEQ ID NO: 7486 - DNA, 283 bp, Homo sapiens
  source 1..283: mol_type = other DNA
tggaggctctggattcacctttaacagtcatgccatgagctggctccgccaggctccagggaaggggctggagtggctctcatctattactgataatggtggggacacatcgtacagagactccgtgaagggccggttcatcatctccagagacaattccaagaacacggtatatctgcaaatgaacaccttgagagtcgaagacacggccgtatattattgtgcgagagatcccccctggttccacccctggggccagggaaccctggtcaccgtctcctca

SEQ ID NO: 7487 - DNA, 283 bp, Homo sapiens
  source 1..283: mol_type = other DNA
tgcagcctctggattcacctttaacagtcatgccatgagctgggtccgccaggctccagggaaggggctggagtgggtctcaagtattagtgatagtgggggtgacacatactacacagactccgtgaagggccggttcatcatctccagagacaattccaagaacacagtgtatctgcaaatgaacaccgtgagagtcgaggacacggccgtatattactgtgcgagagatcccccctggttccacccctggggccagggaaccctggtcgccgtctcctca

SEQ ID NO: 7488 - DNA, 283 bp, Homo sapiens
  source 1..283: mol_type = other DNA
tgcagcctctggattcacctttagcagtcatgccatggcctggctccgccaggctccagggagggggctggagtggctcgcaagtattagtgataatggtggtgacacatcctatatagactccgtgaagggccggttcatcatctccagagacaattccaagaacacagtgtatctgcaaatggacaccctgagagtcggggacacggccgtttattactgtgcgagagatcccccctggttccacccctggggccagggaaccctggtcaccgtctcctca

SEQ ID NO: 7489 - DNA, 283 bp, Homo sapiens
  source 1..283: mol_type = other DNA
ttcagcctctggattcacctttagcagtcatgccatgagctgggtccgccaggctccagggaaggggctggaatgggtctcaagtattagtgatagtggtggtgacacatcctataaagactccgtgaagagccggttcatcatctccagagacaattccaagaatacagtgtatctgcaaatgaacaccctgagagtcgaggactcggccgtatattactgtgcgagagatcccccctggttccacccctggggccagggaaccctggtcaccgtctcctca

SEQ ID NO: 7490 - DNA, 283 bp, Homo sapiens
  source 1..283: mol_type = other DNA
tgcagcctctggatttacctttagcagtcacgccatgagctggctccgccaggctccagggaagggactggaatggttctcgagtattagtgataatggtggtgacacatcctacagagactccgtgaagggccggttcatcatctccagagacaattccaagaacacagtgtatctgcaaatgaaaaccctgagagtcgaggacacggccgtctattattgtgcgagagatcccccctggttccacccctggggccagggaaccctggtcaccgtctcctca

SEQ ID NO: 7491 - DNA, 283 bp, Homo sapiens
  source 1..283: mol_type = other DNA
tgcagcctctggattcacctttagcagtcatgccatgagctgggtccgccaggctccagggaaggggctggagtgggtctcaagtattagtgatagtggtggtgacacatcctacacagactccgtgaagggccggttcatcatctccagagacaattccaagaacacagtgtatctgcaaatgaacaccctgagagtcgaggacacggccgtatattactgtgcgagagatcccccctggttccacccctggggccagggaaccctggtcaccgtctcctca

SEQ ID NO: 7492 - DNA, 277 bp, Homo sapiens
  source 1..277: mol_type = other DNA
tgcagcctctggattcacctttagtacctattggatgagctgggtccgccaggctccagggaagggcctggagtgggtggccaacataaaccaagatggaagtaacaaatactatgtggactctgtgaagggccgattcaccatctccagagacaacgccaagaactcactgtttctgcaaatgaacagcctgagagccgaggacacggctgtgtattactgtgcgagggactacggtgaccactggggccagggaaccctggtcaccgtctcctca

SEQ ID NO: 7493 - DNA, 277 bp, Homo sapiens
  source 1..277: mol_type = other DNA
tgcagcctctggattcacctttaataattattggatgagttgggtccggcagggtccagggaagggactggagtgggtggccaacataaatcaaaatggaagtgaggcacactatgcggcctctgtgaagggccgatttaccatctccagagacgacgcccagaattcactgtatctgcaaatgaacagcctgacggccgccgacgcggctgtgtatttctgtgcgagagactacggtgaccactggggccggggaatcctggtcaccgtctcctca

SEQ ID NO: 7494 - DNA, 271 bp, Homo sapiens
  source 1..271: mol_type = other DNA
tgcagcctctggattcacctttaggaagtattgggtgagctgggtccgccaggctccagggagggggctggagtgggtggccagcataaagggagatggaagtgagagatactatgtggactctgtggagggccgattcatcatctccagagacaacgccaagaactcactgtatctgcaaatgagcagcctgagagtcgaggacacggctgtgtattactgtgcgagagaatgggtttggggccagggaaccctggtcaccgtctcctca

SEQ ID NO: 7495 - DNA, 271 bp, Homo sapiens
  source 1..271: mol_type = other DNA
tacagcctctggattcacctttagcagctattggatgagctgggtccgccaggctccagggaaggggccggagcgggtggccaggataaagcaagatggaagtgagagatactatgtggcctctgtgacgggccgattcaccatctccagagacaacgccaagatgtcgctgtatctgcaaatgaacagcctgagagccgaggacacggctgtgtattactgtgcgagagaatgggtctggggccagggaaccctggtcaccgtctccgca

SEQ ID NO: 7496 - DNA, 280 bp, Homo sapiens
  source 1..280: mol_type = other DNA
ttcagtctctggattcaccttcagtaactacgctatgtactgggtccgccaggctccagggaagggactggaatgtgtttcacttatcagtactgctggggatacatactacgcagactcagtgaagggcagattcaccatctccagagacaattccaagaatgtattgtatcttcaaatgagcagtctgagagctgaagacacggctatttattattgtgtgagagattattacggaatggacgtctggggccaagggaccacggtcaccgtctcctca

SEQ ID NO: 7497 - DNA, 280 bp, Homo sapiens
  source 1..280: mol_type = other DNA
ttcagtctctggattcaccttcagtaattacgctatgtactgggtccgccaggctccagggaagggactggaatgtgtttcacttatcagtactgctggggatacatactacgcagactcagtgaagggcagattcaccatctccagagacaattccaagaatgtattgtatcttcaaatgagcagtctgagagctgaagacacggctatttattattgtgtgagagattattacggaatggacgtctggggccaagggaccacggtcaccgtctcctca

SEQ ID NO: 7498 - DNA, 283 bp, Homo sapiens
  source 1..283: mol_type = other DNA
ttcagcctctggattcaccttcggtagctatgctatgcactgggtccgccaggctccagggaagggactggagtatgtttcagctagtgttactaatgggggtagcacatactacgcagactcagtgaagggcagattcaccatctccagagacaatcccaagaacacgctgtatcttcaaatgaccagtctgagacctgaggacacggctgtgtattactgtgtgagggactactacggtatggacgtctggggccaagggaccacggtcaccgtctcctca

SEQ ID NO: 7499 - DNA, 280 bp, Homo sapiens; identical to SEQ ID NO: 7497
  source 1..280: mol_type = other DNA

SEQ ID NO: 7500 - DNA, 283 bp, Homo sapiens
  source 1..283: mol_type = other DNA
ttcagcctctggattcaccttcagtacctatgctatgtactgggtccgccaggctccagggaagggactggaatgtgtttcacttattagtattaatgggggtagtacatactacgcagactcagtgaagggcagattcaccatctccagagacaattccaagaacacgctgtttcttcaaatgcgcagtctgagagctgaggacacggctgtttattattgtgtgagagattattacggtatggacgtctggggccaagggaccacggtcaccgtctcctca

SEQ ID NO: 7501 - DNA, 280 bp, Homo sapiens
  source 1..280: mol_type = other DNA
tacagcctctggatttaccttcagttcctatgctatgtactgggtccgccaggctccagggaagggactggaatgtgtttcacttattagtattgttggggatacatactacgcagactcagtgaagggcagattcaccatctccagagacaattccaagaacacgctgtatcttcaaatgcgcactctgagacctgaagacacggctgtttattattgtgtgagagattattacggtatggacgtctggggccaagggaccacggtcaccgtctcctca

SEQ ID NO: 7502 - DNA, 280 bp, Homo sapiens
  source 1..280: mol_type = other DNA
ttcagcctctggattcaccttcagtacctatgctatgtactgggtccgccaggctccagggaagggactggaatgtgtttcacttattagtattgctggggatacatactacgcagactcagtgaagggcagattcaccatctccagagacaattccaagaacacgctgtatcttcaaatgcgcagtctgagagctgaagacacggctgtttattattgtgtgagagattattacggtatggacgtctggggccaagggaccacggtcaccgtctcctca

SEQ ID NO: 7503 - DNA, 292 bp, Homo sapiens
  source 1..292: mol_type = other DNA
cactgtctctggtggctccatcagtaattactactggagctggatccggcagcccgccgggaagggactggagtggattgggcgtataaataccagtgggagcaccaacttcaacccctccctcaagagtcgagtcaccatgtcagtagacacgtccaagaaccacttctccctgaagctgagctctgtgaccgccgcggacacggccgtatattactgtgcgagagcgacaactggaactttttactactttgactactggggccagggaaccctggtcaccgtctcctca

SEQ ID NO: 7504 - DNA, 316 bp, Homo sapiens
  source 1..316: mol_type = other DNA
cactgtctctgctggctccatcaggagttactactggagttggatccgacagcccgccgggaagggactggagcagcccgccgggaagggactggagtggattgggcgtatctctaccagtgggagcaccaactacaacccctccctcaagagtcgactctccatgtcagtagacacgtccaagaaccagttctccctaaacctgacgtatgtgaccgccgcggacacggccgtgtattactgtgcgagagctacaactggaactttttactactttgactactggggccagggagccctggtcaccgtctcctca

SEQ ID NO: 7505 - DNA, 292 bp, Homo sapiens
  source 1..292: mol_type = other DNA
cactgtctctggtggctccatcagtaattactactggagctggatccggcagcccgccgggaagggactggagtggattgggcgtatctataccagtgggagcaccaactacaacccctccctcaagagtcgagtcaccatgtcagtggacacgtccaagaaccagttctccctgaagctgagttctgtgaccgccgcggacacggccgtgtattactgtgcgagagcgacaactggaactttttactactttgactactggggccagggaaccctggtcaccgtctcctca

SEQ ID NO: 7506 - DNA, 286 bp, Homo sapiens
  source 1..286: mol_type = other DNA
tgcagcctctgaattcacctttagcagttatgccatgacctgggtccgccaggctccagggaaggggctggagtgggtctcagccagtggtgggagtggtgctaccacatactacgcagactctgtgaagggccgattcaccatctccagagacaattccaagaacatgctgtatctgcaaatgaacatcctgagagccgaggacacggccgtatattactgtgcgaaaggccagagtggtgcttttgatatctggggccaagggacaatggtcaccgtctcttcg

SEQ ID NO: 7507 - DNA, 286 bp, Homo sapiens
  source 1..286: mol_type = other DNA
tgcagcctctggattcacctttagcatctatggcatgagctgggtccgccaggctccagggaaggggctggagtgggtctcagctcttactagtagtggtagtaggacatactacgcagactccgtgaagggccggttcaccatctccagagacaattccaagaacacgctgtatctgcaaatgaacagcctgagagccgaggacacggccgtatattactgtgcgaaagggcagagcggtgcttttgatatttggggccaagggacaatggtcaccgtctcttca

SEQ ID NO: 7508 - DNA, 285 bp, Homo sapiens
  source 1..285: mol_type = other DNA
tcttctggatacaccttcactaactacgctgtgcattgggtgcgccaggcccccggacaaagccttgagtggatgggatggatcaacgctggcaatggtgacagaaaatattcacagaacttccagggcagagtcaccattaccacggacacatccgcgaggacagcctacatggagctgagcagcctgagatctgaagacacggctgtttattattgtgcgagaaatagtgggagttatcggttcgacccctggggccagggaaccctggtcaccgtctcctca

SEQ ID NO: 7509 - DNA, 285 bp, Homo sapiens
  source 1..285: mol_type = other DNA
gcttctggatacaccttcactaactatggtttgcattgggtgcgccaggcccccggacaaaggcttgaatggatgggatggatcaatgttgccaatggtaacacaaaatattcacagagatttcagggcagagtctccattaccagggacacatccgcgaacacagcctacatggaactgagcagcctgagatctgaagacacggctgtctattactgtgcgcgaaattcggggagttatcggttcgacccctggggccagggaaccctggtcaccgtctcctca

SEQ ID NO: 7510 - DNA, 295 bp, Homo sapiens
  source 1..295: mol_type = other DNA
tgcagcctctggattcaacctcagagactattggatgcactgggtccgccaagctccagggaaggggctggagtgggtctcagttattaatcttgatggaagtaacacaaagtacgcggactccgtgaagggccgattcaccatctccaaagacaacgccaagaacacactgtatctgcaaatgaacggtctgagagccgaggacacggctgtatactactgtgcaagagatttccccggtacacctaatgcttgtgatatctggggccaggggacaatggtcaccgtctcttca

SEQ ID NO: 7511 - DNA, 295 bp, Homo sapiens
  source 1..295: mol_type = other DNA
tgttgtctctggattcagattgagtaactactggatgcactgggtccgccaaagtccagggaagggtctggtgtggctttcacgtattaatttagatggaagaatcacagactacgcggactccgtgaagggccgattcgccatctccaaagacgacgccaagaacacggtctatctggaaatgagcagtctgagagtcgaggacacaggtgtatattattgtgcaagagattttccggggacccctaatgcttgtgatatctggggccaagggacaatggtcatcgtctcttca

SEQ ID NO: 7512 - DNA, 271 bp, Homo sapiens
  source 1..271: mol_type = other DNA
tgcagcctctggattcatctttagtacctcttggatgagctgggtccgccaggctccagggaaggggctggagtgggtggccaagataaagccagatggaagtgacaagtactatgtgggctctgtgaagggccgattcaccatctccagagacaacgccaaaaattcactgtatctacaaatgaacagcctgagagccgaggacacggctgtgtattactgtgcgaggtttgatatctggggccaagggacaatggtcaccgtctcttca

SEQ ID NO: 7513 - DNA, 271 bp, Homo sapiens
  source 1..271: mol_type = other DNA
tgcagcctctggattcggcttcagtggttattggatgacctgggtccgccagacttcagagagggggctggagtgggtggccaacataaaccaagatggaagtgagaaaaattatgtggactctgtgaggggccgtttcaccatctccagagacaacgtcaagaactcactgtatttgcaaatgaacagcctgagagccgaggacacggctctgtattactgtgcgagatttgatatctggggccgagggacaatggtcaccgtctcttca

SEQ ID NO: 7514 - DNA, 271 bp, Homo sapiens
  source 1..271: mol_type = other DNA
tgaagcctctggatttacgttcagcagttattggatgacctgggtccgccaggctccagggaaagggctggaatgggtggccaacataaagcccgatgggactgagaaaaaatatttggactctgtgaagggccgattcatcatctccagagacaacgccaagaattccctgtatctgcaaatgaacagcctgagagccgaggacacggccctttattattgtgcgagatttgatatctggggcaaagggacaatggtcaccgtctcttca

SEQ ID NO: 7515 - DNA, 271 bp, Homo sapiens; identical to SEQ ID NO: 7512
  source 1..271: mol_type = other DNA

SEQ ID NO: 7516 - DNA, 271 bp, Homo sapiens
  source 1..271: mol_type = other DNA
tgcagcctctggattcacctttagtatgtcttggatgagctgggtccgcctggctccagggaaggggctggagtgggtggccaagataaagccagatggaagtgagaagtactatgtggactctgtgaggggccgattcaccatctccagagacaacgccaaaaattcactgtatctacaaatgaacagcctgagagccgaggacacggctgtgtattactgtgcgaggtttgatatctggggccaagggacaatggtcaccgtctcttca

SEQ ID NO: 7517 - DNA, 301 bp, Homo sapiens
  source 1..301: mol_type = other DNA
tgcagcctctggattcaccttcagtgaccactacatggactgggtccgccaggctccagggaaggggctggagtgggttggccgtattagagataaaggtaacaattacatcacagaatatgccgcgtctgtgaaaggccgattcaccgtctcaagagatgattcaaagaactcactgtatctgcaaatgaacagcctgaaaaccgaggacacggccgtatactactgtgctagagatgcgcgagcctacggtggctactttgactactggggccagggaaccctggtcaccgtctcctca

SEQ ID NO: 7518 - DNA, 301 bp, Homo sapiens
  source 1..301: mol_type = other DNA
tgtaggctctggattcaccttcagcgaccactacatagactgggtccgtcaggctccagggaaggggctggagtgggttggccgtattagagacaaaggttacaattactacacagaatatgccgcgtctgtgaaaggcaggttcaccatctccagagatgattcaaggaactcactgtatctgcaaatgaacagcctgaaaaccgaggacacggccgtgtattactgtgctagagacgcccgggcatatggtggctactttgactactggggccagggaaccctggtcaccgtctcctca

SEQ ID NO: 7519 - DNA, 292 bp, Homo sapiens
  source 1..292: mol_type = other DNA
tgaagcctctgaattcaccttcagtgactactggatgcactgggtccgccaagctccaggggaggggctggtgtgggtctcacaaattaatgctgctgggaccagcacaaattacgcggactccgtgaagggccgattcaccatctccagagacaacgccaagaacacactgtatctgcaaatgaacagtctgagagccgaggacacggctttgtatttctgtgcaagagatgggacgggagctatcgatcttgactactggggccagggaaccctggtcaccgtctattca

SEQ ID NO: 7520 - DNA, 292 bp, Homo sapiens
  source 1..292: mol_type = other DNA
tgcagcctctggattcaccctcagtagctactggatgcactgggtccgccatgctccagggaaggggctggtgtgggtctcacttattgagagtgatgggcgtagtacaaactacgcggactccgtgaagggccgattcaccatctccagagacaacgccaagaacaccctatatctgcaaatgaacagtctgagcgccgacgacacggctgtttattactgtgcaagggatgggacgggagccatcgaccttgactactggggccagggaaccctggtcaccgtctcctca

SEQ ID NO: 7521 - DNA, 295 bp, Homo sapiens
  source 1..295: mol_type = other DNA
cactgtctctggtgactccatcaacaatgataattactactggagttggatccgccagtccgccggaaagggactggagtggattggacgaatctaccccagtggggccacctactatactccgtccctcaggggtcgactcaccatgtccatagacaggtccaagaatcagttttccatgaagttgagttctgtgaccgccacagacacggccgtgtatttttgtgcgagaggaggcagtggccctaactggttcgacccctggggcccgggaaacctggtcaccgtctcctca

SEQ ID NO: 7522 - DNA, 295 bp, Homo sapiens
  source 1..295: mol_type = other DNA
cactgtgactggtgactccatctataatgataattattactggagttggatccgacagaccgccgggaagggactggaatggattgggcgtgtttatctcagtggggccacctactacaacccctccctcaggagtcgagtcaccatgtctctagacatgtccaagaggcagttcttcttgaacctgaactttgtgaccgccacagacacggccgtctattattgtgcgagagggggctcggggcccaactggttcgacccctggggccagggaatcctggtcaccgtctcctca

SEQ ID NO: 7523 - DNA, 292 bp, Homo sapiens
  source 1..292: mol_type = other DNA
tgcagtctctggattcacctttagtaactattggatgcactgggtccgccgagctccagggaaggggctggtgtgggtcgcacgtattgataaagttgggcgtgatataagttacgcggactccgtgaagggccgattcaccatctccagagacaactcccagaacactctgtttctgcaaatgaacagtctgagagccgacgacacggctgtgtattattgtgcaagactatatagtggcgatgacttctttgactactggggcctgggaaccctggtctccgtctcctca

SEQ ID NO: 7524 - DNA, 292 bp, Homo sapiens
  source 1..292: mol_type = other DNA
tgcagtctctggatgcaccttcagtgactactggatgcactgggtccgccgagctccagggaaggggctgatgtgggtcgcacgtattaataaagacgggcgcagtacaacctacgcggactccgtgaagggccgattcaccatctccagagacaactccaagaacacgctgtatctgcaaatgaacagtctgagagccgacgacacggctgtgtattattgtgcaagactatatagtggcgatgacttctttgactactggggcctgggaaccctggtctccgtctcctca

SEQ ID NO: 7525 - DNA, 292 bp, Homo sapiens
  source 1..292: mol_type = other DNA
tgcagtctctggattcaccttcagtaactactggatgcactgggtccgccgagttccagggaaggggctggtgtgggtcgcacgtgttaataaagatgggcgtgagacaagctacgcggactccgtgaagggccgattcaccatctccagagacaactccaagaacaggttgtatctgcaaatgaacagtctgagagccgacgacacggctctgtattattgtgcaagactatatagtggcgatgacttctttgactactggggcctgggaaccctggtctccgtctcctca

SEQ ID NO: 7526 - DNA, 292 bp, Homo sapiens
  source 1..292: mol_type = other DNA
tgcagtctctggattcaccttcagtaactactggatgcactgggtccgccgagctccagggaaggggctggtgtgggtcgcacgtattaataaagatgggcgtagtacaacatacgcggactccgtgaagggccgattcaccatgtccagagacaactccaagaacacgctgtatctgcaaatgaacagtctgagagccgacgacacggctgtgtattattgtgcaagactatatagtggcgatgacttctttgactactggggcctgggaaccctggtctccgtctcctca

SEQ ID NO: 7527 - DNA, 292 bp, Homo sapiens
  source 1..292: mol_type = other DNA
tgtagcctctggattcaccttcagtaactactggatgcactgggtccgccaagttccagggaaggggctgatgtgggtctcacgtactgacacttatgggcgtgacataaactacgcggactctgtgaagggccgattcaccatctccagagacaacgccaagaacacgctgtatctgcaaatgaacaatctgagagtcgaggacacggctgtgtattattgtgcaagattgtatagtggcgacgatttctttgattattggggccagggaaccctggtcaccgtctcctca

SEQ ID NO: 7528 - DNA, 292 bp, Homo sapiens
  source 1..292: mol_type = other DNA
tgtagcctctggattcaccttcagtaactactggatgcactgggtccgccaagttccagggaaggggctggtgtgggtctcacgtactgacacttatgggcgtgacataaactacgcggactctgtgaagggccgattcaccatctccagagacaacgccaagaacacgctgtatctgcaaatgaacaatctgagagtcgaggacacggctgtgtattattgtgcaagattgtatagtggcgacgatttctttgattattggggccagggaaccctggtcaccgtctcctca

SEQ ID NO: 7529 - DNA, 292 bp, Homo sapiens
  source 1..292: mol_type = other DNA
tgcagtctctggattcaccttcagtaactactggatgcactgggtccgccgagctccagggaaggggctggtgtgggtcgcacgtattaataaagatgggcgtagtacaagctacgcggactccgtgaagggccgattcaccatctccagagacaactccaggaacacgctgtatctgcaaatgaacagtctgagagccgacgacacggctgtgtattattgtgcaagactatatagtggcgatgacttctttgactactggggcctgggaaccctggtctccgtctcctca

SEQ ID NO: 7530 - DNA, 292 bp, Homo sapiens
  source 1..292: mol_type = other DNA
tgcagtctctggattcaccttcagtaattactggatgcactgggtccgccgagctccagggaaggggctggtgtgggtcgcacgtgttaataaagatgggcgtgaaagaagctacgcggactccgtgaagggccgattcaccatctccagagacaactccaagaacacactgtatctgcaaatgaacaatctgagagccgacgacacggctgtgtactattgtgcaagactatatagtggcgatgacttctttgactactggggcctgggaaccctggtctccgtctcctca

SEQ ID NO: 7531 - DNA, 292 bp, Homo sapiens
  source 1..292: mol_type = other DNA
tgcagtctctggattcaccttcagtaactactggatgcactgggtccgccgagctccagggaaggggctggtgtgggtcgcacgtgttaataaagatgggcgtagtacaagttacgcggactccgtgaagggccgattcaccatctccagagacaactccaagaacacgttgtatctgcaaatgaacagtctgagagccgacgacacggctgtgtattattgtgcaagactatatagtggcgatgacttctttgactactggggcctgggaaccctggtctccgtctcctca

SEQ ID NO: 7532 - DNA, 292 bp, Homo sapiens
  source 1..292: mol_type = other DNA
tgcagtctctggattcaccttcagtaactactggatgcactgggtccgccgagctccagggaaggggctggtgtgggtcgcacgtgttaataaagatgggcgtagcacaagctacgcggattccgtgaagggccgattcaccatctccagagacaactccaagaacacgttgtatctgcaaatgaacagtctgagagccgacgacacggctgtgtattattgtgcaagactatatagtggcgatgacttctttgactactggggcctgggaaccctggtctccgtctcctca

SEQ ID NO: 7533 - DNA, 292 bp, Homo sapiens
  source 1..292: mol_type = other DNA
tgtagcctctggattcaccttcagtaactactggatgcactgggtccgccaagctccagggaaggggctggtgtgggtctcacgtactgacagttatgggagggacataacctacgcggactctgtgaagggccgattcaccatctccagagacaacgccaagaacacgctgtatctgcaaatgaacaatctgagagtcgaggacacggctgtgtattattgtgcaaggttgtatagtggcgacgatttctttgattattggggccagggaaccctggtcaccgtctcctca

SEQ ID NO: 7534 - DNA, 292 bp, Homo sapiens
  source 1..292: mol_type = other DNA
tgcagcctctggattcaccttcattaactactggatgcactgggtccgccaagttccagggaaggggctgctgtgggtcgcacgaactgatagtgatgggagtgacataagttacgcggactccgtgaagggccgattcaccatctccagagacaacgccaagaacacactgtatctgcaaatgaacagtctgagagccgaggacacggctgtgtattactgtgcaagattatatagtggcgacgatttctttgactactggggccggggaaccctggtcaccgtctcctca

SEQ ID NO: 7535 - DNA, 292 bp, Homo sapiens
  source 1..292: mol_type = other DNA
tgtagcctctggattcaccttcagtaactactggatgcactgggtccgccaaattccagggaaggggctggtgtgggtctcacgtactgacagttatgggagagacataaactacgcggactctgtgaagggccgattcaccatctccagagacaacgccaagaacacgctgtatctgcaaatgaacaatctgagagtcgaggacacggctgtgtattattgtgcaagattgtatagtggcgacgatttctttgattattggggccagggaaccctggtcaccgtctcctca

SEQ ID NO: 7536 - DNA, 289 bp, Homo sapiens
  source 1..289: mol_type = other DNA
tgcagcctctggattcaccttcagtagttactggatgctctgggtccgccaggctccagggaaggggctggtgtgggtctcacgtattaaaaatgatgagagtgacacaaaatacgcggactccgtgaagggtcgattcaccatctccagagacaacgccaagaacacgttgtatctgcaaatgaacagtctgagagccgaggacacggctgtgtattactgtgcaagagggggcgatggctacaatcctgactactggggccagggaaccctggtcaccgtctcctca

SEQ ID NO: 7537 - DNA, 289 bp, Homo sapiens; identical to SEQ ID NO: 7536
  source 1..289: mol_type = other DNA

SEQ ID NO: 7538 - DNA, 289 bp, Homo sapiens
  source 1..289: mol_type = other DNA
tgcagcctctggattcaccttcagtaactactggatgcactgggtccgccaagctccagggaacgggctggtgtgggtctcacgtattaatagtgatgggagtagcacaagctacgcggactccgtgaagggccgattcaccatctccagagacagcgccaagaacacggtgtatctgcaaatgaacagtctgagaggcgaggacacggctgtctattactgtgcaagagggggagatggctacaatcctgactactggggccagggaaccctggtcaccgtctcctca

SEQ ID NO: 7539 - DNA, 286 bp, Homo sapiens
  source 1..286: mol_type = other DNA
tgcagcctctggattcggcttcgctgactactacatgacgtggatccgccaggctccagggaaggggctggagtgggtctcatatcttagtggtgatggtggttataaaaggtacgcagactctgtgaagggccgattcgccatctccagagacaacgccaggaagtcagtgtatctgcaaatgaacagtctgagagccgaagacacggccgtatattactgtgcgagagcacccacggggagttgtgactactggggccagggaaccctggtcaccgtgtcctca

SEQ ID NO: 7540 - DNA, 286 bp, Homo sapiens
  source 1..286: mol_type = other DNA
tgcagcctctggattcaccttcactgactactacatgacgtggatccgccaggctccagggaaggggctggagtgggtctcataccttagtggcagtggttcttacacaaggtacccagactctgtgaagggccgattcaccatctccagagacaacgccaggaatttagtgtttctgcaactgaacagtctgagagccgaagacacggccgtttatttctgtgcgagagcgcccacggggagttgtgactactggggccagggaaccctggtcaccgtgtcctca

SEQ ID NO: 7541 - DNA, 286 bp, Homo sapiens
  source 1..286: mol_type = other DNA
tgcagcctctggattcaccttcagtgactactacatgacctggatccgccaggctccagggaaggggctggagtgggtttcatatattagtggtagtgatacctacacaaagtacgcagactctgtgaagggccgattcaccatctccagggacaacgccaagaactccctgtatctgcaaatgaacagcctgagagtcgaggacacggccgtatattactgtgcgagagcccctactgggagctgtgactactggggccagggaaccctggtcaccgtctcctca

SEQ ID NO: 7542 - DNA, 283 bp, Homo sapiens
  source 1..283: mol_type = other DNA
tgcagcctctggattcactgtcagtaacaactacatgagctgggtccgccagtctccagggagggggctggagtgggtctcaattctttatggcgatggtagcacattctacagagactccgtgaagggccgattcatcatctccagagacagttccaagaacacattgtttcttcaaatgaacaccctgggagtcgaggacacggccttatattactgtgcgagatggagtgggaggtactacgactattggggccagggaaccctggtcaccgtctcctca

SEQ ID NO: 7543 - DNA, 283 bp, Homo sapiens
  source 1..283: mol_type = other DNA
tgcagtgtctgggttcatcgtcaatgacaactacatgagttggctccgccaggctcccgggaaggggctggagtgggtctcaatgatttatagcggtggtgatacatattacgcagactccgtgaagggccgattcaccatctccagacacaattccaacaacatactgtatcttcaaatgaacagcctgagagtcgatgacacggccgtctattactgtgcgaggtggagtgggaggtactacgactactggggccacggaaacctggtcaccgtctcttca

SEQ ID NO: 7544 - DNA, 283 bp, Homo sapiens
  source 1..283: mol_type = other DNA
tgcagtgtctgggttcatcgtcaatgacaactacatgagttggctccgccaggctccaggaaaggggctggagtgggtctcaatgatttatagcggtggtgatacacattacgcagactccgtgaagggccgattcaccatctccagacacaattcttacaacatactgtatcttcaaatgaacagcctgggagtcgatgacacggccgtctattactgtgcgaggtggagtgggaggtactacgactactggggccacggaaacctggtcagcgtctcttca

SEQ ID NO: 7545 - DNA, 289 bp, Homo sapiens
  source 1..289: mol_type = other DNA
tgcagcctctgggttcagcgtcaatatcaactacatgagctgggtccgccaggctccagggaaggggctggagtgggtctcaattatctataacgatgagagtggtaccacatactacaaagactccgtggagggccgattcaccatctccagagacagttcgaagaacacactgtatcttcacatggacagcctgagagccgaggacacggccgtttatttttgtgcgaggtggagtgggcgatactacgactactggggccagggaaccctggtcaccgtctcctca

SEQ ID NO: 7546 - DNA, 283 bp, Homo sapiens
  source 1..283: mol_type = other DNA
tgcagtgtctgggttcatcgtcaatgacaactacatgagttggctccgccaggctccagggaaggggctggagtgggtctcaatgatttatagcggtggtgaaacacattatgcagactccgtgaagggccgattcatcatctccagacacaattcctacaacatactatatcttcagatgaacagcctgggagtcgatgacacggccgtctattactgtgcgaggtggagtgggaggtactacgactactggggccacggaaacctggtcaccgtctcctca

SEQ ID NO: 7547 - DNA, 289 bp, Homo sapiens; identical to SEQ ID NO: 7545
  source 1..289: mol_type = other DNA

SEQ ID NO: 7548 - DNA, 283 bp, Homo sapiens
  source 1..283: mol_type = other DNA
tgcagtctctgggttcaccgtcagtaataattacatgagttgggtccgccaggctccagggaaggggctggagtgggtctcaatgatttatagcggtggtgatacatattacggagactccgtgaagggccgattcaccatctccagacacgattccaacaacatactgtatcttcaaatgaacagcctgagagccgatgacacggccgtctattactgtgcgaggtggagtgggaggtactacgactactggggccacggaaacctggtcaccgtctcttca

SEQ ID NO: 7549 - DNA, 274 bp, Homo sapiens
  source 1..274: mol_type = other DNA
tgcagcctctgggttcaccttcagtgactctactatgtactgggtccgccaggcttccgggaaagggctggagtgggttggccgtatcagaaacaaagctaacaattacgcgacaacatatggtgcgtcggtgaagggcaggttcaccatctccagagatgattcaaagaacacggcgtatctgcaaatgaacagcctgaaaatcgaggacacggccgtgtattattgtacttcgcattactggggccaggggaccctggtcaccgtctcctca

SEQ ID NO: 7550 - DNA, 274 bp, Homo sapiens
  source 1..274: mol_type = other DNA
tgcagcctctgggttctccttcagtgactctactatgtattgggtccgccaggcttccgggaaagggctggagtgggttggccgtatcagaaacaaagctaacaattacgcgacaacatatggtgcgtcggtgaagggcaggttcaccatctccagagatgattcaaagaacacggcgtatctgcaaatgaacagcctgaaaatcgaggacacggccatgtattattgtacttcgcattactggggccaggggaccctggtcaccgtctcctca

SEQ ID NO: 7551 - DNA, 274 bp, Homo sapiens
  source 1..274: mol_type = other DNA
tgcagcctctgggttcaccttcagtgactctcctatacactgggtccgccaggcttccgggaaagggctggagtgggttggccgtattagaagcaaagctaacacttacgcgacagcctatgctgcgtcggtgaaaggcaggttcaccatctccagagatgattcaaagaacacggcgtatctgcaaatgaacagcctgaaaaccgaggacacggccatatattactgtactagccattactggggccagggaaccctggtcaccgtctcctca

SEQ ID NO: 7552 - DNA, 274 bp, Homo sapiens
  source 1..274: mol_type = other DNA
tgcagcctctgggttcaccttcagtgactctactatgtactgggtccgccaggcttccgggaaagggctggagtgggttggccgtatcagaaacaaagctaacaattacgcgacaacatatggtgcgtcggtgaagggcaggttcaccatttccagagatgattcaaagaacacggcgtatctgcaaatgaacagcctgaaaatcgaggacacggccgtgtattattgtacttcgcattactggggccaggggaccgtggtcaccgtctcctca

SEQ ID NO: 7553 - DNA, 292 bp, Homo sapiens
  source 1..292: mol_type = other DNA
tgcagcgtctggattcaccttcaatacttgtggcatgcactgggtccgccaggctccaggcaaggggctggagtgggtggcagttatatggaagaatggaattaatcaatactatgcagactccgtcaagggccgattcatcttctccagagacgattcgaagaatgcactgtatctgcaaatgaatagtctgagagccgaggacacggctgtctattactgtgcgagagagaggggaccctttgatggttttgatgtctggggccaagggacaatggtcaccgtctcttca

SEQ ID NO: 7554 - DNA, 292 bp, Homo sapiens
  source 1..292: mol_type = other DNA
tgtagcgtctggattcaccttcagtacctatggcatgcactgggtccgccaggctccaggcaaggggctggaatgggtgacagttatttggtctaatggagttaataaatactatgcagactccgtgaggggccgattcacgttctccagagacaactccaagaacactctgtatttgcatatgaacaacctgagagtcgaggacacggctgtttattactgtgcgagagagaggggcccctttgatggttttgatgtctggggccatgggacactggtcaccgtctcttca

SEQ ID NO: 7555 - DNA, 289 bp, Homo sapiens
  source 1..289: mol_type = other DNA
ttcagcgtctggattcaccttcagtacctatggcatgcactgggtccgccaggctccaggcaaggggctggagtgggtggcggttttgtggtctaatggaattaataactattattcagactccgtgaggggccgattcaccatctccagagacaattccaacaccctgtatctgcaaatgaacagcctgagaggcgaggacacggctgtttattactgtgcgagagaaagagggccctttgatggttttgatgtgtggggcctagggacaatggtcaccgtctcttca

SEQ ID NO: 7556 - DNA, 292 bp, Homo sapiens
  source 1..292: mol_type = other DNA
tgcagcgtctggattcaccttcaatacttgtggcatgcactgggtccgccaggctccaggcaaggggctggagtgggtggcagttatatggaagaatggaattaatcaatactatgcagactccgtcaagggccgattcatcttctccagagacgattccaagaatacactgtatctgcaaatgaatagtctgagagccgaggacacggctgtctattactgtgcgagagagaggggaccctttgatggttttgatgtctggggccaagggacaatggtcaccgtctctcca

SEQ ID NO: 7557 - DNA, 292 bp, Homo sapiens
  source 1..292: mol_type = other DNA
tgcagcgtctggattcatgttcaacacttgtggcatgcactgggtccgccaggctccaggcaaggggctggagtgggtggcagttatatggagtaatggaattaatcaatactatggagactctgtgaagggccgattcatcttctccagagacgattccaagaatatattgtatctccaaatgaatagcctgagagccgaggacacggctgtctattattgtgcgagagagaggggaccctttgatggttttgatgtctggggccaagggacaatggtcaccgtctcttca

SEQ ID NO: 7558 - DNA, 286 bp, Homo sapiens
  source 1..286: mol_type = other DNA
tacagcctctggattcacctttaatagctattacatgacctgggtccgccaggctccggggaaggggctggagtggttggccaacataagggaagatggaggtgagagattctatgtggactctgtgaagggccgattcaccatctccagagacaacgccaagaactcactgtatctgcaaatgagcagcctgagagccgaagacaccgctgtgtatttctgtgcgagaggcggtcatacatcacctgactactggggccagggaaccctggtcaccgtctcctca

SEQ ID NO: 7559 - DNA, 286 bp, Homo sapiens
  source 1..286: mol_type = other DNA
tgcagcctctggattcatcttgaataactattggatgacctgggtccgccaggctccagggaaggggctggagtgggtggccaacataaagcaagatggaagtgagaaatactatgtggactctgtgaagggccgattcaccattttcagagacaacgccaagaactcactgtatctgcaaatgagcaacctgagagccgaggacacggccgtgtattactgtgcgagaggaggacacaccagcccagactactggggccagggaaccctggtcaccgtctcctca

SEQ ID NO: 7560 - DNA, 292 bp, Homo sapiens
  source 1..292: mol_type = other DNA
tacagcttctggattcacctttggtgattatgctatgaactggttccgccaggctccagggaaggggctggagtgggtaggtttcattagaaccaaagcttatggtgggacaacagaatacgccgcgtctgtgaaaggcagattcaccatctcaagagatgattccaaaagcatcgcctatctgcagatgaacagcctgaaaaccgaggacacagccgtttattactgtcagggcagcagctggaactggttcgacccctggggccagggaaccctggtcaccgtctcctca

SEQ ID NO: 7561 - DNA, 292 bp, Homo sapiens
  source 1..292: mol_type = other DNA
cacagcctctggattcatctttggtgattatgttatgaactggttccgccaggctccagggaaggggctggagtgggtaggtttcattagaaataaagcttatggtgggtcaacagaatacgccgcgtctgtgaaaggcagattcaccatttcaagagatgattccaaaagcatcgcctatctgcaaatgaacaacctgaaaatcgaggacacagccgtctattattgtcagggcagcagctggaactggttcgacccctggggccagggaactctggtcaccgtctcctca

SEQ ID NO: 7562 - DNA, 292 bp, Homo sapiens
  source 1..292: mol_type = other DNA
tacagcttctggattcacctttggtgattacacaatgaactggttccgccagcctccagggaaggggctggagtgggtaggtttcattagaaccaaagcttctggtgggacgacagagtacgccgcgtctgtgaaaggcagattcaccatttcaagagatgattccaaaagcatcgcctatctacaaatgaacagcctgaaaaccgaggacacagccgtgtattactgtcagggcagcagctggaactggttcgacccctggggccggggaaccctggtcaccgtctcctca

SEQ ID NO: 7563 - DNA, 292 bp, Homo sapiens
  source 1..292: mol_type = other DNA
tacagcttctggattcacctttggtgattatgttatgaactggttccgccaggctccagggaaggggctggagtggataggtttcattagaaacaaagcttatggtgggtcaacagaatacgccgcgtctgtgaaaggcagattcaccatttcaagagatgattccaaaagcatcgcctatctgcaaatgaacagcctgaaaatcgaggacacagccgtgtattactgtcagggcagcagctggaactggttcgacccctggggccagggaaccctggtcaccgtctcctca

SEQ ID NO: 7564 - DNA, 292 bp, Homo sapiens
  source 1..292: mol_type = other DNA
tacagcttctggtttcacctttagtgattatactatgagctggttccgccaggctccagggaaggggctggagtgggtaggtttcattagaatcaaagcttatggtgggacaacagaatacgccgcgtctgtgaaaggcagattcacaatctcaagagatgattccgaaagcatcgcctatctgcaaatgaacagcctgaaaaccgaggacacagccgtatattactgtcagggcagcagctggaactggttcgacccctggggccagggaaccctggtcaccgtctcctca

SEQ ID NO: 7565 - DNA, 301 bp, Homo sapiens
  source 1..301: mol_type = other DNA
cactgtctctggtggctccatcagcagtggtagttactactggagctggatccggcagcccgccgggaagggactggagtggattgggcgtatctataccagtgggagcaccaactacaacccctccctcaagagtcgagtcaccatatcagtagacacgtccaagaaccagttctccctgaagctgagctctgtgaccgccgcagacacggccgtgtattactgtgcgagaagtcgcgattactactactactacggtatggacgtctggggccaagggaccacggtcaccgtctcctca

SEQ ID NO: 7566 - DNA, 301 bp, Homo sapiens
  source 1..301: mol_type = other DNA
cactgtctctggtggctccatcagcagtggtagttactactggagctggatccggcagcccgccgggaagggactggagtggattgggcgtatctataccagtgggagcaccaactacaacccctccctcaagagtcgagtcaccatatcagtagacacgtccaagaaccagttctccctgaagctgagctctgtgaccgccgcagacacggccgtgtattactgtgcgaggtcaagagattactactactactacggtatggacgtctggggccaagggaccacggtcaccgtctcctca

SEQ ID NO: 7567 - DNA, 304 bp, Homo sapiens
  source 1..304: mol_type = other DNA
tgcagcctctggattcttctttagcaactatgccatgagctgggtccgccaggctccagggaaggggctggagtgggtctcagctattagtggtggtgctgatagaacagacttcgcagactccgtgaagggccggttcaccatctccagagacaattccaggaagatgctgtttctacatatgaacagactgagagccgaggacacggccatatattattgtgcgaaagatgggtgggggtattccagtggtcggggtgcttttgatatctggggccaagggacaatggtcaccgtctcttca

SEQ ID NO: 7568 - DNA, 304 bp, Homo sapiens
  source 1..304: mol_type = other DNA
tgcagcctctggattcctctttagcaactatgccatgagctgggtccgccaggctccagggaaggggctggagtgggtctcagctattagtggtggtgctgatagcacaaacttcgcagactccgtgaagggccggttcaccatctccagagacaattccaggaacacgctgtatctgcatatgaacagcctgagagccgaggacacggccatatattattgtgcgaaagatgggtgggggtattccagtggtcggggtgcctttgatatctggggccaagggacaatggtcaccgtctcttca

SEQ ID NO: 7569 - DNA, 304 bp, Homo sapiens
  source 1..304: mol_type = other DNA
tgcagcctctggattcgtctttagcaaatatgccatgagctgggtccgccaggctccagggaaggggctagagtgggtctcaggtattagtggtggtgctgacagcacaaacttcgcagactccgtgaagggccggttcaccatttccagagacaattccaggaatatgctgtatctgcatatgaacagcctgagagccgaggacacggccatatattattgtgcgaaagatgggtgggggtattccagtggtcggggtgcttttgatatctggggccaagggacaatggtcaccgtctcttca

SEQ ID NO: 7570 - DNA, 304 bp, Homo sapiens
  source 1..304: mol_type = other DNA
tgcagcctctgaattcagttttagcagttatgccatgggctgggtccgccaggctccagggaaggggctggagtgggtctcaattattagtggtagtggtgatagtacagattacgctgactccgtgaagggccggttcaccatctccagagacaatagcaagaacacgctgtatctgcaaatgaacagactgagagccgaggacacggccatatattactgtgcgaaagatgggtgggggtacagcagtggccggggagcttttgatatctggggccaagggacaatggtcaccgtctcctca

SEQ ID NO: 7571 - DNA, 304 bp, Homo sapiens
  source 1..304: mol_type = other DNA
tgtagcctctgaattcagttttagcagttatgccatgggctgggtccgccaggctccagggaaggggctggagtgggtctcaattattagtggtagtggtgatagtacagattacgctgactccgtgaagggccggttcaccatctccagagacaataccaagaacacgctgtatctgcaaatgaacagactgagagccgaggacacggccatatattactgtgcgaaagatgggtgggggtacagcagtggccggggagcttttgatatctggggccaagggacaatggtcaccgtctcctca

SEQ ID NO: 7572 - DNA, 304 bp, Homo sapiens
  source 1..304: mol_type = other DNA
tgcagcctctgaattcagttttagcagttatgccatgggctgggtccgccaggctccagggaaggggctggagtgggtctcaattattagtggtagtggtgatagtatagattacgctgactccgtgaagggccggttcaccatctccagagacaataccaagaacacgctgtatctgcaaatgaacagactgagagccgaggacacggccatatattactgtgcgaaagatgggtgggggtacagcagtggccggggagcttttgatatctggggccatgggacgatggtcaccgtctcctca

SEQ ID NO: 7573 - DNA, 304 bp, Homo sapiens
  source 1..304: mol_type = other DNA
tgtagcctctgaattcagttttagcagttatgccatgggctgggtccgccaggctccagggaaggggctggagtgggtctcaattattagtggtagtggtgatagtacagattatgctgactccgtgaagggccggttcaccatctccagagacaataccaagaacacgctgtatctgcaaatgaacagactgagagccgaggacacggccatatattactgtgcgaaagatgggtgggggtacagcagtggccggggagcttttgatatctggggccaagggacaatggtcaccgtctcctca

SEQ ID NO: 7574 - DNA, 279 bp, Homo sapiens
  source 1..279: mol_type = other DNA
gcttctggatacaccttcaccggtcaccacatacactgggtgcgacagacccctggacaagggcttgaatggatgggaagaatcatgccctacgatggcagcacaacgtacgcacagaagttcctgggcagagtcaccatgaccagggacacgtccacgagcacagtctacatggaactgagcagcctcagatctgatgacacggccgtatattactgtgcgagggatacctatgggcatgactattggggccagggaacccgggtcaccgtctcctca

SEQ ID NO: 7575 - DNA, 279 bp, Homo sapiens
  source 1..279: mol_type = other DNA
gcttctggatacaccttcaccgatcaccacatacactgggtgcgacagacccctggacaagggcttgaatggatgggaagaatcatcccctacgatggcagcgcaacgtacgcacagaagttcctgggcagagtcaccatgaccagggacacgtccacgagcacagtctacatggagctgagcagcctcagatctgatgacacggccgtatattactgtgcgagggatacctatggccatgactattggggccagggaacccgggtcaccgtctcctca

SEQ ID NO: 7576 - DNA, 279 bp, Homo sapiens
  source 1..279: mol_type = other DNA
gcatctggatacaccttcaccgaccaccatatccactgggtgcggcaggcccccggacaagggcttgagtggatgggaaaaatcaccccttatgatggtagcacaatatacgcacagaagttccagaccagagtcaccatgaccagggacacgtccacgaggacagtctacatggtgctgagtgggctgagatatgaggacacggccgtgtattactgtgcgagagacacctatggccacgactactggggccagggaaccctggtcaccgtctcctca

SEQ ID NO: 7577 - DNA, 277 bp, Homo sapiens
  source 1..277: mol_type = other DNA
tgcaggctatggattctcctttagaaattatgacatgacctgggtccgccaggctccaggaaaggggctggagtgggtctcaacaattactagtggtggtaccacttattacgcagactccgtgaagggccggttcaccatctccagagacaattccgaagacaccctgtatctgcaaatgaacagcctgagagccgaggacacggccctatattattgtgcgaagggaagtggggttgactcctggggccagggagccctggtctccgtctcttca

SEQ ID NO: 7578 - DNA, 280 bp, Homo sapiens
  source 1..280: mol_type = other DNA
tgcagcctctggattcacctttaccaactatgccatgagctgggtccgccagcctccagggaaggggctggagtgggtctcgagtgttcgagggagcggtgataacacatactacgcagattccgttaagggccggttcaccatctccagagacagttccaagaacactctgtatctgcaaatgagcggcctgagagacgacgacacggccgtctattactgtgcgaaagggtccggtgtggactcctggggccagggaaccctggtcaccgtctcctca

SEQ ID NO: 7579 - DNA, 307 bp, Homo sapiens
  source 1..307: mol_type = other DNA
tgcagcgtctggattcaccttcagtagctatggcatgcactgggtccgccaggctccaggcaaggggctggagtgggtgggagttatttggaatgatggacgtcttaaatactatacagactccgtgaagggccgattcaccatctccagagacaattccgacaacacgctgtatctgcaaatggacagcctgagagccgaggacacggctgtatattattgtgcgagatctgttgtagtagtaccaggtgctatctcgaattggttcgacccctggggccagggaaccctggtcaccgtctcctca

SEQ ID NO: 7580 - DNA, 307 bp, Homo sapiens
  source 1..307: mol_type = other DNA
tgcagcgtctggattcaccttcagtgcttatggcatgcactgggtccgccaggctccaggcaaggggctggagtgggtggcagttatatggtatgatggaagtgataaatactatgcagactccgtgaagggccgattcaccatctccagagacaattccaagaacacgctctatctacaaatgaacagcctgagagccgaggacacggctctgtattactgtgcgaggtctgtcgtagtagtgccaggtgctatctcaaactggttcgacccctggggccagggaaccctggtcaccgtctcctca

SEQ ID NO: 7581 - DNA, 310 bp, Homo sapiens
  source 1..310: mol_type = other DNA
cactgtctctggtggctccatcagcagtattagttactactggggctggatccgccagcccccagggaaggggctggagtggattgggagtatcctttataatgggagaatcttctacaacccgtccctcaagagtcgagtcaccatatccgtagacacgtccaagaaccagttctccctgaaggtgagctctgtgaccgccgcagacacggctgtgtattactgtgcgagacatggggattactatggttcgcagagttattacggtatggacgtctggggccaagggaccacggtcaccgtctcctca

SEQ ID NO: 7582 - DNA, 310 bp, Homo sapiens
  source 1..310: mol_type = other DNA
cactgtctctggtggctccatcagcagtattagttactactggggctggatccgccagcccccagggaaggggctggagtggattgggagtatcctttataatgggagagtattctacaatgcgtccctcaagagtcgagtcaccatatccgtagacacgtccaggaaccagttctccctgaagctgagctctgtgaccgccgcagacacggctgtctattactgtgcgagacatggggattactatggttcccagagttactatggtatggacgtctggggccaagggaccgcggtcaccgtctcctca

SEQ ID NO: 7583 - DNA, 310 bp, Homo sapiens
  source 1..310: mol_type = other DNA
cattgtctctggtggctccatcagcagtagtagttactactggggctggatccgccagcccccagggaaggggctggagtggattgggagtatctattatagtgggcgcaccttttacaacccgtccctcaagagtcgagtcaccatatccgtagatacgtccaagaaccagttctccctgaaggtgagctctgtgaccgccgcggacacggctgtgtattactgtgcgcgacatggggattactatggttcgcagagttattacggtatggacgtctggggccaagggaccacggtcaccgtctcctca

SEQ ID NO: 7584 - DNA, 280 bp, Homo sapiens
  source 1..280: mol_type = other DNA
tgcagcctctggactcacctttagtatatatcgcatgagctgggtccgccaggctccagggaaggggctggagtgggtggccaacataaaggaagatggaagtgaaaaatactatctggactctgtgaagggccggttcaccatctccagagacaacgccaagaactcactgtatctgcaaatgaacagcctgagagtcgaggacacggctgtgtattactgtgcgagagggacctccctgggcgtctggggcaaagggaccacggtcatcgtctcctca

SEQ ID NO: 7585 - DNA, 280 bp, Homo sapiens
  source 1..280: mol_type = other DNA
tgcagcctctggattcacctttagtacctattggatgaattgggtccgacaggctccagggaaggggctggagtgggtggccaacataaaggcagatggaagtgagaaaaactttgtggactctgtgaagggccgattcaccatctccagagacaacgccaagaactcactatatctgcaaatgaacagcctgagagccgaggacacggctctgtattactgtgcgagaggtaccagcctgggcgtctggggccaagggaccacggtcatcgtcccctca

SEQ ID NO: 7586 - DNA, 289 bp, Homo sapiens
  source 1..289: mol_type = other DNA
tgcagcctctggattcactttcaataacgcctggatgagctgggtccgccaggctccagggaaggggctggagtgggttggccgtattagaaccaaagctgatggtgagccaacagactacgctgcacccgttaaaggcagattcaccatctcaagagatgattcaaaaaacacgctgtatctgcaaatgaacagcctgaaaaccgaggacacagccgtctattactgtaccacaagatcctctcaggggggctactggggccagggaaccctggtcaccgtctcctca

SEQ ID NO: 7587 - DNA, 289 bp, Homo sapiens; identical to SEQ ID NO: 7586
  source 1..289: mol_type = other DNA

SEQ ID NO: 7588 - DNA, 289 bp, Homo sapiens
  source 1..289: mol_type = other DNA
tgcagcctctggattcactttcagtgacgcctggatgagttgggtccgccaggctccagggaaggggctggagtgggttggccgtattaaaagcaaaactggtggtgcgacaacagactacgctgcacccgtgaaaggcagattcaccatctcaagagatgattcaagaaacacactgtatctgcaaatgaacaccctgaaaaccgaggacacagccgtgtatttctgtaccacccgtagcagccaaggaggctactggggccagggaaccctggtcaccgtctcctca

SEQ ID NO: 7589 - DNA, 289 bp, Homo sapiens
  source 1..289: mol_type = other DNA
tgcagcctctggattcactttcagtgacgcctggatgagctgggtccgccaggctccagggaaggggctggagtgggttggccgtattaaaagcaaaactgctggtgcgacaacagactacgctgcacccgtgaaaggcagattcaccatctcaagagatgattcaaaaaacacactgtatctgcaaatgaacagcctgaaaaccgaggacacagccgtgtattactgtaccacccgtagcagccaaggaggctactggggccagggaaccctggtcaccgtctcctca

SEQ ID NO: 7590 - DNA, 289 bp, Homo sapiens
  source 1..289: mol_type = other DNA
tgcagcctctggattcactttcagtgacgcctggatgagctgggtccgccaggctccagggaaggggctggagtgggttggccgtattaaaagcaaaactggtggtgcgacaacagagtacgctgcacccgtgaaaggcagattcaccatctcaagagatgattcaagaaacacactgtatctgcaaatgaacaccctgaaaaccgaggacacagccgtgtattactgtaccacccgtagcagccaaggaggctactggggccagggaaccctggtcaccgtctcctca

SEQ ID NO: 7591 - DNA, 289 bp, Homo sapiens
  source 1..289: mol_type = other DNA
tgcagcctctggattcactttcagtgacgcctggatgagctgggtccgccaggctccagggaaggggctggagtgggttggccgtattaaaagcaaaactggtggtgcgacaacagactacgctccacccgtgaaaggcagattcaccatctcaagagatgattcaagaaacacactgtatctgcaaatgaacaccctgaaaaccgaggacacagccgtgtattactgtaccacccgtagcagccaaggaggctactggggccagggaaccctggtcaccgtctcctca

SEQ ID NO: 7592 - DNA, 289 bp, Homo sapiens
  source 1..289: mol_type = other DNA
tgcagcctctggattcactttcagtgacgcctggatgagctgggtccgccaggctccagggaaggggctggaatgggttggccgtattaaaagcaaaactggtggtgcgacaacagactacggtgcacccgtgaaaggcagattcaccatctcaagagatgattcaagaaacacactgtatctgcaaatgaacaccctgaaaaccgaggacacagccgtgtattactgtaccacccgtagcagccaaggaggctactggggccagggaaccctggtcaccgtctcctca

SEQ ID NO: 7593 - DNA, 298 bp, Homo sapiens
  source 1..298: mol_type = other DNA
tgtagtgtctggattcagcttcagtgactatggcatgcactgggtccgccaggctccaggcaaggggctggagtgggtggcagttatatggtatgatggaagtaataaatactatgcagactccgtgaagggccgattcaccatctccagagacaactccaagaacacgctgtatctccaaatgaacagcctgagagccgaggacacggctgtgtattactgtgcgagagattcgagtggtggtgactggaggtactttgactactggggccagggaaccctggtcaccgtctcctca

SEQ ID NO: 7594 - DNA, 298 bp, Homo sapiens
  source 1..298: mol_type = other DNA
tgtagtgtctggattcaccttcggtgactatggcatgcactgggtccgccaggctccaggcaaggggctggagtgggtggcagttatatggcatgatggaagtaataaatactatgcagactccgtgaagggccgattcaccacctccagagacaattcccagaacacggtgtatctccagatggacaggctgagagccgaggacacggctgtgtattattgtgcgagagattcgagtggtggtgactggaggtactttgactactggggccagggaaccctggtcaccgtctcctca

SEQ ID NO: 7595 - DNA, 298 bp, Homo sapiens
  source 1..298: mol_type = other DNA
tgcagcgtctggattcaccttcaatagatatggcatacactgggtccgccaggctccaggcaagggactggagtgggtggcagttatatggtatgatggaaggaataaatactatgcagactccgtgaagggccgattcaccatctccagagacaattccaagaacacgttgtatctggaaatgaacagcctgagagccgaggacacggctgtgtactactgtgcgagagattcttccgggggtgactggcgctactttgactactggggccagggaaccctggtcaccgtctcctca

SEQ ID NO: 7596 - DNA, 298 bp, Homo sapiens
  source 1..298: mol_type = other DNA
tgcagcgtctggattcagcttcagtgactatggcatgcactgggtccgccaggctccaggcaaggggctggagtggctggcacgtatatggtatgatgggagtaatgaatactatgcagactccctgaagggccgattcaccatctccagagacaattccaagaacacactctatctccaaatgaacagcctgagagccgaggacacggctatttattactgtgcgagagatagtagtggcggggattggaggtactttgactactggggccagggaatcttggtcaccgtctcctca

SEQ ID NO: 7597 - DNA, 298 bp, Homo sapiens
  source 1..298: mol_type = other DNA
tgtagtgtctggattcagcttcagtgactatggcatgcactgggtccgccaggctccaggcaagggactggagtgggtggcacgtatatggtatgacggaagtaatgaatactatgcagactccgtgaagggccgattcaccatctccagagacaattccaagaacacgctgtatctccaaatgaacagtctgagaggcgaggacacggctgtgtattactgtgcgagagactcgagtggtggtgactggaggtactttgactactggggccagggaaccctggtcaccgtctcctca

SEQ ID NO: 7598 - DNA, 280 bp, Homo sapiens
  source 1..280: mol_type = other DNA
tgtagtctctgggttcagcgtcagtaataattacatgagttgggtccgccgggctccagggagggggctgcagtgggtctcagttattcatgacgatggtaaaacatactacctagactccgtgaagggccgattcaccatctccagagacaagtccaagaacaccttgtatcttcaaatgagcagcctgacagccgaggacacggccgtgtattattgtgtgagacaagcagggggtttcgactactggggccagggaaccccggtcaccgtctcctca

SEQ ID NO: 7599 - DNA, 280 bp, Homo sapiens
  source 1..280: mol_type = other DNA
tgaagtctctgggttcgccgtcggtaacaattacctgagctgggtccgccaggctccagggaaggggctgcagtgggtctcagttattcatgacgatggtaaaatatactacgcagactccgtgaagggccgattcaccatctcccgagacaattccaagaacacactgtatcttcaaatgcacagcctgagagtcgaggacacggccgtgtattactgcgtgagacaggcgggggggtttgactattggggccagggaaccctggtcaccgtctcctca

SEQ ID NO: 7600 - DNA, 280 bp, Homo sapiens
  source 1..280: mol_type = other DNA
tgcagtctctgggtttaccgtcagttccagctacatgagctgggtccgccaggatccagggaaggggctggagtgggtctcaactattcataaggacggcgccacacactacgcagactccgtgaagggccgatacaccatctccagagacacttccaggaacatggtgtattttgaaatgaacagcctgagagtcgacgacacggccctgtattactgtgtgagacaggcggggggatttgattattggggccagggaactctggtcaccgtctcctca

SEQ ID NO: 7601 - DNA, 280 bp, Homo sapiens
  source 1..280: mol_type = other DNA
tgcagtctctgggttcgccgtcggtaacaattacctgagctgggtccgccaggctccagggaaggggctgcagtgggtctcagttattcatgacgatggtaaaatatactacgcagactccgtgaagggccgattcaccatctccagagacaattccaggaacacactgtatcttcaaatgcacagcctgagagccgaggacacggccgtgtattactgtgtgagacaggcgggggggtttgactattggggccagggaaccctggtcaccgtctcctca

SEQ ID NO: 7602 - DNA, 283 bp, Homo sapiens
  source 1..283: mol_type = other DNA
tgtagcctctgggttcagcgtcagtaacaactacatgagttgggtccgccaggctccagggaaggggctggagtgggtctcagttattcatgacgatggtaaaacaatatactacgcagactccgtgaagggccgattcaccatctccagagacaattccaagaacaccttgtatcttcaaatgagcagcctgagagccgaggacacggccgtgtattattgtgtgagacaagcagggggtttcgactactggggccagggaaccctggtcaccgtctcctca

SEQ ID NO: 7603 - DNA, 280 bp, Homo sapiens
  source 1..280: mol_type = other DNA
tgcagcctctgggttcaccgtcagtaacaattacttgagctgggtccgccaggctccagggaaggggctggagtgggtctcagttattcatgacgatggtaggacacactacgcagactccgtgaagggccgattcaccatctccagagacaattccaagaacactttcgatcttcaaatgaataccctgagagccgaggacacggccctatattattgtgtgagacaggccgggggctttgactactggggccagggaaccctggtcaccgtctcctca

SEQ ID NO: 7604 - DNA, 283 bp, Homo sapiens
  source 1..283: mol_type = other DNA
tgcagcctctggattcaccttcagtagtcattggatgagctgggtccgccaggctccagggaaggggctggagtgggtggccgacataaatcaagatggaagtgagaaacactatgtggactctgtgaagggccgattcaccatctccagagacaacgccaagaactcactgtatttgcagatgaacagcctgagagtcgaggacacggctacatattactgtgcgagagatccgagattgttccactactggggccagggcacggtggtcaccgtctcctcg

SEQ ID NO: 7605 - DNA, 283 bp, Homo sapiens
  source 1..283: mol_type = other DNA
tgtagcctctggattcacacttagtagtcactggatgagctgggtccgccaggctccagggaaggggctggagtgggtggccgacataaatcaagatgggagtgagaagcactatgtggactctgtgaagggccgattcaccatctccagagacaacgcccagaacatcctgtatttgcaaatgaacagcctgagagtcgaggacacggccgtgtattactgtgcgagagacccccggctcttccattattggggccagggcaccctggtcaccgtctcctct

SEQ ID NO: 7606 - DNA, 283 bp, Homo sapiens
  source 1..283: mol_type = other DNA
tgtagcctctggattcacacttagtagtcattggatgagctgggtccgccaggctccagggaaggggctggagtgggtggccgacataaatcaagatgggagtgagaagcactatgtggactctgtgaagggccgattcaccatctccagagacaacgcccagaacatcctgtatttgcaaatgaacagcctgagagtcgaggacacggccgtgtattactgtgcgagagacccccggctcttccattattggggccagggcaccctggtcaccgtctcctct

SEQ ID NO: 7607 - DNA, 277 bp, Homo sapiens
  source 1..277: mol_type = other DNA
cactgtcgctggtggctccatcagcagtgatacttactactggaactggatccggcagcccgccgggaagggactggagtggattgggcgtatctatagcagtgggagcaccaactacaatccccccctcaagagtcgagtcaccatgtcagtagacacgtccaagaaccagttctccctgaatctgagctctgtgaccgccgcagacacggccgtgtattactgtgcgagaggggtggccgtctggggccaggggaccacggtcaccgtctcctca

SEQ ID NO: 7608 - DNA, 277 bp, Homo sapiens
  source 1..277: mol_type = other DNA
cactgtctctggtggctccatcagcagtgctacttactactggagctggatccggcagcccgccgggaagggactggagtggattgggcgtatctttgccagtgggaccaccaactacaacccctccctcaacagtcgagtcaccatattaatagacacgtccaggaaccagttctccctgaagctgagttctgtgaccgccgcagacacggccgtgtattactgtgcgagaggggtggccgtctggggccaagggaccacggtcaccgtctcctca

SEQ ID NO: 7609 - DNA, 277 bp, Homo sapiens
  source 1..277: mol_type = other DNA
cactgtctctggtggctccatcagcagtgctacttactactggagctggatccggcagcccgccgggaagggactggagtggattgggcgtatctttgccagtggaaccaccaactacaacccctccctcaacagtcgagtcaccatattaatagacacgtccaggaaccagttctccctgaagctgagttctgtgaccgccgcagacacggccgtgtattactgtgcgagaggggtggccgtctggggccaagggaccacggtcaccgtctcctca

SEQ ID NO: 7610 - DNA, 277 bp, Homo sapiens
  source 1..277: mol_type = other DNA
cactgcctctggtggctccatcagcagtgctacttactactggagctggatccggcagcccgccgggaagggactggagtggattgggcgtatctttgccagtgggaccaccaactacaacccctccctcaacagtcgagtcaccatattaatagacacgtccaggaaccagttctccctgaagctgagttctgtgaccgccgcagacacggccgtgtattactgtgcgagaggggtggccgtctggggccaagggaccacggtcaccgtctcctca

SEQ ID NO: 7611 - DNA, 277 bp, Homo sapiens
  source 1..277: mol_type = other DNA
cactgtctctggtggctccatcagcagtgctacttactactggagctggatccggcagcccgccgggaagggactggagtggattgggcgtatctttgccagtgggaccaccaactacaacccctccctcaacagtcgagtcaccatattaatagacacgtccaggaaccagttctccctgaagctgagttctgtgaccgccgcagacacggccgtgtattactgtgcgagaggggtggccgtctggggccaagggaccacggtcaccatctcctca

SEQ ID NO: 7612 - DNA, 277 bp, Homo sapiens
  source 1..277: mol_type = other DNA
cactgtctctggtggctccatcagcagtgctacttactactggagctggatccggcagcccgccgggaagggactggagtggattgggcgtatctttgccagtgggaccaccaactacaacccctccctcaacagtcgagtcaccatattaatagacacgtccaggaaccagttctccctgaagctgagttctgtgaccgccgcagacacggccgtgtattattgtgcgagaggggtggccgtctggggccaagggaccacggtcaccgtctcctca

SEQ ID NO: 7613 - DNA, 292 bp, Homo sapiens
  source 1..292: mol_type = other DNA
tgcagcctctggattcaccttcagtaactactggatgcactgggtccgccgagctccagggaaggggctggtgtgggtcgcacgtattgatactaatggacgtgacataacctacgcggactccgtgaagggccgattcaccatctccagagacaacgccaagaacacgctgtttctgcaaatgaacagtctgagagccgacgacacggctgtgtattattgtgcaagactatatagtggctatgacttctttgattactggggcctgggaaccctggtctccgtctcctca

SEQ ID NO: 7614 - DNA, 292 bp, Homo sapiens
  source 1..292: mol_type = other DNA
tgcagtctctggattcaccttcagtaactactggatgcactgggtccgccgagctccagggaaggggctggtgtgggtcgcacgtattaatactaatggacgtgacataacctacgcggactccgtgaagggccgattcaccatctccagagacaacgccaagaacacgctgtttctgcaaatgaacagtctgagagccgacgacacggctgtgtattattgtgcaagactatatagtggctatgacttctttgattactggggcctgggaaccctggtctccgtctcctca

SEQ ID NO: 7615 - DNA, 292 bp, Homo sapiens
  source 1..292: mol_type = other DNA
ttcagtctctggattcaccttcagtagttactggatgcactgggtccgccgagctccagggaaggggctggtgtgggtctcacgtatggacactaatgggcgtgacataagctacgcggactccgtgaagggccgattcaccatctccagagacaacgccaagaacacgctgtatctgcaaatgaacagtctgagagccgacgacacggctgtgtattattgtgcaagactatatagtgggtatgacttctttgactattggggcctgggaaccctagtctccgtctcctca

SEQ ID NO: 7616 - DNA, 292 bp, Homo sapiens
  source 1..292: mol_type = other DNA
tgcagcctctggattcactttcagtaactactggatgcactgggtccgccaagttccagggaaggggctggtgtgggtctcacgtactgatagtgatgggagtgacataagctacgcggactctgtgaagggccgattcaccatctccagagacaacgccaagaacacgctgtatttgcaaatgaacaatctgagagccgaggacacggctgtgtattactgtgcaagattatatagtggctacgatttctttgactactggggccagggaaccctggtcaccgtctcctca

SEQ ID NO: 7617 - DNA, 292 bp, Homo sapiens
  source 1..292: mol_type = other DNA
tgcagtctctggattcaccttcagtaactactggatgcactgggtccgccgagctccagggaaggggctggtgtgggtcgcacgtatgaatactgatggacgtgacataacctacgcggactccgtgaagggccgattcaccatctccagagacaacgccaagaacacgctgtttctgcaaatgaacagtctgagagccgacgacacggctgtgtattattgtgcaagactatatagtggctatgacttctttgattactggggcctgggaaccctggtctccgtctcctca

SEQ ID NO: 7618 - DNA, 292 bp, Homo sapiens
  source 1..292: mol_type = other DNA
tgcagtctctggattcaccttcagtaattactggatgcactgggtccgccgagctccagggaaggggctggtgtgggtcgcacgtatggatactaatggacgcgacataagctacgcggactccgtgaggggccgattcaccatctccagagacaacgccaagaacactctgtttctgcaaatgaacagtctgagagccgacgacacggctgtgtattattgtgcaagactatatagtggctatgacttctttgattattggggcctgggaaccctggtctccgtctcctca

SEQ ID NO: 7619 - DNA, 292 bp, Homo sapiens
  source 1..292: mol_type = other DNA
tgcagtctctggattcaccttcagtaattactggatgcactgggtccgccgagctccagggaaggggctggtgtgggtcgcacgtatggatactaatggacgcgacataagctacgcggactccgtgaggggccgattcaccatctccagagacaacgccaagaacactctgtttctgcaaatgaacagtctgagagtcgacgacacggctgtgtattattgtgcaagactatatagtggctatgacttctttgattactggggcctggaaaccctggtctccgtctcctca

SEQ ID NO: 7620 - DNA, 292 bp, Homo sapiens
  source 1..292: mol_type = other DNA
tgcagtctctggattcaccttcagtagttactggatgcactgggtccgccgagctccagggaaggggctggtgtgggtctcacgtattgacactaatgggcgtgacataagctacgcggactccgtgaagggccgattcaccatctccagagacaacgccaagaacacgctgtatctgcaaatgaacagtctgagagccgacgacacggctgtgtattattgtgcaagactatatagtgggtatgacttctttgactattggggcctgggaaccctagtctccgtctcctca

SEQ ID NO: 7621 - DNA, 292 bp, Homo sapiens
  source 1..292: mol_type = other DNA
tgtagtctctggattcaccttcagtaactactggatgcactgggtccgccaacctccagggaaggggctggtgtgggtcgcacgtatgaatactgatggacgtgacataacctacgcggactccgtgaagggccgattcaccatctccagagacaacgccaagaacacgctgtttctgcaaatgaacagtctgagagccgacgacacggctgtgtattattgtgcaagactatatagtggctatgacttctttgattactggggcctgggaaccctggtctccgtctcctca

SEQ ID NO: 7622 - DNA, 292 bp, Homo sapiens
  source 1..292: mol_type = other DNA
tgcagtctctggattcaccttcagtaattactggatgcactgggtccgccgagctccagggaaggggctggtgtgggtcgcacgtatggatactaatggacgcgacataagctacgcggactccgtgaggggccgattcaccatctccagagacaacgccaagaacactctgtttctgcaaatgaacagtctgagagtcgacgacacggctgtgtattattgtgcaagactatatagtggctatgacttctttgattactggggcctgggaaccctggtctccgtctcctca

SEQ ID NO: 7623 - DNA, 292 bp, Homo sapiens
  source 1..292: mol_type = other DNA
tgcagtctctggattcaccttcagtaactactggatgcactgggtccgccgagctccagggaaggggctggtgtgggtcgcacgtatgaatactgatggacgtgacataacctacgcggactccgtgaagggccgattcaccatctccagagacaacgccaagaacacactgtttctgcaaatgaacagtctgagagccgacgacacggctgtgtattattgtgcaagactatatagtggctatgacttctttgattactggggcctgggaaccctggtctccgtctcctca

SEQ ID NO: 7624 - DNA, 283 bp, Homo sapiens
  source 1..283: mol_type = other DNA
cgctgtctatggtgggtccttcagtggttactactggagctggatccgccagcccccagggaaggggctggagtggattggggaaatcaatcatagtggaagctcctactacaacccgtccctcaagagtcgactcaccatatcagtagacacgtccaagaaccagttctccctgaagctgagctctgtgaccgccgcggacacggctgtgtattactgtgcgagaaagggtgagcagctctggcactactggggccagggaaccctggtcaccgtctcctca

SEQ ID NO: 7625 - DNA, 283 bp, Homo sapiens
  source 1..283: mol_type = other DNA
cgctgtctatggtgggtccttcagtggttactactggagctggatccgccagcccccagggaaggggctggagtggattggggaaatcaatcatagtagaagcaccaactacaatccgtccctcaagagtcgagtcaccatatcagtagacacgtccaagaaccagttctccctgaagctgagctctgtgaccgccgcggacacggctgtgtattactgcgcgagaaagggtgagcagctctggcactactggggccagggaggtctggtcaccgtctcctca

SEQ ID NO: 7626 - DNA, 283 bp, Homo sapiens
  source 1..283: mol_type = other DNA
cgctgtctatggtgggtccttcagtgattactactggagctggatccgccagcccccagggaaggggctggagtggattggggaaatcaatcatagtggaagcacctactacaacccgtccctcaagagtcgactcaccatatcagtagacacgtccaagaaccagttctccctgaagctgagctctgtgaccgccgcggacacggctgtgtattactgtgcgagaaagggtgaacagctctggcactactggggccagggaaccctggtcaccgtctcctca

SEQ ID NO: 7627 - DNA, 283 bp, Homo sapiens
  source 1..283: mol_type = other DNA
cgctgtctatggtgggtccttcagtggttactactggagttggatccgccagcccccagggaagggactggagtggattggggaaatcaatcatagtgaaagcacctactacaacccgtccctcaagagtcgagtcaccatatcagtagacacgtccaagaaccagttctccctgaagctgagctctgtgaccgccgcggacacggctgtgtattactgtgcgagaaagggtgagcagctctggcactactggggccagggaaccctggtcaccgtctcctca

SEQ ID NO: 7628 - DNA, 283 bp, Homo sapiens; identical to SEQ ID NO: 7626
  source 1..283: mol_type = other DNA

SEQ ID NO: 7629 - DNA, 283 bp, Homo sapiens; identical to SEQ ID NO: 7624
  source 1..283: mol_type = other DNA

SEQ ID NO: 7630 - DNA, 283 bp, Homo sapiens; identical to SEQ ID NO: 7627
  source 1..283: mol_type = other DNA

SEQ ID NO: 7631 - DNA, 283 bp, Homo sapiens
  source 1..283: mol_type = other DNA
cgctgtctatggtgggtccttcagaggttactactggagctggattcgccagcccccagggaaggggctggagtggattggggaaatcaatcatagtagaagcaccaactacaacccgtccctcaagagtcgagtcaccatatcagtagacgcgtccaagaaccagttctccctgaaggtgagctctgtgaccgccgcggacacggctgtgtattactgtgcgagaaagggtgagcagctctggcactactggggccagggaaccctggtcaccgtctcctca

SEQ ID NO: 7632 - DNA, 283 bp, Homo sapiens
  source 1..283: mol_type = other DNA
cgctgtctatggtgggtccttcagtggttactactggagctggatccgccagcccccagggaaggggctggagtggattggagaaatcaatcacaatagaatcacctactacaacccgtccctcaagagtcgagtcaccatatcagtagacacgtccaagaaccagttctccctgaagctcagctctgtgaccgccgcggacacggctgtgtattactgtgcgagaaagggtgagcagctctggcactactggggccagggaaccctggtcaccgtctcctca

SEQ ID NO: 7633 - DNA, 283 bp, Homo sapiens
  source 1..283: mol_type = other DNA
cgctgtctatggtgggtccttcagtggttactactggagctggatccgccagcccccagggaaggggctggagtggattggggaaatcaatcatagtggaagcacctactccaacccgtccctcaacagtcgagtcaccatatcagtagacacgtccaagaaccagttctccctgaagttgagctctgtgaccgccgcggacacggctgtgtattactgtgcgagaaagggtgagcagctctggcactactggggccagggaaccctggtcaccgtctcctca

SEQ ID NO: 7634 - DNA, 283 bp, Homo sapiens
  source 1..283: mol_type = other DNA
cgctgtctatggtgggtcgttcagtggttactactggagctggatccgccagcccccagggaaggggctggagtggattggggaaatcaatcatagtagaaggaccaactacaacccgtccctcaagagtcgactcaccatatcagtagacacgtccaagaaccagttctccctgaagctgagttctgtgaccgccgcggacacggctgtgtattactgtgcgagaaagggtgagcagctctggcactactggggccagggaaccctggtcaccgtctcctca

SEQ ID NO: 7635 - DNA, 283 bp, Homo sapiens; identical to SEQ ID NO: 7634
  source 1..283: mol_type = other DNA

SEQ ID NO: 7636 - DNA, 283 bp, Homo sapiens
  source 1..283: mol_type = other DNA
cgctgtctatggtgggtccttcagtgattactactggagctggatccgccagcccccagggaaggggctggagtggattggggaaatcaatcataaaagaatcaccaactacaacccgtccgtcaagagtcgagtcaccatatcagtagacacgtccaagaaccagttctccctgaagctgagctctgtgaccgccgcggacacggctgtgtattactgtgcgagaaagggtgagcagctctggcactactggagccagggaatcctggtcaccgtctcctca

SEQ ID NO: 7637 - DNA, 283 bp, Homo sapiens
  source 1..283: mol_type = other DNA
cgctgtctatggtgggtccttcagtggttactactggagttggatccgccagcccccagggaagggactggagtggattggggaaatcaatcatagtgaaagcacctactacaacccgtccctcaagagtcgagtcaccatatcagtagacacgtccaagaaccagttctccctgaagctgagctctgtgaccgccgcggacacggctgtgtattactgtgcgagaaagggtgagcaactctggcactactggggccagggaaccctggtcaccgtctcctca

SEQ ID NO: 7638 - DNA, 283 bp, Homo sapiens
  source 1..283: mol_type = other DNA
cgctgtctatggtgggtccttcagtgattactactggagctggatccgccagcccccagggaaggggctggagtggattggggaaatcaatcatagtggaagcacctactacaacccgtccctcaagagtcgactcaccatatcagtagacacgcccaagaaccagttctccctgaagctgagctctgtgaccgccgcggacacggctgtgtattactgtgcgagaaagggtgaacagctctggcactactggggccagggaaccctggtcaccgtctcctca

SEQ ID NO: 7639 - DNA, 283 bp, Homo sapiens
  source 1..283: mol_type = other DNA
cgctgtctatggtgggtccttcagtgcttactactggagctggatccgccagcccccagggaaggggctggagtggattggggaaatcaatcatagtagaagcacctactacaatccgtccctcaagagtcgagtcaccatatcagtagacacgtccaagaaccagttctccctgaagctgagctctgtgaccgccgcggacacggctgtgtattactgcgcgagaaagggtgagcagctctggcactactggggccagggaggtctggtcaccgtctcctca

SEQ ID NO: 7640 - DNA, 283 bp, Homo sapiens; identical to SEQ ID NO: 7633
  source 1..283: mol_type = other DNA

SEQ ID NO: 7641 - DNA, 283 bp, Homo sapiens
  source 1..283: mol_type = other DNA
cgctgtctatggtgggtccttcagaggttactactggagctggattcgccagcccccagagaaggggctggagtggattggggaaatcaatcatagtagaagcaccaactacaacccgtccctcaagagtcgagtcaccatatcagtagacgcgtccaagaaccagttctccctgaaggtgagctctgtgaccgccgcggacacggctgtgtattactgtgcgagaaagggtgagcagctctggcactactggggccagggaaccctggtcaccgtctcctca

SEQ ID NO: 7642 - DNA, 283 bp, Homo sapiens; identical to SEQ ID NO: 7625
  source 1..283: mol_type = other DNA

SEQ ID NO: 7643 - DNA, 283 bp, Homo sapiens
  source 1..283: mol_type = other DNA
cgctgtctatggtgggtccttcagtggttactactggagctggatccgccagccaccaggaaaggggctggagtggattggggagatcaatcatggtggaggcaccaattacaacccgtccctcaagagtcgagtcgccatatcactagccacgtccaagaaccagttctccctgaagctgagctctgtgaccgccgcggacacggctgtgtattactgcgcgagaaagggtgagcagctctggcactactggggccagggaggtctggtcaccgtctcctca

SEQ ID NO: 7644 - DNA, 283 bp, Homo sapiens
  source 1..283: mol_type = other DNA
cgctgtctatggtgggtccttcagtggttactactggagctggatccgccagcccccagggaaggggctggagtggattggcgaaatcaatcatattagagtcaccaactacaacccgtccctcaagagtcgagtcaccatatcagtagacacgtccaagaaccagtgctccctgaagctgagcgctgtgaccgccgcggacacggctgtgtattactgtgcgagaaagggtgagcagctctggcactactggagccagggaaccctggtcaccgtctcctca

SEQ ID NO: 7645 - DNA, 283 bp, Homo sapiens
  source 1..283: mol_type = other DNA
cgctgtctatggtgggtccttcagtggttactactggagctggatccgccagcccccagggaaggggctggagtggattggggaaataaatcatagtagaagcaccaactacaacccgtccctcaagagtcgagtcaccatatcagtagacacgtccaagaaccagttctccctgaagctgagctctgtgaccgccgcggacacggctgtgtattactgtgcgagaaagggtgagcaactctggcactactggagccagggaaccctggtcaccgtctcctca

SEQ ID NO: 7646 - DNA, 283 bp, Homo sapiens
  source 1..283: mol_type = other DNA
cgctgtctatggtgggtccttcagtggttactactggagctggatccgccagcccccagggaaggggctggagtggattggggaaatcaatcatagtagaagaacctactacaacccgtccctcaagagtcgagtcaccatatcagtagacacgtccaagaaccagttctccctgaagctgagctctgtgaccgccgcggacacggctgtgtattactgtgcgagaaagggtgagcagctctggcactactggggccagggaaccctggtcaccgtctcctca

SEQ ID NO: 7647 - DNA, 283 bp, Homo sapiens
  source 1..283: mol_type = other DNA
cgctgtctatggtgggtccttcagtggttactactggagctggatccgccagcccccagggaaggggctggagtggattggggaaatcaatcatagtagaagcaccaactacaacccgtccctcaagagtcgagtcaccatatcagtagacaggtccaagaaccagttctccctgaagctgagctctgtgaccgccgcggacacggctgtgtattactgtgcgagaaagggtgaacagctctggcactactggggccagggaaccctggtcaccgtctcctca

SEQ ID NO: 7648 - DNA, 283 bp, Homo sapiens
  source 1..283: mol_type = other DNA
cgctgtctatggtgggtccttcagaggttactactggagctggattcgccagcccccagggaaggggctggagtggattggggaaatcaatcatagtagaagcaccaactacaacccgtccctcaagagtcgagtcaccatatcagtagacgcgtccaagaagcaggtctccctgaaggtgagctctgtgaccgccgcggacacggctgtgtattactgtgcgagaaagggtgagcagctctggcactactggggccagggaaccctggtcaccgtctcctca

SEQ ID NO: 7649 - DNA, 283 bp, Homo sapiens
  source 1..283: mol_type = other DNA
cgctgtctatggtgggtccttcagtggttattactggagctggatccgccagcccccagggaaggggctggagtggattggggaaatcaatcatagtggaagctcctactacaacccgtccctcaagagtcgactcaccatatcagtagacacgtccaagaaccagttctccctgaagctgagctctgtgaccgccgcggacacggctgtgtattactgtgcgagaaagggtgagcagctctggcactactggggccagggaaccctggtcaccgtctcctca

SEQ ID NO: 7650 - DNA, 283 bp, Homo sapiens
  source 1..283: mol_type = other DNA
tgcagcctctggattcaccttcagcacccactggatgcactgggtccgccaagctccagggaaggggctggtgtgggtcgcacgtaccagtagtgatgggagtagtacaagttacgcggactccgtgaagggccgattcaccatctccagagacaacgccaagaacacggtgtatctgcaaatgaacagtctgagagtcgaggacacggctgtgtattactgcgccacctttggtggttatcctgactactggggccagggagtcctggtcaccgtctcctca

SEQ ID NO: 7651 - DNA, 283 bp, Homo sapiens
  source 1..283: mol_type = other DNA
tgcagcctctggattcacgttcagtaacatgtggatggactgggtccgccaagctccagggacgggactggagtgggtctcatttattactagtgatgggagtaacacagggtacgcggactccgtgaagggccgattcaccatctccagagacaacgccaagaacacactgtatctgcaaatgaacagtctgagagccgaggacacggctgtgtattactgtgcaacttttggtggttatcccgactactggggccagggaaccctggtctccgtctctcca

SEQ ID NO: 7652 - DNA, 280 bp, Homo sapiens
  source 1..280: mol_type = other DNA
tgcagcctctggattcacccttagtagccactggatgacctggctccgccaggctccaggcatggggctgcagtgggtggccaacataaaagacgatggaagtgaaaaatactatgcggactctgtgaagggccgattcaccatctccagagacaacgccaagaactcactgtctctgcaaatgaacagcctgagagtcgaggacaccgctgtctatttctgtgcgcggggtttagcaccgccttactggggccagggaaccctggtcaccgtctcctca

SEQ ID NO: 7653 - DNA, 280 bp, Homo sapiens
  source 1..280: mol_type = other DNA
tgcagcctctggattcacctttagtggctattggatgagctgggtccgccaggctccagggaaggggctggagtgggtggccaacataaagcaaggtggaagtgagaaatactatgtggactctgtgaagggccgattcaccatctccagagacgacgccaagaactcactgtatctgcaaatgaacggcctgagagtcgaggacacggctgtgtattattgtgcgagaggactagcaccaccgtactggggccagggaaccctggtcaccgtctcctca

SEQ ID NO: 7654 - DNA, 274 bp, Homo sapiens
  source 1..274: mol_type = other DNA
tgcagcctctggattcaccctcagcagccatgacatgagctgggtccgccaggctccagggaaggggctggagtggatttcatacattagtcctagaagtgccaaatactatgcagactctgtgaagggccgattcaccatctccagagacaatgccaagaactcactggatctgcaaatgaacagcctgagagacgaggacacggctgtgtattactgtgtgagagggtggatggccgactggggccagggaaccctggtcaccgtctcctca

SEQ ID NO: 7655 - DNA, 277 bp, Homo sapiens
  source 1..277: mol_type = other DNA
tgcagcctctggatttaccatcagtcgtgatgacatgagctgggtccgccaggctccagggaagggactggagtgggtctcatacattagtggaagtactgatgccacatattatgcagactctgtgaagggccgattcaccatctccagggacaccgccaagacctcagtgtttctgcaaatgaacagcctgagagacgacgacacggctgtttattattgtgtccgggggtggatggccgactggggccagggaaccctggtcaccgtctcctca

SEQ ID NO: 7656 - DNA, 274 bp, Homo sapiens
  source 1..274: mol_type = other DNA
tgtagcctctggattcaccttgaatagtgatgacataagttgggtccgccaggctccagggaagcgactggagtggatctcatatattagtcctgtgagtgccacatactatgcgaactctgtgaagggccgattcaccatctccagagacaccgccaaggcctcagtgtatctacagatgaacagcctgagggacgacgacacggctgtgtatttttgtgtccgggggtggatggccgactggggccagggaaccctggtcaccgtctcctca

SEQ ID NO: 7657 - DNA, 274 bp, Homo sapiens
  source 1..274: mol_type = other DNA
tgtagcctctggattcaccttgaatagtgatgacataagttgggtccgccaggctccagggaagcgactggagtggatctcatatattagtcctgtgagtgccacatactatgcgaactctgtgaagggccgattcaccatctccagagacaccgccaaggcctcagtgtatctacagatgaacagcctgagggacgacgacacggctgtgtattattgtgtccgggggtggatggccgactggggccagggaaccctggtcaccgtctcctca

SEQ ID NO: 7658 - DNA, 292 bp, Homo sapiens
  source 1..292: mol_type = other DNA
tgcagcctctggattcaccttcagcaaccactggatgcactgggtccgccaagctccagggaaggggctggtttgggtctcacgtattgatagtagtggcactggtgaatcttacgcggacttcgttaagggccgattcaccatctccagagacaacgccaagagtacagtatatctccagatgaacagtctgggagccgaggacagggctgtctactattgtgcaagagacgcgcgaaattggaatcgcattgactactggggccagggagccctggtcagcgtctcctca

SEQ ID NO: 7659 - DNA, 292 bp, Homo sapiens
  source 1..292: mol_type = other DNA
tgcagcctctggattcaccttcagtaacaactggatgcactgggtccgccaagctccagggaaggggctggtgtgggtctcacgtattgattttgatgggggaagtacaagttatgcggactccgtgaagggccgattcaccatctccagagacaacgcccagaacacgttgtatctgcaaatgaccagtctgagagtcgaggacacggctgtctattactgtgcaagagatgctcgtaattggaatcggattgactactggggcccgggaacgcaggtcaccgtctcctca

SEQ ID NO: 7660 - DNA, 292 bp, Homo sapiens
  source 1..292: mol_type = other DNA
tgtagcctctggattcactttcaatagtaactggatgcactgggtccgccaatctccagggatggggctggtgtgggtctcacgtattgattatgatggcagtagcacaaattacgcggactccgtgaagggccgattcaccatctccagagacaacgccaagaacacgctatatctgcaaatgaacagtctgagagccgaggacacgggtgtttattactgtgcgagagatgcacgaaactggaaccgcattgactactggggccagggaaccctggtcaccgtctcctca

SEQ ID NO: 7661 - DNA, 292 bp, Homo sapiens
  source 1..292: mol_type = other DNA
tgcagcctctggattcaccttcaatagtaactggatgcactgggtccgccaacctccagggatggggctggtgtgggtctcacgtattgattatgatgggagtagcacaagttacgcggactccgtgaagggccgattcaccatctccagagacaacgccaagaacacgctgtatctgcaaatgaacagtctgagagccgaggacacggctgtttattactgtgcaagagatgcacgaaactggaaccgcattgactactggggccagggaaccctggtcaccgtctcctca

SEQ ID NO: 7662 - DNA, 292 bp, Homo sapiens
  source 1..292: mol_type = other DNA
tgcagcctctggattcaggttcgatggctactggatgcactgggtccgccaaagttcaggaaaggggctggagtgggtcgcacgtactgattataatggctatgacacaagttacgcggactccgtgaagggccgattcaccatctccagagacaacgccgagaacacggtgtatctgcaaatgaacagtctgagagtcgaggacacggctaaatatttctgcgcaagggatgcacgaaattggaaccgcattgactactggggccagggaaccctggtcaccgtcgcctca

SEQ ID NO: 7663 - DNA, 292 bp, Homo sapiens
  source 1..292: mol_type = other DNA
tgcagcctctggattcacgttcgatgactactggatgcactgggtccgccaaactccaggaaaggggctggagtgggtcgcacgtattgattatagtggctatggcacaagtcacgcggactccgtgaagggccgattcaccatctccagggacaacgccaggaacacgatgtatctgcaaatgaacagtctgagagtcgacgacacggctaaatattattgcgcaagggatgcacgaaactggaaccgcattgactattggggccagggaaccctggtcaccgtcgcctca

SEQ ID NO: 7664 - DNA, 274 bp, Homo sapiens
  source 1..274: mol_type = other DNA
tgcagcctttggatttagcctcagtagcattgacatgagctgggtccgccaggctccagggaagggactggagtgggttgcatatattagtactgttagttccacgtactacgcagactctgtgaagggccgattcagcatctccagagacaatgccaagaactcactgtatctgcaaatgaacagcctgagagacgaggacacggctgtgtattactgtgcgaggggctggttcgccaactggggccagggaaccctggtcaccgtctcctca

SEQ ID NO: 7665 - DNA, 274 bp, Homo sapiens
  source 1..274: mol_type = other DNA
tgcagcctttggatttagcctcagtagtattgacatgagctgggtccgccaggctccagggaagggactggagtgggttgcatatattagtactgttagtgccacgtactacgcagactctgtgaagggccgattcagcatctccagagacgatgccaagaactcactgtatctgcaaatgaacagcctcaaagacgaggacacggctgtgtattactgtgcgaggggctggttcgccaactggggccagggaaccctggtcaccgtgtcctca

SEQ ID NO: 7666 - DNA, 277 bp, Homo sapiens
  source 1..277: mol_type = other DNA
tgcagcctctggattcaccttcagtagttatagcatgaactgggtccgccaggctccagggaaggggctgcaatgggtttcatacattagtagtagtagttctaacatatactacgcagactctgtgaagggccgattcaccatctccagagacaacgccaagaactcactgtatctgcaaatgaacagcctaagagccgaggacacggctgtgtattactgtgcgagaggttggttcgccaactggggccagggaaccctggtcaccgtctcctca

SEQ ID NO: 7667 - DNA, 286 bp, Homo sapiens
  source 1..286: mol_type = other DNA
tgcagcctctggattcacgttcagtgattatagcatgaattggatccgccaggctccagggaaggggctggaatggcttgcgtatattagaagtactagcaagatgatatattatgtagactctgtgaggggccgattcaccatctccagagacaatgcccagaactcgctctttctgcaaatgaacagcctgagagacgacgatacggcattatattactgtgtgagagaccatgaatttgcttttgatatttggggccgagggacaatggtcaccgtctcttca

SEQ ID NO: 7668 - DNA, 286 bp, Homo sapiens
  source 1..286: mol_type = other DNA
tgcagcctctggattcaccttcagtgaatatcccatgaactgggtccgccaggctccagggaagggactggagtgggtctcacacattaggggtgatgctatcaccgtccgttatgtagactctgtgaagggccgattcaccatctcccgcgacaatgccgagaactcactgtttctacaaatgaccagcctgagagacgaggactcggctgtgtattactgtgtgagagaccatgagttcgcttttgatatctggggccaagggacagtggtcaccgtctcttct

SEQ ID NO: 7669 - DNA, 274 bp, Homo sapiens
  source 1..274: mol_type = other DNA
tgcagcctctggattcacctttagtaactattggatggactgggtccgccaggctccagggaaggggctggagtgggtggccaacataaagcgagatgaaagtgagaaatactatgtggactctgtgaagggccgattcaccatctccagagacaacgccaagaactcagtttatctgcaaatgaacagcctgagagtcgaggataaggctgtgtattattgtatgagatcctttgaatattggggccagggaatcctggtcaccgtctcctca

SEQ ID NO: 7670 - DNA, 274 bp, Homo sapiens
  source 1..274: mol_type = other DNA
tgcagcctctagattcatctttagtagctattggatgcactgggtccgccaggctccagggaaggggctggagtgggtggccaacataaaaggagatggaagtgagaaatactatgtggactctgtgaagggccgattcaccatctccagagacaacgccaagaactcactgtttctgcaaatgaacagcctgagagtcgaagacacggctgtgtattactgtatgcgatcttttgagtactggggccagggaatcctggtcaccgtctcctca

SEQ ID NO: 7671 - DNA, 277 bp, Homo sapiens
  source 1..277: mol_type = other DNA
tgcagcctctcgattactgtttcgcactgattggatgtcgtgggtccgccaggctccagggaagggactggagtgggtggccaccataaagccagatggaagtgtggacttctatgtggactctgtgaggggccgattcaccatctccagagacaacgccaagaggtcactgtatctgcaaatgaacagcctgagaggcgaagacacggctctctattactgtgtgagaggggacggggatgactggggccagggaaccctggtcaccgtctcctca

SEQ ID NO: 7672 - DNA, 277 bp, Homo sapiens
  source 1..277: mol_type = other DNA
tgtagcctctggagtcagtttgagtaactattggatgaactgggtccgccagactccaaggaaggggctggagtgggtggcccacataaagccagatggaactgaggcatactatgtggactctgtgaagggccgattcaccatctccagagacaacgccaagaactcactgtatctgcaaatggacagcctgagaggcgaggacacggctgtgtacttttgtgtgagaggtgatggggacgactggggccagggaaccctggtctccgtctcttca

SEQ ID NO: 7673 - DNA, 277 bp, Homo sapiens
  source 1..277: mol_type = other DNA
tgtagcctctggagtcagtttgagtaactattggatgaactgggtccgccagactccaaggaaggggctggagtgggtggcccacataaagccagatggaactgagacatactatgtggactctgtgaagggccgattcaccatctccagagacaacgccaagaactcactgtatctgcaaatggacagcctgagaggcgaggacacggctgtgtatttttgtgtgagaggtgatggggacgactggggccagggaaccctggtctccgtctcttca

SEQ ID NO: 7674 - DNA, 291 bp, Homo sapiens
  source 1..291: mol_type = other DNA
aggggttttggatacacatttacccgctactggatcatctgggtgcgccagatgcccgggaaaggcctggagtggatggggatgattgatcctagtgactctcatgccagctacgatccgtccttccaaggccacgtcaccatctcagttgacaagtctttcaacactgcctacttgcagtggagcagcctgcaggcctcagacaccgccatctattattgtgcgactgggacatcttttggatatactgtcagctactggggccagggaaccctggtcaccgtctcctca

SEQ ID NO: 7675 - DNA, 291 bp, Homo sapiens
  source 1..291: mol_type = other DNA
aggggttttggatacacatttacccgctactggatcatctgggtgcgccagatgcccgggaaaggcctggagtggatggggatgattgatcctagtgactctcatgccagctacgatccgtccttccaaggccacgtcaccatctcagttgacaagtccttcaacactgcctacttgcagtggagcagcctgcaggcctcagacaccgccatctattattgtgcgactgggacatcttttggatatactgtcagctactggggccagggaaccctggtcaccgtctcctca

SEQ ID NO: 7676 - DNA, 304 bp, Homo sapiens
  source 1..304: mol_type = other DNA
tgcagcctctggactcactttcagtaacgcctggatgaactgggtccgccagcctccagggaaggggctggagtgggttggcctaattaaaagtaaggctgatggtgggacaacagactacgctgcacccgtaaaaggcagattcaccatctcaagagatgattcaaaagacacagtgtatctgcaaatgaacagcctgcaaagcgaggacacagccgtgtattattgtgccacagctccaggattctatagcagcagcccttttgactactggggccagggaaccgtggtcaccgtctcctca

SEQ ID NO: 7677 - DNA, 304 bp, Homo sapiens
  source 1..304: mol_type = other DNA
tgcagcctctggactcactttcaataacgcctggatgaactgggtccgccaggctccagggaaggggctggagtgggttggccttattaaaagtaaggctgatggtgggacaacagactacgctgcacccgtaaaaggcagattcaccatctcaagagatgattcaaaagacacagtgtatctgcaaatgaacagcctgcaaagcgaggacacagccgtgtattattgtgccacagctccaggattctatagcagcagcccttttgactactggggccagggaaccgtggtcaccgtctcctca

SEQ ID NO: 7678 - DNA, 304 bp, Homo sapiens
  source 1..304: mol_type = other DNA
tgcagcctctggaatcactttcagtaacgcctggatgcattgggtccgccaggctccagggaaggggctggagtggattggccgtattgaaagcaaatctgatggtgggacaacagactacgctgcacccgtgcaaggcagattcaccatctcaagagatgattcacaaagcacagtgtatctgcaaatgaacagcgtgaacaccgaggacacagccgtatactattgtgccacagccccaggattttacagttcctcgccgtttgattactggggccagggatccctggtcaccgtctcctcg

SEQ ID NO: 7679 - DNA, 298 bp, Homo sapiens
  source 1..298: mol_type = other DNA
cgatgtctctggtgtcaccatcagtggtttcctctggacctggatccggcagtcgtcggagaggggtctgcagtggctcggccagattcgtgacagtggggccaccaccttcaacccttccctccagagtcgactcaccatttcagtggacacgtccaagaaccatttctccctgcacctgaagtctgtgaccgccgcggacacggccgtctactactgtgcgcgagttagtgtccacaatgactactacatgagacttgactactggggccaaggaacccgcgtcaccgtctccaca

SEQ ID NO: 7680 - DNA, 298 bp, Homo sapiens
  source 1..298: mol_type = other DNA
cgatgtctctggtgtcaccatcagtgggttcctctggacctggatccggcagtcgtcggagaggggtctgcagtggctcggccagattcgtgacagtggggccaccaccttcaacccttccctccagagtcgactcaccatttcagtggacacgtccaagaaccatttctccctgcacctgaagtctctgaccgccgcggacacggccgtctactactgtgcgcgagttagtgtccacaatgactactacatgagacttgactactggggccaaggaacccgcgtcaccgtctccaca

SEQ ID NO: 7681 - DNA, 298 bp, Homo sapiens
  source 1..298: mol_type = other DNA
cgatgtctctggtgtcaccatcagtgttttcctctggacctggatccggcagtcgtcggagaggggtctgcagtggctcggccagattcgtgacagtggggccaccaccttcaacccttccctccagagtcgactcaccatttcagtggacacgtccaagaaccatttctccctgcacctgaagtctgtgaccgccgcggacacggccgtctactactgtgcgcgagttagtgtccacaatgactactacatgagacttgactactggggccaaggaacccgcgtcaccgtctccaca

SEQ ID NO: 7682 - DNA, 298 bp, Homo sapiens
  source 1..298: mol_type = other DNA
cgatgtctctggtgtcaccatcagtggtttcctctggacctggatccggcagtcctcggagaggggtctgcagtggctcggccacattcgtgacagtggggccaccaccttcaacccttccctccagagtcgactcaccatttcagtggacacgtccaagaaccatttctccctgcacctgaagtctgtgaccgccgcggacacggccgtctactactgtgcgcgagttagtgtccacaatgactactacatgagacttgactactggggccaaggaacccgcgtcaccgtctccaca

SEQ ID NO: 7683 - DNA, 289 bp, Homo sapiens
  source 1..289: mol_type = other DNA
tgcagcctctgcgttcaccgtcagtaactactacatgagctgggtccgcctggctccagggaaggggctggagtgggtctcagttatctatagtggtggtaccacatactacgcagcctccgtgacgggccgattcaccatctccagagacagttccaagaattcgctgtatcttcaaatgaacagcctgagagccgacgacacggccgtatattattgtgcgagaggatatagcagtggctggtactctgactactggggccagggaaccctggtcaccgtctcctca

SEQ ID NO: 7684 - DNA, 289 bp, Homo sapiens
  source 1..289: mol_type = other DNA
tgcagcctctgggttcaccgtcagtaacaactacatgagctgggtccgccaggctccagggaaggggctggagtgggtctcagttatttatagcggtggtgtcacatactacgcagactccgtggagggccgattcaccatctccagagacaattccaagaacacgctgtatcttcaaatgaacagcctgagagccgaggacacggccgtgtattactgtgcgagaggttatagcagtggctggtattcggactactggggccagggaaccctggtcaccgtctcctca

SEQ ID NO: 7685 - DNA, 289 bp, Homo sapiens
  source 1..289: mol_type = other DNA
tgcagcctctgggttcaccgtcagtagcaactacatgagctgggtccgccaggctccagggaaggggctggagtgggtctcagttatttatagcggtggtgtcacatactacgcagactccgtggagggccgattcaccatctccagagacaattccaagaacacgctgtatcttcaaatgaacagcctgagagccgaggacacggccgtgtattactgtgcgagaggttatagcagtggctggtattcggactactggggccagggaaccctggtcaccgtctcctca

SEQ ID NO: 7686 - DNA, 289 bp, Homo sapiens
  source 1..289: mol_type = other DNA
tgcagcctctgggttcaccgtcagtaacaactacatgagctgggtccgccaggctccagggaaggggctggagtgggtctcagttatttatagcggtggtgtcacatactacgcagactccgtggagggccgattcaccatctccagagacaattccaagaacaccctgtatcttcaaatgaacagcctgagagccgaggacacggccgtgtattactgtgcgagaggttatagcagtggctggtattcggactactggggccagggaaccctggtcaccgtctcctca

SEQ ID NO: 7687 - DNA, 289 bp, Homo sapiens
  source 1..289: mol_type = other DNA
tgcagcctctgggttcaccgtcagtaacaactacatgagctgggtccgccaggctccagggaaggggctggaatgggtctcagttatttatagcggtggtgtcacatactacgcagactccgtggagggccgattcaccatctccagagacaattccaagaacacgctgtatcttcaaatgaacagcctgagagccgaggacacggccgtgtattactgtgcgagaggttatagtagtggctggtattcggactactggggccagggaaccctggtcaccgtctcctca

SEQ ID NO: 7688 - DNA, 271 bp, Homo sapiens
  source 1..271: mol_type = other DNA
cgctgtctatggtgggtccttcagtggttactactggagctggatccgccagaccccagggaaggggctggaagtgattggggaaatcgatggtagtggaagtgccaagtacaacccgtccctgaggagtcgactcaccctgtcattagacacgtccaagaatcaattctccctgaaattgaactctatgaccgccgcggacacggctgtgtattattgtgcgagagtctgggacctctggggccggggaaccctggtcaccgtctcctca

SEQ ID NO: 7689 - DNA, 271 bp, Homo sapiens
  source 1..271: mol_type = other DNA
cgctgtctatggtgggtccttcagtggttactactggagttgggtccggcagcccccagggaaggggctggaggtgattggggagatcgatgatagaggaagcgccaagtacaacccgtccctgaagagtcgagtcaccctgtcattagacacgtccaagaggcaattctccctgaaagtgagctctatgaccgccgcggacacggctgtgtattattgtgcgagagtctgggacctctggggccagggaaccctggtcaccgtctcctca

SEQ ID NO: 7690 - DNA, 271 bp, Homo sapiens
  source 1..271: mol_type = other DNA
cgctgtctatggtgggtccttcagtggttactactggagttgggtccggcaccccccagggaaggggctggaggtgattggggagatcgatgatagaggaagcgccaagtacaacccgtccctgaagagtcgagtcaccctgtcattagacacgtccaagaggcaattctccctgaaagtgagctctatgaccgccgcggacacggctgtgtattattgtgcgagagtctgggacctctggggccagggaaccctggtcaccgtctcctca

SEQ ID NO: 7691 - DNA, 271 bp, Homo sapiens
  source 1..271: mol_type = other DNA
cgctgtctatggtgggtccttcagtggttactactggagctgggtccgccagcccccagagaagagtccggagtgcataggtgaaatcactcccagtggaagcaccaactacaacccgtccctcaagagtcgagtcaccatatcagtggacacgtccaagaaccacttctccctgaagttgacctctgtgaccgccgcggacacggctgtgtattactgtgcgagagtttgggacctctggggcccgggaaccctggtcatcgtctcctca

SEQ ID NO: 7692 - DNA, 283 bp, Homo sapiens
  source 1..283: mol_type = other DNA
tgtaggttctggattcatgtttagtagatattggatggcctgggtccgccaccctccaggtgaggggctggagtgggtggcccacataaaagaagatagaactcagacatactatctggactctgtgaagggccggttcaccatctccaaagacgacaccaagaattcactgcatctggagatgaacagcctgagagtcgaggacacagctgtgtattattgtgtgagaggggggtgggagcttgactcctggggccagggaaccctggtcaccgtctcctca

SEQ ID NO: 7693 - DNA, 283 bp, Homo sapiens
  source 1..283: mol_type = other DNA
tgcagcctctggattcacgtttaaatattattggatgaattgggtccgccaggctccagggaaggggctggagtgggtggccaacataaaggaagacggaactgagaaatattatgtgaactctgtggagggccgattcaccatctccaaagacgacgccatgaactcactgtctctgcaaatgaacaacctgagagtcgaagatacggccgtgtattactgtgtgagaggggggtgggaacttgactcctggggccagggaacccgggtcaccgtctcctca

SEQ ID NO: 7694 - DNA, 283 bp, Homo sapiens
  source 1..283: mol_type = other DNA
tgcagcctctggattcacgtttaaatatttttggatgaattgggtccgccaggctccagggaaggggctggagtgggtggccaacataaaggaagacggaactcagaaatattatgtgaactctgtggagggccgattcaccatctccaaagacgacgccatgaactcactgtctctgcaaatgaacaacctgagagtcgaagatacggccgtttattactgtgtgagaggggggtgggaacttgactcctggggccagggaacccgggtcaccgtctcctca

SEQ ID NO: 7695 - DNA, 276 bp, Homo sapiens
  source 1..276: mol_type = other DNA
aagggttctggatacaggtttaccacctactggatcgtctgggtgcgccagatgcccgggaaaggcctggagtggatggggagcatctaccctggtgactctgatattagatacagcccgtccttccaaggccaggtcaccatctcagccgacaagtccagcggcaccgcctacctgcagtggagcaccctgaaggcctcggacaccgccatatattactgtgcgagagaggggtttgactactggggccagggaaccatggtcaccgtctcctca

SEQ ID NO: 7696 - DNA, 276 bp, Homo sapiens
  source 1..276: mol_type = other DNA
aagggttctggatacaaatttaccagctactttatcggctgggtgcgccagatgcccggcaaaggcctggaatggatgggactcatctatcctggtgactctgataccacatacagcccgtccttccaaggccagatcaccatctcagccgacaagtccatcaacaccgcctacctgcagtggagcagcctgaaggcctcggacaccgccatttattactgtgcgagagaagggtttgactattggggccagggaaccctggtcaccgtctcctca

SEQ ID NO: 7697 - DNA, 279 bp, Homo sapiens
  source 1..279: mol_type = other DNA
acttctggattcacctttagtacctctgctatgcagtgggtgcgacaggcccgtggacaacgccttgagtggataggatggatcgtcgttggcagtggaaacacaaactacgcacagaagtttcagggaagagtcaccattaccagggacatgtccacaaggacagtctatatggaactaaatcggctgaaatacgaagacacggccgtatattactgtgcggctgatgacctccttacggggtcctggggccagggaaccctggtcaccgtctcctca

SEQ ID NO: 7698 - DNA, 279 bp, Homo sapiens; identical to SEQ ID NO: 7697
  source 1..279: mol_type = other DNA

SEQ ID NO: 7699 - DNA, 279 bp, Homo sapiens
  source 1..279: mol_type = other DNA
acttctggattcacctttactaactctgctgtgcagtgggtgcgacaggctcgtggacaacgccttgagtggataggatggatcgtcgttggcagtggtaagtcaaactacgcacagaagttccgggacagagtcaccattaccagggacatgtccacaagcacagcctacatggagttgggcagcctgagatccgaggacacggccgtttattactgtgcggcagatgatcttttgactggttcctggggccagggaaccctggtcaccgtctcctca

SEQ ID NO: 7700 - DNA, 289 bp, Homo sapiens
  source 1..289: mol_type = other DNA
tgcagcctctggattcacctttagtgactattggatgagctgggtccgccaggctccagggaaggggctggagtgggtggccaacataaaccaggatgggagtgaagactactatgtgggtcttgtggcgggccgattcaccatctccagagacaacgccaagaactcactgtatctgcagatggacagcctaagagccgacgacacggctctgttttattgtgcgagagcagcaacggctggtactgttgactactggggccagggaacccaggtcaccgtctcctca

SEQ ID NO: 7701 - DNA, 289 bp, Homo sapiens
  source 1..289: mol_type = other DNA
tgaagcctctagattcacctttagtgactattggatgagctgggtccgccaggctccagggaaggggctggagtgggtggccaacataaaccaagatggaagtgcgaaatactatgtggactctgtgaagggccgattcaccatctccagagacaacgccaagaattcactgtatctgcaaatgaacagcctgagagccgacgacacggccgtgtattactgtgcgagagcggcaacagctggtacggttgactactggggccagggagccctggtcaccgtctcctca

SEQ ID NO: 7702 - DNA, 289 bp, Homo sapiens
  source 1..289: mol_type = other DNA
tgcagcctctgaattcacctttagtagctattggatgagctgggtccgccaggctccagggaaggggctggagtgggtggccaacataaaccaagatgggagtaaggagtactatgtggactctgtgaagggccgattcaccatctccagagacaacgccaagaactcactgtttctgcaaatgaactacctgagagccgacgacacggctgtgtattactgtgcgagagcggctacagctggaacagttgactactggggccagggaaacctggtcaccgtctcctca

SEQ ID NO: 7703 - DNA, 289 bp, Homo sapiens
  source 1..289: mol_type = other DNA
tgcagcctctggattcacattcactacttttagtatggactgggtccgccaggctccagggaagggactggagtgggtttcatacgtcagtagtggtggtgacaccacatactacgcagactctgtgaagggccgcttcaccatctccagagacaatgccaggaactcgctttatctgcaaatgaccaccctgagagacgaggacacggctgtgtattactgtgcgagggggtggcgtgaaaattcttttgactattggggccacggaaccctggtcagcgtctcctca

SEQ ID NO: 7704 - DNA, 289 bp, Homo sapiens
  source 1..289: mol_type = other DNA
tgcagcctctggattcaccttcactacctttagcatggactgggtccgccaggctccagggaaggggccggagtggctttcatacatcagcactgatactaacaccatatactacgcagactctgtgaggggccgattcaccatctccagagacaacgccaagaattcggtgtatctggaaatgcacagcctgagagccgaggacacggctatgtattactgtgcgcgagggtggcgggaaaatagctttgactactggggccagggaaccctggtcagcgtctcctca

SEQ ID NO: 7705 - DNA, 289 bp, Homo sapiens
  source 1..289: mol_type = other DNA
tgcagcctctggattcaccttcactacctatagcatggactgggtccgccaggctccagggaaggggctggagtgggtttcatacatcagtactgatactaacaccatatactacgcagactctgtgaggggccgattcaccatctccagagacaacgccaggaactcgctgtatctggaaatgaacagcctgagaaccgaggacacggctatgtattactgtgcgagagggtggcgggaaaatagctttgactactggggccagggaaccctggtcaccgtctcctca

SEQ ID NO: 7706 - DNA, 289 bp, Homo sapiens
  source 1..289: mol_type = other DNA
tgcagcctctggattcaccttcactacctatagcatggactgggtccgccaggctccagggaaggggctggagtgggtttcatacatcagtactgatactaacaccatatactacgcagactctgtgaggggccgattcaccatctccagagacaacgccaggaactcgctgtatctggaaatgaacagcctgagaaccgaggacacggctatgtattactgtgcgagagggtggcgggaaaatagctttgactaccggggccagggaaccctggtcaccgtctcctca

SEQ ID NO: 7707 - DNA, 289 bp, Homo sapiens
  source 1..289: mol_type = other DNA
tgcagcctctggattcaccttcactacctttagcatggactgggtccgccaggctccagggaaggggccggagtggctttcatacatcagcactgatactaacaccatatactacgcagactctgtgaggggccgattcaccatctccagagacaacgccaagaattcggtgtatccggaaatgcacagcctgagagccgaggacacggctatgtattactgtgcgcgagggtggcgggaaaatagctttgactactggggccagggaaccctggtcagcgtctcctca

SEQ ID NO: 7708 - DNA, 289 bp, Homo sapiens
  source 1..289: mol_type = other DNA
tgcagcctctggattcaccctcactacctttagcatggactgggtccgccaggctccagggaaggggccggagtggctttcatacatcagcactgatactaacaccatatactacgcagactctgtgaggggccgattcaccatctccagagacaacgccaagaattcggtgtatctggaaatgcacagcctgagagccgaggacacggctatgtattactgtgcgcgagggtggcgggaaaatagctttgactactggggccagggaaccctggtcagcgtctcctca

SEQ ID NO: 7709 - DNA, 289 bp, Homo sapiens; identical to SEQ ID NO: 7703
  source 1..289: mol_type = other DNA

SEQ ID NO: 7710 - DNA, 289 bp, Homo sapiens
  source 1..289: mol_type = other DNA
tgcagcctctggattcacattcactacttttagtatggactgggtccgccaggctccagggaagggactggagtgggtttcatacgtcagtagtggtggtgacaccacatactacgcagactctgtgaagggccgcttcaccatctccagagacaatgccaggaactcgctttatctgcaaatgaccaccctgagagacgaggacacggctgtgtattactgtgcgagggggtggcgtgaaaattcttttgactattggggccacggaaccctggtcaccgtctcctca

SEQ ID NO: 7711 - DNA, 289 bp, Homo sapiens
  source 1..289: mol_type = other DNA
tgcagcctctggattcacattcactacttttagtatggactgggtccgccaggctccagggaagggactggagtgggtttcatacgtcagcagtggtggtgacaccacatactacgcagactctgtgaagggccgcttcaccatctccagagacaatgccaggaactcgatttatctggaaatgaccaccctgagagacgaggacacggctgtttattactgtgcgagggggtggcgtgaaaattcttttgactattggggccacggagccctggtcagcgtctcctca

SEQ ID NO: 7712 - DNA, 289 bp, Homo sapiens
  source 1..289: mol_type = other DNA
tgcagcctctggattcacattcactacttttagtatggactgggtccgccaggctccagggaagggactggagtgggtttcatacgtcagtagtggtggtgacaccacatactacgcagactctgtgaagggccgcttcactatctccagagacaatgccaggaactcgctttatctgcaaatgaccaccctgagagacgaggacacggctgtgtattactgtgcgagggggtggcgtgaaaattcttttgactattggggccacggaaccctggtcagcgtctcctca

SEQ ID NO: 7713 - DNA, 289 bp, Homo sapiens
  source 1..289: mol_type = other DNA
tgcagcccctggattcacattcactacttttagtatggactgggtccgccaggctccagggaagggactggagtgggtttcatacgtcagtagtggtggtgacaccacatactacgcagactctgtgaagggccgcttcaccatctccagagacaatgccaggaactcgctttatctgcaaatgaccaccctgagagacgaggacacggctgtgtattactgtgcgagggggtggcgtgaaaattcttttgactattggggccacggaaccctggtcagcgtctcctca

SEQ ID NO: 7714 - DNA, 289 bp, Homo sapiens
  source 1..289: mol_type = other DNA
tgcagcctctggattcacattcactacttttagcatggactgggtccgccaggctccagggaagggactggagtgggtttcatacgtcagtagtggtggtgacaccacatactacgcagactctgtgaagggccgcttcaccatctccagagacaatgccaggaactcgctttatctgcaaatgaccaccctgagagacgaggacacggctgtgtattactgtgcgagggggtggcgtgaaaattcttttgactattggggccacggaaccctggtcagcgtctcctca

SEQ ID NO: 7715 - DNA, 289 bp, Homo sapiens
  source 1..289: mol_type = other DNA
tgcagcctctggattcacattcactacttttagtatggactgggtccgccaggctccagggaagggactggagtgggtttcgtacgtcagtagtggtggtgacaccacatactacgcagactctgtgaagggccgcttcaccatctccagagacaatgccaggaactcgctttatctgcaaatgaccaccctgagagacgaggacacggctgtgtattactgtgcgagggggtggcgtgaaaattcttttgactattggggccacggaaccctggtcagcgtctcctca

SEQ ID NO: 7716 - DNA, 289 bp, Homo sapiens
  source 1..289: mol_type = other DNA
tgcagcctctggattcacattcactacttttagtatggactgggtccgccaggctccagggaagggactggaatgggtttcatacgtcagtagtggtggtgacaccacatactacgcagactctgtgaagggccgcttcaccatctccagagacaatgccaggaactcgctttatctgcaaatgaccaccctgagagacgaggacacggctgtgtattactgtgcgagggggtggcgtgaaaattcttttgactattggggccacggaaccctggtcagcgtctcctca

SEQ ID NO: 7717 - DNA, 289 bp, Homo sapiens
  source 1..289: mol_type = other DNA
tgcagcctctggattcacattcactacttttagtatggactgggtccgccaggctccagggaagggactggagtgggtttcatacgtcagtagtggtggtgacaccacatactacgcagactctgtgaagggccgcttcaccatctccagagacaatgccaggaactcgctttatctgcaaatgaccaccctgagagacgaggacacggctgtgtattactgtgcgagggggtggcgtgaaaattcttttgactattggggccatggaaccctggtcaccgtctcctca

SEQ ID NO: 7718 - DNA, 289 bp, Homo sapiens
  source 1..289: mol_type = other DNA
tgcagcctctggattcacattcactacttttagtatggactgggtccgccaggctccagggaagggactggagtgggtttcatacgtcagtagtggtggtgacaccacatactacgcagactctgtgaagggccgcttcaccatctccagagacaatgccaggaactcgctttatctgcaaatgaccacccggagagacgaggacacggctgtgtattactgtgcgagggggtggcgtgaaaattcttttgactattggggccacggaaccctggtcagcgtctcctca

SEQ ID NO: 7719 - DNA, 319 bp, Homo sapiens
  source 1..319: mol_type = other DNA
tgtagcctctggattcaccttcagtagatactggatgcactgggtccgccaagctccagggaaggggctggtgtgggtctcacgaattaatacggatgggagtagcacaagctccgcggaatccgtgaagggccgattcagcacctccagagacaacgccaagaacacgttttatctacagatgaacagtctgacagccgaggacacggctatatattactgtacaggagccccagattgtggtggtggtacctgcaattcctaccactactacggtttggacgtctggggccaagggaccacggtcaccgtctcctca

SEQ ID NO: 7720 - DNA, 319 bp, Homo sapiens
  source 1..319: mol_type = other DNA
tgcagtctcgggattcaccttcaaagattattggatgcactgggtccgccaagctccagggaaggggctggtgtgggtctcacgtattaatagaagtgggagtgagacagcctacgcggactctgtgaggggccgactcaccatctccagagacaacgccaagaacacgttgtatctgcaaatgagcagtctgagagccgaggacacggctgtgtattattgtacaggagccccggattgtggcggtggtacctgtaactcctaccactattacggtttggacgtctggggccgaggggccgcggtcaccgtctcctca

SEQ ID NO: 7721 - DNA, 289 bp, Homo sapiens
  source 1..289: mol_type = other DNA
tgcagcctctggattcacctttagtaggcattggatgacctgggtccgccaggctccagggaaggggctggagtgggtggccaacataagacaagatgcaagtgagaaatactatgtggactctgtgaagggccgattcaccatctccagagacaacgccaacaactcactgtatctgcaaatgaacagcctgagagtcgaggacacggctgtgtattactgtgcgagctatggctactactacggtttggacgtctggggccaagggaccacggtcaccgtctcctca

SEQ ID NO: 7722 - DNA, 289 bp, Homo sapiens
  source 1..289: mol_type = other DNA
tgcagcctctggattcacctttagtagaaattggatgagctgggtccgccaggctccagggaaggggctggagtgggtggccaacataaagcaagatggaagtgagaaatactatgtggactctgtgaagggccgattcaccatctccagagacaacgccaagaactccctgtatctgcaaatgaacagcctgagagccgaggacacggctgtgtattactgtgcgagttatgggtactactacggtctggacgtctggggccaagggaccacggtcaccgtctcctca

SEQ ID NO: 7723 - DNA, 271 bp, Homo sapiens
  source 1..271: mol_type = other DNA
tgcagcctctggattcgcctttagtacctcttggatgacctgggtccgccaggctccagggaggggcctggagtgggtggccaacataaaccaagatggaagtcagagatactatgtggactctgtgaagggccggttcaccatctccagagacaacgccaagaattcactctatctgcagatgaacagcctgagagccgaggacacggctgtgtattactgtctcggcagtgactactggggccagggaaccctggtcaccgtctcctca

SEQ ID NO: 7724 - DNA, 271 bp, Homo sapiens
  source 1..271: mol_type = other DNA
tgcagtctctggattctcctttagtaggtcgtggatgagctgggtccgccaggctccagggaaggggctggagtgggtggccaacataaaccaagatggaagaacgaaaaattatctggactctgtgaagggccgattcaccattttcagagacaacgccaacaactcattatatctgcaaatgagcagcctgagagccgaggacacggctatgtactactgtttggggagtgactactggggccagggatccctggtcaccgtctcctca

SEQ ID NO: 7725 - DNA, 286 bp, Homo sapiens
  source 1..286: mol_type = other DNA
cgctatctatggtgggtccttcagtggttatcagtggacctggatccgccagccccccgggaaggggctggagtggattggagaaatcaatcatagtggaaacaccaactacaacccgtccctcaagagtcgagtcaccatattagtacagacgtccaggaaccagttctccctgaaactgacgtctgtgaccgccgcagacacggctgtgtattactgtgcgagacccggcggtggtaacgcttttgatatctggggccaagggacaatggtcaccgtctcttca

SEQ ID NO: 7726 - DNA, 286 bp, Homo sapiens
  source 1..286: mol_type = other DNA
cgctgtgtatggtgggtccttcagtggttaccactggacctggatccgccagcccccagggaaggggctggagtggattggggaaatcaatcatagtggaagcaccaactacaacccgtccctcaagagtcgagtcaccatatcgattgactcgtccaagaaccagttctccctgaagctgagctctgtgaccgccgcggacacggctgtatattactgtgcgagacccggggggggaaatgcttttgatatctggggccaagggacaatggtcaccgtctcctca

SEQ ID NO: 7727 - DNA, 286 bp, Homo sapiens
  source 1..286: mol_type = other DNA
cgctgtctatggtgggtccttcagtggttaccactggacctggatccgccagcccccagggaaggggctggagtggattggggaaatcaatcatagtggaagcaccaactacaacccgtccctcaagagtcgagtcaccatatcagttgacgcgtccaagaaccagttctccctgaagctgagctctgtgaccgccgcggacacggctgtatattactgtgcgagacccgggggggggaatgcttttgatatctggggcccagggacaatggtcaccgtctcttca

SEQ ID NO: 7728 - DNA, 286 bp, Homo sapiens
  source 1..286: mol_type = other DNA
cgctgtctatggtgggtccttcagtggttaccactggacctggatccgccagcccccagggaaggggctggagtggattggggaaatcaatcatagtggaagcaccaactacaacccgtccctcaagagtcgagtcaccatatcagttgacgcgtccaagaaccagttctccctgaagctgagctctgtgaccgccgcggacacggctgtatattactgtgcgagacccgggggggggaatgcttttgatatctggggcccagggacaatggtcaccgtctcctca

SEQ ID NO: 7729 - DNA, 279 bp, Homo sapiens
  source 1..279: mol_type = other DNA
gcttctggatacaccttcatcaaacaccacatacactgggtgcgacagacccctggacaagggcttgaatggatgggaagaatcatcccctacgatggcggcgcaacctacgcacagaagttcgtgggcagggtcaccatgaccagggacacgtccgcgaccacagtctacatggaactgagcagcctcagatctgatgacacggccgtatattactgtgtgagggatacctatggccatgactattggggccagggaacccgggtcaccgtctcctca

SEQ ID NO: 7730 - DNA, 279 bp, Homo sapiens
  source 1..279: mol_type = other DNA
gcatctggatacagttttgccagccaccacattcactgggtgcgacaggcccctggagaaggtcttgagtggatgggagtgatcattcccagtggtggcagtacaacgtacgcacagaaattccagggcagagtcatcatgaccagggacacgtccacgactactgtctatttggaggtgagcagcctgagatctgaggacacggccgtgtattattgtgtcagagacacctatggacatgactactggggccagggaaccctggtcaccgtctcctca

SEQ ID NO: 7731 - DNA, 292 bp, Homo sapiens
  source 1..292: mol_type = other DNA
cactttctctggtggctccaccagcagtagtagtcactactggggctggatccgccagcccccagggaaggggctggagtggattgggagtatctattatagtgggagcacctactacaacccgtccctcaagagtagagtcaccatatccgtagacacgtccaagaaccagttctccctgaggctgaactctgtgaccgccgcagacacgtctgtgtactactgtgcaagagtgggagctaccctaacctttgactactggggccagggaaccctggtcaccgtctcctca

SEQ ID NO: 7732 - DNA, 292 bp, Homo sapiens
  source 1..292: mol_type = other DNA
caatgtctctggtggctccatcagcattactacttactactgggcctggatccgccagcccccagggaaggggctggagtggattgggagtatctattatagtgggagcacctactacaacccgtccctcaagagtcgactcaccatatccgtagacacgtccaacaaccacttctccctggagctgagctctctgaccgccgcagacacggctgtatattactgtgcgagagtgggagcgaccctaacctttgactactggggccagggaaccctggtcaccgtctcctca

SEQ ID NO: 7733 - DNA, 289 bp, Homo sapiens
  source 1..289: mol_type = other DNA
tgcagcctctggattcacatttagggactattggatggcgtggctccgccagaccgcagggaaggggctggagtgggtggccaacataaagatggatgggagtttgaaatactatttggactctgtggagggccgattcaccgtctccagagacaacgccaagaattcactctatctacacatgaacagcctgagtgccgacgacacggctctctattactgtgcgagagatgacggctacaggtctattgactactggggccagggaaccccggtcaccgtctcctca

SEQ ID NO: 7734 - DNA, 289 bp, Homo sapiens
  source 1..289: mol_type = other DNA
tgcagcctctggattcacctttagtaactattggatgacttgggtccgccagactccagggaaggcgctggagtgggtggcccagataaaggaagatggaagtgagacatactatgtgggctctctggaggaccgattcaccatctccagagacaacgccaagaactcactgtatctggaaatgaacagcctgagaggcgaggacacggctctctattactgtgcgagagatgacggatatagatcgattgactactggggccagggaaccctggtcaccgtctcctca

SEQ ID NO: 7735 - DNA, 289 bp, Homo sapiens
  source 1..289: mol_type = other DNA
tgcagcctctggattcacctttggtacctattggatgagctgggtccgccaggctccagggaaggggctggagtgggtggccaacatgaagccagatggaagtgagagagactatgtggactctgtggagggccgattcaccatctccagagacaacgccaagaactcactgtttctgcaaatgaacagcctgagggccgaggacacggctgtgtattactgtgcgagagatgacggctacagaagcattgactactggggccagggaaccctggtcaccgtctcctca

SEQ ID NO: 7736 - DNA, 289 bp, Homo sapiens
  source 1..289: mol_type = other DNA
tgcagcctctggattcacctttagtagctattggatgagctgggtccgccaggctccagggaaggggctggagtgggtggccaacatgaagccagatggaagtgagagagactatgtggactctgtggagggccgattcaccatctccagagacaacgccaagaactcagtgtttctgcaaatgaacagcctgagagccgaggacacggctgtatattactgtgcgagagatgacggctacagaagcattgactactggggccggggaaccctggtcaccgtctcctca

SEQ ID NO: 7737 - DNA, 289 bp, Homo sapiens
  source 1..289: mol_type = other DNA
tgcagcctctggattcacctttagtagttattggatgagctgggtccgccaggctccagggaaggggctggagtgggtggccaacatgaagccagatggaagtgagagagactatgtggactctgtggagggccgattcaccatctccagagacaacgccaagaactcagtgtttctgcaaatgaacagcctgagagccgaggacacggctgtgtattactgtgcgagagatgacggctacagaagcattgactactggggccggggaaccctggtcaccgtctcctca

SEQ ID NO: 7738 - DNA, 289 bp, Homo sapiens
  source 1..289: mol_type = other DNA
tgcagcctctggattcacctttagtagctattggatgagctgggtccgccaggctccagggaaggggctggagtgggtggccaacatgaagccagatggaagtgagagagactatgtacgctctgtggagggccgattcaccatctccagagacaacgccaagaactcactgtttctgcaaatgaacagcctgagagccgaggacacggctgtgtattactgtgcgagagatgacggctacagaagcattgactactggggccagggaaccctggtcaccgtctcctca

SEQ ID NO: 7739 - DNA, 289 bp, Homo sapiens; identical to SEQ ID NO: 7736
  source 1..289: mol_type = other DNA

SEQ ID NO: 7740 - DNA, 289 bp, Homo sapiens
  source 1..289: mol_type = other DNA
tgcagcctctggattcacctttagtagctattggatgagctgggtccgccaggctccagggaaggggctggagtgggtggccaacatgaagccagatggaagtgagagagactatgtggactctgtggagggccgattcaccatctccagagacaacgccaagaactcactatttttgcaaatgaacagcctgagagccgaggacacggctgtgtattactgtgcgagagatgacggctacagaagcattgactactggggccagggaaccctggtcaccgtctcctca

SEQ ID NO: 7741 - DNA, 289 bp, Homo sapiens
  source 1..289: mol_type = other DNA
tgcagcctctggattcacctttagtagctattggatgagctgggtccgccaggctccagggaaggggctggagtgggtggccaacatgaagccagatggaagtgagagagactatgtggactctgtggagggccgattcaccatctccagagacaacgccaagagctcagtgtttctgcatatgaacagcctgagagtcgaggacacggctgtatattactgtgcgagagatgacggctacagaagcattgactattggggccagggaaccctggtcaccgtctcctca

SEQ ID NO: 7742 - DNA, 289 bp, Homo sapiens
  source 1..289: mol_type = other DNA
tgcagcctctggattcacctttagtagctattggatgagctgggtccgccaggctccagggaaggggctggagtgggtggccaacatgaaaccagatggaagtgagagagactatgtggactctgtggagggccgattcaccatctccagagacaacgccaagaactcagtgtttctgcaaatgaacagcctgagagtcgaggacacggctgtatattactgtgcgagagatgacggctacagaagcattgactattggggccagggaaccctggtcaccgtctcctca

SEQ ID NO: 7743 - DNA, 289 bp, Homo sapiens
  source 1..289: mol_type = other DNA
tgcagcctctggattcacctttagtagctattggatgagctgggtccgccaggctccagggaaggggctggagtgggtggccaacatgaagccagatggaagtgagagagactatgtggactctgtggagggccgattcaccatctccagagacaacgccaagaactcactgtttctgcaaatgaacagcctgagagccgaggacacggctgtgtattactgtgcgagagatgacggctacagaagcattgactactggggccagggaaccctggtcaccgtctcctca

SEQ ID NO: 7744 - DNA, 289 bp, Homo sapiens
  source 1..289: mol_type = other DNA
tgcagcctctggattcacctttagtagctattggatgagctgggtccgccaggctccagggaaggggctggagtgggtggccaacatgaagccagatggaagtgagagagactatgtggactctgtggagggccgattcaccatctccagagacaacgccaagaactcagtgtttctgcaaatgaacagcctgagagccgaggacacggctgtgtattactgtgcgagagatgacggctacagaagcattgactactggggccggggaaccctggtcaccgtctcctca

SEQ ID NO: 7745 - DNA, 289 bp, Homo sapiens
  source 1..289: mol_type = other DNA
tgcagcctctggattcacctttaggacctattggatgagctgggtccgccaggctccagggatagggctggagtgggtggccaacataaaggaagatggaagtgaggaatactatgtggactctgtgaagggtcgattcaccatctccagagacaacgccaagaactcactgtatctacaaatgaatagcctgagagccgaggacacggccgtgtattactgtgcgagagatgacggctatcgatccattgactactggggccagggaaccctggtcaccgtctcctca

SEQ ID NO: 7746 - DNA, 289 bp, Homo sapiens
  source 1..289: mol_type = other DNA
tgcagcctctggattcacctttagtaactattggatgagctgggtccgccaggctccagggaaggggctggagtgggtggccaacatgaagccagatggaagtgagagagactatgtggactctgtggagggccgattcaccatctccagagacaacgccaagaactcagtgtttctgcaaatgaacagagtgagagtcgatgacacggctgtttattactgtgcgagagatgacggctacagaagcattgactactggggccggggaaccctggtcaccgtctcctca

SEQ ID NO: 7747 - DNA, 295 bp, Homo sapiens
  source 1..295: mol_type = other DNA
tgcagcctctggattcacctttagcaactatgccatgagctgggtccgccaggctccagggaaggggctggagtgggtctcaactatcactggtagtgatggtagcacatactacgcagactccgtgaagggccggttcaccatctccagagacaactccaagaacactctgtatctggaaatgaacagcctaagagccgaggacatggccgtatattactgtgcgaaagacaggagcaacagctggtactactttgactactggggccagggaaccctggtcaccgtctcctca

SEQ ID NO: 7748 - DNA, 295 bp, Homo sapiens
  source 1..295: mol_type = other DNA
tgcagcctctggattcacctttagcgactatgccatgagctgggtccgccaggctccagggaaggggctggagtgggtctctactatttatagcggtggtagtagcacatactatgcagactccgtgaagggccggttcaccatctccagggataattccaagaacacgctctatctgcaaatgaacagcctgcgagtcgacgacacggccgtatattattgtgcgaaagataggagcaatagttggtactactttgactactggggccagggaaccctggtcaccgtctcctca

SEQ ID NO: 7749 - DNA, 295 bp, Homo sapiens
  source 1..295: mol_type = other DNA
tgcagcctctggattcacctttagcagctatgccatgagctgggtccgccaggctccagggaaggggctggagtgggtctcaactattggaagtggtggtggtgacacatactactcagactccgtgaagggccggttcaccatctccagagacaattccaagaacacgctgtatctgcagatgatcagcctgagagccgaggacacggccttatattactgtgcgaaagatccgccggagtctggaactacctttgactattggggccagggaaccctggtcaccgtctcctca

SEQ ID NO: 7750 - DNA, 295 bp, Homo sapiens
  source 1..295: mol_type = other DNA
tgcagcctctggattcacctttagcagctatgccatgagctgggtccgccaggctccagggaaggggctggagtgggtctcaactattagtgatggaggtgctggaacatggaacgcagactccgtgaagggccggttcaccgcctccagagacaattccaagaacacgctgtacctgcatatgaacagcctgagagccgaggacacggccgtatattattgtgcgaaggaccccccggaatcggggaccacttttgactactggggccagggaaccctggtcaccgtctcctca

SEQ ID NO: 7751 - DNA, 295 bp, Homo sapiens
  source 1..295: mol_type = other DNA
tgcagcctctggattcacctttagtagctatgccatgagctgggtccgccaggctccagggaaggggctggagtgggtcgcaactattaatagaagtggtgccgacaaatattacccaggctccgtgaagggccgattcaccgcctccagagacaattccaggaacacgctgtatctgcaaatgaacagcctgacagccgacgacacggccatatattattgtgcgaaggaccccccggaatcggggaccacttttgactactggggccagggaaccctggtcaccgtctcctca

SEQ ID NO: 7752 - DNA, 295 bp, Homo sapiens
  source 1..295: mol_type = other DNA
tgcagcctctggattcacctttagcagctatgccatgagctgggtccgccaggctccagggaaggggctggagtgggtctcaactgttagtactggtggtgctaggacatactacgtagactccgtgaagggccggttcaccatctccagagacaattccaagaacacgctgtatctggaaatgaacagcctgagagccgaggacacggccgtatattactgtgcgaaagaccccccggaatcggggaccacttttgactactggggccagggaaccatggtcgccgtctcctca

SEQ ID NO: 7753 - DNA, 289 bp, Homo sapiens
  source 1..289: mol_type = other DNA
tgcagcctctggattcacctttagcagctctggcatgagctgggtccgccaggctccagggaaggggctggaatgggtctcaactataggtttcactaagacatactatcccgactccgtgaagggccggttcaccatctccagagacaattccaagagcacgctgtatctgcaaatgaccagcctgagagtcgaggatacggccgtatattactgtgcgaaagaccccccggaatcggggaccacttttgactactggggccagggaatcttggtcaccgtctcctca

SEQ ID NO: 7754 - DNA, 295 bp, Homo sapiens; identical to SEQ ID NO: 7750
  source 1..295: mol_type = other DNA

SEQ ID NO: 7755 - DNA, 295 bp, Homo sapiens
  source 1..295: mol_type = other DNA
tgcggcctctggattcacctttggcagctatgccatgagttgggtccgccaggctccagggaaggggctggagtgggtctcaactattagttctggtgggggtagtacacactaccccgactccgtgaagggccggttcaccatctccagagacaatgccaagaacaccctgtatctgcaaatatacagcctgagatccgaggacacggccatatattactgtgcgaaagatcccccggaaagtggaaccacctttgactactggggccagggaaccctggtcaccgtctcctca

SEQ ID NO: 7756 - DNA, 295 bp, Homo sapiens
  source 1..295: mol_type = other DNA
tgcagcctctggattcacctttagcagctatgccatgagctgggtccgccaggctccagggaaggggctggagtgggtctcaactattggaagtggtggtggtgacacatactactcagactccgtgaagggccggttcaccatctccagagacaattccaagaacacgctgtatctgcagatgatcagtctgagagccgaggacacggccttatattactgtgcgaaagatccgccggagtctggaactacctttgactattggggccagggaaccctggtcaccgtctcctca

SEQ ID NO: 7757 - DNA, 295 bp, Homo sapiens
  source 1..295: mol_type = other DNA
tgctgcctctggattcacctttagcagctatgccatgagctgggtccgccaggctccagggaaggggctggagtgggtctcaactattaatagtggtggtaccaggccatactacgtagactccctgaggggccggttcaccatctccagagacaattccaagaacacggtgtatctgcaaatgaacagtgtgagagccgatgacacggccgtatattactgtgcgaaagaccccccggaatcggggaccacttttgactactggggccagggaaccctggtcgccgtctcctca

SEQ ID NO: 7758 - DNA, 298 bp, Homo sapiens
  source 1..298: mol_type = other DNA
tgcagcctctggattcactttcagtaatgcctggatgagttgggtccgccaggctccagggaaggggctggagtgggttggccgtattaaaagaaaaagtgatggtgagacaacacaatacgctgcacccgtgaacggcagattcaccatctcaagagacgattcaagagacacgatgtatctgcaaatgaacagcctgaacaccgaggacacagccgtgtatttttgtaccgcagataggcttctgactgccctgtttgactcctggggccagggagtcctggtcaccgtctcctca

SEQ ID NO: 7759 - DNA, 298 bp, Homo sapiens
  source 1..298: mol_type = other DNA
tgcagcctctggattcagcctcaataacgcctggatgagctgggtccgccaggctccagggaagggactggagtgggtcgcccgtcttaaaaggaatcctgacgatgggacagagcaatacgcggcacccgtgacaggcagattcaccatctcaagagatgattcaaaaaatacactctatctgcatatgaacagcctgaaagtcgaggacacagccgtttactactgtaccgcagatcgtcttttgactgccctctttgactcctggggcccgggaaccctggtcactgtctcctca

SEQ ID NO: 7760 - DNA, 298 bp, Homo sapiens
  source 1..298: mol_type = other DNA
tgcagcctctggattcactttcagtaatgcctggatgagttgggtccgccaggctccagggaaagggctggagtgggttggccgtattaaaagaaaaattgattatgagacaccacaatacgctgaacccgtgaacggcagattcaccctctcaagagacgattcaagaaacatcatgtatctgcaaatgaacagcctgaaaaccgaggacacagccgtatatttttgtaccgctgataggcttctgactgccctgtttgactcctggggccagggagtcctggtcaccgtctcctca

SEQ ID NO: 7761 - DNA, 298 bp, Homo sapiens
  source 1..298: mol_type = other DNA
tgcagcctctggattcactttcagtaatgcctggatgagctgggtccgccaggctccagggaaggggctggagtgggttggccgtcttaaaagaaaaagtgatgctgagacaacacaatacgctgcacccgtgaaaggcagattcaccatctcaagagatgattcaagaaacacgatgtatctgcaaatgaacaacctgaaaaccgaggacacagccgtctatttttgtaccgcagataggcttctgactgccctgtttgactcctggggccagggagttctggtcaccgtctcctca

SEQ ID NO: 7762 - DNA, 298 bp, Homo sapiens
  source 1..298: mol_type = other DNA
tgcagcctctggattcactttcagtaatgcctggatgagctgggtccgccaggctccagggaagggcctggagtggattggccgtgttaaaagacaaagtgatgttgagacaacgcagtacgctgcacccgtgaaaggcagattcaccatctcaagagatgattcaacaaacacgatgtatctagacatgaacagcctgaaagccgaggacacagccgtgtatttttgtaccgcagataggcttctgactgccctgtttgactcctggggccagggagtcctggtcaccgtctcctca

SEQ ID NO: 7763 - DNA, 283 bp, Homo sapiens
  source 1..283: mol_type = other DNA
tgcagcctctggattcatgttgagtgactacaacatgaattgggtccgccaggccccagggaaggggctggagatagtttcatacattagtcgttctaactccatattctacggagactctgtgaggggccgattcaccggctccagagacaatgccaagaactcactgtatttgcaaatgaacagccttcgagacgaagacacggctgtctactattgtgtgagagattttaattggggttttgacttctggggccagggagccctggtcaccgtctcctca

SEQ ID NO: 7764 - DNA, 286 bp, Homo sapiens
  source 1..286: mol_type = other DNA
tgcagcctctggattcagctttagtgattatagcatgaactgggtccgccaggctccggggaaggggctggagtgggtttcatacattgacagatatagtaacaacatacagttcgcagactctgtgaagggccgattcaccatctccagagacaacgccaaggcctcactgtctctgcaaatgaacagcctgagagacgaggacacggctgtgtattactgtgtgagagatttcaactgggggtttgacttctggggccaggggaccccggtcaccgtctcctca

SEQ ID NO: 7765 - DNA, 292 bp, Homo sapiens
  source 1..292: mol_type = other DNA
tgaagcctctggattcacctttagtagcttttggatgacctgggtccgccaggctccagggaaggggctggagtgggtggccaacataaagcaagatggaactgagaaatactttgtggactctgtgaagggccgattcaccatctccagagacaacgccaagaattcactgtatctgcaaatgaacagcctgagagccgaggacacggctgtgtattattgtgcgagagaagggggtgctggttattcgtttgactcctggggccagggaaccctggtcaccgtctcctca

SEQ ID NO: 7766 - DNA, 292 bp, Homo sapiens
  source 1..292: mol_type = other DNA
tgcagcctctggattcacttttagtaacttttggatgacctgggtccgccaggctccagggaagggactggagtgggtaggcaacacaaaccaagatgaaactgagaagaactatgtggactctgtgaagggccgattcaccatctccagagacaacgccaagaggtcactgtatctgcacatgacctccctgagagtcgaggacatggctgtctatttttgtgcgagagaagggggtgctggttattcttttgactcctggggccagggaaccctggtcaccgtctcctca

SEQ ID NO: 7767 - DNA, 283 bp, Homo sapiens
  source 1..283: mol_type = other DNA
tgcagcctctgggttcacctttcgtaacttttggatggcctgggtccgccagcctccaaataaggggctggagtgggtggcccacataaaggaagatggaagtcagaaatactatttggactctgtgaagggccggttcaccatctccagagacgacacccagaactcactgcatctgcaaatgaacagcctgaaagccgaggacacggctctatattactgtgtgaaaggggggtgggagcttgactcctggggccagggaaccctggtcaccgtctcctca

SEQ ID NO: 7768 - DNA, 283 bp, Homo sapiens
  source 1..283: mol_type = other DNA
tgcagcctctggattcacgtttagaagatattggatggcctgggtccgccagcctccagataaggggctggagtgggtggcccacataaaggaagatggaagccagaaatattatgtggactctgtgaagggccgcttcaccatctccaaagacgacaccaagaactcactgcatctgcaaatggacagcctgagagtcgaggacacggctatatattactgtgtgaaaggggggtgggagcttgactcctggggccagggaaccctggtcaccgtctcctca

SEQ ID NO: 7769 - DNA, 283 bp, Homo sapiens
  source 1..283: mol_type = other DNA
tgcagcctctggattcagtttgagaaattattggatgtgttgggtccgccaggctccagggaaggggctggagtgggtggcccacataaaggaagatgggactgagaaatattatgtggactctgtggagggccgatttatcatctccaaagacgacgccaggaatcgggtctatctgcagatgaacagcctgacagccgaggacacggccgtctattactgtgtgaaaggaggttgggaacttgactcctggggccagggaaccgtggtcaccgtctcctca

SEQ ID NO: 7770 - DNA, 292 bp, Homo sapiens
  source 1..292: mol_type = other DNA
cactgtctctggtgtctccatcagtagttactactggagctggatccggcagcccgccgggaagggaccggagtggattggccgtatacatataactgagaacaggttctacagcccctccctcaagagtcgagtcaccatgtcattagacacgtccaagagccagttctccctgaggctgagctctgtgaccgccgcggacacggccgtctattactgtgcgaagtatggagaagtgccagctgcccactttgactactggggccagggaaccctggtcaccgtctcctca

SEQ ID NO: 7771 - DNA, 292 bp, Homo sapiens
  source 1..292: mol_type = other DNA
cactgtctcaggtgcctccataagtagttactattggagttggatccggcagaccgccgggaggggactggagtggattgggcgtgtctacatcactgagagctccaacttcaatccctccctcaagagtcgcgtcaccatgtcactagacacgtccaagaaccagttctccctgaagctgagctctgtgaccgccgcggacacggccatatattactgtgcgaaatatggtgaagtgccagctgcccactttgactactggggccagggaatcctggtcaccgtctcctca

SEQ ID NO: 7772 - DNA, 292 bp, Homo sapiens
  source 1..292: mol_type = other DNA
tgcagcctctggcttcacctttatcaactttgccgtgacatgggtccgccaggctccagggaaggggctggagtgggtctcaactattcataatgatggtgttgtcacatattacgcagactccgtgcagggccggttcaccatctccagagacaactccataaacaccctttatctggacatgaacagcctgagaggcgaggacacggccatatattactgtgcgaaaaatggccggggctggaactattcggactactggggcctgggaaccctggtcaccgtctcctca

SEQ ID NO: 7773 - DNA, 295 bp, Homo sapiens
  source 1..295: mol_type = other DNA
tgcagcctctggattcacctttagcggctatgccatgacctgggtccgccaggctccagggaaggggctggagtgggtctcaactattagtggtaatggtgatggtaccacatactacgcagactccgtgaagggccggttcaccatctccagagacgattccaagaacacactgtatctgcagatgaacagcctgagagccgacgacacggccgtatattactgtgcgaaaaatgggaggggctggaactactctgactactggggccagggaacccgggtcaccgtctcctca

SEQ ID NO: 7774 - DNA, 292 bp, Homo sapiens
  source 1..292: mol_type = other DNA
tgcagcctctggattcacgtttatcaactatgccgtgacctgggtccgccaggctccagggagggggctggagtgggtctcaactattcataatgatggtcgtgtcacatactacgcagactccgtgaagggccggttcaccatctccagagacaattccgagaacacgctgtatctgcaaatggacagcctgagagccgaggacacggccatatattactgtgcgaaaaatggccggggctggaactattcggactactggggccagggaaccgtggtcaccgtctcctca

SEQ ID NO: 7775 - DNA, 305 bp, Homo sapiens
  source 1..305: mol_type = other DNA
ccatctccggggacagtgtctctagcaacagtgctgcttggaactggatcaggcagtccccatcgagaggccttgagtggctggggaggacatactacaattccaagtggtataatgattatgcagtatctgtaaaaagtcgaataaccatcaacccagacacatccaagaaccagttctccctgcagctgaagtctatgactcccgaggacacggctgtttactactgtgcaagagatgtctcccccgggagcagcagctggtacgactactggggccagggaaccctggtcaccgtctcctca

SEQ ID NO: 7776 - DNA, 305 bp, Homo sapiens
  source 1..305: mol_type = other DNA
ccatctccggggacagtgtctctagcaacagtgctgcttggaactggatcaggcagtccccatcgagaggccttgagtggctgggaaggacatactacgggtccaagtggtataatgattatgcggtatctgtgagaggtcgaataaccatcaacccagacacatccaagaaccaggtctccctgcagctgaactctgtgactcccgaggacacggctgtgtattactgtgcaagagatgtatcccccggtagcagcagctggtatgactactggggccagggaaccctggtcaccgtctcctca

SEQ ID NO: 7777 - DNA, 286 bp, Homo sapiens
  source 1..286: mol_type = other DNA
tgcaacctctggattcacgtttagtcagtattggatggcctgggtccgccaggctccagggacggggctagagtgggtggccaacataaaggaagatggaactgagaaatattatgtgggctctgtgaaaggccgattctccatctccagagacaacgccaagaattcactgtttctgcaaatgaacagcctgagagccgaggacacggctgtctattattgtgcgagacacggtcaccaccactttgactactggggccagggaatcctggtcaccgtctcttca

SEQ ID NO: 7778 - DNA, 286 bp, Homo sapiens
  source 1..286: mol_type = other DNA
tgcagcctctggattcacctttagtaactattggatggcctgggtccgccaggctccagggaaggggctggagtgggtggccaacataaagcatgatggaggtgagcggtactatgtggactctgtgcaggcccgattcaccatctccagagacaacgccgacaattcgctgtatctggtaatgaacagcctgcgagccgacgacacggctgtgtattattgtgcgagacatggccaccaccactttgattattggggccagggagccctggtcaccgtctcctca

SEQ ID NO: 7779 - DNA, 286 bp, Homo sapiens
  source 1..286: mol_type = other DNA
tgcagcctctggataccctttcaataacgcctggatgaattgggtccgccaggctccagggaaggggctggagtgggttggccgtattaaaagcaaatctgatggtgggacaacagactacgctgcacccgtgaaaggcagattcattatctcaagagatgattcaaagaacacgctgtatctccaaatgaacagcctgaaaagcgaggacacagccgtttattactgcaccgttcatagtgcccttgactactggggccagggaaccctggtcaccgtctcctca

SEQ ID NO: 7780 - DNA, 286 bp, Homo sapiens
  source 1..286: mol_type = other DNA
tgcaacctctggattcactttcaagaatgcctggatgaactgggtccgccaggctccagggaaggggctggagtgggttggccgtattaaaagcaaaactgatggtgggacaacagactacgctgcgcccgtgcaaggcagattcaccatctcaagagatgattcacaaaacacgctgtatctgcaaatgagcagcctgaaaaccgaggacacagccatatattactgtaccgtacatagtgccttggactactggggccagggaaccctggtcaccgtctcctca

SEQ ID NO: 7781 - DNA, 286 bp, Homo sapiens
  source 1..286: mol_type = other DNA
tgcaacctctggattcactttcaagaatgcctggatgaactgggtccgccaggctccagggaaggggctggagtgggttggccgtattcaaaggcaaattgatggtgggacaacagactacgctgcgcccgtgcaaggcagattcaccatctcaagagatgattcacaaaacacgctgtatctgcaaatgagcagcctgaaaaccgaggacacagccatatattactgtaccgtacatagtgccttggactactggggccagggaaccctggtcaccgtctcctca

SEQ ID NO: 7782 - DNA, 286 bp, Homo sapiens
  source 1..286: mol_type = other DNA
tgcagcctctggataccctttcagtaacgcctggatgagctgggtccgccaggctccagggaaggggctggagtacgttggccgtattaaaagaaaaactgacggtgagacaacagactacgctgcacccgtgaaaggcagattcactatctcaagagatgattcaagaaacacgctgtatctacaaatgaacagcctgaaaaccgaggacacagccgtgtattactgcaccgttcatagtgcccttgactactggggccagggagccctggtcaccgtctcctca

SEQ ID NO: 7783 - DNA, 289 bp, Homo sapiens
  source 1..289: mol_type = other DNA
tgcagcctctggattcaacttcgatatctttaccatgaactgggtccgccaggctccagggaaggggctggagtggctctcctatattagtagtagttctcttaccatatactacgcagactctgtgaagggccgattcaccacctccagagacaatgtcaagaactctctgtatctggagatgaacggcctgagaagcgaggacacggctgtttattactgtgcgaggggagatggtaatggttacccggactattggggccggggaaccctggtcaccgtctcctca

SEQ ID NO: 7784 - DNA, 289 bp, Homo sapiens
  source 1..289: mol_type = other DNA
tgcagcctctggattcaacttcagtatctttaccatgaactgggtccgccaggctcccgggaagggcctggagtggatttcatacattagcagtagtagtttgaccaaatactacgcagacgctgtgaagggccgcttcaccatctccagagacaatgccaagaactcactgtttttgcaaatgaacggcctgagagacgaggacagggctgtttattactgtgcgagaggtgatggaaatggttatccggactactggggccggggaaccctggtcaccgtctcctca

SEQ ID NO: 7785 - DNA, 301 bp, Homo sapiens
  source 1..301: mol_type = other DNA
tgcagcctctggattccctttctctaacgcctggatgacctgggtccgccaggctccagggaaggggctggagtgggttggccgtattaaaagtaaagttgttggtgcgacaacagactacgctgcacccgtgaaaggcagattcaccatctcaagagatgattcaaaaaacacgctgtatctgcacatggacagcctgaaaagcgaggacactgccgtctattactgtatcagcactgtaggatatagtggctacgattgtggctactggggccagggaaccctggtcaccgtctcttca

SEQ ID NO: 7786 - DNA, 301 bp, Homo sapiens
  source 1..301: mol_type = other DNA
tgcagcctctggattccctttcactaatgcctggatgagctgggtccgccaggctccagggaaggggctggagtgggttggccgtattaaaagcaaaagtggtggtgcgacaacagactacgctgcacccgtgaaaggcagattcaccatctcaagagatgattcaaaaaccacgctgtatttgcaaatgaacagcctgaaaaccgaggacacagccgtgtattactgtataagtacggtaggatatagtggctacgattgcggctactggggccagggaaccctggtcaccgtctcctca

SEQ ID NO: 7787 - DNA, 301 bp, Homo sapiens
  source 1..301: mol_type = other DNA
tgcagcctctggattccctttcactaatgcctggatgagctgggtccgccaggctccagggaaggggctggagtgggttggccgtattaaaagcaaaagtggtggtgcgacaacagactacgctgcacccgtgaaaggcagattcaccatctcaagagatgattcaaaaaccacgctgtatttgcaaatgaacagcctgaaaatcgaggacacagccgtgtattactgtataagtacggtaggatatagtggctacgattgcggctactggggccagggaaccctggtcaccgtctcctca

SEQ ID NO: 7788 - DNA, 301 bp, Homo sapiens
  source 1..301: mol_type = other DNA
tgcagcctctggattcactttctctaatgcctggatgacctgggtccgccaggctccagggaaggggctggagtgggttggccgtattaaaagtaatgttgttggtgcgacaacagactacgctgcacccgtgaaaggcagattcaccatctcaagagatgattcaaaaaccacgctgtatctgcacatgaacagcctgaaaagcgaggacactgccgtctattactgtatcagcactgtaggatatagtggctacgattgtggctactggggccagggaaccctggtcaccgtctcttca

SEQ ID NO: 7789 - DNA, 289 bp, Homo sapiens
  source 1..289: mol_type = other DNA
tgcagcctccggactcatttttagtgacgcctggatgagctgggtccgccagcgtccagggaaggggctggagtgggttggccgtattaagagcaaaatttttgatgagagagcagagtacgctgcgcccgtgaaaggcagattcaccatctcaagagacgattcaaaaaacaccatgttcctacaaatgaacagcctgacagtcgaggacacaggcgtgtattattgtagcacagatgatcctcggtggccccactggggccagggaacccagatcaccgtctcgtcg

SEQ ID NO: 7790 - DNA, 289 bp, Homo sapiens
  source 1..289: mol_type = other DNA
tgcagtctctggactcactttcagtgacgcctggctgagctgggtccgccaggctccagggaaggggctggagtgggttggccggatgaaaagccacagtgatggtggggcagcagagtacgctgcggccgtcaaaggcaaattcaccatttcaagagatgattcaaagaacacgctgtatctgcaaatgaacagcctgaaaaccgaggactcagccgtatactactgttccactgatgacccccggtggcctcactggggccagggaaccctggtcaccgtctcctca

SEQ ID NO: 7791 - DNA, 289 bp, Homo sapiens
  source 1..289: mol_type = other DNA
tgcagtctctggactcactttcagtgacgcctggctgagctgggtccgccaggctccagggaaggggctggagtgggttggccgtatgaaaagccacagtgatggtggggcagcagagtacgctgcggccgtcaaaggcaaattcaccatttcaagagatgattcaaaaaacacgctgtatctgcaaatgaacagcctgaaaaccgaggactcagccgtatattactgttccactgatgacccccggtggcctcactggggccagggaaccctggtcaccgtctcctca

SEQ ID NO: 7792 - DNA, 289 bp, Homo sapiens
  source 1..289: mol_type = other DNA
tgcagcctccggactcatttttagtgacgcctggatgagctgggtccgccagcgcccagggaaggggctggagtgggttggccgtattaagagcaaaatttttgatgagagagcagagtacgctgcgcccgtgaaaggcagattcatcatctcaagagacgattcaaaaaacaccctgttcctacaaatgaacagcctgacagtcgacgacacaggcgtgtattattgtagcacagatgatcctcggtggccccactggggccagggagcccagatcaccgtctcgtcg

SEQ ID NO: 7793 - DNA, 286 bp, Homo sapiens
  source 1..286: mol_type = other DNA
tgcagcctctggattcaccttcagagtcttctggatgcactgggtccgccaagttccaggggagggactggtgtgggtcgcacatatgaatcaagatgggagaacgacaaactacgcggactccgtcaagggccgattcaccatctccagagacaacgccagaaacacgctgtatctgcaattaaatagtctgagagtcgaagatacgggtatatattattgtgcgagagatgttcgcggtccggaggacttctggggccagggaaccctggtcaccgtctcctca

SEQ ID NO: 7794 - DNA, 286 bp, Homo sapiens
  source 1..286: mol_type = other DNA
tgcagcctctggattcaccttcagagtcttctggatgcactgggtccgccaagttccaggggagggactggtgtgggtcgcacatatgaatcaagatgggagaacgacaaactacgcggactccgtcaagggccgattcaccatccccagagacaacgccagaaacacgctgtatctgcaattaaatagtctgagagtcgaagatacgggtatatattattgtgcgagagatgttcgcggtccggaggacttctggggccagggaaccctggtcaccgtctcctca

SEQ ID NO: 7795 - DNA, 286 bp, Homo sapiens; identical to SEQ ID NO: 7793
  source 1..286: mol_type = other DNA

SEQ ID NO: 7796 - DNA, 286 bp, Homo sapiens
  source 1..286: mol_type = other DNA
tgcagcctctggattcaccttcagagtcttctggatgcactgggtccgccaagttccaggggagggactggtgtgggtcgcacatatgaatcaagatgggagaacgacaaactacgcggactccgtcaagggccgattcaccatctccagagacaacgccagaaacacgctgtatctgcaattagatagtctgagagtcgaagatacgggtatatattattgtgcgagagatgttcgcggtccggaggacttctggggccagggaaccctggtcaccgtctcctca

SEQ ID NO: 7797 - DNA, 284 bp, Homo sapiens
  source 1..284: mol_type = other DNA
cagcctctggattcaccttcagagtcttctggatgcactgggtccgccaagttccaggggagggactggtgtgggtcgcacatatgaatcaagatgggagaacgacaaactacgcggactccgtcaagggccgattcaccatctccagagacaacgccagaaacacgctgtatctgcaattaaatagtctgagagtcgaagatacgggtatatattattgtgcgagagatgttcgcggtccggaggacttctggggccagggaaccctggtcaccgtctcctca

SEQ ID NO: 7798 - DNA, 286 bp, Homo sapiens
  source 1..286: mol_type = other DNA
tgcagcctcaggattcaccttcaggcgctactggatgcactgggtccgccaacctccagggatggggctggactgggtgtcaaatattaatgaagatggcagtgacacaaactacgcggactccgtgaagggccgattcaccatttccagagacaacgcccagaatatattgtatcttcaaatgaccagtctgagagtcgaggacacggctgtctattattgtgcaagagatgttcgaggcccggaagacttctggggccagggaatcctggtcaccgtctctaca

SEQ ID NO: 7799 - DNA, 293 bp, Homo sapiens
  source 1..293: mol_type = other DNA
ccatctccggggacagtgtctctagtaagactgctgcttggaactggctcaggcagtccccatcgagaggccttgagtggctgggaaggacatactacaggtccaagtggtataatgattatgcagtctttctgaacggtcgaatcaccgtcaagccagacacatccaagaaccagttctccctgcagctcaactctgtgactcccgaggacacggctgtgtattactgtgcaagagatccctttagtactcttgactactggggccagggatccctggtcaccgtctcctca

SEQ ID NO: 7800 - DNA, 293 bp, Homo sapiens
  source 1..293: mol_type = other DNA
ccatctccggggacagtgtctccagcaacactgctgcttggaactggatcaggcagtccccatcgggaggccttgagtggctgggaaggacatactacaggtccaagtggtataatgactatgcgttatctgtgaaaaatcgaataaccgtcaacccagacacatccaagaaccagttctcccttcaactgacctctgtaattcccgaggacacggctgtatattattgtgcaagagatcctttcagcacccttgactactggggccagggtatcctggtcaccgtctcctca

SEQ ID NO: 7801 - DNA, 298 bp, Homo sapiens
  source 1..298: mol_type = other DNA
cactgtctctggtgcctccatcagcggtaaaggttactactggagctggatccgccagctcccagggaagggcctggagtggattgggtacatctattccactgggagtgcctactacaacccgtccctcaagagtcgagttaccatgtcagtagacacgtctaagaatcacatctccctgaagatggactctctgactgccgcggacacggccatatattactgtgcgagagatcaagatggctacggatactattttgactactggggccagggaaccctggtcaccgtctcctca

SEQ ID NO: 7802 - DNA, 298 bp, Homo sapiens
  source 1..298: mol_type = other DNA
cactgtctctggtgcctccatcagcggtaaaggttattactggagctggatccgccagctcccagggaagggcctggagtggattgggtacatctattccactgggagtgcctactacaacccgtccctcaagagtcgagttaccatgtcagtagacacgtctaagaatcacatctccctgaagatggactctctgactgccgcggacacggccatatattactgtgcgagagatcaagatggctacggatactattttgactactggggtcagggaaccctggtcaccgtctcctca

SEQ ID NO: 7803 - DNA, 298 bp, Homo sapiens
  source 1..298: mol_type = other DNA
ctctgtctctggtgtctccatcaacagtgttggttactattggagctggatccgccagctcccagggcagggcctggagtggattgggtacatctattccactgggagcgcctactacaacccgtccctcaagagtcgacttaccatatcactagacacgtctaagaaccacttctccttgatgatgagctctgtgactgccgcggacacggccgtgtattactgtgcgagagatcaagatggctacgggtactattttgactactggggccagggaaccctggtcaccatctcctca

SEQ ID NO: 7804 - DNA, 298 bp, Homo sapiens
  source 1..298: mol_type = other DNA
cactgtctctggtgcctccatcagcggtaaaggtttttactggagctggatccgccagctcccagggaagggcctggagtggattgggtacatctattccactgggagtgcctactacaacccgtccctcaagagtcgagttaccatgtcagtagacacgtctaagaatcacatctccctgaagatggactctctgactgccgcggacacggccatatattactgtgcgagagatcaagatggctacggatactattttgactactggggccagggaaccctggtcaccgtctcctca

SEQ ID NO: 7805 - DNA, 298 bp, Homo sapiens; identical to SEQ ID NO: 7802
  source 1..298: mol_type = other DNA

SEQ ID NO: 7806 - DNA, 298 bp, Homo sapiens
  source 1..298: mol_type = other DNA
cactgtctctggtgcctccatcagcggtaaaggttactactggagctggatccgccagctcccagggaagggcctggagtggattgggtacatctattccactgggagtacctactacaacccgtccctcaagagtcgagttaccatgtcagtagacacgtctaagaatcacatctccctgaagatggactctgtgactgccgcggacacggccgtgtattactgtgcgagagatcaagatggctacggatactattttgactactggggccagggaaccctggtcaccgtctcctca

SEQ ID NO: 7807 - DNA, 298 bp, Homo sapiens
  source 1..298: mol_type = other DNA
cactgtctctggtgcctccatcagcggtaaaggttactactggacctggatccgccagctcccagggaagggcctggagtggattgggtacatctattccactgggagtgcctactacaacccgtccctcaagagtcgagttaccatgtcagtggacacgtctaagaatcacatctccctgaagatggactctctgactgccgcggacacggccatatattactgtgcgagagatcaagatggctacggatactattttgactactggggccagggaaccctggtcaccgtctcctca

SEQ ID NO: 7808 - DNA, 298 bp, Homo sapiens
  source 1..298: mol_type = other DNA
cagtgtctctggtggctccattagtagtaaaggttactattggagctggattcgccagttcccagggaagggcctggagtggattgggtacatctattccactgggagcgcctactacaacccgtccctcaagagtcgactcaccatatcagtagacacgtctcagaaccacttctccctgatggtgagctctgtgactgccgcggacacggccgtgtattactgtgcgagagatcaagacggctacgggtactattttgactactggggccagggaatcctggtcaccgtctcctca

SEQ ID NO: 7809 - DNA, 298 bp, Homo sapiens
  source 1..298: mol_type = other DNA
cactgtctctggtgcctccatcagcggtaaaggttactactggagctggatccgccagctcccagggaagggcctggagtggattggctacatctattccactgggagtacctactacaacccgtccctcaagagtcgagttaccatgtcagtagacacgtctaagaatcacatctccctgaagatggactctgtgactgccgcggacacggccgtgtattactgtgcgagagatcaagatggctacggatactattttgactactggggccggggaaccctggtcaccgtctcctca

SEQ ID NO: 7810 - DNA, 298 bp, Homo sapiens
  source 1..298: mol_type = other DNA
cactgtttctggtgcctccatcagcggtaaaggttactactggagctggatccgccagttcccagggaagggcctggagtggattgggtacatctattccactgggagtacctactacaacccgtccctcaagagtcgagttaccatgtcagtagacacgtctaagaatcacatctccctgaagatggactctgtgactgccgcggacacggccgtgtattactgtgcgagagatcaagatggctacggatactattttgactactggggccggggaaccctggtcaccgtctcctca

SEQ ID NO: 7811 - DNA, 298 bp, Homo sapiens
  source 1..298: mol_type = other DNA
cactgtctctggtgcctccatcagcggtaaaggttactactggagctggatccgccagctcccagggaagggcctggagtggattgggtacatctattccactgggagtacctactacaacccgtccctcaagagtcgagttaccatgtcagtggacacgtctaagaatcacatctccctgaagatggactctctgactgccgcggacacggccgtgtattactgtgcgagagatcaagatggctacggatactattttgactactggggccagggaaccctggtcaccgtctcctca

SEQ ID NO: 7812 - DNA, 298 bp, Homo sapiens
  source 1..298: mol_type = other DNA
cactgtctctggtggctccatcagcagagatggtcactactggagttggatccgccagcacccagggaagggcctggagtggattgggtacatctattccactgggagtgcctactacaacccgtccctcaagagtcgggttaccatgtcagttgacacgtctaagaaccacttctccctggagatgaggtctgtgactgccgcggacacggccgtgtattactgtgcgagagatcaagatggctacggctactattttgattactggggccagggaatgttggccaccgtctcctca

SEQ ID NO: 7813 - DNA, 298 bp, Homo sapiens
  source 1..298: mol_type = other DNA
cactgtctctggtgcctccatcagcggtaaaggttactactggagttggatccgccagctcccagggaagggcctggagtggattgggtacatctattccactggaagtacgtactacaacccgtccctcaagagtcgagttaccatgtcagtagacacgtctaagaatcacatctccctgaagatggactctgtgactgccgcggacacggccgtgtattactgtgcgagagatcaagatggctacggatactattttgactactggggccagggaaccctggtcaccgtctcctca

SEQ ID NO: 7814 - DNA, 299 bp, Homo sapiens
  source 1..299: mol_type = other DNA
tcactgtctctggtgcctccatcagcggtaaaggttactactggagctggatccgccagctcccagggaagggcctggagtggattgggtacatctattccactgggagtgcctactacaacccgtccctcaagagtcgagttaccatgtcagtagacacgtctaagaatcacatctccctgaagatggactctctgactgccgcggacacggccatatattactgtgcgagagatcaagatggctacggatactattttgactactggggccagggaaccctggtcaccgtctcctca

SEQ ID NO: 7815 - DNA, 298 bp, Homo sapiens
  source 1..298: mol_type = other DNA
cagtgtctctggtggctccattagtagtaagggttactattggagctggattcgccagttcccagggaagggcctggagtggattgggtacatctattccactgggagcgcctactacaacccgtccctcaagagtcgacttaccatatcagtagacacgtctcagaaccacttctccctgatggtgaactctgtgactgccgcggacacggccgtgtattactgtgcgagagatcaagacggctacgggtactattttgactactggggccagggaatcctggtcaccgtctcctca

SEQ ID NO: 7816 - DNA, 298 bp, Homo sapiens; identical to SEQ ID NO: 7813
  source 1..298: mol_type = other DNA

SEQ ID NO: 7817 - DNA, 298 bp, Homo sapiens
  source 1..298: mol_type = other DNA
cactgtctccggtggctccgtcagcagagatggttactattggagttggatccgccagcacccagggaagggcctggagtggattgggtacatctattccactgggagtgcctactacaacccgtccctcaagagtcgggttaccatgtcagtagacacgtctaagaaccacttctccctggagatgaggtctgtgactgccgcggacacggccgtgtattactgtgcgagagatcaagatggctacggctactattttgattactggggccagggaaccctggccaccgtctcctca

SEQ ID NO: 7818 - DNA, 298 bp, Homo sapiens
  source 1..298: mol_type = other DNA
tgcagcctctggtgcctccatcagcggtaaaggttactactggacctggatccgccagctcccagggaagggcctggagtggattgggtacatctattccactgggagtgcctactacaacccgtccctcaagagtcgagttaccatgtcagtggacacgtctaagaatcacatctccctgaagatggactctctgactgccgcggacacggccatatattactgtgcgagagatcaagatggctacggatactattttgactactggggccagggaaccctggtcaccgtctcctca

SEQ ID NO: 7819 - DNA, 298 bp, Homo sapiens
  source 1..298: mol_type = other DNA
cactgtctctggtggctccatcagcagtgctggttactactggagctggatccgccagcacccagggaagggcctggagtggattgggtacatctattccagtgggagcgcctactacaacccgtccctcaagagtcgagttaccatatcagtagacacgtctaagaaccagttctccctgaagctgaggtctgtgactgccgcggacacggccgtgtattactgtgcgagagatcaagatggttacggttactactttgactactggggccagggaaccctggtcaccgtctcctca

SEQ ID NO: 7820 - DNA, 298 bp, Homo sapiens
  source 1..298: mol_type = other DNA
cactgtctctggtggctccatcagcagtgctggttactactggagctggatccgccagcacccagggaagggcctggagtggattgggtacatctattccactgggagcgcctactacaacccgtccctcaagagtcgacttaccatatcagtagacacgtctaagaaccagttctccctgaagctgagctctgtgactgccgcggacacggccgtgtattactgtgcgagagatcaagatggttacggttactactttgactactggggccagggaaccctggtcaccgtctcctca

SEQ ID NO: 7821 - DNA, 298 bp, Homo sapiens
  source 1..298: mol_type = other DNA
tgcagcctctggattcacctttagtagctattggatgacctgggtccgccaggctccagggaaggggctggagtgggtggccaacataaagcaagatggaagtgtgaaatactatgtggactctatgaagggccgattcaccatctccagagacaacgtcaagaactcactgtatctgcaaatgaacagcctgagagtcgaggacacggctgtgtattactgtgcgaccgaccggactgactacggtgactaccggttcgactactggggccagggaaccctggtcaccgtctcctca

SEQ ID NO: 7822 - DNA, 298 bp, Homo sapiens
  source 1..298: mol_type = other DNA
tgcagcctctggattcacctttagtagctattggatgagctgggtccgccaggctccagggaaggggctggagtgggtggccaacataaagcaagatggaagtgagaaatactatgtggactctgtgaagggccgattcaccatctccagagacaacgccaagagttcagtgtatctgcaaatgaacagcctgagagccgaggacacggctgtgtattactgtgcgaccgaccggactgactacggtgactaccgcttcgactactggggccagggaaccctggtcaccgtctcctca

SEQ ID NO: 7823 - DNA, 298 bp, Homo sapiens
  source 1..298: mol_type = other DNA
tgcagcctctggattcacctttagtagctattggatgagctgggtccgccaggctccagggaaggggctggagtgggtggccaacataaagcaagatggaagtgagaaatactatgtggactctgtgaagggccgattcaccatctccagagacaacgccaagaactcactgtatctgcaaatgaacagcctgagagccgaggacacggctgtgtattactgtgcgaccgaccggactgactacggtgactaccggttcgactactggggccagggaaccctggtcaccgtctcctca

SEQ ID NO: 7824 - DNA, 298 bp, Homo sapiens
  source 1..298: mol_type = other DNA
tgcagcgtctggattcacctttagtagctattggatgacctgggtccgccaggctccagggaaggggctggagtgggtggccaacattaaccaagatggaagtgtgaaatactatgtggactctatgaagggccgattcaccatctccagagacaacgtccagaactcactgtatctgcaaatgaacagcctgagagtcgaggacacggctgtgtattactgtgcgaccgaccggactgactacggtgactaccggttcgactactggggccagggaaccctggtcaccgtctcctca

SEQ ID NO: 7825 - DNA, 298 bp, Homo sapiens; identical to SEQ ID NO: 7824
  source 1..298: mol_type = other DNA

SEQ ID NO: 7826 - DNA, 298 bp, Homo sapiens
  source 1..298: mol_type = other DNA
tgcagcctctggattcacctttagcagctattggatgagctgggtccgccaggctccagggaaggggctggagtgggtggccaacataaagcaagatggaagtgagaaatactatgtggactctgtgaagggccgattcaccatctccagagacaacgccaagaactcactgtatctgcaaatgaacagcctgagagccgaagacacggctgtgtattactgtgcgacggaccgaaccgactacggtgactatagatttgactactggggccagggaaccctggtcaccgtctcctca

SEQ ID NO: 7827 - DNA, 298 bp, Homo sapiens
  source 1..298: mol_type = other DNA
tgcagcctctggattcacctttagtagttattggatgacctgggtccgccaggctccagggaaggggctggagtgggtggccaacataaagcaagatggaagtgagaaatactatgtggactctgtgaagggccgattcaccatctccagagacaacgccaagaactcactgtatctgcaaatgaacagcctgagagccgaggacacggctgtgtattactgtgcgacggaccgaaccgactacggtgactatagatttgactactggggccagggaaccctggtcaccgtctcctca

SEQ ID NO: 7828 - DNA, 292 bp, Homo sapiens
  source 1..292: mol_type = other DNA
tgcagcctctggattcaccttcagtaactatggcatgcactgggtccgccaggctccaggcaaggggctggagtgggtggcaattatctcatatgatggaagtaataaatactatgcagactccgtaaagggccgattcaccatctccagagacaattccaagaacacgctgtatctgcaaatgaacagcctgagacctgaggacacggctgtgtattcctgtgcgaaagacccttctctacgagtaactcttgcctactgcggccagggaaccctggtcaccgtctcctca

SEQ ID NO: 7829 - DNA, 292 bp, Homo sapiens
  source 1..292: mol_type = other DNA
tgcagcctctggattcaccttcagtaactatggcatgcactgggtccgccaggctccaggcaaggggctggagtgggtggcaattatctcatatgatggaagtaataaatactatgcagactccgtaaagggccgattcaccatctccagagacaattccaagaacacgctgtatctgcaaatgaacagcctgagacctgaggacacggctgtgtattcctgtgcgaaagacccttctctacgagtaactcttgcctactgcggccagggaaccctggtcaccgtctccgca

SEQ ID NO: 7830 - DNA, 292 bp, Homo sapiens
  source 1..292: mol_type = other DNA
tgcagcctctggattcaccttcaataactatggcatgcactgggtccgccaggctccaggcaaggggctggagtgggtggcaattatatcatatgatggaagtaataaatactatgcagactccgtgaagggccgattcaccatctccagagacagttccaagaacacgctgtatctgcaaatgaacagcctgagagctgaggactcggctgtgtattactgtgcgaaagacccttcactacgagtaactcttgcctactggggccagggaaccctggtcaccgtctcctca

SEQ ID NO: 7831 - DNA, 292 bp, Homo sapiens
  source 1..292: mol_type = other DNA
tgcagcctctggattcaccttcagtcactatggcatgcactgggtccgccaggctccaggcaaggggctggagtgggtggcaattatatcatatgatgggactaataaatattatgcagactccgtgaagggccgattcaccatctccagagacgattccaagaacatggtgtttctgcaaatgaacagcctgagagttgaagacacggctctatattactgcgccaaagatcccagcctgcgtgtaactcttgcctactgcggccagggaaccctggtcaccgtctcatca

SEQ ID NO: 7832 - DNA, 289 bp, Homo sapiens
  source 1..289: mol_type = other DNA
tgcaatctctggattcacctttagtaattattggatgggctgggtccgccaggctccaggaaaggggctggagtgggtggccaacataaacccacttggaagcgagaaaacttatctggactctgtgaaggaccgattcaccatctccagagacaacgccaagagctcactgtctctgcaactggacaacctgagagccgaggacacggctctgtatcactgtatgagatggggggtggtcgccggtatggacgtctggggccgagggaccgcggtcaccgtctcctca

SEQ ID NO: 7833 - DNA, 289 bp, Homo sapiens
  source 1..289: mol_type = other DNA
tgcaatctctggattcacctttagtaattattggatgggctgggtccgccaggctccaggaaaggggctggagtgggtggccaacataaacccagttggaagtgagaaaacttatctggactctgtgaaggaccgattcaccatctccagagacaacgccaagagctcactgtctctgcaaatgaacaacctgagagccgaggacacggctctgtatcactgtatgagatggggggtggtcgccggtatggacgtctggggccgagggaccgcggtcatcgtctcctca

SEQ ID NO: 7834 - DNA, 289 bp, Homo sapiens
  source 1..289: mol_type = other DNA
tgcaatctctggattcacctttagtaattattggatgggctgggtccgccaggctccaggaaaggggctggagtgggtggccaacataaacccagttggaagtgagaaaacttatctggactctgtgaaggaccgattcaccatctccagagacaacgccaagagctcactgtctctgcaaatgaacaacctgagagccgaggacacggctctgtatcactgtatgagatggggggtggtcgccggtatggacgtctggggccgagggaccgcggtcaccgtctcctca

SEQ ID NO: 7835 - DNA, 289 bp, Homo sapiens
  source 1..289: mol_type = other DNA
tgcaatctctggattcaactttcctaattattggatgggctgggtccgccaggctccaggaaaggggctggagtgggtggccaacataaacccagctggaagtgagaaatattatctggactctgtgaaggaccgattcaccatctccagagacaacgccaagagctcactgtctctgcaaatgaacaacctgagagccgaggacacggctctgtattactgtatgagatggggggtggtcgccggtatggacgtctggggccgagggaccgcggtcaccgtctcctca

SEQ ID NO: 7836 - DNA, 289 bp, Homo sapiens
  source 1..289: mol_type = other DNA
tgcaatctctggattcacctttagcagccattggatgggctgggtccgccaggctccaggcagcgggctggagtgggtggccaatataaacccgggtggaagtgatgaatattatgtggaatctgcgaagggccggttcaccgtctccagggacaacgcccagggctcactgtttctgcagatgcacggcctgagagccgacgacacggccgtctattactgtatgagatggggagtagtggccggtatggacgtctggggccagggaaccacggtcaccgtctcctca

SEQ ID NO: 7837 - DNA, 284 bp, Homo sapiens
  source 1..284: mol_type = other DNA
ccatctccggggacagtgtctctagcaagagtgctgcttgggactggatcaggcggtccccatcgagaggccttgagtggctgggaaggacatactacaggtccaagtggtataatgattatgcagtgtctgtgaaaagtcgcataaccatcaacccagacacatccaagaaccagttctccctgcagctgaactctgtgactcccgaggacacggctatctattactgtgcagatctggaacggggctactggggccagggaaccctggtcaccgtctcctca

SEQ ID NO: 7838 - DNA, 284 bp, Homo sapiens; identical to SEQ ID NO: 7837
  source 1..284: mol_type = other DNA

SEQ ID NO: 7839 - DNA, 284 bp, Homo sapiens
  source 1..284: mol_type = other DNA
ccatctccggggacagtgtctctagcaacagtgctgcttggaactggatcaggcagtccccatcgagaggccttgagtggctgggaaggacatactacaggtccaagtggtatcgtggttatgcagtatctgtgaaaggtcgaataaccatcaacccagacacatccaagaaccagttctccctggagttgaactctgtgactcccgaggacacggctctatattattgtgcagacttggagcggggctactggggccagggaaccctggtcaccgtctcctca

SEQ ID NO: 7840 - DNA, 307 bp, Homo sapiens
  source 1..307: mol_type = other DNA
tgcggcctctggattccccttcagtagttatgaaatgaactgggtccgccaggctccagggaaggggctggagtgggtttcatacattagtggtagtagtcgtaacatttattacgcagactctgtgaagggccgattcaccatctccagagacaacgccaagaactcactgtatctgcaaatgaacagcctgcgagccgaggacacggctatttattactgtgcgagattcggcggtagtatggttcggggactcgggggctggttcgacccctggggccagggaatcctggtcaccgtctcctca

SEQ ID NO: 7841 - DNA, 307 bp, Homo sapiens
  source 1..307: mol_type = other DNA
tgcggcctctggattccccttcagtagttatgaaatgaactgggtccgccaggctccagggaaggggctggagtgggtttcatacattagtggtagtggtcgtaacatatactacggagactctgtgaagggccgattcaccatctccagagacaacgccaagaactcactgtatctacaaatgaacagcctgcgagccgaggacacggctgtttattactgtgcgagattcggcggtagtatggttcggggactcgggggctggttcgacccctggggccagggaatcctggtcaccgtctcctca

SEQ ID NO: 7842 - DNA, 307 bp, Homo sapiens
  source 1..307: mol_type = other DNA
tgcggcctctggattccccttcagtagttatgaaatgaactgggttcgccaggctccagggaaggggctggagtgggtttcatacattagtggtagtagtcgtaacatatactacgcagactctgtgaagggccgattcaccatctccagagacaacgccaagaactcactgtatctgcaaatgaacagcctgcgagccgaggacacggctgtttattattgtgcgagattcggcggtagtatggttcggggactcgggggctggttcgacccctggggccagggaatcctggtcaccgtctcctca

SEQ ID NO: 7843 - DNA, 307 bp, Homo sapiens
  source 1..307: mol_type = other DNA
tgcagcctctggattcaccttcagtaattatgaaatgaactgggtccgccaggctccagggaaggggctggagtgggtttcatacattagtggtagtggtagaaacatatactacgcagactctgtgaagggccgattcatcatctccagagacaacgccaagaactcactgcatctgcaaatgaacagcctgagagccgaggacacggctgtttattactgtgcgagatttggaggctctatggttcggggacttggggggtggttcgacccctggggccagggaaccctggtcaccgtctcctca

SEQ ID NO: 7844 - DNA, 307 bp, Homo sapiens
  source 1..307: mol_type = other DNA
tgcagcctctggattcaccttcagtaattatgaaatgaactgggtccgccaggctccagggaaggggctggagtgggtttcatacattagtggtagtggtagaaacatatactacgcagactctgtgaagggccgattcaccatctccagagacaacgccaagaactcactgcttctgcaaatgaacagcctgagagtcgaggacacggctgtttattactgtgcgagatttggaggctctatggttcggggacttggggggtggttcgacccctggggccagggaaccctggtcaccgtctcctca

SEQ ID NO: 7845 - DNA, 307 bp, Homo sapiens
  source 1..307: mol_type = other DNA
tgcagcctctggattcaccttcagtaattatgaaatgaactgggtccgccaggctccagggaaggggctggagtgggtttcatacattagtggtagtggtagaaacatatactacgcagactctgtgaagggccgattcaccatctccagagacaacgccaagaactcactgcatctgcaaatgaacagcctgagagccgaggacacggctgtttattactgtgcgagatttggaggctctatggttcggggacttggggggtggttcgacccctggggccagggaaccctggtcaccgtctcctca

SEQ ID NO: 7846 - DNA, 307 bp, Homo sapiens
  source 1..307: mol_type = other DNA
tgcagcctctggattcaccttcagtaattatgaaatgaactgggtccgccaggctccagggaaggggctggagtgggtttcatacattagtgggagtggtagaaacatatactacgcagactctgtgaagggccgattcaccatctccagagacaacgccaagaactcactgcatctgcaaatgaccagcctgagagccgaggacacggctgtttattactgtgcgagatttggaggctctatggttcggggacttggggggtggttcgacccctggggccagggaaccctggtcaccgtctcctca

SEQ ID NO: 7847 - DNA, 307 bp, Homo sapiens
  source 1..307: mol_type = other DNA
tgcggcctctggattccccttcagtagttatgaaatgaactgggtccgccaggctccagggaaggggctggagtgggtttcatacattagtggtagtagtcgtaacatatactacgcagactctgtgaagggccgattcaccatctccagagacaacgccaagaactcactgtatctgcaaatgaacagcctgcgagccgaggacacggctatttattactgtgcgagattcggcggtagtatggttcggggactcgggggctggttcgacccctggggccagggaatcctggtcaccgtctcctca

SEQ ID NO: 7848 - DNA, 307 bp, Homo sapiens
  source 1..307: mol_type = other DNA
tgcagcctctggattcaccttcagtaattatgaaatgaactgggtccgccaggctccagggaaggggctggagtgggtttcatacattagtggtagtggtagaaacatatactacgcagactctatgaagggccgattcaccatctccagagacaacgccaagaactcactgcatctgcaaatgaacagcctgagagccgaggacacggctgtttattactgtgcgagatttggaggctctatggttcggggacttggggggtggttcgacccctggggccagggaaccctggtcaccgtctcctca

SEQ ID NO: 7849 - DNA, 277 bp, Homo sapiens
  source 1..277: mol_type = other DNA
tagtgtctctggtgactccatgagtagtggtggtttctattggacctggatccgccaacgcccagggaagggcctagagtggcttgggtacacctattacagtgggctcctgttgtacaacccgtccctcaagagtcgacttaccatatcggttgacaagtctaagaaccagttctccctacagttgacctctgtgactgccgcggacacggccgtctattactgtgcgaaaactttactgtcgtggggcaagggaaccctggtcaccgtctcctca

SEQ ID NO: 7850 - DNA, 277 bp, Homo sapiens
  source 1..277: mol_type = other DNA
tagtgtctctggtgactccatgagtagtggtggtttctactggacctggatccgccaacacccagggaagggcctggagtggcttgggtacatctattacagtgggctcctgttgtacaacccgtccctcaagagtcgacttaccatatcggtagacaagtctaagaaccagttctccctgaagctgacctctgtgactgccgcggacacggccgtgtattactgtgcgaagactttactgtcgtggggccagggaaccctggtcaccgtctcctca

SEQ ID NO: 7851 - DNA, 277 bp, Homo sapiens
  source 1..277: mol_type = other DNA
cagtatctctggtgactccatgagcactggtggttactactggacctggatccgccagcacccagggaagggcctggagtggattgggtacatctattacagtgggctttcctactacaacccgtccctcaagagtcgacttaccatgtcagtcgacaagtctaacaaccagttctccctgaaactgacctctgtgactgccgcggacacggccgtgtattactgtgcgaaaacactgctgagctggggccagggaacgctggtcaccgtctcctca

SEQ ID NO: 7852 - DNA, 283 bp, Homo sapiens
  source 1..283: mol_type = other DNA
tgcagcctctggattcaccttcagtaactactggatgcactgggtccgccaagctccagggaaggggctggtgtgggtctcatatattaataatcatgggactaccacaagctacgcggactccgtgaagggccgattcaccatctccagagacaacgccaagaacacgctgtatttgcaaatgaacagtctgagagccgacgacacggctatatattactgtgcaagagaggcaaatgcttttgatatctggggccaagggacaatggtcaccgtctcttca

SEQ ID NO: 7853 - DNA, 283 bp, Homo sapiens
  source 1..283: mol_type = other DNA
tgcagcctctggattcactttcacaacgtactggatgcactgggtccgccaagttccagggaaggggctggtgtgggtctcaagtgttagaggtgatgggggtgacgcaaactacgcggactccgtgaagggccgagtcaccatctccagagacaacgccaagaacacactgtatctgcaaatctacagtctcagagccgaggacacggctgtctattactgtgcaagagaggcgaatgcttttgatatctggggccaagggacattggtcaccgtctcttca

SEQ ID NO: 7854 - DNA, 289 bp, Homo sapiens
  source 1..289: mol_type = other DNA
tgcagcctctggattcaccttcattagccactggatgcactggctccgccaagctccagggaaggggctggtttggctctcacgtattgataatcatgggagtgacataaactacgcggactccgtgaaggaccgattcaccatctccagagacaacgccaagaacacgctgtatctgcaaatgaacagcctgagagtcgaggacacggctatgtattactgtgcaaggggtggattcaatcatgtttttgatatatggggccaagggacaatggtcaccgtctcttca

SEQ ID NO: 7855 - DNA, 289 bp, Homo sapiens
  source 1..289: mol_type = other DNA
tgcagcctctggattcagcttcactggttattggatgcactgggtccgccaacctccagggaaggggctggtgtgggtctctcgtattgaccgtgatgggaatggcccagtctacgcggactccgtgaagggccgattcaccatctccagagacaacgccaagaacacggtgtatctgcaaatgaacagtctgcgagacgacgacacggctgtatattattgtgcaagaggagggtttaatcatgtttttgatatctggggccaagggacatcggtcactgtctcttca

SEQ ID NO: 7856 - DNA, 277 bp, Homo sapiens
  source 1..277: mol_type = other DNA
cactgtctctggtggctccatcagcagtagtaattactactggggctggatccgccagcccccagggaaggggctggagtggattgggagtttctattatagtgggagctcctactataattcgtccctcaagagtcgagtcaccatctccgtggacacgtccatgaaccagttctccctgagcctgacctctgtcaccgccgcagacacggctgtgtattactgtgcggctgcctttgagtactggggccagggaaccctggtcaccgtctcctca

SEQ ID NO: 7857 - DNA, 277 bp, Homo sapiens
  source 1..277: mol_type = other DNA
cactgtctctggtgcctccatcagcagtagcagttactactggggctggatccgccagcccccaggggagggtctggagtggattgggagtatcttttccactgggggcaccaattacaacccgtccctcaagagtcgagtcaccatatttgtagacacgtccaagaaccaattctccctgaacctgaattctgtgaccgccgccgacacggctatgtattactgtgcagcggcctttgagtactggggccagggaaacctggtcaccgtctcctca

SEQ ID NO: 7858 - DNA, 277 bp, Homo sapiens
  source 1..277: mol_type = other DNA
cactgtctctggtgcctccatcagcagtagcagttactactggggctggatccgccagcccccaggggagggtctggagtggattgggagtatcttttccactgggggcaccaactacaacccgtccctcaagagtcgagtcaccatatttgtagacacgtccaagaaccaattctccctgaacctgaattctgtgaccgccgccgacacggctatatattactgtgcagcggcctttgagtactggggccagggaaacctggtcaccgtctcctca

SEQ ID NO: 7859 - DNA, 277 bp, Homo sapiens
  source 1..277: mol_type = other DNA
cactgtctctggtggctccatcagcagtagtaattactactggggctggatccgccagcccccagggaaggggctggagtggattgggagtttctattatagtgggacctcctactataattcgtccctcaagagtcgagtcaccatctccgtggacacgtccatgaaccagttctccctgagcctgacctctgtcaccgccgcagacacggctgtgtattactgtgcggctgcctttgagtactggggccagggaaccctggtcaccgtctcctca

SEQ ID NO: 7860 - DNA, 301 bp, Homo sapiens
  source 1..301: mol_type = other DNA
tgcagcctctggattcacctttagcaactatgccatgaactgggtccgccaggctccagggaaggggctggagtgggtctcaggtattagtggcagtggtgttaacacatactacgcagactccgtgaagggccggttcaccatctccagagacaattccaagaacacgctgtatctgcaagtgaacggcctgagagccgaggacacggccgtatattactgtgcgaaagacggatatagcagcagctggcagtactactttgactactggggccagggaaccctggtcaccgtctcctca

SEQ ID NO: 7861 - DNA, 301 bp, Homo sapiens
  source 1..301: mol_type = other DNA
tgcagcctctggattcacctttagcaactatgccatgaactgggtccgccaggctccagggaaggggctggagtgggtctcaggtattagtggcagtggtgttaacacatactacgcagactccgtgaagggccggttcaccatctccagagacaattccaagaacacgctgtatctgcaagtgaacggcctgagagccgaggacacggccatatattactgtgcgaaagacggatatagcagcagctggcagtactactttgactactggggccagggaaccctggtcaccgtctcctca

SEQ ID NO: 7862 - DNA, 301 bp, Homo sapiens
  source 1..301: mol_type = other DNA
tgcagcctctggattcatctttagcagttatgccatgagctgggtccgccaggctccaggaaaggggctggagtgggtctcagttattagtggaagtactggtgtcacatactacgcagactccgtgaagggccggttcaccatctccagagacaattccaagaacacgctgtatctgcaaatgaacagcctgagagtcgacgacacggccatatattactgtgcgaaagacggatatagtagtagctggcagtactactttgactactggggccagggagccctggtcaccgtctcctca

SEQ ID NO: 7863 - DNA, 283 bp, Homo sapiens
  source 1..283: mol_type = other DNA
tgcagcctctggattcacctttagttactcttggatgacctgggtccgccaggctccggggaaggggctggagtgggtggccaacatacagcaagatggaagtgagaaagaatatgtggactctgtgaagggccgattcaccatttccagagacaacgccaagaactcactgtatctgcaaatgaacagcctgagagccgaggacacggctatttattactgtgcgagaggcattggctggttcctcgactggggccagggaaccctggtcaccgtctcctca

SEQ ID NO: 7864 - DNA, 283 bp, Homo sapiens
  source 1..283: mol_type = other DNA
tgtagtctctggaatcacccttagtcgccattggatgacctgggtccgccaggctccagggaaggggctggagtgggtggccaacataaaagaggatggaagtgagaaaaactatgtggactctgtgaagggccgattcaccatctccagagacaacgccaagaactcactgtatctgcaaatgagcagcctgagagccgaggacacggcagtatattactgtgcgagaggtatagggtggtttcttgactggggccagggaaccctggtcaccgtctcctca

SEQ ID NO: 7865 - DNA, 283 bp, Homo sapiens; identical to SEQ ID NO: 7864
  source 1..283: mol_type = other DNA

SEQ ID NO: 7866 - DNA, 283 bp, Homo sapiens
  source 1..283: mol_type = other DNA
tgtagtctctggaatcacccttagtcgccattggatgacctgggtccgccaggctccagggaaagggctggagtgggtggccaacataaaagaggatggaagtgagaaaaactatgtggactctgtgaagggccgattcaccatctccagagacaacgccaagaactcactgtatctgcaaatgagcagcctgagagccgaggacacggcagtatattactgtgcgagaggtatagggtggtttcttgactggggccagggaaccctggtcaccgtctcctca

SEQ ID NO: 7867 - DNA, 283 bp, Homo sapiens
  source 1..283: mol_type = other DNA
ggtagtctctggaatcacccttagtcgccattggatgacctgggtccgccaggctccagggaaggggctggagtgggtggccaacataaaagaggatggaagtgagaaaaactatgtggactctgtgaagggccgattcaccatctccagagacaacgccaagaactcactgtatctgcaaatgagcagcctgagagccgaggacacggcagtatattactgtgcgagaggtatagggtggtttcttgactggggccagggaaccctggtcaccgtctcctca

SEQ ID NO: 7868 - DNA, 283 bp, Homo sapiens
  source 1..283: mol_type = other DNA
tgcagtctctgggatcacccttagtcgccattggatgacctgggtccgccaggctccagggaaggggctggagtgggtggccaacataaaagaggatggaagtgagagaaactatgtggacgctgtgaagggccgattcaccatctccagagacaaccccaagaactcactgtatctgcaaatgaacagcctgagagccgaggacacggctgtctattactgtgcgagaggcataggctggtttctcgactggggccagggaaccctggtcaccgtctcctca

SEQ ID NO: 7869 - DNA, 283 bp, Homo sapiens
  source 1..283: mol_type = other DNA
tgtagtctctggaatcacccttagtcgccattggatgacctgggtccgccaggctccagggaaggggctggagtgggtggccaacataaaagaggatggaagtgaggaaaactatgtggactctgtgaagggccgattcaccatctccagagacaacgccaagaactcactgtatctgcaaatgagcagcctgagagccgaggacacggcagtatattactgtgcgagaggtatagggtggtttcttgactggggccagggaaccctggtcaccgtctcctca

SEQ ID NO: 7870 - DNA, 283 bp, Homo sapiens
  source 1..283: mol_type = other DNA
tgcagcctctggattcaccttcagtagttcttggatgagctgggtccgccaggctccagggaaggggctggagtgggtggccaagatacagcaagatggaagtgagaaatactatgtggactctgtgaagggccgattcaccatctccagagacaacgccaagaactcactgtatctgcaaatgaacagcctgagagtcgaggacacggctttgtattactgtgcgagagtcaagggtgcttttgatatctggggccaagggacaatggtcaccgtctcttca

SEQ ID NO: 7871 - DNA, 283 bp, Homo sapiens
  source 1..283: mol_type = other DNA
tgcagcctctggattcacctttagtagctattggatgagctgggtccgccaggctccagggaaggggctggagtgggtggccaacataaagcaagatggaagtgagaaatactatgtggactctgtgaagggccgattcaccatctccagagacaacgccaagaactcactgtatctgcaaatgaacagcctgagagccgaggacacggctgtgtattactgtgcacgagtaaaaggtgcttttgatatctggggccaagggacaatggtcaccgtctcttca

SEQ ID NO: 7872 - DNA, 324 bp, Homo sapiens
  source 1..324: mol_type = other DNA
acacagaccctcacgctgacctgcaccttctctgggttctcactcagcactagtggagtgggtgtgggctggatccgtcagcccgcaggaaaggccctggagtggcttgcactcatatattgggatgacgataagcgctacagcccatctctgaagagcaggctcaccatcaccaaggacacctccaaaaaccaggtggtccttacaatgaccaacatggaccctgtggacacagccacatattactgtgcacacagacgtgggggtatagtgggagccccctttgactactggggccagggaaccctggtcaccgtctcctca

SEQ ID NO: 7873 - DNA, 324 bp, Homo sapiens
  source 1..324: mol_type = other DNA
acacagaccctcacgctgacctgcaccttctctgggttctcactcagcactactggagtgggtgtgggctggatccgtcagcccccaggaaaggccctggagtggcttgcactcatttattgggatgatgataagcgctacagcccatctctgaagagcaggctcaccatcaccaagaacacctccaaaaaccaggtggtccttacaatgaccaacatggaccctgtggacacagccacatattactgtgcacacagacgggggggtatagtgggagccccttttgactactggggccagggaaccctggtcaccgtctcctca

SEQ ID NO: 7874 - DNA, 324 bp, Homo sapiens
  source 1..324: mol_type = other DNA
acacagaccctcacgctgacctgcagcttctctgggttctcactcagcactagtggagtgggtgtggcctggatccgtcagcccccaggaaaggccctggagtggcttgcactcatttattgggatgacgataagcgctacagcccatctctgaagagcaggctcaccatcaccaaggacacctccaaaaaccaggtggtccttacaatgaccaacatggaccctgtggacacagccacatattactgtgcacacagacgggggggtatagtgggagccccttttgactactggggccagggaaccctggtcaccgtctcctca

SEQ ID NO: 7875 - DNA, 292 bp, Homo sapiens
  source 1..292: mol_type = other DNA
cgctgtctatggtgggtccttcagtggttacttctggacctggatccgccagcccccagggaaggggctggagtggattggggaaatcaatcatagtggaagcaccaactacaacccgtccctcaagagtcgagtcaccatatcagtagacacgtccaagaaccagttctccctgaaggtgacctctgtgaccgccgcggacacggctgtgtattactgtgcgagaggccattacggtgacttttactattttgactattggggccagggaaccctggtcaccgtctcctca

SEQ ID NO: 7876 - DNA, 292 bp, Homo sapiens
  source 1..292: mol_type = other DNA
cgctgcctatggtgggtccttcagtggttatttctggacctggatccgccagcccccagggaaggggctggagtggattggtgaaatcaatcatagtggaagcaccaactacaacccgtccctcaagagtcgagtcaccatgtcagttgacacgtccaagagccaattctccctgaaggtgaggtctgtgaccgccgcggacacggctgtttatcactgtgcgagaggacactacggtgacttctactactttgactactggggccagggaaccctggtaaccgtctcctca

SEQ ID NO: 7877 - DNA, 318 bp, Homo sapiens
  source 1..318: mol_type = other DNA
acacagaccctcacgctgacctgcaccttctctggcttctcactcagcactagtggagtgggtgtgggctggatccgtcagcccccaggaaaggccctggagtggcttgcactcatttattgggatgatgataggcgctacagcccatctctgaagaccaggctcaccatcaccaaggacacctccaaaaaccaggtggtccttacaatgaccaacatggaccctgtggacacagccacatattactgtgcacacagacgaccgacccttgattcttttgatatctggggccaagggacaatggtcaccgtctcttca

SEQ ID NO: 7878 - DNA, 318 bp, Homo sapiens
  source 1..318: mol_type = other DNA
acacagaccctcacgctgacctgcaccttctctgggttctcactcagcactagtggaatgggtgtgggctggatccgtcagccccccggaaaggccctggagtggcttgcactcatttattgggatgatgataagcgctacatcccatctctgaggagcaggctcaccatcaccaaggacacctccagaaaccaggtggtctttacaatgaccaacatggaccctgtggacacagccacatattactgtgcacacagacgcccaaccctcgattcttttgatatctggggccaagggacaatggtcaccgtctcttca

SEQ ID NO: 7879 - DNA, 295 bp, Homo sapiens
  source 1..295: mol_type = other DNA
cactgtctctggtgactccgtcagcagtactcgttactactggagctggatccggcagcccccagggaagggactggagtggattggctatatctattacactgggaccaccaattacaacccctccctcaagagtcgagtcaccatatctgtagacacgtccaacaaccagttctccctgaagctgagttatgtgaccgctgcggacacggccgtgtattactgtgcgagagaggtggctggtacgctggggattgactactggggccagggaaccctggtcaccgtctccaca

SEQ ID NO: 7880 - DNA, 295 bp, Homo sapiens
  source 1..295: mol_type = other DNA
cactgtctctggtggctccgtcagcagtggtagttactactggagctggatccggcagcccccagggaagggactggagtggattgggtatatccattacagagggagcagcaactacaacccctccctcaagagtcgagtcaccatatcagtagacacgtccaagaaccagttctccctgaagctgagctctgtgaccgctgcggacacggccgtgtattactgtgcgagagaagtggctggtacattagggatagactactggggccagggaatcctggtcaccgtctcctca

SEQ ID NO: 7881 - DNA, 295 bp, Homo sapiens; identical to SEQ ID NO: 7880
  source 1..295: mol_type = other DNA

SEQ ID NO: 7882 - DNA, 286 bp, Homo sapiens
  source 1..286: mol_type = other DNA
tgcaggctctggattcacgtttagtacctattggatgacctgggtccgccaggctccagggaaggggctggagtgggtgggcaacataatacaagatggcagtgcggtatactatgcggactctgtgaagggccggttcaccatctccagagacaacgccaagaactcactgtatctgcaaatgaacagcctgagagccgaggacacggctgtgtatcactgtgcgagagatttcagtggctggagtgactactggggccagggaacccgggtcaccgtctcctca

SEQ ID NO: 7883 - DNA, 286 bp, Homo sapiens
  source 1..286: mol_type = other DNA
tgtaggctctggattcacttttagtacctattggatgacctgggtccgccaggctccagggaaggggctggagtgggtggccaacataaacaaagatggaagtgggaaatactatgcggactctgtgaagggccgattcgccatctccagagacaacaccaagaactcactatctctgcaaatgaacagcctgagagacgaggacacggctgtgtattattgtgcgagagatttcagtggctggtccgactactggggccagggaaccctggtcatcgtctcctca

SEQ ID NO: 7884 - DNA, 307 bp, Homo sapiens
  source 1..307: mol_type = other DNA
tgcagcctctggattcaccttcagtgactatggcatgcactgggtccgccaggctctaggcagggggctggagtgggtggcagttgtgtcatatgatggaaacattaaatattatggagactccgtgaagggccgattcaccatctccagagacacttccaagaacacgctgtatctgcaaatgaacagcctgagagctgaggacacggctgtgtattactgtgcgaaagccacatacacctatggttccttctactactacggcatggacgtctggggccaagggaccacggtcaccgtctcctca

SEQ ID NO: 7885 - DNA, 307 bp, Homo sapiens
  source 1..307: mol_type = other DNA
tgcagcctctggattcagcttcagtaactatggcatgcactgggtccgccaggctccaggcaaggggctggagtgggtggcagttatatcatataatggaggtattaaatactctgcagactccgtgaagggccgattcaccatctccagagacaattccaagaatacgctgtatctgcaagtgagcagcctgagagctgaggacacggctgtctattactgtgcgaaagccacatatacctatggttccttctactactacggtatggacgtctggggccaagggaccacggtcaccgtctcctca

SEQ ID NO: 7886 - DNA, 307 bp, Homo sapiens
  source 1..307: mol_type = other DNA
tgcagcctctggattcaccttcagaaactatggcatgcactgggtccgccaggctccaggcaaggggctggagtgggtggcagttatatctgatgatggaaatatcaaataccatgcagactccgtgaagggccgactcaccatctccagagacaattccgggaacacgctgtttctgcaaatgaacaacctgagaactgaagacacggctgtgtattactgtgctaaagccacatatacctatggtagtttctactattacggtatggacgtctggggccaggggaccacggtcaccgtctcctca

SEQ ID NO: 7887 - DNA, 307 bp, Homo sapiens
  source 1..307: mol_type = other DNA
tgcagcctctggattcaccttcagtaactatggcatgcactgggtccgccaggctccaggcaaggggctggagtgggtggcagttatatcatataatggaggtattaaatactctacagactccgtgaagggccgattcaccatctccaaagacgattccaagaacacgctatatctgcaaatgagcagcctgagagctgaggacacggctgtctattactgtgcgaaagccacatatacctatggttccttctactactacggtatggacgtctggggccaagggaccacggtcaccgtctccgca

SEQ ID NO: 7888 - DNA, 285 bp, Homo sapiens
  source 1..285: mol_type = other DNA
gcatctggataccccttcaccacctactatatgcactgggtgcgacaggcccctggacaagggcttgagtggatgggaataatcaagcctatgagtggtggcacaacctacgcacagaacttgcagggcagagtcaccgtgaccacggacacgtccacgagcacagtctacatggaggtgaacagcctgagatctgaggacacggccgtgtattactgtgtgagggaaaagtccggtgggttctttgactactggggccagggaaccctggtcaccgtctcctca

SEQ ID NO: 7889 - DNA, 285 bp, Homo sapiens
  source 1..285: mol_type = other DNA
gcatctggatacaccttcaccacctactatatacactgggtgcgacaggcccctggacaagggcttgagtggatgggaataatgtacactagtggtggaagtacaaggcttgcacagaggttccagggcagagtcaccatgaccagagacacgtccacgaacacagtctacatggagctgagcagcctgggatctgaggacacggccgtctattactgtgtgcgagagaagagcgggggtttctttgactactggggccagggaaccctggtcaccgtctcctca

SEQ ID NO: 7890 - DNA, 285 bp, Homo sapiens
  source 1..285: mol_type = other DNA
acatctggatacaccttcaccagctattatatacactgggtgcgacaggcccctggacaagggcttgagtggatgggaatggtgtacactagtggtggagttacaaggcttccacagaggttccagggcagagtcaccatgaccagagacacgtccacgaacacagtctacatggagctgagcagcctgggatctgaggacacggccgtctattactgtgtgcgggagaagagcgggggtttctttgactactggggccaggggactctggtcaccgtctcctca

SEQ ID NO: 7891 - DNA, 295 bp, Homo sapiens
  source 1..295: mol_type = other DNA
tgcagcctctggattcacctttagcagctatgccatgagctgggtccgccaggctccagggaaggggctggagtgggtctcagttattagtggtagtggtggtagcacatattacgcagactccgtgaagggccggttcaccatctccagagacaattccaagaacacgctgtatctgcaaatgaacagcctgagagccgaggacacggccgtatattactgtgcgaaagatctgagtgggagctacgactactttgactactggggccagggaaccctggtcaccatctcctca

SEQ ID NO: 7892 - DNA, 295 bp, Homo sapiens
  source 1..295: mol_type = other DNA
tgcaggctctgggttcacctttagcagctatggcatgatctgggtccgtcaggctccagggaaggggctggagtgggtctcagcgattactgatagtggtaccagtacatactacacagactccgtgaggggccggttcaccatctccagagacaattccaagaacgaactgtacttgcaaatgaacagcctgagagccgaggacacggccgtctattactgtgcgaaagatttaagtgggagctacgactactttgactactggggccagggaaccctggtcaccgtctcctca

SEQ ID NO: 7893 - DNA, 280 bp, Homo sapiens
  source 1..280: mol_type = other DNA
tgcagcctctggattcatcttcagtgactactacatgagctggatccgccaggctccagggaaggggctggagtgggtttcatacatgagtggcagcaacataaactacgcagactccgtgaagggccgattcaccatctccagggacaacgccaagaactcactctatctgcaaatgaacagcctgagagccgaggacacggccgtgtattactgtgcgaggggtggggcacgcaggtttgactactggggccagggaaccctggtcaccgtctcctca

SEQ ID NO: 7894 - DNA, 283 bp, Homo sapiens
  source 1..283: mol_type = other DNA
tgcagcctctggattcaccttcagtcactactacatgagctggatccgccaggctccagggaaggggctggagtgggtttcatatattaatagtggtagtaccataaactacgcagactctgtggagggccggttcaccatctccagggacaacgccaagagctcactgtatctacaaatgaatagcctgagagtcgaggacacggccgtgtattactgtgcgagagggggggccagacgttttgactactggggccagggaaccctggtcaccgtctcctca

SEQ ID NO: 7895 - DNA, 280 bp, Homo sapiens
  source 1..280: mol_type = other DNA
tgcagcctctggattcatctttagcaactatgccatgagctgggtccgccaggctccagggaaggggctgcagtgggtctcaactattggtggtgatggtactaggacatactacgcagactccgtgaagggccgggtcaccgtctccagagacaattccaagaacaccttgtatctgcaaatgaacagcctgcgagtcggggacacggccatatattactgtgcgcgaacggtggtcaatgattactggggccagggaaccctggtcaccgtctcctca

SEQ ID NO: 7896 - DNA, 280 bp, Homo sapiens
  source 1..280: mol_type = other DNA
tgcagcctctggattcacctttagcaactatgccatgagctgggtccgccaggctccagggaaggggctgcagtgggtctcaactattggtggtgatggtactaggacatactacacagactccgtgaagggccgggtcaccgtctccagagacaattccaagaacacgttgtatctgcaaatgaacagcctgcgagccgaggacacggccatatattactgtgcgagaacggtggtcaatgattactggggccagggaaccctggtcaccgtctcctca

SEQ ID NO: 7897 - DNA, 280 bp, Homo sapiens
  source 1..280: mol_type = other DNA
tgcagcctctggattcacctttagcaactatgccatgacctgggtccgccaggctccagggaaggggctgcagtgggtcgcaactattggtggtgatggtactaggacatactacacagactccgtgaagggccgggtcaccgtctccagagacaattccaagaacatgttgtatctgcaaatgaacagcctgcgagccgaggacacggccatgtattactgtgcgagaacggtggtcaatgattactggggccagggaaccctggtcaccgtctcctca

SEQ ID NO: 7898 - DNA, 280 bp, Homo sapiens
  source 1..280: mol_type = other DNA
tgtagcctctcaattcacctttaaggactatgccatgagttgggtccgccaggctccagggaaggggctggagtgggtctcatctatcagtggtggtggtagtagcacattctacgcagactccgtgaagggccggttcaccatctccagagacaattccaagaacacgctctatctgcaaatgaacagcctgagagtcgacgacacggccatctattactgtgcgagaacggtagtaaatgactactggggccagggcaccctggtcaccgtctcctca

SEQ ID NO: 7899 - DNA, 307 bp, Homo sapiens
  source 1..307: mol_type = other DNA
tgcagcctctggattcacctttagcaactttgccttgagctgggtccgccaggctccaggtaaggggctggagtgggtctcaactattacttataatggtggcagcacatactacgcagactccgtgaagggccggttcaccatctccagagacaattccaagaacacgctgtatctgcaaatgaatagcctgagagccgaggacacggccgtttattactgtgcgaagaagtattcctatggttcggggacttatttgtactactttgactattggggccagggaaccctggtcaccgtctcctca

SEQ ID NO: 7900 - DNA, 307 bp, Homo sapiens
  source 1..307: mol_type = other DNA
tgcagcctctggattcacctttagcaactatgccatgagttgggtccgccaggctccagggaaggggctggcgtgggtctcaactattactgctagcgctggtagcacattgtacgcagactccgtgaagggccggttcaccatctccagagacaattccaagaacacgctgtatctgcaaatgaacagcctgagagccgacgacacggccgtatattactgtgcgaaaaagtattcctatggttcggggacttatttgtactactttgactactggggccagggaaccctggtcaccgtctcctca

SEQ ID NO: 7901 - DNA, 316 bp, Homo sapiens
  source 1..316: mol_type = other DNA
cgcagcctctggattcaattttaggagttatgacatgagttgggtccgccagactccagggaaggggctggagtgggtctcaactatttctgacactggtgcgacaacacactacgcagactccgcgaagggccgcttcatcatctccagagacaattccgagaacacactatatctgcacatgaacaacctgagagccgacgacgcggccgtttatttctgtgcgaaaccccctattgctgtgatgccagctggtcggggacctaattacttcttcgatctctgggaccgtggcaccctggtcgctgtctcatca

SEQ ID NO: 7902 - DNA, 316 bp, Homo sapiens
  source 1..316: mol_type = other DNA
cgcagcctctggattcaattttaggagttatgacatgagttgggtccgccagactccagggaaggggctggagtgggtctcaactatttctgacactggtgcgacaacacactacgcagactccgcgaagggccgcttcatcatctccagagacaattccgagaacacactatatctgcacatgaacaacctgagagccgacgacgcggccgtttatttctgtgcgaaaccccctattgctgtgatgccagctggtcggggacctaattacttcttcgatctctggggccgtggcaccctggtcgctgtctcatca

SEQ ID NO: 7903 - DNA, 316 bp, Homo sapiens
  source 1..316: mol_type = other DNA
cgcagcctctggattcaattttaggagttatgacatgagttgggtccgccagactccagggaaggggctagagtgggtctcaactatttctgacactggtgcgacaacacactacgcagactccgcgaagggccgcttcatcatctccagagacaattccgagaacacactatatctgcacatgaacaacctgagagccgacgacgcggccgtttatttctgtgcgaaaccccctattgctgtgatgccagctggtcggggacctaattacttcttcgatctctggggccgtggcaccctggtcgctgtctcatca

SEQ ID NO: 7904 - DNA, 292 bp, Homo sapiens
  source 1..292: mol_type = other DNA
tgcagcctctggattcaccttcagtaataatgaaatgaactgggtccgccaggctccagggaaggggctggagtgggtttcatacattagttatagtggtagtcccatatactacgcagactctgtgaagggccgattcaccatctccagagacgacgccaagaactcactgtatctgcaaatgaacagcctgagagccgaggacacggctgtttattactgtgcgcgagaggggagggagaccgatgcttttgatatctggggccaagggacaatggtcaccgtctcttca

SEQ ID NO: 7905 - DNA, 292 bp, Homo sapiens
  source 1..292: mol_type = other DNA
tgcagcctctggattcacctttagtagtcatgaaatgaactgggtccgccaggctccagggaaggggctggagtgggtttcatacattagtaatggtggtggcaccatatactacgcagactccgtgaagggccgattcaccatctccagagacgacgccaggaactcactgtttctgcaaatgaacagcctgagagccgaggacacggctgtttattactgtgcgagagaagggcgggagactgatgcttttgatatttggggccaagggacactggtcaccgtctcttca

SEQ ID NO: 7906 - DNA, 286 bp, Homo sapiens
  source 1..286: mol_type = other DNA
tgcagcctctggattcacatttagtaggtactggatgcactgggtccgccaagttccagggaaggggctggtgtgggtctcaaatattaacgaagatgggaggaccacaaactacggggactccgtgaagggccgattcaccaccttcagagacaatgtcagaaacacgctgtatctgcaaatgaacagtctgagagccgaggacacggctgtatatttctgtgcaagagacgttcgcggtccggaggactattggggccagggaatctgggtcaccgtctcctca

SEQ ID NO: 7907 - DNA, 286 bp, Homo sapiens; identical to SEQ ID NO: 7906
  source 1..286: mol_type = other DNA

SEQ ID NO: 7908 - DNA, 286 bp, Homo sapiens
  source 1..286: mol_type = other DNA
tgaagcctctggattcgccttcagtagatactggatgcactgggtccgccaagctccaggggaggggctggtgtgggtctcgaatattaaccaagatgggagaactgtgaactacgcggactccgtgaagggccgattcaccaactccagagacaacgtcaaaaacacgctgtatctgcagatgaacagtctgagagtcgaagacacggctgtatatttctgtgcaagagatgttcgcggtccggaggactactggggccagggcattttggtcaccgtctcctca

SEQ ID NO: 7909 - DNA, 286 bp, Homo sapiens
  source 1..286: mol_type = other DNA
tgcagcctctggattcaccttcagtagatactggatgcactgggtccgccaagctccagggaaggggctggtgtgggtctcaaatattaatgaagatgggagaactgtaaactacgcggactccgtgaagggccgattcaccaactccagagacaacgtcaaaaacacgctgtatctgcaaatgaacagtctgagagtcgaagacacggctgtatatttctgtgcaagagatgttcgcggtccggaggactactggggccagggaattttggtcaccgtctcctca

SEQ ID NO: 7910 - DNA, 286 bp, Homo sapiens
  source 1..286: mol_type = other DNA
cgcagcctctggattcacgttcagtagatactggatgcactgggtccgccaagctccagggaaggggctggtgtgggtctcgaatattaacgaagatgggagaactataaattacgcggactccgtgaagggccgattcaccaactccagagacaacgtcaaaaacacgctgtatctgcaaatgaacagtctgagagtcgaagacacggctatatatttctgtgcaagagatgttcgcggtccggaggactactggggccagggaattttggtcaccgtctcctca

SEQ ID NO: 7911 - DNA, 286 bp, Homo sapiens
  source 1..286: mol_type = other DNA
tgcagcctctggattcacattcagtagatactggatgcactgggtccgccaagttccagggaaggggctggtgtgggtctcaaatattaacgaagatgggaggaccacaaactacggggactccgtgaagggccgattcaccaccttcagagacaatgtcagaaacacgctgtatctgcaaatgaacagtctgcgagccgaggacacggctgtatatttctgtgcaagagacgttcgcggtccggaggactattggggccagggaatctgggtcaccgtctcctca

SEQ ID NO: 7912 - DNA, 286 bp, Homo sapiens
  source 1..286: mol_type = other DNA
tgcaggctcaggattcaccttcagtcgctactggatgcactgggtccgccaacctccagggatggggctggtgtgggtctcaaatattaatgaagacgggagtaccacaaactacgcggactccgtgaagggccgattcaccatctccagagacaacgccaagaacacactgtatcttcaaatgaccagtctgagagtcgaggacacggctctgtattattgtgcaagagatgttcgaggcccggaagactactggggccagggaatcctggtcaccgtatctaca

SEQ ID NO: 7913 - DNA, 289 bp, Homo sapiens
  source 1..289: mol_type = other DNA
tgcagcatctggatttaccttcagtaatttctggatgcactgggtccgccaagctccagggcaggggctggtgtgggtcgcacgggttaatgaagatggatacaggacaacctacgcggactccgtgaagggccgattcacaatctccagagacaacgccaagaacacgctggatctgcaaatgaacagtctcagagccgaggacacggctgtctattattgtgcaaaaggcatagtgggagccgcgctcggctattggggccagggagccctggtcaccgtctcctca

SEQ ID NO: 7914 - DNA, 289 bp, Homo sapiens
  source 1..289: mol_type = other DNA
tgcagcctctggattcaccttcaatatctactggatgcactgggtccgccaagctccagggaaggggctggtgtgggtctcacgtattgataatgatgggagtgccacaacctacgcggactccgtgaggggccgattcaccatctccagagacaacgccaagaacatgttgtatctgcaaatgaacagtctgagagacgaggacacggcagtgtattactgtgcaaaagggatagtaggagctgccctcggctactggggccagggagccctggtcaccgtctcctca

SEQ ID NO: 7915 - DNA, 295 bp, Homo sapiens
  source 1..295: mol_type = other DNA
tgcagcctctggattcgcttttagcaacgtctggatgagctgggtccgccaggctccagggaaggggctggagtgggttggccagattaaaaccaaaggtgagggtgggtcaatagaccacgctgcacccgtgaaaggcagattcaccatctcaagagatgattcaaaaaacacggtgtatctgcaaatgaatagcctgcaaaccgaggacacagccgtgtattactgtaccacagatttcctccggggattctttggctcctggggccagggaaccctggtcaccgtctcctca

SEQ ID NO: 7916 - DNA, 295 bp, Homo sapiens
  source 1..295: mol_type = other DNA
tgcagcctctggattcattttcagtaacgtctggatgaactgggtccgccaggctccagggaaggggctggagtgggttggccgtattaaaaccaaaactgatggtgggacaatagactacgctgcacccgtgaaaggcagattcaccatctcaagagatgattcaaaaaacacgctgtatatgcaaatgaatagcctgaaaacggaggacacagccgtgtattactgtaccacagatttccttaggggattctttggctcctggggccagggagccctggtcatcgtctcctca

SEQ ID NO: 7917 - DNA, 295 bp, Homo sapiens
  source 1..295: mol_type = other DNA
tgcagcctctggattcattttcagtaacgtctggatgaactgggtccgccaggctccagggaaggggctggagtgggttgcccgtattaaaattgaaactgctggtgggacaatagactacgctgcacccgtgaaaggcagattcaccatctcaagagatgattcaaaaaatatgttgtatctgcaaatgactagcctgaaaacggaggacacagccgtgtattactgtaccacagatttccttaggggattctttggctcctggggccagggagccctggtcaccgtctcctca

SEQ ID NO: 7918 - DNA, 295 bp, Homo sapiens
  source 1..295: mol_type = other DNA
tgcagcctctggattcattttcagtaacgtctggatgaactgggtccgccagactccagggaaggggctggagtgggttgcccgtattaaaattgaaactgctggtgggacaatagactacgctgcacccgtgaaaggcagattcaccatctcaagagatgattcaaaaaatatgctgtatctgcaaatgactagcctgaaaacggaggacacagccgtgtattactgtaccacagatttccttaggggattctttggctcctggggccagggagccctggtcaccgtctcctca

SEQ ID NO: 7919 - DNA, 295 bp, Homo sapiens; identical to SEQ ID NO: 7916
  source 1..295: mol_type = other DNA

SEQ ID NO: 7920 - DNA, 295 bp, Homo sapiens
  source 1..295: mol_type = other DNA
tgcagcctctggattcattttcagtaacgtctggatgaactgggtccgccaggctccagggaaggggctggagtgggttgcccgtattaaaattaaaactgatggtgggacaatagactacgctgcacccgtgaaaggcagattcagcatctcaagagatgattcaaaaaatatgctgtatctgcaaatgaacagcctgaaaacggaggacacagccgtgtattattgtaccacagatttccttaggggattctttggctcctggggccagggagccctggtcaccgtctcctca

SEQ ID NO: 7921 - DNA, 295 bp, Homo sapiens
  source 1..295: mol_type = other DNA
tgcagcctctggattcactttcagtaatgtctggatgaactgggtccgccaggctccagggaaggggctggagtgggttggccttattaaaattaaaactgatggtgggacaatagactacgctgcacccgtgaaaggcagattcaccatctcaagagatgattcaaaaaatatgctgtatctgcaaatgaatagcctgaaaacggacgacacagccgtgtattactgtaccacagatttccttaggggattctttggctcctggggccagggagccctggtcaccgtctcctca

SEQ ID NO: 7922 - DNA, 295 bp, Homo sapiens
  source 1..295: mol_type = other DNA
tgcagcctctggattcacttttagtaacgtctggatgagctgggtccgccaggttccagggaaggggctggagtgggttggccaaattaaaaccaaaattgagggtgggacaacagaccacgctgcacccgtgaaaggcagattcaccatctcaagagatgattcaaaaaacacggtatttctgcaaatgaatagcctacaaaccgaggacacagccgtgtattactgtaccacagatttcctcaggggattctttggctcctggggccaggggaccctggtcaccgtctcctca

SEQ ID NO: 7923 - DNA, 295 bp, Homo sapiens
  source 1..295: mol_type = other DNA
tgcagcctctggattcattttcagtaacgtctggatgaactgggtccgccaggctccagggaaggggctggagtgggttggccgtattaaaaccaaaactgatggtgggacaatagactacgctgcacccgtgaaaggcagattcaccatctcaagagatgattcaaaaaacacggtgtatctgcaaatgaatagcctgaagacggaggacacagccgtgtattactgtaccacagatttccttaggggattctttggctcctggggccagggagccctggtcaccgtctcctca

SEQ ID NO: 7924 - DNA, 304 bp, Homo sapiens
  source 1..304: mol_type = other DNA
cactgtctctggtggctccatcaccattactagttactactggggctggatccgccagcccccagggaaggggctggagtggattgggagtatctattatagtgggaggacctacgacaacccgtccctcaagagtcgagtcaccatttccgtagacacgtccaagaaccagttctccctgaggctgagctctgtgaccgccgcagacacggctgtgtattactgtgcgagacttctatatgatagtagtggttattactactttgactgttggggccagggaaccctggtcaccgtctcctca

SEQ ID NO: 7925 - DNA, 304 bp, Homo sapiens
  source 1..304: mol_type = other DNA
cactatttctggtggctccatcagcagtagtagttactactggggctggatccgccagcccccagggaaggggctggagtggcttgggagtatctattatagtgggagcacctacgacaacccgtccctcaagagtcgagtcaccatgtccgtagacacgtccaagaatcagttctccctgaagctgacctctgtgaccgccgcagacacggctgtgtattactgtgcgagactgctctatgatagtagtggttattactactttgactgctggggccagggaaccctggtcaccgtctcctca

SEQ ID NO: 7926 - DNA, 310 bp, Homo sapiens
  source 1..310: mol_type = other DNA
cactgtctctggtggctccatcagcagtagtagttactactggggctggatccgccagccccccgggaaggggctggagtggattgcgagtatgcattatactgggagaccctacgacaacccgtccctcaaaagccgcatcaccatgcccgtagacacgtccaagaaccagttctccctgaagctgagctctgtgaccgccgcagacacggctgtctactactgcgcgagacttctgtatgatagtagtggttattactactttgactgttggggccagggaaccctggtcaccgtctccgtcacctca

SEQ ID NO: 7927 - DNA, 292 bp, Homo sapiens
  source 1..292: mol_type = other DNA
tggagtctctggattgagttttagcagctatgccatgagctgggcccgccaggctccagggaaggggctggagtgggtctcagctattagtggtagtggtggtagtacatactacgcagactccgtgaagggccggttcaccatctccagagacaattccaagaacacgctgtatctgcaaatgaacagcctgagagccgaggacacggccgtatattactgtgcgaaagacgttatcacccttgatgcttttgatatctggggccaagggacaatggtcaccgtctcttca

SEQ ID NO: 7928 - DNA, 292 bp, Homo sapiens; identical to SEQ ID NO: 7927
  source 1..292: mol_type = other DNA

SEQ ID NO: 7929 - DNA, 292 bp, Homo sapiens
  source 1..292: mol_type = other DNA
tgcagcctctggattcacctttggaaattatggcatgagctgggtccgccaggctccagggaaggggctggagtgggtctcagctatcagtgaaagttctagtagtacatactacgcagactccgtgaagggccggttcaccattaccagagacaattccaagagcacgatctatctgcagatgaacagcctgacagccgaggacacggccatgtattattgtgcgaaagatgttatcacccttgatgcatttgatatctggggccaagggacaatggtcaccgtctcttca

SEQ ID NO: 7930 - DNA, 301 bp, Homo sapiens
  source 1..301: mol_type = other DNA
cactgtctctggtggctccatcagcagtagtagttactactggggctggatccgccagccccccgggaaggggctggagtggattgggagtatcaattatagttggagcacctactacaacccgtccctcaaaagtcgagtcaccatatccgtagacacgtccaagaaccagttctccctgaagctgagctctgtgaccgccgcagacacggctgtgtattactgtgcgagaccggggagtagcactggctggtactactttgactactggggccagggaaccctggtcaccgtctcctca

SEQ ID NO: 7931 - DNA, 301 bp, Homo sapiens
  source 1..301: mol_type = other DNA
cactgtctctggtggctccatcagcagtagtggttactactggggctggatccgccagccccccgggaaggggctggagtgggttgggagtatcaattatagttggagcacctactacaacccgtccctcaaaagtcgagtcaccatatccgtagacacgtgcaagaaccagttctccctgaagctgagctctgtgaccgccgcagacacggctgtgtattactgtgcgagaccggggagtagcactggctggtactactttgactactggggccagggaaccctggtcaccgtctcctca

SEQ ID NO: 7932 - DNA, 301 bp, Homo sapiens
  source 1..301: mol_type = other DNA
cactgtctctggtggctccatcagcagtagtacttactactggggctggatccgccagcccccagggaaggggctggagtggatagggagcatctgttatagtgggaacacctactacaacccgtccctcaagagtcgagtcaccatatccgtagacacgtccaagaaccagttctccctgaagctgagctctgtgaccgccgcagacacggctgtgtattactgtgcgagaccagggtctagtactggctggtactactttgactactggggccagggaaccctggtcaccgtctcctca

SEQ ID NO: 7933 - DNA, 283 bp, Homo sapiens
  source 1..283: mol_type = other DNA
tgcagcctctggattcaccttaagtagctactggatgtactgggtccgccaagctccagggaagggactggtgtgggtctcagatattaccagtgatgggagtaccacaacctacgcggactcagtgaagggccgattcaccatctccagagacaacgccgagaacacgctgtatctgcaaatgatcagtctgagagccgaggacacggctgtatattactgtgcaagaggtaacattgggtttgactactggggccagggaaccctggtcaccgtctcctca

SEQ ID NO: 7934 - DNA, 283 bp, Homo sapiens
  source 1..283: mol_type = other DNA
tgcagcctctggattcaccttcagtagctactggatgcactgggtccgccaagctccagggaaggggctggtgtgggtctcacgtatttatagtgatgggagtaccacaaggtacgcggactccgtgaagggccgattcaccatctccagagacaacgccaagaacacgctgtatctgcaaatgaatagtctgagagccgaggacacggctgtgtattactgtgcaagagggaacattggctttgactactggggccagggaaccctggtcaccgtctcctca

SEQ ID NO: 7935 - DNA, 273 bp, Homo sapiens
  source 1..273: mol_type = other DNA
gcttctggatacaccttcaccaattatgatatcaactgggtgcgacaggcctctggacaagggcttgagtggatgggatggatgagccctaggactggtgacacagtctatgcacagaacttccagggcagagtcaccatgaccagggacacctccataagcacagcctacatggagctgagcagcctgagatctgaggacacggccatatattactgtgcgagaggatatagggactactggggccagggaaccctggtcaccgtctcctca

SEQ ID NO: 7936 - DNA, 273 bp, Homo sapiens
  source 1..273: mol_type = other DNA
gcttctggatacaccttcaccaattatgatatcaactgggtgcgacaggcctctggacaagggcttgagtggatgggatggatgagccctaggactggtgacacagtctatgcacagaacttccagggcagagtcaccatgaccagggacacctccataagcacagcctacatggagctgagcagcctgagatctgaggacacggccgtatattactgtgcgagaggatatagggactactggggccagggaaccctggtcaccgtctcctca

SEQ ID NO: 7937 - DNA, 273 bp, Homo sapiens
  source 1..273: mol_type = other DNA
gcttctggatacagcttcaccaattatgatatcaactgggtgcgacaggcctctggacaagggcttgagtggatgggacggatgagccctaggactggtgacacagtctatgcacagaacttccagggcagagtcaccatgaccagggacacctccataagcacagcctacatggagctgagtagcctgagatctgaggacacggccgtatattactgtgcgagaggatatagggactactggggccagggaaccctggtcaccgtctcctca

SEQ ID NO: 7938 - DNA, 273 bp, Homo sapiens
  source 1..273: mol_type = other DNA
gcttctggatacaccttctccagttatgatatcaactgggtgcgacaggccactggacaagggcttgagtggatgggatcgatgagccctagaactggtgacacagcctatgcacagaagtttcagggcagagtcaccatgaccagggacacctccataagcacagcctacatggagctgagcagcctgacatctgaggacacggccgtatattattgtgcgagaggttatcgagactactggggccagggaaccctggtcaccgtctcctca

SEQ ID NO: 7939 - DNA, 273 bp, Homo sapiens
  source 1..273: mol_type = other DNA
gcttctggatacaccttctccagttatgatatcaactgggtgcgacaggccactggacaagggcttgagtggatgggatggatgagccctagaactggtgacacagtctatgcacagaagtttcagggcagagtcaccatgaccagggacacctccataagtacagcctacatggagctgagcagcctgacatctgaggacacggccgtatattattgtgcgagaggttaccgagactactggggccagggaatcctggtcaccgtctcctca

SEQ ID NO: 7940 - DNA, 273 bp, Homo sapiens
  source 1..273: mol_type = other DNA
gcttctggatacaccttctccagttatgatatcaactgggtgcgacaggccactggacaagggcttgagtggatgggatggatgagccctagaactggtgacacagtctatgcacagaagtttcagggcagagtcaccatgaccagggacacctccataagtacagcctacatggagctgagcaccttgacatctgaggacacggccgtatattattgtgcgagaggttaccgagactactggggccagggaaccctggtcaccgtctcctca

SEQ ID NO: 7941 - DNA, 273 bp, Homo sapiens
  source 1..273: mol_type = other DNA
gcttctggatacaccttctccagttatgatatcaactgggtgcgacaggccactggacaagggcttgagtggatgggatcgatgagccctagaactggtgacacagcctatgcacagaagtttcagggcagagtcaccatgaccagggacacctccataagcatagcctacatggagctgagcagcctgacatctgaggacacggccgtatattattgtgcgagaggttatcgagactactggggccagggaaccctggtcaccgtctcctca

SEQ ID NO: 7942 - DNA, 273 bp, Homo sapiens
  source 1..273: mol_type = other DNA
gcttctggatacaccttctccagttatgatatcaactgggtgcgacaggccactggacaagggcttgagtggatgggatggatgagccctagaactggtgacacagtctatgcacagaagtttcagggcagagtcaccatgaccagggacacctccataagtacagcctacatggagctgagcagcctgacatctgaggacacggccgtatattattgtgcgagaggttaccgagactactggggccagggaaccctggtcaccgtctcctca

SEQ ID NO: 7943 - DNA, 273 bp, Homo sapiens
  source 1..273: mol_type = other DNA
gcttctggatacagcttcaccaattatgatatcaactgggtgcgacaggcctccggacaagggcttgagtggatgggacggatgagccctaggactggtgacacagtctatgcacagaacttccagggcagagtcaccatgaccagggacacctccataagcacagcctacatggagctgagtagcctgagatctgaggacacggccgtatattactgtgcgagaggatatagggactactggggccagggaaccctggtcaccgtctcctca

SEQ ID NO: 7944 - DNA, 283 bp, Homo sapiens
  source 1..283: mol_type = other DNA
tgcagcctctggattcacctttagttctcgttggatgacctgggtccgccaggctccagggaaggggctggagtgcgtggccgatataaaaccagatggaagtgagacatattatttggactctgtgaagggccgattcaccgtctccagagacaacgccaagaactcactatttctacaaatgaacagcctcacagccgaggacacggctctatattactgtactacagacctcaactgggaatccttctggggccagggaaccctggtcaccgtctcctca

SEQ ID NO: 7945 - DNA, 283 bp, Homo sapiens
  source 1..283: mol_type = other DNA
tgtaggctctggaatcagcctcagtaactattggatgacttgggtccgccagactccagggaaggggatggagtcggtggccaacataaaaggagatgggggtgagaaatactatgtggactctgtgaagggccgattcaccatctccagagacaacgccaaaaactcactgtttctgcaaatggacagcctgacactcgaggacacggctctttattattgtacgacagacttgaattgggaaagtttctggggccagggaaccctggtcaccgtctcctca

SEQ ID NO: 7946 - DNA, 277 bp, Homo sapiens
  source 1..277: mol_type = other DNA
tgcagcctctggattcacctttagcatttatgccatgagttgggcccgccaggctccagggaaggggctggagtgggtctcagttattggtgatagtggtgaaaggacatactacgcagactccgtgaagggccggttcaccatctccagagacaattccaaggacacgctgtatctgcaaatgaacagcctgagagccgacgacacggccctatattactgtgcgaaactaaggggggacgtttggggccaagggaccaccgtcaccgtctcgtca

SEQ ID NO: 7947 - DNA, 277 bp, Homo sapiens
  source 1..277: mol_type = other DNA
tgcagtctctggattcaacttgaacagctataccatgagctgggtccgccaggctccagggaaggggctggagtgggtctcacttattagtggtactggtggtaccatatactacgcagaatccgtgaagggccggttcaccatctccagagacatttccaagaacacactgtatctgcaaatgaacagcctgagagccgaggacacggccatatattactgtgcgaagttacggggggacgtctggggccaagggaccacggtcaccgtctcctca

SEQ ID NO: 7948 - DNA, 296 bp, Homo sapiens
  source 1..296: mol_type = other DNA
ccatctccggggacagtgtctctagcaacagtgctgcttgggactggatcaggcagtccccatcgagaggccttgagtggctgggaaggacatactacaggtccaagtggtataataattatgcagtatctgtgaaaagtcgaataaccatcaacccagacacatccaagaaccagttctccctgcagctgaactctgtgactcccgaggacacggctgtgtattactgtgcaagaagaggacaggagcaggcacttgactactggggccagggaaccctggtcaccgtctcctca

SEQ ID NO: 7949 - DNA, 296 bp, Homo sapiens
  source 1..296: mol_type = other DNA
ccatctcaggggacagtgtctcaagcaccagtgctacttggaactggatcaggcagtccccatcgagaggccttgagtggctgggaaggacatactacaggtccaagtggtctaatgactatgcagcatctgtgaaaagtcgaataaccgtcaatccagacaccaccaagaaccagttctccctgcagctgaactctgtgactcccgacgacacggctgtctattactgtgcaagaagggggcaggaacaggcccttgactactggggccagggaaccctggtcaccgtgtcctca

SEQ ID NO: 7950 - DNA, 292 bp, Homo sapiens
  source 1..292: mol_type = other DNA
tgcagcctctggattcaccttcagtaatcactggatgcactggatccgccaagctccagggaaggggctggtgtgggtctcacgtattaaaggagatgagagtagcacgagttacgcggactccgtgaagggccgattcaccatttccagagacaacgccaagaacatgctgtttctgcaaatggacgctctgagagccgacgacacggctctttattattgtgtacgagatggggtgggagctcctccctttgactcctggggcccgggaactctggtcaccgtctcctca

SEQ ID NO: 7951 - DNA, 292 bp, Homo sapiens
  source 1..292: mol_type = other DNA
tgcagcctctggcttcaccttcagtgcccactggatgcactgggtccgccaaactccagagaaggggctattttgggtcgcagatataaaatatgatgagactgctaaacgttacgcggactccgtgaagggccgattcaccatctccagagacaacaccgagaacagactgtatctgcaaatgaacagtctgacagtcgaggacacggctctgtattactgtgtaagagatggagtgggagctcccccttttgactcctggggccagggaaccctggtcaccgtctcctca

SEQ ID NO: 7952 - DNA, 295 bp, Homo sapiens
  source 1..295: mol_type = other DNA
tgcagcctctggattcaccttcagtaattatgaattgaactgggtccgccaggctccagggaaggggctggagtgggtttcatacattagtagtactggtagtaccatatactacgcagactctgtggagggccgattcaccatctccagagacaacgccaagaactcactgtatctgcaaatgaattacctgagagccgaggacacggctgtttattactgtgtgagagatcacggtgactacttctggtacttcgatctctggggccgtggcaccctggtcactgtctcctca

SEQ ID NO: 7953 - DNA, 295 bp, Homo sapiens
  source 1..295: mol_type = other DNA
tgcagcctctggattcaccttcagtagttatgaaatgaactgggtccgccaggctccagggagggggctggagtggatttcatacattagtagtagtggtagtaccatatactacgcagactctgtgaagggccgattcaccatctccagagacaacgccaagaaatcactgtttctgcaaatgaactacctgagagccgaggacacggctctttattattgtgtaagagatcacggtgactacttctggtacttcgatctctggggccgtggcaccctggtcactgtctcctca

SEQ ID NO: 7954 - DNA, 286 bp, Homo sapiens
  source 1..286: mol_type = other DNA
tgcagcctctggattcaccttcagtagctacagcatgaactgggtccgccaggctccagggaaggggctggagtgggtctcagccattgacagtagtagtactcacatatactatggagactcaatgaagggccgattcagcatctccagagacaacgccaagaactcactggatctgcaaatgaacagcctgagagccgaggacacgggtgtctattactgtgcaaaggccttcggctggtacttcgatctctggggccgtggcaccttggtcacggtctcgtca

SEQ ID NO: 7955 - DNA, 286 bp, Homo sapiens
  source 1..286: mol_type = other DNA
tgcagcctctggattcaccttcacttcctatagcatgaactgggtccgccaggctccagggaaggggctggagtgggtcgcagccattaatgatgatagtcgttacatttactacgcagactcactgaagggccgattcaccgtctccagagacaacgccaagaattcactgtatctgcaattgaacagcctgagagccgaggacacggctgtgtattactgtgcgaaagcgttcggatggtacttcgatctctggggccgtggcaccctggtcactgtctcctca

SEQ ID NO: 7956 - DNA, 318 bp, Homo sapiens
  source 1..318: mol_type = other DNA
acacagaccctcacgctgacctgcaccttctctgggttctcactcagcactagtggagtgggtgtgggctggatccgtcagcccccaggaaaggccctggagtggcttgcactcattttttgggatgatgataagcgctacagcccatctctgaagagcaggctcaccatcaccaaggacacctccaaaaaccaggtggtccttacaatgaccaacatggaccctgtgggcacagccacatattactgtgcacacaggaggggagtggctgggtactttgactactggggccagggaaccctggtcaccgtctcctca

SEQ ID NO: 7957 - DNA, 318 bp, Homo sapiens
  source 1..318: mol_type = other DNA
acacagaccctcacgctgacctgcaccttctctgggttctcactcagtactagtggagtgggtgtgggctggatccgtcagcccccaggaaaggccctggagtggcttgcactcatttattgggaggatgataagcgctacagcccatctctgaagagcaggctcaccatcaccaaggacacctccaaaaaccaggtggtccttacaatgaccaacatggaccctgtggacacagccacatattactgtgcacacagacgtggggtggcggggtattttgactactggggccagggaaccctggtcaccgtctcctca

SEQ ID NO: 7958 - DNA, 280 bp, Homo sapiens
  source 1..280: mol_type = other DNA
tgcagcctctggattcacttttaaaagtcggtggctgacctggggccgccaggctcccgggaaggggctggagtgggtggccagcataaaggaagatggaagggagaaatactatgtggactctgtgaagggccgattcaccgtctccagagacaacgccaagaattcattgtacctgcagatgaccagcctgagagccgaggacacgtctgtctattactgtgcgctaggtcgcggtatggacgtctggggcccagggaccacggttaccgtctcctca

SEQ ID NO: 7959 - DNA, 280 bp, Homo sapiens
  source 1..280: mol_type = other DNA
tgcagcctctggattcacttttaaaagtcggtggctgacctggggccgccaggctcccgggaaggggctggagtgggtggccagcataaaggaagatggaagggagaaatactatgtggactctgtgaagggccgattcaccgtctccagagacaacgccaagaattcattgtacctgcagatgaccagcctgagagccgaggacacgtctgtctattactgtgcgctaggtcgcggtatggacgtctggggcccagggaccacggtcaccgtctcctca

SEQ ID NO: 7960 - DNA, 280 bp, Homo sapiens
  source 1..280: mol_type = other DNA
tgcagcctctgggttcaactttaatactcgttggatgacctgggtccggcaggctccagggaaggggctggagtgggtggccaacataaaggaagatgggagtcagaaaaactatgtggactctgtgaagggccgattcaccgtctccagagacaacgccgagaactcagtggtcctccaaatgaacagcctgagagtcgaggacacagccgtgtattactgtgccctggggcgggggatggacgtctggggccaagggacctcggtcaccgtctcttca

SEQ ID NO: 7961 - DNA, 295 bp, Homo sapiens
  source 1..295: mol_type = other DNA
tgcaacctccggattcacgtttgccggattcacgtttgatagtcgttggatgacctgggtccggcaggctccagggaagggcctggagtgggtggccaacataaaggggagtggaagtgaaaaacactacgcggactctgtgacggggcgattcaccgtctccagagacaacgcccgggactcagtgtttttgcaaatgaacaggctcagacccgacgacacggccgtctattactgtgccctggggcgggggatggacgtctggggccaagggaccacggtcaccgtctcctca

SEQ ID NO: 7962 - DNA, 280 bp, Homo sapiens
  source 1..280: mol_type = other DNA
tgcagcctctgggttcatctttagtggtcgttggatgacctgggtccggcagcctccagggaaggggctggagtgggtggccaacataaaggaagatgggagtcagaaaaactatgtggactctgtgaggggccgattcaccgtctccagagacaacgccaagaactcagtggtcctccaaatgaacagcctgagagtcgaggacacggccgtatattactgtgccctggggcgggggatggacgtctggggccaagggacctcggtcaccgtctcttca

SEQ ID NO: 7963 - DNA, 280 bp, Homo sapiens
  source 1..280: mol_type = other DNA
tgcagcctctggattcacctttacgagccgttggatgacctgggtccggcaggctccagggaagggactggagtgggtggccaacataaaggaaaatggaaatgagaaaaactatgtgggctctgtgaagggccgattcaccgtctccagagacaacgccaggaacttagtgctcctccaaatgaacagcctgagacccgaggattcggccgtctattactgtgccctggggcgggggatggacgtctggggccaaggaaccacggtcaccgtctcttca

SEQ ID NO: 7964 - DNA, 280 bp, Homo sapiens; identical to SEQ ID NO: 7963
  source 1..280: mol_type = other DNA

SEQ ID NO: 7965 - DNA, 280 bp, Homo sapiens
  source 1..280: mol_type = other DNA
tgcagcctccggattcacgtttagtagtcgttggatgacctgggtccggcaggctccagggaaggggctggagtgggtggccaacataagggggagtggaagtgagaaacactatgtggactctgtgacggggcgattcaccgtctccagagacaacgccaagaactcagtgttcctccaaatgaacagcctcagacccgaggacacggccgtctattactgtgccctggggcgggggatggacgtctggggccaagggaccacggtcaccgtctcttca

SEQ ID NO: 7966 - DNA, 280 bp, Homo sapiens
  source 1..280: mol_type = other DNA
tgcagcctctggattcacctttaataaacgttggatgacctgggtccgccaggctccagggaaggggctggagtgggtggccaacataaacgaagatggacgtgagatacattatgtggactctgtgaagggccgattcaccatctccagagacaacgccaagaactcagtgtatctgcagatgaacagcctgagagccgaggacacggctgtgttttactgtgcacttggcaggggaatggacgtctggggccaagggagcacggtcaccgtctcctca

SEQ ID NO: 7967 - DNA, 280 bp, Homo sapiens
  source 1..280: mol_type = other DNA
tgcagcctctggattcacctttagtagtcgttggatgacctgggtccgccaggctccagggaaggggctggagtgggtggccaccataaacagagatgggagtgacatatactatgtggacgctgtgaagggccgattcaccatttccagagacaacgccaagaactcactgtatctgcaaatgaacagcctgagagacgacgacacggctgtgtattactgtgcgctaggacgcggtatggacgtctggggccaagggaccacggtcaccgtctcctca

SEQ ID NO: 7968 - DNA, 280 bp, Homo sapiens
  source 1..280: mol_type = other DNA
tgcagcctctggattcacctttagtagtcgttggatgacctgggtccgccaggctccagggaaggggctggagtgggtggccaacataaacagagatgggagtgacaaatactatgtggacgctgtgaagggccgattcaccatttccagagacaacgccaagaactcactgtatctgcaaatgaacagcctgagagacgacgacacggctgtgtattactgtgcgctaggacgcggtatggacgtctggggccaagggaccacggtcaccgtctcctca

SEQ ID NO: 7969 - DNA, 280 bp, Homo sapiens
  source 1..280: mol_type = other DNA
tgcagcctctcgattcgcttttagtggccgttggatgacctgggtccgccaggccccaggaaaggggctggagtgggtggccagcataaaaggagatggaagtgagaaatactatgtggactctgtgaggggccgattcgccatctccagagacaacgccaagaactcactgtatctgcaaatgaacagcctgagaggcgacgacacgggcatgtattactgtgcgttgggaagggggatggacgtctggggtcaagggaccacggtcaccgtctcctca

SEQ ID NO: 7970 - DNA, 277 bp, Homo sapiens
  source 1..277: mol_type = other DNA
tgcagtctctggattcacctttagtaactatcgaatgagctgggcccgccaggctccagggaaggggctggagtgggtggccaacataaaccaagatggaagtgagcaatactatgtggactctgtgaagggccgattcaccatctccagagacaacgccaagaactcactgtatctgcaactgaatagcctgagagccgaggacacggctgtgtattactgtgcgagatggggattggacgtctggggccaagggaccacggtcaccgtctcctca

SEQ ID NO: 7971 - DNA, 277 bp, Homo sapiens; identical to SEQ ID NO: 7970
  source 1..277: mol_type = other DNA

SEQ ID NO: 7972 - DNA, 277 bp, Homo sapiens
  source 1..277: mol_type = other DNA
tgcagcctctggattcacctttaatccctattggatgaactgggtccgccaggctgcagggaaggggctcgagtgggtggccaacataaacgaagatggaagtgagaaaaactatgtggactctgtgaagggccgattcaccatctccagagacaacgccaagaactcactgtatctgcaaatggacagcctaagagccgacgacacggctgtgtattactgtgcgaggtggggtttggacgtctggggccaagggaccacggtcaccgtctcctca

SEQ ID NO: 7973 - DNA, 277 bp, Homo sapiens
  source 1..277: mol_type = other DNA
tccagcctctggattcacctttaatacctattggatgaactgggtccgccaggctccagggaaggggctcgagtgggtggccaacataaaccaagatggaactgagaaaaactatgtggactctgtgaagggccgattcaccatctccagagacaacgccaagaactcactgtatctgcaaatggacagcctgagagccgaggacacggctgtgtattactgtgcgaggtggggtttggacgtctggggccaagggaccacggtcaccgtctcctca

SEQ ID NO: 7974 - DNA, 277 bp, Homo sapiens
  source 1..277: mol_type = other DNA
tacagcctctggattcaactttaatatctattggatgaactgggtccgccaggctccaggggaggggctcgagtgggtggccaatataaacctggaggaaagtgagaaaaactatgtggactctgtgaagggccgattcaccgtctccagagacaacgccaaaaactcactgtatctccaaatggacagcctgagagccgaggacacgggtgtatattactgtgcgaggtggggtttggacgtctggggccaagggaccacggtcaccgtctcctca

SEQ ID NO: 7975 - DNA, 277 bp, Homo sapiens; identical to SEQ ID NO: 7973
  source 1..277: mol_type = other DNA

SEQ ID NO: 7976 - DNA, 277 bp, Homo sapiens
  source 1..277: mol_type = other DNA
tgcagtctctggattcacctttagtaactatcgaatgagttgggcccgccaggctccagggaaggggctggagtgggtggccaacataaaccaagatggaagtgagcgacactatgtggactctgtgaggggccgattcaccatctccagagacaacgccaagaactcgctgtatctgcaactgaatagcctgagagccgaggacacggctgtgtattactgtgcgagatggggattggacgtctggggccaagggaccacggtcaccgtctcctca

SEQ ID NO: 7977 - DNA, 277 bp, Homo sapiens
  source 1..277: mol_type = other DNA
tgcagtctctggattcacctttagtaactatcgaatgagttgggcccgccaggctccagggaaggggctggagtgggtggccaacataaaccaagatggaagtgagcaacactatgtggactctgtgaagggccgattcaccatctccagagacaacgccaagaactcactgtatctgcaactgaatagcctgagagccgaggacacggctgtgtattactgtgcgagatggggattggacgtctggggccaagggaccacggtcaccgtctcctca

SEQ ID NO: 7978 - DNA, 275 bp, Homo sapiens
  source 1..275: mol_type = other DNA
cagtctctggattcacctttagtaactatcgaatgagttgggcccgccaggctccagggaaggggctggagtgggtggccaacataaaccaagatggaagtgagcgacactatgtggactctgtgaggggccgattcaccatctccagagacaacgccaagaactcgctgtatctgcaactgaatagcctgagagccgaggacacggctgtgtattactgtgcgagatggggattggacgtctggggccaagggaccacggtcaccgtctcctca

SEQ ID NO: 7979 - DNA, 277 bp, Homo sapiens
  source 1..277: mol_type = other DNA
tgcagtctctggattcacctttagtaactatcgaatgagttgggcccgccaggctccagggaaggggctggagtgggtggccaacataaacgaagatggaagtgagcaatactatgtggactctgggaagggccgattcaccatctccagagacaacgccaagaactcactgtatctgcaactgaatagcctgagagccgaggacacggctgtgtattactgtgcgagatggggattggacgtctggggccgagggaccacggtcaccgtctcctca

SEQ ID NO: 7980 - DNA, 277 bp, Homo sapiens
  source 1..277: mol_type = other DNA
tgcagtctctggattcacctttagtagctatcgaatgagctgggcccgccaggctccagggaaggggctggagtgggtggccaacataaacgaagatggaagtgaacaacactatgtggactctgtgaagggccgattcaccgtctccagagacaacgccaagaactcactgtatctgcaactgaatggcctgagagccgatgacacggctatttattactgtgcgagatggggattggacgtctggggccaagggaccacggtcaccgtctcctca

SEQ ID NO: 7981 - DNA, 277 bp, Homo sapiens
  source 1..277: mol_type = other DNA
tgcagtctctggattcacttttagtaactatcgaatgagttgggcccgccaggctccagggaaggggctggagtgggtggccaacataaaccaagatggaagtgagcaacactatgtggactctgtgaagggccgattcaccatctccagagacaacgccaagaactcactgtatctgcaactgaatagcctgagagccgaggacacggctgtgtattactgtgcgagatggggattggacgtctggggccaagggaccacggtcaccgtctcctca

SEQ ID NO: 7982 - DNA, 277 bp, Homo sapiens
  source 1..277: mol_type = other DNA
tgcagtctctggattcacctttagtaactatcgaatgagctgggcccgccaggctccagggaaggggctggagtgggtggccaacatagaccaagatggaagtgagcaatactatgtggactctgtgaagggccgattcaccatctccagagacaacgccaagaactcactgtatctgcaactgaatagcctgagagccgaggacacggctgtgtattactgtgcgagatggggattggacgtctggggccaagggaccacggtcaccgtctcctca

SEQ ID NO: 7983 - DNA, 277 bp, Homo sapiens
  source 1..277: mol_type = other DNA
tgcagtctctggattcacctttagtaactatcgaatgagctgggcccgccaggctccagggaaggggctggagtgggtggccaacataaacgaagatggaagtgaacaacactatgtggactctgtgaagggccgattcaccgtctccagagacaacgccaagaactcactgtatctgcaactgaatggcctgagagccgatgacacggctatttattactgtgcgagatggggattggacgtctggggccaagggacctcggtcaccgtctcctca

SEQ ID NO: 7984 - DNA, 289 bp, Homo sapiens
  source 1..289: mol_type = other DNA
tgcagtctctggattcacttttagtagttcttacatgagctgggtccgccaggctccagggaaggggctggagtgggtggccaacataaagcaagatggaagtgagaaaaactatgtggactctgtgaagggccgattcaccatctccagagacaacgccaagaactcactgtatctgcaaatgaacagcctgagagccgaggacacggctctctattactgtgcgagagatggctactactacgctatggacgtctggggccaagggaccacggtcaccgtgtcctca

SEQ ID NO: 7985 - DNA, 289 bp, Homo sapiens
  source 1..289: mol_type = other DNA
tgcagcctctggattcacctttaggagctattggatgagttgggtccgccaggctccagggaaggggctggagtggctggccaacttaaagcacgatggaagtgagaaatactatgtggactctgtgacgggccgattcaccatctccagagacaacgccaagaactcactgtatctgcaaatgaacagcctgagagccgaggacacggctgtgtattactgtgcgagagatggttattactacgctatggacgtctggggccaagggaccacggtcaccgtctcctca

SEQ ID NO: 7986 - DNA, 289 bp, Homo sapiens
  source 1..289: mol_type = other DNA
tgcagcctctggatttccttttagtgactattggatgagctgggtccgccaggctccagggaaggggctggagtgggtggccaacataaagggagatcagagtgcgagatactatgtggactctgtgaagggccgattcaccatctccagagacaacgccaagaactcactgtatctgcaaatgaacagcctgagagtcgatgacacggctgtgtattattgtgcgagagatgggtactactacgctatggacgtctggggccaagggaccacggtcaccgtctcctca

SEQ ID NO: 7987 - DNA, 310 bp, Homo sapiens
  source 1..310: mol_type = other DNA
tgtaggctctggattcacctttagtagttattggatgagttgggtccgccaggctccagggagggggctggaatgggtggccaatataaagcaagacggaactgagaaatactatatagacgctgtgaagggccgattctccatttccagagacaatgccaagaagtcactgtatttgcaaatggacagcctgcgagccgaagacacggctatgtatttctgtgcgagaggagattactatgattctagtggtgattacattgatgcttttgacatctggggccaagggacaatggtcaccgtgtctccg

SEQ ID NO: 7988 - DNA, 310 bp, Homo sapiens
  source 1..310: mol_type = other DNA
tgcagcctctggattcacctttagtagctattggatgagctgggtccgccaggctccagggaaggggctggagtgggtggccaacataaagcaagatggaagtgagaagttctatgtggactctgtgaggggccgatttattctctccagagacaacgccaagaactcactctatctacaaatgaacagcctgagaccggaggacacggctgtgtattactgtgcgagaggggattactatgatagtagtggcgattacattgatgcttttgatatctggggccaggggacagtggtcaccgtctcttca

SEQ ID NO: 7989 - DNA, 301 bp, Homo sapiens
  source 1..301: mol_type = other DNA
tgcagcctctggattcaccttcagtaactatggcatccactgggtccgccaggctccaggcaaggggctggagtgggtggcagttatatcatatgatggaagtaataaatactatgcagactccgtgaagggccgattcaccatctccagagacaattccaagaacacgctgtatctgcaaatgaacagcctgagagctgaggacacggctgtgtattactgtgcgaaagaagggggacgtagagatggctacaattactttgactactggggccagggaaccctggtcaccgtctcctca

SEQ ID NO: 7990 - DNA, 301 bp, Homo sapiens
  source 1..301: mol_type = other DNA
tgcagcctctggattcaccttcagtacctatggcatgcactgggtccgccaggctccaggcaaggggctggagtgggtggcagttatatcatatgatggaagtaataaatactatgcagactccgtgaagggccgattcaccatctccagagacaattccaagaacacgctgtatctgcaaatgaacagcctgagaacagaggacacggctgtgtattactgtgcgaaagagggtggacgtagagatggctacaattactttgactactggggccagggaaccctggtcaccgtctcctca

SEQ ID NO: 7991 - DNA, 301 bp, Homo sapiens; identical to SEQ ID NO: 7990
  source 1..301: mol_type = other DNA

SEQ ID NO: 7992 - DNA, 301 bp, Homo sapiens
  source 1..301: mol_type = other DNA
tgcagcctctagattcacgttcagtacctatggcatgcactgggtccgccaggctccaggcaaggggctggagtgggtgtcaatgatatcatatgatggaaataataaagactatgcagactccgtgaagggccgattcaccatctccagagacaactccaagaacaccttgtatctgcacatgaatagcctgagacctgaggacacggctgtgtactactgtgcgaaagagggtggacgtagagatggctacaattactttgactactggggccagggaactctggtcaccgtctcctca

SEQ ID NO: 7993 - DNA, 301 bp, Homo sapiens
  source 1..301: mol_type = other DNA
tgcagcctctggattcaccttcagtgcttatgaaatgaactgggtccgccaggttccagggaaggggccggagtgggtgtcatatattgatagtagtagtagcaccatacactacgcagactctgtgcagggccgattcaccatttccagagacaacgccaagagctcactgtatctgcagatgaacagcctgagagccgaggacacgggtctttattactgtgcgagaggccgggggatggctagagtctggtatggttttgatatatggggccaagggacaatggtcaccgtctcttca

SEQ ID NO: 7994 - DNA, 298 bp, Homo sapiens
  source 1..298: mol_type = other DNA
tgcagcctctggattcaccttcagtagttatgaaatgaactgggtccgccaggctccagggaaggggctggagtgggtttcatacattagtagtggcagtaccatattttacgcagactctgtgaagggccgattcaccatctccagagacaacgccaagaactcactgtatctgcaaatcaacagcctgagagccgaggacacggctgtttatttctgtgcgagaggtcgggggatggccagagtgtggtatggttttgatatctggggccaagggacaatggtcaccgtctcttca

SEQ ID NO: 7995 - DNA, 288 bp, Homo sapiens
  source 1..288: mol_type = other DNA
aaggcttctggatacagctttaccgactactggatcggctgggtgcgccagatgcccgggaaaggcctggagtacatggggatcatctatcctggtgactctaatattaaatacagcccgtccttccaaggccaggtcaccatctcagccgacaagtccatcaccaccgcctacctgcagtggagcagcctgaaggcctcggacaccgccatctatttctgtgcgagacgttatagcaacagctggtttgactactggggccagggaaccctgctcaccgtctcctca

SEQ ID NO: 7996 - DNA, 288 bp, Homo sapiens
  source 1..288: mol_type = other DNA
aagggttctggatacaactttatcagctactggatcggctgggtgcgccagatgcccgggaaaggcctggagtggatggggatcatctatccaggtgactctgataccagatacagcccgtccttccaaggccaggtcaccatctcagccgacaagtccatcagcaccgcctacctgcagtggagcagcctgaaggcctcggacaccgccatgtattactgtgcgaggagatatagcaacagctggtttgactactggggccagggaaccctggtcaccgtctcctca

SEQ ID NO: 7997 - DNA, 289 bp, Homo sapiens
  source 1..289: mol_type = other DNA
tgaagtctctggattcacctttactgactattggatgacctgggtccgccaggctccggggaaggggctggagtgggtggccaacataaaggaagatgggagtgccactttttatgcggactctgtgaagggccgattcgccatctccagagacaacgccaagaagtcactgtatctgcaaatgaacagcctgagagccgaggacacggctgtctattactgtgcgacttcggcagatgcagcagctggcccttattggggccagggaaccctgctcaccgtctcctca

SEQ ID NO: 7998 - DNA, 289 bp, Homo sapiens
  source 1..289: mol_type = other DNA
tgtagtctctgaattcatcttcagtaactattggatgacctgggtccgccaggctccagggaaggggctggagtgggtggccaatataaacgaagatggaagtgtgaaatactatgtggactctgtgaagggccgattcaccatctccagagacaacgccaagaactctctgtttctgcatatgaacagtctgagagccgaggacacggccgtatattactgtgcgacttccgctgatgcagcagctggcccctactggggccagggaaccctggtcaccgtctcctcg

SEQ ID NO: 7999 - DNA, 289 bp, Homo sapiens
  source 1..289: mol_type = other DNA
cactgtctctggtgactccatcagtagttactactggagctggatccggcagcccccagggaagggactggagtggattggatatatctattacagtgggagcaccaactacaacccctccctcaagagtcgagtcaccatatcagtggacacgtccaagaaccagtgctccctgaagctgagatctgtgaccgccgcagacacggccttgtattactgtgcgagacatgggggtggctacgatccttttgactactggggccagggaaccctggtcgccgtctcctca

SEQ ID NO: 8000 - DNA, 289 bp, Homo sapiens
  source 1..289: mol_type = other DNA
cagtgtctctggtggctccatcagtagtcactactggagctggatccggcagcccccagggaagagactggagtggcttggctatatctattaccttgggagcaccaactacaacccctccgtcaagagtcgagtcaccatatcaatagacacgtccaagaaccagctctccctgaagctgagctctgtgaccgccgcagacacggccgtgtattactgtgcgagacatgggggtggctacgacccttttgactactggggccagggaaccctggtcaccgtctcctca

SEQ ID NO: 8001 - DNA, 289 bp, Homo sapiens
  source 1..289: mol_type = other DNA
cagtgtctctggtggctccatcagtagtcactactggagctggatccggcagcccccagggaagagactggagtggcttggctatatctattaccttgggagcaccaactacaacccctccctcaagagtcgagtcaccatatcaatagacacgtccaagaaccagctctccctgaagctgagctctgtgaccgccgcagacacggccgtgtattactgtgcgagacatgggggtggctacgacccttttgactactggggccagggaaccctggtcaccgtctcctca

SEQ ID NO: 8002 - DNA, 289 bp, Homo sapiens; identical to SEQ ID NO: 8001
  source 1..289: mol_type = other DNA

SEQ ID NO: 8003 - DNA, 289 bp, Homo sapiens
  source 1..289: mol_type = other DNA
cagtgtctctggtggctccatcagtagtcactactggagctggatccggcagcccccagggaagagactggagtggcttggctatatctattaccttgggagcaccaactacaacccctccgtcaagagtcgagtcaccatatcaatagacacgtccaagaaccagctctccctgaagctgagctctgtgaccgccgcagacacggccgtgtattactgtgcgagacatggaggtggctacgacccttttgactactggggccagggaaccctggtcaccgtctcctca

SEQ ID NO: 8004 - DNA, 289 bp, Homo sapiens; identical to SEQ ID NO: 8003
  source 1..289: mol_type = other DNA

SEQ ID NO: 8005 - DNA, 303 bp, Homo sapiens
  source 1..303: mol_type = other DNA
gcttctggatacaccttcagtaattatgctatcaattgggtgcgacaggcccctggacaagggcttgagtggatgggatgggtcaacaccaacactgggaacccaacgtatgcccagggcttcacaggacggtttgtcttctcctgggacacctctgtcagcacggcatttctgcagatctccagcctaaaagttgaggacactgccctgtattactgtgcgagaaggggatattgtagtggttctacctgcgggggctggttcgacccctggggccagggaaccctggtcaccgtctcctca

SEQ ID NO: 8006 - DNA, 303 bp, Homo sapiens
  source 1..303: mol_type = other DNA
gcttctggatacaccttcactagctatgctatcaattgggtgcgacaggcccctggacaagggcttgagtggatgggatggatcaacaccaacactgggaacccaacgtatgcccagggcttcacagggcggtttgtcttctccttggacacctctgtcaccacggcatatctgcagatcagcaccctaacgactgaggacactgccatgtattattgtgcgagaaggggatattgtagtggtagtacctgcggaggctggttcgacccctggggccagggaaccctggtcaccgtctcctca

SEQ ID NO: 8007 - DNA, 292 bp, Homo sapiens
  source 1..292: mol_type = other DNA
cacagcctctggatttatcttcagtacttatgaagtgaattgggtccgccaggctccagggaaggggctggagtgggtttcatatattaggagtggaggtgatagcaccacatactacgcagactctgtgaggggccgattcaccatctccagagacaacgccaagaactcagtgtatctgcaaatgaacagcctgagagtcgaggacacggctgtttattactgtgcgagggatttacggtcgaacggcttggacgtctggggcctagggaccacggtcagcgtctcctca

SEQ ID NO: 8008 - DNA, 289 bp, Homo sapiens
  source 1..289: mol_type = other DNA
tgcagcctctggattcaccttcagtatgtatgaaatgaactggatccgccagactccagggaaggggctggagtgggtttcatacattagtagtagtggtagtaccacatactacgcagactctgtgaagggccgattcaccatctccagagacaacgccaagaactcagtgtttctgcaaatgaacagcctgagagacgacgacacggctatttatttgtgtgcgagagaccttcgatcaaacggtttggacgtctggggccaagggaccacggtcaccgtctcctca

SEQ ID NO: 8009 - DNA, 289 bp, Homo sapiens
  source 1..289: mol_type = other DNA
tgcagcctctggattcaccttcagttcttttgaaatgaactgggtccgccaggctccagggaaggggctgcagtggatttcatacattggtgttagtggtgataccgtatactacgcagactctgtgaagggccgattcaccatctccagagacaacgccaagaattcgctgtggctgcaaatgaccagcctgagagccgaggacacggctgtttattactgtgcgagagatctgcgtagcaacggtttggacgtctggggccaagggaccacggtcaccgtctcctca

SEQ ID NO: 8010 - DNA, 297 bp, Homo sapiens
  source 1..297: mol_type = other DNA
aagggttctggatacgactttagcaactactggatcggctgggtgcgccagatgcccgggaaaggcctggagtggatggggatcatctatcctagtgactctgaagccaaatacagcccgtccttccaaggccaggtcaccatctcagtcgacaagtccatcagtaccgccttcttgcagtggagcagcctgaaggcctcggacaccgccatgtattactgtgcgaggcctaggggggggagctactatggagcttttgactactggggccagggagccctggtcaccgtctcctca

SEQ ID NO: 8011 - DNA, 297 bp, Homo sapiens
  source 1..297: mol_type = other DNA
aagggttctggatacatctttaccaacttctggatcggctgggtgcgccaggtgcccggggaaggcctggagtggatggggatcatctatcctggtgactctgatgccaaatacagcccgtccttgcaaggccaggtcaccatctcagtcgacaagtccatcagcaccgcctacctgcattggagcagcctgaaggcctcggacactgccatgtattactgtgcgaggcccaggggtgggagttactacggtgcatttgactactggggccagggaaccctggtcaccgtctcctca

SEQ ID NO: 8012 - DNA, 297 bp, Homo sapiens
  source 1..297: mol_type = other DNA
aagggttctggatacagctttaccaacttctggatcggctgggtgcgccaggtgcccggggaaggcctggagtggatggggatcatctatcctggtgactctgatgccaaatacagcccgtccttgcaaggccaggtcaccatctcagtcgacaagtccatcagcaccgcctacctgcattggagcagcctgaaggcctcggacactgccatgtattactgtgcgaggcccaggggtgggagttactacggtgcatttgactactggggccagggaaccctggtcaccgtctcctca

SEQ ID NO: 8013 - DNA, 297 bp, Homo sapiens
  source 1..297: mol_type = other DNA
aagggttctggatacagctttaccaacttctggatcggctgggtgcgccaggtgcccggggaaggcctggagtggatggggatcatctatcctggtgactctgatgccaaatacagcccgtccttgcaaggccaggtcaccatctcagtcgacaagtccatcagtaccgcctacctgcattggagcagcctgaaggcctcggacactgccatgtattactgtgcgaggcccaggggtgggagttactacggtgcatttgactactggggccagggaaccctggtcaccgtctcctca

SEQ ID NO: 8014 - DNA, 292 bp, Homo sapiens
  source 1..292: mol_type = other DNA
cactgtctctggtggctccatcagtaattattactggacctggatccggcagcccccagggaagggactggagtggattgggtatatctatgacactgggagccccaactgcaacccctccctcaagagtcgactcaccatatcagtagacacgtccaagagccagttcttcctgaagctgagttctgtgaccgccgcagacacggccgtgtattactgtgcgaggggttacgatagtagtggttactactatgattactggggccagggaaccctggtcaccgtctcctca

SEQ ID NO: 8015 - DNA, 292 bp, Homo sapiens
  source 1..292: mol_type = other DNA
cactgtctctggtggctccattagtagttactactggacctggatccggcagccccccggggagggactggagtgggttgggtatatctattacagtgggagcaccaactacaacccctccctcaagagtcgagtcaccatatcagtagacacgtccaagaaccaggtctccctgaacctgagctctgtgaccgccgcagacacggccgtgtattactgtgcgagaggttatgatagtagtggttattactacgactactggggccagggaaccctggtcaccgtctcctca

SEQ ID NO: 8016 - DNA, 292 bp, Homo sapiens
  source 1..292: mol_type = other DNA
cactgtctctggtggctccatcagtagttactactggacctggatccggcagcccccagggaagggactggagtggattgggtatattttttacagtgggagcaccaactccaacccctccctcaagagtcgagtcaccatatcagtagacacgtccaagaaccaggtctccctgaagctgcgctctgtgaccgccgcagacacggccgtgtattactgtgcgagaggttatgatagtagtggttattactacgactactggggccagggaaccctggtcaccgtctcctca

SEQ ID NO: 8017 - DNA, 291 bp, Homo sapiens
  source 1..291: mol_type = other DNA
cactgtctctggtggctccattagtagttactactggacctggatccggcagccccccggggagggactggagtgggttgggtatatctattacagtgggagcaccaactacaacccctccctcaagagtcgagtcaccatatcagtagacacgtccaagaaccaggtctccctgaacctgagctctgtgaccgccgcagacacggccgtgtattactgtgcgagaggttatgatagtagtggttattactacgactactggggccagggaaccctgtcaccgtctcctca

SEQ ID NO: 8018 - DNA, 286 bp, Homo sapiens
  source 1..286: mol_type = other DNA
tgcagcctctggattcaccttcagtagttactggatgcactgggtccgccaagctcccgggaagggcctggtgtgggtctcacgtattgacaattatgggagcatcacagactacgcggactccgtgaagggccgattcaccatctccagagacaacaccaagaacacgctgtatctgcagatgaacagtctgagaaccgaggacgcgggcatgtattactgtgcaagagatgtcggcggtcgtgcgggctactggggccagggaaccctggtcaccgtctcctca

SEQ ID NO: 8019 - DNA, 286 bp, Homo sapiens
  source 1..286: mol_type = other DNA
tgcagcctctggattcaccctcagtagttactggatgcactgggtccgccaagccccagggaaggggctggtgtgggtctcacgtattaatggtgatgggactagcataacctacgcggactccgtgaagggccgattcaccatctccaaagacaacgccaagaacacgctgtatctgcaaatgaacagtctgagagtcgaggacacggccgtatattactgtgcaagagatgttggcggtcgggctggctactggggccagggaaccctggtcaccgtctcctca

SEQ ID NO: 8020 - DNA, 295 bp, Homo sapiens
  source 1..295: mol_type = other DNA
tgcaggctctggattcacctttagtagcttttggatgggctgggtccgccaggctccagggaaggggctggagtgggtggccaacataaagcaagatggaagtgagaaatactatgtggactctgtgaagggccgattcaccatctccagagacaacgccaagaattcactgtatctgcaaatgaacagcctgagagccgaggacacggctgtgtattattgtgcgagaggattcagctatggtacagactactttgactactggggccagggaaccctggtcaccgtctcctca

SEQ ID NO: 8021 - DNA, 295 bp, Homo sapiens
  source 1..295: mol_type = other DNA
tgcagcctctggattcacctttagtaactattggatgagctgggtccgccagactccagggaaggggctggagtggctggccatcataaagcaagatggaagtgagaaatactatgtggactctgtgaagggccgattcactatctccagagacaacgccaagaactcactgtatctgcaaatgaacagcctgagagccgaggacacggctgtgtattactgtgcgagagggttcagctatggcacggactactttgactactggggccagggaaccctggtcaccgtctcctca

SEQ ID NO: 8022 - DNA, 271 bp, Homo sapiens
  source 1..271: mol_type = other DNA
cgctgtctatggtgggtccttcagtaattattactggagctggatccgccagcccccagggaaggggctggagtggattggagaaatcaatcatagtggaaacaccaactacaacccgtccctcaagagtcgagtcaccatgtcagtagacacgtccaagaaccagttctccctgaagctgacctctgtgaccgccgcggacacggctgtgtattactgtgggcggagatttgactactggggcctgggaagcctggtcaccgtctcctca

SEQ ID NO: 8023 - DNA, 271 bp, Homo sapiens
  source 1..271: mol_type = other DNA
cgctgtctatggtgcgtccttcagtggttactactggagctggatccgccagcccccagggaaggggctggagtggattggggaaatcaatcatggtggaagcaccaactacaacccgtccctcaagagtcgagtcaccatatcagtagacacgtccaagaaccagttctccctgaagctgagctctgtgaccgccgcggacacggctgtgtattattgtgggaggcgttttgactactggggccagggaaccctggtcaccgtctccgca

SEQ ID NO: 8024 - DNA, 271 bp, Homo sapiens
  source 1..271: mol_type = other DNA
cgctgtctatggtgcgtccttcagtggttactactggagctggatccgccagcccccagggaaggggctggagtggattggggaaatcaatcatggtggaagcaccaactacaacccgtccctcaagagtcgagtcaccatatcagtagacacgtccaagaaccagttctccctgaagctgagctctgtgaccgccgcggacacggctgtgtattattgtgggaggcgttttgactactggggccagggaaccctggtcaccgtctcctca

SEQ ID NO: 8025 - DNA, 271 bp, Homo sapiens
  source 1..271: mol_type = other DNA
cgctgtctatggtgcgtccttcagtggttactactggagctggatccgccagcccccagggaaggggctggagtggattggggaaatcaatgatagtggaggcaccaactacaacccgtccctcaagagtcgagtcaccatatcagtagacacgtccaagaagcagttctccctgaaggtgatatctgtgaccgccgcggacacggctgtgtatttctgtgggagaagatttgactactggggccagggaaccctggtcaccgtctcctca

SEQ ID NO: 8026 - DNA, 280 bp, Homo sapiens
  source 1..280: mol_type = other DNA
tgcagcctctggattcatcttcggagattatgagatgaattgggtccgccaggctccagggaaggggctggagtggatttcatatatcagtggtagtgggactacgatctatgcagactctgtgaggggccgattcaccatctccagagacaacgccgagaactcactgtttctgcagatgaacaatgtgcgagtcgaggacacggctatttattactgtacgagagatcctcggggcatggacgtctggggccaagggaccacggtcaccgtctcctca

SEQ ID NO: 8027 - DNA, 283 bp, Homo sapiens
  source 1..283: mol_type = other DNA
tgcagcctccggattcacttttagtagttatgaaatgaactgggtccgccaaactccagggaaggggctggagtggctttcatacattagtgaaagtgggggtaccatatggtacgcagactcagtgaagggtcgattcaccacctccagagacaacaccaagaactcactgtatctccaaatgaacagtctgagagtcgaggactcggctatttattactgtacgagagatccgcggggtatggacgtctggggccaagggaccaaggtcaccgtctcctca

SEQ ID NO: 8028 - DNA, 274 bp, Homo sapiens
  source 1..274: mol_type = other DNA
tgcagcctctggattcaccttcagtagctttgctatgcactgggtccgccaggctccaggcaaggggctggagtgggtggcagttatatcatatgatggaagcaataaatattacgcagactccgtgaagggccgattcaccatctccagagacaattccaagaacacgctgtatctgcaaatgaacagcctgagagctgaggacacggctgtgtattactgtgcgaaccgctttgactactggggccagggaaccctggtcaccgtctcctcg

SEQ ID NO: 8029 - DNA, 286 bp, Homo sapiens
  source 1..286: mol_type = other DNA
tgcagcctctggattcaccttcagtggctatgctatgcactgggtccgccaggctccaggcaaagggctggagtgggtggcagttatatcatctgatggaagcaatcaatactacgcagactccgtgaagggccgattcaccatctccagagacaattcccagaacacgctgtacctgcaattgaacagcctgagagctgaggacacggctgtttattattgtgcgaaccgttttgactactggggccagggaaccctggtcaccgtctcctcaggtgagtcctca

SEQ ID NO: 8030 - DNA, 301 bp, Homo sapiens
  source 1..301: mol_type = other DNA
tgtaggctctggattcacctttggtagtaattggatgagctgggtccgccaggctccagggaaggggctggagtgggtggccagcataaagcaagatggaactaagacatacaatgaggactctgtgaagggccgattcagcatctccagagacaacgccaagaactcactgtatcttcaaatgaacagcctgacaggcgccgacacggctgtttattactgtgcgagaggccctagttatggttcgcggaccgactattttgactactggggccagggaaccctggtcaccgtctcctca

SEQ ID NO: 8031 - DNA, 301 bp, Homo sapiens
  source 1..301: mol_type = other DNA
tgcagcctctggattcaccttcagtagtcattggatgagttgggttcgccaggctccagggaaggggctggagtgggtggccagcatcaaggaagttggaagggggacgtacaatgtggactctgtgaagggccgattcaccatctccagagacaacgccaagaactcactgtatctgcaaatgaacggcctgagatccgaggacacggccctgtattactgtgcgagaggccccagttatggttcgaggaccgactactttgactactggggccagggaaccctggtcaccgtctcctca

SEQ ID NO: 8032 - DNA, 301 bp, Homo sapiens
  source 1..301: mol_type = other DNA
tgcagcctctggattcaccttcagtagtaattggatgagctgggtccgccagactccagggaaggggctggagtgggtggccagcgtcaagcaagatgggattacgaaatactatatggactctgtgaagggccgagtcaccatctccagagacaacgccaaggatgcactgtatctgcaaatgaacagcctgagagccgaggacacggctatttattactgtgcgagaggaccgtcgtatggtagtcggactgactactttgactactggggccagggaaccctggtcaccgtctcctca

SEQ ID NO: 8033 - DNA, 301 bp, Homo sapiens
  source 1..301: mol_type = other DNA
tgcagcctctcgattcactttcagcaatcattggatgggctgggtccgccaggctccagggaaggggctggagtgggtggccagcataaagcaagatggaagtgagacgtacaatgtggccccagtgaagggccgattcaccatctccagagacaacgccaggaattcactgtatctgcaaatgaacagcctgacaatcgaggacacggctatatattactgtgcgagaggccccagttatggatcgaggaccgactattttgactactggggccagggaaccctggtcaccgtctcctca

SEQ ID NO: 8034 - DNA, 283 bp, Homo sapiens
  source 1..283: mol_type = other DNA
tgcagcctctggattcacctttagtagctattggatgagctgggtccgccagtctccagggaaggggctggagtgggtggccaacataaagcaagatggaagtgacaaatactatgtggactctgtgaagggccgattcaccatctccagagacaacgccaagaactcactgtatctgcaaatgaacagcctgagagccgaggacacggctgtttattactgtgcgaagggcagtggctggtacggctactggggccagggaaccctggtcaccgtctcctca

SEQ ID NO: 8035 - DNA, 283 bp, Homo sapiens
  source 1..283: mol_type = other DNA
tgcagcctctggatttacctttagtaactattggatgagctgggtccgccaggctccagggaaggggctggagtgggtggccaacataaagaaagatgaaagtgagaaatactatgtggactctgtgaagggccgattcaccatctccagagacaacgccaagaattcactgtctctgcaaatgaacagcctgagagccgaggacacggctgtgtattactgtgcgaaaggcagtggctggtacggctactggggccagggaaccctagtcaccgtctcctca

SEQ ID NO: 8036 - DNA, 283 bp, Homo sapiens
  source 1..283: mol_type = other DNA
tgcagcctctggattcacctttagtacctcttggatgaactgggtccgccaggctccagggaaggggctggagtgggtggccaagataaagcaagatggaagtgagaaatactatgtggactctgtgaggggccgattcaccatctccagagacaatgccaagaactcactgtatctgcaaatgaacagcctgagagtcgaggacacggctgtttattactgtgcgaaaggcagtggctggtacggttactggggccagggaatcctggtcaccgtctcctca

SEQ ID NO: 8037 - DNA, 280 bp, Homo sapiens
  source 1..280: mol_type = other DNA
tgcagcctctggattcacctttaacaactattacatgggctgggtccgccaggctccagggaaggggctggagtgggtggccaacataaaggaagatggaagtgagacactctatgtggactctgtgaggggccgattcatcatctcgagagacaacgccaagaactcagtgtatctgcagatgaacagcctgagaggcgaggacacggctatgtattactgtgcgaggggagtgagatccgagggctggggccagggaaccctggtcaccgtcccctca

SEQ ID NO: 8038 - DNA, 280 bp, Homo sapiens
  source 1..280: mol_type = other DNA
tgcagcctctggattcacctttaataagtattttatgggctgggtccgccaggctccagggaaggggctggagtgggtggccaacgtcaaggaagatggaagtgagacactctatgtggactctgtgaagggccgattcatcatctcgagagacaacgccaagaactcagtgtatctgcagatgaacagcctgagaggcgaggacacggctatgtattactgtgcgaggggagtgagatccgagggctggggccagggaaccctggtcaccgtcacctca

SEQ ID NO: 8039 - DNA, 280 bp, Homo sapiens
  source 1..280: mol_type = other DNA
tgcagcctctggattcacctttaacaactatttcatgggctgggtccgccaggctccagggaaggggctggagtgggtggccaacataaaggaagatggaagtgagacactctatgtggactctgtgaagggccgattcatcatctcgagagacaacgccaagaactcagtgtatctgcagatgaacagcctgagaggcgaggacacggctatgtattactgtgcgaggggagtgagatccgagggctggggccagggaaccctggtcaccgtcccctca

SEQ ID NO: 8040 - DNA, 280 bp, Homo sapiens
  source 1..280: mol_type = other DNA
tgtagcctctggattcacttttacatcttattttatgggctgggtccgccaggctccagggaaggggctggagtgggtggccaacataaaggaagatggaagtgtcaaactctatgtggactctgtgaagggccgattcaccatctccagagacaacgccaacaactcactgtttctgcaaatgaacagcctgagagccgaggacacggctgtctattattgtgcgagaggggtgagatcagagggctggggccagggaaccctggtcaccgtctcctca

SEQ ID NO: 8041 - DNA, 280 bp, Homo sapiens
  source 1..280: mol_type = other DNA
tgcagcctctggattcacttttactagttattttatgggctgggtccgccaggctccagggaaggggctggagtgggtggccaacataaagcatgatggaagtgacaaactctatgtggactctgtgaagggccgattcaccatctccagagacaacgccaagaactcactgtttctgcaaatgaacagcctgagagccgaggacacggctgtctattattgtgcgagaggggtgagatcagagggctggggccagggaaccctggtcaccgtctcctca

SEQ ID NO: 8042 - DNA, 280 bp, Homo sapiens
  source 1..280: mol_type = other DNA
tgcagcctctggattcacctttaacaagtattttatgggctgggtccgccaggctccagggaaggggctggagtgggtggccaacataaaggaagatggaagtgagacactctatgtgggctctgtgaagggccgattcatcatctcgagagacaacgccaagaactcagtgtatctgcagatgaacagcctgagaggcgaggacacggctatctattactgtgcgaggggagtgagatccgagggctggggccagggaaccctggtcaccgtcccctca

SEQ ID NO: 8043 - DNA, 283 bp, Homo sapiens
  source 1..283: mol_type = other DNA
tgcagcctctggattcaccttcagtgactattacatgagctggatccgccaggctccagggaaggggctggagtgggtttcatacattagtagtagtggtagtaccatatactacgcagactctgtgaagggccgattcaccatctccagggacaacgccaagaactcactgtatctgcaaatgaacagcctgagagccgaggacacggccgtgtattactgtgcgagagggggtagcagccctgactactggggccagggaaccctggtcaccgtctcctca

SEQ ID NO: 8044 - DNA, 307 bp, Homo sapiens
  source 1..307: mol_type = other DNA
tgcagcctctggattcaccttcagtgactactacatgagctgggtccgccaggctccagggaaggggctggagtgggtttcatacattaggagtggtgatatttcatacattagtagtagtgatagtaccaaacactacgcagactctgtgaggggccgattcaccatctccagggacaacgccaagaactcactgtatctgcaactgaacagcctgagagccgaggacacggccgtgtattactgtgcgagaggcgggagtagccctgactactggggccagggaaccctggtcaccgtctcctca

SEQ ID NO: 8045 - DNA, 289 bp, Homo sapiens
  source 1..289: mol_type = other DNA
tgcagcctctggattcacctttactaactattggataaactgggtccgccaggctccagggaagggactggagtgggtggccaacataaataacgatggcggtaggaaaaaccatgcggactctgttaagggccgattcaccatctccagagacaatgacaagaactcactatatctacagatgaacaacctgagggccgaggacacggctgtctattactgtgcgagaaataggggatgggaacaattagactactggggccagggaaccctggtcaccgtctcctca

SEQ ID NO: 8046 - DNA, 289 bp, Homo sapiens
  source 1..289: mol_type = other DNA
tgcagcctctggattcacctttactaactattggatgaactgggtccgccaggctccagggaaggggctggagtgggtggccaacatagatatcgatggcggtacgaaaaacaatgcgggctctgttgcgggccgattcaccatctccagagacaatgacaagaactcactatatctacaaatgagcaacctgagggccgaggacacggctgtctattactgcgcgagaaataggggatgggaacaattagactactggggccagggaaccctggtcaccgtctcctca

SEQ ID NO: 8047 - DNA, 289 bp, Homo sapiens
  source 1..289: mol_type = other DNA
tgcagcctctggattcacctttactaactattggataaactgggtccgccaggctccagggaaggggctggagtgggtggccaacataaatgaggttggcggtacgaaaaactatggggactctgttaagggccgattctccatctccagagacaatgacaagaactcactatatctacaaatgaacaacctgagggccgaggacacggctgtctattactgtgcgagaaacaggggatgggaacaattagactactggggccagggaaccctggtcaccgtctcctca

SEQ ID NO: 8048 - DNA, 290 bp, Homo sapiens
  source 1..290: mol_type = other DNA
atgcagcctctggattctcctttactaactattggatgaactgggtccgccaggctccagggaagggcctggactgggtggccaacatagatacggatggcgttacgaaaaactatgcggactctgttaagggccgattcaccatctccagagacaatgacaagaactcactatatctacacatgaacaacctgagggccgaggacacggctgtctattactgtgcgagaaataggggatgggaacaattagactactggggccagggagccctggtcaccgtctcctca

SEQ ID NO: 8049 - DNA, 289 bp, Homo sapiens
  source 1..289: mol_type = other DNA
tgcagcctctggattcacctttagtacctattggatgaactgggtccgccaggctccagggaaggggctggagtgggtggccaacataaaagaggatggaagtgacaaacactatgtggactcagtgaagggccgattcatcatctccagagacaactccaagaactcactatatctgcaaatgaacagcctgagagtcgaggacacggctgtgtattactgtgcgagaaatcgggggtgggaacaattggactactggggccagggaaccctggtcaccgtctcctca

SEQ ID NO: 8050 - DNA, 289 bp, Homo sapiens
  source 1..289: mol_type = other DNA
tgcagcctctggattcacctttaatacctattggatgaactgggtccgccaggctccagggaaggggctggagtgggtggccaacataaaagaggatggaactgacaaacactatgtggcctcagtgaggggccgattcatcatctccagagacaactccaagaactcactatatctggaaatgaacagcctgagagtcgaggacacggctgtgtattactgtgcgagaaatcgggggtgggaacaattggactactggggccagggaaccctggtcaccgtctcctca

SEQ ID NO: 8051 - DNA, 289 bp, Homo sapiens
  source 1..289: mol_type = other DNA
tgcagcctctggattcacctttactaattattggatgaactgggtccgccaggctccagggaaggggctggagtgggtggccaacataaaggaagatggaagttacggacactatgtggactcagtgaagggccgattcaccatctccagagacaacgccaagaactcactatatctccaaatgaacagcctgagagtcgaggacacggctgtctattattgtgcgagaaatcgggggtgggaacaattggactactggggccagggaatcctggtcaccgtctcctca

SEQ ID NO: 8052 - DNA, 289 bp, Homo sapiens
  source 1..289: mol_type = other DNA
tgcagcctctggattcaccttcagtacctattggatgaactgggtccgccaggctccagggaaggggctggagtgggtggccaacataaaagaggatggaagtgacaaacactatgtggactcagtgaagggccgattcatcatctccagagacaactccaagaattcactatatctgcaaatgaacagcctgagagtcgaggacacggctgtgtattactgtgcgagaaatcgggggtgggaacaattggactactggggccagggaaccctggtcaccgtctcctca

SEQ ID NO: 8053 - DNA, 289 bp, Homo sapiens
  source 1..289: mol_type = other DNA
tgcagcctctggattcacctttagcagctatgccatgacctgggtccgccaggctccagggaaggggctggagtgggtctcagcacttggaagtagaggttctgacacatactacccagagtccgtgaagggccggttcaccatctccagagacaactccaagaacacgctgtttctgcaaatgaacagcctgagaggcgaggacgcggccctatattactgtgcgaaaggggttgtagaccggggattggactactggggccagggaatcctggtcaccgtctcctca

SEQ ID NO: 8054 - DNA, 289 bp, Homo sapiens
  source 1..289: mol_type = other DNA
cgcagcctctggattcacctttagcaactatgccatgacctgggtccgccaggctccagggaaggggctggagtgggtctcaggtattggtcctagtggtgctgacacatactatgcagactcagtgaagggccggttcaccatctccagagacagttccaagagcgcactgtttctgcaaatgaacagcctgagagccgaggacacggccgtatatttctgtgcgaaaggggtggtagaccggggacttgactactggggccagggaaccctggtcaccgtctcctca

SEQ ID NO: 8055 - DNA, 286 bp, Homo sapiens
  source 1..286: mol_type = other DNA
tgcagcctctggattcaccttcagtagttatgaaatgaactgggtccgccaggctccagggaaggggctggagtgggtttcatacattagtagtagtggtaatctcatatactacgcagactctgtgaagggccgattcacgatctccagagacaacgccaagaacttactgtacctgcaaatgaacagcctgagagccgaggacacggcgctttattactgtgcgagagaggcccctgatgcttttgatctctggggccaagggacaatggtcaccgtctcttca

SEQ ID NO: 8056 - DNA, 286 bp, Homo sapiens
  source 1..286: mol_type = other DNA
tgcagcctctggattcaccttcagtagtgatgaaatgaactgggtccgccaggctccagggaaggggctggagtgggttgcgtacattagtggtattggtagtaccatatattacgcagactctgtgaagggccgattcaccatttccagagacaacgccaagaagtcactgtatctgcaaatcaacagcctgagagtcgaggacacggctgtttattactgtgcgagagaagctccggatgcttttgatctctggggccaagggacaatggtcaccgtctcttca

SEQ ID NO: 8057 - DNA, 286 bp, Homo sapiens
  source 1..286: mol_type = other DNA
tgcagcctctggattcaccttcagtagtgatgaaatgaactgggtccgccaggctccagggaaggggctggagtgggttgcatacattagtggtattggtaataccatatattacgcagactctgtgaagggccgattcaccatttccagagacaacgccaagaagtcactgtatctgcaaatcaacagcctgagagtcgaggacacggctatttattactgtgcgagagaagctccggatgcttttgatctctggggccaagggacaatggtcaccgtctcttca

SEQ ID NO: 8058 - DNA, 292 bp, Homo sapiens
  source 1..292: mol_type = other DNA
tgcagcctctggctctggattcagcttcagggacgactggatgcactgggtccgccaagctccagggaaggggctggagtgggtctcacatattcagggtgatgggagtcgcacaagctacgcggactccgtgaagggccgattcaccatctccagagacaacgccaagaacacggtgtatctgcaaatgaacagtctgagtgccgaggacacggctgtgtattactgtggaagagatcgcgggtaccaaattgactactggggccagggaaccctggtcagcgtctcctca

SEQ ID NO: 8059 - DNA, 286 bp, Homo sapiens
  source 1..286: mol_type = other DNA
tgcagcctctggattcaccttcagtaggtcctggatgcactgggtccgccaagctccagggaaggggctggtttgggtctcacgtatttatagtgatgggagtggcacaacctacgcggactccgtgaagggccgattcaccatctccagagacaacgccaagaatacgctatatctggaaatgaacggtctgagagccgaggacacggctgtatattactgtggaagagatcgtggttaccagattgactactggggccagggaaccctggtcaccgtctcctca

SEQ ID NO: 8060 - DNA, 295 bp, Homo sapiens
  source 1..295: mol_type = other DNA
tgcagcctctggattcacctttactacttatgccatgagctgggtccgccaggctccagggaaggggctggagtgggtctcagctattagtagtagtggtggtagcacatcctacgcagactccgtgaagggccggttcaccatctccagagacaattccaagaacacgctgtatctgcaagtgaacagcctgagagccgaggacacggccgtatattactgtgcgaaaggctatagcagcatctggtactactttgactactggggccagggaatcctggtcaccgtctcctca

SEQ ID NO: 8061 - DNA, 295 bp, Homo sapiens
  source 1..295: mol_type = other DNA
tgcagcctctggattcacctttagcagctatgccatgagctgggtccgccaggctccagggaaggggctggagtgggtctcaggtattagtactagtggtggaagcacatactacgcagaatccgtgaagggccggttcaccatctccagagacaattccaagaacacgctgtatctgcaaatgaacagcctgagagccgaagacacggccgtatattactgtgcgaaagggtatagtagtatttggtactactttgactactggggccagggaaccctggtcaccgtctcctca

SEQ ID NO: 8062 - DNA, 286 bp, Homo sapiens
  source 1..286: mol_type = other DNA
tgcagcctctggattcaccttcactagctatagcatgaactgggtccgccaggctccagggaagggactggagtgggtttcatgggtcagttacagtcctactgccacatattatgcggactctgtgaagggccggttcaccgtctccagagacaatgccaagcaatcactgtctctgcaaatgaacagcctgagagacgacgacacggctgtctactactgtgtgagagattacgactacgcctttgactactggggccagggaatcttggtcatcgtctcctca

SEQ ID NO: 8063 - DNA, 286 bp, Homo sapiens
  source 1..286: mol_type = other DNA
tgcagcctctggattcaccttcactaggtatagcatgaactgggtccgccaggctccagggaagggactggagtgggtttcatgggtcagttacagtcctactgccacatattatgcggactctgtgaagggccggttcaccgtctccagagacaatgccaagcaatcactgtctctgcaaatgaacagcctgagagacgacgacacggctgtctactactgtgtgagagattacgactacgcctttgactactggggccagggaatcttggtcatcgtctcctca

SEQ ID NO: 8064 - DNA, 283 bp, Homo sapiens
  source 1..283: mol_type = other DNA
tgcagtctctggactcagggtcggtgatgaaagcatgaactgggtccgccaggctccagggagggggctggagtgggtttcaaaccttcatggttctgggaggatatattacgcagactctgtgaagggccggttcaccatctccagagacagcgccacgaacttactgtttctgcaaatgaacagcctgagagccgaggacacggctgtgtatttctgtgtgagagattatgattacgcctttgactattggggccagggaaccctggtcaccgtctcctca

SEQ ID NO: 8065 - DNA, 283 bp, Homo sapiens
  source 1..283: mol_type = other DNA
tgcagtctctggactcagggtcggtgatgaaagcatgaactgggtccgccaggctccagggagggggctggagtgggtttcaaaccttcatggttctgggaggatatattacgcagactctgtgaagggccggttcaccatctccagagacagcgccacgaacttactgtttccgcaaatgaacagcctgagagccgaggacacggctgtgtatttctgtgtgagagattatgattacgcctttgactattggggccagggaaccctggtcaccgtctcctca

SEQ ID NO: 8066 - DNA, 283 bp, Homo sapiens
  source 1..283: mol_type = other DNA
tgcagtctctggactcagggtcggtgatgaaagcatgaactgggtccgccaggctccagggaggggactggagtgggtttcaaaccttcatggttctgggaggatatattacgcagactctgtgaagggccggttcaccatctccagagacagcgccacgaacttactgtttctgcaaatgaacagcctgagagccgaggacacggctgtgtatttctgtgtgagagattatgattacgcctttgactattggggccagggaaccctggtcaccgtctcctca

SEQ ID NO: 8067 - DNA, 303 bp, Homo sapiens
  source 1..303: mol_type = other DNA
acacagaccctcacgctgacctgcaccttctctgggttctcactcaatactcctggagtgggtgtgggctggatccgtcagcccccaggaaaggccctggagtggcttgcactcatttactgggatgatgataagcgctacagcccatctctgaagagcaggctcaccatcaccaaggacacctccaaaaaccaggtggtccttacaatgaccaacatggaccctgtggacacagccacatattactgtggtaggggctactttgactactgcggccagggaaccctggtcaccgtctcttca

SEQ ID NO: 8068 - DNA, 303 bp, Homo sapiens
  source 1..303: mol_type = other DNA
acacagaccctcacgctgacctgcaccttctctgggttctcactcagtactcctggagtgggtgtgggctggatccgtcagcccccaggaaaggccctggagtggcttgcactcatttactgggatgatgataagcgctacagcccatctctgaagagcaggctcaccatcaccaaggacacctccaaaaaccaggtggtccttacaatgaccaacatggaccctgtggacacagccacatattactgtggtaggggctactttgactactgcggccagggaaccctggtcaccgtctcttca

SEQ ID NO: 8069 - DNA, 303 bp, Homo sapiens
  source 1..303: mol_type = other DNA
acacagaccctcacgctgacctgcaccttctctgggttctcactcagcactactggagtgggtgtgggctggatccgtcagcccccaggaaaggccctggagtggctcgcactcatttattgggatggtgatcagcgctacagcccatctctggcgagcaggctcaccatcaccaaggacacctccaaaaaccaggtggtccttacaatgaccaacatggaccctgtggacacagccacatattactgtgggcgaggctactttgactactgcggccagggaatcctggtcaccatctcctca

SEQ ID NO: 8070 - DNA, 303 bp, Homo sapiens
  source 1..303: mol_type = other DNA
acacagaccctcacactgacctgcaccttctctgggttctcactcaggactactggagtgggtgtgggctggatccgtcagcccccaggaaaggccctggagtggcttgcactcatttattgggatggtgataagcgttacagcccatctctggagagcaggctcaccatcaccaaggacacctccaaaaaccaggtggtccttacaatgaccaacatggaccctgtggacacagccacatattactgtgggcgaggctactttgactactgcggccagggaatcctggtcaccatctcctcg

SEQ ID NO: 8071 - DNA, 303 bp, Homo sapiens
  source 1..303: mol_type = other DNA
acacagaccctcacactgacctgcaccttctctgggttctcactcaggactactggagtgggtgtgggctggatccgtcagcccccaggaaaggccctggagtggcttgcactcatttattgggatggtgaaaagcgttacaggccatctctggagagtaggctcaccatcaccgaggacacctccaaaaaccaggtggtccttacaatgaccaacatggaccctgtggacacaggcacatattactgtgggcgaggctactttgactactgcggccagggaatcctggtcaccatctcctcg

SEQ ID NO: 8072 - DNA, 303 bp, Homo sapiens
  source 1..303: mol_type = other DNA
acacagaccctcacgctgacctgcagcttctctgggttctcactcacgactactggagtgggtgtgggctgggtccgtcagcccccaggaaaggccctggagtggcttgcactcatttattgggatggtgataagcgctacagcccatctctggagagcaggctcaccatcaccaaggacacctccaaaaaccaagtggtccttacaatgaccaatatggaccctgtggacactgccacatattactgtgggcgaggctactttgactactgcggccagggaatcctggtcaccatctcctca

SEQ ID NO: 8073 - DNA, 303 bp, Homo sapiens
  source 1..303: mol_type = other DNA
acacagaccctcacactgacctgcaccttctcagggttctcactcaggactactggagtgggtgtgggctggatccgtcagcccccaggaaaggccctggagtggcttgcactcatttattgggatggtgaaaagcgttacagcccatctctggagagtaggctcaccatcaccgaggacacctccaaaaaccaggtggtccttataatgaccaacatggaccctgtggacacagccacatattactgtgggcgaggctactttgactactgcggccagggaatcctggtcaccatctcctcg

SEQ ID NO: 8074 - DNA, 303 bp, Homo sapiens; identical to SEQ ID NO: 8069
  source 1..303: mol_type = other DNA

SEQ ID NO: 8075 - DNA, 303 bp, Homo sapiens
  source 1..303: mol_type = other DNA
acacagaccctcacgctgacctgcaccttctctgggttctcactcacgactactggagtgggtgtgggctgggtccgtcagcccccaggaaaggccctggagtggcttgcactcatttattgggatggtgataagcgctacagcccatctctggagagcaggctcaccatcaccaaggacacctccaaaaaccaggttgtccttacaatgaccaacatggaccctgtggacactgccacatattactgtgggcgaggctactttgactactgcggccagggaatcctggtcaccatctcctca

SEQ ID NO: 8076 - DNA, 303 bp, Homo sapiens
  source 1..303: mol_type = other DNA
acacagaccctcacactgacctgcaccttctctgggttctcactcaggactactggagtgggtgtgggctggatccgtcagcccccaggaaaggccctggagtggcttgcactcatttattgggatggtgaaaagcgttacagcccatctctggagagtaggctcaccatcaccgaggacacctccaaaaaccaggtggtccttacaatgaccaacatggaccctgtggacacagccacatattactgtgggcgaggctactttgactactgcggccagggaatcctggtcaccatctcctcg

SEQ ID NO: 8077 - DNA, 303 bp, Homo sapiens
  source 1..303: mol_type = other DNA
acacagaccctcacgctgacctgcaccttctctgggttctcactcaggactactggagtgggtgtgggctggatccgtcagcccccaggaaaggccctggagtggcttgcactcatttattgggatgatgataagcgctacagcccatctctggagagcaggctcaccatcaccaaggacacctccaaaaaccaggtggtccttacaatgaccaacatggaccctgtggacactgccacatattactgtgggcgaggctactttgactactgcggccagggaatcctggtcaccatctccgca

SEQ ID NO: 8078 - DNA, 303 bp, Homo sapiens
  source 1..303: mol_type = other DNA
acacagaccctcacgctgacctgcaccttctctggattctccctcaccactagtggagtgggtgtgggctggatccgtcagcccccaggaaaggccctggagtggcttgcactcatttattgggatgatgataagagctacagcccttctctggagagcaggctcaccatcaccaaggacacctccaaaaaccaggtggtccttataatgaccaacatggaccctgtggacactgccacatattactgtggccgtggatactttgactactggggccagggaatcctggtcaccgtctcctca

SEQ ID NO: 8079 - DNA, 303 bp, Homo sapiens; identical to SEQ ID NO: 8070
  source 1..303: mol_type = other DNA

SEQ ID NO: 8080 - DNA, 303 bp, Homo sapiens
  source 1..303: mol_type = other DNA
acacagaccctcacgctgacctgcaccttctctgggttctcactcacgactactggagtgggtgtgggctgggtccgtcagcccccaggaaaggccctggagtggcttgcactcatttattgggatggtgataagcgctacagcccatctctggagagcaggctcaccatcaccaaggacacctccaaaaaccaggttgtccttacaatgaccaacgtggaccctgtggacactgccacatattactgtgggcgaggctactttgactactgcggccagggaatcctggtcaccatctcctca

SEQ ID NO: 8081 - DNA, 303 bp, Homo sapiens; identical to SEQ ID NO: 8076
  source 1..303: mol_type = other DNA

SEQ ID NO: 8082 - DNA, 303 bp, Homo sapiens; identical to SEQ ID NO: 8078
  source 1..303: mol_type = other DNA

SEQ ID NO: 8083 - DNA, 303 bp, Homo sapiens
  source 1..303: mol_type = other DNA
acacagaccctcacgctgacctgcaccttctctgggttctcactcagcactactggagtgggtgtgggctggatccgtcagcccccaggaaaggccctggagtggcttgcactcatttattgggatgatgataaaacctacagcccatctctgaagagcaggctcaccatcaccaaggacacctccaaaaaccaggtggtcttgacaatgaccaacatggaccctgtggacacagccacatattactgtgggcgggggtactttgactactggggccagggaatcctggtcaccgtctcctca

SEQ ID NO: 8084 - DNA, 294 bp, Homo sapiens
  source 1..294: mol_type = other DNA
accatctccggggacagtgtctctagcaacagtgctgcttggagctggatcaggcagtccccatcgagaggccttgagtggctgggaaggacatactacaggtccaagtggtataatgattatgcagtatctgtgaaaagtcgaataaccatcaacccagacacatccaagaaccagttctccctgcagttgaactctgtgactcccgaggacacggctgtgtattactgtgcgagagggtcctatgacagcagttggtgctggggccagggaaccctggtcaccgtctcctca

SEQ ID NO: 8085 - DNA, 293 bp, Homo sapiens
  source 1..293: mol_type = other DNA
ccatctccggggactttgtctctagcaacagtgctgcttggcactggatcagacagtccccatcgagaggccttgagtggctgggaaggacatactacaggtcccagtggttttatgattatgcactatctgtgaaaagtcgaataaccatcaacccagacacgtccaagaaccagttctccctgcaactgaactctgtgactcccgaagacacggctgtgtactactgtgcaagagggtcgtatgacagcagctggtgctggggccagggaaccctggtcaccgtctcctca

SEQ ID NO: 8086 - DNA, 289 bp, Homo sapiens
  source 1..289: mol_type = other DNA
cgcagcctctggattcaggtttaatgatcatgccatgcactgggtccgacaagctccagggaagggcctggagtgggtctcaggtattaattggaaaactggttggatagactatgcggactctgtgaagggccgattcaccatctccagagacaacgccaagaactccctgtatctgcacatggacagtctgagagctgaggacacggccttgtattactgtacaagagatattttgccggggggtgtggacgtctggggccaagggaccacggtcaccgtctcctca

SEQ ID NO: 8087 - DNA, 289 bp, Homo sapiens
  source 1..289: mol_type = other DNA
tgcagcctctggattcacctctggtgatcatgccatgcactgggtccggcaagttccagggaagggcctagagtgggtctcaggtttttatttgaaaactggtagggtaggctatgcggactctgtgaagggccgattcagtatctccagagacaacgccaagaactccctgtatctgcaaatgaacagtctgagagccgaggacacggccttatactactgtacaagggatattctcccgggcggtgtggacgtctggggccaagggaccacggtcaccgtctcctca

SEQ ID NO: 8088 - DNA, 280 bp, Homo sapiens
  source 1..280: mol_type = other DNA
tgcagcctctggattcaccctcagtacccacaacatgaactgggtccgccaggctccggggaaggggctggacttagtttcatacattaatagtgacagtagtaccatgtcctacgcaggctctgtgcagggccgattcaccatctccagagacaatgccaagaactcactgtatctgcaaatgaacagcctgagagacgaggacacggctgtctattactgtgcgagagggaataaccttgactactggggccagggaaccctggtcaccgtctcctca

SEQ ID NO: 8089 - DNA, 280 bp, Homo sapiens
  source 1..280: mol_type = other DNA
tgtaggctctggattcagtttcagtgccactaacatgaactgggtccgcctggctccagggaaggggctggagttggtttcatatattaatgccggtagtactaccatatcgtatgcagactctgtgaagggccgattcaccacctccagagacaacgccaagagctcactgtatctggaaatgaacagcctgagagaggaggacacggctttttattattgtgcgcgggggaataacttagattattggggccagggaaccctggtcaccgtctcctca

SEQ ID NO: 8090 - DNA, 306 bp, Homo sapiens
  source 1..306: mol_type = other DNA
gcatctgcacacactttcagcacctactatatgcactgggtgcgacaggcccctggccaagggcttgactggatgggaataatcaaccctagtggtgacagtacaatgtacgcacagaagttccagggcagagtcaccatgaccagggacacgtccacgagcacagtctatatggagctgagcagcctgagatctgaggacacggccgtgtattactgtgcgagagatggtccaggatattgtagtggtggtagctgctactactttgactactggggccagggaaccctggtcaccgtctcctca

SEQ ID NO: 8091 - DNA, 306 bp, Homo sapiens
  source 1..306: mol_type = other DNA
gcatctggatacaccttcaccaaccactatatgcactgggtgcgacaggcccctggacaagggcttgagtggatgggaataatcgaccctagtggtggtagcacaaactacgcacagaagttccagggcagagtcaccatgaccagggacacgtccacgagcacagtctacatggagctgagcagcctgagatctgaggacacggccgtgtattactgtgcgagagatgggccaggatattgtagtggtggtagctgctactactttgactactggggccagggaaccctggtcaccgtctcctca

SEQ ID NO: 8092 - DNA, 306 bp, Homo sapiens; identical to SEQ ID NO: 8091
  source 1..306: mol_type = other DNA

SEQ ID NO: 8093 - DNA, 292 bp, Homo sapiens
  source 1..292: mol_type = other DNA
cattgtctctggtggctccatcagtaattactactggagctggatccggcagcccccagggaagggactggagtggattgggtatatctattacagtgggagcaccaactacaacccctccctcaagagtcgagtcaccatatcagtagacacgtccaagaaccagttctccctgaagctgagctctgtgaccgccgcagacacggccatatattactgtgcgagacacttcacaccgggggggaactggttcgacccctggggccagggaaccctggtcaccgtctcctca

SEQ ID NO: 8094 - DNA, 292 bp, Homo sapiens
  source 1..292: mol_type = other DNA
cactgtctctggtggctccatcggtggttactactggagctggatccggcagcccccagggaagggactggagtggattgggtttgtctattacagcgggagcaccaagtacaatccctccctcacgagtcgagtcaccatatcagtggacacgtccaagaaccagttctccctgaagctgagctctgtgaccgccgcggacacggccgtctattactgtgcgagacattttaccccaggggggaactggttcgacccctggggccagggaaccctggtcaccgtctcctca

SEQ ID NO: 8095 - DNA, 283 bp, Homo sapiens
  source 1..283: mol_type = other DNA
tgcagcctctggattcacctttaggagatattggatgagctgggtccgtcaggctccagggaaggggctggagtgggtggccaacataaaggaagatggaagtgacaaatactatgtggactctgtgaagggccgattcaccatctccagagacaacgccaagatttctctctatctacaaatgaacagcctgagagccgaggacacggctgtgtattactgtgtgagactcgctgagtacttccaacactggggccagggcaccctggtcaccgtctcctca

SEQ ID NO: 8096 - DNA, 283 bp, Homo sapiens
  source 1..283: mol_type = other DNA
tgcagcctctggattcatctttagaagctattggatgagctgggtccgccaggctccagggaaggggctggagtgggtggccaacataaaatatgatggaagtgaaaaatactatgtggactctgtgaagggccgattcaccatctccagagacaacgccaagaattcactgtttctgcaaatgaacagcctgagagccgaggacacggctgtgtattattgtgttcggttggctgaatacttccagcactggggccagggcaccctggtcaccgtctcctca

SEQ ID NO: 8097 - DNA, 277 bp, Homo sapiens
  source 1..277: mol_type = other DNA
tgcagcctctggattcacctttgatgattatgccatgcactgggtccggcaagctccagggaagggcctggagtgggtctcaggtattagttggaatagtggtagcataggctatgcggactctgtgaagggccgattcaccatctccagagacaacgccaagaactccctgtatctgcaaatgaacagtctgagagctgaggacacggccttgtattactgtgcaagggatggaggtgactactggggccagggaaccctggtcaccgtctcctca

SEQ ID NO: 8098 - DNA, 277 bp, Homo sapiens
  source 1..277: mol_type = other DNA
tgcagcctctggattcacctttgatgattatgccatgcactgggtccggcaagctccagggaagggcctggagtgggtctcaggtattagttggaatagtggtagcataggctatgcggactctgtgaagggccgattcaccatctccagagacaacgccaagaactccctgtatctgcaaatgaacagtctgagagctgaggacacggccttgtattactgtgcaagggatgggggtgactactggggccagggaaccctggtcaccgtctcctca

SEQ ID NO: 8099 - DNA, 292 bp, Homo sapiens
  source 1..292: mol_type = other DNA
tgcaggctctgggttcaccttcagtggctctgctatacactgggtccgccaggcttccgggaaagggctggagtgggttggccgtattagaagtaaagctaacaactatgcgacttcatatagtgcgtcggtggaaggcaggttctccatctccagagatgattcaaagaacacggcgtatctgcaaatgaacagcctgaaaaccgacgacacggccgtgtattactgttctaggccctactatgataatacgggctactggggccagggaaccctggtcaccgtctcctca

SEQ ID NO: 8100 - DNA, 292 bp, Homo sapiens
  source 1..292: mol_type = other DNA
tgcaggctctggtttcaccttcagtgactctgctatacactgggtccgccaggcttccgggaaagggctggagtgggttggccgtgtgagaagcaaagctaacagttacgcgacagactatgctgcgtcggtggaaggcaggttcaccatctccagagatgaatcaaagaacacggcgtatctgcaaatgaacaacctgagacccgaggacacggccgtctattactgtagtagaccatactatgataatactggttactggggccagggaaccctggtcaccgtctcctca

SEQ ID NO: 8101 - DNA, 292 bp, Homo sapiens
  source 1..292: mol_type = other DNA
tgcaggctctgggttcaccttcagtgactctgctatccactgggtccgccaggcttccgggaaagggctggagtgggttggccgtattagaagcagacctaacggttacgcgacagactacgctgcgtcggtgaagggcaggttcaccatctccagagatgattcaaagaacacggcctatctgcaaatgaacagcctgaaaaccgaggacacggccgtttattactgttccagaccctactatgataatactgggtattggggccagggaaccctggtcaccgtctcctca

SEQ ID NO: 8102 - DNA, 286 bp, Homo sapiens
  source 1..286: mol_type = other DNA
tgcagcctctggattcactttcaatgactactacatgacctggatccgccaggctccagggaaggggctggtgtgggtctcatacattagtggtgatcatagtgtcatatactatggagaatctgtgaagggccgattcaccatctccagggacaacgccaagaactcagtgtatctgcaaatgaacagcctgagagccgacgacacggccgtctattactgtgtgaggggcggtgcccttggctttgacttctggggccagggaagcctggtcaccgtctcctca

SEQ ID NO: 8103 - DNA, 286 bp, Homo sapiens
  source 1..286: mol_type = other DNA
tgcagcctctggattcactttcactgactactacatgacctggatccgccagcctccagggaaggggctggtgtgggtttcatacattagtggtgataggagtgtcatacactacggagactctgtgaagggccgattcaccatctccagggacaacgccaggaactcagtgtatctgcaaatgaacagcctgagagccgacgacacggccgtctattactgtgtgaggggcggtgcccttggctttgacttctggggccagggaaccctggtcaccgtctcctca

SEQ ID NO: 8104 - DNA, 286 bp, Homo sapiens
  source 1..286: mol_type = other DNA
tgcagcctctggattcactttcaatgactactacatgacctggatccgccaggctccagggaaggggctggtgtgggtttcatacattagtggtgatcatagtgtcatatactatggagaatctgtgaagggccgattcaccatctccagggacaacgccaagaactcagtgtatctgcaaatgaacagcctgagagccgacgacacggccgtctattactgtgtgaggggcggtgcccttggctttgacttctggggccagggaagcctggtcaccgtctcctca

SEQ ID NO: 8105 - DNA, 286 bp, Homo sapiens
  source 1..286: mol_type = other DNA
tgcagcctctggattcaccttcactgactactacatgacctggatccgccaggctccagggaaggggctggagtgggtctcatacagtagtcctagtcgtgatatcatacactatgtagactccgtaaagggccgattcaccatctccagggacaacgccaagaactcactgtatctgcaaatgaacagcctgagagccgaggacacggccgtgtattattgtgtgagaggaggggccctggggtttgacttctggggccagggaaccctggtcaccgtctcctca

SEQ ID NO: 8106 - DNA, 318 bp, Homo sapiens
  source 1..318: mol_type = other DNA
acacagaccctcacgctgacctgcaccatctctgggttctcactcagtactagtggagtgggtgtggcctggatccgtcagcccccaggaaaggccctggaatggcttgcactcatttattgggatgatgataagcgctacagcccatctctgaagagcaggctcaccatcaccaaggacacctccaaaacccaggtgatccttacaatgaccaacatggaccctgtggacacagccacatattactgtgcacacagactggggcgggctatcgactttgactactggggccagggaatcctggtcaccgtctcctca

SEQ ID NO: 8107 - DNA, 318 bp, Homo sapiens
  source 1..318: mol_type = other DNA
acacagaccctcacgctgacctgcaccgtctctgggttctcactcagcactagtggagtgggtgtggcctggatccgtcagcccccaggaaaggccctggaatggcttgcactcatttattgggatgatgataagcgctacagcccgtctctgaggagcaggctcaccatcaccaaggacacctccaaaaaccaggtggtccttagtatgaccaacatggaccctgtggacacagccacatattactgtgcacacagactcgggagagctatcgactttgactactggggccagggaaccctggtcaccgtctcctca

SEQ ID NO: 8108 - DNA, 276 bp, Homo sapiens
  source 1..276: mol_type = other DNA
gcttttggatacacattcactagctatgctatacattgggtgcgccaggcccccggacaaagacttgagtggatgggatggatcaacgctggcaatggtaacacaaaatattcacagaagttccagggcagagtcaccattaccagggacacatccgcgagcacagcctacatggagctgagcagcctgagatctgaagacacggctatgtattactgtgcgaggaactggaacgttgactactggggccagggaaccctggtcaccgtctcctca

SEQ ID NO: 8109 - DNA, 276 bp, Homo sapiens
  source 1..276: mol_type = other DNA
gcttctggatatactttcactagtttaactatacaatgggtgcgccaggtccccggacaaagccttgagtggatgggttcgatccacgcaggcagtggtgacacaaaatattcacagaagttccaggacagagtcaccattaccagggacacatccgcgaacactgcctacatggagatgagcggcctgcgatctgaagacacggctgtctattactgtgcgagaaattggaatgttgactattggggccagggaaccctggtcaccgtctcctca

SEQ ID NO: 8110 - DNA, 295 bp, Homo sapiens
  source 1..295: mol_type = other DNA
cactgtctctggtggctccatcaacagttactactggagctggatccggcagaccccagggaagagactggagtggattgggtctatctattacactgggagcaccaactacaacccctccctgaagagtcgagtcaccatatcagtagacacgtccaagaaccagttctccctgaagttgagttctgtgaccgctgcggacacggccgtgtattactgtacgagagatggagggagcgacggtgactacgagtttgactactggggccagggaaccctggtcaccgtctcctca

SEQ ID NO: 8111 - DNA, 295 bp, Homo sapiens
  source 1..295: mol_type = other DNA
cattgtctctggtggctccatcagtggttactactggagctggatccggcagcccccagggaagggactggagtggattgggtctatctattacagtgggaacaccaactacaacccctccctcaagagtcgagtcaccatatcagtagacacgtccaagaaccagttctccctgaaggtgacctctatgaccgctgcggacacggccgtgtattactgtacgagagatgggggttcggacggtgactacgagtttgactactggggccagggaaccctggtcaccgtctcctca

SEQ ID NO: 8112 - DNA, 295 bp, Homo sapiens
  source 1..295: mol_type = other DNA
cgttgtctctggtggctccatcagtggttactactggagctggatccggcagcccccagggaagggactggagtggattgggtctatctattacagagggaacaccaactacaatccctccctcaagagtcgagtcaccatttcagtagacacgtccaagaaccagttctccctgaaggtaacctctgtgaccactgcggacacggccgtgtattactgtacgagagatgggggttcggacggtgactacgagtttgactactggggccagggaaccctggtcaccgtctcctca

SEQ ID NO: 8113 - DNA, 295 bp, Homo sapiens
  source 1..295: mol_type = other DNA
cattgtctctggtggctccatcagtagttactattggagctggatccggcagcccccagggaagggactggagtggattgggtctatctattacaatgggaacaccaactacaacccctccctcaagagtcgagtcaccatatcagtagacacgtccaagaaccagttctccctgaaggtgagctctgtgaccgctgcggacacggccgtgtattactgtacgagagatgggggttcggacggtgactacgagtttgactactggggccagggaaccctggtcaccgtctcctca

SEQ ID NO: 8114 - DNA, 295 bp, Homo sapiens
  source 1..295: mol_type = other DNA
cattgtctctgctggctccatcagtggttactactggagctggatccggcagcccccagggaagggactggagtggattgggtctatccattacagtgggaacaccaactacaacccctccctcaagagtcgagtcaccatatcagtagacacgtccaagaaccaattctccctgaaggtgagctctatgaccgctgcggacacggccgtttattactgtacgagagatgggggttcggacggtgactacgagtttgactactggggccagggaaccctggtcaccgtctccgca

SEQ ID NO: 8115 - DNA, 295 bp, Homo sapiens
  source 1..295: mol_type = other DNA
cattgtctctggtggctccatcagtggttactactggagctggatccggcagcccccagggaagggactggagtggattgggtccatctcttactacgggaacaccaactacaacccctccctcaagagtcgagtcaccatttcagtggacacgtccaagaaccagttctccctgcaggtgagctctgtgaccgctgcggacacggccgtctattattgtacgagagatggcggttcggacggtgactacgagtttgactactggggccagggaaccctggtcaccgtctcctcg

SEQ ID NO: 8116 - DNA, 295 bp, Homo sapiens
  source 1..295: mol_type = other DNA
ctttgtctctagtggctccatctatggttactattggagctggatccggcagtccccagggaggggcctggagtggattgggtctatctattacgctgggaacaccaactacaacccctccctcaagagtcgagtcagcatatcagtagacacgtccaagaatcagttctccctgaaagtgagctctgtgaccgctgcggacacggccgtgtattattgtacgagagatgggggttcggacggagactacgagtttgactattggggccagggaatgctggtcaccgtctcctca

SEQ ID NO: 8117 - DNA, 295 bp, Homo sapiens
  source 1..295: mol_type = other DNA
cattgtctctggtggctccatcagtggttactactggagctggatccggcagcccccagggaagggactggagtggattgggtctatctattacagtgggaacaccaactacaacccctccctcaagagtcgagtcaccatatcagtagacacgtccaagaaccagttctccctgaaggtgagctctatgaccgctgcggacacggccgtgtattactgtacgagagatgggggttcggacggtgactacgagtttgactactggggccagggaaccctggtcaccgtctccgca

SEQ ID NO: 8118 - DNA, 295 bp, Homo sapiens; identical to SEQ ID NO: 8111
  source 1..295: mol_type = other DNA

SEQ ID NO: 8119 - DNA, 295 bp, Homo sapiens
  source 1..295: mol_type = other DNA
tattgtctctggtggctccatcagtagttactactggagctggatccggcagcccccagggaagggactggagtggattgggtctatctattacaatgggaacaccaactacaacccctccctcaagagtcgagtcaccatatcagtagacacctccaagaaccagttctccctgaaggtgagctctgcgaccgctgcggacacggccgtgtattactgtacgagagatgggggttcggacggtgactacgagtttgactactggggccagggaaccctggtcaccgtctcctca

SEQ ID NO: 8120 - DNA, 283 bp, Homo sapiens
  source 1..283: mol_type = other DNA
tgcagcctctgggatcaccgtcagtagtaactacatgagctgggtccgccaggctccagggaaggggctggagtgggtctcatttatttatatcgctggtaacacaaactacgcagactccgtgaagggccgattcaccatctccagagacaattccaagaacaccctgtatcttcaaatgaacagcctgagagccgaggacacggccgtctattactgtgcgaggtggactgggacctactatgactactggggccagggaaccctggtcaccgtctcctca

SEQ ID NO: 8121 - DNA, 283 bp, Homo sapiens
  source 1..283: mol_type = other DNA
tgcagtgtctgggttcaccgtcagtaacaactacatgagctgggtccgccaggctccagggaaggggctggagtgggtctcaatgctttatagcgatggtgatacatattacgcagactccgtgaagggccgattcaccatctccagacacaattccatcaacatattatatctgcaaatgaacagcctgagagccgatgacacggccgtctattactgtgcgaggtggactgggacctactacgactactggggccacggaaacctggtcaccgtctcttcg

SEQ ID NO: 8122 - DNA, 283 bp, Homo sapiens
  source 1..283: mol_type = other DNA
tgcagtgtctgggttcgccgtcaataacaactacatgagctgggtccgccaggctccagggaaggggctggagtgggtctcaatgatttatagcggtggtgatacatattacgcagactccgtgaagggccgattcaccatctccagacacagctccatcaacatattatatcttcaaatgaacagcctgagagccgatgacacggccgtctattactgtgcgaggtggactgggacctactacgactactggggccacggaagcctggtcaccgtctcttca

SEQ ID NO: 8123 - DNA, 283 bp, Homo sapiens
  source 1..283: mol_type = other DNA
tgcagtgtctgggttcaccgtcagtaacaactacatgagctgggtccgccaggctccagggaaggggctggagtgggtctcaatgatttatgccgatggtaatacatattacgcagactccgtgaagggccgcttcaccatctccagacacaattccttcaacatactttatcttcaaatgaatagcctgagagccgatgacacggccgtctattactgtgcgaggtggactgggacctactacgactactggggccacggaaacctggtcaccgtctcttca

SEQ ID NO: 8124 - DNA, 283 bp, Homo sapiens
  source 1..283: mol_type = other DNA
tgcagcctctggtttcgccgtcagtaacaactacatgagctgggtccgccaggctccagggaaggggctgcagtgggtctcaatgctttataacactggtgacacatattacgcggactccgtgaagggccgattcaccatctccagagacaattccaggaacaccctgtatcttcaaatgaacagcctgagagccgaggacacggccctctattactgtgcgaggtggacggggacttactacgactattggggccagggaaccctggtcatcgtctcctca

SEQ ID NO: 8125 - DNA, 271 bp, Homo sapiens
  source 1..271: mol_type = other DNA
tgcagcctctggattcacattcagtaattatgaaatgaactgggtccgccaggctccagggaaggggctggagtggctttcatacatcgctagtactggtagtcccatatactacgcagactctgtgaagggccgattcaccatctccagagacaacgccaagaactcactgtatctgcaaatgaacagcctgagagccgaggacacggctgtttattactgtgcgaggcttgactcctggggccagggaaccctggtcaccgtctcctca

SEQ ID NO: 8126 - DNA, 271 bp, Homo sapiens
  source 1..271: mol_type = other DNA
tgcagcctctggattcactttcagtagttttgatatgaactggttccgccaggctccggggaaggggctggagtggatttcacacatcaatagtggtggtagtaccatatactacgcagactctgtgaagggccgattcaccatctccagagacaacgccaagaactccctctatctgcaaatgaacagcctgagggccgaggacacggctttttattactgtgcgagacttgactcctggggccaggcaaccctggtcaccgtctccgca

SEQ ID NO: 8127 - DNA, 298 bp, Homo sapiens
  source 1..298: mol_type = other DNA
tgaagcctctggattcaccttcagtatattctggatgcactgggtccgccaagttccagggaaggggctggagtgggtctcacgcataagtactgatgggagtgacataaaatacgcggactccgtgaggggccgattcaccatctccagagacaacgccaagaagacattgtttctgcacatggacagtctgagagccgaggacacggctgtctattattgtgcaagagatcagacagtgcgtggcccctctacctatgacaactggggccagggaaccctggtcaccgtctcctca

SEQ ID NO: 8128 - DNA, 298 bp, Homo sapiens
  source 1..298: mol_type = other DNA
tgcagcctctggattcgccttcagtaggtactggatgcactgggtccgccaagctccagggaaggggccggtgtgggtctctcgcatcgacactgatggaggcatcataaactacgcggactccgtgaagggccgatttaccgtctccagagacaacaccaagaacacgttgtttctgcaaatgaacagtctgagagacgaggacacggctttgtactactgtgcaagggatcagacggtccggggaccttctacatatgacaactggggccagggaaccctggtcatcgtctcgtca

SEQ ID NO: 8129 - DNA, 292 bp, Homo sapiens
  source 1..292: mol_type = other DNA
tgcagcctctggattcttgactctgaactatgccatgagttgggtccgccaggctccggggaaggggctggagtgggtcgcatttagtagtgggactggcaatgataactattacgcagactccgtgaagggccgattcaccatctccagagacaaccgcaagaacacgctgtctctgcagttggacagcctgagagtcgaagacacggccacatattattgtgtgagagatggctacaattttgtcccgtttgactactggggccagggggccctggtcgccgtctcttca

SEQ ID NO: 8130 - DNA, 292 bp, Homo sapiens
  source 1..292: mol_type = other DNA
tacagcctctggattcacccttagtgcctatgccatgagctgggtccgccaggctccagggaagggactggagtgggtcgcctttattactggtactggtaatgacgcatactacatggactctgtgaagggccggttcaccgtctccaggcacaattccttgaacaccctctatctgcaaatgaatagcctgagagccgaggacacggccctctactattgtgttagagatggctacaatttcgtcccctttgactactggggccggggaaccctggtcaccgtctcctca

SEQ ID NO: 8131 - DNA, 292 bp, Homo sapiens
  source 1..292: mol_type = other DNA
tgcagcctctggattcacccttagtgcctatgccatgagctgggtccgccaggctccagggaagggactggagtgggtctcttttatttctggtactggtaatgacgcatactacatggactctgtgaagggccggttcaccatctccagggacaattccatgaacaccctctatctgcaaatgaatagcctgagagccgaggacacggccctttactactgtgttagagatggctacaatttcgtcccctttgactactggggccggggaaccctggtcaccgtctcctca

SEQ ID NO: 8132 - DNA, 294 bp, Homo sapiens
  source 1..294: mol_type = other DNA
gcttctggatacaccttcactacctatgctatgcattgggtgcgccaggcccccggacaaaggcttgagtggatgggatggatcaacgcgggcaatggtaacacaaaatattcacagaagttccagggcagagtcaccattaccagggacacatccgcgagcacagcctacatggagctgagcagcctgagatctgaagacacggctgtctattactgtgcgagagatctatggagggactactactacggtatggacgtctggggccaagggaccacggtcaccgtctcctca

SEQ ID NO: 8133 - DNA, 294 bp, Homo sapiens
  source 1..294: mol_type = other DNA
gcttctggatacaccttcactacctatgctatgcattgggtgcgccaggcccccggacaaaggcttgagtggatgggatggatcaacgctggcaatggtaacacaaaatattcacagaaattccagggcagagtcaccattaccagagacacatccgcgagcacagcctacatggacctgagcagcctgagatctgaagacacggctgtctattactgtgcgagagatctgtggagggactattattacggtatggacgtctggggccaagggaccacggtcaccgtctcctca

SEQ ID NO: 8134 - DNA, 292 bp, Homo sapiens
  source 1..292: mol_type = other DNA
tgcagcgtctggattcaccttcagtagctatggcatgcactgggtccgccaggctccaggcaaggggctggagtgggtggcaattatatggtatgatggaagtaataaatactatgcagactccgtgaagggccgattcaccatctccagagacaattccaagaacacgctgtatctgcaaatgaacagcctgagagccgaggacacggctgtatattactgtgcgagagtaggtagtgggagctactactttgactactggggccagggaaccctggtcaccgtctcctca

SEQ ID NO: 8135 - DNA, 292 bp, Homo sapiens
  source 1..292: mol_type = other DNA
tgcagcctctggattcaccttcagtgaccatgacatgcactgggtccgcctggctccaggcaaggggctggagtgcgtggcagttatctggtttgatggaagtaatgaatactttgcagactccgtgaagggccgattcaccatctccagagacaattccaagaacaccctgtatctgcaaatgaacagcctgagagccgaggacacggctgtatattactgtgcgagagtcggttcggggagttactactttgactactggggccagggaaccctggtctccgtctcctca

SEQ ID NO: 8136 - DNA, 280 bp, Homo sapiens
  source 1..280: mol_type = other DNA
tgcagcctctggattcagctttaggagctatggcatgaactgggtccgccaggctcctgggaaggggctagagtgggtctcaactattgatcctggtggtattaagacatactacgcggactccgtgaagggccggttcaccatctccagagacaattccaagaccacgctgtatttgcaaattaacagcctgagagccgaggacacggccctatattactgtgtccgaagtaactttatggacgtctggggccaagggaccacggtcaccgtctcctca

SEQ ID NO: 8137 - DNA, 280 bp, Homo sapiens
  source 1..280: mol_type = other DNA
tgcagcctctggattcacctttgacagtcttgccatgaactgggtccgccaggctccagggaaggggctggagtgggtctcacttatttctagggataatagtgtctcatactatgcagactccgtgaggggccggttcaccatctccagagataattccgagaatatggtgtatctgcaaatggatagcctgagagccgaagacacggccgtatatttctgtgtgagatcgaactttatggacgtctggggccaagggaccacggtcaccgtctcctca

SEQ ID NO: 8138 - DNA, 289 bp, Homo sapiens
  source 1..289: mol_type = other DNA
tgcagtctctgggtttagttttagcagctattggatgacctgggtccgccaggctccggggaaggggctggagtgggtggccaacataaaagaagacggaagtgcaaaatattatgtggactctgtgaagggccgattcgacatctccagagacaacgccaagaactcactgtatctgcaaatgaacagcctgagagtcgaggacacggctgtatactactgtgcgactacggcagatgcagcagctggtccttactggggccagggaaccctggtcaccgtctcctct

SEQ ID NO: 8139 - DNA, 289 bp, Homo sapiens
  source 1..289: mol_type = other DNA
tgtagtccctgaattcatcttcactaagtattggatgacctgggtccgccaggctccagggaaggggctggagtgggtggccaatataaacgaagatggaagtgtgaaatactatgtggactctgtgaagggccgattcaccatctccagagacaacgccaagaactctctgtttctgcatatgaacagtctgagagccgaggacacggccgtatattactgtgcgacaaccgctgatgcagcagctggcccctactggggccagggaaccctggtcaccgtctcctcg

SEQ ID NO: 8140 - DNA, 280 bp, Homo sapiens
  source 1..280: mol_type = other DNA
tgtcgtctctggattcacttttaatactcggtggctgacctgggtccgccaggctccagggaaggggctggagtgggtggccagcataaaccagaatggacgtgagaaatactatgtggactctgcgaagggccgattcaccgtctccagagacaacgccaagaattcagcgtatctgcagatgaccagcctgagagccgaggacacgtctgtctattactgtgcgataggtcgaggtatggacgtctggggccaagggaccacggtcaccgtctcctca

SEQ ID NO: 8141 - DNA, 280 bp, Homo sapiens
  source 1..280: mol_type = other DNA
tgcagcctctggattcacctttagtagtcgttggatgacctgggtccgccaggctccagggaaggggctggagtgggtggccaacataaagaaagatgggagtgacaaatactatgtggacgctgtgaagggccgattcaccatttccagagacaacgccaagaactcactgtatctgcaaatgaacagcctgagagacgacgacacggctgtgtattactgtgcgataggacgcggtatggacgtctggggccaagggaccacggtcaccgtctcctca

SEQ ID NO: 8142 - DNA, 280 bp, Homo sapiens
  source 1..280: mol_type = other DNA
tgcagcctctggattcgcctttagtgggcgctggatgacctgggtccgccaggctccaggggaggggctggagtgggtggccaacataaacgaagatggaagagagatttactatttggaccctgtgaagggccgattcaccatctccagagacaacgccaagaactcactgtatctgcaaatgaacagcctgagagtcgaggacacggctgtgtattactgtgcgatagggaggggaatggacgtctggggcaaagggaccacggtcaccgtctcctca

SEQ ID NO: 8143 - DNA, 289 bp, Homo sapiens
  source 1..289: mol_type = other DNA
tgcagcctctggattcaccttcgttaattactggatgcactgggtccgccaagctccaggggaggggctggtgtgggtctcacgtattaataatcatgggactgagacaatctacgcgagctccgtggaaggccgattcgccacttccagagacaacgccaagaacaccctgtatctacaaataagtggtctgagaggcgaggatacggctctttattattgtgcaagagggggcttcgaacatgcttttgatgtctggggcccagggactctggtcaccgtctcgtca

SEQ ID NO: 8144 - DNA, 289 bp, Homo sapiens
  source 1..289: mol_type = other DNA
tgcagcctctggattcaccttcagaagctactggatgcactgggtccgccaagctccagggaaggggctggtgtgggtctcacgtattgataacgatggatatagcacaatctacgcggaatccgtgaagggccgattcaccatctccagagacaacgccaagaacacgctgcatttgcaaatgaacagtctgagagccgaggacacggctgtgtattattgtgcaagaggcggcttcgagcacgcttttgatgtatggggccaagggacagaggtcaccgtctcctca

SEQ ID NO: 8145 - DNA, 286 bp, Homo sapiens
  source 1..286: mol_type = other DNA
tgcagcctctggattcacctttagaacctatgccatgagctgggtccgccaggctccagggaaggggctggagtgggtctcaggtattagtggtggtggtggtagcacatactacgcagactccgtgaagggccggttcaccatctccagagacaattccaagtacacgctgtatctgcaaatgaacagcctgagagccgaggacacggccgtatattactgtgcgaaagatctgacggtgactcctgactactggggccagggaaccctggtcaccgtctcctcc

SEQ ID NO: 8146 - DNA, 286 bp, Homo sapiens
  source 1..286: mol_type = other DNA
tgcagcctctggattcaccttaagcagatatgccatgagctgggtccgccagactccagggaaggggctggagtgggtctcacttatttatagcgatggacatagtacattctatgcagactccgtgaagggccggttcaccatctccagagatacttccaagaacacgctgtatctgcaaatgaacagcctgagagccgaggacacggccgtatattactgtgcgaaagatctgacggtgacccctgactactggggccagggaaccctggtcaccgtctcctca

SEQ ID NO: 8147 - DNA, 289 bp, Homo sapiens
  source 1..289: mol_type = other DNA
tgcagcctctggattcacctttagcagctatgccatgaactgggtccgccaggctccggggaaggggctggagtgggtctcaacttttagtgttagtactgatagcacatactacgcagactccgtgaagggccggttcaccatctccagagacatttccaagaacacagtgtttttgcagatgaacagcctgagagccgaggacacggccctgtattactgtgcgaaggccgggtctggcatcttttttgaccactggggccggggaaccctggtcaccgtctcctca

SEQ ID NO: 8148 - DNA, 289 bp, Homo sapiens
  source 1..289: mol_type = other DNA
tgcagcctctggattcacctttagtaactatgtcatgacgtgggtccgccaggctccagggaaggggctggagtgggtctcagcgactagtaataatggtggtaatatatactacgcagactccgtgaagggccggttcaccatctccagagacaattccaagaacatgctgtatctgcaactgaacagcctaagaggcgaggacacggccgtatattactgtgcgaaagcgggttcggggattttttttgaccactggggccagggaaccctggtcaccgtctcctca

SEQ ID NO: 8149 - DNA, 274 bp, Homo sapiens
  source 1..274: mol_type = other DNA
tgcagcctctagattcaccttcagtagctactggatgcactgggtccgccaagctccagggaaggggctggtgtgggtctcgcatattaatactgatgggagtagcacaacctacgcggactccgtgaagggccgattcaccatctccagagacaacgccaagaacacgctgtatctgcaaatgaacagtctgagagccgaggacacggctgtctattactgtgtaagagatgtaatacgctggggccaagggacaatggtcaccgtctcttca

SEQ ID NO: 8150 - DNA, 274 bp, Homo sapiens
  source 1..274: mol_type = other DNA
tgcagcctctggattcaccttcagtggcttctggatgtattgggtccgccaaactccagggaaggggctggtgtgggtctcacatattaatactaatgggaggaccacaagctacgcggactccgtgaagggccgattcaccatctccagagacaacgccaagaacacgctgtatctgcaaatgaacagtctgagagccgaggacacggccatgtattattgtgtaagagatgtaataaggaggggccaagggacaatggtcaccgtctcttca

SEQ ID NO: 8151 - DNA, 316 bp, Homo sapiens
  source 1..316: mol_type = other DNA
tgcagcctctggattcactttcgataacgcctggatgagctgggtccgccaggctccagggaaggggctggagtggattggccgtattaaaagcaaaactgacggtgggacaacagacttcgctgcacccgtgaaaggcagattcaccatctcaagagatgattcaaaaaacgcgctgtatctgcaaatgaacaacctgaaaaccgaggacacagccgtgtattactgtaccacagatcgatattatgattacatttgggggagttatcgttatgtggactactggggccagggaaccctggtcaccgtctcctca

SEQ ID NO: 8152 - DNA, 316 bp, Homo sapiens
  source 1..316: mol_type = other DNA
tgcagcctctgaattcactttcactaacgcctggatgacctgggtccgccaggctccagggaaggggctggagtgggttggccgtattaaaagcgaaactgatggtgggacaatagactacgttgcacccgttaaaggcagattcaccatctcaagagatgattcaaaaaatacgctgtatctccaaatgaacagcctgaaaaccgaggacacagccgtgtattactgtaccacagatcgatattatgattacatttgggggagttatcgttatgttgactactggggccagggaaccctggtcaccgtctcctca

SEQ ID NO: 8153 - DNA, 316 bp, Homo sapiens
  source 1..316: mol_type = other DNA
tgcagcctctgaattcactttcactaacgcctggatgacctgggtccgccaggctccagggaaggggctggagtgggttggccgtattaaaagcaaaactgatggtgggacaatagactacgttgcacccgttaaaggcagattcaccatctcaagagatgattcaaaaaatacgctgtatctgcaaatgaacagcctgaaaaccgaggacacagccgtgtattactgtaccacagatcgatattatgattacatttgggggagttatcgttatgttgactactggggccagggaaccctggtcaccgtctcctca

SEQ ID NO: 8154 - DNA, 316 bp, Homo sapiens
  source 1..316: mol_type = other DNA
tgcagcctctggattcactttcagtaatgcctggatgagctgggtccgccagactccagggaaggggctggagtgggttggccgtattaaaaccaaaactgatggtgggacaacagactacgctgcacccgtgaaaggcagattcaccatctcaagagatgattcaaaaaacacactgtatctacaaatgaacagcctgaaaaccgaggacacagccgtgtattactgtaccacagatcgatattatgattacatttgggggagttatcgttatgttgactactggggccagggaaccctggtcaccgtctcctca

SEQ ID NO: 8155 - DNA, 316 bp, Homo sapiens
  source 1..316: mol_type = other DNA
tgcagcctctggattcactttcagtaatgcctggatgacctgggtccgccagactccagggaaggggctggagtgggttggccgtattaaaagcaaaactgatggtgggacaacagactacgctgcacccgtgaaaggcagattcaccatctcaagagatgattcaaaaaacacactgtatctacaaatgaacagcctgaaaaccgaggacacagccgtgtattactgtaccacagatcgatattatgattacatttgggggagttatcgttatgttgactactggggccagggaaccctggtcaccgtctcctca

SEQ ID NO: 8156 - DNA, 286 bp, Homo sapiens
  source 1..286: mol_type = other DNA
tgcagcctctggattcacctttagttactacgggatgtactgggtccgccaagctccagggaaggggctggtttgggtctcacgtatttataatgatggaattaccacaacctacacggactccgtgaagggccgattcaccatctccagagacaacgccaagaacacactgtatctgcaaatgaacagtctaagagccgaggacacggctgtctatttctgtgctagaggtgggacctactcctttgacttctggggccagggaaccctggtcaccgtctcctca

SEQ ID NO: 8157 - DNA, 283 bp, Homo sapiens
  source 1..283: mol_type = other DNA
tgcagcctctggattcaccttcagtagttacggaatgtactgggtccgccaagctccagggaaggggctggtgtgggtcgcgcgaatttggagcgatgtgactactaactacgcggagtccgtgaggggccgcttcaccatctccagagacaacgccaagaacacgctgtttctgcaaatgaacagtctgagaggcgaggacacggctgtttattactgtgcaagaggtgggacctactcttttgacttctggggccagggaacgcaggtcaccgtctcctca

SEQ ID NO: 8158 - DNA, 283 bp, Homo sapiens; identical to SEQ ID NO: 8157
  source 1..283: mol_type = other DNA

SEQ ID NO: 8159 - DNA, 286 bp, Homo sapiens
  source 1..286: mol_type = other DNA
tgcagcctctggattcaccttcagttactacgggatgtactgggtccgccaagctccagggaaggggctggtttgggtctcacgtatttataatgatggaattaccacaacctacgcggactccgtgaagggccgattcaccatctccagagacaacgccaagaacacactgtatctgcaaatgaacagtctaagagccgaggacacggctgtctatttctgtgctagaggtgggacctactcctttgacttctggggccagggaaccctggtcaccgtctcctca

SEQ ID NO: 8160 - DNA, 277 bp, Homo sapiens
  source 1..277: mol_type = other DNA
tgcagcctctggattcaccttcagtgtctatagcatgaactgggtccgccagggtccagggaaggggctggagtggctttcatacattagtagtgacagtactaccatatactacgcagactccgtgaagggccgattcaccacatccagagacaatgccaagacctcactgtatctgcaaatgaacagcctgagagacgacgactcggctgtgtattactgtgcgaggggcgcttttgatttctggggccaagggacaatggtctccgtctcttca

SEQ ID NO: 8161 - DNA, 277 bp, Homo sapiens
  source 1..277: mol_type = other DNA
tgtcgcctctggattcaacttcagtgcctttgctatgaactgggtccgccaggctccagggaaggggctggagtgggtttcatacattagtagtcgaagtagtacgataagtttcgcagactctgtgaagggccgattcagcctctccagagacaacgccaaggagtcaatgtatctggaaatgaacagcctgagcgccgaagacacggctgtctattactgtgcgcgaggggcttttgatttctggggccaagggacagttgtcaccgtctcttca

SEQ ID NO: 8162 - DNA, 283 bp, Homo sapiens
  source 1..283: mol_type = other DNA
cactgtctctggtttctccctcagtcttggcttctggaattgggtccggcagcccccagggaagggactggagtggattggatatgttcactacagtgggactaccaactacaacccctccctcaggagtcgagtcaccattttaggagactcgtccaagaaccagttctccctgaaactgacctctgtgaccgccgcggacacggccgtgtatttctgtgtgatagggattggctggcaacccgactactggggcccgggaaccctggtcaccgtctcttca

SEQ ID NO: 8163 - DNA, 283 bp, Homo sapiens
  source 1..283: mol_type = other DNA
cagtgtcactggtgattccatcaattcttactacctgaactgggtccggcagcccccagggaagggactggagtggattggctatgtccattacagccggaacaccaaatacaacccctccctcaagagtcgagtcaccatatcacttgacacgtcgaagagcctcttctccctggagttgagctccgtgaccgctgcggacacggccgtttattactgtgtgataggaatagggtggcaacctgactactggggccagggaaccctggtcaccgtctcctca

SEQ ID NO: 8164 - DNA, 283 bp, Homo sapiens
  source 1..283: mol_type = other DNA
cagtgtcactggtgattccatcaattcttactacctgaactgggtccggcagcccccagggaagggactggagtggattggctatgcccattacagccggaacaccaaatacaacccctccctcaacagtcgagtcaccatatcacttgacacgtcgaagagcctcttctccctggagttgaggtccgtgaccgctgcggacacggccgtttattactgtgtgataggaatagggtggcaacctgactactggggccagggaaccctggtcaccgtctcctca

SEQ ID NO: 8165 - DNA, 292 bp, Homo sapiens
  source 1..292: mol_type = other DNA
cagtgtctctagtggctccttcaatagttactactggagctggatccggcagtccccagggaagggactggagtggattgcttatatctattacagtggggacaccaactataatccctccctccagagtcgagccaccatatcagtggacacgtccaagaaccagttctccctgaagttgacctctgtgaccgccgcagacacggccgtgtatttctgtgcgagacgtagagctgcagttggtacagcatttgactactggggcctgggaaccctggtcaccgtctcctca

SEQ ID NO: 8166 - DNA, 292 bp, Homo sapiens
  source 1..292: mol_type = other DNA
cagtgtctctagtggctccttcaatagttactactggagctggatccggcagtccccagggaagggactggagtggattgcttatatctattacagtggggacaccaactacaacccctccctccagagtcgagccaccatatcagtggacacgtccaagaaccagttctccctgaagttgacctctgtgaccgccgcagacacggccgtgtatttctgtgcgagacgtagagctgcagttggtacagcatttgactactggggcctgggaaccctggtcaccgtctcctca

SEQ ID NO: 8167 - DNA, 292 bp, Homo sapiens
  source 1..292: mol_type = other DNA
cagtgtctctggtggctccatcagtagttactactggagctggatccggcagcccccagggaagggactggagtggcttggatatatcttttacagtgggagcaccaactacaacccctccctcaggagtcgagtcaccatatcaatagacacgtccaagaaccagttctccctgaagctgagctctgtgaccgccgtagacacggccgtgtattattgtgcgagacggcgagcagcagttggtacggcctttgactactggggccagggaaccctggtcaccgtctcctca

SEQ ID NO: 8168 - DNA, 295 bp, Homo sapiens
  source 1..295: mol_type = other DNA
tgcagcctctggattcacctttagtagctattggatgaactgggtccgccaggctccagggaaggggctggagtgggtggccaacataaagcaagatggaagtgagaaatactatgtgggctctgtgaagggccgattcaccatctccagagacaacgccaagaactcactgtatctgcaaatgaacagcctgagagccgaggacacggctgtctattattgtgtgagatatattgtaatagatccatctgctattggttactggggccagggagccctggtcaccgtctcctca

SEQ ID NO: 8169 - DNA, 295 bp, Homo sapiens
  source 1..295: mol_type = other DNA
tgcagcctctggattcacctttagtagctattggatgaactgggtccgccaggctccagggaaggggctggagtgggtggccaacataaagcaagatggaagtgagaaatactatgtggactctgtgaagggccgattcaccatctccagagacaacgccaagaactcactgtatctgcacatgaacagcctgagagccgaggacacggccgtgtattactgtgtgagatatattgttatagatccatctgctataggctactggggccagggaaccctggtcaccgtctcctca

SEQ ID NO: 8170 - DNA, 321 bp, Homo sapiens
  source 1..321: mol_type = other DNA
acacagaccctcacactgacctgcaccttctctgggttctcactcagcactagtggaatgtgtgtgaactggatccgtcagcccccagggaaggccctgaagtggcttgcacgcattgattgggatgatgataaatactacagcacatctctgaagaccaggctcaccatctccaaggacgcctccaaaaaccaggtggtccttacaatgaccaacatggaccctgtggacacaggcacgtattactgtgcacggatcgggcaagtgggagctactcactttgactactggggccagggaaccctggtcaccgtctcctca

SEQ ID NO: 8171 - DNA, 321 bp, Homo sapiens
  source 1..321: mol_type = other DNA
acacagaccctcacactgacctgcaccttctctgggttctcactctatactagtgaagtatatatgaactggatccgtcagcccccagggaaggccctggagtggcttgcacgcattgattacaataataataaatattacagtacatctctgaggaccaggctcaccgtctccaaggacatgtccaaaaaccaggtggtccttacaatgaccaacatggaccctgtggacacagccacgtattactgtgcacggatagggcaagtgggagctactcactttgactactggggccagggaatcctggtcaccgtctcctcg

SEQ ID NO: 8172 - DNA, 298 bp, Homo sapiens
  source 1..298: mol_type = other DNA
tgcagcctctggattcaccttcagtaattatggcatgcactgggtccgccaggctccaggcaaggggctggagtgggtggcagttatatcatatgatggaaataataaatatgatggagactccgtgaagggccgattcagcatctccagagacaattccaagaacacgctgtatctgcaaatgaacagcctgagagctgaggacacggctgtgtattactgtgcgaaaccctacggtgactacgccaggggtggttttgatatctggggccaagggacaatggtcaccgtctcttca

SEQ ID NO: 8173 - DNA, 301 bp, Homo sapiens
  source 1..301: mol_type = other DNA
tgcagcctctggattcaccttcagtacctatgggatgcactgggtccgccaggctccaggcaaggggctggagtgggtggcagttatatcatatggcgatggaagtcatacatattatggagactccgtgaagggccgatccaccatctccagagacaattccaagaacacgctgtatctgcaaatgaacagcctgcgagctgaggacacggctgtttattactgtgcgaaaccttacggtgactacgccagaggtggttttgatatctggggccaagggacaatggtcaccgtctcttca

SEQ ID NO: 8174 - DNA, 271 bp, Homo sapiens
  source 1..271: mol_type = other DNA
tgcagcctctggattcacctttagtggctattggatgagctgggtccgccaggctccagggaaggggctggagtgggtggccaacataaagggagatggaagtgagaaaaactatgtggactctgtgaagggccgattcaccatctccagagacaacgccaaggactcactgtttctgcgaatgaacagcctgagagccgaggacacggctgtgtattactgtgcgagccgtgtagtccggggccagggaaccctggtcaccgtctcctca

SEQ ID NO: 8175 - DNA, 271 bp, Homo sapiens
  source 1..271: mol_type = other DNA
tgaaatctctggattcaccattagtgccatctggatgagttgggtccgccaggccccagggaaggggctggagtgggtggccaacacaaaccaggatggaagtgaccgacactatgtggactctgtgaggggccggttcaccatttccagagacaatgccaagaggtcactgtttctgcaaatgaatagcctgagagtcgaggacacggccgtgtattattgtgcgagccgggtcgtctggggccagggaatgctggtcaccgtctcctca

SEQ ID NO: 8176 - DNA, 295 bp, Homo sapiens
  source 1..295: mol_type = other DNA
tgcagcgtctgggttcaccttcagtagctatggcatgcactgggtccgccaggctccaggcaaggggctggagtgggtgacagttatatggtatgatggaagtaataaatactatgcagactccgtgaagggccgattcaccatctccagagacaattccaagaacacgctgtatctgcaaatgaacagcctgagagccgaggacacggctgtgtattactgtgcgagagcgtatagcagcagctggcccaactttgactactggggccagggaaccctggtcaccgtctcctca

SEQ ID NO: 8177 - DNA, 295 bp, Homo sapiens
  source 1..295: mol_type = other DNA
tgcagcgtctggattcaccttcagtagctatggcatgcactgggtccgccaggctccaggcaaggggctggagtgggtggcagttatatggtatgatggaagtaataaatactatgcagactccgtgaagggccgattcaccatctccagagacaattccaagaacacgctgtatctgcaagtgaacagcctgagagccgaggacacggctgtgttttactgtgcgagagcatatagcagcagctggcccaactttgactactggggccagggaaccctggtcaccgtctcctca

SEQ ID NO: 8178 - DNA, 319 bp, Homo sapiens
  source 1..319: mol_type = other DNA
tgcagcctctggattcacctttagcagctatgccatgagctgggtccgccaggctccagggaaggggctggagtgggtctcagcttttagtggtcgtggtagtggcacatactacgcagagtccgtgaagggccggttcaccatctccagagacaattccaagaacacgctgcatatgcaaatgaacagcctgagagccgaggacacggccgtatattactgtgcgaaaacatattcctatgatagtagtggttattacgactactactactacggtatggacgtctggggccaagggaccacggtcaccgtctcctca

SEQ ID NO: 8179 - DNA, 319 bp, Homo sapiens
  source 1..319: mol_type = other DNA
tgcagcctctggattcacctttagcaactatgccatgagctgggtccgccaggctccagggaaggggctggagtgggtctcaggttttagtggtcgtggtgttagcacttacagcgcagactccgtgaagggccggttcaccatctccagagacaattccaagaacatgctgtatctgcaaatgaacagcctgagagccgaggacacggccgtatattactgtgcgaagacctattcttatgatagtagtggttattatgactactactattatggtatggacgtctggggccaagggaccacggtcaccgtctcctca

SEQ ID NO: 8180 - DNA, 319 bp, Homo sapiens
  source 1..319: mol_type = other DNA
tgcagcctctggattcacctttagaaactatgccatgagctgggtccgccaggctccagggaaggggctggagtgggtctcagcttttagtggtcgtggtagtggcacatactacgcagactccgtgaagggccggttcaccatctccagagacaattccaagaacacgctgcatctgcaaatgaacagcctgagagccgaggacacggccgtatattactgtgcgaaaacatattcctatgatagtagtggttattacgactactactactacggtatggacgtctggggccaagggaccacggtcaccgtctcctca

SEQ ID NO: 8181 - DNA, 319 bp, Homo sapiens
  source 1..319: mol_type = other DNA
tgcagcctctggattcacctttagaaactatgccatgagctgggtccgccaggctccagggaaggggctggagtgggtctcagcttttagtggtcgtggcactggcacatactacgcagactccgtgaagggccggttcaccatctccagagacaattccaagaacacgctgcatctgcaaatgaacagcctgagagacgacgacacggccgtatattactgtgcgaaaacctattcctatgatagtagtggttactacgactactactactacggtatggacgtctggggccaagggaccacggtcaccgtctcctca

SEQ ID NO: 8182 - DNA, 289 bp, Homo sapiens
  source 1..289: mol_type = other DNA
tttggcctctggattcgactttaatagttacttcatgacctgggtccgccaggctccagggaaggggctggagtgggtggccagtataaagccagatgaaagtgagatatactatgtggattacttgaggggccgattcaccatctccagagacaacgccaagaactcactatatctgcaaatgaacagtctgagagtcgacgacacggctctatattactgtgcgagactcaatggctgggggtggttcggcccctggggccagggaagcctggtcactgtctcttca

SEQ ID NO: 8183 - DNA, 289 bp, Homo sapiens
  source 1..289: mol_type = other DNA
tgcagcctctggattcacctttactaactattggatgggctgggtccgccaggctccagggaaggggctggagtgggtggccaacataagggaagatggaagtggtgtcttctatgtggagtctgtgaagggccgattcaccatctccagagacaacgcccagaactcactgtatctacaaatgaacagcctgagagccgacgacacggctatgtattactgtgcgagactgaacgggtgggggtggttcggcccctggggccagggaaccctggtcagcgtctcttca

SEQ ID NO: 8184 - DNA, 289 bp, Homo sapiens
  source 1..289: mol_type = other DNA
tgcagcctctggattcaccttcagtgactactacatgagctggatccgccaggctccagggaaggggctggagtggttttcatacattagtactggtggtattaccatacactacgcagactctgtgaagggccgattcaccatctccagggacaacgccaagaactcactgtatctgcaaatgaacagcctgagagccgaggacacggccgtgtattactgtgcgagagttagggggagctactcgattgactactggggccagggaaccctggtcaccgtctcctca

SEQ ID NO: 8185 - DNA, 292 bp, Homo sapiens
  source 1..292: mol_type = other DNA
tgcagcctctggattcaccttcagtgactactacatgagctggatccgccaggctccagggaaggggctggagtgcatttcatacattagtagtggtggtggtagtaccagatactacgcagactctgtgaagggccgattcaccatctccagggacaacgccaagacctcactgtatctgcaaatgaacagcctgagagccgaggacacggccctgtattactgtgcgagagtgcgtgggagctactctatagactactggggccagggaaccctggtcaccgtctcctca

SEQ ID NO: 8186 - DNA, 292 bp, Homo sapiens
  source 1..292: mol_type = other DNA
tgcagcctctggattcaccttcagtgactactacatgagctggatccgccaggctccagggaaggggctggagtgcatttcatacattagtagtggtggtggtagtaccagatactacgcagactctgtgaagggccgattcaccatctccagggacaacgccaagacctcactgtatctgcaaatgaacagcctgagagccgaggacacggccgtgtattactgtgcgagagtgcgtgggagctactctatagactactggggccagggaaccctggtcaccgtctcctca

SEQ ID NO: 8187 - DNA, 292 bp, Homo sapiens
  source 1..292: mol_type = other DNA
tgcagcctctggattcaccttcagtggctactacatgacttggatccgccaggctccagggaaggggctggagtgtatttcatacattagtaatggtggtggcagtaccaaatactacgcagaatctatgaagggccgattcaccatctccagggacaatgccaagacctcactgtatttgcaagtgaacagcctgagagccgacgacacggccgtatattactgtgcgagagtgcgtgggagttactctatagactactggggccagggaaccctggtcaccgtctcctca

SEQ ID NO: 8188 - DNA, 292 bp, Homo sapiens
  source 1..292: mol_type = other DNA
tgaagcctctggattcaccttcagtgactactacatgacctggatccgccaggctccagggaaggggctggagtgcatttcatacattagcagtcgtggtggtagcaccagatactacgcagactctgggaagggccgattctccatctccagggacaacgccaagacctcactgtatctgcaaatggacagcctgagagccgacgacacggccgtgtattactgtgcgagagtgcgtgggagttattctatagactactggggccagggaaccctggtcaccgtctcctca

SEQ ID NO: 8189 - DNA, 292 bp, Homo sapiens
  source 1..292: mol_type = other DNA
tgcagcctctggattcaccttcagtgactactacatgacctggatccgccaggctccagggaaggggctggagtgcatttcatatattagtagtggtggtggtactaccagatactacgcagactctgtgaagggccgattcaccatctccagggacaacgccaagacctcactgtatctgcaaatgaacagcctgagagccgacgacacggccgtgtattactgtgcgagagtgcgtgggagctactctatagactactggggccagggaaccctggtcaccgtctcctca

SEQ ID NO: 8190 - DNA, 292 bp, Homo sapiens
  source 1..292: mol_type = other DNA
tgcagcctctggattcaccttcagtgactactacatgagctggatccgccaggctccagggaaggggctggagtgcatttcatacattagtagtggtggtggtagtaccaaatactacgcagactctgtgaagggccgattcaccatctccagggacaacgccaagacctcactgtatctgcaaatgaacagcctgagagccgaggacacggccgtgtattactgtgcgagagtgcgtgggagctactctatagactactggggccagggaaccctggtcaccgtctcctca

SEQ ID NO: 8191 - DNA, 292 bp, Homo sapiens
  source 1..292: mol_type = other DNA
tgcagcctctggattcaccttcagtggctattacatgacttggatccgccaggctccagggaaggggctggagtgcatttcatacattagtagtggtggtggcagtaccagatactacgcagaatctatgaagggccgattcaccatctccagggacaacgccaagacctcactgtatttgcaagtgaacagcctgagagccgacgacacggccgtgtattactgtgcgagagtgcgtgggagttactctatagactactggggccagggaaccctggtcaccgtctcctca

SEQ ID NO: 8192 - DNA, 292 bp, Homo sapiens
  source 1..292: mol_type = other DNA
tgcagcctctggattcaccttcagtgactactacatgagctggatccgccaggctccagggaaggggctggagtgcatttcatacattagtagtggtggtggtagcaccagatactacgcagactctgtgaagggccgattcaccatctccagggacaacgccaagacctcactgtatctgcaaatgaacagcctgagagccgaggacacggccgtgtattactgtgcgagagtgcgtgggagctactctatagactactggggccagggaaccctggtcaccgtctcctca

SEQ ID NO: 8193 - DNA, 292 bp, Homo sapiens
  source 1..292: mol_type = other DNA
tgcagcctctggattcaccttcagtgactactacatgagctggatccgccaggctccagggaaggggctggagtgcatttcatacattaatagtggtggtggtagtaccagatactacgcagactctgtgaagggccgattcaccatctccagggacaacgccaagacctcactgtatctgcaaatgaacagcctgagagccgaggacacggccgtgtattactgtgcgagagtgcgtgggagctactctatagactactggggccagggaaccctggtcaccgtctcctca

SEQ ID NO: 8194 - DNA, 292 bp, Homo sapiens
  source 1..292: mol_type = other DNA
tgaagcctctggattcaccttcagtgactactacatgacctggatccgccaggctccagggaaggggctggagtgcatttcatacattagcagtcgtggtggtagcaccagatactacgcagactctgggaagggccgattcaccatctccagggacaacgccaagacctcactgtatctgcaaatggacagcctgagagccgacgacacggccgtgtattactgtgcgagagtgcgtgggagttattctatagactactggggccagggaaccctggtcaccgtctcctca

SEQ ID NO: 8195 - DNA, 298 bp, Homo sapiens
  source 1..298: mol_type = other DNA
tgcagcctctggattcaccttcagtagttatagcatgaactgggtccgccaggctccagggaaggggctggagtgggtttcatacattactagcagtagtagtaccatatactacgcagactctgtgaagggccgattcaccatctccagagacaatgccaagaactcactggatctgcaaatgaacagcctgagagacgaggacacggctgtatattactgtgcgagtgcacgtggatacagctatggttattactttgactactggggccaaggaaccctggtcaccgtctcctca

SEQ ID NO: 8196 - DNA, 298 bp, Homo sapiens
  source 1..298: mol_type = other DNA
tgcagcctctggattcaccttcagtagctatagcatgaactgggtccgccaggctccagggaagggactggagtgggtttcatacattactagtagtagtagtagcatatactacgcagactctgtgaagggccgattcaccatctccagagacaatgccaagaactcactgtatctgcaaatgagcagcctgagagacgaggacacggctgtgtattactgtgcgagcgcgaggggatacagctatggttactactttgactactggggccagggaaccctggtcaccgtctcctca

SEQ ID NO: 8197 - DNA, 295 bp, Homo sapiens
  source 1..295: mol_type = other DNA
tgcagcctctggattcagcttcggcaactttggcatgcactgggtccgccaggctccaggcaaggggctggagtgggtggcagttataagacatgaaggaactcataaatactatgcagactccgtgaagggccgattcaccatctccagagacaactccaggaacacgctgtatttgcaaatgaacagcctgagaggtgaggacacggccttgtattactgtgtgaaagatcgactgacggaggcctacggtatggaggtctggggccaagggaccacggtcaccgtctcctca

SEQ ID NO: 8198 - DNA, 295 bp, Homo sapiens
  source 1..295: mol_type = other DNA
tgcagcctctggattcattttcaggacctatggcatgcactgggtccgccaggctccaggcaaggggctggagtgggtggcagttacatcaaatgatggaagtaggaaatactatggagactccgtgaagggccgattcaccatctccagagacaactctaagaacacgctgtatctgcaaatgaacagcctgagatctgaggacacggctgtgtattattgtgtgaaagatcggctcacggaggcctacggtatggaggtctggggccaggggaccacggtcaccgtctcctca

SEQ ID NO: 8199 - DNA, 283 bp, Homo sapiens
  source 1..283: mol_type = other DNA
tgcagcctctggattcaccttcagtgactattacatgagctggatccgccaggctccagggaaggggctggagtccatttcatacattagcggtgatagtagagacctcaactacgcagactctgtgaagggccgattcaccatctccagggacaacgccaagaactcactgtatctgcaaatccacagcctgagagccgaggacacggccgtgtattactgttcgagagatccccggcacttggacttctggggccagggaaccctggtcaccgtctcctca

SEQ ID NO: 8200 - DNA, 283 bp, Homo sapiens
  source 1..283: mol_type = other DNA
tgcagcctctggattcaccttcagtgactattacatgagctggatccgccaggctccagggaaggggctggagtccatttcatacattagcggtgatagtagagacgtcaactacgcagactctgtgaagggccgattcaccatctccagggacaacgccaagaactcactgtatctgcaaatccacagcctgagagccgaggacacggccgtatattactgttcgagagatccccggcacttggacttctggggccagggaaccctggtcaccgtctcctca

SEQ ID NO: 8201 - DNA, 283 bp, Homo sapiens
  source 1..283: mol_type = other DNA
tgcagcctctggattcaccttcactgactactacatgacttggatccgccaggctccagggacggggctggagtggatttcatacattagtcaaaatagtagggatacaagttacgcagactctgtgaggggccgattcaccatctccagagacaacaccatgaactcactgtatctgcaaatggacaacctgagagccgacgacacggccgtgtattactgttcgagagatcctagacacctagacttcttgggccggggaaccctggtcaccgtctcctca

SEQ ID NO: 8202 - DNA, 297 bp, Homo sapiens
  source 1..297: mol_type = other DNA
gcttctggatacaccttcaccagttatgatatcaactgggtgcgacaggccactggacaagggcttgagtggatgggatggatgaaccctaacagtgataacacaggctatgcacagaagttccagggcagagtcaccatgaccaggagcacctccataagcacagcctacatggagctgagcagcctgagatctgaggacacggccgtgtattactgtgcgagagtatattgtagtggtggtagctgctacggtatggacgtctggggccaagggaccacggtcaccgtctcctca

SEQ ID NO: 8203 - DNA, 297 bp, Homo sapiens
  source 1..297: mol_type = other DNA
gcttctggatacaccttcaccagttatgatatcaactgggtgcgacaggccactggacaaggacttgagtggatgggatggatgaaccctaacagtgatgacacaggctatgcacagaagttccagggcagagtcaccatgaccaggagcacctccataagcacagcctacatggagctgagtagcctgagatctgaggacacggccgtttattactgtgcgagggtatattgtagtggtggtagctgctacggtatggatgtctggggccaagggaccacggtcaccgtctcctca

SEQ ID NO: 8204 - DNA, 297 bp, Homo sapiens; identical to SEQ ID NO: 8203
  source 1..297: mol_type = other DNA

SEQ ID NO: 8205 - DNA, 283 bp, Homo sapiens
  source 1..283: mol_type = other DNA
tgcagcctctggattcaccttcagtagttatgaaatgaactgggtccgccaggctccagggaaggggctggagtgggtttcatacattagtagtagtggtagtaccatataccacgcagactctgtgaagggccgattcaccatctccagagacaacgccaagaactcactatatttgcaaatgaacagcctgagagccgaggacacggctgtgtattactgtgcgagagaaagaggggggtttgaccactggggccagggaacccgggtcaccgtctcctca

SEQ ID NO: 8206 - DNA, 283 bp, Homo sapiens
  source 1..283: mol_type = other DNA
tgcagcctctggattcaccttcagtagttttgaaatgacctgggtccgccaggctccagggaaggggctggagtggatttcatacattggtagtagttatagtaccatatactacgcagactctgtgaagggccgattcaccatctccagagacaacgccaagaactcactatatctgcaaatgaacagcctgagagtcgaggacacggctgtttattattgtgcgagagagcggggcggctttgaccactggggccagggaaccctggtcaccgtctcctca

SEQ ID NO: 8207 - DNA, 301 bp, Homo sapiens
  source 1..301: mol_type = other DNA
tgcagcctctggattcacctttagtagatattggatgggctgggtccgccaggctccagggaaggggctggagtgggtggccagcataaagcaagatgaaagtgagacatacaatgtggactctgtgaagggccgatttaccatctccagagacaacgccaagaactcaatttatctgcaaatgaacagcctgagaaccgaggacacggccgtgtattactgtgcgagaggcccaagctatggttcgaggaccgactactttgactcctggggccagggaaccctggtcaccgtctcctca

SEQ ID NO: 8208 - DNA, 301 bp, Homo sapiens
  source 1..301: mol_type = other DNA
tgcagcctctgccttcacgtttagtaattattggatggcctgggtccgccaggctccagggaaggggctggagtgggtggccaacataaaacaaggtggaagtgagaaatactatgtggactctgtgaagggccgattcaccatctctagagacgacgccgagagctcactgtttctgcagatgaacagcctgagagtcgaggacacggccgtgtactactgtgcgagagggccatcgtacggtagcaggacggactactttgactcctggggccagggagccctggtcaccgtctcctca

SEQ ID NO: 8209 - DNA, 310 bp, Homo sapiens
  source 1..310: mol_type = other DNA
tgcagcctctggattcacctttagcagctatgccatgagctgggtccgccaggctccagggaaggggctggagtgggtctcagctattactgatagtggtgatagcacagtgtacgcagcctccgtaaagggccggttcaccttctccagagacaattccaagaacacgctgtatctgcaaatgaacagcctgagagccgaggacacggccgtgtatcactgtgcgaaagggacccttagatattgcagtggtggtagttgttacccctttgactactggggccagggaaccctggtcaccgtctcctca

SEQ ID NO: 8210 - DNA, 310 bp, Homo sapiens
  source 1..310: mol_type = other DNA
tgcagcctctggattcacctttagcagctatgccatgagctgggtccgccaggctccagggaaggggctggagtgcgtctcagttattactaatagtggtgatagcacattgtgcacagaccccgtgaagggccggtgcaccatctccagagacaattccaagaacatcctgtatctgcaaatgaacagcctgagagccgaggacacggccgtgtattactgtgcgaaagggactctaagatattgtagtggtggtagctgctacccctttgactactggggccagggaaccctggtcaccgtctcctca

SEQ ID NO: 8211 - DNA, 298 bp, Homo sapiens
  source 1..298: mol_type = other DNA
cactgtctctggtggctccatcggtacttactactggacctggatccggcagcccccagggaagggactggagtggattgggtatatcgattacagtgggagcaccgactacaacccctccctcaagagtcgagtcaccatatcactagacacgtccaagaaccagttctccctgaagctgagctctgtgaccgctgcggacacggccgtttattactgtgcgagagggcgtcggtatagtgggagacatgatgctcttgatatctggggccaagggacaatggtcaccgtctcttca

SEQ ID NO: 8212 - DNA, 298 bp, Homo sapiens
  source 1..298: mol_type = other DNA
cactgtctctggtggctccatcagtagttactactggagctggatccggcagcccccagggaagggactggagtggattgggtatatctattacagtgggagcaccaactacaacccctccctcaagagtcgagtcaccatatcagtagacacgtccaagaaccagttctccctgaagctgagctctgtgaccgctgcggacacggccgtgtatttctgcgcgagaggtcgtcgatatagtggccgtcatgatgctcttgatatctggggccaagggacaatggtcaccgtctcttca

SEQ ID NO: 8213 - DNA, 295 bp, Homo sapiens
  source 1..295: mol_type = other DNA
tgcagcctctggattcaccttcagtagctatagcatgaactgggtccgccaggctccagggaaggggctggagtgggtctcatccattagtagtagtagtagttacatatactacgcagactcagtgaagggccgattcaccatctccagagacaacgccaagaactcactgtatctgcaaatgaacagcctgagagccgaggacacggctgtgtattactgtgcccgaggggacagcagtggctggtacgggcttgactactggggccagggaaccctggtcaccgtctcctca

SEQ ID NO: 8214 - DNA, 295 bp, Homo sapiens
  source 1..295: mol_type = other DNA
tgcagcctctgaattcaccttcagtagctatcgcatgaactgggtccgccaggctccagggaaggggctggagtgggtctcatccattagtagtagtagtagttacatatactacgcagactcagtgaagggccgattcaccatctccagagacaacgccaagaactcactttatctgcaaatcaacagcctgagagccgaggacacggctgtgtattactgtgcgagaggagatagcagtggctggtacggtttggactactggggccagggaaccctggtcaccgtctcctca

SEQ ID NO: 8215 - DNA, 283 bp, Homo sapiens
  source 1..283: mol_type = other DNA
tgcaggctcgggattcaggtttgatgatcatgccatgcactgggtccggcaacctccagggaagggcctggagtgggtcgccagtattagttggaatagtggtagttcaggctacgcggactctgtgaagggccgtttcaccatctccagagacaacgccaacaacttcctatatctgcaaatgaacagtctgagagttgaggacacggctttatattactgtgcaaaagcgagattcgggcttgactactggggccagggaaccctggtcaccgtctcttca

SEQ ID NO: 8216 - DNA, 283 bp, Homo sapiens
  source 1..283: mol_type = other DNA
cgcaggctctggattcatgtttgaggatcatgtcatgcactgggtccggcaagctccggggaagggcctggagtgggtcgcaagcattagttgggatagtggtagtataggttatgcggactctgtgaggggccgattcaccatctccagagacaacgccaagaattccctgtatttggaaatgaatagtctgacaattgacgacacggccttgtattactgtgcaaaggcccgcttcgggcttgattattggggccagggaaccctggtcaccgtctcctca

SEQ ID NO: 8217 - DNA, 307 bp, Homo sapiens
  source 1..307: mol_type = other DNA
tgcagcctctggattaacctttaccatctatgccatgacctgggtccgccaggctcccgggaagggactggagtgggtctccactataagtgcaagtggtggcactatatactacgcagactccgtgaagggccgattcaccgtgtccagagacaattccaaaaatataatggttctgcaaatgaacagcctgagagtcgacgacacggccgtatattattgtgcgaaaggacctctgggatattgcagtggtggtacatgctatttggactactggggccagggaaccctggtcactgtctcctca

SEQ ID NO: 8218 - DNA, 307 bp, Homo sapiens
  source 1..307: mol_type = other DNA
tgcagcctctggagtcacatttagtatctatgccatgagctgggtccgcctggctccagggaaggggctgcagtgggtctcagctataagtgcaagtggtggtagcacatattacgcagactccgtgaagggccggttcaccacatccagagacaattccaagaatactctctatctacaaatgaacagcctgagagccgaggacacggccctttattactgtgcgaaaggaccccttggatattgcagcggtggtacctgctaccttgactactggggccaaggaaccccggtcaccgtctcctcc

SEQ ID NO: 8219 - DNA, 298 bp, Homo sapiens
  source 1..298: mol_type = other DNA
tgcagcctctggattcaccattagcaccgcctggatgagctggctccgccaggctccagggaaggggctcgagtgggtggcctacataaggcaagatgaaaatgagaaacaatatgtggactccgtgaagggccgattcaccatctccagagacaattccaagaactcagtgtatctacaaatgaacagcctgagagccgaggacacggctgtatattactgtgcgagaggtctcaaaaatacacactatggagggtgggcctactggggccagggaaccctggtcaccgtctcctca

SEQ ID NO: 8220 - DNA, 298 bp, Homo sapiens; identical to SEQ ID NO: 8219
  source 1..298: mol_type = other DNA

SEQ ID NO: 8221 - DNA, 298 bp, Homo sapiens
  source 1..298: mol_type = other DNA
tgcagcctctggattcaccattagcaccgcctggatgagctggctccgccaggctccagggaaggggctcgagtgggtggcctacataaggcaagatgaaaatgaaaaacaatatgtggactccgtgaagggccgattcaccatctccagagacaattccaagaactcagtgtatctacaaatgaacagcctgagagccgaggacacggctgtatattactgtgcgagaggtctcaaaaatacacactatggagggtgggcctactggggccagggaaccctggtcaccgtctcctca

SEQ ID NO: 8222 - DNA, 298 bp, Homo sapiens
  source 1..298: mol_type = other DNA
tgcagcctctggattcaccattagcaccgcctggatgagctggctccgccaggctccagggaaggggctcgagtgggtggcctacataaggcaagatgaaaatgagaaacaatatgtggactccgtgaagggtcgattcaccatctccagagacaattccaagaactcagtgtatctacaaatgaacagcctgagagccgaggacacggctgtatattactgtgcgagaggtctcaaaaatacacactatggagggtgggcctactggggccagggaaccctggtcaccgtctcctca

SEQ ID NO: 8223 - DNA, 298 bp, Homo sapiens
  source 1..298: mol_type = other DNA
tgaagcctctggatttacaattagttgggtctggatgagttggctccgcctcactccaggaaaggggctggagtgggtggcccacattcaacaagatgaaaatcagaagacctatgtggaccccgtgaggggccgattcaccatctccagaaacaacgcccagaattctctctatctccaaatgaacaggctgcgagtcgaagacacgggcgtgtatttttgtgctagaggcttgaagaacactcactacggcgggtgggcctactggggccagggagccctggtcaccgtctcctca

SEQ ID NO: 8224 - DNA, 289 bp, Homo sapiens
  source 1..289: mol_type = other DNA
ctctgtctctggtgactccatcaacagccccagttaccgctgggtctggatccgccagtccccagggaaggggctggagtggattggctatgtctatcacacaggggccagtcactacacctcgtccctccagagtcgcgtcaccatgtccgttgacacctccaagaatcagttctccctgaatttggcctctgtaagcgccgcagacacggctgtttactattgtgcgagacattacggcagtgcctcggactactggggcccgggactcctggtcaccgtctcctca

SEQ ID NO: 8225 - DNA, 289 bp, Homo sapiens
  source 1..289: mol_type = other DNA
ctctgtctctggtgactccatcaacagccccagttaccgctgggtctggatccgccagtccccagggaaggggctggagtggattggctatgtctatcatacaggggccagtcactacacctcgtccctccagagtcgcgtcaccatgtccgttgacacctccaagaatcagttctccctgaatttggcctctgtaagcgccgcagacacggctgtttactattgtgcgagacattacggcagtgcctcggactactggggcccgggactcctggtcaccgtctcctca

SEQ ID NO: 8226 - DNA, 289 bp, Homo sapiens
  source 1..289: mol_type = other DNA
ctctgtctctggtgactccatcaacagccccagttaccgctgggtctggatccgccagtccccagggaaggggctggagtggattggctatgtctatcacacaggggccagtcactacacctcgtccctccagagtcgcgtcaccatgtccgttgacacctccaagaatcagttctccctgaatttggcctctgtaagcgccgcagacacggctgtttactattgtgcgagacattacggcagtgcctcggactactggggccagggaaccctggtcaccgtctcctca

SEQ ID NO: 8227 - DNA, 289 bp, Homo sapiens
  source 1..289: mol_type = other DNA
ctctgtttcgggtgactccatcagtagccccacttaccgctgggtctggatccgccagcccccagggaaggggctggagtggattggatatatttatcatacagggagtagtcactacaactcgtccctcaagagtcgggtctccatgtccgttgacacgtccaagaatcaattctccctgaatgtgacttctgtgaccgccgcagacacggctgtttattattgtgcgagacattatggaagtgcctcggactattggggccagggactcctggtcaccgtctcctca

SEQ ID NO: 8228 - DNA, 289 bp, Homo sapiens
  source 1..289: mol_type = other DNA
cactgtctctggtgactccatcagcagtcctgctcaccgctggggctggatgcgccagtccccagggaagggactggagtggattgggactatctcatctggtgcgcttaccgactacaacccgtccctcaagagtcgagtcgccatatccatagacacgtccaagagcctgttctccctgaccctgacctctgtgaccgccgcagacacggccatatattactgtgccagacattatggcagcgcgtcagactactggggccagggaaccctggtcaccgtctcctca

SEQ ID NO: 8229 - DNA, 289 bp, Homo sapiens
  source 1..289: mol_type = other DNA
cactgtctctggagactccatcgccagtcccactcaccgctggggctggttccgccagccccccgggaagggcctggagtgggttgggactggcactcatgttggcgtcacccattacaacccgtccctcaagggtcgagtctccatatccgtcgacacgtccgaaaatcagttctttctgaggttgacctctgtgaccgccgctgacacggctgtctatttctgtgccagacattatggcagcgcgtcagactactggggccagggaatcctggtcaccgtctcctca

SEQ ID NO: 8230 - DNA, 292 bp, Homo sapiens
  source 1..292: mol_type = other DNA
tgcagcctctggattcaccttcagtgattactggatgcactgggtccgccacgttccggggaagggcctggtgtgggtctcccgtattaatgatgatggcagtcatagtgcctacgccgactccgtgaagggccgattcaccatctccagagacaacgccaagaacactgcatttttgcaaatgattggtctgagagtcgacgacacggctatttatttctgtgtaagaggaaccagagactggagtggcattgactactggggccagggaatcctggtcagcgtcttctca

SEQ ID NO: 8231 - DNA, 292 bp, Homo sapiens
  source 1..292: mol_type = other DNA
tgcagcctctggattcaacctcagcagccactggatgcactgggtccgccaagctccagggaaggggctggtgtgtgtcgcacgtattactgatgatgggaattatatagactacgcggactccgtgaagggccgattcaccatctccagagacaacgccaagaacacgctgtatttgcaaatgaatagtctgagatccgaggacacggctaaatattactgtgtgaggggtaccagggactggtccgggattgactactggggccagggagcggtggtcaccgtctcctca

SEQ ID NO: 8232 - DNA, 292 bp, Homo sapiens
  source 1..292: mol_type = other DNA
tgcagtctctggattcaccctcagcacccactggatgcactgggtccgtcaagctccagggaaggggctggtgtgtgtctcacgtattactgatgatgggaggtatacagactacgcggactccgtgaagggccgattcaccatctccagagacaacgccaagaacacgctgtatttggaaatgaacaatctgagattcgaggactcggctgtatattactgtgtaaggggtaccagggactggtccgggattgactactggggccagggaaccgtggtcaccgtctcctca

SEQ ID NO: 8233 - DNA, 277 bp, Homo sapiens
  source 1..277: mol_type = other DNA
tgtagccactggattcagtttcactagccaggccatgagctgggtccgccaggttccagggaggggactggagtgtatctcgaccattggtggtaatggtatcacatactacgtagactccgtgaagggccggttcaccatctccagagacatttccaagaacacattgtatctgcaaatgagtagcctgagagccgaggacacggccatttattactgtgcgagaaatgcgggccttgactactggggccagggaaccctggtcaccgtctcgtca

SEQ ID NO: 8234 - DNA, 280 bp, Homo sapiens
  source 1..280: mol_type = other DNA
tgacgcctctggattcatctttagtatgcaggccatgaactgggtccgccaggctccagggaagggactggaattaatctcaactattactggtagtggtggtgccacatactacgcagactccgtgaagggccggttcaccatctccagagacaattccaggaacacgatgcatttgcaaatggacaacctgagaccggacgacacggccctatattactgtgcgagaaatgcaggtctcgactactggggccagggaatccaagtcaccgtctcctca

SEQ ID NO: 8235 - DNA, 280 bp, Homo sapiens
  source 1..280: mol_type = other DNA
tgcagcctctggattcatctttaccagacaggacatggcctgggtccgccaggctccagggaaggggctggaatgggtcgcatgtgttggtgtcagcgacactgacagtttctacattgactccgtgaagggccgattcaccatctccagagacaattccaggaacacagtgtctctacaaatgaacaacctgagatccgaggacacggccatatattactgtgcgagaaatgcgggccttgactactggggccagggaagcctggtcaccgtctcctca

SEQ ID NO: 8236 - DNA, 280 bp, Homo sapiens
  source 1..280: mol_type = other DNA
tgcaacctctggattcaccttcagcagccaagacatgaactgggtccgccagactccagggaaggggctggagttggtctcaagtatcagtggcagtggtctcaatacacactacgcagactccgtgaagggccggttcaccatctccagagacagttccaggaacaccttacatctacaaatgaacagcctgagagccgaggacacggccgtatattactgtgcgcgaaatgcgggccttgactactggggccagggaaccctggtcaccgtctcctca

SEQ ID NO: 8237 - DNA, 277 bp, Homo sapiens
  source 1..277: mol_type = other DNA
tgcagcctcaggattcacctttaccagccaagacatgacctgggtccgccaggctccaggaaagggactggagtgggtctcagttgtaagtcctggtggtggtggatactacgcagactccgtgaagggccggttcaccgtctccagagacaattccaggaacacggtgtatctgcaaatgaacagcctgagagccgaggacacggccatatattactgtgcgagaaacgcagggcttgactactggggccagggaaccctggtcaccgtctcctca

SEQ ID NO: 8238 - DNA, 309 bp, Homo sapiens
  source 1..309: mol_type = other DNA
gcttctggagaccccctcaacaatattgatatcaattgggtgcgacaggcccctggtcaaggacttgagtggctgggatggatgaacatggacagcggtaacacagtctattcacagaaattccagggcagaattgccatgaccagggacaaggcaatcaccacagcctacatggagctgagcggcctgcgatctcaagacacggccgtttatttctgtgccattgcagatgtggactggtatgagagtggctggtatgttggtctggtcagccggtggggccaaggaaccctggtcaccgtctcctca

SEQ ID NO: 8239 - DNA, 309 bp, Homo sapiens
  source 1..309: mol_type = other DNA
gcttctggagaccccctcaacaatattgatatcaattgggtgcgacaggcccctggtcaaggacttgagtggctgggatggatgaacatggacagcggtaacacagtctattcacagaaattccagggcagaattgccatgaccagggacaaggcaatcaccacagcctacatggagctgagcggcctgcgatctcaagacacggccgtttatttctgtgccattgcagatgtggactggtatgagagtggctggtatgttggtctggtcagccggtggggccaaggaaccctggtcactgtctcctca

SEQ ID NO: 8240 - DNA, 304 bp, Homo sapiens
  source 1..304: mol_type = other DNA
tgcagcctctggattcacctttaacagatatgccatgaactgggtccgccaggctccagggaaggggctggagtgggtctcaggtattggtgccattggcggcagcacagactacgcggactccgtgaagggccggttcaccatctccagagacaattccaagaacaccctttatctgcaaatgatgttcctcagagccgaagacacggccgtatattattgtgcgaaagatcgagacgtgatagtcgctacggtacacggtatggacgtctggggccaggggaccatggtcaccgtctcctca

SEQ ID NO: 8241 - DNA, 304 bp, Homo sapiens
  source 1..304: mol_type = other DNA
tgcagcctctggattcacctttaacagatatgccatgaactgggtccgccaggctccagggaaggggctggagtgggtctcaggtattggtgccattggcggcaacacagactacgcggactccgtgaagggccggttcaccatctccagagacaattccaagaacaccctttatctgcaaatgatgttcctcagagccgaagacacggccgtatattattgtgcgaaagatcgagacgtgatagtcgctacggtacacggtatggacgtctggggccaggggaccatggtcaccgtctcctca

SEQ ID NO: 8242 - DNA, 304 bp, Homo sapiens
  source 1..304: mol_type = other DNA
tgcagcctctggattcacctttaacagatatgccatgaactgggtccgccaggctacagggaaggggctggagtgggtctcaggtattggtgccattggcggcagcacagactacgcggactccgtgaagggccggttcaccatctccagagacaattccaagaacaccctttatctgcaaatgatgttcctcagagccgaagacacggccgtatattattgtgcgaaagatcgagacgtgatagtcgctacggtacacggtatggacgtctggggccaggggaccatggtcaccgtctcctca

SEQ ID NO: 8243 - DNA, 304 bp, Homo sapiens
  source 1..304: mol_type = other DNA
tgcagccactggattcacctttagtagtcatgccatgacctgggtccgccaggctccagggaaggggctggagtgggtcgcaggtattggtggtagtggtggtagcacagactacgcagactccgtgaagggccggttcaccatctccagagacaatttcaagaacaccctgtatctgcaaatgcacagcctgagagccgaggacacggccgtatactactgtgcgaaagatcgggatgttatagtagcaacagttcacggtatggacgtctggggccaagggaccacggtcaccgtctcctca

SEQ ID NO: 8244 - DNA, 289 bp, Homo sapiens
  source 1..289: mol_type = other DNA
tgcagcctctggattcaccttcagtacttcttggatgagctgggtccgccaggctccagggagggggctggagtgggtgggccacatgaacccagatggaagtgcgatatactgtgtggactctgtgaggggccgattcaccatctccagagacaacgccaagaactcactttatctccaaatggacagcctgagagtcgaggatacggctgtatattattgtgcgagagatccgggttggggcgcttttgacatgtggggccaggggacaatggtcaccgtctcttca

SEQ ID NO: 8245 - DNA, 289 bp, Homo sapiens
  source 1..289: mol_type = other DNA
tgcagcctctggattcacctttaggaattattggatgaactgggtccggcaggctccagggaaggggctggagtgggtggccatcataaacgcagatggaagtgtcaagggctccatggactctgtgaagggccgattcactgtgtccagagacaacgccaagaactcactgtatttgcaaatggacagcctaagagccgaagacacggctgtgtactactgtgcgagagaccccgggtggggtgcttttgatatgtggggccaagggacaatggtcaccgtctcttca

SEQ ID NO: 8246 - DNA, 289 bp, Homo sapiens
  source 1..289: mol_type = other DNA
tgcagcctctggattcacctttaggaattattggatgaactgggtccggcaggctccagggaaggggctggagtgggtggccatcataaaggcagatggaagtaacaaggactgcgtggactctgtgaagggccgattcactgtgtccagagacaacgccaagaactcactgtatctgcaaatggacagcctaagagccgaagacacggctgtctactactgtgcgagagaccccgggtggggtgcttttgatatgtggggccaagggacaatggtcaccgtctcttca

SEQ ID NO: 8247 - DNA, 286 bp, Homo sapiens
  source 1..286: mol_type = other DNA
tgcagcctctggattcaggttcagtgactacagcatgaactgggtccgccagggtccagggaaggggctggaatggatttcatatcttgatggaagaaaggggaccatatcctacgcagactctgtgaagggccgattcaccatctcctgggacagtggcaagaactcactgcttctgcaaatgaacagcctgagagacgaggacacggctgtgtactactgtgcgagagatttaatatatgcctttgactactggggcctgggaaccctggtcaccgtctcctcg

SEQ ID NO: 8248 - DNA, 286 bp, Homo sapiens
  source 1..286: mol_type = other DNA
tgcagcctctggattcaccttcagtgattataccataaactgggtccgccaggctccagggaaggggctggagtgggtttcatacattactagtactagtagtaccaaatcctacgcagactctgtgaagggccgattcaccatctccagagacaatgccaagaactcactgtatctgcaaatgaacagcctgagagacgaggacacggctgtctattactgtgcgagagatctgatctacgcgtttgactactggggccagggaaccctggtcaccgtctcctca

SEQ ID NO: 8249 - DNA, 312 bp, Homo sapiens
  source 1..312: mol_type = other DNA
acacagaccctcacgctgacttgtaccttctctgggttctcactcaccactgaagcagtgggtgtgggctggatccgtcagccccccggaaaggccctagagtggcttgcattcatttattggaatgatgagacccactacagtccatctctggcgagcaggctcaccatcaccaaggacacctccaaaaaccaggtggtccttacattgaccgacatggaccctgtggacactgccacatattattgttcacacgggagtggctggctccttgactactggggccagggaatcctggtcaccgtctcttca

SEQ ID NO: 8250 - DNA, 312 bp, Homo sapiens
  source 1..312: mol_type = other DNA
acacagaccctcacgctgacctgcaccttctctggattctcactcagcgctcctgcagtgggtgtgggctgggtccgtcagcccccaggagagggcctggagtggcttgccttcatttattgggatgataataagtattacagcccatctctggcgagcagactcagcatctccaaggacacctccaaaaaccaggtggtccttacaatgaccaacatggaccctgtggacacaggcacatattattgttcacacggcagtggctggttacttgactattggggcccgggagcccttgtcaccgtctcttca

SEQ ID NO: 8251 - DNA, 295 bp, Homo sapiens
  source 1..295: mol_type = other DNA
tgcagcctctgggttcagcttcggtgcctctgctatgcactgggtccgccaggcttccgggaaaggactagagtgggttggccgtattagaagcaaaccttacaattacgcgacagcatatactgcgtcggtgacaggcaggttcaccatctccagagatgattcaaagaacacggcgtatctgcaaatgaacagcctgaaaaccgacgacacggccgtgtattactgtacctactatggttcggggagttacctttcctactggggccagggaaccctggtcaccgtctcctca

SEQ ID NO: 8252 - DNA, 295 bp, Homo sapiens; identical to SEQ ID NO: 8251
  source 1..295: mol_type = other DNA

SEQ ID NO: 8253 - DNA, 295 bp, Homo sapiens
  source 1..295: mol_type = other DNA
taaagcctctggattcaccttcagtgactctagtatggaatgggtccgccaggcttccgggaaagggctggagtgggttggccgcattagaagcagaactagaaagttcgccacaaaatatgttgcgtcggtgcaaggcaggttcaccatctccagagatgactctgagagcacggcgtttctacacatgaacagcctgaaaaccgacgacacggccgtatattactgtacctactatggttcggggagttatctctcctactggggccagggagccctggtcaccgtctcctca

SEQ ID NO: 8254 - DNA, 295 bp, Homo sapiens
  source 1..295: mol_type = other DNA
tgcagcctctggattcaccttcagtggctctgatatgcagtgggtccgccaggcttccggtaaagggctggaatgggttggccgtatcagaagtcgacctaacaattacgcgacagcatatgctgcctcggtgaaaggcaggttcaccatctccagagatgattcaaagtacacggcatatctccaaatgaacaacctgaaaagcgaagacgcggccatttattactgtacttactatggttcggggagttatctttcgtactggggccagggaaccctggtcaccgtctcctca

SEQ ID NO: 8255 - DNA, 313 bp, Homo sapiens
  source 1..313: mol_type = other DNA
tgcagcctctgaattcatgttcagtgactactacatgagctggatccgccaggctccagggaaggggctggagtgggtttcatacattagtagtagtggtaacaccatatactatgcagactctgtgaagggccgattcaccgtctccagggacaacgccaagaactcactgtatctgcaaatgaacagcctgagagccgaggacacggccgtgtattactgtgcgagagataggagagatattttgactggttattactactactacgctatggacgtctggggccaagggaccacggtcaccgtctcctca

SEQ ID NO: 8256 - DNA, 313 bp, Homo sapiens
  source 1..313: mol_type = other DNA
tgcagcctctgacttcatcttcagtgactactacatgagctggatccgccaggctccagggaaggggctggagtggatttcatacattagtagtagtggtagtaccatatactacgcagactctgtggagggccgattcaccatctccagggacaacgccaagaactcactgtatctgcaaatgaacagcctgagagccgaggactcggccgtgtattactgtgcgagagatcgtcgcgatattttgactggttattactactactacgctatggacgtctggggccaagggaccacggtcaccgtctcctca

SEQ ID NO: 8257 - DNA, 313 bp, Homo sapiens; identical to SEQ ID NO: 8256
  source 1..313: mol_type = other DNA

SEQ ID NO: 8258 - DNA, 313 bp, Homo sapiens
  source 1..313: mol_type = other DNA
tgcagcctctgacttcatcttcagtgactactacatgagctggatccgccaggctccagggaaggggctggagtggatttcatacactagtagtagtggtagtaccatatactacgcagactctgtggagggccgattcaccatctccagggacaacgccaagaactcactgtatctgcaaatgaacagcctgagagccgaggactcggccgtgtattactgtgcgagagatcgtcgcgatattttgactggttattactactactacgctatggacgtctggggccaagggaccacggtcaccgtctcctca

SEQ ID NO: 8259 - DNA, 303 bp, Homo sapiens
  source 1..303: mol_type = other DNA
gcatctggattcagcgtcacgagtcactatacacactgggtgcgtcaggccccgggacaaggccttgagtggatgggattggtctaccctggtggtgttgacccatactacgcagagaagttccagggcagagtctctatgaccagagacacgtccacgggcacggactatatggagttgaccagcctgcgatctggcgacacggccgtgtatttctgtgcgagagaggggcccttagcagcacctggtgtcaatgatgcttttgatatctggggccaagggactctggtcatcgtctcctct

SEQ ID NO: 8260 - DNA, 309 bp, Homo sapiens
  source 1..309: mol_type = other DNA
gcatctggatactcgttcaccagctcctatatacactgggtgcgacaggcccctggactagggcctgaatggatgggactcatctaccctagtggtgacaggacattctacgcacagaagttccagggcagagtcatcatgacaagggacacgtccacgagcacattttacatggacctgagcagcctgaggtatgaggacacggccgtgtattactgtgcgagagagggtcccctagcagcacctggtgtcaatgatgcttttgatatctggggccaagggacgatggtcaccgtctccgtctcttca

SEQ ID NO: 8261 - DNA, 283 bp, Homo sapiens
  source 1..283: mol_type = other DNA
tgcggcctctggattcaccgtcagtagcaactacatgagctgggtccgccaggctccagggaagcggctggagtgggtcgcaattatttatagggatggtaccacatactacgcagactccgtgaggggcagattcaccatctccagagacaattccaagaacactctgtatcttcaaatgaacagcctgagagccgaggacacggctatgtattactgtgcgagatggctagaaatcttttatgactactggggccagggaactctggtcaccgtctcctca

SEQ ID NO: 8262 - DNA, 283 bp, Homo sapiens
  source 1..283: mol_type = other DNA
tgcagcctctggattcgccgtcagtaacaactacatgagctgggtccgccaggctccagggaaggggctggagtgggtctcaattatttataacagtggtaccacatactacgcggactccgtgaagggcagattcaccatctccagagacaattccaagaacacgctgtatcttcaaatgaacagcctgagagccgaggacacggctgtgtattactgtgcgagatggctagaaatcttttatgactactggggccagggaaccctggtcaccgtctcccca

SEQ ID NO: 8263 - DNA, 283 bp, Homo sapiens
  source 1..283: mol_type = other DNA
tgcggcctctggattcaccgtcagtagcaactacatgagctgggtccgccagcctccagggcagcggccggagtgggtcgcaattatttatagggatggtaccacatactacgcagactccgtgaggggcagattcaccatctccagagacaattccaggaacactctgtatcttcaaatgaacagcctgagagccgaggacacggctatatattactgtgcgagatggctagaaatcttttatgactactggggccagggaactctggtcaccgtctcctca

SEQ ID NO: 8264 - DNA, 283 bp, Homo sapiens
  source 1..283: mol_type = other DNA
tgcggcctctggattcaccgtcagtagcaactacatgagctgggtccgccagcctccagggaagcggctggagtgggtcgcaattatttatagggatggtaccacatactacgcagactccgtgaggggcagattcaccatctccagagacaattccaagaacactctgtatcttcaaatgaacagcctgagagccgaggacacggctatgtattactgtgcgagatggctagaaatcttttatgactactggggccagggaactctggtcaccgtctcctca

SEQ ID NO: 8265 - DNA, 283 bp, Homo sapiens
  source 1..283: mol_type = other DNA
tgcagcctctggattcaccgtcagtagcaactacatgagctgggtccgccaggctccagggaaggggctggagtgggtcgcaattatttatagggatggtaccacatactacgcagactccgtgaagggcagattcaccatctccagagacaattccaagaacactttgtatcttcaaatgaacagcctgagagccgaggacacggctatgtattactgtgcgagatggctagaaatcttttatgactactggggccagggaactctggtcaccgtctcctca

SEQ ID NO: 8266 - DNA, 283 bp, Homo sapiens
  source 1..283: mol_type = other DNA
tgcggcctctggattcaccgtcagtagcaactacatgagctgggtccgccagcctccagggcagcggctggagtgggtcgcaattatttatagggatggtaccacatactacgcagactccgtgaggggcagattcaccatctccagagacaattccaagaacactctgtatcttcaaatgaacagcctgagagccgaggacacggctatatattactgtgcgagatggctagaaatcttttatgactactggggccagggaactctggtcaccgtctcctca

SEQ ID NO: 8267 - DNA, 283 bp, Homo sapiens
  source 1..283: mol_type = other DNA
tgcagcctctggattcaccgtcagtaacaactacatgagctgggtccgccaggctccagggaaggggctggagtgggtctcaattatttatagcggtggtaccacatactacgcagactccgtgaagggcagattcaccatctccagagacaattccaagaacacgctgtatcttcaaatgaacagcctgagagccgaggacacggctgtgtattactgtgcgagatggctagaaatcttttatgactactggggccagggaaccctggtcaccgtctcccca

SEQ ID NO: 8268 - DNA, 283 bp, Homo sapiens
  source 1..283: mol_type = other DNA
tgcggcctctggattcaccgtcagcagcaactacatgagctgggtccgccaggctccagggaagaggctggagtgggtcacaattatttatagggatggtaccacatactacgcagactccgtgaggggcagattcaccatctccagagacaatgccaaaaacactctgtatcttcaaatgaacagcctgagagccgaggacacggctatatattactgtgcgagatggctagaaatcttttatgactactggggccagggaactctggtcaccgtctcctca

SEQ ID NO: 8269 - DNA, 286 bp, Homo sapiens
  source 1..286: mol_type = other DNA
tgcagtctctggattcaccgtcagtagcaactacatgagctgggtccgccaggctccagggaaggggctggagtgggtctcaattatttatagcggcgatggtactacatactacacagactccgtgaagggcagattcaccatctccagagacaattccaagaacacgctgtatcttcaaatgaacaacctgagagccgacgacacggctgtatattactgtgcgagatggctagaaatcttctatgactactggggccagggaaccctggtcaccgtctcctca

SEQ ID NO: 8270 - DNA, 283 bp, Homo sapiens
  source 1..283: mol_type = other DNA
tgcggcctctggattcaccgtcagtagcaactacatgagctgggtccgccaggctccagggaagcggctggagtgggtcgcaattatttatagggatggtaccacatactacgcagactccgtgaggggcagattcaccatctccagagacaattccaagaacactctgtatcttcaaatgaacagcctgagagccgaggacacggctatgtattactgtgcgagatggctagaaatcttttatgactattggggccagggaactctggtcaccgtctcctca

SEQ ID NO: 8271 - DNA, 286 bp, Homo sapiens
  source 1..286: mol_type = other DNA
cgctgtgtatggtgggcccttcacaaaccactattggacctggatccgccagccccccgggaaggggctggagtggattggggaaattcttcataatggaaatacgaaatacaacccgtccctcaaaagtcgggtcgtcatatcattggacaagtccaagaaccaattctccctaaaactgaactctttgaccgccgcagacacggctgtgtatttctgtgcgagaggtcgatggtccccgactcttgatatctggggccttgggacaatggtcaccgtctcttca

SEQ ID NO: 8272 - DNA, 286 bp, Homo sapiens
  source 1..286: mol_type = other DNA
cgctgtctatggtgggtccttcactaaacaccactggacctggatccgccactcccccggggagggactggagtggattggagaaatccttcattctggggtctcgaaatacaacccgtccctcaagagccgcgtcgtcatatcattggacacgtcgaagaaccaattctccctgaaactgcagtctctgaccgtcgcagattcggctgtatattattgtgcgagaggtcgatggtccccgacccttgacatttggggccaggggacaatggtcaccgtctctcca

SEQ ID NO: 8273 - DNA, 286 bp, Homo sapiens
  source 1..286: mol_type = other DNA
cgctgtctatggtgggcccttcaagaattactattggacctggatccggcagcccccagggaaggggctggagtggattggggaaatttaccatagtggaggcaccaactacaacccgtccctcaagagtcgagtcaccatttcagtggacacgtcgaagaaccagttctccctgaggctgacctctatgaccgccgcagacacggctgtatattattgtgcgagaggccgatggtcccccactttggacatctggggccaagggacagtggtcaccgtctcttca

SEQ ID NO: 8274 - DNA, 286 bp, Homo sapiens
  source 1..286: mol_type = other DNA
cgctgtctatggtgggtccttaaagaatcactattggacgtggatccgccaggccccagggaaggggctggagtggattggggaaatctctcatagtggaggcaccaactacaacccgtccctcaagagtcgagtcaccatttcagtggacacgtcgaaaaaccagttctccttgagggtgacctctgtgatcgccgcggacacggctgtttattactgtgcgagaggccgatggtcccccactcttgatatctggggccaagggacattggtcaccgtctcttca

SEQ ID NO: 8275 - DNA, 286 bp, Homo sapiens
  source 1..286: mol_type = other DNA
cgctgtatatggtgggtccttcaagaatcattattggacctggatccgccaggccccagggaaggggctggagtggattggagaaatctctcatagtggagacaccaaatacaacccgtccctcaggagtcgagtcaccatttcagtggacacgtcgaggaaccagttctccctgagggtgacctctgtgaccgccgcggacacggctgtatattactgtgcgagaggccgatggtcccccactttggatatctggggccaagggacattggtcaccgtctcttca

SEQ ID NO: 8276 - DNA, 286 bp, Homo sapiens
  source 1..286: mol_type = other DNA
cgttgtctatggtgggtccttcaaaaattactattggacctggatccgccaggccccagggaagggactggagtggattggggaaatccttcacagtggagtcactaactacaacccgtccctcaagagtcgagtcaccatttcagtggacacgtcgaagaaccagttttccctgagggtgacctctgtgaccgccgcggacacgggtgtatattactgtgcgagaggccgatggtcccccacacttgatatctggggccaagggacattggtcaccgtctcttca

SEQ ID NO: 8277 - DNA, 289 bp, Homo sapiens
  source 1..289: mol_type = other DNA
cactgtctctggtggctccatcactggttaccactggagctggatccggcagcccccaggggagggactggagtggattgggtttatccattacagtggggacaccaactacaacccctccctcaggagtcgactcaccatgtcagtcgacacatccaagaaccagttctccctgaagttgaactctgtgaccgctgcggacacggccgtttattactgtacgagagatcggggccgtgatgggggctttgactactggggccagggaaccctggtcaccgtctcctca

SEQ ID NO: 8278 - DNA, 292 bp, Homo sapiens
  source 1..292: mol_type = other DNA
cactgtctctggtgtctccatcactggttattaccactggagctggatccggcagcccccaggggagggactggagtggattggctttatccattacagtggggacaccaactacagcccctccctcaggagtcgactcaccatgtcagtcgacacatccaagaaccagttctccctgaagttgaactctgtgaccgctgcggacacggccgtttattactgtacgagagatcggggccgtgatgggggctttgactactggggccagggaaccctggtcaccgtctcctca

SEQ ID NO: 8279 - DNA, 289 bp, Homo sapiens
  source 1..289: mol_type = other DNA
tactgtctctggtggctccatcactccttactactggagctgggtccgtcagcccccagggaggggcctggagtggattggatttatccatcacagtggatacacagtctgcaacccctccctcaagagtcgcgtcaccgtgtcagtagacacgtccaataaccagttgtccctaaagatgaattctgtgaccgctccggacacggccgtatattattgtacgagagatcgtgggagggacggcgggtttgactactggggcttgggaattctggtcaccgtctcctcg

SEQ ID NO: 8280 - DNA, 292 bp, Homo sapiens
  source 1..292: mol_type = other DNA
tgtagcctctggattcacctttagctcctatggcatggactgggtccgccaggctccagggaaggggctggagtgggtctcagctataagtactggtggtgataacacatactacacagactccatcaagggccggttcaccatctccagagacaattctaagagcacgctgtatctgcaaatgaacggcctgagagccgaggacacggccttatattactgtgcgaaagagagggggttcagaggtccttttgatatctggggccaagggacaatggtcaccgtctcttca

SEQ ID NO: 8281 - DNA, 292 bp, Homo sapiens
  source 1..292: mol_type = other DNA
tgcagcctctggattcacctttagcaactatggcatgaactgggtccgccaggctccagggaaggggctggagtgggtctcagctattggcagtggtaatgctaagacatactacgcagactccgtgaagggccggttcaccatctccagagacaattccaagaacacgctgaacctgcaaatgaacagcctgagagccgaggacacggcagtatattactgtgcgaaagaacggggattccgggggccttttgatatctggggccaagggacaatggtcaccgtctcttca

SEQ ID NO: 8282 - DNA, 304 bp, Homo sapiens
  source 1..304: mol_type = other DNA
tgcagcctctggattcacctttaggagctattggatgagctgggtccgccaggctccagggaaggggctggagtgggtggccaacataaaggaagatgggagtgacaaatactatgtggactctgtgaagggccgattcaccatctccagagacaacgccaagaactcactgtatctgcaaatgaacagcctgagagccgaggacacggctgtgtattattgtgcgagagatggatatagcagcagctggtaccgcgacggcatggacgtctggggccaagggaccacggtcaccgtctcctca

SEQ ID NO: 8283 - DNA, 304 bp, Homo sapiens
  source 1..304: mol_type = other DNA
tgcagcctctggattcacctttagtagttattggatgagctgggtccgccaggctccagggaaggggctggagtgggtggccaacataaagcaagatggaagtgacaaatactatgtggactctgtgaagggccgattcaccatctccagagacaacgccaagaactcactgtttctgcaaatgaacagcctgagagccgaggacacggccgtctattactgtgcgagagatgggtatagcagcagctggtacagggacggtatggacgtctggggccaagggaccacggtcagcgtctcctca

SEQ ID NO: 8284 - DNA, 304 bp, Homo sapiens
  source 1..304: mol_type = other DNA
tgcagcctctggattcacctttagtagttattggatgagctgggtccgccaggctccagggaaggggctggagtgggtggccaacataaagcaagatggaagtgacaaatactatgtggactctgtgaagggccgattcaccatctccagagacaacgccaagaactcactgtttctgcaaatgaacagcctgagagccgaggacacggccgtctattattgtgcgagagatgggtatagcagcagctggtacagggacggtatggacgtctggggccaagggaccacggtcagtgtctcctca

SEQ ID NO: 8285 - DNA, 304 bp, Homo sapiens
  source 1..304: mol_type = other DNA
tgcagcctctggattcacctttagtagttattggatgagctgggtccgccaggctccagggaaggggctggagtgggtggccaacataaagcaagatggaagtaacaaatactatgtggactctgtgaagggccgattcaccatctccagagacaacgccaagaactcactgtttctgcaaatgaacagcctgagagccgaggacacggccgtctattactgtgcgagagatggctatagtagcagctggtacagggacggtatggacgtctggggccaagggaccacggtcagcgtctcctca

SEQ ID NO: 8286 - DNA, 304 bp, Homo sapiens
  source 1..304: mol_type = other DNA
tgcagcctctggattcacctttagtagttattggatgagctgggtccgccaggctccagggaaggggctggagtgggtggccaacataaaacaagatggaagtgacaaatactatgtggactctgtgaagggccgattcaccatctccagagacaacgccaagaactcactgtttctgcaaatgaacagactgagagccgaggacacggccgtctattactgtgcgagagatggttatagcagcagctggtacagggacggtatggacgtctggggccaagggaccacggtcagcgtctcctca

SEQ ID NO: 8287 - DNA, 304 bp, Homo sapiens
  source 1..304: mol_type = other DNA
tgcagcctctggattcacctttagtagttattggatgagttgggtccgccaggctccagggaaggggctggagtgggtggccaacataaagcaagatggaagtgacaaatactatgtggactctgtgaagggccgattcaccatctccagagacaacgccaagaactcactgtttctgcaaatgaacagcctgagagacgaggacacggccgtctattactgtgcgagagatggatatagcagcagctggtacagggacggtatggacgtctggggccaagggaccacggtcagcgtctcctca

SEQ ID NO: 8288 - DNA, 304 bp, Homo sapiens
  source 1..304: mol_type = other DNA
tgcagcctctggattcacctttagtagttattggatgagctgggtccgccaggctccagggaaggggctggagtgggtggccaacataaagcaagatggaagtgacaaatactatgtggactctgtgaagggccgattcaccatctccagagacaacgccaagaactcactgtttctgcaaatgaacagactgagagccgaggacacggccgtctattactgtgcgagagatggttatagcagcagctggtacagggacggtatggacgtctggggccaagggaccacggtcagcgtctcctca

SEQ ID NO: 8289 - DNA, 286 bp, Homo sapiens
  source 1..286: mol_type = other DNA
tgcagcctctggattcacctttaaaaattatgccatgagctgggtccgccaggctccagggaaggggctggagtgggtctcagttattggtgttagtggtggagacacatactacgcagactccgtgaagggccggttcaccatctccagagacaattccaagaacacgctgtatctgcaaatggacagcctgagagccgaggacacggccgtatattactgtgcgtcccgaggcgcggtggctggggactactggggccagggaaccctggtcaccgtctcctca

SEQ ID NO: 8290 - DNA, 286 bp, Homo sapiens
  source 1..286: mol_type = other DNA
tgcagcctctggattcacctttagcatctatgccatgagctgggtccgccaggctccagggaaggggctggagtgggtctcagttattagtgttagtggtgataacacatactacgcagactccgtgaagggccgattcaccatctccagacacaattccaagaacacgctgtatctgcaaatgaacagcctgagagccgaggacacggccgtgtattactgtgcgtcccgaggggcagtggctggtgactactggggccagggaaccctggtcaccgtctcctca

SEQ ID NO: 8291 - DNA, 283 bp, Homo sapiens
  source 1..283: mol_type = other DNA
tgcagcctctggattcacctttagcacctatgtcatgacttgggtccgccaggctccagggaaggggctggagtgggtctcaactattagtggtagtggtggtagcacatactacgcagactccgtgaagggccggttcaccatctccagagacaattccaagaacacgctgtctctgcaaatgaacagcctgagagccgaggacacggccgtgtattactgtgtgagaggctacaccggtatggacgtctggggccaagggaccacggtcaccgtctcctca

SEQ ID NO: 8292 - DNA, 283 bp, Homo sapiens
  source 1..283: mol_type = other DNA
tgcagcctctggattcacctttaccagttttgccatgagctgggtccgccaggctccagggaaggggctggagtgggtctcatctcttactactagtggcggtagcacatactacgcagactccgtgaagggccggttcaccatctccagagacaattccaagaacacgctgcatctgcaaatgaacagcctgagagccgaggacacggccgtatattacgcggttcggggatatactggtatggacgtctggggccaagggaccacggtcaccgtctcctca

SEQ ID NO: 8293 - DNA, 283 bp, Homo sapiens; identical to SEQ ID NO: 8291
  source 1..283: mol_type = other DNA

SEQ ID NO: 8294 - DNA, 277 bp, Homo sapiens
  source 1..277: mol_type = other DNA
tgaagcttctggattcatctttatcgactatgccatgacatgggtccgccagagtccagggaaggggctggagtgggtctcgactattgcttatagtggcacacactacacagactccgtgaagggccgattcaccatttccagagacaataccaagaacatggtgtatctacaaatgaacagcctgagagccgaggacacggccatctattactgtgtgaaaggtttgactacttttgactactggggtccgggaaccctggtcaccgtctcctca

SEQ ID NO: 8295 - DNA, 277 bp, Homo sapiens
  source 1..277: mol_type = other DNA
tgcagcctctggattcgtctttatcgactatgccatgacctgggtccgccaggctccagggaaggggctggagtgggtctcaactattgcttatagtggcacacactatacagactccgtgaagggccggttcaccatttccagagacaataccaagaacacggtgtatctgcaaatgaacagcctgagagccgaggacacggccatatattactgtgtgaaaggcttgactacgtttgactactggggccagggaaccctggtcaccgtctcctca

SEQ ID NO: 8296 - DNA, 277 bp, Homo sapiens
  source 1..277: mol_type = other DNA
tgaagcttctggattcatcttcatcgactatgccatgacatgggtccgccagagtccagggaaggggctggagtgggtttcgactattgcttatagtggcatatattatgcagactccgtgaagggccgattcaccatttccagagacaatagcaacaacatggtgtatctacaaatgagcagcctgagagccgaggacacggccatctattactgtgtgaaaggtttgactacttttgactactggggtccgggaaccctggtcaccgtctcctca

SEQ ID NO: 8297 - DNA, 277 bp, Homo sapiens
  source 1..277: mol_type = other DNA
tgcagcctctggattcatttttagggactttgccatgacctgggtccgccaggctccagagaagggcctggagtgggtctcaactattacttatagtggtttacactatgcagactccgtgaagggccggttcaccatctccagagacaattcccagaacacagtgtatctgcaaatgaacagcctgagagccgaggacacggccgtatattactgtgtgaaagggctcactacatttgactactggggccagggatccctggtcaccgtctcctca

SEQ ID NO: 8298 - DNA, 277 bp, Homo sapiens
  source 1..277: mol_type = other DNA
tgcagcctctggattcccctttagtgcctatgccatgacctgggtccgccaggctccagggatggggctggagtgggtctcaactatcgtttatgatggttcacactactcggactccgtgaagggccggttcaccatctccagagacaattcccagaacacagtttatctgcaaatgaacagcctgagagtcgcggacacggccgtatatttctgtgtgaaaggactcactacatttgactactggggccagggagccctggtcaccgtctcctcg

SEQ ID NO: 8299 - DNA, 295 bp, Homo sapiens
  source 1..295: mol_type = other DNA
cagtgtctctggtgactccattagtgattactactggacctggatccggcagcccccagggaagggactggaatggatcggttacatccataacagttggagcactaactacgccccctccctcaggggtcgagttaccatgtcaagagacacgtccaagaatcagttctccctgaggttgacctctgtgaccgctgcggacacgggcgtctattattgtgcgagatatttttatggatcggggacaccttattttgactactggggccaggggatgctggtcaccgtctcctca

SEQ ID NO: 8300 - DNA, 294 bp, Homo sapiens
  source 1..294: mol_type = other DNA
cagtgtctctggtgactccattagtgattactactggacctggatccggcagcccccagggaagggactggaatggatcggttacatccataacagttggagcactaactacgccccctccctcaggggtcgagttaccatgtcaagagacacgtccaagaatcagttctccctgaggttgacctctgtgaccgctgcggacacgggcgtctattattgtgcgagatatttttatggatcggggacaccttattttgactactggggccaggggtgctggtcaccgtctcctca

SEQ ID NO: 8301 - DNA, 295 bp, Homo sapiens
  source 1..295: mol_type = other DNA
cactgtctctggtgactccatcggtgattattactggacctggatccggcagcccccagggaagggactggagtggattggctatatctattacagttgggtcaccaactacaacccctccctcaagggtcgagtctccatggcagtagactcgtccaagaaccagttctccctgaagctgacctctgtgaccgctgcggacacggccatgtattactgtgcgaggtatttctatgggtcggggactccttattttgactactggggccaggggaccctggtcaccgtctcctca

SEQ ID NO: 8302 - DNA, 277 bp, Homo sapiens
  source 1..277: mol_type = other DNA
tgcagcctctggattcaccttcagtagttatgaaatgaactgggtccgccaggctccagggaaggggctggagtgggtttcatacattagtagtagtggtagtaccatgtactacgcagactctgtgaagggccgattcaccatctccagagacaacgccaagaactcactgtatctgcaaatgaacagcctgagagccgaggacacggctttttattactgtgcgagaggtaaaaatggagtctggggccagggaaccctggtcaccgtctcctca

SEQ ID NO: 8303 - DNA, 277 bp, Homo sapiens
  source 1..277: mol_type = other DNA
tgcagcctctggattcaccttcagtagttatgaaatgaactgggtccgccaggctccagggaaggggctggagtgggtttcatacattagttctagtgggactattaaatactacgcagactctgtgaagggccgattcaccatctccagagacaacgccaagaactcactgtatctgcaaatgaacagcctgagagccgaggacacggctgtttactactgtgcgagaggaaagaacggggtatggggccagggaaccctggtcaccgtctcctca

SEQ ID NO: 8304 - DNA, 312 bp, Homo sapiens
  source 1..312: mol_type = other DNA
acacagaccctcacgctgacctgcaccttctctggattctcactcagtactaatggattgggtgtggcctggatccgtcagcccccaggaaaggccctggagtggcttgcactcatttattgggatgatgataagcgctacagcccatctctgaacaacagacttaccatcgccaaggacacctccaaaaaccaggtggtccttacattgaccaacttggaccctgcggacacagccacatattactgtgcacacctctcgactacggtgactacacactggggccagggaaccctggtcaccgtctcctca

SEQ ID NO: 8305 - DNA, 312 bp, Homo sapiens
  source 1..312: mol_type = other DNA
acacagaccctcacgctgacctgcaccttctctggattctcactcagtactaatggattgggtgtggcctggatccgtcagcccccaggaaaggccctggagtggcttgcactcatttattgggatgatgataagcgctacagcccatctctgaacaacagacttaccatcgccaaggacacctccaaaaaccaggtggtccttacattgaccaacttggacccagcggacacagccacatattactgtgcacacctctcgactacggtgactacacactggggccagggaaccctggtcaccgtctcctca

SEQ ID NO: 8306 - DNA, 312 bp, Homo sapiens
  source 1..312: mol_type = other DNA
acacagaccctcacgctgacctgcaccttctctgggttctcactcagtactaatggattgggtgtggcctggatccgtcagcccccaggaaaggccctggagtggcttgcactcatttattgggatgatgataagcgctacagcccatctctgaacaacagacttaccatcgccaaggacacctccaaaaaccaggtggtccttacattgaccaacttggaccctgcggacacagccacatattactgtgcacacctctcgactacggtgactacacactggggccagggaaccctggtcaccgtctcctca

SEQ ID NO: 8307 - DNA, 312 bp, Homo sapiens
  source 1..312: mol_type = other DNA
acacagaccctcacgctgacctgcaccttctctgggttctcactcagcactagtggattgggtgtggcctggatccgtcagcccccagggaaggccctggagtggcttgcactcatttattgggatgatgataagcgctacagcccatctctgaagagccgactcaccatcaccaaggacacctccaaaaaccaggtggtccttacaatgaccaacatggaccctgtggacacagccacatattactgtgcacacctgtcgactacggtgactacccactggggccagggagccctggtcaccgtctcctca

SEQ ID NO: 8308 - DNA, 312 bp, Homo sapiens
  source 1..312: mol_type = other DNA
acacagaccctcacactgacctgcaccttctctgggttctcactcagcactagtggattgggtgtggcctggatccgtcagcccccagggaaggccctggagtggcttgcactcatttattgggatgatgataagcgctacagcccatctctgaagagccgactcaccatcaccaaggacacctccaagaaccaggtggtccttacaatgaccaacatggaccctgtggacacagccacatattactgtgcacacctgtcgactacggtgactacccactggggccagggagccctggtcaccgtctcctca

SEQ ID NO: 8309 - DNA, 312 bp, Homo sapiens
  source 1..312: mol_type = other DNA
acacagaccctcacactgacctgcaccttctctgggttctcactcagcactagtggattgggtgtggcctggatccgtcagcccccagggaaggccctggagtggcttgcactcatttattgggatgatgataagcgctacagcccatctctgaagagccgactcaccatcaccaaggacacctccaaaaaccaggtggtccttacaatgaccaacatggaccctgtggacacagccacatattactgtgcacacctgtcgactacggtgactacccactggggccagggagccctggtcaccgtctcctca

SEQ ID NO: 8310 - DNA, 283 bp, Homo sapiens
  source 1..283: mol_type = other DNA
tgcagcctctggattcatctttagcaactatgccatgatgtgggtccgccaggctccagggaaggggctggagtgggtctcaagtcttagtggcaatagtagagatatatactatcgagactccgtgaagggccggttcaccatctccagagacaattccaagaacaccctatatctgcaaatgaacagcctgagagccgacgacacggccatatattattgtgcgaaagattcccctgtggggacctactggggccagggagccctggtcaccgtctcctca

SEQ ID NO: 8311 - DNA, 283 bp, Homo sapiens
  source 1..283: mol_type = other DNA
tacaggctctggcttcacctttagcacccctggcatgagctgggtccgccaggctccagggaaggggctggagtgggtctcatctatagatggtagtggtcgtgccacatactacgcagactccgtgaagggccggttcaccatctccagagacaattccaagaacacgctgtatctccaaatgagtaccctgagagccgaggacacggccgtttattattgtgcgaaagatagtccggtggggacttactggggccagggaaccctggtcaccgtctcctca

SEQ ID NO: 8312 - DNA, 283 bp, Homo sapiens
  source 1..283: mol_type = other DNA
tacagcctctggcttcacctttagcacccctggcatgagctgggtccgccaggctccagggaaggggctggagtgggtctcatccatagatggtagtggtcgtgccacatactacgcagactccgtgaagggccggttcaccatctccagagacaattccaagaacacgctgtatctccaaatgactatgctgagagccgaggacacggccgtttattattgtgcgaaagatagtccggtggggacttactggggccagggaaccctggtcaccgtctcctca

SEQ ID NO: 8313 - DNA, 283 bp, Homo sapiens
  source 1..283: mol_type = other DNA
tacagcctctggcttcacctttagcacccctggcatgagctgggtccgccaggctccagggaaggggctggagtgggtctcatctatagatggtagtggtcgtgccacatactacgcagactccgtgaagggccggttcaccatctccagagacaattccaagaacacgctgtatctccaaatgagtaccctgagagccgaggacacggccgtttattattgtgcgaaagatagtccggtggggacttactggggccagggaaccctggtcaccgtctcctca

SEQ ID NO: 8314 - DNA, 283 bp, Homo sapiens
  source 1..283: mol_type = other DNA
tgcagcctctggcttcacctttagcacccatggcatgagctgggtccgccaggctccaggtaaggggctggagtgggtctcatctatagatgttagtggtcgtgccacatactacgcagactccgtgaagggccggttcaccatctccagagacaattccaagaacacgctgtatctccaaatgagtaccctgagagccgaggacacggccgtatattattgtgcgaaagatagtccggtggggacttactggggccagggaaccctggtcaccgtctcctca

SEQ ID NO: 8315 - DNA, 283 bp, Homo sapiens
  source 1..283: mol_type = other DNA
tacagcctctggcttcacctttaacacccctggcatgagctgggtccgccaggctccagggaaggggctggagtgggtctcatctatagatggtagtggtcgtgccacatactacgcagactccgtgaagggccggttcaccatctccagagacaattccaagaacacgctgtatctccaaatgagtaccctgagagccgaggacacggccgtttattattgtgcgaaagatagtccggtggggacttactggggccagggaaccctggtcaccgtctcctca

SEQ ID NO: 8316 - DNA, 283 bp, Homo sapiens
  source 1..283: mol_type = other DNA
tacagcctctggcttcacctttagcacccctggcatgagctgggtccgccaggctccagggaaggggctggagtgggtctcatctatagatggtagtggtcgtgccacatactacgcagactccgtgaagggccggttcaccatctccagagacaattccaagaacacgctgtatctccaaatgagtaccctgagagccgaggacacggccgtttattattgtgcgaaagatagtccggtggggacttacgggggccagggaaccctggtcaccgtctcctca

SEQ ID NO: 8317 - DNA, 283 bp, Homo sapiens
  source 1..283: mol_type = other DNA
cgatgtctctggtgactctatcaataaatactactggaactggatccgacagccccccgggaagggcctggagtggcttggatatgtctattacaatgggatcaccatctacaacccctccctcaagggtcgagtcaccatatcagtcgccacgtccaggacccagttctccctgaagttgacctctttgaccgctgcggacacggccgtctactattgtgcgagaacctgggagggcgtttttgatatctggggccagggggcactggtcaccgtctctgca

SEQ ID NO: 8318 - DNA, 283 bp, Homo sapiens
  source 1..283: mol_type = other DNA
cagtgtctctggtggcgccatcaatagatactactggaactggatccggcagcccccagggaggggactggagtggattgggtatatctatcacaatgggattacccactacaaccccgccctcaagagtcgagtcaccatctcattagacacgtccaggacccagttctccctgaaactgaactctctgaccgtcgcggacacggccgtctattactgtgcgagaacatgggaaggtgttttcgatatctggggcccagggacactggtcgccgtctcttca

SEQ ID NO: 8319 - DNA, 298 bp, Homo sapiens
  source 1..298: mol_type = other DNA
cactgtctctggtggctccgtcagcgataataattactactggggctggatccgccagcccccagggaaggggctggagtacattgcgactatgcattctagtgggactacctactacgatccgtccctcaagagtcgagtcaccatttccgcagacacgtccaagaaccagttctccctgaggctgagctctgtgaccgccgcagacacggctgtgtattactgtgcgagacggatgacaggacctgggggatggttcgacccctggggccagggcaccctggtcaccgtctcctca

SEQ ID NO: 8320 - DNA, 298 bp, Homo sapiens
  source 1..298: mol_type = other DNA
cactgtctctggtgcctccgtcactgatacttattactactggggctggattcgccagcccccaggggaggagccggagtacatttcgactatccattctactgggaccacctactacaacccgtccctccagagtcgcctcaccatatcgttagacaggtccaagaaccagctgtccctggagttgaggtctgtgaccgccgcggacacggccgtatattactgtgcgagacgaatgacaggtccgggagggtggttcgacccctggggccagggaaccctggtcaccgtctcctca

SEQ ID NO: 8321 - DNA, 277 bp, Homo sapiens
  source 1..277: mol_type = other DNA
tgcagcctctggattcacctttagtaactactggatgagctgggtccgccaggctccagggaaggggctggagtgggtggccaacataaagcaagatggaagtgagagatactatgtggactctgtgaagggccgattcaccatctccagagacaacgccaagaactcactgtttctgcaaatgaacagcctgacagtcgaggacacggctgtgtattactgtgcgaggggctaccagggggagtggggccagggaaccctggtcaccgtctcctca

SEQ ID NO: 8322 - DNA, 277 bp, Homo sapiens
  source 1..277: mol_type = other DNA
tgcagcctctggattcacctttagtaactattggatgagctgggtccgccaggctccagggaaggggctggagtgggtggccaacataaagcaagatggaagtgagaaatactatgtggactctgtgaagggccggttcaccatctccagagacaacgccaagaactcactgtttctgcaaatgaacagcctgacagtcgaggacacggctgtgtattactgtgcgaggggctaccagggggagtggggccagggaaccctggtcaccgtctcctca

SEQ ID NO: 8323 - DNA, 277 bp, Homo sapiens
  source 1..277: mol_type = other DNA
tgcagcctctggattcacctttagtaactattggatgagctgggtccgccaggctccagggaaggggctggagtgggtggccaacataaagcaagatggaagtgagagatactatgtggactctgtgaagggccgattcaccatctccagagacaacgccaagaactcattgtatctgcaaatgaacagcctgatagtcgaggacacggctgtgtattactgtgcgaggggctaccagggggagtggggccagggaaccctggtcaccgtctcctca

SEQ ID NO: 8324 - DNA, 277 bp, Homo sapiens; identical to SEQ ID NO: 8321
  source 1..277: mol_type = other DNA

SEQ ID NO: 8325 - DNA, 277 bp, Homo sapiens
  source 1..277: mol_type = other DNA
tgcagcctctggattcacctttagtaactattggatgagctgggtccgccaggctccagggaaggggctggagtgggtggccaatataaagcaagatggaagtgagaaatactatgtggactctgtgaagggccggttcaccatctccagagacaacgccaagaactcactgtttctgcaaatgaacagcctgacagtcgaggacacggctgtgtattactgtgcgaggggctaccagggggagtggggccagggaaccctggtcaccgtctcctca

SEQ ID NO: 8326 - DNA, 277 bp, Homo sapiens
  source 1..277: mol_type = other DNA
tgcagcctctggattcacctttagtaactattggatgagctgggtccgccaggctccagggaaggggctggagtgggtggccaacataaagcaagatggaagtgagaaatactatgtggactctgtgaagggccgattcaccatctccagagacaacgccaagaattcgttgtctctgcaaatgaacagcctgacagtcgaggacacggctgtgtattactgtgcgaggggctaccagggggagtggggccagggaaccctggttaccgtctcctca

SEQ ID NO: 8327 - DNA, 277 bp, Homo sapiens
  source 1..277: mol_type = other DNA
tgcagcctctggattcacctttagtagttattggatgagttgggtccgccaggctccagggaaggggctggagtgggtggccaacataaaacaagatggaagtgagaaatactatgtagactctgtgaagggccgattcaccatctccagagacaacgccaagaactcactgtatctgcaaatgaacagcctgagagtcgaggacacggctatgtattactgtgcgaggggctaccagggggagtggggccagggaaccctggtcaccgtctcctca

SEQ ID NO: 8328 - DNA, 277 bp, Homo sapiens; identical to SEQ ID NO: 8326
  source 1..277: mol_type = other DNA

SEQ ID NO: 8329 - DNA, 277 bp, Homo sapiens
  source 1..277: mol_type = other DNA
tgcagcctctggattcacctttagtaactattggatgagctgggtccgccaggctccagggaaggggctggagtgggtggccaacataaaacaagatggaagtgagaaatactatgtggactctgtgaagggccgattcaccatctccagagacaacgccaagaactcactgtatctgcaaatgaacagcctgacagtcgaggacacggctgtgtattactgtgcgaggggctaccagggggagtggggccagggaaccctggtcaccgtctcctca

SEQ ID NO: 8330 - DNA, 277 bp, Homo sapiens
  source 1..277: mol_type = other DNA
tgcagcctctggattcatctttagtacctattggatgagctgggtccgccaggctccagggaagggactggagtgggtggccaacataaagcaagatggaagtgagaaatactatgtggactctgtgaagggccgattcaccatctccagagacaacgccaagaactcactttatctaaaaatgaacagcctgagagccgaggacacggctgtttattactgtgcgagagggtaccagggggagtggggccagggaaccctggtcaccgtctcctca

SEQ ID NO: 8331 - DNA, 289 bp, Homo sapiens
  source 1..289: mol_type = other DNA
tgcagcctctggattcaccttcagtgaccgctacatggactgggtccgccaggctccagggaaggggctggagtggcttggtcgtattagaaacagaactaatggttacagtatagaatatgccgcgtctgtgaaaggcagattcaccatctcaagagatgactcaaagctgtatctgcaaatgaacagcctggcaaccgaggacacggccgtttattactgtgcgcgttcggggagttattccgcctttgactactggggccagggaaccctggtcaccgtctcctca

SEQ ID NO: 8332 - DNA, 295 bp, Homo sapiens
  source 1..295: mol_type = other DNA
tgcagcctccggattcaccttcattgaccactccatggactgggtccgccaggctccagggaaggggctggagtgggttggccatactagaaacaaagcttacagttacaccacacaatacgccgcgtctgtgaaaggcagattcattatctcaagagatgagtcaaagaactcactgcatctgcaaatgaacagcctgaaatccgaggacacggccgtgtattactgtgctaggagtgggagctactctgcttttgactactggggccagggaaccctggtcaccgtctcctca

SEQ ID NO: 8333 - DNA, 283 bp, Homo sapiens
  source 1..283: mol_type = other DNA
tataacctctggattcacctttagtggttattggatgagttgggtccgccaggctccagggaaggggctggaatgggtggccaacataaaggaagatggaagtgacaagtactatgtggagtctgtgaagggccgattcaccatctccagagataactccaagaactcattgtatctgcagatgagcagcctgagagccgaggactcggctgtttattactgtgtaatggggcgtgcgggatttgactcgtggggccagggaaccctggtcgccgtctcctca

SEQ ID NO: 8334 - DNA, 283 bp, Homo sapiens
  source 1..283: mol_type = other DNA
tgcggcctctggattctcttttagtgactactggatgagttgggtccgccaggatccagggaaggggctggagtgggtggccaacataaagcaagatggaaatgagaaatattatgtggactctgtgaagggccgattcaccatctccagagacaacgccaagagttcattgtatctgcaaatgtacagtctgagagtcgaggacacggctctgtaccattgtgttatgggcagggctggttttgactcttggggccagggaaccctggtcaccgtctcctca

SEQ ID NO: 8335 - DNA, 286 bp, Homo sapiens
  source 1..286: mol_type = other DNA
tgagggctctgggttcgacttcagtggcgctgctatacactggatccgccaggcccccgggaaagggctggagtgggttggccatattagaatcaaagatgacagttatgcgacaacatatgctgcgtcggtgaaaggcaggttcaccatctccagagatgattcaaagaacacggcgtatttgcaaatgaacagcctaaaaaacgaggacacggccgtctactattgtgcaagacatgactggctcgacccctggggcctgggaaccctggtcaccgtctcctca

SEQ ID NO: 8336 - DNA, 286 bp, Homo sapiens
  source 1..286: mol_type = other DNA
tgtcacctctggattccccttcagtggcgctgccatacactgggtccgccaggcttccgggaaagggctggagtgggttggccacattagaatcaaatctgacaattacgccacaacatatggtacgtcggcggagggcaggtttaccatctccagagatgattccaagaacacggcatatctgcagatggacagcctcacaagtgaggacacggccatctactactgcgccagacatgactggttggacccctggggccagggcaccctggtcaccgtctcctcc

SEQ ID NO: 8337 - DNA, 283 bp, Homo sapiens
  source 1..283: mol_type = other DNA
tgcagcctctgagttcacctttggtaactattggatggcctgggtccgccaggctccagggaaggggctggagtgggtggccaacataaacctagatggaagtgggcaatactatgtggactctgtgaggggccgattcaccatctccagggacaacgccaagaactcactgtatctgcaaatgaacagcctgagagtcgaggacacggctgtgtattactgtgcgagagaccacttctacactgactactggggccagggaaccctggtcaccgtctcctca

SEQ ID NO: 8338 - DNA, 283 bp, Homo sapiens
  source 1..283: mol_type = other DNA
tgcagcctctggattcacctttagtaactattggatgacctgggtccgccaggctccagggaaggggctggagtgggtggccaacataaaccaagatggaactgaggaatactatgtggactctgtgaggggccgattcaccatctccagagacaacgccaagaactcactgtatctggaaatgaacagcctgagagtcgaggacacggctgtgtattactgtgcgagagatcacttctacactgactactggggccagggaaccctggtcaccgtctcctca

SEQ ID NO: 8339 - DNA, 286 bp, Homo sapiens
  source 1..286: mol_type = other DNA
tgtaggctcaggcactggatacacctttagagatcattggatgacctgggtccgccaggctccagggagggggctggagtgggtggccaacatacaacaagatggaagtgggaaaaactatgtggactctgtgaagggccgattctccatctccagagacaacgccaagaactcactgtatctacaaatggacagcctgagagtcgaggacacggctgtatattactgtgggagatctagggcccccgggtactggggccagggaaccctggtcaccgtctcctca

SEQ ID NO: 8340 - DNA, 286 bp, Homo sapiens
  source 1..286: mol_type = other DNA
tgtaggctcaggcactggatacactttcagagatcattggatgacctgggtccgccaggctccagggagggggctggagtgggtggccaacatacaacaagatggaagtgggaaaaactatgtggactctgtgaagggccgattctccatctccagagacaacgccaagaactcactgtatctacaaatggacagcctgagagtcgaggacacggctgtttattactgtgggagatctagggcccccgggtactggggccagggaaccctggtcaccgtctcctca

SEQ ID NO: 8341 - DNA, 280 bp, Homo sapiens
  source 1..280: mol_type = other DNA
tgtagcctctgggctcacccttaatacccatttcatgacctgggtccgtcaggctccagggaaggggctggagtgggtggccaacataaaaccagatggaagtgagaaatactatgtggactctgtgaagggccgattcaccatctccagagacaacaccaagaactcactgtttctgcaaatgaacagcctgagagtcgaggacacggctgtgtatttctgtgggagaagtagagcacctggatactggggccagggaaccctggtcaccgtctcctca

SEQ ID NO: 8342 - DNA, 283 bp, Homo sapiens
  source 1..283: mol_type = other DNA
tgcagcctctggattcacctttagagatcatgatatgagctgggtccgccgggctccagggagggggctggagtgggtctcaactattggtcgcagtggtgaactcacatactacgcagactccgtgaagggccgattcaccatctccagagacaattccaagagtacactgtgtctgcaaatgaacggtctgagagccgaagacacggccgtatactactgtgcgagaggcgggtggcttgatgactactggggccagggaaccctggtcaccgtctcctca

SEQ ID NO: 8343 - DNA, 283 bp, Homo sapiens
  source 1..283: mol_type = other DNA
tgcagcctctggattcacctttagtaactatgacatgagctgggtccgccagactccaggggaggggctggagtgggtctcaactattagtcgtagtggtggtatcacatactacgcagactccgtgaggggccggttcaccatctccagagacaattccaagaacacactgtatctgcaaatgaacagcctgagagccggggacacggccctatattactgtgcgagaggcgggtggcttgatgactactggggcctgggaaccctggtcaccgtctcctca

SEQ ID NO: 8344 - DNA, 283 bp, Homo sapiens
  source 1..283: mol_type = other DNA
tgcagcctctggattcacctttagaagctatgacatgagctgggtccgccaggctccagggagggggctggagtgggtctcagctattagtcgtactggtgaagccacatactacgcagactccgtgaagggccgattcaccatatccagagacaattccaagaacacactgtgtctgcaaatggacagtctgagagccgaggacacggccatatattactgtgcaagaggcgggtggcttgatgactactggggccagggaaccctggtcaccgtctcctca

SEQ ID NO: 8345 - DNA, 283 bp, Homo sapiens
  source 1..283: mol_type = other DNA
tgcggcctctggattcacctttagaaactatgagatgacctgggtccgccagactccagggaaggggctggagtgggtctcaagtatttatactatgggtagtggcacaaactacgcagactccgtgaggggccggttcaccgtctccagagaggattccatgagcaccctgtatctgcaaatgaacagcctgagagccgaggacacggccatctatttctgtgcccgcggaggatggctcgatgactactggggccagggaaccctggtcaccgtctcctca

SEQ ID NO: 8346 - DNA, 283 bp, Homo sapiens
  source 1..283: mol_type = other DNA
tgcggcctctggattcacctttagaaactatgagatgacctgggtccgccagactccagggaaggggctggagtgggtctcaagtatttatactatgggtagtggcacaaactacgcagactccgtgaggggccggtccaccgtctccagagaggattccatgagcaccctgtatctgcaaatgaacagcctgagagccgaggacacggccatctatttctgtgcccgcggaggatggctcgatgactactggggccagggaaccctggtcaccgtctcctca

SEQ ID NO: 8347 - DNA, 283 bp, Homo sapiens
  source 1..283: mol_type = other DNA
tgcagcctctggattcatctttagaaactatgacatgagctgggtccgccagactccagggagggggctggagtgggtctcagctattagtcgttctggtgaggccacatactacgcagactccgtgaagggccgattcaccatctccagagacaactccaagaacacactgtctctgcaaatgaacagcctgagagccgaggacacggccgtatattactgtgcgagaggcgggtggcttgatgactactggggccagggaacccaggtcaccgtctcctca

SEQ ID NO: 8348 - DNA, 295 bp, Homo sapiens
  source 1..295: mol_type = other DNA
tgcagtgtctggattcaccttcagtgactatggcatgcactgggtccgccaggctccaggcaaggggctggagtgggtggcagtgatatggcatgatgggagtaataaatactatgcagacttcgtgacgggccgattcaccatctccagagacgattcgaagaacacgctgtatctgcaaatgaacagcctgagagccgaggacacggcggtgtattactgtgcgagagacgatattttgggtggttataccattgactactggggccagggaaccccgctcaccgtctcctca

SEQ ID NO: 8349 - DNA, 295 bp, Homo sapiens
  source 1..295: mol_type = other DNA
tgcagtctctggattcattttcactgactatggcatgcactgggtccgccaggctccaggcaaggggccggagtgggtggcagttatatggcatgatggaagtaataaattttatgcagactccgtgaagggccgattcactatctccagagacgattccaagaacacgctgaatctgcaaatgaacagcctgagagccgaggacacggctgtgtatttctgtgcgagagacgatattttgggtggttataccattgactactggggccagggaaccctggtcatcgtctcctca

SEQ ID NO: 8350 - DNA, 289 bp, Homo sapiens
  source 1..289: mol_type = other DNA
tgcagtctctggattcacctctcatgaccatggcatgcactgggtccgacaaggtccacggaagggcctggagtgggtctcaggtattatgtggaatagtggtgcgacaggctatgcagactctgtgaagggccgattcaccatctccagagacaacaccaagaactccctctatctgcaaatggacgatctgacaactgacgacacggccttatattactgtgttaaggatgtggaagccggcggcgctgcctcctggggccagggaaccctggtcaccgtctcctca

SEQ ID NO: 8351 - DNA, 289 bp, Homo sapiens
  source 1..289: mol_type = other DNA
tgatgtctctggattcatctctcatcatcatggcatgcactgggtccggctaagtccacggaagggcctggagtgggtcgcaggaattatttggtatacttatgcgacaggctatgcagactctgtgaagggccgattcaccatctccagagacaacaccaagaactccctgtatctgcaaatggacgatctgagagatgacgacacggccttatattattgtgtaaaggatgtggaagccggcggcgctgcctcctggggccagggaaccctggtcaccgtctcgtca

SEQ ID NO: 8352 - DNA, 289 bp, Homo sapiens
  source 1..289: mol_type = other DNA
cgttctctctggattcgcctctcataatcacgccatgcactgggtccgacaagctccagggaagggcctggagtgggtctcaggcatttactggaacagtggcagtgcaggctatgcggagtctgttaagggccgcttcaccgtctccagagacaacgccaggagtaccctctttctgcaaatggacagtctgagacttgaagacacaggcctctatttttgtgttaaagatgtggaggcggggggggcggcttcctggggcctgggaaccctggtcaccgtctccgca

SEQ ID NO: 8353 - DNA, 289 bp, Homo sapiens
  source 1..289: mol_type = other DNA
tgtactctctggattcgtctctcatgatcacgccatgcactgggtccgacaagctccagggaagggcctggagtgggtctcaggcattttctggtacagtggcgatacaggctatgcggagtctgtgaagggccggttcaccgtctccagagacaacgccaggaataccctctttctgcaaatggacagtctgagagttgaagacacaggcttctattattgtgtaaaggatgtggaggcggggggggcggcttcctggggccagggaaccctggtcaccgtctccgca

SEQ ID NO: 8354 - DNA, 283 bp, Homo sapiens
  source 1..283: mol_type = other DNA
tgcagcctctggactcaccttcagtagttacagcatgaactgggtccgccaggctccagggaaggggctggagtgggtttcatacattactggtggtagcgggtccatatactatgcagactctgtaaagggccgattcaccatctccagagacaatgccaagaactcagtgtatctgcaaatgaacagcctgagagatgaggacacggctgtgtattactgtgcgagcagcaatggctgccttgactactggggccagggaaccctggtcaccgtctcctca

SEQ ID NO: 8355 - DNA, 283 bp, Homo sapiens
  source 1..283: mol_type = other DNA
tgcagcctctggattcaccttcagtagctatagcatgaactgggtccgccaggctccagggaaggggctggagtggctttcatacattactggtagtagtacttccatatactacgcagactctgtgaagggccgattcaccatctccagagacaatgccaagaactcactgtttctgcaaatgaacagcctgagagacgaggacatggctgtgtattactgtgcgagttccaacggttgccttgactactggggccagggaaccctggtcaccgtctcctca

SEQ ID NO: 8356 - DNA, 289 bp, Homo sapiens
  source 1..289: mol_type = other DNA
tgcagcgtctggaatcaccttcagtagcagtggcatgcactgggtccgccaggctccaggcaaggggctggagtgggtggcaatgatttggtctgatggaagtaagcaatactatgcagactccgtgaagggccgtttcaccatctccagagacaattacaggaacacggtgcatctgcaaatggacagcctgagagccgaggacacggctgtgtattactgtgggagagataaaggtgtcacctctattgacaactggggccagggagccctggtcaccgtctcctca

SEQ ID NO: 8357 - DNA, 289 bp, Homo sapiens
  source 1..289: mol_type = other DNA
tgcagcgtctggaatccccttcagcagcagtggcatgcactgggtccgccaggctccaggcaaggggctggagtgggtggcaatgatttggtctgatggaagtaatcaatactatgcagactccgtgaagggccgtttcatcatctccagagacaattccaagaacacggtgtatctgcaaatggacagcctgagagccgaggacacggctgtgtattattgtgggagagataaaggtgtcacgtctattgacaactggggccagggagccctggtcaccgtctcctca

SEQ ID NO: 8358 - DNA, 289 bp, Homo sapiens
  source 1..289: mol_type = other DNA
tgcagtgtctggaatctcctttagtgcctctggcatgcactgggtccgccaggctccaggcaagggactggagtgggtggcaatgattacgtctgttgggactacggaattctatgcagactccgtgaagggccgattctccatctccagagacaactccaaggacaccctgtttctgcaaatgaacagcctgaaagtcgaggacacggctatctattactgtgggagagataagggtgtcacttccattgacaactggggccagggaaccctggtcatcgtctcctca

SEQ ID NO: 8359 - DNA, 286 bp, Homo sapiens
  source 1..286: mol_type = other DNA
tgcagcctctggattcaccttcagtagttctgaaatgagctgggtccgccaggctccagggaagggcctggagtgggtctcattcattaggcatagtgatggaaccatatactctgcagactctgtgaagggccgattcaccatctccagagacagcgccaagaacacactgtatctgcaaatgaacagcctgagagtcgacgacacggctatttattactgtgcgagaggctccctctacggtatggacgtctggggcccggggaccacggtcaccgtctcctca

SEQ ID NO: 8360 - DNA, 286 bp, Homo sapiens
  source 1..286: mol_type = other DNA
tgcagcctctggattcatcttcagtagttatgaaatgaactgggtccgccaggctccagggaaggggctggagtgggtttcatacattagtagtagtggtagtaccatatactacgcagactctgtgaagggccggatcaccatctccagagacaacgtcaagaagtcactgtatctgcaaatgaacagcctgagagccgaggacacggctgttttttactgtgcgagaggctcgctttacggcatggacgtctggggccaagggaccacggtcaccgtctcctca

SEQ ID NO: 8361 - DNA, 300 bp, Homo sapiens
  source 1..300: mol_type = other DNA
aagggttctggatacagttttgccacctactggatcggctgggtgcgccagaagcccgggaaaggcctggagtggatggggatcatctatcctggtgactttgataccagatacagcccgtccttccaaggccaggtcaccatctcagtcgacaagtccatcagtaccgcctacctgcagtggagcagcctgaaggcctcggacagcgccacgtattactgtgcgagaagtcccacctccgtgagtaatccgtattacagtgactactggggtcagggaaccctggtcaccgtctcctca

SEQ ID NO: 8362 - DNA, 300 bp, Homo sapiens
  source 1..300: mol_type = other DNA
aagggttctggatacagttttaccaagtactggatcggctgggtgcgccagatgcccgggaaaggcctggagtggatgggaatcatctatcctggtgactctgataccagatacagcccgtccttcaaaggccaggtcactatctcagccgacaagtccatcaccaccgcccacctgcagtggagcagcctgaaggcctcggacaccgccatttattactgtgcgagatctccaacgtccgtgtcaaacccctattactctgactattggggccagggaaccctggtcaccgtctcctca

SEQ ID NO: 8363 - DNA, 295 bp, Homo sapiens
  source 1..295: mol_type = other DNA
tgcagcctctggattccccttcagtatatctggcatgcactgggtccgccaggctccaggcaaggggccggagtgggtggcagttataccgaatgatggaagtagacaatactatggagactccgtgaagggccgattcaccatctccagagacaattccaagaacacgctgtatctgcaaatgaacagtctgagacttgaggacacggctgtgtattactgtgtgaaagatcggatgacggaagcctacggtatggaagtctggggccaagggaccacggtcagtgtctcctca

SEQ ID NO: 8364 - DNA, 295 bp, Homo sapiens
  source 1..295: mol_type = other DNA
tgcagcctctggattccccttcagtatatctggcatgcactgggtccgccaggctccaggcaaggggctggagtgggtggcagttatgcggaatgatggaagtagacaatattatggagactccgtgaagggccgattcaccatctccagagacaattccaagaacacgctgtatctgcaaatgaacagtctgagacttgaggacacggctgtctattactgtgtgaaagatcggatgacggaagcctacggtatggaagtctggggccaagggaccacggtcactgtctcctca

SEQ ID NO: 8365 - DNA, 295 bp, Homo sapiens
  source 1..295: mol_type = other DNA
tgcagcctctggattccccttcagtatatctggcatgcactgggtccgccaggctccaggcaaggggctggagtgggtggcagttataccgaatgatggaagtagacaatactatggagactccgtgaagggccgattcaccatctccagagacaattccaagaacacgctgtatctgcaaatgaacagtctgagacttgaggacacggctgtgtattactgtgtgaaagatcggatgacggaagcctacggtatggaagtctggggccaagggaccacggtcagtgtctcctca

SEQ ID NO: 8366 - DNA, 295 bp, Homo sapiens
  source 1..295: mol_type = other DNA
tgcagcctctggattcaccttcaatgcatttggcatgcactgggtccgccaggctccaggcaaggggctggagtgggtggcagttgtatcaaatgatggaaccaggaaacactattcagacaccgtgaagggccgattcaccatctccagagacagttccatgaacacgctgtatttgcaaatgaacagcctgagagctgaggacacggcagtgtattactgtgtgaaagacaggatgacagaggcttacggtatggaggtctggggccaagggaccacggtcaccgtctcctca

SEQ ID NO: 8367 - DNA, 333 bp, Homo sapiens
  source 1..333: mol_type = other DNA
acacagaccctcacgctgacctgtaccctctctgggttctcactcagcactagtggagtgggtgtgggctggatccgtcagcccccaggaaaggccctggagtggcttgcagttatttattgggatgatgataagcgctatagcccatctctgcagagcaggctcagcatcaccaaggacacctccaaaaaccaggtggtccttacaatgaccaacatggaccctgtggacacagccacatattactgtgcacacagacgattctatggttcggggagttatcggtgtgcgtttgatatctggggccaagggactttggtcaccgtctcttca

SEQ ID NO: 8368 - DNA, 333 bp, Homo sapiens
  source 1..333: mol_type = other DNA
acacagaccctcacgctgacctgtaccctctctgggttctcactcaccactactggagtgggtgtggcctggatccgtcagcccccaggacaggccctggagtggcttgcagtcatttattgggatgatgataagcgctacaatccatctctgaagagcaggctcaccatcaccaaggacacctccaaaaaccaggtggtccttacaatgaccaacatggaccctgtggacacagcctcatattattgtgcacacagacgcttctatggttcggggagttatcgttgtgcttttgatatctggggccaagggacaatggtcaccgtcgcttca

SEQ ID NO: 8369 - DNA, 292 bp, Homo sapiens
  source 1..292: mol_type = other DNA
cactgtctctcgtggctccatcagcagtagtacttaccactggggctggatccgccagcccccagggaaggggctggagtggattgggagtatctattacagtgggagcacctactacaacccgtccctcaggagtcgcgccaccttatccgtagacacgtccaagaatcagttctccctgaaactgacctctgtgaccgccgcagacacggctgtttattactgtgcgggcagcagctggaacaaatggttcgacccctggggccagggaagcctggtcaccgtctcctca

SEQ ID NO: 8370 - DNA, 292 bp, Homo sapiens
  source 1..292: mol_type = other DNA
cactgtctctgatgggtccatcagcagcagtacttatcactgggcctggatccgccagcccccagggaagggactggagtggattgggagtatctattatagtgggagcacctattacaacccgtctctcaagagtcgactcatcctgtccgtggacacgaccaagaaccagttctcccttaaactgacctctgtgactgtcgcagatacggcaacatattactgcgcgggcagcagttggaataagtggttcgacccctggggccagggatccctggtcaccgtctcctca

SEQ ID NO: 8371 - DNA, 292 bp, Homo sapiens
  source 1..292: mol_type = other DNA
cactgtctctgctggctccatcagcagcagtacttatcactgggcctggatccgccagcccccagggaagggactggagtggattgggagtatctattatagtgggagcacctattacaacccgtctctcaagagtcgactcaccctgtccgtggacacgaccaagaaccagttctcccttaaactgacctctgtgactgtcgcagatacggcaacatattactgcgcgggcagcagttggaataagtggttcgacccctggggccagggatccctggtcaccgtctcctca

SEQ ID NO: 8372 - DNA, 295 bp, Homo sapiens
  source 1..295: mol_type = other DNA
tgtagcctctgcattcaactttggtagttattggatgagttgggtccgccaggctccaggggaggggctggagtgggtggccaatataaagcaagatggaagtgagaaacactatgcggactctgtgaagggccgattcaccatctccagagacaactccaagaactcagtgtatctgcaaatgaacagcctgagagccgaggacacggctgtgtattactgtgcgagagtgtacagcaccagctggtacgactttgactactggggccagggaaccctggtcaccgtctcctca

SEQ ID NO: 8373 - DNA, 295 bp, Homo sapiens
  source 1..295: mol_type = other DNA
tgtagcctatggattccccttcggtagctattggatgagctgggtccgccaggctccagggaagggactggagtgggtggccaccataaagaaagatggaagtgagaaatactatgtggactctgtgaagggccgattcaccctctccagagacaacgccgagaactcagtgtatctgcaaatgaacagcctgagagccgaggacacggctgtgtactactgtgcgagagtgtatagtactagctggtacgactttgactactggggccagggaaccatggtcaccgtctcctca

SEQ ID NO: 8374 - DNA, 293 bp, Homo sapiens
  source 1..293: mol_type = other DNA
cagcctctggattcatctttcatagccattggatgagctgggtccgccaggctccagggaaggggctggagtgggtggccaacataaaccaagatggaactgagagatactatgtggactctgtgaagggccgattcaccgtctccagagacaacgccaagaactccctgtatctgcaaatgaacagcctgagagccgaggacacggctctatattactgtgcgagagatggagtggctgagggggtctactttgactcctggggccagggaaccctggtcaccgtctcctca

SEQ ID NO: 8375 - DNA, 295 bp, Homo sapiens
  source 1..295: mol_type = other DNA
tgcagcctctggattcacctttcgcagccattggatgagctgggtccgccaggctccagggaaggggctggagtgggtggccaacataaaccaagatgggcgtgagacatactatatggactctgtgaagggccgattcaccatctccagagacaacgccaaaaactcactgattctacaaatgaacagcctgagagccgaggacacggctgtctatttgtgtgcgagagatggggtagcagaaggtgtctactttgactcctggggccagggaaccctggtcaccgtctcctca

SEQ ID NO: 8376 - DNA, 295 bp, Homo sapiens
  source 1..295: mol_type = other DNA
tgcggcctctggattcacctttcgcagccattggatgagctgggtccgccaggctccagggaaggggctggagtgggtggccaacataaaccaagatggacgtgagacatactatttggactctgtgaagggccgattcagcatctccagagacaacgccaaaaactccctgtatctacaaatgaacagcctgacagccgaggacacggctgtttatttgtgtgcgagagatggggtagcagaaggtgtctactttgactcctggggccagggaaccctggtcaccgtctcctca

SEQ ID NO: 8377 - DNA, 295 bp, Homo sapiens
  source 1..295: mol_type = other DNA
tgcagcctctggattcacctttcgcagccattggatgagctgggtccgccaggctccagggaaggggctggagtgggtggccaacataaaccaagatggacgtgagacatactatttggactctgtgaagggccgattcaccatctccagagacaacgccaaaaactcactgtatctacaaatgaacagcctgacagccgaggacacggctgtttatttgtgtgcgagagatggggtagcagaaggtgtctactttgactcctggggccagggaaccctggtcaccgtctcctca

SEQ ID NO: 8378 - DNA, 295 bp, Homo sapiens
  source 1..295: mol_type = other DNA
tgcagcctctggattcacctttcgcagccattggatgagctgggtccgccaggctccagggaaggggctggagtgggtggccaacataaaccaagatggacgtgagacatactatttggactctgtgaagggccgattcaccatctccagagacaacgccaaaaactcactgtatctacaaatgaacagcctgacagccgaggacacggctgtttatttgtgtgcgagagatggggtggcagaaggtgtctactttgactcctggggccagggaaccctggtcaccgtctcctca

SEQ ID NO: 8379 - DNA, 295 bp, Homo sapiens
  source 1..295: mol_type = other DNA
tgcagcctctggattcacctttcgcagccattggatgagttgggtccgccaggctccaggggaggggctggagtgggtggccaacataatccaagatggacgtgagacatactatgtggactctgtgaagggccgattcaccatctccagagacaacgccaaaaactcactgtatctgcaaatgaacagcctgagagccgaggacacggctgtgtatttttgtgcgagagatggggtagcagaaggtgtctactttgactcctggggccagggaaccctggtcaccgtctcctca

SEQ ID NO: 8380 - DNA, 286 bp, Homo sapiens
  source 1..286: mol_type = other DNA
tgcagcctctggattcacctttagtagttattggatgagctgggtccgccaggctccagggaaggggctggagtgggtggccaagataaagacagatggaagtgagaaatactatgtggactctgtgaagggccgattcaccatttccagagacaacgccgagaactcactctatctgcaaatgaacagcctgagagtcgaggacacggccgtgtattactgtgcgagaggcggatacaggtattttgaccagtggggccagggatccctggccaccgtctcctca

SEQ ID NO: 8381 - DNA, 286 bp, Homo sapiens
  source 1..286: mol_type = other DNA
tgcagcctctggattcacctttaatacctattggatgagctgggtccgccaggctccagggaaggggctggagtgggtggccaacataaaggaagacggaagtcagaaatactatgtggactctgtgaggggccgattcaccatctccagagacaacgccaagaactcactgtatctgcaaatgaacagcctgagagccgaggacacggccgtgtattactgtgcgagaggggggtatcgctactttgaccagtggggccagggaaccctggtcaccgtctcctca

SEQ ID NO: 8382 - DNA, 292 bp, Homo sapiens
  source 1..292: mol_type = other DNA
tgcagcctctggattcacctttagcagctatgccatgagttgggtccgccaggctccagggaaggggctggagtgggtctcagctattagtggtagtggtggtagcacatactacgcagactccgtgaagggccggttcaccgtctccagagacaattccaagaacacgctgtatctgcaaatgaacagcctgagagccgaggacacggccgtatattactgtgcgaaagatgggcttcggtactacggtatggacgtctggggccaagggaccacggtcaccgtctcctca

SEQ ID NO: 8383 - DNA, 292 bp, Homo sapiens
  source 1..292: mol_type = other DNA
tgcagcctctggattcacctttagcagctatgccatgagctgggtccgccaggctccagggaaggggctggagtgggtctcagctattagtggtagtggtggtagcacatactacgcagactccgtgaagggccggttcaccatctccagagtcaattccaagaacacgctgtatgtgcaaatgaacagcctgagagccgaggacacggccgtatattactgtgcgaaagatgggcttcggtactacggtatggacgtctggggccaagggaccacggtcaccgtctcctca

SEQ ID NO: 8384 - DNA, 292 bp, Homo sapiens
  source 1..292: mol_type = other DNA
tgcagcctctggattcacctttagcagtcatgccatgagctgggtccgccaggctccagggaaggggctggagtgggtctcaggtattagtggtagtggtggtagcacagactacgcagactccgtgaagggccggttcaccatctccagagacaattccaagaacacgctgtatctgcaaatgaacagcctgagagccgaggacacggccgtatattactgtgcgaaagacgggttgcggtactacggtatggacgtctggggccaagggaccacggtcaccgtctcctca

SEQ ID NO: 8385 - DNA, 291 bp, Homo sapiens
  source 1..291: mol_type = other DNA
gcctctggttacagtttaagcaaatatggtatgagctgggtgcgacaggcccctggacagggccttgagtggatgggatgggtcggcttacacaatgatgacacacactatatacagaagctccagggcagagtcaccatgaccacagacacatccacgaacacagcctacatggaactgaggagcctgagatctgacgacacggccatatattactgtgcgagagataagggtgggagccccgatacctttgatatctggggccaagggacagtggtcatcgtctcttca

SEQ ID NO: 8386 - DNA, 291 bp, Homo sapiens
  source 1..291: mol_type = other DNA
gcttctggttacactttaagcagttatggtatgagctgggtgcgacaggcccctggacagggccttgagtggatgggatgggtcggctctcacaatgatgacacacactatatacagaagctccagggcagagtcaccatgaccacagacacatccacgagcacagcctacatggagctgaggagcctgagatctgacgacacggccatatattactgtgcgagagataagggtgggagccccgatacctttgatatctggggccaagggacagtggtcatcgtctcttca

SEQ ID NO: 8387 - DNA, 291 bp, Homo sapiens
  source 1..291: mol_type = other DNA
ccttctggttacacctttattacctacgggatcagctgggtgcgacaggcccctggacaagggcttgagtggatgggatgggtcagcgctcacactggtgaggcaaactatgcagagagcctccagggcagagtcatcatgaccacagacacatccacgagtacaatatacatggagctgaggagcctgagatctgacgacacggccgtgtattactgtgcgagagataaggggggctcgccggatacttttgatatctggggccaagggacaatggtcaccgtctcttca

SEQ ID NO: 8388 - DNA, 310 bp, Homo sapiens
  source 1..310: mol_type = other DNA
tgcagcctctggattcaccttcagtagttatgaaatgaactgggtccgccaggctccagggaaggggctggagtgggtttcatacattagtagtagtggtagtaccatatactacgcagactctgtgaagggccgattcaccatctccagagacaacgccaagaactcactgtatctgcaaatgaacagcctgagagccgaggacacggctgtttattactgtgcgggggatagtagtggttattactacgggtactactactacggtatggacgtctggggccaagggaccacggtcaccgtctcctca

SEQ ID NO: 8389 - DNA, 310 bp, Homo sapiens
  source 1..310: mol_type = other DNA
tgcagcctctggattcaccttcagtagctatagcatgaactgggtccgccaggctccagggaaggggctggagtgggtttcatacattagtagtagtagtagtaccatatactacgcagactctgtgaagggccgattcaccatctccagagacaatgccaagaactcactgtatctgcaaatgaacagcctgagagacgaggacacggctgtgtattactgtgcgggggatagtagtggttattactacggctactactactacggtatggacgtctggggccaagggaccacggtcaccgtctcctca

SEQ ID NO: 8390 - DNA, 277 bp, Homo sapiens
  source 1..277: mol_type = other DNA
tgcagactctggattcacctttactaggtattggatgaactgggtccgccaggctccagggaaggggctggagtgggtggccaacataaacgaagatggaagtcagagagactatgtgggctctgtgaagggccgattcaccatctccagagacaatgccaagggctcactgtatctgcaaatgaacagcctgagagtcgaggacacggctgtgtattactgtgcgggaggccattttgaattctggggccagggagccctggtcaccgtctcctca

SEQ ID NO: 8391 - DNA, 277 bp, Homo sapiens
  source 1..277: mol_type = other DNA
tgcagcctctggatccacctttagaagttattggatgaattgggtccgccaggctccagggaagggactggaatgggtggccaacataaacgaagatggaagtgtgattttctatgtggactctgtaaagggccgattcaccatctccagagacaacgccaagaagtcagtgtatctgcaaatgaacagcctgagagtcgaggacacggctatttattactgtgcgggaggacattttgagttctggggccagggaatgctggtcaccgtctcctca

SEQ ID NO: 8392 - DNA, 289 bp, Homo sapiens
  source 1..289: mol_type = other DNA
tgcagcctctggattcacattaagtagttactggatgtactgggtccgccaagttccagggaaggggctggtgtgggtctcatacattaataatgatgggagtaatacaaactacgcggactccgtgaagggccgattcaccttctccagagacaacgccaagaacacgctgtatctgcaaatgaacagtctgagaaccgaggacacggctgtgtattattgtgcaagagggggccacaatcacgctttggacgtctggggccaagggaccacggtcaccgtctcctca

SEQ ID NO: 8393 - DNA, 289 bp, Homo sapiens
  source 1..289: mol_type = other DNA
tgcagcctctggattcaccttgagttactactggatgtactgggtccgccaagctccagggaaggggctggtgtgggtctcacatattgatagtgatgggactactacaacctacgcggactccgtgaagggccgattcaccttctccagagacaacgccaagaacacgctgtatctgcaaatgaacagtctgagagccgaggacacggctgtatattactgtgcaagaggtggccacaaccacgctttggacgtctggggccaagggaccacggtcaccgtctcctca

SEQ ID NO: 8394 - DNA, 289 bp, Homo sapiens
  source 1..289: mol_type = other DNA
tgcagcctctggattcaccttaagtgcctattggatgtactgggtccgccaagctccagggaaggggctggtctgggtctcatatattaataatgatgggactagcacaatctacgcggactccgtgaagggccgattcaccttctccagagacaacgccaagaacacgctgtttctgcaaatgaacagtctgagagccgaggactcggctctttattattgtgcaagaggtggccacaaccacgctttggacgtctggggccaagggaccacggtcaccgtctcctca

SEQ ID NO: 8395 - DNA, 289 bp, Homo sapiens
  source 1..289: mol_type = other DNA
tgcagcctctggattcaccttcagttcctattggatgtactgggtccgccaagctccagggaaggggctggtctgggtctcatatattaatagtgatgggagtagcacaatctacgcggactccgtgaagggccgattcaccttctccagagacaacgccaagaacacgctgtttctgcaaatgaacagtctgagagccgaggacacggctgtttattattgtgcaagaggtggccacaaccacgctttggacgtctggggccaagggaccacggtcaccgtctcctca

SEQ ID NO: 8396 - DNA, 289 bp, Homo sapiens
  source 1..289: mol_type = other DNA
tgcagcctctggattcaccttaagtgcctattggatgtactgggtccgccaagctccagggaaggggctggtctgggtctcatatattaataatgatgggactagcacaatctacgcggactccgtgaagggccgattcaccttctccagagacaacgccaagaacacgctgtttctgcaaatgaacagtctgagagccgaggactcggctctttattattgtgcaagaggtggccacaaccacgctttggacgtctggggccaaaggaccacggtcaccgtctcctca

SEQ ID NO: 8397 - DNA, 309 bp, Homo sapiens
  source 1..309: mol_type = other DNA
gcttctggatacaccttcagtgcctctgctgtccattgggtacgccaggcccccggacaaaggcctgagtggatggaatggatcaaaggtggcagtggagacacaaaatatttacagaagttccagggcagagtcaccatcaccagggacacatccgcgaacacagcctacatggaactgagcagtctgatctctgaagacacggctatatattattgtgtgagagatatgggtttcgatgttttgactggttcttatgttgatgcttttgatttgtggggccaagggacactggtcaccgtctcttca

SEQ ID NO: 8398 - DNA, 309 bp, Homo sapiens
  source 1..309: mol_type = other DNA
gcttctggatacaccttcagtgcctctgctgtccattgggtacgccaggcccccggacaaaggcctgagtggatgggatggatcaaaggtggcagtggagacacaaaatatttacagaagttccagggcagagtcaccatcaccagggacacatccgcgaacacagcctacatggaactgagcagtctgatctctgaagacacggctatatattattgtgtgagagatatgggtttcgatgttttgactggttcttatgttgatgcttttgatttgtggggccaagggacactggtcaccgtctcttca

SEQ ID NO: 8399 - DNA, 295 bp, Homo sapiens
  source 1..295: mol_type = other DNA
cactgtctctggtggctccatcaataaattctactggagctgggtccggcagaccccagggaagggactggagtggattgggtatatctattatagtgggagcacccaatacaacccctccctcaagagtcgggtcaccttatcagtagacacgtccaaaaaccaattctccctgacgctgacctctgtgaccgctgcggactcggccgtgtattactgtgcgagaggggcaacttctggtacgacgcggtggttcgacccctggggccagggaaccctggtcaccgtctcctca

SEQ ID NO: 8400 - DNA, 295 bp, Homo sapiens
  source 1..295: mol_type = other DNA
cactgtctctggtggctccatcagtaattactactggagttgggtccggcagcccccggggaagggactggagtggattggctatatctattacagtgggagcacccagtacaatccttccctcaagagtcgagtcaccatttcagtggacacgtccaacaaccagttctccctgaagctgacctctgtgaccgctgcggacacggccgtatattactgtgccagaggggcaacatctggtacaacgagatggttcgacccctggggccagggaaccctggtcaccgtctcctca

SEQ ID NO: 8401 - DNA, 292 bp, Homo sapiens
  source 1..292: mol_type = other DNA
tgtaggctctggattcacctttggcaggtctgccatgacctgggtccgccaggctccagggaaggggctggagtgggtctcacgtattagtgacagtggtggtgaaacatactacgcagactccgtgaagggccggttcaccgtctccagagacaattccaaggacacgctctatctgcagatgcacagcctgagagccgaggacacggccatgtatttctgtgcgaaggatcactatactaccagtctcggggactactggggccagggagccctggtcaccgtctcctca

SEQ ID NO: 8402 - DNA, 289 bp, Homo sapiens
  source 1..289: mol_type = other DNA
tgcagcctctggattcacctttggcaacaatgccatgacctgggtccgccaggctccagggaaggggctggagtgggtctcacgtatcggtggtggtgatgagacacactacgcagactccgtgaagggccgcttcaccatctccagagacaattccaagagtatggtgtatctgcaaatgaacagcctgacagccgaggacacggccgtatatttctgtgcgaaagatcactataccacttcccttggggactactggggccagggaaccctggtcatcgtctcctca

SEQ ID NO: 8403 - DNA, 289 bp, Homo sapiens
  source 1..289: mol_type = other DNA
tgcagcctctggattcacctttaacaacaatgccatgacctgggtccgccaggctccagggaaggggctggagtgggtctcacgtatcggtggtggtgatgagacacactacgcagactccgtgaagggccgcttcaccatctccagagacaattccaagagcatgctgtatctgcaaatgaacagcctgacagccgaggacacggccgtctatttctgtgcgaaagatcactataccacttcccttggagactactggggccagggaaccctggtcaccgtctcctca

SEQ ID NO: 8404 - DNA, 286 bp, Homo sapiens
  source 1..286: mol_type = other DNA
tgtagcctctggattcggcttcagtggttatggtatgcactgggtacgccaggctccaggcaaggggctggagtgggtggcagttataccatttgatgaaacttatagatactacgcagactccgtgaagggccgattcaccatctccagagacaattccaagaaaacgctgtatctgcaaatgaacagcctgagacctgaggacacggctgtgtattactgtgcgagagatatacatcccggttttgactactggggccagggaaccctggtcaccgtctcctca

SEQ ID NO: 8405 - DNA, 286 bp, Homo sapiens
  source 1..286: mol_type = other DNA
tgcagcctctggattcggcttcagtggttatggtatgcactgggtacgccaggctccaggcaaggggctggagtgggtggcagttataccatttgatgaaacttatagatactacgcagactccgtgaagggccgattcaccatctccagagacaattccaagaaaacgctgtatctgcaaatgaacagcctgagacctgaggacacggctgtgtattactgtgcgagagatatacatcccggttttgactactggggccagggaaccctggtcaccgtctcctca

SEQ ID NO: 8406 - DNA, 286 bp, Homo sapiens
  source 1..286: mol_type = other DNA
tgcagcctctggattcagcttcagtggttatggtatgcactgggtacgccaggctccaggcaaggggctggagtgggtggcagttataccatttgatgagacttatagatactacgcagactccgtgaagggccgattcaccatctccagagacaattccaagaaaacgctgtatctgcaaatgaacagcctgagacctgaggacacggctgtatattactgtgcgagagatatacatcccggttttgactactggggccagggaaccctggtcaccgtctcctca

SEQ ID NO: 8407 - DNA, 286 bp, Homo sapiens
  source 1..286: mol_type = other DNA
tgcagcctctggattcagcttcagtcgctatggcatgcactgggtccgccaggctccaggcaaggggctcgagtgggtggctgtcttgccatttgatgaaagttataagtattatgcagactccgtgaagggccggttcaccgtctccagagacaattccaagaacaccctgtatctgcaaatgaacagcctgagagctgaggacacggctgtctattactgtgcgagagatatccacccggggtttgactactggggccagggaaccctggtcaccgtctcctca

SEQ ID NO: 8408 - DNA, 286 bp, Homo sapiens
  source 1..286: mol_type = other DNA
tgcagcctctggattcagcttcagtggttatggtatgcactgggtacgccaggctccaggcaaggggctggagtgggtggcagttataccatttgatgaaacttatagatactacgcagactccgtgaagggccgattcaccatctccagagacaattccaagaaaacgctgtatctgcaaatgaacagcctgagacctgaggacacggctgtgtattactgtgcgagagatatacatcccggttttgactactggggccagggaaccctggtcaccgtctcctca

SEQ ID NO: 8409 - DNA, 292 bp, Homo sapiens
  source 1..292: mol_type = other DNA
tgcagcctctggattcactttcagtgactcctacatgagctggatccgccaggctccagggaaggggctggagtgggtttcatacattagtagtagtggtagtgccaaatactacgcagactctgtgaagggccggttcaccatctcctgggacaacgccaagaagtcactgtatctgcaaatgaacagcctgagagccgacgacacggccgtgtattactgtgcgagagcaggagatggctacaattcttttgactattggggccagggaaccctggtcaccgtctcctca

SEQ ID NO: 8410 - DNA, 292 bp, Homo sapiens
  source 1..292: mol_type = other DNA
tgcagcctctggattcaccttcagtggctcctacatgagctggattcgccaggctccagggaaggggctggagtgggtttcatacattagcattggtggttctaccattttctacgcagactctgtgaagggccgattcatcgtctccagggacgacgccaagaatgcactgtatttgcaaatgaacagcctgagagccgaggacacggccgtttactattgtgcgagagccggagatggctacaattcttttgactactggggccagggaagtctggtcaccgtctcctca

SEQ ID NO: 8411 - DNA, 292 bp, Homo sapiens
  source 1..292: mol_type = other DNA
tgcagcctctggattcaccttcagttactactacatgacctggatccgccaggctccagggaaggggctggaatgggtttcatgtcttagtggtagtggtagttccaaattctacgcagactctgtgaagggccgattcaccatctccagggacaacgccaagaactcactttatctgcagatgaacagcctgagagccgaggacacggccatctattactgtgcgagagcaggagatggctacaattcctttgactactggggccagggaaccctggtcaccgtctcatca

SEQ ID NO: 8412 - DNA, 283 bp, Homo sapiens
  source 1..283: mol_type = other DNA
tacagcctctggattcaccttaagtaactactggatgcactgggtccgccaacctccaggaaaggggctggtgtgggtctcacgtattagtaatgatgagaatattataacctacgcggactccgtgaagggccgattcaccatctccagagacaacgccaagaatacggtgtatctgcaaatgagcagtctgagagccgaggacacggctgtgtattactgtgcaagatcatcgggttatgttgacttctggggccagggaactctggtcaccgtctcctca

SEQ ID NO: 8413 - DNA, 283 bp, Homo sapiens
  source 1..283: mol_type = other DNA
tgcagcctctggattcaccttcaatacctactggatgcactgggtccgccaagctccagggaaggggctggtgtgggtctcacatattaatactgatgggggtaccacaaactacgcggactccgtgaagggccgattcaccatctccagagacaacgccaagaacacggtgtatctgcaaatgaacagtctgagagccgaggacacggctgtgtattactgtgcaaggtctagtggctacgttgacttccggggccagggaaccctggtcaccgtctcctca

SEQ ID NO: 8414 - DNA, 298 bp, Homo sapiens
  source 1..298: mol_type = other DNA
cactgtctctggtggctccatcagtggttactactggagctggatccggcagcccccagggaagggactggagtggattgggtatatctattacactgggagcaccaactacaacccctccctcaagagtcgactcaccatatcagtagacacgtccaagaaccagttctccctgaaggtgagctctgtgaccgctgcggacacggccgtgtattattgtgcgagagatggacgtggatacaactatggttacggtatggacgtctggggccaagggaccacggtcaccgtctcctca

SEQ ID NO: 8415 - DNA, 298 bp, Homo sapiens
  source 1..298: mol_type = other DNA
cagtgtctctggtggctccatcaatggttaccattggagctggatccggcagcccccaggaaagggactggagtggattggctatatttatttcactgggagcaccaactacaacccctccctcaagagtcgagtcaccatatcagcagacacgtccaagaatcagatctccctgaaattgaggtctgtgaccgctgcggacacggccgtgtattactgtgcgagagatgggcgtggatacaattatggatatggtatggacgtctggggccaagggaccacggtcaccgtctcctca

SEQ ID NO: 8416 - DNA, 280 bp, Homo sapiens
  source 1..280: mol_type = other DNA
tgcagcctctggattcccctttagtaaatcttggatgagctgggtccgccaggctccagggaaggggctggagtgggtggccaacataaaccacgatggaagtgcgacatactatgtgaggtcactggagggccgattcttcatctccagagacaacgccaaaaactctttatatctgcaaatggaccgcctgagaggcgacgacacggctgtctattactgtgcgagaggtgggagctacggccactggggccagggaaccctggtcatcgtctcctca

SEQ ID NO: 8417 - DNA, 280 bp, Homo sapiens
  source 1..280: mol_type = other DNA
tgtagtctctggattcaattttagtaggtcttggatgagttgggtccgccagcctccagggaagggcctggagtgggtgggtaacataaatcaggacggaagtgagacatattatgtagactttctgaagggtcgattcatcatctccagagacaataccaagaatttactgtttttacaaatgtaccgactgagagtcgaagaatcggcggtgtattattgtgcgaggggtggcagttacggccactggggccagggaagcctggtcacagtctcctca

SEQ ID NO: 8418 - DNA, 280 bp, Homo sapiens
  source 1..280: mol_type = other DNA
tgtagtctctggattcaattttagtaggtcttggatgagttgggtccgccagcctccagggaagggcctggagtgggtgggtaacataaatcaggacggaagtgagacatattatgtagactttctgaagggtcgattcatcatctccagagacaataccaagaatttactgtttttacaaatgtaccgactgagagtcgaagattcggcggtgtattattgtgcgaggggtggcagttacggccactggggccagggaagcctggtcacagtctcctca

SEQ ID NO: 8419 - DNA, 292 bp, Homo sapiens
  source 1..292: mol_type = other DNA
tgcaggctctgggttcaccttctatggctctgctatacactgggtccgccaggcttccgggaaagggctggagtgggttggccgtattagaagcaaagctaacggatacgcgacagattatgctgcgtcggtgaagggcaggttcaccatttacagagatgattcaaagaacacggcatatctgcaaatgaacagcctgaaaaccgaggacacggccgtctattattgtactagaccttactatgataatagtggttattggggccagggaaccctggtcaccgtctcctca

SEQ ID NO: 8420 - DNA, 292 bp, Homo sapiens
  source 1..292: mol_type = other DNA
tgcagcctctgggttcatcttcagtgactctgctattcactgggtccgccaggcttccgggaaagggctggagtgggttggccgtattagaagcaaagctaacagttacgcgacaggatatgctgcgtcggtgcaaggcaggttcaccatctccagagatgagtcaaagaatacggcgtttctgcaaatgaacagcctgaaaatcgaggacacggccgtgtattattgtactagaccttattatgataatagtggttattggggccagggaaccctggtcaccgtctcctca

SEQ ID NO: 8421 - DNA, 289 bp, Homo sapiens
  source 1..289: mol_type = other DNA
tgcagcctctgggttcagcttcagtgggtctaatatgcactgggtccgccaggcttccgggaaagggctagagtggcttggtcgtattaaaaggaaagctgacaattacgcgacacaatatgctgcgtcagtggaacgcaggttcaccatctccagagatgattcaaggaacacggcgtttctgcaaatgaacagcctgcaaatcgaggacacggccgtttattattgttttagtagagattctagtggaggctactggggccagggaaccctggtcaccgtctcctca

SEQ ID NO: 8422 - DNA, 289 bp, Homo sapiens
  source 1..289: mol_type = other DNA
tggagcctctgggttcatcttcagtggctctaatatgcactgggtccgccaggcttccgggaaagggctggagtgggttggccgtattacaaggaaaagtaacaattacgcgacagaatatgctgcgtgggtgaaaggcaggttcatcatctccagagatgattcaaagagcacggcatatctgcaaatgaacagcctgcaaaccgaggacacggccgtatattactgttttagtcgcgatagtagtgggggctactggggccagggaaccctggtcaccgtctcctca

SEQ ID NO: 8423 - DNA, 289 bp, Homo sapiens
  source 1..289: mol_type = other DNA
tgcagcctctgggttcaccttcagtggctctaatatgcactgggtccgccaggcttccgggaaagggctggagtgggttggccgaattaaaagcaaagctaacaattacgcgacagagtatgctgcgtcggtgaaaggcaggttcaccatctccagagatgattcaaagaacacggcatatctgcaaatgaacagcctggaaaccgaggacacggccgtctattactgttttagtcgggatagcagtgggggctactggggccagggaaccctggtcaccgtctcctca

SEQ ID NO: 8424 - DNA, 289 bp, Homo sapiens
  source 1..289: mol_type = other DNA
tgcagcctctggattcagcttcagtggctctaatatgcactgggtccgccaggcttccgggaaagggctggagtgggttggccgtattaaaagcaaagctaaaaattacgcgacagaatatgctgcgtcgctgaaaggcaggttcgtcatctccagagatgattcaaagaacacggcatatctgcaaatgaacagcctgaaaaccgaggacacggccgtgtatttctgttttagtcgagatagcagtgggggctactggggccagggaaccctggtcaccgtctcctca

SEQ ID NO: 8425 - DNA, 289 bp, Homo sapiens
  source 1..289: mol_type = other DNA
tgcagcctctggactcaccattaatggtcatgccatacattgggtccggcaagctccagggaagggcctggagtgggtctcagccattagtttgacaattggtagaattggatatgcggactctgtgaagggccgattcatcatctccagagacgacgccaagaactccgtgtatctgcaaatgaacagtctgagacttgaggacacggccttatattattgtcttaaagatataaagccgggcggtttggacgtctggggccaagggaccacggtcaccgtctcctca

SEQ ID NO: 8426 - DNA, 289 bp, Homo sapiens
  source 1..289: mol_type = other DNA
tacagcctctgggttcacctttgatggacatgccatacactgggtccggcagactccagggaagggcctggagtgggtctcaggttttgattggaatagtggcaggatagactatggggactctgtgaagggccgattcaccgtctccagaaacaacgccaagaactccctggatctgcaaatgaacagtctgagagttgacgacacggctctgtattactgtttaaaagatattaagccgggcggtttggacgtctggggccaagggaccacggtcaccgtctcctca

SEQ ID NO: 8427 - DNA, 271 bp, Homo sapiens
  source 1..271: mol_type = other DNA
cactgtctctggtggctccatcagtagttactactggagctggatccggcagcccccagggaagggactggagtggattgggtatatctattacactgggagcaccaactacaacccctccctcaagagtcgagtcaccatatcactagacacgtccaaaaaccagttctctctgaaactgagctctgtgaccgccgcagacacggccgtgtattactgtgcgagacttccgtacgactggggccagggaaccctggtcaccgtctcctca

SEQ ID NO: 8428 - DNA, 271 bp, Homo sapiens
  source 1..271: mol_type = other DNA
cactgtctctggtggctccatcagtagtgactactggagctggatccggcagcccccagggaagggactggagtggattgggtatatctattacagtgggaccaccaactccaatccctccctcaagagtcgagtcaccatatcagtagacacgtccaagaaccagttctccctgaagctgagctctgtgaccgccgcagacacggccgtgtattactgtgcgagactcccctacgactggggccagggaaccctggtcaccgtctcctca

SEQ ID NO: 8429 - DNA, 304 bp, Homo sapiens
  source 1..304: mol_type = other DNA
tgcagcctctggattcactttcagtcacgcctggatgaattgggtccgccaggttccagggaaggggctggagtgggttggccatattaaaagtaaagctgatggtgggacaacagactccgctacacccgtgaaaggaagattcaccatctcaagagatgattcaaaagacacgctgtctctccaaatgaacagcctggaaatcgaggactcagccgtgtattactgcgccacaggagactacggttcggggagttatcccctccaacactggggccagggcaccctggtcaccgtctcttca

SEQ ID NO: 8430 - DNA, 304 bp, Homo sapiens
  source 1..304: mol_type = other DNA
tgcagcctctggattcactttcagtggcgcctggatgaactgggtccgccaggctccagggaaggggctggagtgggttggccgtattaaaagcaaaactgatggtggggcaatagactacgctgcacccgtaaaaggcagattcaccatctcaagagatgactcaaaaaacacgttgtatctgcaaatgaacagcctgaaaatcgaggacacagccgtgtatcactgtgccacaggggattatggttcggggagttaccctctccagcactggggccagggcaccctggtcaccgtctcctca

SEQ ID NO: 8431 - DNA, 307 bp, Homo sapiens
  source 1..307: mol_type = other DNA
tgcagcctctggattcacgttcagtaactatggcatgcactgggtccgccaggctccaggcaaggggctggagtgggtggcacttatattatttgatggaagtaatcaatactatgaagactccgtgaagggccgattcaccatctccagagacaattccaagaacacgctgtatctgcaaatggacagcctgagacctgaggacacgtctgtctattactgtgcgaaagagatgggcagtggctggtactactcgtactacggtatggacgtctggggcccggggaccacggtcaccgtctcctca

SEQ ID NO: 8432 - DNA, 307 bp, Homo sapiens
  source 1..307: mol_type = other DNA
tgcagcctctggattcaccttcagtaactatggcatacactgggtccgccaggctccaggcaaggggctggagtgggtggcacttatatcatttgatggcagtaagaaatattatgcagattccgtggagggccgattcaccatctccagagacaattccaagaacacggtgtatctggaaatgaacagcgtgagaactgaggacacggctgtcttttactgtgcgaaagagatgggcagtggctggtattattcttactacggtatggacgtctggggccaagggaccacggtcaccgtctcttca

SEQ ID NO: 8433 - DNA, 283 bp, Homo sapiens
  source 1..283: mol_type = other DNA
tgcagcctctggattcacctttactacctattggatgagttgggttcgccaggctccaggaaaggggctggagtgggtggccaacataaaggaagatggaagtgacatatactatgcggactctgttcagggccgattcaccatgtccagagacaacgccaagaagtcattgtatttactaatgaacagcctgagagccgaggacacggctgtttattattgtgcgaggatgggctggtacttcgatctctggggccgtggcaccctggtcactgtctcctca

SEQ ID NO: 8434 - DNA, 283 bp, Homo sapiens
  source 1..283: mol_type = other DNA
tgcagcctctggattcacctttactacctattggatgagttgggttcgccaggctccaggaaaggggctggagtgggtggccaacataaaggaagatggaagtgacaaatactatgcggactctgttcagggccgattcaccgtgtccagagacaacgccaagaagtcattgtatttactaatgaacagcctgagagccgaggacacggctgtttattattgtgcgaggatgggctggtacttcgatctctggggccgtggcaccctggtcactgtctcctca

SEQ ID NO: 8435 - DNA, 283 bp, Homo sapiens
  source 1..283: mol_type = other DNA
tgcagcctctggattcacctttagtacctattggatgagttgggtccgccaggctccagggaaggggctggagtgggtggccaaaataaaggcagatggaagtgatagatactatgtggactccgtgaagggccgattcaccatctccagagacaacgccaggaactcactatatctgcaaatgagtagcctgagacccgaggacacggctgtgtatttctgtgcgagaatggggtggtacttcgatctctggggccgtggcaccctggtcactgtctccgca

SEQ ID NO: 8436 - DNA, 283 bp, Homo sapiens; identical to SEQ ID NO: 8435
  source 1..283: mol_type = other DNA

SEQ ID NO: 8437 - DNA, 283 bp, Homo sapiens
  source 1..283: mol_type = other DNA
tgcagcctctggattcacttttagaacctattggatgagctgggtccgccaggctccagggacggggctggagtgggtggccaaaataaaggcagatggaagtgataaatactatgtggactccgtgaagggccgattcaccatctccagagacaacgccaggaactcactgtatctgcaagtgagcagcctgagacccgaggacacggctgtgtatttctgtgcgagaatgggatggtacttcgatctctggggccgtggcaccctggtcactgtctccgca

SEQ ID NO: 8438 - DNA, 283 bp, Homo sapiens
  source 1..283: mol_type = other DNA
tgcagcctctggattcacctttagtacctattggatgagctgggtccgccaggctccaggaaaggggctggagtgggtggccagcataaaggcagatggaagtgacatgtactatgcggactctgttcagggccgattcaccatgtccagagacaacgccaagaagtcattgtatttactaatgaatagcctgagagccgaggacaccgctgtttattattgtgcgaggatgggctggtacttcgatctctggggccggggcaccctggtcagtgtctcttca

SEQ ID NO: 8439 - DNA, 286 bp, Homo sapiens
  source 1..286: mol_type = other DNA
tgcagcgtctggattcaccttcagtgactactacatgacctggatccgccaggctccagggaaggggctggaatgggtttcatacattagtactaccagtggtggtgccacaggcttcgcagactctgtgaggggccgattcaccatctccagggacgacgccaagaattcactgtatctgcagatgaacaacctgagagccgaggacacggccgtgtattactgtgcgagaggagcaagtgactccgactactggggccagggaaccctggtcaccgtctcctca

SEQ ID NO: 8440 - DNA, 283 bp, Homo sapiens
  source 1..283: mol_type = other DNA
tgcagcctctggattcaccttcagtgactactacatgagctggatccgccaggctccagggaaggggctggagtgggtttcatacattagtactagtgatagtgccatatactacgcagactctgtggagggccgattcaccatctccagggacaacgccaagaactcactgtatctgcaaatgaacagcctgagagccgaggacacggccgtatattactgtgcgagaggggcctcggatagtgactactggggccagggaaccctggtcaccgtctcctca

SEQ ID NO: 8441 - DNA, 292 bp, Homo sapiens
  source 1..292: mol_type = other DNA
tgtagcctctggattcaccttcacttcctatgctatgcactgggtccgccaggctccaggcaaggggctggagtgggtggcagttatctcatttgatggaaataataaatattatgcagactccgtgaagggccgattcaccatctccagagacaattccaagaacacactgtatctggagatgagcagcctgagagctgaggacacgggtctctattactgtgcgcgatcgggtaactattacccccctttgggctactggggccagggaaccctggtcaccgtctcctca

SEQ ID NO: 8442 - DNA, 292 bp, Homo sapiens
  source 1..292: mol_type = other DNA
tgcagcctctggattcaccttcagcaactatgctttccactgggtccgccaggctccaggcaaggggctggagtgggtggcagttatttcgtttgatggaagtcacacatactacgcagagtccgtgaagggccgattcaccatctccagagacaattccaagaatacactgtatgtgcaaatgaatagcctgagacctgaggacgcggctgtctatttctgtgcgagaagtggcaattactatcccccccttggctactggggccagggaaccctggtcaccgtctcctca

SEQ ID NO: 8443 - DNA, 292 bp, Homo sapiens
  source 1..292: mol_type = other DNA
tgcagcctctggattcaccttcagtagctatgctatgcactgggtccgccagggtccaggcaaggggctggagtgggtggcagtaatatcatttgatggagctaataaatactacgcagactacctgaagggccgattcaccatctccagagacaattccaagaacaccttgtctctgcaaatcaacggcctgagagctgacgacacggctgtgtattactgtgcgagaagtgggaattactaccccccccttggctactggggcctgggaaccctggtcaccgtctcctca

SEQ ID NO: 8444 - DNA, 289 bp, Homo sapiens
  source 1..289: mol_type = other DNA
tgcagcctctggattcacctttagatcttattggatggcttgggtccgccaggctccagggaaggggctggagtgggtggccaacacaaatccagatgaaaccgagaaagattatgtggactctgtgaagggccgattcaccgtctccagagacaacgccaagaacttagtgcttctacaaatgaacagcctgagagccgaggacacggctgtctattactgtgtgagagaccgtggctggtctacgtatgactactggggccagggaaccctggccaccgtctcctca

SEQ ID NO: 8445 - DNA, 289 bp, Homo sapiens
  source 1..289: mol_type = other DNA
tgcagcctctggattcacctttaggacctattggatgagctgggtccggcaggctccagggaaggggctggagtgggtggccaacataagggaagatggaggtgagataaactatgtggactctgtgaggggccgattcagcatctccagagacaacgccaagaattcagtggacttacaaatgaacagcctgagagccgaggacacggctgtgtattattgtgtgagagatcgtgggtggtccacttatgactactggggccagggaaccctgctcaccgtctcctca

SEQ ID NO: 8446 - DNA, 310 bp, Homo sapiens
  source 1..310: mol_type = other DNA
ctctgtctctggtggctccatcagcagaagtagttaccactggggctggatccgccagcccccagggaaggggctggagtggattgggagtatctattatagtgggagcacctactacaacccgtccctcaagagtcgagtcaccatatccgtagacacgtccaagaaccagttctccctgaagctgagctctgtgaccgccgcagacacggctgtgtattactgtgcgagacattattgtagtggtgatacctgctactccaactactttgactactggggccagggaaccctggtcaccgtctcctca

SEQ ID NO: 8447 - DNA, 310 bp, Homo sapiens
  source 1..310: mol_type = other DNA
cactgtctcaggtggctccatcagtagtagaagttaccactggggctggatccgccagcccccaggcaaggggctggagtggattgggagtatctattatagtgggagcacctactatagcccgtccctcaacagtcgagtcaccatatccgtagacacgtccaagaagcagttctccctgaaagtgaggtctgtgaccgccgcagacacggctgtatattactgtgcgagacattattgtagtggtgatacctgctactccaactactttgactactggggccagggaaccctggtcaccgtctcctca

SEQ ID NO: 8448 - DNA, 310 bp, Homo sapiens
  source 1..310: mol_type = other DNA
cactgtctcaggtggctccatcagtagtagaagttaccactggggctggatccgccagcccccaggcaaggggctggagtggattgggagtatctattatagtgggagcacctactatagcccgtccctcaacagtcgagtcaccatatccgtagacacgtccaagaagcagttctccctgaaagtgaggtctgtgaccgccgcagacacggctgtatattactgtgcgagacattattgtagtggcgatacctgctactccaactactttgactactggggccagggaaccctggtcaccgtctcctca

SEQ ID NO: 8449 - DNA, 310 bp, Homo sapiens
  source 1..310: mol_type = other DNA
ttcaggctctggattcaccttcagtgaacactacatggactgggtccgccaggctccaggggcggggctggagtgggttggccgtagtagagacaatgttaacagttataggccagaatacgccgcgtctgtgaaaggcagactcaccatctcaagagatgattctggcaactctatgtttctgcaaatcaacgccctgagagcggaggacacagccgtttattattgtactaggggcgggacggagactacggggtactacgaccctatggacgtctggggccaaggaaccacggtcaccgtctcctca

SEQ ID NO: 8450 - DNA, 310 bp, Homo sapiens
  source 1..310: mol_type = other DNA
tgcagcctctggattcaccttcagtgaccactacatggactgggtccgccaggctccagggaagggactggagtgggttggccgtggtagaaacaaagctaacaggtacaccacagaatacgccgcgtcggtgaaaggcagattcaccatctccagagatgattcaaagaactcactgtatctgcaactgaacggcctgaaaaccgaggacacggccgtatattattgtactagaggaggtacggagactaccgggtactacgatcctatggacgtctggggccaagggaccacggtcaccgtctcatca

SEQ ID NO: 8451 - DNA, 310 bp, Homo sapiens
  source 1..310: mol_type = other DNA
tgcaggctctggattctccttcagtgaccactacatggactgggtccgccaggctccagggaaggggctggagtgggttggccgtgctagaaacaaagctaaccattacaccccagaatacgccgcgtctgtgaaaggcagattctccatttcaagagatgattcaaagaactcaatttttctgcaaatgaacagcctgagagtcgaggacacggccgtatattattgcactagagggggaacagagactactggctactacgaccctatggacgtctggggccaagggaccacggtcaccgtctcctca

SEQ ID NO: 8452 - DNA, 285 bp, Homo sapiens
  source 1..285: mol_type = other DNA
gcatgtgggtacaacttcagcaattactttttccactgggtgcgacaggcccctgggcaagggcttgaatggatgggactaatccaccctgatggtaggacaagttatgcacagaagttccaggacagagtcagcatgaccagggacacgtccacgagcacggcctatctggaactgatcagcctgacatctgaagacacggccgtctattattgtgtgagagagggagatgactacaagtactttgactactggggccagggaaccctggtcaccgtctcctca

SEQ ID NO: 8453 - DNA, 288 bp, Homo sapiens
  source 1..288: mol_type = other DNA
acatctggatacagcctcatgaggtactatatgcactgggtgcgacaggcccctggagaaggccttgagtggatgggattaatccaccctagcggtgatgacacaagctacgcacagaagttccagggcagattcacagtgaccagggacacgtccacgagtacagtctacatggaactgagcggcctgacatctgaggacacggccatatatcactgtgtgagagaaggagatgactacaagtactttgactactggggccagggaaccctagtcaccgtctcctca

SEQ ID NO: 8454 - DNA, 286 bp, Homo sapiens
  source 1..286: mol_type = other DNA
tgcagcctcaggattcccgtttagtgacgtgtggatgagctgggtccgccaggcccccgggaaggggctggaatgggtggccagcataaacggcgatggaagtgcgcagcattatgtggactctgtgaagggccgagtcaccatctccagagacaacgccaagacctcggtgtatctccaaatgaacagcctgagagtggaggacacggctgtgtattattgtacgagaggaggtggctgggaccaggactactggggccagggaacactggtcaccgtctcctca

SEQ ID NO: 8455 - DNA, 286 bp, Homo sapiens
  source 1..286: mol_type = other DNA
tgcagcctctggattcacctttacgacttactggatgacctggatccgccaggctccagggaaggggctggagtgggtggccgtcgtcaagcgagatggaagtgacaaatactatgtggactctgtgaagggccgcttcaccatctccagagacaacaccaaaaactctctctatctacaaatggacagcctgagagtcgaggacacggctgtatattactgtacgagagggggcggctgggaccaggactattggggccagggaaccctggtcaccgtctcctca

SEQ ID NO: 8456 - DNA, 295 bp, Homo sapiens
  source 1..295: mol_type = other DNA
tgcagcctctggattcactttcagtaacgcctggatgagctgggtccgccaggctccagggaaggggctggagtgggttggccgtattaaaagcaaaactgatggtgggacaacagactacgctgcacccgtgaaaggcagattcaccatctcaagagatgattcaaaaaacacgctgtatctgcaaatgaacagcctgaaaaccgaggacacagccgtgtattactgtaccgccgatatagtggctacgatcgttgactactggggccagggaaccctggtcaccgtctcctca

SEQ ID NO: 8457 - DNA, 295 bp, Homo sapiens
  source 1..295: mol_type = other DNA
tgcagcctctggattcactttcagtaacgcctggatgagctgggtccgccaggctccagggaaggggctggagtgggttggccgtattaaaagcaaaactgatggtgggacaacagactacgctgcacccgtgaaaggcagattcaccatctcaagagatgattcaaaaaacacgctgtatctgcaaatgaacagcctgaaaaccgaggacacagccgtgtattactgtaccgcggatatagtggctacgattgttgactactggggccagggaaccctggtcaccgtctcctca

SEQ ID NO: 8458 - DNA, 298 bp, Homo sapiens
  source 1..298: mol_type = other DNA
tgcagcctctggattcaccttcagtacctatgctgtgcactgggtccgccagggtccaggcaaggggctggagtgggtggcacttatatcatatgatggagttaataaatactacgcagactccgtgaagggccgattcaccctctccagagacaattccaagaacacgctgtatctgcaaatgaacagcctgagacctgaggacacggctgtatattactgtgcgagatcacgtagtgggtcttactactacggtatggacgtctggggccaagggaccacggtcaccgtctcttca

SEQ ID NO: 8459 - DNA, 298 bp, Homo sapiens
  source 1..298: mol_type = other DNA
tgcagcctctggattcaccttcagtagctatgctatgcactgggtccgccaggctccaggcaaggggctggagtggatggcacttatatcatatgatggcattaataaatactacgcagactccgtgaagggccgattcaccatctccagagacaattccaagaacatgctctttctgcaaacgagcaccctgagggctgaggacacggctgtgtattattgtgcgaggtcaaggagtgggagctattactacggtatggacgtctggggccaagggaccacggtcaccgtctcctca

SEQ ID NO: 8460 - DNA, 298 bp, Homo sapiens
  source 1..298: mol_type = other DNA
tgcagcctctggattcaccttcagtacctatgctttccactgggtccgccaggctccagtcaaggggctggagtgggtggcacttatatcttatgatggaaataatcaatactacgcagactccgtgaggggccgattcaccatctccagagacaattccaagaacacgctgtatctgcaaatgaacagcctgagacctgaggacacggctgtgtattattgtgcgagatcgcggagtgggagctactactacggtatggacgtctggggccaagggaccacggtcaccgtctcctca

SEQ ID NO: 8461 - DNA, 298 bp, Homo sapiens
  source 1..298: mol_type = other DNA
tgcagcctctggattcaccttcagtacctacgctatgcactgggtccgccaggctccaggcaagggcccgcagtgggtggcacttatttcatatgatgcctctaataaattctacgcagactccgtgaagggccgaatcaccatctccagagacaattccaagaacacgctgtatctgcaaatgcacagcctgagagctgaggacacggctgtgtattactgtgcgagatcgcgaagtggttcctactactacggtatggacgtctggggccaagggatcacggtcaccgtctccaca

SEQ ID NO: 8462 - DNA, 286 bp, Homo sapiens
  source 1..286: mol_type = other DNA
tgcagcctctggattcaccttcagcacccatggcatgacctgggtccgccaggctccaggcaaggggctggagtgggcggcacttataatacatgatggaagtaagcaatattattcagactccgtgaagggccgattcaccatctccagagacaatgccaagaacactctgtatctgcaaatgaacagcctgagagctgaggacacggctgtatattactgtgcgaggggcggtgacaacacctttgactattggggtcagggaaccctggtcaccgtctcctca

SEQ ID NO: 8463 - DNA, 286 bp, Homo sapiens
  source 1..286: mol_type = other DNA
tgcagcctctggattcaccttcagtagctatggcatgctctgggtccgccaggctccaggcaaggggctggagtgggtggcacttatatcatatgatggaagtaataaatactatgcagactccgtgaagggccgattcaccatctccagagacaattccaagaacacgctgtatctgcaaatgaacagcctgagagctgaggacacggctgtgtattactgtgcgagaggcggtgataacacctttgactactggggccagggaaccctgctcaccgtctcctca

SEQ ID NO: 8464 - DNA, 289 bp, Homo sapiens
  source 1..289: mol_type = other DNA
tgcagcctccggattcgcccttggtcgcaatgccatgagctgggtccgccaggttcctgggaagggtctggagtgcgtcgcaggtattggaaacaccgatgacgacatacactatctagactctgtcaacggccggttcaccatctctagagacccttccaagaacatggtgtatttgcacatgaccagcctgagacccgaggacacggcccgatattattgtgccaaagacatactttggtggtcctttgaccactggggccagggagtcctggtcaccgtctcctca

SEQ ID NO: 8465 - DNA, 286 bp, Homo sapiens
  source 1..286: mol_type = other DNA
tgcagcctctggattcagcttcagtaccaatgccatgacctgggtccgccaggctccaggaaaggggctggagtgggtctcaggtattggtggtgatgggaacacactctacgcagactccgtgaagggccggttcaccatctccagagacacttccaagagcacgctgtatctgcaaatgaacagcctgagagccgatgacacggccgtatattactgtgcgaaagacatattgtggtggagctttgaccactggggccagggaaccctggtcagcgtctcgtca

SEQ ID NO: 8466 - DNA, 286 bp, Homo sapiens
  source 1..286: mol_type = other DNA
tgcagcctctggattcaacttcggtcccaatgccatggcctgggtccgccaggttccaggaaaggggctggagtgggtctcaggtattggtggtgatgggaacacactctacgcagactccgtgaggggccgattcaccatctccagagacacttccaagagcacgctgtatctgcaaatgaacagcctgagagccgatgacacggccgtatattactgtgcgaaagacatattgtggtggagctttgaccactggggccagggaaccctggtcagcgtctcatca

SEQ ID NO: 8467 - DNA, 286 bp, Homo sapiens
  source 1..286: mol_type = other DNA
tgcagcctctggattcacctttagcaactatgacatgagctggatccgccaggctccaggaaaggggctggagtgggtctcagctattactggtgatggtgatatcacattctacgcgggctccgtggagggccgattcaccatctccagagacaattccagggacacggtgtatctgcaaatgagcagcctgagagccgaggacacggccgtctattactgtgcgaaacaccaggtgcggactcatgactactggggccagggaaccctggtcaccgtctcctca

SEQ ID NO: 8468 - DNA, 286 bp, Homo sapiens
  source 1..286: mol_type = other DNA
tgcagcctctggattcacctttagcaactatgacatgagctggatccgccaggctcccggaaaggggctggaatgggtctcagctattactggtagtggtgatatcacattctacgcaggctccgtgaagggccgcttcaccatctccagagacaattctaggaacacggtatatctgcaaatgaacagcctgagagccgaggacacggccgtctatttctgtgcgaaacaccaggtgcggactcatgactactggggccagggaaccctggtcaccgtctcctca

SEQ ID NO: 8469 - DNA, 286 bp, Homo sapiens
  source 1..286: mol_type = other DNA
tgcagcctctggattcacctttagcaactatgacatgagctgggtccgccaggctccagggaaggggctggagtgggtctcagctattactagtaatggtggtaccacatactacgcagactccgtgaagggccgcttcaccatctccagagacaattccaagaacacgctgtatatgcaaatgaacagcctgagagtcgaggacacggccgtatattattgtgcgaaacatcaagtaaggactcatgactactggggccagggaaccctggtcaccgtctcctca

SEQ ID NO: 8470 - DNA, 289 bp, Homo sapiens
  source 1..289: mol_type = other DNA
tgcagcctctggattcagcattggtcgcaatgccatgagctgggtccgccaggttcctgggaagggtctggagtgcgtcgcaggtattggaaataccgatgacgacatacactatgcagactctgtgaagggccggttcaccatctctagagacgcttccgagaacacggtgtttttgcaaatgaccagcctgagagccgaggacacggccagatattactgtgcgaaagacatactttggtggtcctttgactactggggccagggagtcctggtcaccgtctcctca

SEQ ID NO: 8471 - DNA, 286 bp, Homo sapiens
  source 1..286: mol_type = other DNA
tgcagcctctggattcacctttagccccaatgccatgagctgggtccgccagactccagagaaggggctggagtgggtctcaggtattggtggtgacggtcgcacacactacacagattccgtgaagggccggttcctcatctccagagacaattccaagaacacactgtatctgcaaatgaacagcctgagagccgaggacacgggcgtatattactgtgcgaaagatattctatggtggtcctttgactactggggccagggaaccctggtcaccgtctcctca

SEQ ID NO: 8472 - DNA, 295 bp, Homo sapiens
  source 1..295: mol_type = other DNA
tgcagcctctggattcaccttcagtagctactggatgcactgggtccgccaagctccagggaaggggctggtgtgggtctcacgtattaatagtgatgggagtagcacaagctacgcggcctccgtgaagggccgattcaccatctccagagacaacgccgagaacacgctgtatctgcaaatgaacagtctgagagccgaggacacggctgtgtattactgtgcaagaggggcggtggtgactgctaactggttcgacccctggggccagggaaccctggtcaccgtctcctca

SEQ ID NO: 8473 - DNA, 295 bp, Homo sapiens
  source 1..295: mol_type = other DNA
tgtagcctctggattcagcttcagtacctactggatgcactgggtccgccaagctccaggggaggggctggtgtgggtctcacggattcttagtgatggcagtagcacaatgtacgcggactccgtgaagggccgattcaccatctccagagacaactccaagaacacgctgtatctgcaaatgcacagtctgggagccgaggacacggctgtgtattactgtgcaagaggggcggtggtaaccgcgaactggttcgacccctggggccagggaaccctggtcaccgtctcctca

SEQ ID NO: 8474 - DNA, 289 bp, Homo sapiens
  source 1..289: mol_type = other DNA
tgtagcctctggatttagcattgttggtcacgccatgcactgggtccgacaaggtccagagaagggcctggagtgggtctcaggtattgattggactagtactcacataggctacgcggactctgtgaagggccgattcaccgtctctagagacaacgccaagaactccctgtttttgcaaatgaacagtctgagagttgaggatacggccttctatttctgcataaaagatattaatccggggggtgcggacgtctggggccaagggaccacggtcaccgtctcctca

SEQ ID NO: 8475 - DNA, 289 bp, Homo sapiens
  source 1..289: mol_type = other DNA
tgtaacctctggattcacctcttatgattatgccatgcactgggtccggcaagctccagggaagggcctggagtgggtctcaggtatttactgggctagtaatagaatagactatgcggactctgtgaagggccgattcaccatctccagagacaacgccaggaactccctgtatctgcaaatgaacagtctgagaggtgaagacacggccttatatttctgtataaaagacattaacccggggggtgcggacgtctggggccaagggaccacggtcatcgtctcctca

SEQ ID NO: 8476 - DNA, 289 bp, Homo sapiens
  source 1..289: mol_type = other DNA
tgcagtctctggattcacctttagtacgtcttggatggactgggtccgccaggctccagggaaggggctggagtgggtggccatcataaagccagatggaggtgtaaaaaactatttggactctgtgaagggccgattcaccatctccagagacaacgccaagaactcaatgtatctggaaatgaacagcctgagagccgaggacacggctgtttattactgtgtgagggatccagcctggggtgcttttgatgtctggggccaagggaccacggtcaccgtctcttca

SEQ ID NO: 8477 - DNA, 289 bp, Homo sapiens
  source 1..289: mol_type = other DNA
tgcagcctctggatataccttcagtaataattggatgcactgggtccgccaggccccagggaaggggctggagggggtggccatcataaatcaagatggaagtcaaacaaagtacgtggactcggtgaggggccgattcaccatatccagagacaacgccaaggactcactatatttgcaaatgaacagcctgagagtcgacgacacggctgtttatttctgtgtgagagatcctgcatggggtgcttttgatgtctggggccaagggacaaaggtctccgtctcctca

SEQ ID NO: 8478 - DNA, 289 bp, Homo sapiens
  source 1..289: mol_type = other DNA
tgcagcctctggatataccttcagtaatcattggatgcactgggtccgccaggccccagggaaggggctggagggggtggccatgatgaatcaagatggaagtcaaacatactacgtggactcggtgaggggccgattcaccatatccagagacaacgccaaggactcactatatttgcagatgaacagcctgagagtcgacgacacggctgtttatttctgtgtgagagatcctgcatggggtgcttttgatgtctggggccaagggacacaggtctccgtctcctca

SEQ ID NO: 8479 - DNA, 280 bp, Homo sapiens
  source 1..280: mol_type = other DNA
tgcagcctctggattcacctttagcaactatgccatgagctgggtccgccaggctccagggaaggggctggagtgggtctcagctattagtggtagtggtggtagcacatactacgcagactccgtgaagggccggttcaccatgtccagagacaattccaagaacacgctgtttctgcaaatgagcagcctgagagccgaggacacggccgtatattactgtacgaaagatgtccgcgggtcatactgggcccagggaaccctggtcaccgtctcctca

SEQ ID NO: 8480 - DNA, 283 bp, Homo sapiens
  source 1..283: mol_type = other DNA
tgcagcctctggattcacctttaccacctatgccatgagctgggtccgccaggctccagggaagggactggagtgggtctcatcagctattggtggtagtggtggtaccacatactacgcagactccgtgaagggccggttcaccatctccagagacaattccaagaacacgctgtatctgcaaatgaacagcctgagagccgaggacacggccatttatttttgtacgaaagatgtacgtgggagctactggggtgagggaaccctggtcaccgtctcctca

SEQ ID NO: 8481 - DNA, 296 bp, Homo sapiens
  source 1..296: mol_type = other DNA
ccatctccggggacagtgtctttggcaacaatggtgcttggaactggatcaggcagtccccatcgagaggccttgagtggctgggaaggacatactacagctccaagtggtattatgattatgcagaatctgtgaaaagtcgaataaccatcaacccagacacatccaagaaccagttctccctgcagctgaactctgtgactcccgaggacacggctgtctattactgtgcaagagggtggatacgcttcggatttgactactggggccagggaaccctggtcaccgtctcctca

SEQ ID NO: 8482 - DNA, 296 bp, Homo sapiens
  source 1..296: mol_type = other DNA
ccatctccggggacagtgtctctagtaacagtgctgcttggaactggatcaggcagtccccatcgagaggccttgagtggctgggaaggacatactacaactccaagtggtataatgattatgcagtctctgtgaaaagtcgaataaccatcaacccagacacatccaagaaccagttctccctgcaactgaactctgtgactcccgaggacacggctgtgtacttctgtgcaagagggtggatacggttcggctttgactactggggcctgggaaccctggtcaccgtctcctca

SEQ ID NO: 8483 - DNA, 296 bp, Homo sapiens
  source 1..296: mol_type = other DNA
ccatctccggggacagtgtctctagtaacagtggtgcttggaactggatcaggcagtccccatcgagaggccttgagtggctgggaaggacatactacaactccaagtggtataatgattatgcagtctctgtgaaaagtcgaataaccatcaacccagacacatccaagaaccagttctccctgcagctgaactctgtgactcccgaggacacggctgtatacttctgtgcaagagggtggatacggttcggctttgactactggggcctgggaaccctggtcaccgtctcctca

SEQ ID NO: 8484 - DNA, 296 bp, Homo sapiens; identical to SEQ ID NO: 8482
  source 1..296: mol_type = other DNA

SEQ ID NO: 8485 - DNA, 296 bp, Homo sapiens
  source 1..296: mol_type = other DNA
ccatctccggggacagtgtctctagtaacagtgctgcttggaactggatcaggcagtccccatcgagaggccttgagtggctgggaaggacatactacaactccaagtggtataatgattatgcagtctctgtgaaaagtcgaataaccatcaacccagacacatccaagaaccagttctccctgcagctgaactctgtgactcccgaggacacggctgtgtacttctgtgcaagagggtggatacggttcggctttgactactggggcctgggaaccctggtcaccgtctcctca

SEQ ID NO: 8486 - DNA, 289 bp, Homo sapiens
  source 1..289: mol_type = other DNA
tgcagcctttggattcagcttcagttcttatgaaatgaattggattcgccaggctccaggaaaggggctggagtggatttcatacactagtgccaccgggagtcccaaggactacgcagactctgtgaagggccgcttcaccatctccagagacaacgccaagaactcactatatctgcaaatgagcagcctgagagtcgaagacacggctgtttattactgtgcgagagaaatgaggactagcggctttgactattggggccagggagccgtggtcaccgtctcctca

SEQ ID NO: 8487 - DNA, 289 bp, Homo sapiens
  source 1..289: mol_type = other DNA
tgcagcctctaaattcaccttcagtaacgttgaaatgaactgggtccgccaggctccagggaaggggctggagtgggtttcatacattaatactattagtaatgtcatggactacgcagactctgtgaagggccgattcaccatctccagagacaacgccaagaactcactgtatctgcaaatgcacagcctgagagccgaggacacggctgtttattactgtgcgagagaaatgcgcacctccggctttgactactggggccagggaaccctggtcaccgtctcctca

SEQ ID NO: 8488 - DNA, 289 bp, Homo sapiens
  source 1..289: mol_type = other DNA
tgcagcctctaaattcaccttcagtaactttgaaatgaactgggtccgccaggctccagggaaggggctggagtgggtttcatacattaatactattagtaatgtcatggactacgcagactctgtgaagggccgattcaccatctccagagacaacgccaagaactcactgtatctgcaaatgcacagcctgagagccgaggacacggctgtttattactgtgcgagagaaatgcgcacctccggctttgactactggggccagggaaccctggtcaccgtctcctca

SEQ ID NO: 8489 - DNA, 289 bp, Homo sapiens
  source 1..289: mol_type = other DNA
tgcagcctctggcttcacgttcagtacttatgaaataaactgggtccgccaggctccagggaagggactggagtgggtttcatatattaattctgatagtagtagaatagactatgcagcccctgtgaagggccgattcaccctctccagagacaacgccaagtactcactgtatctgcagatgaacagcctgagagccgaggacacggctgtttattactgtgccagagaaatgcgcacctccggctttgactactggggccagggaaccctggtcaccgtctcctca

SEQ ID NO: 8490 - DNA, 276 bp, Homo sapiens
  source 1..276: mol_type = other DNA
acttctggttacacctttgccagctatgggatcagttgggtgcgacaggcccctggacaagggcttgagtgggtgggatgggtcagcggtaacaatgataacacaaactatgcacagaaattccaggacagagtcaccatgaccacagacacatccacgagcacagcctacatggagctgaggagcctgagatctgacgacacggccgtatattactgtgttagagcccttccttttgactactggggccagggaaccctggtcaccgtctcctca

SEQ ID NO: 8491 - DNA, 276 bp, Homo sapiens
  source 1..276: mol_type = other DNA
tcttctggttacacctttaccagctatgatatcagttgggtacggcaggcccctggacaagggcttgagtggatgggatggatcagcgctaataatggtaacacaaactatgcacagaagttccagggcagagtcaccatgaccacagacacatccacgagcacagcctacatggagctgaggagcctgagctctgacgacacggccgtgtattactgtgtgcgggcactcccctttgactactggggccagggaacccaggtcaccgtctcctca

SEQ ID NO: 8492 - DNA, 289 bp, Homo sapiens
  source 1..289: mol_type = other DNA
tgcagcctctggattcacctttagtacctattggatgagttgggtccgccaggctccagggaaggggctggagtggatggccaacataaggcaagatggaagtgaggaatactatgtggactctgtgaagggccgattcaccatctccagagacaacgccaagaactcactgtatctgcaaatgaacagcctgagagccgaggacacggccatgtattactgtgcgaggtccccaagcagcaccttttatagttactggggccagggaaccctggtcaccgtctcctca

SEQ ID NO: 8493 - DNA, 289 bp, Homo sapiens
  source 1..289: mol_type = other DNA
tgcagcctctggattcacctttagtacctattggatgagttgggtccgccaggctccagggaaggggctggagtgggtggccaacataaggcaagatggaagtgaggaatactatgtggactctgtgaagggccgattcaccatctccagagacaacgccaagaactcactgtatctgcaaatgaacagcctgagagccgaggacacggccatgtattactgtgcgaggtccccaagcagcaccttttatagttactggggccagggaaccctggtcaccgtctcctca

SEQ ID NO: 8494 - DNA, 289 bp, Homo sapiens
  source 1..289: mol_type = other DNA
tgcagcctctggattcacttttagtagttattggatgagctgggtccgccaggctccagggaaggggctggagtgggtggccaacataaagcaagatggaagtgagacatactatgtggactctgtgaagggccgattcaccatctccagggacaacgccaaggattcactgtatcttcaaatgaacagcctgagagccgaggacacggccgtgtattactgtgcgaggtccccaagcagcaccttttatagttactggggccagggaaccctggtcaccgtctcctca

SEQ ID NO: 8495 - DNA, 289 bp, Homo sapiens
  source 1..289: mol_type = other DNA
tgcagcctctggattcacctttagtagctattggatgagttgggtccgccaggctccagggaaggggctggagtgggtggccaacataaggcaagatggaagtgaggaatactatgtggactctgtgaagggccgattcaccatctccagagacaacgccaagaactcactgtatctgcaaatgaacagcctgagagccgaggacacggccatgtattactgtgcgaggtccccaagcagcaccttttatagttactggggccagggaaccctggtcaccgtctcctca

SEQ ID NO: 8496 - DNA, 289 bp, Homo sapiens
  source 1..289: mol_type = other DNA
tgcagcctctggattcacctttagtagttattggatgagctgggtccgccaggctccagggaaggggctggagtgggtggccaacataaagcaagatggaagtgagacatactatgtggactctgtgaagggccgattcaccatctccagggacaacgccaaggattcactgtatcttcaaatgaacagcctgagagccgaggacacggccgtgtattactgtgcgaggtccccaagcagcaccttttatagttactggggccagggaaccctggtcaccgtctcctca

SEQ ID NO: 8497 - DNA, 289 bp, Homo sapiens
  source 1..289: mol_type = other DNA
tgcagcctctggattcacctttagtagttattggatgagctgggtccgccaggctccagggaaggggctggagtgggtggccaacataaaacaagatggaagtgagacatactatgtggactctgtgaagggccgattcaccatctccagggacaacgccaaggattcactgtatcttcaaatgaacagcctgagagccgaggacacggccgtgtattactgtgcgaggtccccaagcagcaccttttatagttactggggccagggaaccctggtcaccgtctcctca

SEQ ID NO: 8498 - DNA, 289 bp, Homo sapiens
  source 1..289: mol_type = other DNA
tgcagcctctggattcacctttagtacctattggatgagttgggtccgccaggctccagggaaggggctggagtgggtggccaacataaggcaagatggaagtgaggaatactatgtggactctgtgaagggccgattcaccatctccagagacaacgccaagaactcactgtatctgcaaatgaacagcctgagagccgaggacacggccatgtattactgtgcgaggtccccaagtagcaccttttatagttactggggccagggaaccctggtcaccgtctcctca

SEQ ID NO: 8499 - DNA, 289 bp, Homo sapiens
  source 1..289: mol_type = other DNA
tgcagcctctggattcacctttagtagctattggatgagttgggtccgccaggctccagggaaggggctggagtgggtggccaacataaggcaagatggaagtgaggaatactatgtggactctgtgaagggccgattcaccatctccagagacaacgccaagaactcactgtatctgcgaatgaacagcctgagagccgaggacacggccatgtattactgtgcgaggtccccaagcagcaccttttatagttactggggccagggaaccctggtcaccgtctcctca

SEQ ID NO: 8500 - DNA, 289 bp, Homo sapiens
  source 1..289: mol_type = other DNA
tgcagcctctggattcacctttagtagctattggatgagttgggtccgccaggctccagggaaggggctggagtgggtggccaacataagacaagatggaagtgaggaatactatgtggactctgtgaagggccgattcaccatctccagagacaacgccaagaactcactgtatctgcaaatgaacagcctgcgagccgaggacacggccatgtatttctgtgcgaggtccccaagcagcaccttttatagttactggggccagggaaccctggtcaccgtctcctca

SEQ ID NO: 8501 - DNA, 289 bp, Homo sapiens
  source 1..289: mol_type = other DNA
tgcagcctctggattcacctttaagagttattggatgagctgggtccgccaggctccagggaaggggctggagtgggtggccaacatcaagcaagatggaagtgagacatactatgtagactctgtgaagggccgattcaccatctccagggacaacgccaaggattcactgtatcttcaaatgaacagcctgagagccgaggacacggccgtgtattactgtgcgaggtccccaagcagcaccttttatagttactggggccagggaaccctggtcaccgtctcctca

SEQ ID NO: 8502 - DNA, 289 bp, Homo sapiens
  source 1..289: mol_type = other DNA
tgcagcctctggattcacctttagtacctattggatgagttgggtccgccaggctccagggaaggggctggagtgggtggccaatataaggcaagatggaagtgaggaatactatgtggactctgtgaagggccgattcaccatctccagagacaacgccaagaactcactgtatctgcaaatgaacagcctgagagccgaggacacggccatgtattactgtgcgaggtccccaagcagcaccttttatagttactggggccagggaaccctggtcaccgtctcctca

SEQ ID NO: 8503 - DNA, 289 bp, Homo sapiens
  source 1..289: mol_type = other DNA
tgcagcctctggattcacctttagtacctattggatgagttgggtccgccaggctccagggaaggggctggagtgggtggccaacataaggcaagatggaagtgaggaatactatgtggactctgtgaagggccgattcaccatctccagagacaacgccaagaactcactgtatctgcaaatgaacagcctgagagccgaggacacggccatgtattactgtgcgaggtccccaagcagcaccttttatagttactggggccagggaaccctggtcactgtctcctca

SEQ ID NO: 8504 - DNA, 289 bp, Homo sapiens
  source 1..289: mol_type = other DNA
tgcagcctctggattcacttttagtacctattggatgagttgggtccgccaggctccagggaaggggctggagtgggtggccaacataaggcaagatggaagtgaggaatactatgtggactctgtgaagggccgattcaccatctccagagacaacgccaagaactcactgtatctgcaaatgaacagcctgagagccgaggacacggccatgtattactgtgcgaggtccccaagcagcaccttttatagttactggggccagggaaccctggtcaccgtctcctca

SEQ ID NO: 8505 - DNA, 289 bp, Homo sapiens
  source 1..289: mol_type = other DNA
tgcagcctctggattcacctttagtacctattggatgagttgggtccgccaggctccagggaaggggctggagtgggtggccaacataaggcaagatggaagtgaggaatactatgtggactctgtgaagggccgactcaccatctccagagacaacgccaagaactcactgtatctgcaaatgaacagcctgagagccgaggacacggccatgtattactgtgcgaggtccccaagcagcaccttttatagttactggggccagggaaccctggtcaccgtctcctca

SEQ ID NO: 8506 - DNA, 289 bp, Homo sapiens
  source 1..289: mol_type = other DNA
tgcagcctctggattcacctttagtacctattggatgagctgggtccgccaggctccagggaaggggctggagtgggtggccaacataaggcaagatggaagtgaggaatactatgtggactctgtgaagggccgattcaccatctccagagacaacgccaagaactcactgtatctgcaaatgaacagcctgagagccgaggacacggccatgtattactgtgcgaggtccccaagcagcaccttttatagttactggggccagggaaccctggtcaccgtctcctca

SEQ ID NO: 8507 - DNA, 280 bp, Homo sapiens
  source 1..280: mol_type = other DNA
tgcagcctctggattcacctttagtaacttctggatgcactgggtccgccaagttccagggagggggctgatttgggtcgcgcgcattagcgatgatggccgtacgacaacctacgcggacttcgtggagggccgattcaccatctccagagacaacgccaggaacaagttgtatctacaaatgcacagtctgggagtcgacgacacgggtttgtacttttgtacaagagaccggcgtgggtgggactggggccagggaaccctggtcaccgtctcctca

SEQ ID NO: 8508 - DNA, 280 bp, Homo sapiens
  source 1..280: mol_type = other DNA
tgcagtctctggattccttttcagagactactggatgcactgggtccgccaaactccagggcaggggctggtttgggtcgcacgtattagtgatgatggacgcaccacaacttacgcggactccgtgaggggccgattcaccatctccagagacaacgccaagaacagactctatttgcaaatgaacagtctgagagaggaggacacggctgtttattattgtacaagagatcgcaggggctgggactggggccagggaacccaggtcaccgtctcctca

SEQ ID NO: 8509 - DNA, 280 bp, Homo sapiens
  source 1..280: mol_type = other DNA
tgaagtctctggattcactttcagtgacttctggatgcactgggttcgccaagttccagggaggggactacagtgggtcgcacgtattagtgaagatggtcgcaccacaacctacgcggactccgtgaggggccgattcaccatctccagagacaacgccaggaacaggctgtttttgcagatgaacggtgtgacagaggaggacacggctcgatattattgcacaagagatcgaaggggctgggactggggccagggaaccctggtcatcggctcctca

SEQ ID NO: 8510 - DNA, 280 bp, Homo sapiens
  source 1..280: mol_type = other DNA
tgaagtctctggattcactttcagtgacttctggatgcactgggtacgccaggttccagggaagagactggtgtgggtcgcacgtattagtgatgatggacgcaccacaacctacgcggacgccgtgaggcgccgcttcatcatctccagagacaacgccagcaacaggctgtatttgcagatgaaccgtctgagagcggaggacacggctatatattactgtacaagagatagaaggggctgggactggggccagggaacccaggtcaccgtctcgtca

SEQ ID NO: 8511 - DNA, 280 bp, Homo sapiens
  source 1..280: mol_type = other DNA
tgcagcctctggattcaccttcaacaccgactggatgcactgggtccgacaagtgccagggaagggcctggtttgggtcgcacgtattagtgaagatgggagaactacaaattacgcggagtccgtgaggggccgattcaccatttacagagacaacgccaggaacacactttatctgcaaatgaggactctgagagtcgaggacaccggtgtctattactgtacaagagatcggcgggggtgggactggggccagggaaccctggtcaccgtctcctca

SEQ ID NO: 8512 - DNA, 280 bp, Homo sapiens
  source 1..280: mol_type = other DNA
tgcagcctctggattcaccttcaataacgactggatgcactgggtccgacaagtcccagggaagggcctggtttgggtcgcacgtattagtgaagatgggagaactacagattacgcggagtccgtgaggggccgattcaccatttacagagacaacgccaggaacacactttatctgcaaatgaggactctgagagtcgaggacaccgctgtctattactgtacaagagatcggcgggggtgggactggggccagggaaccctggtcaccgtctcctca

SEQ ID NO: 8513 - DNA, 280 bp, Homo sapiens
  source 1..280: mol_type = other DNA
tgcagcctctggattcaccttcaacaccgactggatgcactgggtccgacaagtgccagggaagggcctggtttgggtcgcacgtattagtgaagatgggagaactacaaattacgcggagtccgtgaggggccgattcaccatttacagagacaacgccaggaacacactttatctgcaaatgaggactctgagagtcgaggacaccggtgtctattactgtacacgagatcggcgggggtgggactggggccagggaaccctggtcaccgtctcctca

SEQ ID NO: 8514 - DNA, 280 bp, Homo sapiens
  source 1..280: mol_type = other DNA
tgtaggttctgggttcagcttcaatagccactggatgcactgggtccgcctagctccagggaaggggctgacgtgggtctcacgtattagtgaagatggaattcacacagactacgcggacttcgtgaggggccgattcaccatgtccagagacaacgccaagaacacggtatatctgcacatgagtagtctgtggggcgaggacacggctgtctactactgcacaagagatcggagggggtgggactggggccagggaaccctggtcaccgtctcctca

SEQ ID NO: 8515 - DNA, 280 bp, Homo sapiens
  source 1..280: mol_type = other DNA
tacagcctctggattcaccttcaatacctactggatgcactgggtccgccaagctcaagggaagggcctggtgtgggtcgcacgcattagtgataatggaagacacacagactacgcgggctccgtgaagggccgattcaccatctccagagacaacgccaaggatactctgtatctgcaaatgaacagtctgagagccgaggacgcggctttatattattgtacaagagatcggcgggggtgggactggggccagggaaccctggtcaccgtctcctca

SEQ ID NO: 8516 - DNA, 280 bp, Homo sapiens
  source 1..280: mol_type = other DNA
tgcagcctctggattcaccttcaataacgactggatgcactgggtccgacaagtcccagggaagggcctggtttgggtcgcacgtattagtgaagatgggagaactacagattacgcggagtccgtgaggggccgattcaccatttacagagacaacgccaggaacacactttatctgcaaatgaggactctgagagtcgaggacaccgctgtctattattgtacaagagatcggcgggggtgggactggggccagggaaccctggtcaccgtctcctca

SEQ ID NO: 8517 - DNA, 280 bp, Homo sapiens
  source 1..280: mol_type = other DNA
tgcagtctctggattccttttcagagactactggatgcactgggtccgccaaactccagggcaggggctggcttgggtctcacgtattagtgatgatggacgcaccacaacttacgcggactccgtgaggggccgattcaccatctccagagacaacgccaagaacagactgtatttgcaaatgaacagtctgagagaggaggacacggctgtttattattgtacaagagatcgcaggggctgggactggggccagggaacccaggtcaccgtctcctca

SEQ ID NO: 8518 - DNA, 280 bp, Homo sapiens
  source 1..280: mol_type = other DNA
tgcagtctctggattccttttcagagacttctggatgcactgggtccgccaaactccagggcaggggctggtttgggtctcacgtattagtgatgatggacgcaccacaacttacgcggactccgtgaggggccgattcaccatctccagagacaacgccaggaacagactgtatttgcaaatgaacagtctgagagaggaggacacggctgtttattactgcacaagagatcgaaggggctgggactggggccagggaacccaggtcaccgtctcctca

SEQ ID NO: 8519 - DNA, 280 bp, Homo sapiens
  source 1..280: mol_type = other DNA
tgcagtctctggattccttttcagagactactggatgcactgggtccgccaaactccagggcaggggctggtttgggtctcacgtattagtgatgatggacgcaccacaacttacgcggactccgtgaggggccgattcaccatctccagagacaacgccaagaacagactgtatttgcaaatgaacagtctgagagaggaggacacggctgtttattactgtacaagagatcgaaggggctgggactggggccagggaacccaggtcaccgtctcctca

SEQ ID NO: 8520 - DNA, 280 bp, Homo sapiens
  source 1..280: mol_type = other DNA
tgcagtctctggattccttttcagagacttctggatgcactgggtccgccaaattccagggcaggggctggtctgggtctcacgtattagtgatgatggacgcaccacaacttacgcggactccgtgaggggccgattcaccatctccagagacaacgccaagaacagactgtatttgcaaatgaacagtctgagagaggaggacacggctgtttattactgtacaagagatcgaaggggctgggactggggccagggaacccaggtcaccgtctcctca

SEQ ID NO: 8521 - DNA, 280 bp, Homo sapiens
  source 1..280: mol_type = other DNA
tgaagtgtctggattcatcttcagtgacttctggatgcactgggtacgccaacttccagggaagggactggtgtgggtcgcacgtattagtgaggatggacgcaccacaacctacgcggagtccgtgaggggccgattcaccatctccagagacaccgccaggaacagactttatttggagatgagcagtctgagagaggaggacacggctgtatattattgtacaagagatcgaaggggctgggactggggccagggaaccctggtcaccgtctcctca

SEQ ID NO: 8522 - DNA, 301 bp, Homo sapiens
  source 1..301: mol_type = other DNA
tgcagcctctggattcaccttcaatatttatgctatacactgggtccgccaggctccaggcaaggggctggagtgggtggcagttatatcatctgatggaagtgttaaatactacacagagtccgtgaagggccgattcaccatctccagagacaattccaagaacacactgtatctgcaaatgaacagcctgagagttgaggacacggctgtgtattactgtgcgagagatccggtgggggctacgtcaccacgttactttgactactggggccagggaaccctggtcaccgtctcctca

SEQ ID NO: 8523 - DNA, 301 bp, Homo sapiens
  source 1..301: mol_type = other DNA
tgcagcctctggattcgcattcagtacatatacaatgcactgggtccgccaggctccaggcaaggggctggagtggttgacagttatatcatctgatggaagtcttaaattctatgcggactccgtgaggggccgaatcaccatctccagagacaattccaagaacacgttgtatctgcaaatggacaggctgagagttgacgacacggctgtgttttactgtgcgagagacccagtgggagccacgtcgccgcgatactttgactactggggccagggaaccctggtcaccgtctcctca

SEQ ID NO: 8524 - DNA, 292 bp, Homo sapiens
  source 1..292: mol_type = other DNA
tgcagcctctggatttaccttcaggacctatgcaatgcactgggtccgccaggctccaggcaaggggctggagtgggtggcatatatttcaattgacgaaagtaagaaatactatgcagactccgtgaagggccgattcgccatctccagagacaactccaagaataccctgtatctacaaatgaacagcctgagagctgaggacacggctgtgtattactgtgcgaaagacacccctgacattttgggcctggactactggggccagggcagcctggtcaccgtctcctca

SEQ ID NO: 8525 - DNA, 286 bp, Homo sapiens
  source 1..286: mol_type = other DNA
tgtagcctctggattcaccttcagtaactatgctatgcactgggtccgccaggctccaggcaagggactggagtacgtatcatatattggatatggtaatcagtactacgcagactccgtgaggggccggttcaccatctccagagacaattccaagagcacgctgtatctgcaaatgaacagcctgagacctgaggacacggctgtatattactgtgcgaaagatacgcctgacatcctgggattggactactggggccagggaaccctggtcaccgtctcctca

SEQ ID NO: 8526 - DNA, 298 bp, Homo sapiens
  source 1..298: mol_type = other DNA
tgcagcctctggattcacctttagtagaaattggatgagctgggtccggcaggctccagggaaggggctggagtgggtggccagcataaaggaagatggaagtgagacatcctatgtggactctgtgaagggccgattcaccatctccagagacaacgccaagaactcactgtctctacaaatgaacagcctgagagccgaggacacggctatgtattactgtgcgagatccccgtatagcactaggtacaactggttcggcccctggggccagggaaccctggtcaccgtctcttca

SEQ ID NO: 8527 - DNA, 298 bp, Homo sapiens
  source 1..298: mol_type = other DNA
tgcagcctctggcttcaccttcagtagcagttggatgagctgggtccgccaggctccagtgaaggggctggaatgggtggccagcataaacgaaaatggaaatgaagaatactatgtggactctgtgaagggccgattcaacatctccagagacaacgccaagaactcactgtttctgcaaatgaacagcctgagagccgaggacacggctgtgtactactgtgcgaggtctccatacagtaccagatacaactggttcggcccctggggccagggaaccctggtcaccgtctcctca

SEQ ID NO: 8528 - DNA, 298 bp, Homo sapiens
  source 1..298: mol_type = other DNA
tgcagcctctggtttcaccttcagtagcagttggatgagctgggtccgccaggctccagtgaaggggctggaatgggtggccagcataaacgaaaatggaaatgaagaatactatgtggactctgtgaagggccgattcaacatctccagagacaacgccaagaactcactgtttctgcaaatgaacagcctgagagccgaggacacggctgtgtactactgtgcgaggtctccatacagtaccagatacaactggttcggcccctggggccagggaaccctggtcaccgtctcctca

SEQ ID NO: 8529 - DNA, 283 bp, Homo sapiens
  source 1..283: mol_type = other DNA
tgcagcctctggattcactttcagtaacgcctggatgagctgggtccgccaggctccagggaaggggctggagtgggttggccgtattaaaagtaaaactgatggtgggacaatagaatacgctgcacccgtgaaaggcagattcaccctctcaagagatgattcaaaaaacacactgtatctgcaaatgaatagcctgaaaggcgaggacacagccgtgtattactgtaccacactagggtatcgaccctggggccagggaaccctggtcaccgtctcctca

SEQ ID NO: 8530 - DNA, 283 bp, Homo sapiens
  source 1..283: mol_type = other DNA
tgcagcctctggattcactttcagtaacgcctggatgagctgggtccgccaggctccagggaaggggctggaatgggttggccgtattaaaagcaaaactgatggtgggacaacagactacgctgcacccgtgaaaggcagattcaccatctcaagagatgattcaaaaaacatgctgtatatgcaaatgaacagcctgaaaattgaggacacagccgtgtattactgtaccacattggggtatagaccctggggccagggaaccctggtcaccgtctcctca

SEQ ID NO: 8531 - DNA, 289 bp, Homo sapiens
  source 1..289: mol_type = other DNA
tgcagcctctggattcacctttagcagctatgccatgaactgggtccgccaggctccagggaaggggctggagtgggtctcagctgttactggagatgctgatgccacatactacgcagactccgtgaagggccggttcaccatctccagagacaattccaagaacacgctgtatttgcaaatgaacagcctgagagccgaggacacggccatatattactgtgcgaaacgaggcagtggctggtacatggactactggggccagggaaccctggtcaccgtctcctca

SEQ ID NO: 8532 - DNA, 289 bp, Homo sapiens
  source 1..289: mol_type = other DNA
tgcagcctctggattcacctttaacacctatgccatgagctgggtccgccaggctccagggaaggggctggagtgggtctcaggtattggtggtggtggtggtagcacatactacgcagactccgtgaagggccggttcaccatctccagagacaattccaagaacacgctgtatctgcaaatgaacagcctgagagccgaggacacggccctatattactgtgcgaaacggggcagtggctggtacatggactactggggccagggaaccctggtcaccgtctcctca

SEQ ID NO: 8533 - DNA, 303 bp, Homo sapiens
  source 1..303: mol_type = other DNA
gcttctggatacaccttcaccggctactatatgcactgggtgcgacaggcccctggacaagggcttgagtggatgggatggatcaaccctgacagtggcggcacaaactatgcacagaggtttcagggcagggtcaccatgaccggggacacgcccatcagtacagcctacatggagctgagcagactgagatctgacgacacggccgtatattactgtgcgcgagtggtgagggatggctacaattcgggactttactactttgactactggggccagggaaccctggtcaccgtctcctca

SEQ ID NO: 8534 - DNA, 303 bp, Homo sapiens
  source 1..303: mol_type = other DNA
gcttctggatacaccttcaccggctactatatgcattggatgcgacaggcccctggacaagggcttgagtggatgggatggatcgaccctaatagtggtgccacaaagtatgcacagaactttcagggcagggtcaccatgaccacggacacgtccatcagtactgcctatatggaactgagcaggctgagatctgacgacacggccgtaatttactgtgcgagagtcgtgagagatggctacaattcgggcctttactactttgactactggggcctgggaagtctggtcaccgtctcctca

SEQ ID NO: 8535 - DNA, 286 bp, Homo sapiens
  source 1..286: mol_type = other DNA
tgcagcctctggattcacctttgatgattatgccatgcactgggtccggcaagctccagggaagggcctggagtgggtctcaggtattagttggaatagtggtagcataggctatgcggactctgtgaagggccgattcaccatctccagagacaacgccaagaactccctgtatctgcaaatgaacagtctgagagctgaggacacggccttgtattactgtgccagaaatagtggctacgattttgactactggggccagggaaccctggtcaccgtctcctca

SEQ ID NO: 8536 - DNA, 286 bp, Homo sapiens
  source 1..286: mol_type = other DNA
tgcagcctctggattcacctttgatgattatgccatgcactgggtccggcaagctccagggaagggcctggagtgggtctcaactattacttggaatagtggtgtcatagactatgcggactctgtgaagggccgattcaccatctccagagacaacgccaagaactccctgtatgtgcaaatgaacagtctgagagctgaggacacggccttgtattactgtgcaagaaatagtggctacgattttgactactggggccagggaaccctggtcaccgtctcctca

SEQ ID NO: 8537 - DNA, 286 bp, Homo sapiens
  source 1..286: mol_type = other DNA
tgcagcctctggattcacctttgatgattatgccatgcactgggtccggcaagctccagggaagggcctggaatgggtctcaactattagttggaatagtggtgtcatagactatgcggactctgtgaagggccgattcaccatctccagagacaacgccaagaactccctgtatgtgcaaatgaacagtctgagagctgaggacacggccttgtattactgtgcaagaaatagtggctacgattttgactactggggccagggaaccctggtcaccgtctcctca

SEQ ID NO: 8538 - DNA, 286 bp, Homo sapiens
  source 1..286: mol_type = other DNA
tgcagcctctggattcacctttgatgattatggcatgcactgggtccggcaagctccagggaagggcctggagtgggtctcaactattagttggaatagtggtgtcatagactatgcggactctgtgaagggccgattcaccatctccagagacaacgccaagaactccctgtatgtgcaaatgaacagtctgagagctgaggacacggccttttattactgtgcaagaaacagtggctacgattttgactattggggccagggaaccctggtcaccgtctcctca

SEQ ID NO: 8539 - DNA, 280 bp, Homo sapiens
  source 1..280: mol_type = other DNA
tgcagcctctggattcacctttagcagctatgccatgagctgggtccgccaggctccagggaaggggctggagtgggtctcagctattagtggtagtggtggtagcacatactacgcagactccgtgaagggccggttcaccatctccagagacaattccaaggacaccctgtatctgcaaatgaacagcctgagagccgacgacacggccgtatattactgtgcgaaacctttcggtatggacgtctggggccaagggaccacggtcaccgtctcctca

SEQ ID NO: 8540 - DNA, 277 bp, Homo sapiens
  source 1..277: mol_type = other DNA
tgcagcctctggattcacctttagtaactctgccatgagttgggtccgccaggctccagggaaggggctggagtgggtctcaagtataggtggtggtggtgggagatactacgcagactccgtgaagggccggttcaccatctccaaagacatttccaagaacacgctgtatctgcaaatggacagcctgagagtcgaggacacggccgtatatttctgtgcgaagccctttggtatggacgtctggggccaagggaccacggtcaccgtctcctca

SEQ ID NO: 8541 - DNA, 282 bp, Homo sapiens
  source 1..282: mol_type = other DNA
gcttctggatacagcttcactacctatgctatgcattgggtgcgccaggcccccggacaaaggcttgagtggatgggatggatcaaccctggcaatggtaacacaaaatattcacagacgttgcagggcagagtcacctttaccagggacacatccgcgagcacagcctacatggaactgagcagcctgagatctgaagacacggctgtgtattactgtgcgaggagagcaccagcgggtattgactactggggccagggaactctggtcaccgtctcctca

SEQ ID NO: 8542 - DNA, 282 bp, Homo sapiens
  source 1..282: mol_type = other DNA
gcttctggatacagcttcactacctatgctatgcattgggtgcgccaggcccccggacaaaggcttgagtggatgggatggatcaaccctggcaatggtaacacaaaatattcacagacgttgcagggcagagtcacctttaccagggacacatccgcgagcacagcctacatggaactgagcagactgagatctgaagacacggctgtgtattactgtgcgaggagagcaccagcgggtattgactactggggccagggaactctggtcaccgtctcctca

SEQ ID NO: 8543 - DNA, 282 bp, Homo sapiens
  source 1..282: mol_type = other DNA
gcttctggatacagcttcactacctatgctatgcattgggtgcgccaggcccccggacaaaggcttgagtggatgggatggatcaaccctggcaatggtaacacaaaatattcacagacgttgcagggcagagtcacctttaccagggacacatccgcgagcacagcctacatggaactgagcagcctgagatctgaagacacggctgagtattactgtgcgaggagagcaccagcgggtattgactactggggccagggaactctggtcaccgtctcctca

SEQ ID NO: 8544 - DNA, 282 bp, Homo sapiens
  source 1..282: mol_type = other DNA
gcttctggatacaccttcacaagcaatgctatccattgggtgcgccaggcccccggacaaaggcttgagtggatgggatggataaacactggcaatggtgacacaaaatattcacagagtttccagggcagagtcacgttcaccagggacacatccgcgaacacagcctacatggagatgagcagcctgaaatctgaagacacggctatgttttactgtgcgaggcgtgccccagccgggattgactattggggccagggaaccctggtcaccgtctcctca

SEQ ID NO: 8545 - DNA, 284 bp, Homo sapiens
  source 1..284: mol_type = other DNA
ccatctccggggactctgtctctaacaacgttggtgcttggaactggatcaggcagtccccgtcgggaggccttgagtggctgggacggacatactacaggtccgagtggcattttgattatgcagaatctctgagaggtcgaattgccatcaagccagacacatccaagaaccaattctccctgcacctgacttccgtgactcccgaggacacggctgtgtatttctgtgcaagtggctgggccttacagtggggcccgggaacaccggtcaccgtctcctca

SEQ ID NO: 8546 - DNA, 284 bp, Homo sapiens
  source 1..284: mol_type = other DNA
ccatctccggggactctgtctctaacaacgttggtgcttggaactggatcaggcagtccccgtcgggaggccttgagtggctggaacggacatactacaggtccgagtggcattttgattatgcagaatctctgagaggtcgaattgccatcaagccagacacatccaagaaccaattctccctgcacctgacttccgtgactcccgaggacacggctgtgtatttctgtgcaagtggctgggccttacagtggggcccgggaacaccggtcaccgtctcctca

SEQ ID NO: 8547 - DNA, 284 bp, Homo sapiens
  source 1..284: mol_type = other DNA
tcatctccggggacactgtcgctagcgagactgctgcttggaactggatcaggcagtccccatcgcgaggccttgagtggctgggaaggacatattttaggtccaagtggtttcatgattatgcagtctctgtgcaaagtcgaataagtatcactgcagacacatccaagaatcaactcttcctgcagttgaactctgtgactcccgaggacacggctgtatattactgtgcaagtggctgggcccttcagtggggccagggatccctggtcaccgtctcctca

SEQ ID NO: 8548 - DNA, 284 bp, Homo sapiens
  source 1..284: mol_type = other DNA
tcatctccggggacagtgtcgctagcgagactgatgcttggaactggatcaggcagtccccatcgcgaggccttgagtggctgggaaggacatattttaggtccaagtggtttcatgattatgcagactctgtgaaaagtcgaataaacatcacctcagacacatccaggaatcagctcttcctgcagttgaaatctgtgactcccgaggacacggctgtatattactgtgcaagtggctgggcccttcagtggggccagggatcccaggtcaccgtctcctca

SEQ ID NO: 8549 - DNA, 273 bp, Homo sapiens
  source 1..273: mol_type = other DNA
gcttctggatacaccttcaccgagtactatatacactgggtgcgacaggcccctggacaagggcttgagtggatgggatgggtctaccctagcactggtggcacaaactatgcacagaagtttcagggcagggtcaccatgaccagggacatgtccatcagcacagcctacatggagctgagcaggctgagatctgacgacacggccgtgtattactgtgcgaggagcactacggggtactggggccagggaaccctggtcaccgtctcctca

SEQ ID NO: 8550 - DNA, 273 bp, Homo sapiens
  source 1..273: mol_type = other DNA
gcttctggatacaccttcaccgagtactatatacactgggtgcgacaggcccctggacaagggcttgagtggatgggatgggtctaccctaccactggtggcacaaactatgcacagaagtttcagggcagggtcaccatgaccagggacatgtccatcagcacagcctacatggagctgagcaggctgacatctgacgacacggccgtgtattactgtgcgaggagcactacggggtactggggccagggaaccctggtcaccgtctcctca

SEQ ID NO: 8551 - DNA, 273 bp, Homo sapiens
  source 1..273: mol_type = other DNA
gcttctggatacaccttcaccgagtactatatacactgggtgcgacaggcccctggacaagggcttgagtggatgggatgggtctaccctagcactggtggcacaaactatgcacagaagtttcggggcagggtcaccatgaccagggacatgtccatcagcacagcctacatggagctgagcaggctgagatctgacgacacggccgtgtattactgtgcgaggagcactacggggtactggggccagggaaccctggtcaccgtctcctca

SEQ ID NO: 8552 - DNA, 273 bp, Homo sapiens
  source 1..273: mol_type = other DNA
tcttttggatacaccttcaccacttactatatacactgggtgcgacaggcccctggacaagggcttgagtggatgggatacatcaaccctaacaatggtggcacaaactatgcagagaaatttcagggcagggtcaccatgaccagggacacgtccatcagcacggcctacatggaactgaccatgctgacatctgctgacacggcccactattactgtgcgaggtcgacaacagggtactggggccagggaaccctggtcactgtctcgtca

SEQ ID NO: 8553 - DNA, 273 bp, Homo sapiens
  source 1..273: mol_type = other DNA
tcttttggatacaccttcaccacttactatatacactgggtgcgacaggcccctggacaagggcttgagtggatgggatacatcaaccctaacaatggtggcacaaactatgcagagaaatttcagggcagggtcaccatgaccagggacacgtccatcagcacggcctacatggaactgaccatgctgacatctgctgacacggcccactattactgtgcgaggtcgacaacagggtactggggccagagaaccctggtcactgtctcgtca

SEQ ID NO: 8554 - DNA, 284 bp, Homo sapiens
  source 1..284: mol_type = other DNA
ccatctccggggacagtgtctctagcaacagtgctgcttggaactggatcaggcagtccccatcgagaggccttgagtggctgggaaggacatactacaggtccaagtggtattatggttatgcagtatctgtcaaaagtcgaataaccatcagcccagacacatccaagaaccagttctccctgcagctgaactctgtgactcccgaggacacggctatgtattactgtacaagagaccccacgggcaactggggccagggaaccctggtcaccgtctcctca

SEQ ID NO: 8555 - DNA, 284 bp, Homo sapiens; identical to SEQ ID NO: 8554
  source 1..284: mol_type = other DNA

SEQ ID NO: 8556 - DNA, 284 bp, Homo sapiens
  source 1..284: mol_type = other DNA
ccatctccggggacagtgtctctagcaacagtgctgcttggaactggatcaggcagtccccatcgagaggccttgagtggctgggaaggacatactacaggtccaagtggtattatggttatgcagtgtctgtgaaaagtcgaataaccatcaacccagacacatccaagaaccagttctccctacacctgaactctgtgactcccgaggacacggctgtgtattactgtacaagagatcccactggaaactggggccagggaaccctggtcaccgtctcctca

SEQ ID NO: 8557 - DNA, 283 bp, Homo sapiens
  source 1..283: mol_type = other DNA
tgcagcctctggattcacctttagtaactattggatgacctgggtccgccaggctccagggaaggggctggagtgggtggccaacataaagcaagatgaaaatgagaaatactatgtggactctgtgaagggccgattcaccatctccagagacaacgccaacaactcactgttcctgcaaatgaacagcctgagagccgaggacacggctgtgtactactgtgggagaggaaggcagcctattgactactggggccagggaaccctggtcaccgtctcctca

SEQ ID NO: 8558 - DNA, 283 bp, Homo sapiens
  source 1..283: mol_type = other DNA
tgcagcctctggattcacctttagtaactattggatgacctgggtccgccaggctccagggaaggggctggagtgggtggccaacataagacaagatgaaagtgagaaatactatgtggactctgtgaagggccgattcaccatctccagagacaacaccaagaactcagtgtatctgcaaatgaacagcctgagggccgaggacacggccgtatattactgtggcagagggcgtcagcctattgactactggggccagggaaccctggtcaccgtctcctca

SEQ ID NO: 8559 - DNA, 286 bp, Homo sapiens
  source 1..286: mol_type = other DNA
tgcagcctctggactgacattcactaagtactggatgcactgggtccgccaacgtccggggaaggggctggtgtgggtctcacgcattagtggcgatgggagtgagacagagtatgcggactccgtgaagggccggtttaccgtctccagagacaacagcaagaacaccctgtatctacaaatgaacagtctgagagtcgacgacacaggtgtctattattgtgcaagaagtactgtccttcggggagtccattggggccaggggaccctggtaacagtctcctca

SEQ ID NO: 8560 - DNA, 286 bp, Homo sapiens
  source 1..286: mol_type = other DNA
tgcagcctccggattcgcgttcggcaggtattggatgcactggctccgccagactccaggaaggggtctggtgtgggtctcacacattaattttgatggaactacgacagactacgcggactccgtgaggggccgattcaccatttccagagacaacgccaagaacacggtctatctgcaaatgaccagtctgagagtcgaggacacggcgacctattattgtgcaagaagtactgtgcttcggggagttcactggggccgggggacagcagtcaccgtttccaca

SEQ ID NO: 8561 - DNA, 271 bp, Homo sapiens
  source 1..271: mol_type = other DNA
cgcagtctctggaatcacgttcaattggttggactgggtccgccaagctccagggaaggggctggtgtgggtctcacgtattaagagtgatgggactaccacgagatacgcggactccgcgaagggccgattcaccatctccagagacaacgccaagaacacggtgcatctgcaaatgaacagtctgggagccgaggacacggctgtgtattactgtgtcactatgccaccaggctactggggccagggaaccctggtcaccgtctcctca

SEQ ID NO: 8562 - DNA, 271 bp, Homo sapiens
  source 1..271: mol_type = other DNA
cgcagtctctggattcaccttcaattggttggactgggtccgccaagctccagggaaggggctggtgtgggtctcacgtattaagagtgatgggagtagcacgagatacgcggactccgtgaagggccgattcaccatctccagagacaacgccaagaacacggtgcatctgcaaatgaacagtctgagagccgaggacacggctgtgtattactgtgtcactatgccaccaggctactggggccagggaaccctggtcaccgtctcctca

SEQ ID NO: 8563 - DNA, 271 bp, Homo sapiens
  source 1..271: mol_type = other DNA
cgcagtctctggatccaccttcaattggttggactgggtccgccaagctccagggaaggggctggagtgggtctcacgtattaagagtgatggcagtagtccgagatacgcggactccgtgaagggccgattcaccatctccagagacaacgccgagaacacggtgcatctgcaaatgaacagtctgagagccgaggacacggctgtgtattactgtgtcacaatgccaccaggctactggggccagggaaccctggtcaccgtctcctca

SEQ ID NO: 8564 - DNA, 277 bp, Homo sapiens
  source 1..277: mol_type = other DNA
cgcagtctctggattccccttcagtagctactggttggactgggtccgccaagctccagggaaggggctggtgtgggtctcacgtattaagagtgatgggagtttcacgagatacgcggactccgtgaagggccgattcaccatctccagagacaacgccaagaacacggtgcatctgcaaatgaacagtctgagagccgaggacacggctgtgtattactgtgtcactatgccaccaggttactggggccagggaaccctggtcaccgtctcctca

SEQ ID NO: 8565 - DNA, 271 bp, Homo sapiens
  source 1..271: mol_type = other DNA
cgcagtctctggagtcaccttcaattggttggactgggtccgccaagttccagggaaggggctggagtgggtctcacgtattaagagtgatggcagtagcccgagatacgcggactccgtgaagggccgattcaccatctccagagacagcgccaagaacacggtgcatctgcaaatgaacagtctgagagccgaggacacggctgtgtattactgtgtcacaatgccaccagggtactggggccagggaaccctggtcaccgtctcctca

SEQ ID NO: 8566 - DNA, 277 bp, Homo sapiens
  source 1..277: mol_type = other DNA
tgcagtctctggattcaccttcggaacttactggctagactgggtccgccaggctccagggaaggggctggtttgggtctcacgtattcatagtgatgacaataaggcaatatacgcggactctgtgaagggtcgattcaccatctctagaaaccaagccaagaacacattctatctgcaaatgaacagtctgacagacgacgacacggctgtttattactgtgtaacaatgccgccgggctactggggccagggaaccctggtcaccgtctcctca

SEQ ID NO: 8567 - DNA, 289 bp, Homo sapiens
  source 1..289: mol_type = other DNA
tgcagcctctggattcacctttagtgcctatgccatgacctgggtccgccaggctccagggaaggggctggagtgggtctcagctattagtggtagtagtattaacacacactacgcagactccgtgaagggccggttcaccatctccagagacaattccaagaacaccctgtatctgcaaatgaacagcctgagagacgaggacacggccgtctattattgtgcgaaagggccagtggctgtagactttgactactggggccagggaaccctggtcaccgtctcctca

SEQ ID NO: 8568 - DNA, 289 bp, Homo sapiens
  source 1..289: mol_type = other DNA
tgcagcctcaggattcacctttagtgcctatgccatgacctgggtccgccaggctccagggaaggggctggagtgggtctcaactattagtggtagtagtgttaacacacactacgcagactccgtgaagggccggttcaccatctccagagacaattcctacaacaccctgtatctgcaaatgaacagcctgagagacgaggacacggccgtctattactgtgcgaaagggccagtggctgtagactttgactactggggccagggaacccgggtcgccgtctcctca

SEQ ID NO: 8569 - DNA, 289 bp, Homo sapiens
  source 1..289: mol_type = other DNA
tgcagcctctggattcagctttagcagatatgccatgacctgggtccgccaggctccggggaaggggctggagtgggtctcaacaattagtggtagtggtggtaacacacattacgcagactccgtgaagggccgcttcaccatctccagagacaactccaagaacacgctgtatctgcaaatgaacagcctgagagccattgacacggccgtatattactgtgcgaaaggccctgtggcagtggactttgactactggggccagggaaccctggtcaccgtctcctca

SEQ ID NO: 8570 - DNA, 289 bp, Homo sapiens
  source 1..289: mol_type = other DNA
tgcagcctctggattcagctttagcagatatgccatgacctgggtccgccaggctccggggaaagggctggagtgggtctcaacaattagtggtagtggtggtaacacacattacgcagactccgtgaagggccgcttcaccatctccagagacaactccaagaacacgctgtatctgcaaatgaacagcctgagagccattgacacggccgtatattactgtgcgaaaggccctgtggcagtggactttgactactggggccagggaaccctggtcaccgtctcctca

SEQ ID NO: 8571 - DNA, 313 bp, Homo sapiens
  source 1..313: mol_type = other DNA
tgcagcctctggattcacctttagcaactacgccatgaattgggtccgccaggctccagggaaggggctggagtgggtctcaggtattggtgagagtggggataccacatactacgcagactccgtgaagggccggttcaccatctccagagacaactccaagaacacactgtatctacaaatggacagcctgagagccgaggacacggccgtatattactgtgcgaaagccaccggatatgatattttgactggccttgactactggggccagggaaccctggtcaccgtctccctggtcgccgtctgctca

SEQ ID NO: 8572 - DNA, 313 bp, Homo sapiens; identical to SEQ ID NO: 8571
  source 1..313: mol_type = other DNA

SEQ ID NO: 8573 - DNA, 313 bp, Homo sapiens
  source 1..313: mol_type = other DNA
tgcagcctctggattcacctttagcaactacgccatgaattgggtccgccaggctccagggaaggggctggagtgggtctcaggtattggtgagagtggggataccacatactacgcagactccgtgaagggccggttcaccatctccagagacaactccaagaacacactgtttctgcaaatggacagcctgagagccgaggacacggccgtatattactgtgcgaaagccaccggatatgatattttgactggccttgactactgcggccagggaaccctggtcaccgtctccctggtcgccgtctgctca

SEQ ID NO: 8574 - DNA, 298 bp, Homo sapiens
  source 1..298: mol_type = other DNA
tgcagcctctggattcacccttagcagctatgccatgagttgggtccgccaggctccagggaaggggctggagtgggtctccactattagtggtagtggtggtagtacatactacgcagactccgtgaagggccggttcaccatctccagagacggttccaagaacacgctgcatctgcaaatgaacagcctgagagccgacgacacggccatatattactgtgcgaaagccaccgggtacgatattttgacaggacttgactattggggccagggaaccctggtcaccgtctcctca

SEQ ID NO: 8575 - DNA, 283 bp, Homo sapiens
  source 1..283: mol_type = other DNA
tgcagcctctggattcaccttcagtagctatagcatgaactgggtccgccaggctccagggaaggggctggagtgggtctcatccattagtagtactagtacttacatatactacgcagactcagtgaagggccgattcaccatctccagagacaacgccaagaactcactgtatctgcaaatgaacggcctgagagccgacgacacggctgtgtattactgtgcgagaggtggaagggtgactgcggactggggccagggaaccctggtcaccgtctcctcg

SEQ ID NO: 8576 - DNA, 283 bp, Homo sapiens
  source 1..283: mol_type = other DNA
tgcagcctctggattcaccttcagtagttatagcatgaactgggtccgccaggctccagggaaggggctggagtgggtctcatccattagtagtagtagtagttacatatattacgcagactcagtgaagggccgattcaccatctccagagacaatgccaagaactcactgtttctgcaaatgaacagcctgagagccgaggacacggctgtgtattactgtgcgagggggggtcgggtgacggcggactggggccagggaaccctggtcaccgtctcctca

SEQ ID NO: 8577 - DNA, 289 bp, Homo sapiens
  source 1..289: mol_type = other DNA
tgcggcctctggattcaccttcagtagttatgaaatgaactgggtccgccaggctccagggaaggggctggagtgggtttcgtacattagtactagtggtagtcccatatactacgcagactctgtgaagggccgattctccatctccagagacaacgccaagaactcactgtatctgcgaatgaccagcctgagagccgaggacacggctgtttattactgtgcgagagatcaaggcctttacgcttttgatatctggggccaagggacaatggtcaccgtctcttca

SEQ ID NO: 8578 - DNA, 289 bp, Homo sapiens
  source 1..289: mol_type = other DNA
tgcagcctctgaattcaccttcaataattatgaaatgaactgggtccgccaggctccagggaaggggctggagtggatttcatacattagtagtagtggtaataccatatactacgcagactctgtgaggggccgattcaccatctccagagacaacgccaagaactcactgtatctgcaaatgaacagcctgagagccgaggacacggctctttattactgtgcgagagatcagggcctttatgcttttgatatctggggccaggggacaatggtcaccgtctcttca

SEQ ID NO: 8579 - DNA, 298 bp, Homo sapiens
  source 1..298: mol_type = other DNA
tgtagcctctgggttaatcttcagtggcgctgatatgcactgggtccggcaggcttccgggaaagggctggagtgggttggccgtgttagaagcaaaagaaacaattacgcgacagtatatgctgcgtcggtgaaaggcaggttcaccatctccagagatgattcaaagaacacggcgttcctgcaaatgaacagcctgaaaagcgaggacacggccgtgtattattgtgttcactatggttcggggagttattctactgactactggggccagggaaccctggtcaccgtctcctca

SEQ ID NO: 8580 - DNA, 298 bp, Homo sapiens
  source 1..298: mol_type = other DNA
tgcagcctctgggttcaccttcagtggcgctgagatgcactgggtccgccaggcttccgggaaagggctggagtgggttggccgtattagaaacaaagccaacagttacgcgacaacatatgttgcgtcggtaagaggcaggttcaccatctccagagatgattcaaagaacacggcgtatctgcagatgaacagcctgaaaaccgaggacacggccgtttattactgtgtgcactatggttcggggagttattccactgactactggggccagggaaccctggtcaccgtctcctca

SEQ ID NO: 8581 - DNA, 304 bp, Homo sapiens
  source 1..304: mol_type = other DNA
tgcagcctctgaattcaccttcagtacccatggcatacactgggtccgccaggctccaggcaaggggctggagtgggtggcagttatatcgtatgatggaagtaacacacactatgcagactccgtgaagggccgattcaccatctccagagacaattccaagaactcggtgtatctgcaaatgaacagcctgacaccggaggacacggctgtgtattattgtgcgaaagggggtgggactatagcggcacctggtcatgcatttgatttctggggccaagggacaatggtcaccgtctcttca

SEQ ID NO: 8582 - DNA, 304 bp, Homo sapiens
  source 1..304: mol_type = other DNA
tacagcctctggattcaccttcagtacccatggcatacactgggtccgccaggctccaggcaagggactggagtggttggtagttatatcacacgatggaagtaatataaaatatgcagactccgtgaagggccgattcaccatctccaaagacaactccaggaacacagtgtatctgcaaatgaacaccctgggaccggaggacacggctgtgtattattgtgcgaaggggggtgggaccatagcggcccctggtcatgcatttgatttctggggccaagggacaatggtcaccgtctcttca

SEQ ID NO: 8583 - DNA, 277 bp, Homo sapiens
  source 1..277: mol_type = other DNA
tgaagcctctggattcacctttagcagctatgccatgagctgggtccgccaggctccagggaaggggctggagtgggtctcaggtattagtggtagtggtggtagcacatactacgcagactccgtgaagggccggttcaccatctccagagacaattccaagaacacattgtatctgcaaatgcaaagcctgagagtcgaggacacggccacatattactgtttcggagcgcgccttgactactggggccagggaagcctggtcaccgtctcctca

SEQ ID NO: 8584 - DNA, 277 bp, Homo sapiens
  source 1..277: mol_type = other DNA
tgtagcctctggattcacctttagcagctatgccatgagctgggtccgccaggctccagggaaggggctggagtgggtctcaactattagtggaagtggtggtaagacatactacgcagactccgtgaagggccggttcaccatctctcgagacaattccaagaacacactgtatgtgcaaatgaacagcctgagagacgaggacacggccgtgtattattgttttggagcgagacttgactactggagccagggaaccctggtcaccgtctcctca

SEQ ID NO: 8585 - DNA, 301 bp, Homo sapiens
  source 1..301: mol_type = other DNA
tgcagcctctggattcacctttagcagctatgccatgagctgggtccgccaggttccagggaaggggctggagtgggtctcagctattagtggcagtgctgatagcacatactacgcagactccgtgacgggccggttcaccatctccagagacaactccaagaaaaggctgtatctgcaactgaacagcctgagagccgaggacacggccatatattactgtgcaaaagatcaggtggtgactgctattcaggggcgatttggatactggggccagggaacccaggtcaccgtctcctca

SEQ ID NO: 8586 - DNA, 301 bp, Homo sapiens
  source 1..301: mol_type = other DNA
tgcagcctctggattcacctttaacacctatgccatgacctgggtccgccaggctccagggaaggggctggagtgggtctcaggtattagtggtagtggtgatagcacctactacgcagactccgtgacgggccggttcaccatctccagagacaattccaagaaaatgctgtatctgcaactgaacagcctgagagccgaggacacggccatatattactgtgcaaaagatcaggtggtgactgctattcaggggcgatttggatactggggccagggaacccaggtcaccgtctcctca

SEQ ID NO: 8587 - DNA, 301 bp, Homo sapiens
  source 1..301: mol_type = other DNA
tgcagcctctggattcacctttagtatttatgccatgagctgggtccgccaggctccagggaaggggctggagtgggtctcaggtattagtggcagtggtgatagcacatactacgcagactccgtgaagggccgattctccatctccagagacaattccaagaacacgctgtatctgcaaatgaagaccctgagagccgaggacacggccgtatattactgtgcgaaagatcaggtggtgactgctattcagggtcggtttggctactggggccagggaaccctggtcaccgtctcctca

SEQ ID NO: 8588 - DNA, 277 bp, Homo sapiens
  source 1..277: mol_type = other DNA
tgcagcctctggattcattgtcagtagtaactccatgaactgggtccgccaggctccagggaaggggctggagtgggtctcagttattcatggcggtggtagtatacacttttcagactccgtgaagggcagattcaccatgtccagagacaattccaagaacacggtgtatcttcaaatgaacagcctgaaagtcgaggacacggctgtatattactgtgcgaggcacgcgtggctagagaactggggccagggaaccctgctcaccgtctcctca

SEQ ID NO: 8589 - DNA, 277 bp, Homo sapiens
  source 1..277: mol_type = other DNA
tgcagcctctggattcaccgtcagtagcaactccatgaactgggtccgccaggctccagagaagggtctggagtgggtctcagttactcatagcgatggtagcagatattacgcagactccgtgaagggcagattcaccatctccagagacgattccaagaacacgctgtatcttcaaatgaacagcctgagagtcgaggacacggctgtgtattactgtgcgagacacgcatggcttgagaactggggccagggaaccctggtcaccgtctcctca

SEQ ID NO: 8590 - DNA, 286 bp, Homo sapiens
  source 1..286: mol_type = other DNA
tgcagcctctggattcacctttagtagttattggatgagctgggtccgccaggctccagggaaggggctggagtgggtggccaagataaaggaagatggaagtgagaaatactatgtggactctgtgaagggccgattcaccatctccagagacaacgccaagaactcactgtatctgcaaatgaacagcctgagagccgaggacacggctgtgtattactgtgcgagaggtgggtggagaaggtttgactactggggccagggaaccctggtcaccgtctcctca

SEQ ID NO: 8591 - DNA, 286 bp, Homo sapiens
  source 1..286: mol_type = other DNA
tgcagcctctggattcacgtttaatacctattggatgagctgggtccgccaggctccagggaaggggctggagtgggtggccagcataaaggaagatggaagtgagaaataccatgtggactctgtgaagggccgattctccatctccagagacaacgccaagaactcactgtatctgcaaatgaacagcctgagagccgaggacacggccgtgtattactgcgcaagaggtggctggcgacgctttgactactggggccagggaaccctggtcaccgtctcctca

SEQ ID NO: 8592 - DNA, 286 bp, Homo sapiens
  source 1..286: mol_type = other DNA
tgaagcctctggattcaccttcagtagacactggatgcactgggtccgccaagctccagggaaggggctggtgtgggtctcacgtcttaaccctgatggaagcatcacacactacgcggactccgtgaagggccgattcaccatctccagagacaacgccaagaacacgctgtatctgcaaatgaacagtctgagagtcgaggacacggctgtgtatttctgtgtaagggaaggaaactgggacttggactactggggccagggaacccgggtcaccgtctcctca

SEQ ID NO: 8593 - DNA, 286 bp, Homo sapiens
  source 1..286: mol_type = other DNA
tgcagcctcaagcttcaccttcagtagacactggatgcactgggtccgccaagctccagggaagggactggtgtgggtgtcacgtcttaatcctgatgggagcgaaacagcctacgcggactccgtgaagggccgattcaccatttccagagacaacaccaagaacaccttgtatctccgaatggacagtctgagagtcgaggacacggctttgtattactgtgtaagagaaggcaactgggacctggactactggggccagggggccctggtcaccgtctcctca

SEQ ID NO: 8594 - DNA, 280 bp, Homo sapiens
  source 1..280: mol_type = other DNA
tgccgcctctggatttaccttcagtgactataccatgaactgggtccgccaggctccagggaaggggctggagtggatttcatacattcctagtactagtactcccatatactacgcagactctgtgaagggccgattcaccgtctccagagacaatgtcaagaactcactgtatctgcaaatggacagcctgagagacgaggacacggctctgtattactgtgcgagagatcgacttttagactcctggggccagggaaccctggtcaccgtctcctca

SEQ ID NO: 8595 - DNA, 280 bp, Homo sapiens; identical to SEQ ID NO: 8594
  source 1..280: mol_type = other DNA

SEQ ID NO: 8596 - DNA, 280 bp, Homo sapiens
  source 1..280: mol_type = other DNA
tgccgcctctggatttcccttcagtgactataccatgaactgggtccgccaggctccagggaaggggctggagtggatttcatacattcccagtagtagcgctcccatatactacgcagactctgtgaagggccgattcaccgtctccagagacaatgtcaagaactcactctatctgcaaatgcacagcctgagagacgaggacacggctctttattactgtgcgagagatcgacttttagactcctggggccagggaaccctggtcaccgtctcctca

SEQ ID NO: 8597 - DNA, 280 bp, Homo sapiens
  source 1..280: mol_type = other DNA
tgcagccactggattcacgttcagtagttctagcatgaactgggtccgccaggctccagggaaggggctggagtggctttcacacatcagtagtagtggtaattccatattctacgcagactctgtgaagggccggttcaccatctccagagacaatgccaagacctcactgtatctgcaaatgaacagcctgagagacgaggacacggctgtctattactgtgcgagagatagactccttgactcctggggccagggaaccctggtcaccgtctcctca

SEQ ID NO: 8598 - DNA, 279 bp, Homo sapiens
  source 1..279: mol_type = other DNA
gcttctggattcacctttagaaactctgctgttcagtggctgcgacaggctcgtggacaacgccttgagtgggtaggatggatcgtcgttggcagtggtaatacaaactacgcacagaagttccaaggaagagtcaccattaccagggacatgtccacaagcacagcctacatggagctgagcggcctgacatccgcggacacggccgtctattactgtgcggcagacgatattttgactgctttctggggccagggaaccctggtcaccgtctcctca

SEQ ID NO: 8599 - DNA, 279 bp, Homo sapiens
  source 1..279: mol_type = other DNA
gcttctggactcatctttactaattcggctgtgcagtgggtgcgacaggctcgtggacagcgccttgagtggttaggatggatcgtcgttgccagtggtaaaataaactacgcacagaagtttcaggaaagagtcatcatttctagggacatgtccacaaacacagcctacatggagttaaatcgtctggcatccgacgacacggccgtgtattattgtgcggcagacgatattttgactgctttttggggccagggaaccctggtcaccgtctcctca

SEQ ID NO: 8600 - DNA, 279 bp, Homo sapiens
  source 1..279: mol_type = other DNA
gcttctggattcacctttaggacatccgctgtacagtgggtgcgacaggctcgtggacaacgccttgagtgggtaggatggatagtcgttggcagtggtagcgcaaactacgcacagaagttccagggaagagtcaccattaccagggacatgtccacaagtaccgcctacatggagctgagcagcctgaaatacgacgacacggccgtgtattactgtgcggcagacgatattttgactgctttctggggccagggaaccctggtcaccgtctcctca

SEQ ID NO: 8601 - DNA, 279 bp, Homo sapiens
  source 1..279: mol_type = other DNA
gcttctggactcatctttaccaattcggctgtgcagtgggtgcgacaggctcgtggacagcgccttgagtggttaggatggatcgtcgttgccagtggtaagacaaactacgcacagaagttccaggaaagagtcatcatttctagggacatgtccacgaacacagcctacatggagttgagtcgtctggcatccgacgacacggccgtgtattattgtgcggcagacgatattttgactgctttttggggccagggaaccctggtcaccgtctcctca

SEQ ID NO: 8602 - DNA, 279 bp, Homo sapiens
  source 1..279: mol_type = other DNA
gcttctggactcatctttactaattcggctgtgcagtgggtgcgacaggctcgtggacagcgccttgagtggttaggatggatcgtcgttgccagtggtaatacaaactacgcacagaagttccaggaaagagtcaccattaccagggacatgtccacaaacacagcctacatggagttgagtagtctggcatccgacgacacggccgtgtattactgtgcggcagacgatattttgactgctttttggggccagggaaccctggtcaccgtctcctca

SEQ ID NO: 8603 - DNA, 279 bp, Homo sapiens
  source 1..279: mol_type = other DNA
gcttctggactcatctttactagttcggctgtgcagtgggtgcgacaggctcgtggacaacgccttgagtggttaggatggatcgtcgttgccagtggtaatacaaactacgcacagaagttccaggaaagagtcaccattaccagggacatgtccacaaacacagcctacatggagctgagtagtctggcatccgacgacacggccgtgtattactgtgcggcagacgatattttgactgctttttggggccagggaaccctggtcaccgtctcctca

SEQ ID NO: 8604 - DNA, 298 bp, Homo sapiens
  source 1..298: mol_type = other DNA
tgcagcctctggattcactttcagtgacgcctggatgagctgggtccgccaggctcctgggaaggggctggagtgggttggccgtcttaaaagccatggtagtggtgggacaacagactacgctgcacccgtgagaggcagattcaccatctcaagagaggattcaaaaaacacgctgtatctgcaaatgaacagcctgaaaaccgaggacacaggcgtatattactgttcgtgggagacctctccatattacggtatggacgtctggggcaaagggaccacggtcaccgtctcctca

SEQ ID NO: 8605 - DNA, 298 bp, Homo sapiens
  source 1..298: mol_type = other DNA
tgcagcctctggattcactttcagtgacgcctggatgagctgggtccgccaggctcctgggaaggggctggagtgggttggccgtcttaaaagccatggtagtggtgggacaacagactacgctgcacccgtgagaggcagattcaccatctcaagagaggattcaaaaaacacgctgtatctgcaaatgaacagcctgaaaaccgaggacacaggcgtatattactgttcgtgggagacctctccatattacggtatggacgtctggggccaagggaccacggtcaccgtcccctca

SEQ ID NO: 8606 - DNA, 298 bp, Homo sapiens
  source 1..298: mol_type = other DNA
tgcagtctctggaatcactttcagtgacgcctggatgagctggatccgccaggctccagggaaggggctggagtgggttggccgtattaaaagccaaggtagtggtgggacaacagactacgctgcacccgtgaaaggcagattcaccatctcaagagatgattcaaaaaacacggtgtatctgcaaatagacagcctgaaaaccgaggacacaggcgtgtattactgttcgtgggagacgagtccctactacggcatggacgtctggggccaaggggccacggtcaccgtctcctca

SEQ ID NO: 8607 - DNA, 281 bp, Homo sapiens
  source 1..281: mol_type = other DNA
ttgcaggctctggattcaccttcagtgacaatagcatgaagtgggtccgccaggctccagggaaggggctggagtggctttcatacattagtggtggtagtgacaccatatattacgcagactctgtgaagggccgattcaccgtctccagagacaatgccaagaacttactgtatctgcaaatgaacagcctgagagacgaggacacggctgtgtattactgtgcgagatcccacctctatgactactggggccagggaaccctggtcaccgtctcctca

SEQ ID NO: 8608 - DNA, 280 bp, Homo sapiens
  source 1..280: mol_type = other DNA
tgcaggctctggattcactttcagtagctacagcatgaagtgggtccgccaggctccagggaaggggctagagtggctttcatacattgatggtcgtagtgaaatcatttactacgcagactctgtgaagggccgatttaccgtctccagagacaatgccaagaactcattgtatctgcaaatgaacagcctgagagacgaggacacggctgtgtattactgtgcgagatcccacctctatgactactggggccagggaaccctggtcaccgtctcctca

SEQ ID NO: 8609 - DNA, 321 bp, Homo sapiens
  source 1..321: mol_type = other DNA
acacagaccctcacgctgacctgcaccttctctgggttttcactcagcactactggagtaggtgtgggctggatccgtcagcccccaggaaaggccctggagtggcttgcactcatttattgggatgatgataagcgctacagtccatctctgaagagcaggctcaccatcaccaaggacacctccaaaaaccaggtggtccttacaatgaccaccataaaccctgtggacacagccacatattactgtgcacacaggcggagcaatggctggtacgactttgactactggggccagggaaccctggtcaccgtctcctca

SEQ ID NO: 8610 - DNA, 321 bp, Homo sapiens
  source 1..321: mol_type = other DNA
gcacagaccctcacgctgacctgcaccttctctgggttctcactcagcactagtggagtgggtgtgggctggatccgtcagcccccaggaaaggccctggagtggcttgcactcatttattgggatgatgataagcgctacagcccatctctgaagagcaggctcaccgtcaccaaggacacctccaaaaaccaggtggtccttagaatgaccaacatggaccctgtggacacaggcacatattattgtgcacacagacgctccaatggctggtacgactttgactactggggccagggaaccctggtcaccgtctccgca

SEQ ID NO: 8611 - DNA, 321 bp, Homo sapiens
  source 1..321: mol_type = other DNA
acacagaccctcacgctgacctgcaccttctctgggttctcactcactactagtggagtgggtgtgggctggatccgtcagcccccaggaaaggccctagagtggcttgcactcatttattgggatgatgataagcgctacagcccatctctgaagagcaggctcaccatcaccaaggacacctccaaaaaccaggtggtccttacactgaccaacatggaccctgtggacacagccacatattactgtgcacatagacgcagcaatggctggtacgactttgactactggggccagggaaccctggtcaccgtctcctca

SEQ ID NO: 8612 - DNA, 321 bp, Homo sapiens
  source 1..321: mol_type = other DNA
acacagaccctcacgctgacctgcaccttctctgggttctcactcagtactagtggagtgggtgtgggctggatccgtcagcccccaggaaaggccctggagtggcttgcactcatttattgggatgatgataagcgctacagcccatctctgaagagcagactcaccatcaccaaggacacctccaaaaaccaggtggtccttagaatgaccaacatggaccctgtggacacagccacatattactgtgcacacagacgcagcaatggctggtacgactttgactactggggccagggaaccctggtcaccgtctcctca

SEQ ID NO: 8613 - DNA, 321 bp, Homo sapiens
  source 1..321: mol_type = other DNA
acacagaccctcacgctgacctgcaccttctctggtttctcactcagtactactggagtgggtgtgggctggatccgtcagcccccaggaaaggccctggagtggcttgcactcatttattgggatgatgataagcgctacagcccatctctgaagagcaggctcaccatcaccaaggacacctccaaaaaccaggtggtccttacaatgaccaacatggaccctgtggacacagccacatattactgtgcacacagacgcagcaatggctggtacgactttgactactggggccagggaaccctggtcaccgtctcctca

SEQ ID NO: 8614 - DNA, 286 bp, Homo sapiens
  source 1..286: mol_type = other DNA
tgcagcctctggattcaactttggtagttataccatgagctgggtccgccaggctccagggaagggactggagtgggtctcagctatttctggtggcagtgcgaccataaactacgcagactccgtgaagggccggttcaccatctccagagacaattccaagaacacgctatatctgcaactgaacggcctgagagccggggacacggccatatattactgtgcgaaagggggtgcagctcgcccagagtactggggccagggaaccctggtcaccgtctcctca

SEQ ID NO: 8615 - DNA, 286 bp, Homo sapiens
  source 1..286: mol_type = other DNA
tgtagcctctggattcacctttagtagttatacgatgagctgggtccggcagcctccagggaagggactggaatgggtctccgctattagtggcggaagtgcgaccatctactacgcagactccgtgaagggccggttcaccatctccagagacaattccaagaacacgctatatctgcaactgaatggcctgagagccggggacacggccatatattactgtgcgaaaggtggagcagcccgcccagagtactggggccagggaaccctggtcaccgtctcctca

SEQ ID NO: 8616 - DNA, 286 bp, Homo sapiens
  source 1..286: mol_type = other DNA
tgcagcctctggattcaactttggtagttataccatgaactgggtccgccaggctccagggaagggactggagtgggtctcagctatttctggtggcagtgcgaccataaactacgcagactccgtgaagggccggttcaccatctccagagacaattccaagaacacggtatatctgcaactgaacggcctgagagccggagacacggccatgtattactgtgcgaaagggggtgcagctcgcccagagtactggggccagggaaccctggtcaccgtctcctca

SEQ ID NO: 8617 - DNA, 286 bp, Homo sapiens
  source 1..286: mol_type = other DNA
cgcagcctctggattcacctttggtagttataccatgagctgggtccgccaggctccagggaagggactggagtgggtctcagctatttctggtggtagtgcgactataaactacgcagactccgtgaagggccggttcaccatctccagagacaattccaagaacacgctatatctgcaactgaacggcctgagagccggggacacggccatatattactgtgcgaaagggggtgcagctcgcccagagtactggggccagggaaccctggtcaccgtctcctca

SEQ ID NO: 8618 - DNA, 286 bp, Homo sapiens
  source 1..286: mol_type = other DNA
tgcagcctctggattcacctttagtagctatcacatgagctgggtccgccaggctccagggaaggggctggagtgggtctcagctcttagtggcagtggtgtcagcacgtactacgcagactctgtgcaaggccggttcaccgtctccagagacaattccaaggatacgctgtatctgcaaatgaacagcctgagagccgaggacacggccatctattactgtgcgaaaggcggagcagctcgtcctgagtactggggccagggaaccctggtcaccgtctcctca

SEQ ID NO: 8619 - DNA, 286 bp, Homo sapiens
  source 1..286: mol_type = other DNA
tgcagcctctggactcactatgagtgacaagtggatgaattgggtccgccaggttccagggaaggggctggagtgggttgcccgtattaaaggaaaaagtgagggagcgacaatagattatgcagcacccgtgaaaggcagattcaccatctcaagagatgattcaagcaacatcctgtttctgcaaatgaacagcctgaaaatcgaggacacagccctatattattgtgccacagggactacgacgggcgcctggggccagggaactctggtcaccgtctcctca

SEQ ID NO: 8620 - DNA, 286 bp, Homo sapiens
  source 1..286: mol_type = other DNA
tgcaggctctggattcagtctcagtaacgagtggatgaactgggtccgtcaggctccagggaaggggctggagtgggttgcacgtattaaaaggaaaagtgaaggtgggacaatagactacggagcactcgtgaaaggcagattcaccatctcaagagatgattcaaacaacatgctgtatctgcaaatgatcagcctgaaaaccgacgacacagccgtttattactgtgccaccggaactacaactggggcctggggccagggaaccctggtcaccgtctcctca

SEQ ID NO: 8621 - DNA, 286 bp, Homo sapiens
  source 1..286: mol_type = other DNA
tgcaggctctggattcgatgtcagtaatgactggatgaactgggtccgccaggctccagggaaggggctggagtgggttggccgtattaaaaggaagactgaaggtgcgacaatagactacggtgcacccgtgaaaggcagattcaccgtctcaagagatgatgaaaaaaacacggtgtatttgcaaatgaacagcctgaaaagcgaggacacagccgtgtattactgtgccacagggactacaacaggtgcctggggccagggaaccctggtcaccgtctcctca

SEQ ID NO: 8622 - DNA, 292 bp, Homo sapiens
  source 1..292: mol_type = other DNA
tgaagtctctggaatcagtttaactaacgtctggatgagttgggtccgccaagctccagggcaggggctggagtgggttggccgcgttagaacgaaaagtgatggtgggacatcagactacgctgctcccgtgaaaggcagagtcaccatcacaagggatgatgcaagcaatactgtctatctacatatgaacagcctgaacaccgaagacacagccctgtatttctgtgccacccaccatagcagtggccttgactactggggcccgggaaccccggtcaccgtctcgtcc

SEQ ID NO: 8623 - DNA, 292 bp, Homo sapiens
  source 1..292: mol_type = other DNA
tgcagcctctggaatcactgtcagaaacacctggatgagttgggtccgccagggtccagggaaggggctggagtgggttggccgtcttagaagcgatactgatggtgggacagcagacttcgctgcacccgtaaaaggcagattcaccatttcaagagatgattcaaagaacacgctttatctgcaattgaacagcctgaagaccgaggacaccgccgtttattactgtgccacccatcacagtagtggacttgactactggggccagggatccctagtcaccgtctcctca

SEQ ID NO: 8624 - DNA, 280 bp, Homo sapiens
  source 1..280: mol_type = other DNA
tgcagcctctggattcaccttcagcagcgtctggatgagttgggtccgccaggctccagggaagggactggagtgggtggccaacattaagcaagacggaagtgacaaatactatgtggactctgtgaagggccgattcaccatctccagagacaacaggaaaaactcactgcatctgcaaatgaacagccttagagccgaggacacggctatgtattactgtgcgagaggacgaggtttcgacgtctggggccaagggaccacggtcaccgtctcctca

SEQ ID NO: 8625 - DNA, 280 bp, Homo sapiens
  source 1..280: mol_type = other DNA
tgcagcctctggatttatttttaataatttatggatgaactgggtccgccaggctccagggaaggggctggagtgggtggccaacataaagccagatggaactgacaagtactatgtggactctgtgaagggccgattcaccatttccagagacaacgccaagaactctctatatctgcagatgaacagcctgagagccgaggacacggctgtctattactgtgcgagagggcgtggttttgacgtctggggccaggggaccacggtcaccgtctcctcg

SEQ ID NO: 8626 - DNA, 292 bp, Homo sapiens
  source 1..292: mol_type = other DNA
tgcagcgtctggattcaccttcagtatctatgccatgcactgggtccgccaggctccaggcaaggggctggagtgggtggcatttatatcgtatgatggaaataataaatactatgcagactccgtgaagggccgattcaccatctccagagacaattccaagaacacgctgtatctgcaagtgaacagcctgagagccgaggacacggctctatattactgtgcgagagattggtataccagctcctgccttgactactggggccagggaaccctggtcaccgtctcctca

SEQ ID NO: 8627 - DNA, 292 bp, Homo sapiens
  source 1..292: mol_type = other DNA
tgcagcgtctggattcaccttcagtatttatggcatgcactgggtccgccaggctccaggcaagggactggagtgggtggcagttatatggtatgatggaagtaatacatactatgcagactccgtgaagggccgattcaccatctccagagacaattccaagaacacgctgtatctgcaaatgagcagcctgagagccgaggacacggctgtatattactgtgcgagagactggtataccagcagctgtcttgactactggggccagggaaccctggtcaccgtctcctca

SEQ ID NO: 8628 - DNA, 289 bp, Homo sapiens
  source 1..289: mol_type = other DNA
tgcagcctctggattcaccttcagtaggtactggatgcactgggtccgccaagctccaggggaggggctggtgtctgtctcacgtattaatgaggatgggagtgtcggaagctacgcggactccgtgaagggccgattcaccatctccagagacaacaccaagaacgtactgcatctgcaaatgaacagtctgagagccgaagacacggctgtgtattactgtgcaagaggtagcagttcgcccgggattgactactggggccagggaaccctggtctccgtctcctca

SEQ ID NO: 8629 - DNA, 289 bp, Homo sapiens
  source 1..289: mol_type = other DNA
tgcagtctctggattcaccttcagtagctactggatgcactgggtccgccaagctccaggggaggggctggtgtctgtctcacgtattaatgaggatgggagtgtcgtaagctacgcggactccgtgaagggccgattcaccatctccagagacaacaccaagaacgtactgcatctgcaaatgaacagtctgagagccgaagacacggctatgtattactgtgcaagaggtagcagttcgcccgggattgactactggggccagggaaccctggtccccgtctcctca

SEQ ID NO: 8630 - DNA, 289 bp, Homo sapiens
  source 1..289: mol_type = other DNA
tgcagcctctggattcaccttcggtaactactggatgcactgggtccgccaaggtccagagaaggggctggtgtgggtctcacgtattaataatgatgggagtggcacagactacgcggactccgtgaagggccgattcaccatctccagagacaccgccaaaaacaggctgtatctgcaaatgaacagtctgagagtcgaggacacgggtatctactactgtgcaagggggagcagcagcccaggcattgactactggggccggggaaccctggtcaccgtctcctca

SEQ ID NO: 8631 - DNA, 289 bp, Homo sapiens
  source 1..289: mol_type = other DNA
tgtagcctctggattcaccttcagtaactactggatgcactgggtccgcctagatccagggaaggggctggcgtgggtctcgggttttaatagtgatgggagtttcacagactacgcggactccgtgaagggccgattcaccatctccagagacaacgccaagaacaaactgtatctgcaaatgaacagtctgagagccgaggacacggctgtgtattactgtgcaagggggagcagcagcccaggcattgactactggggccggggaacgctggtcaccgtctcctca

SEQ ID NO: 8632 - DNA, 289 bp, Homo sapiens
  source 1..289: mol_type = other DNA
tgcagcctctggattcaccttcagtagctactggatgcactgggtccgccaaggtccagagaaggggctggtgtgggtctcacgtatgactagcgatgggaggggcacagactacgcggactccgtgaagggccgattcaccatctccagagacaccgccaaaaacacgctgtatctgcaaatgaacagactaagagccgaggacacgggtatctactactgcgcaagggggagcagcagcccaggcattgactactggggccggggaaccctggtcaccgtctcctcg

SEQ ID NO: 8633 - DNA, 283 bp, Homo sapiens
  source 1..283: mol_type = other DNA
tgaagcctctggattcacctttagtagctattggatgagctgggtccgccaggctccagggaaggggctggagtgggtggccaacataaagcaagatggaagtgagaaatactatgtggactctgtgaagggccgattcaccatctccagagacaacgccaagaactcactgcatctgcaaatgaacagcctgagagccgaggacacggctgtgtattactgtgcgagaaaggggggggttgctgactactggggccagggatccctggtcaccgtctcctca

SEQ ID NO: 8634 - DNA, 283 bp, Homo sapiens
  source 1..283: mol_type = other DNA
tgtagcctctggattcagtttgagtagctactggatgagctgggtccgccaggctccagggaaggggctggagtgggtggccaacatagagccagatggaagtaagagaaactatgtggactctgtgaagggccgattcaccatctccagagacaacgccaagaactcactgtttctgcaaatgaacagcctgagagtcgaggacacggctgtgtattactgtgcgagaaagggtggcgttgccgactactggggacagggaaccctggtcaccgtctcctct

SEQ ID NO: 8635 - DNA, 295 bp, Homo sapiens
  source 1..295: mol_type = other DNA
tacagcttctggattcatctttagtagttattggatgagctgggtccgccaggctccagggaaggggctggagtgggtggccaacataaagcaagatggtagtgacaagtactatgtgaactctgtgaagggccgattcaccatctccagagacaacgccaagagctccctgtatctgcaattgaacagcctgacagccgaggacacggccgtgtattactgtgggaggtccgctgtggctggtacagatggtgtcgactactggggccggggcaccctggtcaccgtctcctca

SEQ ID NO: 8636 - DNA, 295 bp, Homo sapiens
  source 1..295: mol_type = other DNA
tgaagcctctggattcacctttagtagttattggatgagctgggtccgccaggctccagggaaggggctggagtgggtggccaacataaagcaagatggaagtgagaaatactatgtggactctgtgaagggccgattcaccatctccagagacaaccccaagaactcactgtatctgcaaatgaacagcctgagagccgaggacacggccgtgtattactgtgggaggtcagcagtggctggtacagacggagtcgactactggggccagggaaccctggtcaccgtctcctca

SEQ ID NO: 8637 - DNA, 280 bp, Homo sapiens
  source 1..280: mol_type = other DNA
tgcagcctctggattcactttcagtaaagcctggatgagctgggtccgccaggctccagggaaggggctggagtgggttggccgtattaaaagcaaaagtgatggtgggacaatagactacgctgcacccgtgaaaggcagattcaccatctcaagagatgattcaaaaaagacgctgtctctgcaaatgaacagcctgaaaaccgaggacacagccgtgtattactgtacgtcagggatgaaatactggggccagggaaccctggtcaccgtatcctca

SEQ ID NO: 8638 - DNA, 280 bp, Homo sapiens
  source 1..280: mol_type = other DNA
tgcagcctctggattcactttcagtaaagcctggatgagctgggtccgccaggctccagggaaggggctggagtgggttggccgtattaaaagcaaaactgatggtgggacaatagactacgctgcacccgtgaaaggcagattcaccatctcaagagatgattcaaaaaagacgctgtatctgcagatgaacagcctgaaagccgaggacacagccgtatattactgtacctcagggatgaagtactggggccagggaaccctggtcaccgtatcctca

SEQ ID NO: 8639 - DNA, 280 bp, Homo sapiens
  source 1..280: mol_type = other DNA
tgcaggctctggattcactttcactaaagcctggatgagctgggtccgccaggctccagggaaggggctggagtgggttggccgtattaaaagtagatctgatggtgggacaacagactatgctgcacccgtgacagccagattcaccgtctcaagagatgattcaaagaacacgctgtatctgcaaatgaacagtttgagaaccggggacacaggcatatattattgtacttcagggatgaaatactggggccgaggaaccctggtcaccgtctcctca

SEQ ID NO: 8640 - DNA, 280 bp, Homo sapiens
  source 1..280: mol_type = other DNA
tgtaggttctggattcactttcactaaggcctggatgagctgggtccgccaggctccagggaaggggctggagtggattggccgtattaaaagcagaaatgatggtgggacaacagactacgctgcatccgtgaaaggctccttcaccatctcaagagatgattcgaagaacacgctgtttctgcaaatgaacaggctgaaaaccgaggacacagccgtctattactgtacttcaggcatgaaatactggggccggggaaccctggtcaccgtctcctca

SEQ ID NO: 8641 - DNA, 280 bp, Homo sapiens
  source 1..280: mol_type = other DNA
tgcaggttctggattcactttcactaaggcctggatgagctgggtccgccaggctccagggaaggggctggagtggattggtcgtattaaaagcagaactgatggtgggacaacagactacgctgcatccgtgaaaggctccttcaccatctcaagagatgattcgaagaacacgctgtttctgcaaatgaacaggctgaaaaccgaggacacagccgtctattactgtacttcaggcatgaaatactggggccggggaaccctggtcaccgtctcctca

SEQ ID NO: 8642 - DNA, 280 bp, Homo sapiens
  source 1..280: mol_type = other DNA
tgcaggttctggattcaccttcactaaggcctggatgagctgggtccgccaggctccagggaaggggctggagtggattggtcgtattaaaagcagaactgatggtgggacaacagactacgctgcacccgtgaaaggctcattcaccatctcaagagacgattcgaagaacaccctgtttctgcagatgaacaggctgaaaaccgaggacacagccgtctattactgtacctcaggcatgaaatactggggccggggaaccctggtcaccgtctcctca

SEQ ID NO: 8643 - DNA, 280 bp, Homo sapiens; identical to SEQ ID NO: 8642
  source 1..280: mol_type = other DNA

SEQ ID NO: 8644 - DNA, 294 bp, Homo sapiens
  source 1..294: mol_type = other DNA
gcttcgggatacacattcactacctatgccatgcaatgggtgcgccaggcccccggacaaaggcttgagtggatggggtggatcaactgtggcaatggtaacacaaattacgcacagaaattcaagggcagagtcgccattaccagggacacatccgcgagcacagcctacatggaggtgagcagcctgagatctgaagacacggctgtttattactgtgcgagggaacacgatactttgactggttatgcttttgatatctggggccgagggacaatggtcaccgtctcttca

SEQ ID NO: 8645 - DNA, 294 bp, Homo sapiens
  source 1..294: mol_type = other DNA
gcttctggatacatcttcactagctttgctatccattgggtgcgccaggcccccggacaaaggcttgagtggatgggatggatcaacgctggtaatgctaacacaaaatattcacagaagtttcagggcagagtcaccattaccagggacacatccgcgaccacagcctacatggagctgagcagcctgagatctgaagacacggctgtgtattactgtgcgagagagcacgatactttgactggttatgcttttgatatctggggccaagggacaatggtcaccgtctcttca

SEQ ID NO: 8646 - DNA, 294 bp, Homo sapiens
  source 1..294: mol_type = other DNA
gcttctggatacatcttcactagctttgctatccattgggtgcgccaggcccccggacaaaggcttgagtggatgggatggatcaacgctggtaatggtaacacaaaatattcacagaaatttcagggcagattcaccattaccaaggacacatccgcgaccacagcctacatggagctgagcagcctgaactctgaagacacggctgtctattactgtgcgagagagcacgatactttgactggttatgcttttgatatctggggccaagggacaatggtcaccgtctcttca

SEQ ID NO: 8647 - DNA, 286 bp, Homo sapiens
  source 1..286: mol_type = other DNA
tgcagcctctggattcaccttcaattactatggcatgcactgggtccgccaggctccaggcaaggggctggagtgggtggcagttatatcatatgatggaaggaacaaatactatgcagactccgtgaagggccgactcaccatctccagagacaactccaagaacacgctgtatctgcaaatgaacagcctgagagctgaggacacggctgtatattactgtgcgaaaagggaagagtactactttgactactggggccagggaaccctggtcaccgtctcctca

SEQ ID NO: 8648 - DNA, 286 bp, Homo sapiens
  source 1..286: mol_type = other DNA
tgcagcctctggattcaccttcagtagctatggcatgcactgggtccgccaggctccaggcaaggggctggagtgggtggcaattatatcatatgatggaagtaataaatactatgcagactccatgaagggccgattcaccatctccagagacaattccaagaacacgctgtatctgcaaatgaacagcctgagagctgaggacacggctgtgtattactgtgcgaaaagggaagagtactactttgactactggggccagggaaccctggtcaccgtctcctca

SEQ ID NO: 8649 - DNA, 289 bp, Homo sapiens
  source 1..289: mol_type = other DNA
tgcagcctctggattcaccttcagtgactactatatgagctggatccgccaggctccagggaaggggctggagtgggtttcatacatcagtaatggcaatgtttacacaagatacgcagactctgtgaagggccgattcaccatgtccagagacaacgccaagagcgcactgtatctgcaaatgaacagcctgagagccgacgacacggccatttattactgtgcgcgagtaccgggaacataccgtcttgactactggggccagggaaccctggtcaccgtctcctca

SEQ ID NO: 8650 - DNA, 289 bp, Homo sapiens
  source 1..289: mol_type = other DNA
tacagtctcaggattcagcttcagagactactacatgagctggatccgccaggctccagggaaggggctggagtgggtttcatacattagtaacagtgctggtaccacatactacgcagactctgtgaggggccgattcaccatctccagggacaacgccaagaactcactgtatctgcaaatgaacagcctgggagccgaggacacggccgtgtattactgtgcgagagttcccgggacttataggcttgactactggggcccgggaaccctggtcaccgtctcctca

SEQ ID NO: 8651 - DNA, 289 bp, Homo sapiens
  source 1..289: mol_type = other DNA
tgcagtctcaggattcagcttcagagactactacatgagctggatccgccaggctccagggaaggggctggagtgggtttcatacattagtaacagtgctggtaccacatactacgcagactctgtgaggggccgattcaccatctccagggacaacgccaagaactcactgtatctgcaaatgaacagcctgggagccgaggacacggccgtgtattactgtgcgagagttcccgggacttataggcttgactactggggccagggaaccctggtcaccgtctcctca

SEQ ID NO: 8652 - DNA, 289 bp, Homo sapiens
  source 1..289: mol_type = other DNA
tacagtctcaggattcagcttcagagactactacatgagctggatccgccaggctccagggaaggggctggagtgggtttcatacattagtaacagtgctggtaccacatactacacagactctgtgaggggccgattcaccatctccagggacaacgccaagaactcactgtatctgcaaatgaacagcctgggagccgaggacacggccgtgtattactgtgcgagagttcccgggacttataggcttgactactggggcccgggaaccctggtcaccgtctcctca

SEQ ID NO: 8653 - DNA, 286 bp, Homo sapiens
  source 1..286: mol_type = other DNA
tacagcctctggattcaccttcagtgacttctggattcactgggtccgccaaagtccagggaaggggccggtgtgggtctcacgcattaataaggatgggagtattacaagctacacggactccgtgaggggccggttcaccacctccagagacaacgccaagaacacgctgtatctgcaaatgaacagtctgagagccgaggacacggctgtgtattattgtgtaagagatttcactgcctggtcggacttctggggccggggaaccctggtcaccgtctccaaa

SEQ ID NO: 8654 - DNA, 286 bp, Homo sapiens
  source 1..286: mol_type = other DNA
tgcagcctctggattcacactcagtacctactggatgcactgggtgcgccaagctccagggaaggggctggtttgggtgtcacgtgttaataaagatgggacttactcaagccacgcggactccgtgaagggccgattcaccatctccagagacaacgccgagaacacgttgtatctgcaaatgaacagtctgagagccgaggacacggctgtgtattactgtgtaagagatttcactgcgtggtctgacttctggggccggggaacccaggtcacagtctccgca

SEQ ID NO: 8655 - DNA, 286 bp, Homo sapiens
  source 1..286: mol_type = other DNA
tgcagcctctggattcacctttagtgactattggatgacctgggtccgccaggctccagggaaggggctggagtgggtggccaaaataaggggagatggaagtgagatgtactatgtggactctgtgaagggccgattcaccatctccagagacaacgccaagaactcactgtatctgcaaatgagcagcctgagagccgaggatacggctgtgtattactgtgcgagaggaggaaggacgaggtttgactgctggggccagggaaccctggtcaccgtcgcctca

SEQ ID NO: 8656 - DNA, 286 bp, Homo sapiens
  source 1..286: mol_type = other DNA
tgcagcctctggattcggctttggtggctattggatgagctgggtccgccaggctccagggaaagggctggagtgggtggccaagataaaggatgatggaagtgagaaataccatgtggactctgtgaagggccgattcaccatctccagagacaacgccaagaattcactgtatttgcaaatgaacagcctgagagccgaggacacggccgtgtattactgtgcgagaggaggtaggacaagatttgactgctggggccagggaaccctggtcaccgtctcctca

SEQ ID NO: 8657 - DNA, 286 bp, Homo sapiens
  source 1..286: mol_type = other DNA
tgcggcctctggattcacctttacttcctattggatgacctgggtccgccaggctccagggaaggggctggagtgggtgggcagcataaagtcagatggaagtgagcacttctatgtggattctgtgaagggccgattcaccatctccagagacgacgccaagaactcactgtatctgcaaatgaacagcctgagcgccgaggacacggctatatattactgtgcgagagggggaagaactaggtttgactgctggggccagggaactctggtcaccgtctcctca

SEQ ID NO: 8658 - DNA, 292 bp, Homo sapiens
  source 1..292: mol_type = other DNA
ctctgtctctggaacgtccgtcaagagtcagtattggagctggattcggcagccccccgggaagggcctggagtgggttgcctatggcattcacactggcatcaccaagtataatccgtccctcgagagtcgactcaccttatcggtcgacacgtccaagaaccagttgtccctgaggctgacttctgtgaccgccgcagacacggccgtttactactgtgcgagacacagactctatgataccgatggttttgacatctggggccaagggacaaaggtcaccgtctcttca

SEQ ID NO: 8659 - DNA, 289 bp, Homo sapiens
  source 1..289: mol_type = other DNA
cactgtgtctggtgactccatgagtggttactatagttggatccggcagtccccagggaagggactggagtggattgcccatatctctcacagtgggatcaccgactacaatccctccctcaagagtcgaatcaccatatcagtagacaagtccaagagtcagttgtccctgaatttaaactctgtgaccgccgcagacacggccgtgtattattgtgcgagacaccgcctctatgatactgatggttttgatatatggggccaaggggcaatggtcaccgtctcctca

SEQ ID NO: 8660 - DNA, 292 bp, Homo sapiens
  source 1..292: mol_type = other DNA
cgcagtgtatggtggacccctcagaggttattactggagttggatccggcagtctccaggaaaggggctggagtggattggggaaatcagtcgtagtggcagttttacccagaacccgtccctcaagagtcgagtcaccgtctcaatagacacatctaagaatcaattctccctgaagttgacttctgtgaccgccgcggacacggctctatattactgtgcgagaggaccaactggcagtggctggtcgtttgactactggggcccgggaaccctggtcaccgtctcctca

SEQ ID NO: 8661 - DNA, 292 bp, Homo sapiens
  source 1..292: mol_type = other DNA
cgctgtctatggtgggtccctcagtggttatcactggagctggatccgccagcccccaggaaaggggctggagtggattggggaaatcaatcgtagtggcagtttcacctacaacccgtccctcaagagtcgagtcaccgtctcaacagacacatctaagaatcagttctccctgaagttgacctctgtgaccgccgcggacacggctctatattactgtgcgagaggaccaactggcagtggctggtcctttgactactggggccagggaaccctggtcaccgtctcctca

SEQ ID NO: 8662 - DNA, 292 bp, Homo sapiens; identical to SEQ ID NO: 8661
  source 1..292: mol_type = other DNA

SEQ ID NO: 8663 - DNA, 292 bp, Homo sapiens
  source 1..292: mol_type = other DNA
tgtagtctctggattctacttagaaaattatgccatgagttgggtccgccaggctccaggaaagggcctggagtgggtctccgatattagtggcactggtgctaggaaaagctacgcagactctgtgaagggccgcttcaccatctccagagacaactccaagaacacgatgtttctggaaatgaacagcctgagagtcgaagacacggccctatattactgtgcgagagatggctacaattggattccttatgatatgtggggccaagggacaatggtcaccgtgtcctca

SEQ ID NO: 8664 - DNA, 292 bp, Homo sapiens
  source 1..292: mol_type = other DNA
tgtcgtctctggattccagttacaaaattatgccatgagttgggtccgccaggctccaggaaagggcctggagtgggtctccgatattagtggcactggtgctaggaaaagctacgcagactctgtgaagggccgcttcaccatctccagagacaactccgcgaacacgctgtttctggaaatgaacagtctgagagtcgaagacacggccctatattactgtgcgagagatggctacaattggattccttatgatatgtggggccaagggacaatggtcaccgtgtcctca

SEQ ID NO: 8665 - DNA, 292 bp, Homo sapiens
  source 1..292: mol_type = other DNA
tgtagcctctggatttgccctcagcagcgccgccatgggctgggtccgccaggctccagggaaggggctggagtgggtctcaagtattagtggaactggcggcaacacatactacgcagactccgtgaagggccggttcacgatctccagagacaattccaagaacaccttgtatctagaattgggcagcctgagagccgaagacacggccctatattactgtgcgagagatggctacaattggataccctatgatatgtggggccacgggacgatggtcgccgtctcttca

SEQ ID NO: 8666 - DNA, 289 bp, Homo sapiens
  source 1..289: mol_type = other DNA
tgcagcctctggattcaccttcagtagcttttctatgcactgggtccgccaggctccggggaagggactggaatatgtttcagctcttaataataatggggatatcacatattatggagactctgtgaagggcagattcaccatctccagagacaattccaagaacacgctgtatcttcaaatgggcagcctgagagccgacgacatggctgtatattactgtgcgaggattggggggtctggtgcttatgatatctggggccaggggacaatggtcaccgtctcttca

SEQ ID NO: 8667 - DNA, 289 bp, Homo sapiens
  source 1..289: mol_type = other DNA
tgcagcctctggattcacctttagtaacttttctatgcactgggtccgccaggctccagggaaggggctggaatatgtttcagctattagttataatgtgggtaacacatattatgcagactctgtgaagggcagattcaccatctccagagacaattccaagaacacgctgcatcttcaaatgggcagcctgagaggcgacgacatggctgtgtattactgtgcgaggattggggggtctggtgcttatgatatctggggccaagggacaatggtcaccgtctcttca

SEQ ID NO: 8668 - DNA, 289 bp, Homo sapiens
  source 1..289: mol_type = other DNA
tgtagcctctggattcaccttcagtaccttttctatgcactgggtccgccaggctccagggaagggactggaatatgtttcagctattggtagaaatgggggtgacacatattatgcaaactctgtggagggcagattcaccatctccagagacaactccaagtacacgctgtatcttcaaatgggcagcctgagagctgaggacatggctgtgtatttctgtgcgcgaatcgggggatcgggtgcttatgatatctggggccaagggacaatggtcaccgtctcttca

SEQ ID NO: 8669 - DNA, 289 bp, Homo sapiens
  source 1..289: mol_type = other DNA
tgtagcctctggattcaccttcagtaccttttctatgcactgggtccgccaggctccagggaagggactggaatatgtttcagctattgatagaaatgggggtgacacatattatgcaaactctgtggagggcagattcaccatctccagagacaactccaagtacacgctgtatcttcaaatgggcagcctgagagctgaggacatggctgtgtatttctgtgcgcgaatcgggggatcgggtgcttatgatatctggggccaagggacaatggtcaccgtctcttca

SEQ ID NO: 8670 - DNA, 286 bp, Homo sapiens
  source 1..286: mol_type = other DNA
tgcagcctctggattcactatgagtaacgactggatgaattgggtccgccaggttccagggaaggggctggagtgggttgcccgtattaaaagaaaaagcgagggagcgacaatagattacgcagcacccgtgaaaggcagattcaccatctcaagagatgattcaaaaaacacgctgtttctgcaaatgaacagcctgaaaatcgaggacacagccgtatattattgtgccacagggactacggtgggcgcctggggccagggaactctggtcaccgtctcctca

SEQ ID NO: 8671 - DNA, 286 bp, Homo sapiens
  source 1..286: mol_type = other DNA
cgcagcctctggattcagtgttagtaatgagtggatgaactgggtccgccagactccagggaaggggctggagtggcttggccgtattaaaaggaaaagtgagggtggggcaatagactacgctgcacacgtggaaggcagattcaccgtctcaagagatgactcaaaaaacacgttttatctgcaaatgagcagcctgaaaatcgaggacacaggcgtctattcctgtgccactggaaccacggtgggggcctggggccagggaaccctggtcagcgtctcctca

SEQ ID NO: 8672 - DNA, 286 bp, Homo sapiens
  source 1..286: mol_type = other DNA
cgcagcctctggcttcagtgttagtgatgagtggatgaactgggtccgccagactccagggaagagactggagtggcttggccgtattaaaagggatcgtgagggtgggacaatagactacgctgcacacgtggaaggcagattcaccgtctcaagagatgactcaaaaaacacattttatctgcaaatgaccagcctgaaaaccgaggacacaggcctctattcgtgtgccactggaaccacggtgggggcctggggccagggaacccaggtcaccgtctccgca

SEQ ID NO: 8673 - DNA, 286 bp, Homo sapiens
  source 1..286: mol_type = other DNA
cgcagcctctggattcagtgttaatgatgagtggatgaactgggtccgccagactccagggaaggggctggagtggcttggccgtattaaaagggagagtgagggtgcgacaatagactacgctgcacacgtggaaggccgattcaccgtctcaagagatgactcaagaaacaccttttatctccaaatgcgtcgcctgaaaatcgaggacacaggcgtctattcctgtgccactggaaccacggtgggggcctggggccagggaaccccggtcaccgtctcctca

SEQ ID NO: 8674 - DNA, 283 bp, Homo sapiens
  source 1..283: mol_type = other DNA
tgcaacctctggattcacctttagtcaagattggatgacctgggtccgacaggctccagggaagagactggagtgggtggccaacataaaggcagacggaagcgagaagacctatgcggactctgtgaagggccgattcaccatctccagagacaatgccaagaattcactgtatctgcaaatgaatggtctgagagccgaggacacggccgtatattcctgtgcgagaggaaatggctggttaccacactggggccagggaaccgtggtcaccgtctcctca

SEQ ID NO: 8675 - DNA, 283 bp, Homo sapiens
  source 1..283: mol_type = other DNA
tgtagtctctggagtcagttttactaaggattggatgagttgggtccgccaggctccagggaaggggctggagtgggtggccaacataaaccaagatggaagtgagaaaaactatgtggactctgtgaagggccgattcaccatctccagagacaacgccaagaactcactgtatctgcaagtgaacagcctgacagccgaggacacggctgtgtattattgtgcgagaggcaatggctggctccctcacttgggccagggaaccctggtcaccgtctcctca

SEQ ID NO: 8676 - DNA, 283 bp, Homo sapiens
  source 1..283: mol_type = other DNA
tgtagtctctggagtcagttttagtgaggattggatgagttgggtccgccaggctccagggaaggggctggagtgggtggccaatataaaccaagatggaagtgaaaaatactatgtggactctgtgaagggccgattcaccatctccagagacaacgccaagaactcagtgtttctgcaactgaacagcctgacagccgaggacacggcggtgtattattgtgcgagaggcaacggctggctccctcactgtggccagggaaccctggtcaccgtctcctca

SEQ ID NO: 8677 - DNA, 283 bp, Homo sapiens
  source 1..283: mol_type = other DNA
tgtagtctctggagtcaattttagaaacgattggatgagttgggtccgccaggctgcagggaaggggccggagtgggtggccaacataaaccaagatggaagtgagaaatactatgtggactctgtgaagggccgcttcaccatctccagagacaacgccaagaactcactgtatctgcaagtgaacagcctgacagtggaggacacggctgtatattattgtgcgagaggcaatggctggctccctcactggggccagggaaccctggtcaccgtctcctca

SEQ ID NO: 8678 - DNA, 286 bp, Homo sapiens
  source 1..286: mol_type = other DNA
tgcaggctctggattcaccttcagaacctctgccatgcactgggtccgccaggctccaggcaaggggctggagtgggtgacagaaatgtcatctgatggaagtgataaacactatgcagactccgtgaagggccgattcaccatctccagagacaattccaagaacacgctgtatctgcaaatggacagcctgagaactgaggacacggctgtctattactgtgtgaaagatgcctacggtagccttgactactggggccagggaaccctggtcaccgtctcctca

SEQ ID NO: 8679 - DNA, 286 bp, Homo sapiens
  source 1..286: mol_type = other DNA
tgcagcctctggattcatgttcactatctatcctatgcactggctccgccaggctccaggcaaggggcaggagtgggtggcggttatgtcatctgatggaagtgatatacattacacagactccgtgaaggaccgattcaccatctccagagacaattccaagaacacgctgtatctgcaaatgaacagcctgagacctgaggacacggctgtatattactgtgtcaaagacgcctacgggagccttgactattggggccagggaaccctggtcgccgtctcctca

SEQ ID NO: 8680 - DNA, 286 bp, Homo sapiens
  source 1..286: mol_type = other DNA
tgcagtctctggattcaccgtcaatagcgactacatgagctgggtccgccaggctccagggaaggggctggaatgggtctcggttatttataatgatagaaacggtggtaggacatattacgcagactccgtgaagggcagattaaccatctccagagacactttcaagaacacagtgtatcttcaaatgaacagcctgagagccgaggatacggctgtgtattactgtgtgaggcacgactggttcgacccctggggccagggaaccctggtcaccgtctcctca

SEQ ID NO: 8681 - DNA, 280 bp, Homo sapiens
  source 1..280: mol_type = other DNA
tgtagtctctggattcatcgtcaacagcgactacatgagttgggtccgccagcgtccaggggaggggctggagtggatctcaactatttatagcggttatggtcgcacatcgtatgcagagtccgtgaagggccgattcagcatcgccagagacaattctaagaacacagtgtatctgcaaatgaacagcctgagagccgaggacacggccgtgtattactgtgtgagacatgactggttcgacccctggggcttgggaaccctcgtcatcgtctcctca

SEQ ID NO: 8682 - DNA, 280 bp, Homo sapiens
  source 1..280: mol_type = other DNA
cgcagcctccggattcaccttcagtagttctgaaatgaactggttccgccaggctccagggaaggggccggagtgggtcgcatatattactagtagtggaagtgtcataaactacgcagactctgtgaagggccgattcaccgtctccagagacagcgccaagaattcactgtatttgcacatgaacagcctgagggtcgaggacacggctgtctattactgtgcgagaggcaatcccgtcccggactggggccagggaaccctggtcaccgtctcctca

SEQ ID NO: 8683 - DNA, 280 bp, Homo sapiens
  source 1..280: mol_type = other DNA
cgcagcctccggattcaccttcagtagttctgaaatgaactggttccgccaggctccagggaaggggccggagtgggtcgcatatattactagtagtggaagtgtcataaactacgcagactctgtgaagggccgattcaccgtctccagagacagcgccaagaattcactgtatttgcacatgaacagcctgaaggtcgaggacacggctgtctattactgtgcgagaggcaatcccgtcccggactggggccagggaaccctggtcaccgtctcctca

SEQ ID NO: 8684 - DNA, 280 bp, Homo sapiens
  source 1..280: mol_type = other DNA
cgcagcctccggattcaccttcagtagttcggaaatgaactggttccgccaggctccagggaaggggccggagtgggtcgcatatattactagtagtggaagtgtcataaactacgcagactctgtgaagggccgattcaccgtctccagagacagcgccaagaattcactgtatttgcacatgaacagcctgagggtcgaggacacggctgtctattactgtgcgagaggcaatcccgtcccggactggggccagggaaccctggtcaccgtctcctca

SEQ ID NO: 8685 - DNA, 280 bp, Homo sapiens
  source 1..280: mol_type = other DNA
tgtgggctctggattcactttcagcagaactgagatgaattggttccgccaggctccagggaaggggcctgagtggcttgcgtacattgatagtactcgaacgaatataaactacgcagactctgtgaagggccgattcaccatttccagagacgacgccaagaactccgtctttctgcaaatgaactccctgagagccgaagacacggctgtttactactgtgccaggggcaacccagttcctgactggggccagggaaccctggtcaccgtctcctcg

SEQ ID NO: 8686 - DNA, 280 bp, Homo sapiens
  source 1..280: mol_type = other DNA
tgtgggctctggattcattttcagtaaaactgagatgaactggttccgccaggctccagggaaggggcctgagtggcttgcgtatattagtagtactcgtacgaacataaactacgcagactctgtgaagggccgattcttcatctccagagacgacgccaagaactccctctttctgcaaatgaactccctgagagccgaagacacggctttttactactgtgccaggggcaatccagttcctgactggggccggggaaccctggtcaccgtctcctcg

SEQ ID NO: 8687 - DNA, 280 bp, Homo sapiens
  source 1..280: mol_type = other DNA
tgcaacctctggattcaccttcagtgacactgaaatgaactgggtccgccaggctccagggcaggggctgcagtggctttcatacattagtagtagtggcgataacataaactacgcagactctgtgaagggccgattcaccgtctccagagacaacggtaagaactcactttatctgcaaatcaacagcctgagagccgaggacacggctgtttattactgtgcgagaggaaatcccgttcccgactggggccagggaaccctggtcatcgtctcctca

SEQ ID NO: 8688 - DNA, 283 bp, Homo sapiens
  source 1..283: mol_type = other DNA
cagtgtctctggtgggtccttaactgggtactattggagttggatccgccagcccccagggaagggactggaatggcttggctacatccattacaatgggagcaccctctacaacgcctccctcaagagtcgactcaccatatcggtcgacacgtccaagagccaattctccctgaccctgaggtctgtgaccgccggagacacagccgtatattattgtgcgagacatccgggggcgtcatttgacttttggggccggggaaccctggtcaccgtctcctca

SEQ ID NO: 8689 - DNA, 283 bp, Homo sapiens
  source 1..283: mol_type = other DNA
cagtgtctctggtgaccccatgacgggatattactatagttggatccgacagtccccagggaagggactggagtggattggctatatctattatactgggagcacctattacagcccctccctcaagagtcgagtcaccatgtcaatagacacgtccaagaatcacttctccctgaagttgagttctgtgaccgccgcagacacggccgtctattactgtgcgagacacccgggcgctagttttgacttttggggccagggaaccgtggtcaccgtctcctca

SEQ ID NO: 8690 - DNA, 283 bp, Homo sapiens
  source 1..283: mol_type = other DNA
cagtgtctctggtgaccccatgacgggatattactatagttggatccgacagtccccagggaagcgactggagtggattggctatatctattatactgggagcacctattacagtccctccctcgagagtcgagtcaccatgtcgatagacacgtccaagaatcacttctccctgaagttgagttctgtgaccgccgcagacacggccgtctattactgtgcgagacacccgggcgctagttttgacttttggggccagggaaccgtggtcaccgtctcctca

SEQ ID NO: 8691 - DNA, 280 bp, Homo sapiens
  source 1..280: mol_type = other DNA
tgaagcgtctggattcacctttagcacctctgtcatgacttgggtccgccaggctccagggaaggggctagaatgggtctccaccattagtggcagtggtgccagcacatactacgcagactccgtgaagggccggttcaccatctccagagacaattccaagaacaccctgtatctgcaaatgagcagcctgagagccgaggacacggccgcatattactgtgcgagacgcactttttttgactattggggccagggaaccctggtcaccgtctcctca

SEQ ID NO: 8692 - DNA, 280 bp, Homo sapiens
  source 1..280: mol_type = other DNA
tgaagcgtctggattcacctttagcacctctgtcatgacttgggtccgccaggctccagggaaggggctagaatgggtctccaccattagtggcagtggtgccagcacatactacgcagactccgtgaagggccagttcaccatctccagagacaattccaagaacaccctgtatctgcaaatgagcagcctgagagccgaggacacggccgcatattactgtgcgagacgcactttttttgactattggggccagggaaccctggtcaccgtctcctca

SEQ ID NO: 8693 - DNA, 280 bp, Homo sapiens
  source 1..280: mol_type = other DNA
tgcagcctctggattcacctttagtacctatggaatgaactgggtccgccaggctccagggaaggggctggagtgggtctcttttattattgggagtggtggcagcacatacgacgcagactccgtgaagggccggttcaccatctccagagacaattccaagaacacgctttatctgcaaatgaacagcctgagagccgaggacacggccgtatattactgtgcgagaaggactttctttgactactggggccagggaaccgtggtcaccgtctcctca

SEQ ID NO: 8694 - DNA, 280 bp, Homo sapiens
  source 1..280: mol_type = other DNA
tgaagcgtctggattcacctttagcacctctgtcatgacttgggtccgccaggctccagggaaggggctagaatgggtctccaccattagtggcagtggtgccagcacatactacgcagactccgtgaagggccggttcaccatctccagagacaattccaagaacaccctgtatctgcaaatgagcagcctgagagccgaggacacggccgcatattactgcgcgagacgcactttttttgactattggggccagggaaccctggtcaccgtctcctca

SEQ ID NO: 8695 - DNA, 289 bp, Homo sapiens
  source 1..289: mol_type = other DNA
tgcagcctctggattcagctttagtacctattggatgagctgggtccgccagactccagagaaggggctggagtgggtggccaacataaatgaggatggaagtaatggataccgtgtggactctgtgaagggccgattcaccgtctccagagacaacgccaagaacttagtgtatctgcaaatgagcagcctgagagtcgaggacacggctctgtattactgtgcgagagaggacggctacaatacatgtgactactggggccagggaaccctggtcaccgtctcctca

SEQ ID NO: 8696 - DNA, 289 bp, Homo sapiens
  source 1..289: mol_type = other DNA
tgtagcctctggattctcctttaggagttattggatgagttgggtccgccaggctccagggaaggggccggagtgggtggccaacataaaccaagatgaaagtgacaaatactttgtggactctgtgaagggccgattctccatctccagagacaacgccaagaattcactgtatctgcaaatgaatagcctcagagccgaggacacggctgtatattactgtgcgagagaagatggctacaacacctgtgactactggggccagggaaccctggtcaccgtctcctca

SEQ ID NO: 8697 - DNA, 274 bp, Homo sapiens
  source 1..274: mol_type = other DNA
tgcagcctctggattcagccttgatgattatgccatgcactgggtccggcaagctcccgggaagggcctggagtgggtcgcaggcattagtagggatagtaggagaataggctacgcggactctgtgaatggccgattcaccgtctccagagacgacgccaggaactccctctttctgcaaatgaacagtctgaaaattgacgacacggccttatattattgtacgaaatcaagtgtggactggggccagggaactctggtcaccgtttcttca

SEQ ID NO: 8698 - DNA, 274 bp, Homo sapiens
  source 1..274: mol_type = other DNA
tgaagtctctgggtttagtcttgaggagtttgccatgcactgggtccggcaagctcccgggaagggcctggagtgggtcgcaggtattagtaaggatagtagtagaatagggtatgcggactctgtgaatggccgattcaccgtctccagagacatcgccaggaactccgtgtttctgcaaatgaacagtctgagacctgaagacacggccacatactattgtacgaaatcaagtgtggactggggccagggaatcatggtcaccgtttcctca

SEQ ID NO: 8699 - DNA, 274 bp, Homo sapiens
  source 1..274: mol_type = other DNA
cgcagcctctggattcacctttgacgactttgccatgcactgggtccggcaacgtccagggcagggcctcgagtgggtcgcaggaattaagaaagatagtgggaccaaagggtatgcggactctgtgaagggccgattcaccatctccagagacaacgccaggaatttcgtctctctacaaatggacagtctgagacttgaggatacggccttgtattactgtacaaaatctagtgtggactggggccagggaactctggtcaccgtctcttca

SEQ ID NO: 8700 - DNA, 274 bp, Homo sapiens
  source 1..274: mol_type = other DNA
tgcagcctctggattcagccttgatgattatgccatgcactgggtccggcaagctcccgggaagggcctggagtgggtcgcaggcattagtagggatagtaggagaataggctacgcggactctgtgaatggccgattcaccgtctccagagacgacgccaggaaccccctctttctgcaaatgaacagtctgaaaattgacgacacggccttatattattgtacgaaatcaagtgtggactggggccagggaactctggtcaccgtttcttca

SEQ ID NO: 8701 - DNA, 274 bp, Homo sapiens
  source 1..274: mol_type = other DNA
tgcagcctctggattcacctttagtgattatgccatgcattgggtccgtcaggctccaggcaagggcctggagtgggtctcaggtattagtcggaccagtgatcgcataggctatgcggactctgtgaggggccgattcaccatctccagagacaacgccaggaactccctgtatcttgaaatgaattatctgaaacctgaggacacggccttctactactgtacaaagtcgtcggtggactggggccggggaaccctggtctccgtctcctca

SEQ ID NO: 8702 - DNA, 292 bp, Homo sapiens
  source 1..292: mol_type = other DNA
tgtagcctctggattcatcttcagtcgttatgaaatgaactgggtccgccaggctccagggaagggactggagtggatttcatacattagtggcagtggtagtaccacagaccgcgcagactctgtgaagggccgattcaccatctccagagacaacgccaagaactcattgtatctgcaaatgaacagcctgagagccgaggacacggctgtctattactgtgcgagagatggaggccgcggctgggcccttgactactggggccagggaaccttggtcaccgtctcctca

SEQ ID NO: 8703 - DNA, 292 bp, Homo sapiens; identical to SEQ ID NO: 8702
  source 1..292: mol_type = other DNA

SEQ ID NO: 8704 - DNA, 292 bp, Homo sapiens
  source 1..292: mol_type = other DNA
tgcagcctctggaatccccttaaggaattatgaaatgaattgggtccgccaggctccagggaagggactggagtggatttcatacgttgattctagtggtaataccaaagactacgcagactctgtgaagggccgattcaccatctccagagacaacgccaagaattcattgtttctgcaaatgaacagcctgagagtcgacgacacggctgtttattattgtgcgagagatggaggacgcggctgggcccttgactactggggccagggaatcctggtcaccgtctcctcg

SEQ ID NO: 8705 - DNA, 292 bp, Homo sapiens; identical to SEQ ID NO: 8704
  source 1..292: mol_type = other DNA

SEQ ID NO: 8706 - DNA, 292 bp, Homo sapiens
  source 1..292: mol_type = other DNA
tgcagcctctggattcatcttcaataattatgaaatgaactgggtccgccaggctccagggaagggactggaatggatttcatacatttattctgacggaaataccaaagactacgcagactctgtaaagggccgattcaccatctccagagacaacgccaagaactcactgtatctgcaaatgaacaacctgagagtcgacgacacggctgtttattattgtgcgagagatggaggacgcggctgggcccttgactactggggccagggaaccctggtcaccgtctcctca

SEQ ID NO: 8707 - DNA, 292 bp, Homo sapiens
  source 1..292: mol_type = other DNA
tgcagcctctggaatccccttgagcaattatgagatgaactgggtccgccaggctccagggaagggactggagtggatctcatacattaatcccagtggtagtaccgaagactacgcagactctgtgaagggccggttcaccatctccagagacaacgccaagaattcattgtttctgcaaatgaacagcctgagagtcgacgacacggctgtttattactgtgcgagagatggaggacgcggctgggcccttgactactggagccagggaatcctggtcaccgtctcctca

SEQ ID NO: 8708 - DNA, 292 bp, Homo sapiens
  source 1..292: mol_type = other DNA
tgcagcctctggaatccccttaaggaattatgaaatgaattgggtccgccaggctccagggaagggactggagtggatttcatacgttgattctagtggtaataccaaagactacgcagactctgtgaagggccgattcaccatctccagagacaacgccaagaattcattgtttctgcaaatgaacagcctgagagtcgacgacacggctgtttattattgtgcaagagatggaggacgcggctgggcccttgactactggggccagggaatcctggtcaccgtctcctcg

SEQ ID NO: 8709 - DNA, 292 bp, Homo sapiens
  source 1..292: mol_type = other DNA
tgcagcctctggaatccccttaaggaattatgaaatgaattgggtccgccaggctccagggaagggactggagtggatttcatacgttgatcctagtggtaataccaaagactacgcagactctgtgaagggccgattcaccatctccagagacaacgccaagaattcattgtttctgcaaatgaacagcctgagagtcgacgacacggctgtttattattgtgcgagagatggaggacgcggctgggcccttgactactggggccagggaatcctggtcaccgtctcctcg

SEQ ID NO: 8710 - DNA, 292 bp, Homo sapiens
  source 1..292: mol_type = other DNA
tgcagcctctggaatccccttaaggaattatgaaatgaattgggtccgccaggctccagggaagggactggagtggatttcatacgttgattctagtggtaataccaaagactacacagactctgtgaagggccgattcaccatctccagagacaacgccaagaattcattgtttctgcaaatgaacagcctgagagtcgacgacacggctgtttattattgtgcgagagatggaggacgcggctgggcccttgactactggggccagggaatcctggtcaccgtctcctcg

SEQ ID NO: 8711 - DNA, 292 bp, Homo sapiens
  source 1..292: mol_type = other DNA
tgcagcctctggaatccccttaaggaattatgaaatgaattgggtccgccaggctccagggaagggactggagtggatttcatacgttgattctagtggtaataccaaagactacgcagactctgtgaagggccgattcaccatctccagagacaacgccaagaattcattgtttctgcaaatgaacaacctgagagtcgacgacacggctgtttattattgtgcgagagatggaggacgcggctgggcccttgactactggggccagggaatcctggtcaccgtctcctcg

SEQ ID NO: 8712 - DNA, 292 bp, Homo sapiens
  source 1..292: mol_type = other DNA
tgtagcctctggattcatcttcagtcgttatgaaatgaactgggtccgccaggctccagggaagggactggagtggatttcatacattagtggcagtggtagtaccacagaccgcgcagactctgtgaagggccgattcaccatctccagagacaacgccaagaactcattgtatctgcaaatgaacagcctgaaagccgaggacacggctgtctattactgtgcgagagatggaggccgcggctgggcccttgactactggggccagggaaccttggtcaccgtctcctca

SEQ ID NO: 8713 - DNA, 298 bp, Homo sapiens
  source 1..298: mol_type = other DNA
cactgtctctggtgactccatcagcagttatactacctattactggggctgggtccgccagtccccaggaaagggcctggagtggattggggctatcttttatagtgggaccacgcactacaacccgtccctcaagacacgagtcaccatatccctagacacgtccaaggaccagttctccctgaagctgatttctgtgacagccgcagacacggctatatattactgtgcgaggtctcgtggatacagctatgcccacgacccctggggccagggaaccctggtcaccgtctcgtca

SEQ ID NO: 8714 - DNA, 298 bp, Homo sapiens
  source 1..298: mol_type = other DNA
cactgtctctggtgactccatcagcagttatactacctattactggggctgggtccgccagtccccaggaaagggcctggagtggattggggctatcttttatagtgggaccacgcactacaacccgtccctcaagacacgagtcaccatatccctagacacgtccaaggaccagttctccctgaagctgatttctgtgacagccgcagacacggctgtgtattactgtgcgaggtctcgtggatacagctatgcccacgacccctggggccagggaaccctggtcaccgtctcgtca

SEQ ID NO: 8715 - DNA, 298 bp, Homo sapiens; identical to SEQ ID NO: 8714
  source 1..298: mol_type = other DNA

SEQ ID NO: 8716 - DNA, 298 bp, Homo sapiens
  source 1..298: mol_type = other DNA
cactgtctctggtgactccatcagcagttatactacctattactggggctgggtccgccagtccccaggcaagggcctggagtggattggggctatcttttatagtgggaccacgcactacaacccgtccctcaagagacgagtcaccatatccctagacacgtccaaggaccagttctccctgaagctgatttctgtgacagccgcagacacggctgtgtattactgtgcgaggtctcgtggatacagctatgcccacgacccctggggccagggaaccctggtcaccgtctcgtca

SEQ ID NO: 8717 - DNA, 298 bp, Homo sapiens
  source 1..298: mol_type = other DNA
cactgtgtctggtgactctatgagcagcagtagtgattactactggggttgggtccgccaggccccagggaagggactggagtggatagggggtatgtttcttagtgggcccacccattacgacccgtccctgaagagtcgagtcaccatatccgtagacacgtccacgaaccagttcttcctgaaactgaactatgtaaccgccgcagacacggctgtgtattactgtgcgagatcccgtggatacagctatgctcatgacccctggggcccgggaaccctggtcatcgtctcctca

SEQ ID NO: 8718 - DNA, 295 bp, Homo sapiens
  source 1..295: mol_type = other DNA
cggtgcctctggattcaccttcggtcgctatagcatgaactgggtccgccaggctccagggaagggactggagtgggtctcagccattagtagtagtaggagttatatatattatgtagactcagtgaagggccgattcaccatctccagagacgacgccaagagctcagtatatctgcaaatgaatagcctgagagccgaggacacggctgtttattactgtgcgagagcgggcccatatggttcggggagttttgactactggggccggggaaccctggtcaccgtctcctca

SEQ ID NO: 8719 - DNA, 295 bp, Homo sapiens
  source 1..295: mol_type = other DNA
cggtgcctctggattcaccttcggtcgctttagcatgaactgggtccgccaggctccagggaaggggctggagtgggtctcagccattagtagtggtagtggttatatatattatctagactcagtgaagggccgattcaccatctccagagacgacgccaagagctcaatatatctgcaaatgaatagcctgagagccgaggacacggctgtttattactgtgcgagagcgggcccctatggttcggggagttttgactactggggccggggaaccctggtcaccgtctcctca

SEQ ID NO: 8720 - DNA, 295 bp, Homo sapiens
  source 1..295: mol_type = other DNA
tgcagcctctggattcactttcagaagctatagcttgaactgggtccgccaggctccagggaaggggctcgagtgggtctcagccataagtagtgaaagtaagtacatatactacgcagactcagtggagggccggttcaccattttcagagacgatgccaagaactcagtgtatctgcaaatgaacaccctgggagccgatgacacggctgtgtattattgcgcgagagccggcccctatggttcggggagttttgactactggggccaggggaccctggtcatcgtctcccca

SEQ ID NO: 8721 - DNA, 295 bp, Homo sapiens
  source 1..295: mol_type = other DNA
cggtgcctctggattcaccttcggtcgctatagcatgaactgggtccgccaggctccagggaagggactggagtgggtctcagccagtagtagtagtaggagttatatatattatgtagactcagtgaagggccgattcaccatctccagagacgacgccaagagctcagtatatctgcaaatgaatagcctgagagccgaggacacggctgtttattactgtgcgagagcgggcccatatggttcggggagttttgactactggggccggggaaccctggtcaccgtctcctca

SEQ ID NO: 8722 - DNA, 295 bp, Homo sapiens; identical to SEQ ID NO: 8719
  source 1..295: mol_type = other DNA

SEQ ID NO: 8723 - DNA, 295 bp, Homo sapiens
  source 1..295: mol_type = other DNA
tgcaccgtctggattcatcttcagtaactatgccatgcactgggtccgccaggctccaggcaaggggctggagtgggtggccgttatctggtatgacggaagtaataaattacatgcagactccgtgaagggccgattcaccatctccagagacaattccgagaacacgctgtccctgcaaatgaacaacctgagagccgacgactcggctgtgtattattgtgcgagaggcgggaccacgggaggctacggtatggacgtctggggccaggggacctcggtcaccgtctccaca

SEQ ID NO: 8724 - DNA, 295 bp, Homo sapiens
  source 1..295: mol_type = other DNA
tgcagcgtctggattcaccttcgggaaccatggcatgcactgggtccgccaggctccagggaaggggctggagtgggtggcagttatatggtatgatggaagtaatagccactatgcagactctgtgaagggccgattcaccatctccagagacaattccgagaacatggtgtatctaaaaatgaccaacctgagagccgaggatacggctctctactactgtgccagaggtggaacgacggggggctacggtatggacgtctggggccaagggaccacggtcaccgtctcctca

SEQ ID NO: 8725 - DNA, 295 bp, Homo sapiens
  source 1..295: mol_type = other DNA
tgcaccgtctggattcatcttcagtaactatgccatgcactgggtccgccaggctccaggcaaggggctggagtgggtggccgttatctggtatgacggaagaaataaattatatgcagactccgtgaagggccgattcaccatctccagagacaattccgagaacacgctgtccctgcaaatgaacaacctgagagccgaagactcggctatctattattgtgcgagaggcgggaccacgggaggctacggtatggacgtctggggccaggggacctcggtcaccgtctccaca

SEQ ID NO: 8726 - DNA, 277 bp, Homo sapiens
  source 1..277: mol_type = other DNA
cataggttctggattcacgtttggtgattacgctatgacttgggtccgccaggctccagggaaggggctggagtgggtaggtttcattagaactaaaggtaatggtgggacaacagattatgccgcgtctgtgaaaggcagattcaccatctcaagagatgactccaaaagcatcgcctacttgcaaatgaatagcctgaaaatcgaggacacagccgtgtattactgtgcccgcaggggctactggggccggggaaccctggtcaccgtctcctca

SEQ ID NO: 8727 - DNA, 277 bp, Homo sapiens
  source 1..277: mol_type = other DNA
tacagcttctggattcacctttagtgattatgctatgacctgggtccgccaggctccagggaaggggctggagtgggttggtttcattagaaacaaaacttatggtgggacaacagactacgccgcttctgtgaagggcagattcactatctcaagagatgattccaaaagcatcgcctatctgcaaatgaacagcctgaaagccgaggacacagccgtatattactgtgcgagacggggctactggggccagggaaccctggtcaccgtctcctca

SEQ ID NO: 8728 - DNA, 277 bp, Homo sapiens
  source 1..277: mol_type = other DNA
tacaggttctggattcacctttggtgattatgctatgacctgggtccgccaggctccagggaaggggctggagtgggtaggtttcattagaaacaaaacttatggtgggacaacagattacgccgcgtctgtgaaaggcagattcaccatctcaagagatgattccaaaagcatcgcctatctgcaaatgaacagcctgaaaaccgaggacacagccgtgtattactgtgcgagaaggggctactggggccagggaaccctggtcaccgtctcctca

SEQ ID NO: 8729 - DNA, 277 bp, Homo sapiens
  source 1..277: mol_type = other DNA
tacagcttctggattcacctttagtgattatgctatgacctgggtccgccaggctccagggaaggggctggagtgggttggtttcattagaaacaaaacttatggtgggacaacagactacgccgcttctgtgaagggcagattcactatctcaagagatgattccaaaagcatcgcctatctgcaaatgaacagcctgaaagtcgaggacacagccgtatattactgtgcgagacggggctactggggccagggaaccctggtcaccgtctcctca

SEQ ID NO: 8730 - DNA, 283 bp, Homo sapiens
  source 1..283: mol_type = other DNA
cgctgtctctggtggctccatcagtggttactactggagctgggtccggcagcccccagggaagggactggagtacattggttatatgtattacagtgggagcaccaactacaacccctccctcaagagtcgagtcaccatatcagtggacacgtccaagaatcagttctccctgaggctgagctctgtgaccgctgcggacacggccatatattattgtgcgaggttgagagggagttatttagactactggggccagggaaccctggtcaccgtctcctca

SEQ ID NO: 8731 - DNA, 283 bp, Homo sapiens
  source 1..283: mol_type = other DNA
cgctgtctctggtggctccatcagtggttactactggagctgggtccggcagcccccagggaagggactggagtacattgggtatatgtattacagtggcagcaccaattacaacccctccctccagagtcgagtcaccatttcagtggacacgtccaagaaccagttctccctgaggctgagctctgtgaccgctgcggacacggccgtatattactgtgcgaggttgagagggagctatttagactactggggccagggaaccctggtcaccgtctcctca

SEQ ID NO: 8732 - DNA, 283 bp, Homo sapiens
  source 1..283: mol_type = other DNA
cgttgtctctggtggctccatcagtggttactactggagctggatccggcagcccccagggaagggactggagtacattgggtatatgtattacagtgggagtaccaactacaacccctccctcaagagtcgagtcaccatatcagtggacacgtccaagaaccagttctccctgaggctgagctctgtgaccgctgcggacacggccgtatattactgtgcgaggttgagagggagctatttagactactggggccagggaaccctggtcaccgtctcctca

SEQ ID NO: 8733 - DNA, 283 bp, Homo sapiens
  source 1..283: mol_type = other DNA
cgctgtctctggtggctccatcagtggttactactggagctgggtccggcagcccccagggaagggactggagtacattgggtatatgtattacagtgggagcaccaactacaacccctccctcaagagtcgagtcaccatctcagtggacacgtccaagaaccagttctccctgaggctgagctctgtgaccgctgcggacacggccgtatattactgtgcgaggttgagagggagctatttagactactggggccagggaaccctggtcaccgtctcctca

SEQ ID NO: 8734 - DNA, 283 bp, Homo sapiens
  source 1..283: mol_type = other DNA
cactgtctctggtggctccatcagtggttactactggagctggatccggcagcccccagggaagggactggaatacattgggtatatgtattacagtggggaaaccaactacaacccctccctcaagagtcgagtcaccatatcagtggacacgtccaagaaccagttctccctgagactgagctctgtgaccgctgcggacacggccgtatattactgtgcgaggttgagagggagctatttagactactggggccagggaaccctggtcaccgtctcctca

SEQ ID NO: 8735 - DNA, 283 bp, Homo sapiens
  source 1..283: mol_type = other DNA
cgctgtctctggtggctccatcagtggttactactggagctggatccggcagcccccagggaagggactggagtacattgggtatatgtattacagtgggagcaccaactacaacccctccctcaagagtcgagtcaccatatcagtggacacgtccaagaaccagttctccctgaggctgagctctgtgaccgctgcggacacggccgtatattactgtgcgaggttgagagggagctatttagactactggggccagggaaccctggtcaccgtctcctca

SEQ ID NO: 8736 - DNA, 283 bp, Homo sapiens
  source 1..283: mol_type = other DNA
cgctgtctctggtggctccatcagtggttactactggagctgggtccggcagcccccagggaagggactggagtacattgggtatatgtattacagtgggagcaccaactacaacccctccctcaagagtcgagccaccatatcagtggacacgtccaagaaccagttctccctgaggctgagctctgtgaccgctgcggacacggccatatattactgtgcgaggttgagagggagctatttagactactggggccagggaaccctggtcaccgtctcctca

SEQ ID NO: 8737 - DNA, 283 bp, Homo sapiens
  source 1..283: mol_type = other DNA
cgctgtctctggtggctccatcagtggttactactggagctgggtccggcagcccccagggaagggactggaatacattgggtatatgtattacagtgggagcaccaactacaacccctccctcaagagtcgagtcaccatatcagtggacacgtccaagaaccagttctccctgaggctgagctctgtgaccgctgcggacacggccgtatattactgtgcgaggttgagagggagctatttagactactggggccagggaaccctggtcaccgtctcctca

SEQ ID NO: 8738 - DNA, 283 bp, Homo sapiens
  source 1..283: mol_type = other DNA
cgctgtctctggtggctccatcagtggttactactggagctggatccggcagcccccagggaagggactggagtatattgggtatatgtattacagtgggagcaccaactacaacccctccctcaagagtcgagtcaccatatcagtggacacgtccaagaaccagttctccctgaggctgagctctgtgaccgctgcggacacggccgtatattactgtgcgaggttgagagggagctatttagactactggggccagggaaccctggtcaccgtctcctca

SEQ ID NO: 8739 - DNA, 283 bp, Homo sapiens
  source 1..283: mol_type = other DNA
cactgtctctggtggctccatcagtgattactactggaactggatccggcagcccccagggaagggactggagtggattgggtatatctattacagtgggagcaccaactacaacccctccctcaagagtcgagtcaccatgtcagtagacacgtccaagaaccaattctccctgaacctgagctctgtgaccgccgcagacacggccgtgtattactgtgcgagactgagggggagctaccttgactactggggccagggaaccctggtcaccgtctcctcg

SEQ ID NO: 8740 - DNA, 277 bp, Homo sapiens
  source 1..277: mol_type = other DNA
tgcagcctctggattcaccttcagtaggtcctggatgcactgggtccgtcaagctccagggaaggggctggtgtgggtctcacgtcttaatgctgatgcgactctcacaaactacgcggactccgtgaagggccgattcaccatctccagagacaacgccaagaacacgctgtctctgcaaatgaacggtctgagagccgaggacacggctgtgtattattgtgtaagggggttgggggaaatgtggggccaagggacaatggtcaccgtctcttca

SEQ ID NO: 8741 - DNA, 277 bp, Homo sapiens
  source 1..277: mol_type = other DNA
tggagcctctggattcaccttcagaagcttctggatacactgggtccgccaggctccagggaaggggccggtgtgggtctcacgtatgaacagtgatgggactatgacaggcttcgcggactccgtgaagggccgattcatcattgccagggacatagccaagaacacggtgaatctccaaatgaaccgtctgacagtcgaggacacaggtgtatattattgtgtaagaggactaggggaaatgtggggccgagggacaaaagtcatcgtctcttca

SEQ ID NO: 8742 - DNA, 277 bp, Homo sapiens
  source 1..277: mol_type = other DNA
tggagcctctggattcaccttcagaagcttctggatacactgggtccgccaggctccagggaaggggccggtgtgggtctcacgtatgaacagtgatgggactatgacaggcttcgcggactccgtgaagggccgattcatcattgccagggacatagccaagaacacggtgaatctccaaatgaaccgtctgacagtcgaggacacaggtgtatattattgtgtaagaggactaggggaaatgtggggccgagggacaaaggtcatcgtctcttca

SEQ ID NO: 8743 - DNA, 292 bp, Homo sapiens
  source 1..292: mol_type = other DNA
tgcagcctctggattcaccttcagtagctactggatgcactgggtccgccaagctccagggaaggggctggtgtgggtctcacgtattaatggtaatggggggagtacaaattacgcggactccgtgaagggccgattcaccacctccagggacaacgccaagaacacgctatatctgcaaataaacagtctgacagccgaagacacggctgtgtactactgtgcaagaggcaacgatggttatgggaactttgactactggggccagggaaccctggtcaccgtctcctca

SEQ ID NO: 8744 - DNA, 292 bp, Homo sapiens
  source 1..292: mol_type = other DNA
tgcagcctctggattcaccttcagtagctactggatgcactgggtccgccaagctccagggaaggggctggtgtgggtctcacgtattaatggtaatgggggaactacaagttacgcggactccgtgaagggccgattcaccatctccagggacaacgccaagaacacgctgtatctgcacatgaacagtctgacagccgaggacaacggtgtatattactgtgcaagaggcaacgatggttatgggaactttgactactggggccagggaaccctggtcaccgtctcctca

SEQ ID NO: 8745 - DNA, 292 bp, Homo sapiens
  source 1..292: mol_type = other DNA
tgcagcctctggattcaccttcagtagctactggatgcactgggtccgccaagctccagggaaggggctggtgtgggtctcacgtattcatggtaatgggggaactacaaattacgcggactccgtgaagggccgattcaccatctccagggacaacgccaagaacacgctgtttgtgcagatgaacagtctgacagccgaggacacgggtgtgtattactgtgcaagaggcaacgatggttatgggaactttgactactggggccagggaaccctggtcaccgtctcctca

SEQ ID NO: 8746 - DNA, 292 bp, Homo sapiens
  source 1..292: mol_type = other DNA
tgcagcctctgcattcaccttcagtagctactggatgcactgggtccgccaagttccagggaagggactggtgtgggtctcacgtattagtcctgatgggagtagtacaaactacgcggactccgtgacgggccgattcaccatctccagagacagcgccaagagcacgctgtatctgcaaatgaacagtctgagagccgaggacacggctgtgtattactgtgcaagaggcaatgatggttacgggaattttgactactggggccagggagtcctggtcaccgtctcctca

SEQ ID NO: 8747 - DNA, 292 bp, Homo sapiens
  source 1..292: mol_type = other DNA
tgaagcctctggattcaccttcagtagctactggatgcactgggtccgccaacctccagggaaggggctggtgtgggtctcacgtattagtagtaatgggggaactacaaattacgcggaatccgtgaagggccgattcaccatctccagggacaacgccaagaacacactatatgtgcaaatagatagtctgacagccgaagacacggctgtttattactgtgcaagaggcaacgatggttatgggaactttgactactggggccagggaaccctggtcaccgtctcctca

SEQ ID NO: 8748 - DNA, 292 bp, Homo sapiens
  source 1..292: mol_type = other DNA
tgcagcctctggattcaccttcagtagctactggatgcactgggtccgccaagctccagggaaggggctggtgtgggtctcacgtattcatggtaatgggggaactacaaattacgcggactccgtgaagggccgattcaccatctccagggacaacgccaagaacacgctgtttctgcagatgaacagtctgacagccgaggacacgggtgtgtattactgtgcaagaggcaacgatggttatgggaactttgactactggggccagggaaccctggtcaccgtctcctca

SEQ ID NO: 8749 - DNA, 292 bp, Homo sapiens
  source 1..292: mol_type = other DNA
tgcagcctctggattcaccttcagtagctatagcatgaactgggtccgccaggctccagggaaggggctggagtgggtctcacgtattcatggtaatgggggaactacaaattacgcggactccgtgaagggccgattcaccatctccagggacaacgccaagaacacgctgtttctgcagatgaacagtctgacagccgaggacacgggtgtgtattactgtgcaagaggcaacgatggttatgggaactttgactactggggccagggaaccctggtcaccgtctcctca

SEQ ID NO: 8750 - DNA, 289 bp, Homo sapiens
  source 1..289: mol_type = other DNA
tgcagcgtctggattcaccttcagtagctttggcatgcactgggtccgccaggctccaggcaaggggctggagtgggtggcagttatatggtatgatgaaagtaataaatactatgcagactccgtgaagggccgattcaccatctccagagacacttccaagaacacgctgtatctgcaaatgaacagcctgagagccgaagacacggctgtgtattactgtgcgaaagatagcagcagctggtccattgactactggggccagggaaccctggtcaccgtctcctca

SEQ ID NO: 8751 - DNA, 289 bp, Homo sapiens
  source 1..289: mol_type = other DNA
tgcagcgtctggattcattttcagtagctatggcatgcactgggtccgccaggctccaggcaaggggctggagtgggtggcagttatatggtatgatggaagtaatcaatactatgcagactccgtgaagggccgattcaccatctccagagacatttccaagaacacgctgtatctgcaaatgaacagcctgagagccgaggacacggctgtgtattactgtgcgaaagatagtagcagttggtccattgactactggggccagggaaccctggtcaccgtctcctca

SEQ ID NO: 8752 - DNA, 280 bp, Homo sapiens
  source 1..280: mol_type = other DNA
tgcagcctctggatccagtgttagtaaattttggatgaactggatccgccaggctccagggaaggggctggagtgggtggccaacataaaagacgacggaagtgagaaaaactatattgactctgtgaagggccgattcacaatctccagagacaacgccaagaactcactgtatctgcaattgaacagcctgagagtcgaagacacggctgtgtattattgtgccagaggtcattatgataattattggggccagggaaccttggtcactgtctcctca

SEQ ID NO: 8753 - DNA, 280 bp, Homo sapiens
  source 1..280: mol_type = other DNA
tgcagtctctggactcacctttagcaacttgtatatgaactgggtccgccaggctccagggaaggggctggagtgggtggccaacataaatgcagatggatctgagagaaactatgtggactctgtgaagggccgattcaccatctccagagacaacgccaagaattcactgtatctgcaaatgaacagcctgagcgccgaggacacggctgtatactactgtgcgcgaggccactatgataattatcggggccagggaaccctggtcaccgtctcctca

SEQ ID NO: 8754 - DNA, 280 bp, Homo sapiens; identical to SEQ ID NO: 8753
  source 1..280: mol_type = other DNA

SEQ ID NO: 8755 - DNA, 277 bp, Homo sapiens
  source 1..277: mol_type = other DNA
tgcagcctctggattcaccttcagttactactggatgcactgggtccgccaagctccagggaaggggctggtgtgggtctcacgaattaataatgatgggaatatcataacttacgcggactccgtgaagggccgattcaccatctccagagactacgccaagaacacgatgtatcttcaaatgaacagtctgagaggcgaggacacggctgtgtattactgtgcaagggggatgggagaccactggggccagggaaccctggtcaccgtctcctca

SEQ ID NO: 8756 - DNA, 277 bp, Homo sapiens; identical to SEQ ID NO: 8755
  source 1..277: mol_type = other DNA

SEQ ID NO: 8757 - DNA, 277 bp, Homo sapiens
  source 1..277: mol_type = other DNA
tacagcctctggattcaccttcaatagatactggatgcactgggtccgccaagctccagggaaggggctggtgtgggtcgcacgtattgatagtggtggccttatgacaacctacgcggactccgtgaagggccgattcaccatctccagagacaacgccaagaacacactgtatctgcaaatgcacagtctgagagtcgaggacacggctgtgtatttctgtgccaggggcatgggggaccactggggccagggaaccctggtcaccgtctcctca

SEQ ID NO: 8758 - DNA, 295 bp, Homo sapiens
  source 1..295: mol_type = other DNA
cagtgtctctggtggctccatcagtacctactactggaactggatccggcagtccccagggaagggactggagtggattggacatatctataacagtgggagcaccaactataacccctccctcaagagtcgagtcaccatatcagtagacatgtccaagaaccagttctccctgaagttgtactctgtgaccgctgcggacacggccgtttattactgtgcgcgagacggtagtgggacctactttaactggttcgacccctggggccagggaaccctggtcaccgtctcctca

SEQ ID NO: 8759 - DNA, 295 bp, Homo sapiens
  source 1..295: mol_type = other DNA
cagtgtctctggtggctccatcagtacctactactggaactggatccggcagtccccagggaagggactggagtggattgggcatatctataacagtgggagcaccaactataacccctccctcaagagtcgagtcaccatatcagtagacatgtccaagaaccaattctccctgaagttgtactctgtgaccgctgcggacacggccgtttattactgtgcgcgagacggtagtgggacctactttaactggttcgacccctggggccagggaaccctggtcaccgtctcctca

SEQ ID NO: 8760 - DNA, 295 bp, Homo sapiens
  source 1..295: mol_type = other DNA
cactgtctctggtgtctccatcagtaattactactggagctggatccggcagcccccggggaagggactggagtggattgggtatatctataacagtgggagcaccaactacaacccctccctcaagagtcgagtcaccatatcagtagacacgtccaagaaccagttctccctgaagctgagctctgtgaccgctgcggacacggccgtgtattactgtgcgagagatggttcggggacttatttcaactggttcgacccctggggccagggaaccctggtcaccgtctcctca

SEQ ID NO: 8761 - DNA, 292 bp, Homo sapiens
  source 1..292: mol_type = other DNA
tgtagcctctggattcagattcagtacttatggcatacactgggtccgccaggctccaggcaaggggctggagtgggtggcagttgtttcatctgatggacgtatacaatactatgcagactccgtgaaggaccgattcaccatctccagagacaattccaagaacactctctatctgcaaatgagcagcctgagagttgatgacacggccatatattactgtgcgaaagaaataggagtggctgacctctttgactattggggccagggaaccctggtcaccgtctcctca

SEQ ID NO: 8762 - DNA, 292 bp, Homo sapiens
  source 1..292: mol_type = other DNA
tgcagcctctggattcaccttcagcagctatggcatacactgggtccgccaggctccaggcaaagggctggagtggatggcagtaatttcatatgacggaagtaaaacatactatgcagattccgtgaaggaccgattcaccatctccagagacaattccaggaacactctgtatctgcaaatgaacaccctgagagctgaggacacggcggtgtattactgtgcgaaagaaataggagtggctgacctctttgactattggggccagggaaccctggtcaccgtctcctct

SEQ ID NO: 8763 - DNA, 292 bp, Homo sapiens
  source 1..292: mol_type = other DNA
tgcagcctctggattcagcttcagttcttatggcatacactgggtccgccaggctccaggcaaggggctggagtgggtggcagttatttcagacaatggaattatgcaatactatgcagactccgtgacgggccgattcaccatctccagagacaactccaagaacactctgtatctgcaaatgaacagcctgacagttgaggacacggctatttactactgtgcgaaagaaataggcgtggctgacctctttgactattggggccagggaaccctggtcaccgtctcctca

SEQ ID NO: 8764 - DNA, 292 bp, Homo sapiens
  source 1..292: mol_type = other DNA
tgcagcctctggattcagcttcagtaattatggcatacactgggtccgccaggctccaggcaaggggctggagtggatgggagttatttcatctgatggacgtataacatactatgcagactccgtgaaggaccgattcaccatctccagagacaattccaagaacactctgtatctgcaattgaacagcctgagacctgaggacacggctgtgtattactgtgcgaaagaaataggagtggccgacctctttgactattggggccagggaaccccggtcaccgtctcctct

SEQ ID NO: 8765 - DNA, 292 bp, Homo sapiens
  source 1..292: mol_type = other DNA
tgcagcctctggattcaccttcagtagttttggcatacactgggtccgccagcctccaggcaaggggctggaatggatggcagttatttcatatgatggaaatatagcatactatgcagactctgtgaagggccgattcaccatctccagagacaattccaagaacactctgtatctgcaattgaacagcctgagacctgaggacacggctatatattactgtgcgaaagaaataggagtggctgacctctttgactattggggccagggaaccctggtcaccgtctcctct

SEQ ID NO: 8766 - DNA, 292 bp, Homo sapiens
  source 1..292: mol_type = other DNA
tgcagcctctggattcaccttcagtagttatggcatacactgggtccgccaggctccaggcaaggggctcgagtgggtaggagttatttcatctgatggaaatatacaatactatgcagactccctgaaggaccgattcaccatctccagagacaattccaagaacactctgtatctgcaaatgaacagcctgagagttgatgacacggctacatattactgtgcgaaagaaataggagtggctgacctctttgactattggggccagggaaccctggtcaccgtctcctca

SEQ ID NO: 8767 - DNA, 292 bp, Homo sapiens
  source 1..292: mol_type = other DNA
cgcagcctctggattcaccttcagaagctatggcatacactgggtccgccaggctccaggcaaggggctggagtgggtggcagttatatcatatgatggaagtaatacatactatgcagactccgtgaagggccgattcaccatctccagagacaattccaagaacacgctgtatctgcaaatgtacagcctgagagctgaagacacggctgtgtattactgtgcgaaagagataggagtggctgacctctttgactactggggccagggaaccctggtcaccgtctcctca

SEQ ID NO: 8768 - DNA, 292 bp, Homo sapiens
  source 1..292: mol_type = other DNA
tacagcctctggattcagcttcagtttttatggcatacactgggcccgccgggctccaggcagggggctggagtgggtgggagtcatttcatctgatggaaataaacaatactatggagactccgtgaagggccgattcaccatctccagagacaattccaagaacactctgtatctgcagatgaacagcctgagagctgacgacacggctatatactactgtgcgaaagaaataggagtggctgacctctttgactattggggccagggaaccctggtcaccgtctcctca

SEQ ID NO: 8769 - DNA, 292 bp, Homo sapiens
  source 1..292: mol_type = other DNA
tgtagcctctggattcagattcagtacttatggcatacactgggtccgccaggctccaggcaaggggctggagtgggtggcagttgtttcatctgatggacatatacaatattatgcagactccatgaagggccgattcaccatctccagagacaattccaagaacactctctatctgcagatgagcagcctgagacttgatgacacggctatatattactgtgcgaaagaaataggagtggctgacctctttgactattggggccagggaaccctggtcaccgtctcctca

SEQ ID NO: 8770 - DNA, 292 bp, Homo sapiens
  source 1..292: mol_type = other DNA
tgcagcctctggattcaccttcagttcttatggcatacactgggtccgccaggctccaggcaaggggctggagtggatgggagttatttccagtgatggacatatcacatattatgcagactccgtgaaggaccgattcaccatctccagagacaactccaagaacactctgtatctgcaaatgaagagcctgagagttgaagacacggctgtgtattactgtgcgaaagaaataggagtggccgacctctttgactattggggccagggaaccctggtcaccgtctcctct

SEQ ID NO: 8771 - DNA, 292 bp, Homo sapiens
  source 1..292: mol_type = other DNA
tgcagcctctggattcgccttcagtgactatggcatacactgggcccgccaggctccaggcaaggggctggagtggctggcagttatttcatctgacggaactaagacatactatggaaactccatgaaggaccgattcaccatctccagagacaactccaagaacattctgtatctgcaaatgaacagcctgagagctgaagacacggctgtgtattactgtgcgaaagaaataggagtggctgacctctttgactattggggccagggaaccccggtcaccgtctcctct

SEQ ID NO: 8772 - DNA, 286 bp, Homo sapiens
  source 1..286: mol_type = other DNA
tgcagcctctggtttctttttgattgactacgcgatgcactgggtccgccaggctccagggaaggggctggtgtgggtctcacgtattaggaccgatgagacttcggcaacctacgtcgactccgtgaagggccgattcaccagttccagagacgacgccaggaacacactgtatctgcaaatgaacagtctgagagccgaggacacgggtgtatattactgtgtaagagatgtcggatatgcttttgatatttggggccaagggacaatcgtcaccgtctctaca

SEQ ID NO: 8773 - DNA, 286 bp, Homo sapiens; identical to SEQ ID NO: 8772
  source 1..286: mol_type = other DNA

SEQ ID NO: 8774 - DNA, 286 bp, Homo sapiens
  source 1..286: mol_type = other DNA
tgcagcctctggattcaccctcagtacctactcgatgcactgggtccgccaagctccagggaaggggctggtgtgggtctcacgtagtaatacttatgggactaccacaacctacgcggactccgtgaagggccgattcaccatctccagagacaacgccaagaacacgctgtatctgcaaatgaacagtctgagagccgaggacacggctgtgtattattgtgtaagagatgtcggttatgcttttgatatctggggccaagggacaatggtctccgtctcttca

SEQ ID NO: 8775 - DNA, 292 bp, Homo sapiens
  source 1..292: mol_type = other DNA
tgcagcctctggatttactttcagtaatgcctggatgagctgggtccgccaggctccagggaaggggctggagtgggttggccgtattaaaagcaaaactgatggtgggacaacagactacgctgcacccgtgaaaggcagattcaccatctcaagagatgattcaaaaaacacgctgtatctgcaaatgaacagcctgaaaaccgaggacacagccgtgtattactgtaccacccgcacatggtcgttggttgactactggggccagggaaccctggtcaccgtctcctca

SEQ ID NO: 8776 - DNA, 292 bp, Homo sapiens
  source 1..292: mol_type = other DNA
tgcagtgtctggatttactctcagtaacgcctggatgagctgggtccgcaaggttccagggaaggggctggagtgggttggccgtattaaaagcaaaattgatggtgggacaacagactacgctgcacccgtgaaaggcagattcaccatctcaagagatgactcaaaaaacatgctgtttctgcaaatgaacagcctgaaaaccgaggacacagccgtgtattattgtaccacaaggacatggtccttggttgactactggggccagggaaccctggtcaccgtctcctca

SEQ ID NO: 8777 - DNA, 280 bp, Homo sapiens
  source 1..280: mol_type = other DNA
tgcagcctctggattcacctttagcacctatgccatgagctgggtccgccaggctccagggaagggactggagtgggtctcaagtattagtggtagtggtggcagcacatactacacagactccgtgaagggccgcttcaccatctccagagacaattccaagaacacgctgtatctgcaaatgaacagcctgagagccgaggacacggccttatattcttgtgcgagaacggtggcttgtgaagtctggggccagggaaccctggtcaccgtctcctcg

SEQ ID NO: 8778 - DNA, 280 bp, Homo sapiens
  source 1..280: mol_type = other DNA
tgcagcctctggattcacctttagcacctatgccatgagctgggtccgccaggctccagggaagggactggagtgggtctcaagtattagtggtagtggtggtagcacatactacacagactccgtgaagggccgcttcaccatctccagagacaattccaagaacacgctgtatctgcaaatgaacagcctgagagccgaggacacggccttatattcttgtgcgagaacggtggcttgtgaagtctggggccagggaaccctggtcaccgtctcctcg

SEQ ID NO: 8779 - DNA, 280 bp, Homo sapiens
  source 1..280: mol_type = other DNA
tgcagcctctggattcacctttagcacctatgccatgagttgggtccgccaggctccagggaagggactggagtgggtctcaagtattagtggtagtggtggtagcacatactacacagactccgtgaagggccgcttcaccatctccagagacaattccaagaacacgctgtatctgcaaatgaacagcctgagagccgaggacacggccttatattcttgtgcgagaacggtggcttgtgaagtctggggccagggaaccctggtcaccgtctcctcg

SEQ ID NO: 8780 - DNA, 280 bp, Homo sapiens
  source 1..280: mol_type = other DNA
tgcagcctctggattcacctttagcacctatgccatgacctgggtccgccaggctccagggaagggactggaatgggtctcaagtattagtggtagtggtggtagtacatactacagagactccgtgaagggccgcttcaccatctccagagacaattccaagaacacgctgtatctgcaaatgaacagcctgagagccgaggacacggccttatattcttgtgcgagaacggtggcttgtgaagtctggggccagggaaccctggtcatcgtctcctcg

SEQ ID NO: 8781 - DNA, 280 bp, Homo sapiens
  source 1..280: mol_type = other DNA
tgcagcctctggattcacctttagcacctatgccatgacctgggtccgccaggctccagggaagggactggagtgggtctcaagtattagtggtagtggtggtagcacatactacacagactccgtgaagggtcgcttcaccatctccagagacaattccaagaacacgctgtatctgcaaatgaacagcctgagagccgaggacacggccttatattcttgtgcgagaacggtggcttgtgaagtctggggccagggaaccctggtcaccgtctcctcg

SEQ ID NO: 8782 - DNA, 280 bp, Homo sapiens
  source 1..280: mol_type = other DNA
tgcagcctctggattcacctttagagattatgccatgacctgggtccgccaggttcccgggaaggggctggagtgggtctcaagtattagtggtgatggacgtaatacatactacgcagaatccgtgaggggccggttcaccctctccagagacaattccaagagcacactctttctgcaaatgaacagcctgagagccgacgacacggccctatattattgtgcgaggacagtggcttgtgaagtctggggccagggaaccctggtcaccgtctcctcc

SEQ ID NO: 8783 - DNA, 280 bp, Homo sapiens
  source 1..280: mol_type = other DNA
tgcagcctctggattcacctttagagattatgccatgacctgggtccgccaggttcccgggaaggggctggagtgggtctcaagtattaatggtgatggacgtaatacatactacgcagaatccgtgaggggccggttcaccctctccagagacaattccaagagcacactctttctgcaaatgaacagcctgagagccgacgacacggccctatattattgtgcgaggacagtggcttgtgaagtctggggccagggaaccctggtcaccgtctcctcc

SEQ ID NO: 8784 - DNA, 280 bp, Homo sapiens
  source 1..280: mol_type = other DNA
tacagcctctggattcacctttagcacctatgccatgagctgggtccgccaggctccagggaagggactggagtgggtctcaagtattagtggtagtggtggtagcacatactacacagactccgtgaagggccgcttcaccatctccagagacaattccaagaacacgttgtatctgcaaatgaacagcctgagagccgaggacacggccttatattcttgtgcgagaacggtggcttgtgaagtctggggccagggaaccctggtcaccgtctcctcg

SEQ ID NO: 8785 - DNA, 280 bp, Homo sapiens
  source 1..280: mol_type = other DNA
tgcagcctccggattcacctttagcacctatgccatgagctgggtccgccaggctccagggaagggactggagtgggtctcaagtattagtggtagtggtggtagcacatactacacagactccgtgaagggccgcttcaccatctccagagacaattccaagaacacgctgtatctgcaaatgaacagcctgagagccgaggacacggccttatattcttgtgcgagaacggtggcttgtgaagtctggggccagggaaccctggtcaccgtctcctcg

SEQ ID NO: 8786 - DNA, 280 bp, Homo sapiens
  source 1..280: mol_type = other DNA
tgcagcctctggattcacctttagcacctatgccatgagctgggtccgccaggctccagggaagggactggagtgggtctcaagtattagtggtagtggtggtagcacattctacacagactccgtgaagggccgcttcaccatctccagagacaattccaagaacacgctgtatctgcaaatgaacagcctgagagccgaggacacggccttatattcttgtgcgagaacggtggcttgtgaagtctggggccagggaaccctggtcaccgtctcctcg

SEQ ID NO: 8787 - DNA, 280 bp, Homo sapiens
  source 1..280: mol_type = other DNA
tgcagcctctggattcacctttagcacctatgccatgacctgggtccgccaggctccagggaagggactggagtgggtctctagtattagtgctagtggtggtagcacatactacacagactccgtgaagggccgcttcaccatctccagagacaattccaaaaacacgctgtatctgcaaatgaacagcctgagaggcgaggacacggccttatattcttgtgcgagaacggtggcttgtgaagtctggggccagggaaccctggtcaccgtctcctcg

SEQ ID NO: 8788 - DNA, 280 bp, Homo sapiens
  source 1..280: mol_type = other DNA
tgcagcctctggattcacctttagcacctatgccatgacctgggtccgccaggctccagggaagggactggagtgggtctcaagtattagtggtagtggtggtagcacatactacacagactccgtgaagggccgcttcaccatctccagagacaattccaagaacacgctgtatctgcaaatgaacagcctgagagccgaggacacggccttatattcttgtgcgagaacggtggcttgtgaagtctggggccagggaaccctggtcaccgtctcctcg

SEQ ID NO: 8789 - DNA, 280 bp, Homo sapiens
  source 1..280: mol_type = other DNA
tagagcctctggattcagctttagcacctatgccatgacctgggtccgccaggctccggggaagggactggagtgggtctcaagtataagtgctagtggtggcagcacattctacacagactccgtgaagggccgcttcaccatctccagagacaattccaggaacacgttgtatctgcaaatgaacagccttagagccgaggacacggccttatattcttgtgcgagaacggtggcttgtgaagtctggggccagggaaccctggtcaccgtctcctcg

SEQ ID NO: 8790 - DNA, 280 bp, Homo sapiens
  source 1..280: mol_type = other DNA
tgcagcctctggattcacctttagagattatgccatgacctgggtccgccaggttcccgggaaggggctggagtgggtctcaagtattagtggtgatggacgtaatacatactacgcagaatccgtgaggggccggttcaccctctccagagacagttccaagagcacactctttctgcaaatgaacagcctgagagccgacgacacggccctatattattgtgcgaggacagtggcttgtgaagtctggggccagggaaccctggtcaccgtctcctcc

SEQ ID NO: 8791 - DNA, 300 bp, Homo sapiens
  source 1..300: mol_type = other DNA
aagggttctggatacagcttcatcagccagtggatcggctgggtgcgccagatgcccgggaaaggcctggagtggatggggatcatctatcctggtgactctgacaccagatacagcccgtccttccaaggccaggtcaccatctcagccgacaagtccatcagcaccgcctacctgcagtggaacagcctgaaggcctcggacaccgccatgtattactgtgcgcgacggggggatggttcggagactttttatacctttgactactggggccagggaaccctggtcaccgtctcctca

SEQ ID NO: 8792 - DNA, 300 bp, Homo sapiens
  source 1..300: mol_type = other DNA
aagggttctggatacagctttaccagccagtggatcggctgggtgcgccagatgcccgggaaaggcctggagtggatggggatcatctatcctggtgactctgatgttagatacagcccgtccttccaaggccaggtcaccatctcagccgacaagtccatcagcaccgcctacctgcagtggagtagcctgaaggcctcggacaccgccatctattattgtgcgagacggggagatggttcggagactttttatacttttgactactggggccagggaaccctggtcaccgtctcctca

SEQ ID NO: 8793 - DNA, 274 bp, Homo sapiens
  source 1..274: mol_type = other DNA
tgcagcctctggattcaccttcaataatttctggatgcactgggtccgccaagctccagggaaggggctggtgtgggtctcacgtattgatatcgatgggaccggcacaagttacgcggactccgtgaagggccgattcaccatctccagagacaacgccaagaacacggtctatctgcaaatgaacagtctgagagccgaggacacggctgtttattactgtggtagtgtttttgagcactggggcccgggaaccctggtcaccgtctcctca

SEQ ID NO: 8794 - DNA, 274 bp, Homo sapiens; identical to SEQ ID NO: 8793
  source 1..274: mol_type = other DNA

SEQ ID NO: 8795 - DNA, 274 bp, Homo sapiens
  source 1..274: mol_type = other DNA
tgcagcctctggattcattttcactgatttctggatgcactgggtccgccaagttccagggaaggggctggtgtgggtcgcgcgtattgatggagaagggagtggcacaagctacgcggactccgtgaagggccgattcaccgtcaccagagacaatgccaagaacacactgtatctgcagatgagcagtctgagagtcgaggacacggctgtgtattactgtgggagcgtctttgagcactggagccagggatccctggtcaccgtctcccca

SEQ ID NO: 8796 - DNA, 280 bp, Homo sapiens
  source 1..280: mol_type = other DNA
tgcagcctctggattcacctttagcgcccgtgacatgagttgggtccgccaggctccagggaaggggccggagtgggtctcaaccatttatcgtgatggcactcagacagtatatgcagactccgtgaggggccggttcatcatttccagggacaattccaagaacacggtgcgtctgcagatgaacagcctgagagtcgaggacacggccgtatattactgtgcgatagatcggtggctgtcaccctggggacagggaaccctggtcgccgtctcctcg

SEQ ID NO: 8797 - DNA, 280 bp, Homo sapiens
  source 1..280: mol_type = other DNA
tgcagcctctggattcatctttactagccgtgatatgagctgggtccgccaggctccagggaaggggccggagtgggtctcaactatcggtcttactggtggtggtgcatcctacgcagactccgtgaagggccggttcaccatctccagagacaattccaagaacacactgtatctacaaatgaacagcctgagagccgaggacacggccatatatcactgtgcgatagatcgttggctctccccctggggccagggaaccctggtcaccgtctcctca

SEQ ID NO: 8798 - DNA, 286 bp, Homo sapiens
  source 1..286: mol_type = other DNA
tgcagcctctggattcagcttcagtagctcctggatgcactgggtccgccaagctccagggaaggggctggtgtgggtctcacatattaatagtgatgggagtagcacaacctacgcggactccgtgaagggccgattcaccatctccagagacaacgccaagagtacggtgtatctgcaaatgaacagtctgagagccgaggacacggctgtgtatttctgtgcaagagatttctcctacgctatggacgtctggggccaagggaccacggtctccgtctcttca

SEQ ID NO: 8799 - DNA, 286 bp, Homo sapiens
  source 1..286: mol_type = other DNA
tgcagcctctggattcgccttcagtagccactggatgcactgggtccgccaagctccagggaaggggctggtgtgggtctcacatattaatagtgatgggagtagcacaatctacgcggattccgtgaagggccgattcaccatctccagagacaacgccaagaacacgctgtatctgcaaatgaacagtctgagagccgaggacacggctatgtattactgtgcaagagacttctcctacgctatggacgtctggggccaagggaccacggtcaccgtctcctca

SEQ ID NO: 8800 - DNA, 291 bp, Homo sapiens
  source 1..291: mol_type = other DNA
gcttctggttacacctttaccagctatggtatcacctgggtgcgacaggcccctggacgagggcttgagtggatgggatggatcagcacttacaatggtaacacagactatgcacagaacctccagggcagagtcgccatgaccacggacacttccgcgacaacagcctacttggaactgaggagcctgacctctgacgacacggccgtgtattactgtgcgagaacctgtcctggtgccagttgttatattatttattggggccagggaaccctgctcaccgtctcctca

SEQ ID NO: 8801 - DNA, 292 bp, Homo sapiens
  source 1..292: mol_type = other DNA
ggcttctggttacaccttttcgaattacggtatcaactggcttcgacaggcccctggacaagggcctgagtggatcggttggatcagcacttacaatggtaatacagactatgcaccgaaactccagggcagagtcaccatgaccacagacacatccacgagcacagcctacatggaactgaggagcctaagatctgacgacacggccgtgtactactgtgcgaggacttgtcctggtgccagttgctatattatctactggggccagggaaccctgatcaccgtctcctcg

SEQ ID NO: 8802 - DNA, 289 bp, Homo sapiens
  source 1..289: mol_type = other DNA
tgcagcctctggattcacctttagcagctcttccatgacctgggtccgccaggctccagggaaggggctggaatgggtctcaaatattcgtagtaatggagttgacacatactacgcagactccgtgaagggccggttcaccatctccagagacaattccaagaacacgctgtcactgcaaatgaacagcctgagagccgaggacacggccgtatattactgtgcaaaaggaggatataccactccctttgactactggggccagggaaccctggtcaccgtctcctca

SEQ ID NO: 8803 - DNA, 289 bp, Homo sapiens
  source 1..289: mol_type = other DNA
tgcagcctctggattcacctttagaagctattccatgacttgggtccgccaggctccagagaaggggctggagtgggtctctactattcgtgctgatggtagtgacgcattctacacagactccgtgaagggccggttcatcatttccagagacaattccaagaacacgctgtatctgcagatgaacagcctgagagccgaggacacggccatttattactgtgcgaagggaggctataccactccctttgactactggggccagggaaccctgctcgccgtctcctca

SEQ ID NO: 8804 - DNA, 289 bp, Homo sapiens
  source 1..289: mol_type = other DNA
tgcagcctctggattcacctttaggagctattccatgacttgggtccgccaggctccagagaaggggctggagtgggtctctactattcgtgctgatggtagtgacacattctacacagactccgtgaagggccggttcatcatttccagagacaattccaagaacacgctgtatctgcagatgaacagcctgagagccgaggacacggccatttattactgtgcgaagggaggctataccactccctttgactactggggccagggaaccctgctcgccgtctcctca

SEQ ID NO: 8805 - DNA, 289 bp, Homo sapiens
  source 1..289: mol_type = other DNA
tgcagcctctggattcacctttagcagctatgccatgagctgggtccgccaggctccagggaaggggctggagtgggtctcagctattagtggtagtggtggtagcacatactacgcagactccgtgaagggccggttcaccatctccagagacaattccaagaacacgctgtatctgcagatgaacagcctgagagccgaggacacggccatttattactgtgcgaagggaggctataccactccctttgactactggggccagggaaccctgctcgccgtctcctca

SEQ ID NO: 8806 - DNA, 289 bp, Homo sapiens
  source 1..289: mol_type = other DNA
tgcagcctctggattcacctttagtagttatgccatgacttgggtccgccaggctccagggaaggggctggagtgggtcgcacttattcgtgctggtggtggtagcacatactacgcagactccgtgaagggccggttcaccatctccagagacaattccaaggacacgcaatatctgcagatgaacagcctgacagtcgaggacacggccatatattattgtgcgaaaggtggatatacgactccatttgactactggggccagggaaccctggtcaccgtctcctca

SEQ ID NO: 8807 - DNA, 298 bp, Homo sapiens
  source 1..298: mol_type = other DNA
cactgtctctggtggctccatcagtgatagtgattatatctgggcctggatccgccagcccccagggaaggggctggagtggattggggatatctattatccaaacgggcacgcctcttatagcccgtccctcaggagtcgagtcaccatctccgtcgacacgtccaacaaccaagtctccctgaggttgagctctgcgaccgccgcggacacgtctacattttattgtgcgagacggctctatggttcggggagaattgactactggggccagggaaccctagtcaccgtctcctca

SEQ ID NO: 8808 - DNA, 295 bp, Homo sapiens
  source 1..295: mol_type = other DNA
cactgtctctggtggctccatcagcaatagtagttactactgggtctggatccgccagccccccgggaaggggctggagtggattgggaatatctattatagtgggagcacctcttacaacccgtccctcaagagtcgactcaccatatccgtagacacgtccaagaaccagttctccctggagctgagctctgtgaccgccgcagacacggctgtatattactgtgcgagacgcctctatggttcggggagaattgactactggggccagggaaccctggtcaccgtctcctca

SEQ ID NO: 8809 - DNA, 277 bp, Homo sapiens
  source 1..277: mol_type = other DNA
ggcttctggttacaccttgaccaattttgcaatcacttgggtgcgacaggcccctgggcaagggcttgagtggatgggatggatcaacaattacaatggtaacacaaagtatacacagaagtggcaggacagagtcaccatgaccagagacacatccacgaatacagtctacatggaactgaggagcctgacatctgacgacacggccgtgtattactgtgcgagaacgactagtggtgattattggggccagggaaccctggtcaccgtctccaca

SEQ ID NO: 8810 - DNA, 276 bp, Homo sapiens
  source 1..276: mol_type = other DNA
tcttctggttacacctttaccagttatgatatcacctgggtgcgccaggcccctggacaagggcttgagtggatgggacggatcaaccctaacaatggtaacacaaactatgcacaaaagctccggggcagagtcaccattagcgcagacacatccacgaccacagcctacatggagctgaggagcctgacatctgacgacacggccatgtattactgtgcgaggacaacgtctggcgactactggggccagggaaccctggtcaccgtctcctca

SEQ ID NO: 8811 - DNA, 308 bp, Homo sapiens
  source 1..308: mol_type = other DNA
ccatctccggggacagtgtctctagcaacagtgctggttggaactggatcaggcagtccccatcgagaggccttgagtggctgggaaggatatattacaggtccaagtggtatagtgattatgcagtctctgtgaaaagtcgaatgaccatcaacccagacacaaccaagaaccacttctcccttcaactgaagtctgtgactcccgaggacacggccatgtattactgtgcaagaggggggctggttcggggagctgttgggtggttcgacccctggggccagggaaccctggtcaccgtctcctca

SEQ ID NO: 8812 - DNA, 308 bp, Homo sapiens
  source 1..308: mol_type = other DNA
ccatcttcggggacagtgtctccagcaactccgctgggtggaactggatcaggcagtccccatcgagaggccttgagtggctcggaaggatatattataggtccaagtggtatagtgattatgcagtctctgtgaaaagtcgaatgaccatcatcccagacatagccaagaaccacttctcccttcaactgaactctgtgactcccgacgacacggctatgtattactgtgcgagagggggactggttcggggagctgttgggtggttcgacccctggggccagggaaccctggtcaccgtctcctca

SEQ ID NO: 8813 - DNA, 308 bp, Homo sapiens
  source 1..308: mol_type = other DNA
ccatctccggggacagtgtctctagcaacagcgctggttggaactggatcaggcagtccccatcgagaggccttgagtggctgggaaggatatattacaggtccaagtggtatagtgattatgcagtatctgtgaaaagccgaatgaccatcaacccagacacatccaagaaccagttctcccttcaactgaactctgtgacttccgaggacacggctatgtattactgtgcaagaggggggctggttcggggagctgttgggtggttcgacccctggggccagggaaccctggtcaccgtctcctca

SEQ ID NO: 8814 - DNA, 308 bp, Homo sapiens
  source 1..308: mol_type = other DNA
tcatctccggggacagtgtctccagtaacactgctggctggaattggatcaggcagtccccatcgagaggccttgagtggctggcaaggacatactacaggtccaagtggtattttgattatgcagaatctgtgaaaagtcgaattaccatgaacccagacacatccaagaaccagttctccctgcaacttaactctgtgactcccgaggacacggctgtgtattattgtgcaagaggaggattggttcggggagctgttggctggttcgacccctggggccagggaatgctggtcaccgtcgcctca

SEQ ID NO: 8815 - DNA, 283 bp, Homo sapiens
  source 1..283: mol_type = other DNA
tgcagcctctggattcacctttggtgattatggcatgagctgggtccgccaagctccagggaaggggctggagtgggtctctggtattaattggaatggtggtagcacaggttatgcagactctgtgaagggccgattcaccatctccagagacaacgccaagaactccctgtatctgcaaatgaacagtctgagagccgaggacacggccttgtattactgtgcgagaggcccgaactggttcgacccctggggccagggaaccctggtcaccgtctcctca

SEQ ID NO: 8816 - DNA, 283 bp, Homo sapiens
  source 1..283: mol_type = other DNA
tgcagcctctggattcacctttggtgattatggcatgagctgggtccgccaagctccagggaaggggctggagtgggtctctggtattaattggaatggtggtagcacaggttatgcagactctgtgaagggccgattcaccatctccagagacaacgccaagaactccctgtatctgcaaatgaacagtctgagagccgaggacacggccttgtattactgtgcgagaggcccaaactggttcgacccctggggccagggaaccctggtcaccgtctcctca

SEQ ID NO: 8817 - DNA, 280 bp, Homo sapiens
  source 1..280: mol_type = other DNA
cactgtctctggtggctccatcagtagttactactggagctggatccggcagcccccagggaaggggctggagtggattgggtatatctattacagtgggactaccaactacaacccctccctcaagagtcgagtcaccatatcagtggacacgtccaagaaccagttctccctgaagctgagctctgtgaccgccgcggacacggccgtgtattactgtgcgagaggtggctggtccctagacaagtggggccagggaaccctggtcaccgtctcctca

SEQ ID NO: 8818 - DNA, 289 bp, Homo sapiens
  source 1..289: mol_type = other DNA
cactgtctctggtggctccatcgatgctcacaattggagttattggagttggctccggcagcccccagagaagggactggagtggattggatatgtcttttacactgggaccaccaactacaatccctccctcgagagtcgagtcactatatcagtagacaggtccaagaaccagttctccctgaggctgacttctgtggctgctgcggacacggccacttatttctgtgcgagagggggctggtcccttgacaagtggggccggggaaccctggtcaccgtctcctcg

SEQ ID NO: 8819 - DNA, 280 bp, Homo sapiens
  source 1..280: mol_type = other DNA
cactgtctctggtggctccatcagtagttactactggacctggatccggcagtccccagggaaggggctggagtggattggatatatctattacagtgggagcaccaattataacccctccctcaagagtcgagtcaccatctcagttgacgcgtccaagaaccagttctccctgaggttgacctctgtgaccgccgcagacacggccgtgtatttgtgtgcgagaggtggctggtcgttagataaatggggccagggaaccctggtcaccgtctcctca

SEQ ID NO: 8820 - DNA, 286 bp, Homo sapiens
  source 1..286: mol_type = other DNA
tgcagcctctggattcacctttagtcactataccataacctgggtccgccaggctccagggaagggactggagtgggtctcaagtataagtggtagtggtactagcacatacgcagactccgtgaagggccggttcaccatctccagagacagttccaagaacacggtggatttgcaaatgaacagcctgagagccgaggacacggccttgtattactgtgcgagaggggggggtgggaggcactttgactactggggccagggaaccctggtcaccgtctcctca

SEQ ID NO: 8821 - DNA, 289 bp, Homo sapiens
  source 1..289: mol_type = other DNA
tgcagcctctggattcacctttagtagttatggcatgagctgggtccgccaggctccagggaagggactggagtgggtctcaactattagtggcagtggtggcggcacatactacgcagactccgtgaagggccggttcaccatctccagagacaactccaagaacacgctgtatctgcaaatgaacagcctgagagccgaggacacggccgtatattattgtgcgaggggagggggaggtcgccactttgactactggggccagggaaccctggtcaccgtctcctca

SEQ ID NO: 8822 - DNA, 282 bp, Homo sapiens
  source 1..282: mol_type = other DNA
gcttctggttacagctttaggacgttcggtgtcagctgggtgcgacaggcccctggacaagggcttgagtggatgggatgggtcagcccctggagtggagacacacactattcaccgaagctccagggcagagttagcatgaccacagacgcacccacgaaaacaatctacttggaattgaggagcctcagatctgacgacacggccgtctattactgtgcgagggagacagtgggagctcctgactactggggccagggaaccctggtcacggtctcctca

SEQ ID NO: 8823 - DNA, 282 bp, Homo sapiens
  source 1..282: mol_type = other DNA
gcttctggttacagctttaggacgttcggtgtcagctgggtgcgacaggcccctggacaagggcttgagtggatgggatgggtcagcccctggagtggagacacacactattcagcgaagctccagggcagagttagcatgaccacagacgcacccacgaaaacaatctacttggaattgaggagcctcagatctgacgacacggccgtctattactgtgcgagggagacagtgggagctcctgactactggggccagggaaccctggtcacggtctcctcc

SEQ ID NO: 8824 - DNA, 282 bp, Homo sapiens
  source 1..282: mol_type = other DNA
gcttctggttacatcttcaccagctatggtgtcagctgggtgcggcaggcccctggacaagggcttgagtggatgggatgggtcagcccctacaatggtgacacacactattcaccgaagttccagggcagagtcgccatgaccacagacacatccacgactactgtctacatggaaatgaggagcctgacatctgacgacacggccgtctattactgtgcgagagagacagtgggagctcctgactactggggccagggaaccctggtcagcgtctcttca

SEQ ID NO: 8825 - DNA, 282 bp, Homo sapiens
  source 1..282: mol_type = other DNA
gcttctggttacatcttcaccagctatggtgtcagttgggtgcgacaggcccctggacaagggcttgagtggatggggtgggtcagcccctacaatggtgacacacactatgcaccgaagttccagggcagagtcaccatgaccacagacacatccacgactactgtctacatggagatgaggagcctgacatctgacgacacggccgtgtattattgtgcgagagagacagtgggagctcctgactactggggccagggaaccctgatcatcgtctcttca

SEQ ID NO: 8826 - DNA, 286 bp, Homo sapiens
  source 1..286: mol_type = other DNA
tgtagcctctggattcacctttagtaactattggatgagctgggtccgccaggctccagggaaggggctggagtgggtggccaacataaagcaagatggaagtgacaaatactatgtggactctgtgaagggccgattcaccatctccagagacaacgccaagaactcactgtatctgcaaatgaacagcctgggagccgaggacacggctgtgtattactgtgcgagatcagtagcagcagctggcgactactggggccagggaaccctggtcaccgtctcctca

SEQ ID NO: 8827 - DNA, 286 bp, Homo sapiens
  source 1..286: mol_type = other DNA
tgcagcctctggattcagctttagtagctattggatgagctgggtccgccaggctccagggaaggggctggagtgggtggccaacataaaggaagatggaaatgacaaatactatgtggattctgtgaagggccgattcgccatctccagagacaacgccaagaactcactgtatctgcaaatgaacagcctgagagccgaggacacggctgtgtattactgtgcgagatcggtggcagcagctggtgactactggggccagggaaccctggtcaccgtctcctca

SEQ ID NO: 8828 - DNA, 292 bp, Homo sapiens
  source 1..292: mol_type = other DNA
tgcagcctctggattcactttcattaacgcctggatgagctgggtccgccaggctccagggaaggggctggagtgggttggccgtgttaaaagcaaaactgatggtgggacaccagactacgctgcacccgtgaaaggcagattcaccatctcaagagatgattcaaaaaacacgctgtatctacaaatgaacagcctgaaaaccgaggacacagccgtatattactgtaccacagaaaccagtagtggttattactactggggccagggaaccctggtcaccgtctcctca

SEQ ID NO: 8829 - DNA, 292 bp, Homo sapiens
  source 1..292: mol_type = other DNA
tgcagcctctgggttcgcttttagtaacgcctggatgaactgggtccgccaggctccagggaaggggctggagtgggttggccgtgttaaaagtaaaagtgacggtgggacaacagactacgctgcacccgtgagagacagattcaccatgtcaagagatgattcaaaaaacacgctgtatctacaaatgaatagcctgaaaaccgaggacaccgccgtatattactgtaccacagagactagtagtgggtactactactggggccagggaaccctggtcaccgtctcctca

SEQ ID NO: 8830 - DNA, 289 bp, Homo sapiens
  source 1..289: mol_type = other DNA
tacagcctctggattcgcctttggcaccaattacatgagctgggtccgccaggctccagggaaggggccggagtgggtctcagtcatcactagtggtggtgacacattccacgcagactccgtgaagggccgtttcaccgtctccagagacacttccaagaacacgctgtatctgcaaatgaacagcctgagagtcgaagacacggccctttattactgtgcgaaacatttaagtgggagctactcctttgactactggggccagggagccctggtcaccgtctcctca

SEQ ID NO: 8831 - DNA, 289 bp, Homo sapiens
  source 1..289: mol_type = other DNA
tgcagcctctggattcagctttagcagtaattacatgagctgggtccgccaggctccagggaaggggctggagtgggtctcagtcataactggtggtgccgacacatattacggagactccgtgaagggccgtttcaccatctccagagacaattccaagaacacgctgtatctgcaaatgaacagcctgagagtcgaagacacggccgtatattactgtgcgaaacatttaagcgggagttactcgtttgactactggggccagggaaccctggtcaccgtctcctca

SEQ ID NO: 8832 - DNA, 289 bp, Homo sapiens
  source 1..289: mol_type = other DNA
tgcagcctctggattctccttcagcggtaattccatgacctgggtccgtcaggctccagggaaggggctagagtgggtctcagctattgctggtggtggtaccacatactacgcggactccgtgaagggccggttcaccatctccagagacaattccaagaacacacattatctgcaaatgaacagcctgagcgccgaggactcggccttatatttctgtgcgaaacaccttagtgggagctactcttttgactactggggccagggaatcctggtcaccgtcgcctca

SEQ ID NO: 8833 - DNA, 289 bp, Homo sapiens
  source 1..289: mol_type = other DNA
tgcagcctctggattcacctttagcaataattacatgacctgggtccgccaggctccagggaaggggctagagtgggtctcagctattagtggtagtggtaacacattctacgcagactccgtgaagggccggttcaccatctccagagacaattccaagaacacacagtatctgcaaatgaacagcctgagagccgaggacacggccctatatttctgtgcgaaacaccttagtgggagctactcttttgactactggggccagggaaccctggtcaccgtctcctca

SEQ ID NO: 8834 - DNA, 295 bp, Homo sapiens
  source 1..295: mol_type = other DNA
tgcagcctctggattcaccttcagtgactatgaaatgaactgggtccgccaggctccagggagggggctggagtggatttcatacattagtggtggtagtctcacatactacgcagactctgtgaagggccgattcaccgtctccagagacaacgccaagaattcactgtatctacaaatgaacagcctgagcgccgaggacacggctctttattactgtgcgagagaaaaggcaggatgtggtggtgactgcttggactactggggccagggaatcctggtcaccgtctcctca

SEQ ID NO: 8835 - DNA, 298 bp, Homo sapiens
  source 1..298: mol_type = other DNA
tgcagcctctggattcaccttcagtacttatgaattcaactgggtccgccaggctccggggaaggggctggaatggatttcatacattagtagtagtggtgataatgtattttacgtggactctgtgaggggccgattcaccgtctccagagacaacgccaagaactcattgtatctgcagatggacagcctgacagccgaggacacggctctttattactgtgcgagagagaaggcaggttgtggtggtgactgccttgactactggggccagggaaccctggtcaccgtctcctca

SEQ ID NO: 8836 - DNA, 313 bp, Homo sapiens
  source 1..313: mol_type = other DNA
tgcagcctctggattcacctttagtagctatgccatgagctgggtccgccaggctccagggaaggggctggaatgggtctcaagtattagtggtagtggtggtagcacatactacgcagactccgtgaagggccggttcaccatctccagagacaattccaagaacacgctgtatctgcaaatgaacagcctgagagccgaggacacggccgtttattactgtgcgaaaggtctcctaggatattgtactagtaccaactgctatgcggccttggactactggggccagggaaccctggtcaccgtctcctca

SEQ ID NO: 8837 - DNA, 313 bp, Homo sapiens
  source 1..313: mol_type = other DNA
tgcagcctctggattcacctttagcagctatgccatgagctgggtccgccaggctccagggaaggggctggagtgggtctcagttattagtggtagtggtggtaccacatattacgcagactccgtgaagggccggttcaccatctccagagacaattccaagagcgccctgtatctgcaaatgaacaccctgagagccgaggacacggccgtatattactgtgcgaaaggccttctaggatattgtactagtaccaactgttatgcggcccttgactactggggccagggaaccctggtcaccgtctcctca

SEQ ID NO: 8838 - DNA, 289 bp, Homo sapiens
  source 1..289: mol_type = other DNA
cactgtctctggtggctccatcagtagttactactggagctggatccggcagcccgccgggaagggactggagtggattgggcgtacctataccagtgggagcaccaactacaacccctccctccagagtcgagtcaccatgtcagtagacacgtccaagaaccagttctccctgaagctgagctctgtgaccgccgcggacacggccgtgtattactgtgcgagagacagtaatggtgacaggtcctttgactactggggccagggaaccctggtcaccgtctcctca

SEQ ID NO: 8839 - DNA, 289 bp, Homo sapiens
  source 1..289: mol_type = other DNA
cactgtctctggtggctccatcagtagttactactggagctggatccggcagcccgccgggaagggactggagtggattgggcgtatctataccagtggtagcaccaactacaacccctccctccagagtcgagtcaccatgtcagtagacacgtccaagaaccagttctccctgaagctgagctctgtgaccgccgcggacacggccgtgtattactgtgcgagagacagtaatggtgacaggtcctttgactactggggccagggaaccctggtcaccgtctcctca

SEQ ID NO: 8840 - DNA, 289 bp, Homo sapiens
  source 1..289: mol_type = other DNA
cactgtctctggtggctccatcagtagttactactggagctggatccggcagcccgccgggaagggactggagtggattgggcgtatctataccagtgggagcaccaactacaacccctccctccagagtcgagtcaccatgtcagtagacacgtccaagaaccagttctcactgaagctgagctctgtgaccgccgcggacacggccgtgtattactgtgcgagagacagtaatggtgacaggtcctttgactactggggccagggaaccctggtcaccgtctcctca

SEQ ID NO: 8841 - DNA, 289 bp, Homo sapiens
  source 1..289: mol_type = other DNA
cactgtctctggtgactccatcaatagttactactggagctggatccggcagcccgccgggaagggactggagtggattgggcgtatctatcacagtggcattaccaactacaacccctccctcaagagtcgagtcaccatgtcagtagacacgcccaagaaccagttctccctgaggttgaactctgtgaccgccgcggacacggccatttattactgtgcgagagattcgaacggtgacagatcctttgactactggggccagggaaccctggtcaccgtctcctca

SEQ ID NO: 8842 - DNA, 289 bp, Homo sapiens
  source 1..289: mol_type = other DNA
cactgtctctggtggctccatcaataattactactggagctggatccggcagcccgccgggaagggactggagtggattgggcgtatctataccagtgggactaccaactacaacccctccctcaagagtcgagtcaccatgtcagtagacacgtccaagaaccagttctccctgaagctgaactctgtgaccgccgcggacacggccatgtattactgtgcgagagattcgaacggtgacagatcctttgactactggggccagggaaccctggtcaccgtctcctca

SEQ ID NO: 8843 - DNA, 289 bp, Homo sapiens
  source 1..289: mol_type = other DNA
cactgtctctggtggctccatcagtagttactactggagctggatccggcagcccgccgggaagggactggagtggattgggcgtatctataccagtgggagcacgaactacaacccttccctccagagtcgagtcaccatgtcagtagacacgtccaagaaccagttctccctgaagctgagctctgtgagcgccgcggacacggctgtgtattactgtgcgagagacagtaatggtgacaggtcctttgactactggggccagggaaccctggtcaccgtctcctca

SEQ ID NO: 8844 - DNA, 283 bp, Homo sapiens
  source 1..283: mol_type = other DNA
tgcagcctctggattcaccttcagtagttatgaaatgaattgggtccgccaggctccagggaaggggctggaatggctttcatacattagtagtggtggtactaccatatattatgcagactctgtgaagggccgattcaccatctccagagacaacgccaagaactcactctatctgcaagtgaacagcctgagagccgaggacacggctgtttattactgtgcgagatcggaaggaccctttgactactggggccagggaaccctggtcaccgtctcctca

SEQ ID NO: 8845 - DNA, 283 bp, Homo sapiens
  source 1..283: mol_type = other DNA
tgcagcctctggattcacgttcagtaattatgagatgaattgggtccgccaggctccagggaaggggctggagtggctttcatacattactagtagtggtgataccatatactacgcagactctgtgaagggccgattcaccatctccagagacaacgccaagaactcactgtatctgcaaatgaacagcctgagagccgaggacacggctgtttattactgtgcgagatctgaggggccctttgactactggggccagggaaccctggtcaccgtctcctca

SEQ ID NO: 8846 - DNA, 283 bp, Homo sapiens
  source 1..283: mol_type = other DNA
tgcagcctctggattcaccttcagtagttatgagatgaactgggtccgccaggctccagggaaggggctggagtgggtttcatacattactagtagtggtgataccatatactacgcagactctgtgaagggccgattcaccatctccagagacaactccaagaactcactgtatctgcaaatgaacagcctgagagccgaggacacggctgtttattactgtgcgagatctgaggggccctttgactactggggccagggaaccctggtcaccgtctcctca

SEQ ID NO: 8847 - DNA, 283 bp, Homo sapiens
  source 1..283: mol_type = other DNA
tgcagcctctggattcacctttagtagttatgagatgaactgggtccgccaggctccagggaaggggctggagtgggtttcatacattactagtagtggtgataccatatactacgcagactctgtgaagggccgattcaccatctccagagacaacgccaagaactcactgtatctgcaaatgaacagcctgagagtcgaggacacggctgtttattactgtgcgagatctgaggggccctttgactactggggccagggaaccctggtcaccgtctcctca

SEQ ID NO: 8848 - DNA, 295 bp, Homo sapiens
  source 1..295: mol_type = other DNA
cactgtctttggtgcctccctaagtaatcattactggagctggatccggcagtccgccgggaggggactggagtggattggccgtatctatggaagtgggactaacaactacaacccctccctcaagagtcgcgtcaccatgtcagtagacacgtccaacaaccagttatccctgaagctgagctctgtgaccgccgcagacacggccatgtattactgtgcgagagggccatattgtggtggtgactgttacttcgactcctggggcctgggaaccctggtcaccgtctcctca

SEQ ID NO: 8849 - DNA, 295 bp, Homo sapiens
  source 1..295: mol_type = other DNA
cactgtctctggtggctccatcaataattactactggagctggatccggcagcccgccgggaagggactggagtggattgggcgaatttataccagtgggagcaccaactacaacccctccctcaagagtcgagtcaccatgtcagtagacacgtccaagaaccagttctccctgagactgggctctgtgaccgccgcggacacggccgtgtattactgtgcgagagggccatattgtggtggtgactgctattttgactcctggggccagggaacccaggtcgccgtctcctca

SEQ ID NO: 8850 - DNA, 298 bp, Homo sapiens
  source 1..298: mol_type = other DNA
tgcagcctctggattcaccttcactaattatcctatgcactgggtccgccaggctccaggcaaggggctggagtgggtggcagttatagcatatgatggaagtattaaaatctacgcagactccgtgaagggccgattcaccatctccagagacgattccaagaacacggtgtatctgcaggtgagcagcctgagacctgaggacacggctgtctatttctgtgcgagggatctgtttcggggagccccagactacttagattactggggcctgggaaccctggtcaccgtctcctca

SEQ ID NO: 8851 - DNA, 298 bp, Homo sapiens
  source 1..298: mol_type = other DNA
tgcagcctctggattcaccttcagtagctatcctatgcactgggtccgccaggctccaggcaaggggctggagtgggtggcagttatatcatatgacggaaatgttagactctacgcagagtccgtgaagggccgattcaccatctccagagacgattccaagaacacgctgtttctgcaaatggacagtctgagagctgaggacacggccgtgtattactgcgcgagagatctgtttcggggagccccggactaccttgactactggggcctgggaaccctggtcaccgtctcctca

SEQ ID NO: 8852 - DNA, 307 bp, Homo sapiens
  source 1..307: mol_type = other DNA
tgtaggctctggattcaccttcagtcattatgaaatgaactgggtccgccagactccagggaaggggctggaatggatttcatacattagtagtagtggtgataccaaatattacgcagactctgtgaagggccgattcaccatctccagagacaacgccaagaattcgctgtttctgcaaatgaacagcttgagagccgaggacacggctgtttattactgtgcgagagggggatattattatgatagtagtggttattattactccgactactggggccagggaaccctggtcaccttctcctca

SEQ ID NO: 8853 - DNA, 307 bp, Homo sapiens
  source 1..307: mol_type = other DNA
tgcagcctctggattcaccttcagtagttatgagatgaactgggtccgccagtctccagggaaggggctggagtgggtttcatacattagtagtagtgggaataccatatactacgcagactctgtgaagggccgattcaccatctccagagacaacgccaagaactcagtgtatctgcaactgaacagcctgggagccgaggacacggctgtttattactgtgcgaggggcggatattactatgatagtagtggttattactacagtgactactggggccagggaaccctggtcaccgtctcctca

SEQ ID NO: 8854 - DNA, 280 bp, Homo sapiens
  source 1..280: mol_type = other DNA
tgcagcctctggattcaccttcagtagctatggcatgcactgggtccgccaggctccaggcaaggggctggagtgggtggcagttatatcatatgatggaagtaataaatactacgcagactctgtgaagggccgattcaccatctccagagacaacgccaagaactcactgtatctgcaaatgaacagcctgagagccgaggacacggctgtttattactgtgcgaggagtgggggcatggacgtctggggccaagggaccacggtcaccgtctcctca

SEQ ID NO: 8855 - DNA, 277 bp, Homo sapiens
  source 1..277: mol_type = other DNA
tgcagcctctggattcaccttcaggagttatgctatgcactgggtccgccaggctccaggcaaggggctggagtgggtggcagttatatcaaatgatggaaatgaaaaatatgaagactccgtgaagggccgaatcaccatctccagagacaattccaagaacacgctgtatctgcaaatgaacagcctgagagctgaggacacggctgtgtatcactgtgcgagaagcggaggtatggacgtctggggccaagggactacggtcaccgtctcctca

SEQ ID NO: 8856 - DNA, 286 bp, Homo sapiens
  source 1..286: mol_type = other DNA
tgcagcctctggattcaccttcagtggctactggatgcactgggtccgccaagctccagggaaggggctggtgtgggtctcacgtattaagagtgatgggaataacacaacctacgcggactccgtgaagggccgattcaccatctccagagacaacgccaagaacacgctgtatctgcaaatgaacagtctgagagccgaggacacggctatatattactgtgcaagagacagatctggcgcgtttgactactggggccagggaaccctggtcaccgtctcctca

SEQ ID NO: 8857 - DNA, 286 bp, Homo sapiens
  source 1..286: mol_type = other DNA
tgcagcctctggattcaccttcagtaattcctggatgcactgggcccgccaagctccagggaaggggctggtgtgggtctcacgtattaatagtgatgggagtagcacaaattacgcggactccgtgaagggccgattcaccatctccagagacaacgccaagaacacgctggatctgcagatgaacagtctgagagccgaggacacggctgtgtattactgtgcaagagatcggtcaggggcctttgactactggggccagggagccctggtcaccgtctcctca

SEQ ID NO: 8858 - DNA, 298 bp, Homo sapiens
  source 1..298: mol_type = other DNA
ctctgtttctggttactccatcagcaatggttactactgggggtggatccgtcagcccccagaggggggactggagtggattgccagtatgtcttatgctggaagcacctactacaatccgtccctcaggagtcgagtcaccatttctctagacacgtccaagaatcagttctccctgaagctgacctctgtgaccgccgcagactcggccatgtattactgtgcgacttaccgaggatacagctatgcttactactttgactactggggccagggaaccctggtcaccgtctcctca

SEQ ID NO: 8859 - DNA, 298 bp, Homo sapiens
  source 1..298: mol_type = other DNA
cactgtctctggttactccatcagcagtggttactactggggctggatccggcagcccccagggaaggggctggagtggattgcgagtacccatcatagtgagagcacctactacaacccgtccctcaggagtcgcgtcaccatatcactggacacgtccaagaaccagttctccctgaggttgagctctgtgaccgccgaagacacggccgtgtattactgtgcgacctaccgcggatacagttatgcttactactttgattactggggccagggaaccctggtcaccgtctcctca

SEQ ID NO: 8860 - DNA, 301 bp, Homo sapiens
  source 1..301: mol_type = other DNA
tgcagcctccggcttcacctttaccaactattggatgagctgggtccgccaggttccagggaaggggctggagtgggtggccagtataaggtttgttggagatgagaagtcctatgtggactctgtgaagggccgattcacaatctccagagacaacgccaagaactcattgtatctgcaaatgaccagcctgagagccgaggacacggctctgtattactgtgcgagaggtcccccatatggtgcgaggacagactactttgattattgggggcagggaaccctggtcaccgtctcctca

SEQ ID NO: 8861 - DNA, 301 bp, Homo sapiens
  source 1..301: mol_type = other DNA
tgcagcctctggattcacctttaggagccattggatgagttgggtccgccagcctccagggaaggggctggagtgggtggccagtataaagcagggtggaagtgagacatcttatgtggactctgtgaagggccgattcaccatctccagagacgacgccagaaccttactgtatgtgcaactaaacagcctgagagtcgaggactcggctgtttattactgcgcgagaggcccgccctatggtgcgagaacggactactttgactattggggccagggaaccctggtcaccgtctcctca

SEQ ID NO: 8862 - DNA, 283 bp, Homo sapiens
  source 1..283: mol_type = other DNA
cactgtctctggttactccatcagcagtggttactactggggctggatccggcagcccccagggaaggggctggagtggattgggagtatgtactatagtgggagcacctactacaagccgtccctcaagagtcgagtcaccatatcattagacacgtccaagaaccagttctccctgaagctgacctctgtgaccgccgcagacacggccgtctattattgtgcgaggggcacccctaactttgactactggggccagggaaccctggtcaccgtctcctca

SEQ ID NO: 8863 - DNA, 283 bp, Homo sapiens
  source 1..283: mol_type = other DNA
cactgtctctggttactccatcagcagtggttactactggggctggatccggcagcccccagggaaggggctggagtggattgggagtatctatcatagtgagagtacctactacaacccgtccctcaagagtcgagtcaccatatcagtagacacgtccaagaaccagttctccctgaagctgagctctgtgaccgccgcagacacggccgtgtattactgtgcgaggggaaccccaaactttgactactggggccagggaaccctggtcaccgtctcctca

SEQ ID NO: 8864 - DNA, 289 bp, Homo sapiens
  source 1..289: mol_type = other DNA
tgaagcctctggattcaccttcagtagttattggatgagttgggtccgccaggctccagggaaggggccggagtgggtggccaacatgaacgtcggtggaagtgcgatatattatttggactctgtgaagggccgattcaccatctccagagacaacgccaagaactcactgtatctgcaaatgaatagcctgagagccgaggacatggctgtttattactgtgcgagagacgcggggtggggggcttatgatatctggggccaagggacaatggtcatcgtctcttca

SEQ ID NO: 8865 - DNA, 289 bp, Homo sapiens
  source 1..289: mol_type = other DNA
tgtagcctccggattcatctttagtcagtcttggatgacctgggtccgccaggctccagggaaggggctggacgacgtggccatgataaatcaagatggaagtgggaaatattatgtggactctgtgaggggccgattcaccatctccagagacaacgccaagaactcactgtatctgcaaatggacagcctgcgagccgaggacacggctatctactactgtgcgagagatgcggggtggggtgcctatgatatctggggccgagggacaatggtcatcgtctcttca

SEQ ID NO: 8866 - DNA, 286 bp, Homo sapiens
  source 1..286: mol_type = other DNA
tgcagcctccggattcacaatcagtaactcttggatgaactgggtccgccaggctccagggaaggggctggagtgggtggccaacataaagaaagatggaagtgaggaaaactatgtggagtctgtggagggccgattcaccatttccagagacaacgccatgaactcactatatctgcaaatgaacaccctgagagccgacgacgcgggtgtgtattactgtgcgagtggcactggctggttaatcgactactggggccggggaaccctggtcatcgtctcctca

SEQ ID NO: 8867 - DNA, 286 bp, Homo sapiens
  source 1..286: mol_type = other DNA
tgcagcctctggatccacctttagtaattcttgggtgaattgggtccgccaggctccagggaaggggctggagtgggtggccaatataaagaaagatggaagagagaagtactatgtggactctgtgaagggccgattcaccatctcaagagacaacgccgagaactccgtatatctgcaaatgaacagcctgagagccgaggacacggctgtgtacttctgtgcgagcgggactggctggttgatagactattggggccaggggatgctggtcaccgtctcctca

SEQ ID NO: 8868 - DNA, 286 bp, Homo sapiens
  source 1..286: mol_type = other DNA
tgcagcctctggatccacatttagtaattcttgggtgaactgggtccgccaggctccagggaaggggctggagtgggtggccaacataaagaaagatggaagtgaggagaggtatgtcgactctgtgaggggccgattcaccatctccagagacaacgccaagaactccgtgtatctgcaaatgaacagcctgagagccgatgacacggctgtttacttctgtgcgagcgggactggctggttgatagactattggggccagggaatgctggtcaccgtctcctca

SEQ ID NO: 8869 - DNA, 286 bp, Homo sapiens
  source 1..286: mol_type = other DNA
cactgtctctggtggctccatcagcagtggtagttacttctggagctggatccggcagcccgccgggaagggactggagtggattgggcgtatctatagcagtgggggcaccaactacaacccctccctcaagagtcgagtcaccatatcaatagacacgtccaagaaccagttctccctgaagctgagctctgtgaccgccgcagacacggccgtgtattactgtgcgagagccaactggtacttcgatctctggggccgtggcaccctggtgactgtctcgtca

SEQ ID NO: 8870 - DNA, 286 bp, Homo sapiens
  source 1..286: mol_type = other DNA
cactgtgtctggtgcctccatcagcagtgatttctccttctggagctggatccggcagcccgccgggaagggactggagtggattgggcgtatctataatactgggggcaccaactacaacccctccctcgagagtcgagtcaccttatcagtggacacgtccaagaaccagttctccctgaaattgagctctgtgaccgccgctgacacggccgtgtattactgtgcaagagccaactggtacttcgatctctggggccgtggcaccctagtcactgtctcctca

SEQ ID NO: 8871 - DNA, 280 bp, Homo sapiens
  source 1..280: mol_type = other DNA
cgcagcctctggattcagcttcagtaggttttggatgaactgggtccgccaggctccagggaagggactggagtgggtggccaacataaaggacgatggaagtgagacacactatgcggattctgtgaagggccgattcaccatctccagagacaacgccaagagctcactgtatctgcaattgaacagcctcagaggcgaggacacggctgtgtattactgtacgataggtcactaccatgactactgggcccagggaaccctggtcaccgtctcctca

SEQ ID NO: 8872 - DNA, 280 bp, Homo sapiens
  source 1..280: mol_type = other DNA
tgtcacctctggattcacctttaataaatttatcatgaattgggtccgccaggctccagggaaggggctggagtgggtggccaacgtggaccctgatggaagtcagaaatactatgtggactctgtgaagggccgattcaccatctccagagacaacgcccagaattcagtgtatcttcagatgaacaccctgagagccgacgacacggggttttatttctgtacgatagggcactaccatgactacatgggccaggggaccctggtcaccgtctcctca

SEQ ID NO: 8873 - DNA, 280 bp, Homo sapiens
  source 1..280: mol_type = other DNA
tgtcacctctggattcacctttaataaatttatcatgaattgggtccgccaggctccagggaaggggctggagtgggtggccaacgtggaccctgatggaagtcagaaatactatgtggactctgtgaagggccgattcaccatctccagagacaacgcccagaattcagtgtatcttcagatgaacaccctgagagccgacgacacggggttttatttctgtacgatagggcactaccatgactacacgggccaggggaccctggtcaccgtctcctca

SEQ ID NO: 8874 - DNA, 279 bp, Homo sapiens
  source 1..279: mol_type = other DNA
gcttctggatacaccttcaccgactactatatacactgggtgcgacaggcccctggacaagggcttgagtggatgggctggctcaagcctaaaaatggtgccacaaactatgcacagaggtttgagggcaggatcaccatgaccagggacacgtccatcagcacagcctacatggagctgaccaggctgacatctgacgacacggccgtctattattgtgcgagaaatagtagtggctatctctactggggccagggaaccctggtcaccgtctcctca

SEQ ID NO: 8875 - DNA, 279 bp, Homo sapiens
  source 1..279: mol_type = other DNA
gcctctggatacaccttcaccgactattatatgcactgggtgcgacaggcccctggacaagggcttgagtggatgggatggatcaagcctaatagtggtggcacaaaatatgaacagagatttcagggcagggtcaccatgaccagggacacgtccaccagcacagcctacatggaactgagcgggctgagatctgacgacacggccatttattattgcgcgagaaatagcagtggttatttgtactggggccagggaaccctggtcaccgtctcctca

SEQ ID NO: 8876 - DNA, 279 bp, Homo sapiens
  source 1..279: mol_type = other DNA
gcttctggatacaccttcaccgactactatatgcactgggtgcgacaggcccctggacaagggcttgagtggatgggatggatcaagcctaacagtggtggcacaaaatatgaacagagatttcagggcagggtcaccatgaccagggacacgtccaccagcacagcctacatggaactgagcgggctgagatctgacgacacggccatttattattgcgcgagaaatagtagtggttatttgtactggggccagggaaccctggtcaccgtctcctca

SEQ ID NO: 8877 - DNA, 279 bp, Homo sapiens
  source 1..279: mol_type = other DNA
gcttctggatacaccttcaccgactattatattcactgggtgcgacaggcccctggacaagggcttgagtggatggggtggagcaaacctatcaatggtgccacaaactatgcactgaagtttcagggcagggtcaccatgaccagggacacgtccatcagcacagcctacatggagctgagcagtctgagctctgacgacacggccatatattactgtgcgaggaatagtagtggttatttatactggggccagggaaccctggtcaccgtctcctca

SEQ ID NO: 8878 - DNA, 279 bp, Homo sapiens
  source 1..279: mol_type = other DNA
gcttctggatacaccttcaccgactactatatccactgggtgcgtcaggcccctggacaagggcttgagtggatgggatggatcaagcctaggaatggtgccacaaactatgcacagagatttgagggcagggtcaccatgaccagggacacgtccatcaccacagcctacatggaattgagtaggctgacatttgacgacacggccgtgtactattgtgcgaggaatagtagtggttatctttattggggccagggaaccctggtcaccgtctcctca

SEQ ID NO: 8879 - DNA, 304 bp, Homo sapiens
  source 1..304: mol_type = other DNA
cactgtctctggtggctccataagtgattactactggagctggatccggcagtccccagggaagggactggagtggattgggtatatcaatgacagagagaccaccaactacaacccctccctcaagagtcgagtcaccatatcagtagacacgtccaagaaccagttctccctgaacctgaggtctgtgaccgcagcggacacggccttatattactgtgcgagagcggaagcagcagctggttctcattactactacggtttggacgtctggggccaagggaccacggtcaccgtctcctca

SEQ ID NO: 8880 - DNA, 304 bp, Homo sapiens
  source 1..304: mol_type = other DNA
cactgtctctggtggctccatcagtggttactactggagctggatccggcagcccccagggaagggactggagtggattgggtatatctattataatgagatcaccaactacaacccgtccctcaagagccgagtcaccatgtcagtggacacgcccaagaaccagttctccctgaatctgagctctgtgaccgctgcggacacggccgtttattactgtgcgagagcggaagcagcagctggtagtcactactactacggtttggacgtctggggccaagggaccacggtcaccgtctcctca

SEQ ID NO: 8881 - DNA, 283 bp, Homo sapiens
  source 1..283: mol_type = other DNA
tgcagcctctggattcacctttagaaactattgggtgagctgggtccgccaggctccagcgaaggggctggagtgggtggccaacataaagcaagatggaagtgagaagtactatgtggactctgtgaagggccgattcaccgtctccagagacaacgccaagaattcactgtatctgcaaatgaacaacctgagagccgaggacacggctgtgtattactgtgcgagagtgaccccagctattcaatactggggccagggaaccctggtcaccgtctcctca

SEQ ID NO: 8882 - DNA, 283 bp, Homo sapiens
  source 1..283: mol_type = other DNA
tgcagcctctggattcacctttagtagttattggatgacctgggtccgcctggctccagggaaggggctggagtgggtggccaacataaagcaagatgggcgtgataaatactatgtggactctgtggagggccgattcaccatctccagagacaacgccaagaattcactgtttctgcaaatgaacagcctgagagccgaggacacggctgtgtattactgtgcgagagtcacccccgccattcagtactggggccagggaaccctggtcaccgtctcctca

SEQ ID NO: 8883 - DNA, 280 bp, Homo sapiens
  source 1..280: mol_type = other DNA
tgcagcctctggattcacctttagcagctctgccatgacctgggtccgccaggctccagggaaggggctggagtgggtctcaactattactagtagtggtgacagcacatactacgcagactccgtgaagggccggttcaccatctccagagccaattccagggacacgttgtatctgcaaatgaacagcctgagagccgaagacacggccgtatattactgtgcgaaaccaaacggtatggacgtctggggccaagggaccacggtcaccgtctcctca

SEQ ID NO: 8884 - DNA, 280 bp, Homo sapiens
  source 1..280: mol_type = other DNA
tgcagcctctggattcacctttagcaactatcccatgagctgggtccgccaggctccagggaaggggctggagtgggtctcaactattagtggtagtggtgctagcacatactacgcagactccgtgaagggccggttcaccatctccagagacaattccaagaacacgctgtatctgcaaatgagcagcctgcgagccgaggacacggccgtgtattactgtgcgaaacccaacggtatggacgtctggggccaggggaccacggtcaccgtctcctca

SEQ ID NO: 8885 - DNA, 282 bp, Homo sapiens
  source 1..282: mol_type = other DNA
gcttctggatacaccttcaccagttatgatatcaactgggtgcgacaggccactggacaagggcttgagtggatgggagggatgaaccctaccagtgggtacacaacctatgcacagaagttccagggcagagtcaccatgaccagggacacctccataagcacagcctacatggagctgaccagcctcagatctgaggacacggccgtatattactgtgcgagaggcgtagatgagggtcttgactactggggccagggaaccctggtcaccgtctcctca

SEQ ID NO: 8886 - DNA, 282 bp, Homo sapiens
  source 1..282: mol_type = other DNA
gcctctggatacacattcaccagtcttgatatgaactgggtgcgacaggcccctggacaagggcttgaatggatgggatgggtgagccctaatagtgggaacgcaggctctgcacagaagttccagggcagagtcaccatgaccagagacactcccattaacacattctacatggaattgagcgggctgacatctgacgacacggccatctattactgtgcgagaggtgtagatgaaggtcttgactactggggccagggaaccgcgatcaccgtctcctca

SEQ ID NO: 8887 - DNA, 283 bp, Homo sapiens
  source 1..283: mol_type = other DNA
tacagtctctggattcacgttgagtagtcatgaagtcaattgggtccgccaggctccagggaaggggctggaatgggtttcatacagtagtcatggtagtacgacatttttcgcagactccgtgaagggccgattcaccgtctccagagacaacgccaagaactcagtgtatctgcaaatgaacagcctgagagtcgacgacacggctgtttattactgtgcgagaggccccctggctccgttcgactactggggccagggaaccctggtcaccgtctcctca

SEQ ID NO: 8888 - DNA, 283 bp, Homo sapiens
  source 1..283: mol_type = other DNA
tgcagcctctggattcaccttcagaagttatgaaatgaattgggtccgccaggctccagggaaggggctggagtggctttcatacattagtagtggtagtaccatattctacgcagactctgtgaagggccgatttaccgtctccagagacaacgccaagaactcgctgtatctgcaaatgaatagcctgcgagccgaggacacggctgtttattactgtgcgagagggccactggccccttttgactactggggccagggaaccctggtcaccgtctcctcg

SEQ ID NO: 8889 - DNA, 283 bp, Homo sapiens
  source 1..283: mol_type = other DNA
tgcaggctctggattcacgttgagtacttatgaagtcaattgggtccgccaggctccagggaaggggctggaatgggtttcatacagtagttatggtagtacgatattttacgcagattctgtgaagggccgattcaccatctccagagacaacgccaacaactcagtgtatctgcaaatgaacagcctgagagtcgacgacacggctgtttattactgtgcgagaggccccctggctccgtttgactactggggccagggaaccctggtcaccgtctcctca

SEQ ID NO: 8890 - DNA, 286 bp, Homo sapiens
  source 1..286: mol_type = other DNA
tacagcctctggattcacctttaccaactatgccatgagctgggtccgccagcctccagggaaggggctggagtgggtctcagctattactggtgacggtggtaccacattctacgcagactccgtgaagggccgattcaccgtctccagagacaatttcaggaacacgatagatctgcaagtgaacagcctgagagcggacgacacggccgtatattactgtgcgaaagggaactgggggcaccttgactactggggccagggaaccctggtcaccgtctcctca

SEQ ID NO: 8891 - DNA, 286 bp, Homo sapiens
  source 1..286: mol_type = other DNA
tgcaacttctggattcacgtttcgcgactatgccatgagctgggtccgcctggctccagggaaggggctggagtgggtctcagctatgaatggtaatgatcctggcacatactacgcagactccgtgaagggccggttcaccgtctccagagacaattcgaagaacacactgtatctgcaaatgaacagcctaagagccgaggacacggccgtatattactgtgcgaaaggcaactggggacatttagactactggggccagggaaccctggtcaccgtctcctca

SEQ ID NO: 8892 - DNA, 286 bp, Homo sapiens
  source 1..286: mol_type = other DNA
tgcagcctctggattcacctttaccaactatgccatgagctgggtccgcctggctccagggaaggggctggagtgggtctccgctgttactggtaatggtattggcacattctacgcagactccgtgaagggccggttcaccatctccagagacaattccaagaacacactgtatctgcagatgaacagtctaaaagccgaggacacggccatatattactgtgcgaaaggcaactggggacacttagactactggggccagggaaccctggtcaccgtctcctca

SEQ ID NO: 8893 - DNA, 286 bp, Homo sapiens
  source 1..286: mol_type = other DNA
tgcagcctctggattcacctttaccagctatgccatgagctgggtccgcctggctccagggaaggggctggagtgggtctctgctgttactggtgatggtggtggcacattctacgcagactccgtgaagggccggttcaccatttccagagacaattccaagaacacactgtatctgcaaatgaacagtcttacggccgacgacacggccacatattactgtgcgaaaggcaactggggacacttggactactggggccggggaaccctggtcaccgtctcctca

SEQ ID NO: 8894 - DNA, 286 bp, Homo sapiens
  source 1..286: mol_type = other DNA
tgcagcctcaggattcccctttaccagctatgccatgagctgggtccgcctggctccagggaggggcctggagtgggtgtcagctgttactggtgatggggctgtcacattctacgcagactccgtgaagggccggttcaccatctccagagacaattccaagaacacgctgtatctgcagatgaacagtctgaaagccgaggacacggccatatattactgtgcgaaaggcaactggggacacttagactactggggccagggaaccctggtcaccgtctcctca

SEQ ID NO: 8895 - DNA, 286 bp, Homo sapiens
  source 1..286: mol_type = other DNA
tgcagcctctggattcacctttaccagctatgccatgagctgggtccgcctggctccagggaaggggctggagtgggtctctgctgttactggtgatggtgctcgcacattctacgcagactccgtgaagggccggttcaccatctccagagacaattccaagaacacgctgtatctgcaaatgaacagtcttaaggccgaggacacggccatatattactgtgcgaaaggcaactggggacacttggactactggggccagggaaccctggtcaccgtctcctca

SEQ ID NO: 8896 - DNA, 295 bp, Homo sapiens
  source 1..295: mol_type = other DNA
tgcagcctctggattcatcttcactaaccatgccatgcactgggtccgccaaaatccagacaaggggctggagtgggtggccctgatattgaaagatggaagtgaaaaatcctatggagactccgtgaagggccgattcaccatctcgagagacgattccaagaacactgtgtttttgcaaatggatagcctgagacctgaggacacggctgtgtattactgtgtgaaggatgatactactggattcttctatgttgactactggggccagggaaccccggtcaccgtctcctca

SEQ ID NO: 8897 - DNA, 295 bp, Homo sapiens
  source 1..295: mol_type = other DNA
tgcagcctctggattcaccttcagccgtcatgggatgcactgggtccgccaggctccaggcaaggggctggagtgggtggcaattatattcaatgatggaagtcaacattattatgcagactccgtgaagggccgattcaccgtctccagagacgattccaagaacacgctgtatctacaaatgaacagcctgagagttgaggacacggctctatattactgtgtgaaagatgatactactggttttttctatgtagattactggggccagggaaccctggtcaccgtctcctca

SEQ ID NO: 8898 - DNA, 283 bp, Homo sapiens
  source 1..283: mol_type = other DNA
tgcagcctctggattcacctttagcgcccataccatgtcttgggtccgccagagtccagggaaggggctggaatgggtctcaactattgatagtcgtgatttgaccacctcctacgcagactccgtgaagggccggttcactatctccagagacaattccaggaacagtctgtatctacaaatgaacagcctgagagccgacgacacggccgtctattactgtgcacaaggacttaaggaccttgactactggggccagggagccctggtcaccgtctcctca

SEQ ID NO: 8899 - DNA, 283 bp, Homo sapiens
  source 1..283: mol_type = other DNA
tgcagcctctggattcacctttagcagacatgtcatgagttgggtccgccaggctccagggaagggactggagtgggtctcaagtattagtaatattggtgacagcacatactacgcagactctgtgaagggccggttcaccatctccagagacaattccaagaacactctatatctgcaattgaacagcctgagagccgaggacacggccgtatattactgtgcgcagggccttaaagaccttgactactggggccagggagccctggccaccgtctcctca

SEQ ID NO: 8900 - DNA, 295 bp, Homo sapiens
  source 1..295: mol_type = other DNA
tgtagcctctggattcgcctttagcagctctgccatgagctgggtccgccaggctccagggaaggggctggagtgggtctccgctattagtggtagtggtgagagcacatactacgcagactccgtgaagggccggttcaccttctccagagacaattccaagaacaccctgtctctgcaaatgaacagcctgagactcgaggacacggccatatattactgtgcgaaatctctcggttcggggacttactcatttgactactggggcctgggaaccctggtcaccgtctcctca

SEQ ID NO: 8901 - DNA, 295 bp, Homo sapiens
  source 1..295: mol_type = other DNA
tgcagcctctggattcacctttagtagctatgccatgagttgggtccgccaggctccagggaaggggctggagtgggtctcactcattcatagcagtggtactaacacattctatgtagactccgtgaagggccggttcaccatctccagagataattccaagaacatggtgtatctgcaaatgaacagcctgagagtcgaggacacggccgtatattactgtgcgaaatcccttggttcggggacttactcatttgactactggggccagggaaccctggtcaccgtctcctca

SEQ ID NO: 8902 - DNA, 295 bp, Homo sapiens
  source 1..295: mol_type = other DNA
tacagcctctggattcacctttaccaactatgccatgagctgggtccgccaggctccagggatggggctggagtgggtctcacttatttatgccgatggcagtaggacatcctatgcggactccgtgaagggccagttcatcctctccagagataattccaagaacacggtgtttctgcaaatgaacagcctgagagccgaggacacgaccgtatattactgtgcgaagagcctgggttcggggacttattcttttgactactggggccagggaatcctggtcaccgtctcctca

SEQ ID NO: 8903 - DNA, 295 bp, Homo sapiens
  source 1..295: mol_type = other DNA
tacagcctctggattcacctttaccaactatgccatgagctgggtccgccaggctccagggatggggctggagtgggtctcacttatttatgccgatggcagtaggacatcctatgcggactccgtgaagggccagttcatcctctccagagataattccaagaacacggtgtttctgcaaatgaacagcctgagagccgaggacacggccgtatattactgtgcgaagagcctgggttcggggacttattcttttgactactggggccagggaatcctggtcaccgtctcctca

SEQ ID NO: 8904 - DNA, 295 bp, Homo sapiens
  source 1..295: mol_type = other DNA
tggagcctctggattcacctttagcaactatgccatgagttgggtccgccaggctccagggaaggggctggagtgggtctcacttattgacaacagtggtagtggttctacctatgcagactccgtgaggggccggttcaccatctccagagctaattccaagaacatggtctatgtgcaaatgaacagcctgagagccgaggacacggccgtatattactgtgcgaaaagtcttggttcggggacttactcctttgactactggggccagggaaccctcgtcaccgtctcctca

SEQ ID NO: 8905 - DNA, 280 bp, Homo sapiens
  source 1..280: mol_type = other DNA
tgcagcctctggattcacctttagtagctattggatgagctgggtccgccaggctccagggaaggggctggagtgggcggccaacattaagcaagatggaagtgagaaatactatgtggactctgtgaagggccgattcaccatctccagagacaacgccaagaactcactgtatctgcaaatgaacagcctgagagccgaggacacggctgtgtattactgtggagtctctcggacctttgactactggggccagggaaccctggtcaccgtctcctca

SEQ ID NO: 8906 - DNA, 280 bp, Homo sapiens
  source 1..280: mol_type = other DNA
tacagcctctggattgacttttagtagctattggatgagctgggtccgccaggctccagggaaggggctggagtgggtggccaacataaaacaagatggaagtgacaagtactatgtggactctgtgatgggccgattcaccatctccagagacaacgccaagaactcactgtatctgcaaatgaatagcctgagagccgacgacacggctgtgtattactgtggcgttagcagaacctttgactactggggccagggaaccctggtcaccgtctcccca

SEQ ID NO: 8907 - DNA, 280 bp, Homo sapiens
  source 1..280: mol_type = other DNA
tgcagcctctggattcccctttagtagattttggtggagctgggtccgccaggcgccagggaaggggctggagtggctggccaacataaagcaagatggaagtgaagaaaactatgtggactctgtgatgggccgattcaccatctccagagacaacgccaagaactcactgtatctgcaaatgaatagcctgagagccgacgacacggctgtgtattactgtggcgttagcagaacctttgactactggggccagggaaccctggtcaccgtctcccca

SEQ ID NO: 8908 - DNA, 280 bp, Homo sapiens
  source 1..280: mol_type = other DNA
tacagcctctggattgacttttagtagctattggatgagctgggtccgccaggctccagggaaggggctggagtgggtggccaacataagacaagatggaagtgaaaagtactatgtggactctgtgatgggccgattcaccatctccagagacaacgccaagaactcactgtatctgcaaatgaacagcctgagagccgacgacacggctgtgtattactgtggcgttagcagaacctttgactactggggccagggaaccctggtcaccgtctcccca

SEQ ID NO: 8909 - DNA, 298 bp, Homo sapiens
  source 1..298: mol_type = other DNA
tgcagcgtctggattcaccttcgatagctatggcatgcactgggtccgccaggctccaggcaaggggctggagtgggtgtcagttatatggtatgatggaagtaataaatactatgcagactccgtgaagggccgatttaccatctccagagactcttccaagaacacgctgtatctgcaaatgaacagcctgagagccgaggacacggctgtgtattactgtgcgaaaggggccgggtataacagtggctggtactttgactactggggccagggaaccctggtcaccgtctcctca

SEQ ID NO: 8910 - DNA, 298 bp, Homo sapiens
  source 1..298: mol_type = other DNA
tgcagcgtctggattcaccttcagtagttatggcatgcactgggtccgccaggctccaggcaaggggctggagtgggtggcagttatatggtatgatggaagtaataaatactatgcagactttgtgaggggccgattcaccatctccagagacagttccaacaacacgctgtatctgcaaatgaacagcctgagagccgaggacacggctgtttattactgtgcgaaaggtgccgggtataacagtggctggtactttgactactggggccagggaaccctggtcaccgtctcctca

SEQ ID NO: 8911 - DNA, 298 bp, Homo sapiens; identical to SEQ ID NO: 8910
  source 1..298: mol_type = other DNA

SEQ ID NO: 8912 - DNA, 292 bp, Homo sapiens
  source 1..292: mol_type = other DNA
tgcagcctctggattcacctttagcaactacgccatgagctgggtccgccaggctccagggaaggggctggagtgggtctcagccattagtggtagtggtggtactacatcctacgcagactccgtgaagggccggttcaccatctccagagacaattccaagaacacgctgtatctgcaaatgaacagcctgagagccgaggacacggccatatattactgtgcgaaaggtagtagtggttattactactttgattattggggccagggaaccctggtcaccgtctcctca

SEQ ID NO: 8913 - DNA, 292 bp, Homo sapiens
  source 1..292: mol_type = other DNA
tgcagcctctggattcacctttagcagccatgccatgagctgggtccgccaggctccagggaaggggctggagtgggtctcagctatcgttggtagtggtggtagaacatcctacgcagactccgtgaagggccggttcaccatctccagagacaattccaagaacacgctgtatctgcaaatgaacagcctgagagccgaggacacggccgtatattactgtgcgaaaggttccagtggttattattactttgactattggggccagggaaccctggtcaccgtctcctca

SEQ ID NO: 8914 - DNA, 289 bp, Homo sapiens
  source 1..289: mol_type = other DNA
tgcagcctctggattcgactttagtaattcttggatgagttgggtccgtcaggctccagtgagggggctggagtgggtggccgacatgaaccaagatggaagtgtaaaagtctatggggactctgtgaagggccgattcaccatctccagagacaatgccaagaattcagtgtttctgcaactggacagcctgagcgccgaggacacggctgtctattattgtgcgagagatccccattgtggggccctggactactggggccagggagccctggtcaccgtctcttca

SEQ ID NO: 8915 - DNA, 289 bp, Homo sapiens
  source 1..289: mol_type = other DNA
tgcagcctctggattcgaccttagtaattcttggatgagttgggtccgtcaggctccagtgagggggctggagtgggtggccgacatgaaccaagatggaagtgtaaaagtctatggggactctgtgaagggccgattcaccatctccagagacaatgccaagaattcagtgtttctgcaactggacagcctgagcgccgaggacacggctgtctattattgtgcgagagatccccattgtggggccctggactactggggccagggagccctggtcaccgtctcttca

SEQ ID NO: 8916 - DNA, 289 bp, Homo sapiens
  source 1..289: mol_type = other DNA
tgcagcctctggattcacctttggtagttcttggatgagttgggtccgccgggctccagggaagggactggagtgggtggccgacataaacggagatggaagtacgattgtgtacgtggactctgtgaagggccgattcaccgtctccagagacaacgccaagaattcagtgtatctgcaaatgaatagcctgagagtcgaggacacggctgtctatttctgtgcgagagatcctcactgtggggccttagattactggggccagggaaccctggtcaccgtctcctca

SEQ ID NO: 8917 - DNA, 298 bp, Homo sapiens
  source 1..298: mol_type = other DNA
tgcagcctctggattcaccttcactggctatgacatgcactgggtccgccaggctccaggcaaggggctagagtgggtggcagttatatcaattgatggaagcattaaatactactcagactccgtgaagggccgtttcaccatctccagagacaattccaagaacacgctatatctgcaaatgaacagcctcagagctgaagacacggctatatattactgtgcgagagactttagactgggagccccggactacttagactactggggccagggaaccctggtcaccgtctcctca

SEQ ID NO: 8918 - DNA, 298 bp, Homo sapiens
  source 1..298: mol_type = other DNA
tgcagcctctggattcaccttcactgactatgacatgcactgggtccgccaggctccaggcaaggggctagagtgggtggcagttatatcaattgatggaagcattaaatactactcagactccgtgaagggccgtttcaccatctccagagacaattccaagaacacgctatatctgcaaatgaacagcctcagagctgaagacacggctatatattactgtgcgagagactttagactgggagccccggactacttagactactggggccagggaaccctggtcaccgtctcctca

SEQ ID NO: 8919 - DNA, 301 bp, Homo sapiens
  source 1..301: mol_type = other DNA
tgcagcctctggattcaacttcgctatgtatgagatacactgggtccgccaggctccaggcaagggactggagtgggtggcagttatgtcaacaggttctggaactattcgattgtacactgactccgtgaggggccgattcaccatctccagggacgataccaagaacactctgtttctgcaaatgaacagcctgagagccgacgacacggctgtctattattgtgcgagagattttcgactaggcgccccggactaccttgactactggggccagggaaccctggtcaccgtctcctca

SEQ ID NO: 8920 - DNA, 286 bp, Homo sapiens
  source 1..286: mol_type = other DNA
tgtagcgtctggattcgccttcagtacttatggcatgcactgggtccgccaggctccaggcaagggcctggagggggtggcaactttattgtatgatgcaagtaatgcatattattcagactccgtgcagggccgcttcagcatctccagagacatttccaaaaacacactttatttgcaaatgaacagcctgagagccgaggatacggcggtctattattgtgcgagagatgggattagcggcattgactactggggccagggaaccctggtcaccgtctcgtcg

SEQ ID NO: 8921 - DNA, 286 bp, Homo sapiens
  source 1..286: mol_type = other DNA
tgtagcgtctggattcgccatcagcagatatggcatgcactgggtccgcctggctccagacaagggattggagtgggtgacacttctgacaagtgattcaactgaaaaacactatatagactccgtgaggggccgattcaccatctccaaggacaactccaagaacatgttgtttctgcaaatgaatagcctgagagtcgaggacacggccacatattattgtgcgagagatggtataagtggaattgactattggggccagggatccctggtcaccgtctcagca

SEQ ID NO: 8922 - DNA, 286 bp, Homo sapiens
  source 1..286: mol_type = other DNA
tgtagcgtctggattcgccttcagtacttatggcatgcactgggtccgccagactccaggcaaggggctggagggggtggcaaccttattatatgatgccagtaatgaatattatttagactccgtgaagggccgattcaccatctccagagacatttccaaaaacacactttatctgcaaatggatagcctgagagccgaagacacggctgtctattactgtgcgagagatgggattagtggcattgactactggggccagggaaccctggtcaccgtctcctcg

SEQ ID NO: 8923 - DNA, 286 bp, Homo sapiens
  source 1..286: mol_type = other DNA
tgcagcctccggattcacatttagtagtctttggatgaattgggtccgccaggttccagggaaggggctggaatgggtggccattataaggcaggatgggagtgagacaaagtatgtggactctgtgaaggggcgattcaccatctccagagacaacgccgagaactcagtgtatctgcaaatgaacagtctcagagccgaggacacggctctgtattactgtgcgggcggaacgggatggctgatggagttttggggccagggaaccctggccaccgtctcttca

SEQ ID NO: 8924 - DNA, 286 bp, Homo sapiens
  source 1..286: mol_type = other DNA
tgcagcctccggattaacatttagtagtctttggatgaattgggtccgccaggttccagggaaggggctggaatgggtggccattataaggcaggatgggagtgagacaaagtatgtggactctgtgaaggggcgattcaccatctccagagacaacgccgagaactcagtgtatctgcaaatgaacagtctcagagccgaggacacggctctgtattactgtgcgggcggaacgggatggctgatggagttttggggccagggaaccctggccaccgtctcttca

SEQ ID NO: 8925 - DNA, 284 bp, Homo sapiens
  source 1..284: mol_type = other DNA
cagcctccggattcacatttagtagtctttggatgaattgggtccgccaggttccagggaaggggctggaatgggtggccattataaggcaggatgggagtgagacaaagtatgtggactctgtgaaggggcgattcaccatctccagagacaacgccgagaactcagtgtatctgcaaatgaacagtctcagagccgaggacacggctctgtattactgtgcgggcggaacgggatggctgatggagttttggggccagggaaccctggccaccgtctcttca

SEQ ID NO: 8926 - DNA, 286 bp, Homo sapiens
  source 1..286: mol_type = other DNA
tgcagcctctggattgacctttagaagttattggatgaactgggtccgccaggctccagggaaggggctagagtgggtggccatcattaaacaaggtggaactgaacaaaagtatgtggactctgtgaggggccgattcaccatctccagagacgacgccaagagttcattgtatctgcaaatgaacagcctgagagccgacgacacggctgtctattattgtgcggggggtactggctggcttatggagttctggggccggggagtcctgatcaccgtctcctca

SEQ ID NO: 8927 - DNA, 280 bp, Homo sapiens
  source 1..280: mol_type = other DNA
tgcagcctctggattcacatttagtgccaacttgatgacttgggtccgccaggctccagggaaggggctggagtgggtggccaacataaaccaagatggaagtgagaaatactatgtggactctgtgaagggccgattcaccatctccagagacaacgccaaaaattcactgtatctgcaaatggacagcctgagagccgaggacacggctgtgtatttctgtgcgagactccgcggtggtaataactggggccagggaatcctggtcaccgtctcctca

SEQ ID NO: 8928 - DNA, 280 bp, Homo sapiens
  source 1..280: mol_type = other DNA
tgcagtctctggactcacctttagtagtaatttgatgacctgggtccgccaggctccagggaaggggctggagtgggtggccaacataaaccaagatggaagtgagaaatactatggtgactctgcgaagggccgattcaccatctccagagacaacgccaggaactcactctttctgcaaatgaacagcctgagagtcgaagacacggctgtctattactgtgcgaggctgcgtggtggcaataactggggccagggaaccctggtcaccgtctcctca

SEQ ID NO: 8929 - DNA, 280 bp, Homo sapiens; identical to SEQ ID NO: 8927
  source 1..280: mol_type = other DNA

SEQ ID NO: 8930 - DNA, 289 bp, Homo sapiens
  source 1..289: mol_type = other DNA
tgcagcgtctggattctccttcagtaattatgccatgcactgggtccgccaggccccaggcaaggggctgcagtgggtggcacttatttggtatgatggaactaatgaacattatgcagactccgtgaagggccgattcaccatctccagagacaattccaagaacaccctgtttctgcaaatgaacagcctgagagccgaagacacggctgtgtattactgtgcgagggaaaaaaaagagatggctaccgactactggggccagggaatcctggtcaccgtctcctca

SEQ ID NO: 8931 - DNA, 289 bp, Homo sapiens
  source 1..289: mol_type = other DNA
tgcagcgtctggattctccttcagtaattatgccatgcactgggtccgccaggccccaggcaaggggctgcagtgggtggcacttatttggtatgatggaactaatgaacattatgcagactccgtgaagggccgattcaccatctccagagacaattccaagaacaccctgtttctgcaaatgaacagcctgagagccgaagacacggctgtgtattactgtgcgagggaaaaaaaagaaatggctaccgactactggggccagggaatcctggtcaccgtctcctca

SEQ ID NO: 8932 - DNA, 289 bp, Homo sapiens
  source 1..289: mol_type = other DNA
tgcagcctctggattcagcttcagtgactatgccatgcactgggtccgccaggctccaggcaaggggctggagtgggtggcagttatatggtatgatggaagtaacaaattccatgcagactccgtgaagggccgattcaccatctccagagacaattccaagaacatgctatatctgcaaatgaacagcctgagagtcgaggacacggctgtatattattgtgcgagagaaaagaaggagatggctactgactactggggccagggaaccctggtcaccgtctcctca

SEQ ID NO: 8933 - DNA, 291 bp, Homo sapiens
  source 1..291: mol_type = other DNA
gagacttctggatacaactttgatactttctggattggctgggtgcgccagatgcccgggaaaggcctggagtggatgggtatcatctatcccggtgactctgatgtcagatacagtccgtccttccaaggccaagtcactatctcagccgacaggtccaccaataccgcctacctacagtggaccagcctgaaggcctcggacaccgccatgtatttttgtgcgcgacggggtgggagtctgaacttctttgactactggggccagggagtcctggtcaccgtctcctca

SEQ ID NO: 8934 - DNA, 291 bp, Homo sapiens
  source 1..291: mol_type = other DNA
gagggttctggatacagctttaacacctactggatcggctgggtgcgccagatgcccgggaaaggcctggagtggatgggtatcatctatcctggtgactctgataccagatatagcccgtccttccaatgccaggtcaccatctcagccgacaggtccagcaataccgcctacctgcagtggagcagcctgaaggcctcggacaccgccatgtatttttgtgcgcgacggggtgggagcctaaacttctttgactactggggccagggagtcctggtcaccgtctcctca

SEQ ID NO: 8935 - DNA, 291 bp, Homo sapiens
  source 1..291: mol_type = other DNA
gagggttctggatacagctttaacacctactggatcggctgggtgcgccagatgcccgggaaaggcctggagtggatgggtatcatctatcctggtgactctgataccagatatagcccgtccttccaaggccaggtcaccatctcagccgacaggtccagcaataccgcctacctgcagtggagcagcctgaaggcctcggacaccgccatgtatttttgtgcgcgacggggtgggagcctaaacttctttgactactggggccagggagtcctggtcaccgtctcctca

SEQ ID NO: 8936 - DNA, 291 bp, Homo sapiens
  source 1..291: mol_type = other DNA
aagggttctggatacacctttaccaactcctggattggctgggtgcgccagatgcccgggaaaggcctggagtggatgggcatcatctatcctggtgactctgataccagatacagcccgtccttccaaggccaagtcaccatctcagccgacaagtccatcaacattgcctacctgcagtggagcagcctggaggcctcggacaccgccatgtattactgtgcgagacggggggggtccttaaacttctttgactactggggccagggaaccctggtcaccgtctcctca

SEQ ID NO: 8937 - DNA, 291 bp, Homo sapiens
  source 1..291: mol_type = other DNA
aagggttctgcatacacctttgacaactactggatcggctgggtgcgccagatgcccgggaaaggcctggagtggatgggaatcatttatcctgctgactctgataccagatacagtccgtctttccaaagccaagtcaccatctcagccgacaagtccatcgccaccgcctacctgcagtggaccagtctgaaagcctcggacaccgccatttattactgtgcgagacggggaggaagtctaaatttttttgactactggggccagggaaccctggtcaccgtctcctca

SEQ ID NO: 8938 - DNA, 291 bp, Homo sapiens
  source 1..291: mol_type = other DNA
gagggttccggatacaacttcgacacctactggattggctgggtgcgccagatgcccggaaagggcctggagtggatgggtatcatctatcctggggactctgataccagatacagtccgtccttccaaggccgggtcaccatgtcagtcgacgtgtccacccatatcgcctatttgcagtggagcagcctggaggcctcggacaccgccatatatttttgtgcgcgacggggtggcagcctgaacttctttgactactggggccagggagtcctggtcaccgtctcctca

SEQ ID NO: 8939 - DNA, 298 bp, Homo sapiens
  source 1..298: mol_type = other DNA
tgcagcctctggattcaccttcagaaacttcgttatgcactgggttcgccaggctccaggcaaggggctggagtggataggtgctttatcatctgatggaagtattccatatttcacaaagtccgactccctgagggaccgattcgtcatgtccagaaacaattcgaggaacactctgttcctgcaagtgaacgacgtgagacctgaagacacggctacatatttttgtgcgagagagggcggttcggggagttcccccgattactggggccagggaaccctggtcatcgtctcttca

SEQ ID NO: 8940 - DNA, 292 bp, Homo sapiens
  source 1..292: mol_type = other DNA
tgcagcctctggattcagcttcagcagctatgctatgcagtgggtccgccaggctccaggcaaggggctggagtgggtggcagttacaccatatgatggaagttataactaccacgcaggctccgtgaagggccggttcaccatctccagagacaattccaagaacacgctgtatctgcaaatgaacagcctgagagatgaggacacggctgtctattactgtgcgagagaaggaggttcggggagttctcccgactactggggccagggaaccctggtcaccgtctcctca

SEQ ID NO: 8941 - DNA, 307 bp, Homo sapiens
  source 1..307: mol_type = other DNA
tacagtttctggattcacccttggtgattatgctttgaactgggtccgccaggctccgggagaggggctggagtgggtaggtctcattagaaacgatgcttatggtgggacaacggaatacgccgcgtctgtgaaagggagatttaccatctcaagagatgattccaaaaccattgcctatctgcaaatgaacagcctgaaaatcgaggacacagccgtgtattactgtgctagaggccgtaccgttgtgggagccaagtactactttgactactggggcctgggaaccctggtcaccgtctcctca

SEQ ID NO: 8942 - DNA, 307 bp, Homo sapiens
  source 1..307: mol_type = other DNA
tacaccttctggattcacctttggtgattatgctatgacctgggtccgccaggctccagggaaggggctggagtgggtaggtttcattagaagtaaagagtatggtgggacaacagaatacgacgcgtccgtgagaggcagattcaccatctcaagagatgattccaaaagcatcgcctatctgcaaatgaacagcctgaaaaccgaagacacagccgtgtattactgtgctagaggtagaaccgtagtgggagctaagtactactttgactactggggccagggaatcctggtcaccgtctcctca

SEQ ID NO: 8943 - DNA, 307 bp, Homo sapiens
  source 1..307: mol_type = other DNA
cacagcctctggattcagttttgaagattatggtatgggttgggtccgccaggctccagggaggggcctggagtgggtcagtttcattagaagctacatttatggtgggtcagcagaaaacgccgcgtctgtgaaaggcagattcatcgtctcaagagatgattccaaaaacatcgcctatctgcagatgaacagcctggacaccggggacacagccatatattattgtggtagaggtctgacggttacaggaagtaaatactactttgacaactggggccagggaaccctggtcaccgtctcctca

SEQ ID NO: 8944 - DNA, 307 bp, Homo sapiens
  source 1..307: mol_type = other DNA
ttcagcctctggattcagccttggtgattatggtatgggttgggtccgccaggctccagggaggggcctggagtgggtaagtttcattagaagcaaaacctatggcgggtcagcagaaaacgccgcgtctgtgaaaggcagattcatcgtctcaagagatgattccaaaaacatcgcctatctgcagatgaacagcctggacaccgaggacacagccatatattattgtggtagaggcctgacggttacaggaagtaaatactactttgacaactggggccagggaaccctggtcaccgtctcctca

SEQ ID NO: 8945 - DNA, 307 bp, Homo sapiens
  source 1..307: mol_type = other DNA
tacaacttctggatatacctttgttgattttggcttgggctgggtccgccaggctccagggaaggggctggagtgggtagctttcgctagaagcaaactttatggtggggcgcctgaatacgccgcggctgttaaaggcagattcaccgtctcaagagatgattccaacagtatcgcacatctgcacatggacagcctgcagaccgaggacacagccgtctactactgtggtagaggacttactgtgacaggatcaaagtactactttgacaactggggccagggaaccctggtcaccgtctcctca

SEQ ID NO: 8946 - DNA, 307 bp, Homo sapiens
  source 1..307: mol_type = other DNA
ttcagcctctggattcagccttggtgattatggtatgggttgggtccaccaggctccagggaggggcctggagtgggtaagtttcattagaagcaaaacctatggcgggtcagcagaaaacgccgcgtctgtgaaaggcagattcatcgtctcaagagatgattccaaaaacatcgcctatctgcagatgaacagcctggacaccgaggacacagccatatattattgtggtagaggcctgacggttacaggaagtaaatactactttgacaattggggccagggaaccctggtcaccgtctcctca

SEQ ID NO: 8947 - DNA, 298 bp, Homo sapiens
  source 1..298: mol_type = other DNA
tacagcctctggattcctgttcagtgaatatactatgcactgggtccgccaggctcccggcaagggactggagtgggtggcggttatatcacatcatggaatcatttcatactacgcagactccctgaagggccgattcaccatctccagagacaattccaagaacacgctgtatctgcaaatgagcagcctgagacctgacgacacggcaatctattattgtgcgagagatcctgtaccgggagtcccggactactttgactactggggccagggaaccctggtcaccgtctcctca

SEQ ID NO: 8948 - DNA, 298 bp, Homo sapiens
  source 1..298: mol_type = other DNA
tgcaacttctggattcattttcagtgactatgttatacactgggtccgccaggctccaggcaagggactggagtgggtggcagttatgtcaagtggtggaagcattataatctacacggactccgtgaagggccgattcaccatctccagagacaattcccagaacacactgtatctggaaatgaacagcctgagacctgaggacacggccgtatattactgtgcgagagatccagtaccgggtgtccccgactactttgactactggggccagggaactctggtcactgtctcctcg

SEQ ID NO: 8949 - DNA, 292 bp, Homo sapiens
  source 1..292: mol_type = other DNA
tgcagcctctggattcagcttcaggacctatggcatacactgggtccgccaggctccaggcaaggggctggagtgggtggcagttgtttcatatgatggaaatgaacaatactatgcagactccgtgaagggccgattcatcatctccagagacaattccaagaacaccgtttttttccaaatgaacagcctgagacctgaggacacggctgtatattactgcgccaaagagtccgatggtcactccgagattgactactggggccagggaaccctggtcgccgtctcctca

SEQ ID NO: 8950 - DNA, 292 bp, Homo sapiens
  source 1..292: mol_type = other DNA
tgcagcctccggattcaccttcagtagctatagcattcactgggtccgccagactccagacaaggggctggagtgggtggcagttatttcaagagatgcaagtgaaaagttctatgcacattccgtgaagggccgattcaccatctccagagacaattccaggaacacgctgtttttacaaatgatcagcctgagacctgaggacacggctgtatattactgtgcgaaagagagcgatggtcactccgaaattgactactggggccagggaaccctggtcaccgtctcctca

SEQ ID NO: 8951 - DNA, 292 bp, Homo sapiens
  source 1..292: mol_type = other DNA
tgcagcctccggattcaccttcagtgcctatagcattcactgggtccgccagactccagacaaggggctggagtgggtggcagttatttcaagtgatggaagtcaaaaattctatgcagattccgtgaagggccgattcaccatctccagagacaattccaggaacacgctgtttttacaaatgatcagcctgagacctgaggacacggctgtatattactgtgcgaaagagagcgatggtcactccgaaattgactactggggccagggaaccctggtcaccgtctcctca

SEQ ID NO: 8952 - DNA, 283 bp, Homo sapiens
  source 1..283: mol_type = other DNA
tgcagcctctgggttcacctttagtacctattggatgaactgggtccgccaggctccagggaaagggctggagtgggtggccaacataaaggaagatggaagtgagaaatggtatgcggactctgtgaagggccgattcaccatctccagagacaacgccaagaactcactgtatctgcaaatgaacagcctgagagtcgaggacacggccctgtattactgtgcgagagggagacttgtgggcgcctactggggccagggaaccctggtcaccgtctcctca

SEQ ID NO: 8953 - DNA, 283 bp, Homo sapiens
  source 1..283: mol_type = other DNA
tgtagcctctggattcgtctttggtggttcttggatgaactgggtccgccaggctccagggaaggggctggagtgggtggcctccataaacgaagaaggaagtgagaaatactatgtggactctgtgaagggccgattcaccatctccagagacaacgccaagaactcattgtatctacaaatgagcagcctgagaaccgacgacacggctgtgtattactgtgcgagaggtcgtctagtgggagcctactggggccagggaaccctggtcaccgcctcctca

SEQ ID NO: 8954 - DNA, 283 bp, Homo sapiens
  source 1..283: mol_type = other DNA
tgcagcctctgggttcacctttagtacctattggatgaactgggtccgccaggctccagggaaagggctggagtgggtggccaacataaaggaagatggaagtgagatatggtatgcggactctgtgaagggccgattcaccatctccagagacaacgccaagaactcactgtatctgcaaatgaacagcctgagagccgaggacacggccgtgtattactgtgcgagagggagacttgtgggcgcctactggggccagggaaccctggtcaccgtctcctca

SEQ ID NO: 8955 - DNA, 321 bp, Homo sapiens
  source 1..321: mol_type = other DNA
acacagaccctcacactgacctgcaccttctctgggttctcactcagcactagtggaatgtgtgtgacctggatccgtcagcccctagggaaggccctggagtggcttgcactcattgaatgggatgatgatgaatattacaacgcatctctgaagaccaggctcaccatctccaaggacacctccaaaaaccaggtggtccttacaatgaccaacatggaccctgtggacacagccacgtattattgtgcacggtcctatggttcggggagttattataatgactactggggccagggaaccctggtcaccgtctcctca

SEQ ID NO: 8956 - DNA, 321 bp, Homo sapiens
  source 1..321: mol_type = other DNA
acacagaccctcacactgacctgcaccttctctgggttctcactcagcactagtggaatgtgtgtgagctggatccgtcagcccccagggaaggccctggagtggcttgcacgcattgattgggatgatgataaatattacagcacatctctgaagaccaggctcaccatctccaaggacacctccaaaaaccaggtggtccttacaatgaccaacatggaccctgtggacacagccacgtactactgtgcacggagctatggttcggggagttattataatgactactggggccagggaaccctggtcaccgtctcctca

SEQ ID NO: 8957 - DNA, 321 bp, Homo sapiens
  source 1..321: mol_type = other DNA
acacagaccctcacactgacctgcaccttctctgggttctcactcagcactagtggaatgtgtgtgagctggatccgtcagcccccagggaaggccctggagtggcttgcacgcattgattgggatgatgataagtactacaccacatctctgaagaccaggctcaccatctccaaggacacctccaaaaaccaggtggtccttacaatgaccaacatggaccctgtggacacagccacgtattactgtgcacggagctatggttcggggagttattataatgactactggggccagggaaccctggtcaccgtctcctca

SEQ ID NO: 8958 - DNA, 321 bp, Homo sapiens
  source 1..321: mol_type = other DNA
acacagaccctcacactgacctgcaccttctctgggttctcactcagcactagtggaatgtgtgtgacctggatccgtcagcccctagggaaggccctggagtggcttgcactcattgaatgggatgatgataaatattacaacgcatctctgaagaccaggctcaccatctccaaggacacctccaaaaaccaggtggtccttacaatgaccaacatggaccctgtggacacagccacgtattattgtgcacggtcctatggttcggggagttattataatgactactggggccagggaaccctggtcaccgtctcctca

SEQ ID NO: 8959 - DNA, 283 bp, Homo sapiens
  source 1..283: mol_type = other DNA
tatagcctctggattcaccttcagtgactattacatgaattggatccgccaggctcctgggaaggggctggagtgggtctcatatattagtcaatatggtggtgacacaaactatgcagactctgtgatgggccgcttcaccatctccagagacaacgccgacaactcagtgtatctgcaaatgaacgacctgagagccgaagacacggccgtatattattgcgtaaagactgctagactggcggacgtctggggcaacgggaccacggtcaccgtctcctca

SEQ ID NO: 8960 - DNA, 283 bp, Homo sapiens
  source 1..283: mol_type = other DNA
tatagcctctggattcaccttcactgactactacatgaactggatccgccaggctcctgggaaggggctggagtgggtttcatatattggtcaacatggtcgcgacacaaattatgcagactctgtgatgggccgcttcaccatctccagagacaacgtcgacaactcagtgtatctgcaaatgagagacctgagagccgaagacacggccatatattattgtgtcaagactgctagactggcggacgtctggggcaacgggaccacggtcaccgtctcctca

SEQ ID NO: 8961 - DNA, 283 bp, Homo sapiens
  source 1..283: mol_type = other DNA
tgtagcctcaggcttcacctttaatgactactacatgaactggatccgcctggctccagcgaaggggctggagtggattgcatacattagtcagagtggacatgacatacagtacgcagactctgtgaagggccggttcaccatctccagggacaacgccgagaactcagtgtatctgcaaatgaacagcctcagagtcgacgacacggccgtttattattgtgtgaaaactgccaggttagcggacgtctggggccaggggaccaccgtcaccgtctcctca

SEQ ID NO: 8962 - DNA, 283 bp, Homo sapiens
  source 1..283: mol_type = other DNA
catagcctctggattcaccttcagtgattactatatgaactggatccgccaggctcctgggaaggggcctgaatgggtttcttatattagtcaacatggtggtgacacaaattatgcagactcagtgatgggccgcttcaccatctccagagacaacgccgacaactcagtgtatctccaaatgaacgacctgagagccgaggacacggccgtatattattgtgttaagaccgctagactggcggacgtctggggcaacgggaccacggtcaccgtctcctca

SEQ ID NO: 8963 - DNA, 289 bp, Homo sapiens
  source 1..289: mol_type = other DNA
cgcagcttctggattcagtctcacttccaccagtatgagctgggtccgccagattccagggaaaaggctggagtgggtctccatgcttagtgacactggccgcgacaccttctacgcagactcagtgaagggccgattcaccatgtccagagacacagccacaaatgtgttctatctgcaaatgaacagcctgcgagacgaagacacggctctttattactgtgcgagagacgggtgggctgatgcctttgatatctggggccaagggaccatggtcaccgtcatttca

SEQ ID NO: 8964 - DNA, 289 bp, Homo sapiens
  source 1..289: mol_type = other DNA
tgcagcctctggattcaacttcagtgactctgccatgagctgggtccgccaggctcctggggaggggctgcagtgggtctcactgattcatcctaatggtcgtgacagattttacgcagactcagtgaagggccgattcaccctgtccagagacaacgccaacaactcactctatcttcagatgaacagcctgagacccgaggacacggctgtctatttctgtgcgagagatgggtgggctgatgcttttgatatctggggccaggggacagtggtcaccgtctcttca

SEQ ID NO: 8965 - DNA, 283 bp, Homo sapiens
  source 1..283: mol_type = other DNA
tgtagcctctgggttcaccgtcattagcaactacatgagctgggtccgccagcctccagggaaggggctggagtgggtcacaatgatttatagcggtggtgacacatactacacagactccgtgaagggccgattcaccatctccagagacaattccaagaacacgctgtatcttcaaatgaacagcctgagagccgaggacacggccgtgtattactgtgcgaggtggaccgggacattctatgactactggggccagggaaccctggtcaccgtctcctca

SEQ ID NO: 8966 - DNA, 283 bp, Homo sapiens
  source 1..283: mol_type = other DNA
tgtagcctctgggttcaccgtctttagcaactacatgagctgggtccgtcaggctccagggaaggggctggagtgggtcacaatgatttatagcggtggtgacacatactacacagactccgtgaagggccgattcaccatctccagagacaattccaagaacacgctgtatcttcaaatgaacagcctgagagccgaggacacggccgtgtattactgtgcgaggtggaccgggacattctatgactactggggccagggaaccctggtcaccgtctcctca

SEQ ID NO: 8967 - DNA, 283 bp, Homo sapiens
  source 1..283: mol_type = other DNA
tgcagcctctgggttcaccgtcagtagcaactacatgagctgggtccgccaggctccagggaaggggctggagtgggtctcaatgatttacagcagtggtatcacacactacacagactccgtgaagggccgattcaccatctcaagagacaattcccagaacacactgtatcttcaaatgaacagcctgagagccgaggacacggccctgtattactgtgcgaggtggacggggactttctacgactactggggccagggaaccctggtcaccgtctcctca

SEQ ID NO: 8968 - DNA, 283 bp, Homo sapiens
  source 1..283: mol_type = other DNA
tgtagcctctgggttcaccgtcattaacaactacatgagctgggtccgccaggctccagggaaggggctggagtgggtcacaattatttatgccggtggtgacacatactacagagactccgtgcagggccgattcaccatctccagagacagttccaagaacacgttgtatcttcaaatgaacagtgtgagagccgaggacacggccttttattactgtgcgaggtggaccgggactttctatgactactggggccagggaaccctggtcaccgtctcctca

SEQ ID NO: 8969 - DNA, 283 bp, Homo sapiens
  source 1..283: mol_type = other DNA
tgtagcctctgggttcaccgtcattagcaactacatgagctgggtccgccagcctccagggaaggggctggagtgggtcacaatgatttatagcggtggtgacacatactacacagactccgtgaagggccgattcaccatctccagagacacttccaagaacacgctgtatcttcaaatgaacagcctgagagccgaggacacggccgtgtattactgtgcgaggtggaccgggacattctatgactactggggccagggaaccctggtcaccgtctcctca

SEQ ID NO: 8970 - DNA, 289 bp, Homo sapiens
  source 1..289: mol_type = other DNA
tgcagcgtctggattcagcttcagaaactatggcatgcactgggtccgccaggctccaggcaaggggctggagtgggtggcagttataaggtatgatggaagtagtaaatactatgcagactccgtgaagggccgattcaccatctccagagacaattccaagaacacgctggatctgcaaatgaacagcctgagagccgaggacacggctgtatattactgtacgagagacatcagtagcaggtactttgactactggggccagggaacccccgtcaccgtctcctca

SEQ ID NO: 8971 - DNA, 289 bp, Homo sapiens
  source 1..289: mol_type = other DNA
tgcagcgtctggattcaccttcagtaactatggcatgcactgggtccgccaggctccaggcaaggggctggagtgggtggcagttatatggtatgatggaagtaataaatactatgcagactccgtgaagggccgattcaccatctccagagacaattccaagaacacgctgaatctgcaaatgaacagcctgagagccgaggacacggctgtgtattactgtacgagagatatatccagtcggtactttgactactggggccagggaaccctggtcaccgtctcctca

SEQ ID NO: 8972 - DNA, 292 bp, Homo sapiens
  source 1..292: mol_type = other DNA
cactgtgtctggtggctccatcactagtggcaattatttttggggctggatccgccagtccccagagaaggggctggagtggattggaagtatccattataatgggaacacctactacaacccgtccctcaagagtcgagtcaccatatttagagacacgtccaggaaccagttctccctgaggctgacctctgtgaccgccgcagacacggctgtgtactactgtgtgagagacggtggtaactggctgattgactactggggccagggaaccctggtcaccgtctcctca

SEQ ID NO: 8973 - DNA, 292 bp, Homo sapiens
  source 1..292: mol_type = other DNA
tactgtctctggtggctccatcaccagtagtggttacttctggggctgggtccgccagcccccagggaaggggctggagtggattgggagtatcgttcatactgggagcacctactacaacccgtccctcatgagtcgactcaccatattagtagacacgtccaagaaccagttctccctgtggctgagctctgtgaccgccgcggacacggccgtgtattattgtgtgagagatggggggaattggttgattgactactggggccagggaaccttggtcaccgtctcctca

SEQ ID NO: 8974 - DNA, 283 bp, Homo sapiens
  source 1..283: mol_type = other DNA
tgcagcctctggattcacctttagttactattggatgagctgggtccgccaggctccagggaagggcctggagtgggtggccaacataaagcaagatggaagtgagaagcactatgtggactctgtgaagggccgattcaccatctccagagacaacgccaagaactcactgtatctgcaaatgagcagcctgagagccgaggacacggctgtgtattactgtgcgagagccttaatgactacggcttactggggccagggaaccccggtcaccgtctcctca

SEQ ID NO: 8975 - DNA, 283 bp, Homo sapiens
  source 1..283: mol_type = other DNA
tgcagcctctggattcacctttagtaactattggatgagctgggtccgccaggctccagggaaggggctggagtgggtggccaacataaagcaagatggaagtgagacatactatgtggactctgtgaagggccgattcaccatctccagagacaacgccaagaactcactgtatctgcaaatgaacagcctgagagccgaagacacggctgtatattactgtgcgagagcattgatgactacggcttactggggccagggaaccctggtcaccgtctcctca

SEQ ID NO: 8976 - DNA, 283 bp, Homo sapiens
  source 1..283: mol_type = other DNA
tgcagcctctggattcacctttagttactattggatgagctgggtccgccaggctccagggaaggggctggagtgggtggccaacataaaacaagatggaagtgagaaatactatgtggactctgtgaagggccgattcaccatctccagagacaacgccaagaactcactgtatctgcagatgaacagcctgagagccgaggacacggctgtgtattactgtgcgagagcattgatgactacggcttactggggccagggaaccctggtcaccgtctcctca

SEQ ID NO: 8977 - DNA, 277 bp, Homo sapiens
  source 1..277: mol_type = other DNA
tgcagcctctggactcaccctcagtaactacggcatgcactgggtccgccaggctccaggcaaggggctggagtgggttggatttattgatagaaaaaatatttggtatgcaaactccgtgaagggccgattcaccatctccagagacacttccaagaataccatgtatttggaaatgaacagcctgagacctgaggacacggctgtatactattgtacgaaagaaagcaattcttttgatgtttggggcctggggacaatggtcgccgtctcctca

SEQ ID NO: 8978 - DNA, 283 bp, Homo sapiens
  source 1..283: mol_type = other DNA
tgcagcgtctggattcaccttcagttcctatcacatgcactgggcccgccaggctccaggcaaggggctggagtgggtggcacttatatggtatgatggaagtaaagagtactatgcagactccctgaagggccgattcaccatctccagagacaattccaggaacacgctgtatctgcaaatggacagcctgagaactgaggacacgggtgtctattactgtacgaaagaatcgaattcttttgatgtttggggccaagggacaatggtcaccgtctcttca

SEQ ID NO: 8979 - DNA, 286 bp, Homo sapiens
  source 1..286: mol_type = other DNA
tgcagcctctggattcacctttagcagttattggatgggctgggtccgccaggctccagggagagggctggagtgggtggccaacataaaagaagatggaagtgagaaatactatgtggactctgtgaggggccgattcaccatctccaaagacaacgccaagacgtcactgtatttggaaatgaacagcctgagagccgaggacacggccgtctattactgtgcgagactgccttggtttagctccgactactggggccagggaaccctggtcaccgtctcctca

SEQ ID NO: 8980 - DNA, 286 bp, Homo sapiens
  source 1..286: mol_type = other DNA
tgcagcctctggattcacctttagtacctattggatgggctgggtccgccaggctccagagaaggggctggagtgggtggccaacataaaccaagatggaagtgagaaatactatgtggactctgtgaagggccgattcaccatctccagagacaacgccaagaactcactttatctgcaaatgaacagcctgagagccgaggacacggccgtgtattactgtgcgaggttaccgtggtttagcagtgactactggggccggggaacccgggtcatcgtcttctca

SEQ ID NO: 8981 - DNA, 280 bp, Homo sapiens
  source 1..280: mol_type = other DNA
tgcagcctctggattcaagtttagtatctactggatgaactgggtccgccaggctccagggaaggggctggagtgggtggccaagataaatatgggtggaggtgaaaaatactatgtggactctgtgaagggccgattcaccatctccagagacaacaccaagaactcactggatctgcaaatgaacagcctgagagtcgaggacacggctgtgtattactgtgtgaaaggcgggtggcttgacaactggggccagggaaccctggtcaccgtctcctca

SEQ ID NO: 8982 - DNA, 280 bp, Homo sapiens
  source 1..280: mol_type = other DNA
tgcagcctctggattcacctttagtaattattggatgaattgggtccgccaggctccagggaaggggctggagtgggtggccaatataaacgaagatggaagtgagagacactatgtggactctgtgaagggccgattcaccatctccagagacaacgccaagaactcactatatctgcaaatgaacagcctgagagccgaggacacggctgtgtattactgtgtgaaaggggggtggcttgacaactggggccagggaaccctggtcaccgtctcctca

SEQ ID NO: 8983 - DNA, 277 bp, Homo sapiens
  source 1..277: mol_type = other DNA
tgcagcctctggattcaccttcagtacctattggatgacctgggtccgccaggctccagggaagggcctggagtgggtggcctacataaaggaagatggaaaggaatactatgtggactctgtgaagggccgattcaccatctccagagacaacgccaagacctcgctccatctgcagatgaacagcctgagagtcgaggacacggctttgtattattgtgtgaaaggggggtggcttgacaactggggccagggaaccctggtcaccgtctcctca

SEQ ID NO: 8984 - DNA, 274 bp, Homo sapiens
  source 1..274: mol_type = other DNA
tgcagcctctggattcacctttagtaattcttggatggactgggtccgccaggctccagggacggggctggagtgggtggccaacataaaggcagatggaagtgagatatattatctagacgcggtgaagggccgattcaccatctccagagacaacgccaagaacatactgtatctgcatttgggcagcctgagagccgaagacacggctgtgtatttctgctcatggactctagcctacttcggccagggaaccccggtcaccgtctcctca

SEQ ID NO: 8985 - DNA, 274 bp, Homo sapiens
  source 1..274: mol_type = other DNA
tgcagcctctggattcacctttagtgattcttggatggactgggtccgccaggctccagggacggggctggagtgggtggccaacattaaggcagatggaagtgagacatcttatgtagactcggtgaagggccgattcaccatctccagagacaacgccaagaacacactgtttctgcatttgggcagcctgagagccgaagatacggctgtgtatttctgttcatggactctagcctacttgggccagggaaccccggtcaccgtctcctca

SEQ ID NO: 8986 - DNA, 274 bp, Homo sapiens
  source 1..274: mol_type = other DNA
tacagcctctgggttcacttttagtaacagttggatggactgggtccgccaggctccagggaaggggctggagtgggtggccaacatcaagccagatggaagtgagacatcgtatgtggactccgtgaagggccgattcaccatctccagagacaacgccaggaactctctgtttctacagttgaacagcctgagagtcgaggacacgtctatttattactgttcgtggacacttgcttacttgggccacggaaccctggtcaccgtctcctca

SEQ ID NO: 8987 - DNA, 274 bp, Homo sapiens
  source 1..274: mol_type = other DNA
tacagcctctgggttcgcttttagtaacagttggatggactgggtccgccaggctccagggaaggggctggagtgggtggccaacatcaagccagatggaagtgagacctcgtatgtggactccgtgaagggccgattcaccatctccagagacaacgccaggaactctctgtttctacaattgaacagcctgagagtcgaggacacgtctatttattactgttcgtggacacttgcttacttgggccgcggaaccctggtcaccgtctcctca

SEQ ID NO: 8988 - DNA, 274 bp, Homo sapiens
  source 1..274: mol_type = other DNA
tacagcctctgggttcacttttagtaacagttggatggactgggtccgccaggctccagggaaggggctggagtgggtggccaacatcaagccagatggaagtgagacatcgtatgtggactccgtgaagggccgattcaccatctccagagacaacgccaggaactctctgtttctacaattgaacagcctgagagtcgaggacacgtctatttattactgttcgtggacacttgcttacttgggccacggaaccctggtcaccgtctcctca

SEQ ID NO: 8989 - DNA, 277 bp, Homo sapiens
  source 1..277: mol_type = other DNA
tgcagcctctggatttatgttcggaagttattggatgcactgggtccggcaagttccagggaaggggctggtgtggctctcacgtgttaataatgatgggactatgttaacttatgcggactccgtgaagggccgattcaccatctccagagacaactccaagaacaccgtgtatctgcaaatgcacagtctgagagccgaggacacggctgtgtattactgtgtaagaggggtcggtgactactggggccagggaaccctggtcaccgtctccgca

SEQ ID NO: 8990 - DNA, 277 bp, Homo sapiens
  source 1..277: mol_type = other DNA
tgcagcctctggattcagtttcagaagctactggatgcactgggtccgccaagttccagggaaggggctgatgtgggtctcacgtgtaaatgcagatggaagtctcataacctacgcggactccgtgaagggccgattcaccatctccagagacaacgtcaagagcacgctgtatttgcagatgagtagtctgagaaccgaagacacggctgtatatttctgcgtaagaggtgtgggcgactactggggccagggaaccccggtcaccgtctcctca

SEQ ID NO: 8991 - DNA, 274 bp, Homo sapiens
  source 1..274: mol_type = other DNA
tgcagcctctggatttaccttcagtgattatgaaatgaactgggtccgccaggctccagggaaggggctggagtgggtttcacacattagtgcaagtggaattacaatatactacgtagactctgtgaagggccgattcaccatctccagagacaacgccaggaactcactgtatctgcaaatgaacagcctgagagccgaggacacggctatttattactgtgtgagagattggtataattggggccagggaaccctggtcaccgtctcctca

SEQ ID NO: 8992 - DNA, 274 bp, Homo sapiens
  source 1..274: mol_type = other DNA
tgcagcctctggattcaccttcagtagttatgaaatgaactgggtccgccaggctccagggaaggggctggagtgggtttcacacattagtagtagtagtagtgccatttactacgtagactctgtgaagggccgattcaccatctccagagacaacgccaagaactcattgtatctgcaaatgaacagcctgagagtcgaggacacggctgtttattattgtgtgagagactggtacaactggggccagggaaccctggtcactgtttcctca

SEQ ID NO: 8993 - DNA, 289 bp, Homo sapiens
  source 1..289: mol_type = other DNA
tgcagcctctggattcacgtttagcagctatgccatgagctgggtccgccaggctccagggaaggggctggagtgggtctcagctattagtggtagtggtggtagtacatactacgcagactccgtgaagggccggttcaccatctccagagacaattccaagaacacgctgtatctgcaaatgaacagcctgagagccgaggacacggccgtatattactgtgcgaaaggggggtatagcagcccttatgactactggggccagggaaccctggtcaccgtctcctca

SEQ ID NO: 8994 - DNA, 289 bp, Homo sapiens
  source 1..289: mol_type = other DNA
tgcagcctctggattcacctttagcacctatgccatgagctgggtccgccaggctccagggaaggggctggagtgggtctcaactattagtggtagtggttatagcacatactacacagactccgtgcagggccggttcaccatctccagagacaattccaagagcacgctgtatctgcaaatggacagcctgagagccgaggacacggccgtatattactgtgcgaaagggggttatagtagcccctatgactactggggccagggaaccctggtcaccgtctcctca

SEQ ID NO: 8995 - DNA, 283 bp, Homo sapiens
  source 1..283: mol_type = other DNA
tatagtctctggactcaccttcagttcctataacatgaactgggtccgccaggttccagggaaggggctggagtgggtctcatccattagtcagactagtacttacatgtcttacatagagacagtgaagggccgattcaccatctccagagacaacgccaagaattcactgtatctgcaaatgaacagcctgagagtcgaggacacggctgtatattactgtgcgaaggggggcagttactttgactactggggccagggagccctggtcaccgtctcctca

SEQ ID NO: 8996 - DNA, 283 bp, Homo sapiens
  source 1..283: mol_type = other DNA
catagtctctggattcaacctcagttcctataacatgaactgggtccgccaggttccagggaaggggctggagtgggtctcatccattagtcagactagtatttacatgtcttacatagagacagtgaagggccgattcaccatctccagagacaacgccaagaattcactgtatctgcaaatgaacagcctgagagtcgaggacacggctgtatattactgtgcgaaggggggcagttactttgattactggggccagggagccctggtcaccgtctcttca

SEQ ID NO: 8997 - DNA, 283 bp, Homo sapiens
  source 1..283: mol_type = other DNA
tatagtctctggactcaccttcagttcctataacatgaactgggtccgccaggttccagggaaggggctggagtgggtcgcatccattagtcagactagtacttacatgtcttacgtagagacagtgaagggccgattcaccatctccagagacaacgccaagaattcactgtatctgcaaatgaacagcctgagagtcgaggacacggctgtatattactgtgcgaaggggggcagttactttgactactggggccagggagccctggtcaccgtctcctca

SEQ ID NO: 8998 - DNA, 283 bp, Homo sapiens
  source 1..283: mol_type = other DNA
tgcagtctctggattcacgttcagtgattataacatgaattgggtccgccaggctccagggaaggggccggagtgggtcgcatccattagtaggggtagtgtttatttatcgtacgcagactcagtgaagggccgattcaccatctccagagacaatgccaagaattcactgtatctgcaaatgaacagcctgagagtcgaggatacggctgtgtattactgtgcgaaaggcgggagctactttgactactggggccagggaaccctggtcaccgtctcctca

SEQ ID NO: 8999 - DNA, 283 bp, Homo sapiens
  source 1..283: mol_type = other DNA
catagtctctggattcaacctcagttcctataacatgaactgggtccgccaggttccagggaaggggctggagtgggtctcatccattagtcagactagtatttacatgtcttacatagagacagtgaagggccgattcaccatctccagagacaacgccaagaattcactgtatctgcaaatgaacagcctgagagtcgaagacacggctgtatattactgtgcgaaggggggcagttactttgattactggggccagggagccctggtcaccgtctcctca

SEQ ID NO: 9000 - DNA, 295 bp, Homo sapiens
  source 1..295: mol_type = other DNA
tgcggcctctggactcacctttagtacctattggatgagttgggtccgccaggccccagggaaggggctggagtggttggccaacataaagcaagatggaagtgagaaatactatgtggactctgtgaagggccgattcaccatctccagggacaacgccaagaattcactgtttctgcaaatgaacagcctgagagccgaggacacggctgtgtattactgtgcgagagtcggtatatcagtggctgccaccctgtggtactggggccaggggaccctggtcatcgtctcctca

SEQ ID NO: 9001 - DNA, 295 bp, Homo sapiens
  source 1..295: mol_type = other DNA
tgtagcctctggattgaccgttagcacctattggatgagctgggtccgccaggctccagggaaggggctggagtgggtggccaacataaagcaagacggaagtgagaaatactatgtggactctgtgaagggccgattcaccatctccagagacaacgccaaaaactcagtgtatctgcaaatgaacagcctgagagtcgaggacacggctgtgtatttctgtgcgagagtcggtatatcagtggctgctaccctttggtactggggccagggaatcctggtcaccgtctcctca

SEQ ID NO: 9002 - DNA, 283 bp, Homo sapiens
  source 1..283: mol_type = other DNA
tgcagcctctggactcaccttcagtagctactggatgcactgggtccgccaagctccagggaaggggctggtgtgggtctcacgtattaaaagtgatgggagtagcacaagctacgcggactccgtgaagggccgattcaccatctccagagacaacgccaagaacacgctgtatctgcaaatgaacagtctgagagccgaggacacggctgtgtattactgtgcgcgggttattacgtactttgactactggggccagggaaccctggtcaccgtctcctca

SEQ ID NO: 9003 - DNA, 283 bp, Homo sapiens
  source 1..283: mol_type = other DNA
tgcagcctctggattcgacttcagtagttcttggatgcactgggtccgccaagctccagggaagggactagtgtgggtctcacgaattaacactgatggggctgagacaaactacgcggactccgtgaagggccgattcaccatctccagagacaacgccaagaacacgttgtttctccaaatgaacactctgagagacgaggacacggctgtgtattactgtgcaagggtcataacttactttgactactggggccagggagccctggtcaccgtctcctca

SEQ ID NO: 9004 - DNA, 286 bp, Homo sapiens
  source 1..286: mol_type = other DNA
tgcagcctctggattcacttttagtaattactggatgacctgggtccgccagactccagggaaggggctggagtgggtggccaacataaacccagatggaagtgcgaaacaatatcttgactctgtgaagggccgattcaccatctccagagacaacggcaagaactcactgtatttgcaaatgaacagtttgagggccgaggacacggctgtctattactgtgcgaggccccctgggcgagctcttgatttctggggccaagggacaatggtcacggtttcctca

SEQ ID NO: 9005 - DNA, 286 bp, Homo sapiens
  source 1..286: mol_type = other DNA
tgcagtctctggattcgacttttctaactattggatgacctgggtccgccaggttccagggaaggggctggagtgggtggccaacataaacgaaggtggaaatgtgcaacagtatttggactctgtgaagggccgattcaccatctccagagacaacgccaagaactcattgtatctgcaaatggacagcctgagagccgaggacacggctctatattactgtgcgagacccccaggcagggctttggatttctggggccaagggacaatggtcaccgtctcttca

SEQ ID NO: 9006 - DNA, 328 bp, Homo sapiens
  source 1..328: mol_type = other DNA
tgcagcctctggattcaccttcagtagctatggcatgcactgggtccgccaggctccaggcacggggctggagtgggtggcggttatatggtctgatggaagtaataaatactttgcagactccgtgaagggccgattcaccatctccagagacaattccaagaacacgctgtatctgcaaatgcacagcctgagagccgaggacacggctgtctattactgtgcgagagatggtccggcttgtagtactaccagctgctatagggttagctactactattacggtatggacgtctggggccaagggaccacggtcaccgtctcctca

SEQ ID NO: 9007 - DNA, 328 bp, Homo sapiens
  source 1..328: mol_type = other DNA
tgcagcgtctggattcaccttcagtagctatggcatgcactgggtccgccaggctccaggcacggggctggagtgggtggcggttatatggtctgatggaagtaataaatactttgcagactccgtgaagggccgattcaccatctccagagacaattccaagaacacgctgtatctgcaaatgcacagcctgagagccgaggacacggctgtctattactgtgcgagagatggtccggcttgtagtactaccagctgctatagggttagctactactattacggtatggacgtctggggccaagggaccacggtcaccgtctcctca

SEQ ID NO: 9008 - DNA, 328 bp, Homo sapiens
  source 1..328: mol_type = other DNA
tgcagcgtctggattcaccttcagtagctatggcatgcactgggtccgccaggctccaggcaaggggctggagtgggtggcagttatatggtctgatggaagtaataaatactttggagactccgtgaagggccgattcaccatctccagagacaattccaagaacacgctgtatctgcaaatgcacagcctgagagccgaggacacggctgtatattactgtgcgagagatggtccggcttgtagtactaccagctgctatagggttagctactactactacggtatggacgtctggggccaagggaccacggtcaccgtctcctca

SEQ ID NO: 9009 - DNA, 288 bp, Homo sapiens
  source 1..288: mol_type = other DNA
gcatctggatacaccttcaccagctaccatatgcactgggtgcgacaggcccctggacaagggcttgagtggattggaataatcaaatctagtggtgataccacaatctacgcacagaagttccagggcagagtcaccatgaccagggacacgtccacgagtacagtgtacatggagttgaatagcctgagatctgaggacacggccgtgtattcctgtgcgagagaactcccaggcagcttccactttgactactggggccagggaaccctggtcaccgtctcctca

SEQ ID NO: 9010 - DNA, 288 bp, Homo sapiens
  source 1..288: mol_type = other DNA
gcatctggatacaccttcaccagctaccatatacactggatgcggcaggcccctggacaaggacctgagtggatgggaataatcttctctagtagtggaagcgctgtgtccccacagaagttccagggcagagtcaccatgaccagggacacctccacaagtgtaggctacatggagctgagtggcctgaaatctgaggacacggccgtctattattgtgcgagagaacttcctggctcgttccactttgactactggggccagggaaccctggtcaccgtcgcctca

SEQ ID NO: 9011 - DNA, 288 bp, Homo sapiens
  source 1..288: mol_type = other DNA
gcatctggatacaccttcaccagctaccatatgcactgggtgcggcaggcccctggacaaggacctgagtggatgggaataatcttctctagtagtggtagcgcaatgtccccacagaagttccagggcagagtcaccatgaccagggacacgtccacaagtatagcctacatggagctgagtagcctgggatctgaggacacggccgtctattactgtgcgagagaacttcctggctcgttccactttgactactggggccagggaaccctggtcaccgtcgcctca

SEQ ID NO: 9012 - DNA, 280 bp, Homo sapiens
  source 1..280: mol_type = other DNA
tgcagcctctacattcacctttagtagttattggatgagttgggtccgccaggctccagggaaggggctggagtgggtggccaacataaacccagatggaaataagaaatactacgtggactctgtgaagggccgattcaccatctccagagacaacgccaagaactcactgtctctgcaaatgaacagcctggcaaccgaggacacggctgtgtattactgtgcggcctggggggggtcgaattactggggccagggaaccccggtcaccgtctcctca

SEQ ID NO: 9013 - DNA, 280 bp, Homo sapiens
  source 1..280: mol_type = other DNA
tgcaggctctggattcacgtttagtgagtattggatgaattgggtccgccaggccccagggcaggggctggagtgggtggccaatattaacccagacggaagtcagaaatcttatgtggagtccgtgaagggccgattcaccatctccagagacaacgccaagaactcactgtatctgcaaatggacagcctgagagtcgaagacacgtctgtatattactgtgcggcctggggtggctccaattactggggccagggaaccctggtcaccgtctcctca

SEQ ID NO: 9014 - DNA, 282 bp, Homo sapiens
  source 1..282: mol_type = other DNA
gcttctggatacaccttcaccggcaacaatatgcactgggtgcgacaggcccctggacaagggcttgagtggatgggacggatcatttctaacagtggtgccaccaactatgcacagaagtttcagggcagggtcaccatgaccagggacacgtccatcagcacagcctacatggagctgaatgggctgacatctgacgacacggccgtatactactgtgcgagaggacacaattatgctcacgacttctggggccagggaaccctggtcaccgtctcctca

SEQ ID NO: 9015 - DNA, 282 bp, Homo sapiens
  source 1..282: mol_type = other DNA
gcctctggatacacctccaccgcctaccctctgcactgggtgcgacaggcccctggacaggggcttgagtggatgggacggatcagccctaacagtggtggctcaaactttgcacagaagtttcagggcagggtcaccctgaccagggacacgtccatcaacacagtctacatggagctgagcagcctgagatctgacgacacggccgtgtattactgtgcgaggggacacaactatgctcacgacttctggggccagggaacgctggtcaccgtctcctca

SEQ ID NO: 9016 - DNA, 283 bp, Homo sapiens
  source 1..283: mol_type = other DNA
tgcagcctctggattcaccttcagtagctatagcatgaactgggtccgccaggctccagggaaggggctggagtgggtctcatccattggtattagtagtagttacatatactacgcagactcagtgaagggccgattcaccatctccagagacaacgccaagaactcactgtatctgcaaatgaacagcctgagagccggggacacggctgtgtattactgtgcgagagagggggctggtttggactactggggccagggaaccctggtcaccgtctcctca

SEQ ID NO: 9017 - DNA, 277 bp, Homo sapiens
  source 1..277: mol_type = other DNA
tgcagcctctggattcaccttcagtacctatagcatgagctgggtccgccaggctccagggaaggggctggagtgggtctcatccatcagtcctactagtagtaacatctactacgcacactcagtgaggggccgattcaccatctccagagacaagacctcactgtatctgcaaatgaacagcctgagagccgaggacacggctgtgtattactgtgcgagagagggggctggccttgactactggggccagggaaccctggccatcgtctcctca

SEQ ID NO: 9018 - DNA, 295 bp, Homo sapiens
  source 1..295: mol_type = other DNA
tgcagcgtctgggtttagtttccgtccttatgccatgcactgggtccgccaggctccaggcaaggggctggagtgggtggcatttatatggcatgatggaagtaatcaagactatgcagagtccctgaagggccgcttcatcatctccagagacaattccaagaacacggtgtatctgcatatgaacagcctgagagtcgacgacacggccgtctattactgtggtagagatcctccccaaagtgggtacgccatcgactactggggccagggaaccctggtcaccgtctcccca

SEQ ID NO: 9019 - DNA, 295 bp, Homo sapiens
  source 1..295: mol_type = other DNA
tgcagcgcctgggtttagtttccgtccttatgccatgcactgggtccgccaggctccaggcaaggggctggagtgggtggcatttatatggcatgatggaagtaatcaagactatgcagagtccctgaagggccgcttcatcatctccagagacaattccaagaacacggtgtatctgcatatgaacagcctgagagtcgacgacacggccgtctattactgtggtagagatcctccccaaagtgggtacgccatcgactactggggccagggaaccctggtcaccgtctcccca

SEQ ID NO: 9020 - DNA, 295 bp, Homo sapiens
  source 1..295: mol_type = other DNA
tgcagcgtctgggtttagtttccgtccttatgccatgcactgggtccgccaggctccaggcaaggggctggagtgggtggcatttatatggcatgatggaagtaatcaagactatgcagagtccctgaagggccgcttcatcatctccagagacaattccaagaacacggtgtatctgcatatgaacagcctgagagtcgacgacacggccgtctattactgtggtagagatcctccccaaagtgggtacgccatcgactactggggccagggaaccctggtcaccgtctccccg

SEQ ID NO: 9021 - DNA, 286 bp, Homo sapiens
  source 1..286: mol_type = other DNA
cactgtctctggtggctccatcagtagttactactggagctggatccggcagcccccagggaagggactggaatggattgggtatatctattacagtgggagcaccaactacaacccctccctcaagagtcgagtcaccatatcagtagacacgtccaagaaccagttctccctgaaactgagctctgtgaccgccgcagacacggccgtgtattactgtgcgagacttgactacggtggtaaccccgactactggggccagggaaccctggtcaccgtctcctca

SEQ ID NO: 9022 - DNA, 286 bp, Homo sapiens; identical to SEQ ID NO: 9021
  source 1..286: mol_type = other DNA

SEQ ID NO: 9023 - DNA, 286 bp, Homo sapiens
  source 1..286: mol_type = other DNA
cactgtctctggtggctccatcagtacttactactggagctggatccggcagcccccagggaagggactggagtggattgggtatatctatttcactgggagcaccagctacaacccctccctcaagagtcgagtcaccatatcagtagacacgtccaagaaccagttctccctgaagctgaactctgtgaccgccgcagacacggccgtatattactgtgcgagacttgactacggtggtaaccccgactactggggccagggaaccctggtcaccgtctcctca

SEQ ID NO: 9024 - DNA, 293 bp, Homo sapiens
  source 1..293: mol_type = other DNA
ccatctccggggacagtgtctctagcaacagtgctgcttggaactggatcaggcagtccccatcgagaggccttgagtggctgggaaggacatactacaggtccaagtggtataatgaatatgcagtatctgtgaaaagtcgaataaccatcaacccagacacatccaagaacctgttctccctgcagctgaactctgtgactcccgaagacacggctgtgtattactgtgcaagagccgttagtgggagaattgactattggggcccgggaaccctggtcaccgtctcctca

SEQ ID NO: 9025 - DNA, 293 bp, Homo sapiens
  source 1..293: mol_type = other DNA
ccatctccggggacagtgtctctagcaacagtgctacttggaactggatcaggcagtccccatcgagaggccttgaatggctgggaaggacatattataggtccaagtggtctactgactatgcaggatctgtgaaaggtcgaataaccatcaacccagacacatccaagaaccagttctccctgcagctggattctgtgactcccgaggacacggctgtgtattcctgtgcaagagcggtgagtggccggattgactactggggccagggaacccaggtcaccgtctcctca

SEQ ID NO: 9026 - DNA, 293 bp, Homo sapiens; identical to SEQ ID NO: 9025
  source 1..293: mol_type = other DNA

SEQ ID NO: 9027 - DNA, 277 bp, Homo sapiens
  source 1..277: mol_type = other DNA
tgcagcctctggattcacctttagtagttattggatgacctgggtccgccaggctccagggaaagggctggagtgggtggccaacataaagcaagatggaactgagacatactatgtggactctgtgaagggccgattcaccatctccagagacaacgccaagaactcactgcatctgcaactggacagcctgagagacgaggacacggccgtgtattattgtgcgagatcctacggtgactactggggccagggaaccctggtcgccgtctcctca

SEQ ID NO: 9028 - DNA, 277 bp, Homo sapiens
  source 1..277: mol_type = other DNA
tgcagcctctgggttcgattttattaactcttggatgacctggttccgccagactccagcgagggggctggagtgggtggccaacctaaacacagatggaagtcagagatactatgtggactctgtgaagggccgattcaccatctccagagacaacgtcgacaactcactgtatctgcagatgaacagcctgacaaccgaggacacggctgtatattactgtgcgaggtcatacggtgactactggggccagggaaccctggtcaccgtctcctcc

SEQ ID NO: 9029 - DNA, 277 bp, Homo sapiens
  source 1..277: mol_type = other DNA
tgcagcctctgggttcgattttattaattcttggatgacctgggtccgccagactccagcgagggggctggagtgggtggccaacttaaacccagatggaagccagaaatactatgtggactctgtgaagggccgattcaccatctccagagacaacgtcgagaagtcactgtatctgcagatgaacagcctgacaaccgaggacacggctgtatattactgtgcgaggtcatacggtgactactggggccagggaaccctggtcaccgtctcctcc

SEQ ID NO: 9030 - DNA, 301 bp, Homo sapiens
  source 1..301: mol_type = other DNA
cgctgtctatggtgggtccttcagtgatttctactggagctggatccgccagcccccagggaaggggctggagtggattggggaaatcaatcatagtggcatcaccacctgcaacccgtccctcaagagtcgagtcaccatatcagcagacgcgtccaagaaccagttttccctgaagctgatctctgtgaccgccgcggacacggctgtttattattgtgcgagaggctggggatatagcggcttcggcaaccatgcttttgatatttggggccaagggacaagggtcaccgtctcttca

SEQ ID NO: 9031 - DNA, 301 bp, Homo sapiens
  source 1..301: mol_type = other DNA
cgctgtctatggtgggtccttcagtgatttctactggagctggatccgccagcccccagggaaggggctggagtggattggggaaatcaatcatagtggcagcaccacctgcaacccgtccctcaagagtcgagtcaccatatcagcagacgcgtccaagaaccagttttccctgaagctgatctctgtgaccgccgcggacacggctgtttattattgtgcgagaggctggggatatagcggcttcggcaaccatgcttttgacatttggggccaagggagaagggtcaccgtctcttca

SEQ ID NO: 9032 - DNA, 301 bp, Homo sapiens; identical to SEQ ID NO: 9030
  source 1..301: mol_type = other DNA

SEQ ID NO: 9033 - DNA, 301 bp, Homo sapiens
  source 1..301: mol_type = other DNA
cgctgtctatggtgggtccttcagtgatttctactggagctggatccgccagcccccagggaaggggttggagtggattggggaaatcaatcatagtggcagcaccacctgcaacccgtccctcaagagtcgagtcaccatatcagcagacgcgtccaagaaccagttttccctgaagctgatctctgtgaccgccgcggacacggctgtttattattgtgcgagaggctggggatatagcggcttcggcaaccatgcttttgacatttggggccaagggagaagggtcaccgtgtcttca

SEQ ID NO: 9034 - DNA, 297 bp, Homo sapiens
  source 1..297: mol_type = other DNA
gcttctggttacacctttaccgactttggtatcagttgggtgcgacaggcccctggacaagggcttgagtggatgggatggatcaacacttccaatcctaacacacacatccactatgaacagaagttccaagacagagtcaccatgaccatagacacatccactaactcagcctacttggaggtgacgaccctaagatctgacgacacggccgtgtattactgtgcgagggactgggatgggcggaccaactggttcgacccctggggccagggaaccctggtcaccgtctcctca

SEQ ID NO: 9035 - DNA, 291 bp, Homo sapiens
  source 1..291: mol_type = other DNA
gcttctggttacacctttagcagctatggtatcagctgggtgcgacaggcccctggacaagggcttgagtggatgggatggatcggctcttacaatgatgacacagcctatgcacagaaattccagggcagagtcaccatgaccacagacacatccacgagcacagcctacatggagttgaggagcctgagatctgacgacacggccgtgtattactgtgcgagagattgggatgggagaacgaactggttcgacccctggggccagggaaccctggtcaccgtctcctca

SEQ ID NO: 9036 - DNA, 291 bp, Homo sapiens; identical to SEQ ID NO: 9035
  source 1..291: mol_type = other DNA

SEQ ID NO: 9037 - DNA, 283 bp, Homo sapiens
  source 1..283: mol_type = other DNA
tgttgcctctggattcacctttagtacccagggcatgagctgggtccgccaggctccagggaaggggctggagtgggtctcaggtattcctggtgggagtactaatgcatattacgcagactccgtgaggggccggttcaccagttccagagacaatcccaagagcactttttatttgcaaatgaacagcttgagagtcgaagacacgggcatatattattgtgcgagaggcactgcatcacctgactcctggggccaggggaccccggtcaccgtctcctca

SEQ ID NO: 9038 - DNA, 283 bp, Homo sapiens
  source 1..283: mol_type = other DNA
tgcagcctctggattcacctttagcccctctggcatgagctgggtccgccaggctccagggaaggggctggagtgggtctcaggtatgcctggtggtggtactagcacattctacgcagactccgtgaagggccgcttcaccatctccagagacaactccaagaacacgctgtatctgcaaatgaacagcctgagagccgacgacacggccagatattactgtgcaagaggtacggcgtcgccggactcctggggccagggaaccctggtcaccgtctcctca

SEQ ID NO: 9039 - DNA, 271 bp, Homo sapiens
  source 1..271: mol_type = other DNA
tgcagcctccggattcacctttagtgcctcttggatgagttgggtccgccaggctccagggaaggggctggagtgggtggccaacataagatacgatggaagtcaaaaagagtatgcggactctgtgaagggccgattcaccatctccagagacaacaccaagaactcactgtatctgcaaatgaacagcctcagagtcgaggacacggctctatattactgtgcgagagaataccgctggggccagggaacccaggtcaccgtctcctca

SEQ ID NO: 9040 - DNA, 271 bp, Homo sapiens
  source 1..271: mol_type = other DNA
tgcagcctctggtttcacccttggtagtcattggatgagttgggtccgccagactccagggaaggggctggagttcgtggccaacataaaccaagatggaagtgagaaatactatttggactctgtgaagggccgattctccatctccagagacaacgccaagaactcactgtttctgcagatgggcagcctgagagccgacgacacggctatatattactgtgcgagagaataccgctggggccagggaaccctggtcaccgtctcctca

SEQ ID NO: 9041 - DNA, 280 bp, Homo sapiens
  source 1..280: mol_type = other DNA
tgcagcctctggattcaccttcagcagccactggatgcagtgggtccgccaagctccagggaaggggctggtgtgggtctcgcgtattaatagtgatgggagtggctcagactccgcgggcttcgcgaagggccgattcaccgtctccagagacaacgccaagaacacgttgtatctgcagatgagcagtctgagagccgaggacacggctatgtattattgtgtaagagatagcagtgcctcgcactggggccagggaagcctggtcaccgtctcctca

SEQ ID NO: 9042 - DNA, 280 bp, Homo sapiens
  source 1..280: mol_type = other DNA
tgcagcctctggattcaccttcaaagaccactggatgtactgggtccgccagactccagggaaggggctgatgggggtctcacatattaatagtgatggcacttatgcaaactatgcggactccgtgaagggccgattcaccatctccagagacaacgccaggaacacgctctttctgcaaatgaacagtctgacagtcgaagacacggctgtatatttttgtgtgagagatagtagtgcgtcgcactggggccggggaactctggtcaccgtctcctca

SEQ ID NO: 9043 - DNA, 280 bp, Homo sapiens; identical to SEQ ID NO: 9042
  source 1..280: mol_type = other DNA

SEQ ID NO: 9044 - DNA, 283 bp, Homo sapiens
  source 1..283: mol_type = other DNA
tgcagcctctggattcaccttcagtgactactacatgagctggatccgccaggctccagggaaggggctggagtacgtttcatacattagtggtagtggtactatcataaactacgcagagtctgtgaagggccgattcaccatctccagggacaacgccaagaactcattgtatctggaaatgaacagcctgagagccgaggacacggctgtgtattactgtgcgagagaggcacggacccctacttactggggccaaggaaccgtggtcaccgtctcctca

SEQ ID NO: 9045 - DNA, 283 bp, Homo sapiens
  source 1..283: mol_type = other DNA
tgcagcctctggattcactttcactaactactacatgacctggatccgccaggctccagggagggggctggagtacattttatacattagtggtagtggtagtatcatatcgtacgcagactctgtgaagggccgattcaccatctccagggacaacgccaagaactcactgtacctacaaatgaacagcctgagagccgacgacacggccgtgtattattgtgcgagggaagccagaacccccacgtactggggccagggaacgctggtcaccgtctcctca

SEQ ID NO: 9046 - DNA, 293 bp, Homo sapiens
  source 1..293: mol_type = other DNA
ccatctccggggacagtgtctctagcaacggtgtctcttggcactggatcaggcagtccccatcgagaggccttgagtggctgggattgacttactacagttccgggtggcatactgtttatgcactttctgtgcaaagccgaataaccatcaacccagacacatccaagaaccagttctccctgcaactgacctctttgactcccgaggacacggctgtctattactgtgcacgaaaccacctttgggccattgccttctggggccagggaacccgggtcaccgtctcctca

SEQ ID NO: 9047 - DNA, 293 bp, Homo sapiens
  source 1..293: mol_type = other DNA
ccatctccggggacagtgtctctagcaacggtgtctcttggcactggatcaggcagtccccatcgagaggccttgagtggctgggattgacttactacagttccgggtggcattctgattatgcagtttctgtgcaaagccgaataaccatcaacccagacacatccaagaaccagttctccctgcaactgagctctttgactcccgaggacacggctgtctattactgtgcacgaaaccacctttgggccattgccttctggggccagggaacccgggtcaccgtctcctca

SEQ ID NO: 9048 - DNA, 289 bp, Homo sapiens
  source 1..289: mol_type = other DNA
tgcagcctctggattcacccttagtaactattggatgagttgggtccgccaggctccagggaaggggctggagtgggtggccaatataaatgaacacggaagtgagaaattctatgtggactctgtgaagggccgattcaccatctccagagacaatgccaagaactcactgtttctgcaaatgaacaccctgagaggcgaggacacggctgtatattactgtgcgagagcggcaggacctggtacatgtgactattggggccagggaaccctggtcaccgtctcctcc

SEQ ID NO: 9049 - DNA, 289 bp, Homo sapiens
  source 1..289: mol_type = other DNA
tgcagcctctggattcacctttggtagctattggatgagctgggtccgccaggctccagggaaggggctggagtgggtggccaacatagaccaagatggaagtgagcaatactatgtggactctgtgaagggccgattcaccatctccagagacaacgccaagaactcactgtatctgcaaatgcacaccctgagagccgaggacacggctgtgtattactgtgcgagagccgcaggacctggtacgtgtgactactggggccaggggaccctggtcaccgtctcctca

SEQ ID NO: 9050 - DNA, 279 bp, Homo sapiens
  source 1..279: mol_type = other DNA
gcttctggatacaccttcaccaacaaccgtatacactggatgcgacaggcccctggacaagggcttgagtggatgggatggatcaaccctaacagtggtggcacagactatgcgcaaaactttcagggcagggtcaccatgaccagggacacgtccatcagcacagtctacatggagctgagtacggtgagatatgacgacacggccgtgtattattgtgcgagagaaaactggtactttgactactggggccagggaaccctggtcaccgtctcctca

SEQ ID NO: 9051 - DNA, 279 bp, Homo sapiens
  source 1..279: mol_type = other DNA
gcttctggctacaccttcaccggctactggatacactgggtgcgacaggcccctggacaagggcttgagtggttgggatgcctcaattataacaatggtaacacaggctatgcacagaagtttcagggcagggtcagcatgaccagggacacgtccatcaccacagcctacatggagctgagcagcctgagatctgacgacacggccgtgtatttctgtgcgagagaaaactggtactttgactactggggccagggaaccctggtcaccgtctcgtca

SEQ ID NO: 9052 - DNA, 277 bp, Homo sapiens
  source 1..277: mol_type = other DNA
tgcagcctctggattcaccttcagtagctactggatgcactgggtccgccaagctccagggaaggggctggtgtgggtctcacgtattaatagtgatgggactagcacaagctacgcggactccgtgaagggccgattcaccatctccagagacaacgccaagaacacgctgtttctgcaaatgaacagcctgagagccgaggacacggctgtgtattactgtgtagtagaggcgtgggactactggggccagggaaccctggtcaccgtctcctca

SEQ ID NO: 9053 - DNA, 277 bp, Homo sapiens
  source 1..277: mol_type = other DNA
tgcagcctctggattcaccttcagtaactactggatgcactgggtccgccaagctccagggaaggggctggtgtgggtctcacgtattaatagtgatgggaatagcacaagttgcgcggactccgtgaagggccgattctccatctccagagacaacgccaagaacaccctgtatttgcaaatgaacagtctgagagccgaggacacggctatatattactgtgtagtagaggcgtgggactactggggccagggaaccctggtcaccgtctcctca

SEQ ID NO: 9054 - DNA, 277 bp, Homo sapiens
  source 1..277: mol_type = other DNA
tgcagcctctggattcaccttcagtgattactggatgcactgggtccgccaagttccagggaaggggctggtgtgggtctcacgtattaatagtgatgggagtagtccaaactacgcggactccgtgaagggccgattcaccatctccagagacaacgccaagaacacactatatctacaaatggacagtctgagagccgaggacacggctgtgtactactgtgtggtggaggcttgggactactggggccagggaaccctggtcaccgtctcctca

SEQ ID NO: 9055 - DNA, 277 bp, Homo sapiens
  source 1..277: mol_type = other DNA
tgcagcctctggattcaccttcagtgattactggatgcactgggtccgccaagctccagggaaggggctggtatacgtctcacgtattaatagtgatgggagtagtccaaactacgcggactccgtgaagggccgattcaccatctccagagacaacgccaagaatacggtatatctacaaatggacaatctgagagtcgaggacacggctgtgtattactgtgtggtggaggcttgggactattggggccagggaaccctggtcaccgtctcctca

SEQ ID NO: 9056 - DNA, 289 bp, Homo sapiens
  source 1..289: mol_type = other DNA
tgcagcctctggattcaccttcagtggccatgctatgcactgggtccgccaggctccaggcaaggggctggagtgggtgacacttatatcatatgatggaagaactaaattgtacgcagagacggtgaagggccgattcaccgtctccagagacaattccaagaacacactgtatctgcaaatggacagtctgagagttgacgacacggctgtgtattactgtgtggcggaggtgggagccagggagtttgactcctggggccagggaaccctagtcaccgtctcctca

SEQ ID NO: 9057 - DNA, 289 bp, Homo sapiens
  source 1..289: mol_type = other DNA
tgcggcctctggattccccttcagtagtcatgcaatgcactgggtccgccaggctccaggcaaggggctggagtgggtggcagttatctcatacgatggaaattataaatactacacagactccctgaagggccgattcaccatctccagagacaattccaacaacacattgtttctgcaaatggacagcctgagagctgaggacacagctctgtattactgtgtcgctgaggtgggggctagagaatttgactcctggggccagggaaccctggtcaccgtctcctca

SEQ ID NO: 9058 - DNA, 286 bp, Homo sapiens
  source 1..286: mol_type = other DNA
tgcagcctctggattcacctttagcacctatggcatgagttgggtccgccaggctccagggaaggggctggagtgggtctcaagtataactaataatggtggtagcacattctacgcagactccgtgaagggccggttcaccatctccagagacaattccaagaacacgctgtctctgcaaatgaacagcctgagagccgaggacacggccctatattactgtgcgagattgggcccctactactctgactactggggccagggaaccctggtcaccgtctcctca

SEQ ID NO: 9059 - DNA, 286 bp, Homo sapiens
  source 1..286: mol_type = other DNA
tccagcctctggattcacctttagcatctatggcatgaactgggtccgccagtctccagggagggggctggagtgggtctcagatattagtgctagtggtgatgacacatactacgcagactccgtgaagggccggttcaccgtctccagagacaattccaagaacacgctgtatctgcaaatgaacagcctgagagccgaggacacggccgtatattactgtgcgagactgggcccatattactctgactattggggccagggatccctggtcaccgtctcctca

SEQ ID NO: 9060 - DNA, 280 bp, Homo sapiens
  source 1..280: mol_type = other DNA
cactgtctctggtggctccatcagtaattactactggagctggatccggcagcccccagggaagggactggagtggattgggtgtatctattacaatgggattaccaattacaccccctccctcaagagtcgactcactatatcagtagacacgtccaagaaccagttctccctgaagctgacctctgtgaccgctgcggacacggccgtgtatttttgtgcgagaacatataattacatggacgtctggggcaaagggaccacggtcaccgtctcctca

SEQ ID NO: 9061 - DNA, 280 bp, Homo sapiens
  source 1..280: mol_type = other DNA
cactgtctctggtggctccatcaataagtactactggagctggatccggcagcccccagggaagggactggagtggattgggtgtatctattacaatgggattaccaattacaccccctccctcaagagtcgactcactatatcagtagacacgtccaaaaaccagttctccctgaagctgacctctgtgaccgctgcggacacggccgtctatttctgtgcgagaacatataattacatggacgtctggggcaaagggaccacggtcaccgtctcctca

SEQ ID NO: 9062 - DNA, 280 bp, Homo sapiens
  source 1..280: mol_type = other DNA
cactgtctctagtggctccatcagtaattactactggagctggatccggcagcccccagggaagggactggagtggattgggtctgtctattacagtgggggcaccaaccacaacccctccctcaagagtcgagtcgccgtatcagtagacacgtccaagaaccagttctccctgaagctgagttctgtgaccgctgcggacacggccgtgtattactgtgcgagaacttataactacatggacgtctggggcaaagggaccacggtcaccgtctcctca

SEQ ID NO: 9063 - DNA, 280 bp, Homo sapiens
  source 1..280: mol_type = other DNA
cactgtctctgatgcctccatcagtaattactactggagctggatccggcagccccccgggaaggggctggagtgggttggttgtatctattatagtgggaacaccaactacaacccctccctcaagagtcgagtcaccatatcagtagacacggccaagaaccagttctccctgaagctgagctctgtgaccgctgctgacacggccgtgtattactgtgcgagaacttataactacatggacgtctggggcaaagggaccacggtcaccgtctcctca

SEQ ID NO: 9064 - DNA, 271 bp, Homo sapiens
  source 1..271: mol_type = other DNA
tgaagtgtctggattcccctttagagactatggcatgcactgggtccgccaggctccaggcaaggggctggagtgggtggcagttatatggtctgatggaagtaataaatattatgcagactccgtgaagggccgattcaccatctccagagacaattccaagagcacgttgtatctgcaaatgaacagtctcagagtcgaggacacggctgtgtattactgttcgagcctccactactggggccagggaaccctggtcaccgtctcctca

SEQ ID NO: 9065 - DNA, 271 bp, Homo sapiens
  source 1..271: mol_type = other DNA
tgcagcgtctggattcatctttcatgactatggcatgcactgggtccgccaggctccaggcaaggggctggagtgggtggcagttatctggtctgatggaagtaataagtactatgcagactccgtgaggggccgattcaccgtctccagagacaattccgagaagacggtgtatctgcaaatgaacagcctgagagtcgaagacacggctatatactactgttcgagtctgcattattggggccagggaaccctggtctccgtctcctcg

SEQ ID NO: 9066 - DNA, 271 bp, Homo sapiens
  source 1..271: mol_type = other DNA
tgcagcgtctggattcatctttcatgactatggcatgcactgggtccgccaggctccaggcaaggggctggagtgggtggcagttatctggtctgatggaagtaataagtactatgcagactccgtgaggggccgattcaccgtctccagagacaattccgagaagacggtgtatctgcaaatgaacagcctgagagtcgaagacacggctatatactactgttcgagtctgcattattggggccagggaaccctggtccccgtctcctcg

SEQ ID NO: 9067 - DNA, 271 bp, Homo sapiens
  source 1..271: mol_type = other DNA
tgcagcctctggattcaccttcagtagctatgctatgcactgggtccgccaggctccaggcaaggggctggagtgggtggcagttatctggtctgatggaagtaataagtactatgcagactccgtgaggggccgattcaccgtctccagagacaattccgagaagacggtgtatctgcaaatgaacagcctgagagtcgaagacacggctatatactactgttcgagtctgcattattggggccagggaaccctggtctccgtctcctcg

SEQ ID NO: 9068 - DNA, 289 bp, Homo sapiens
  source 1..289: mol_type = other DNA
tgcagcctctggattcaccttgaataactactggatgcactgggtccgccaagctccagggaaggggctggtgtgggtctcacgtatcgatgagggtgggagtagtacaacttacgcggactccgtgaagggccgattcaccatctccagagacaacgccaagaacacactatatctgcaaatgaacagtctgagagtcgaggatacggctgtgtattattgtgtaagagatctgcctcataattggttcgacccctggggccagggaaccctggtcaccgtctcctca

SEQ ID NO: 9069 - DNA, 289 bp, Homo sapiens
  source 1..289: mol_type = other DNA
tgcagcctctggattctcgatcagtagttactggatgcactgggtccgccaggctccagggaaggggctggtgtgggtctcacgtgttaataatgatgggagtgacagtacctacgcggactccgtgaagggccgattcaccatctccagagacaacgccaagaacacactgtatctgcaaatgaacagtctgcgagccgaggacacggctgtctattactgtgtaagagatttacctcacaattggttcgacccctggggccagggaaccctggtcgccgtctcctca

SEQ ID NO: 9070 - DNA, 289 bp, Homo sapiens
  source 1..289: mol_type = other DNA
tacaatgtctggattcatcttcaataactactggatgcactgggtccgccaagctccagggaaggggctggtgtgggtctcaggtattaataacgatgggagtggcacaaagtacgcggactccgtgaagggccgattctccatctccagagacaacgccaagaacacgctgtttctgcaaatgaacagtctgagagccggggacacggctgtgtattactgtgtaagagatctgcctcacaactggttcgacccctggggccagggaaccctggtcaccgtctcctca

SEQ ID NO: 9071 - DNA, 289 bp, Homo sapiens
  source 1..289: mol_type = other DNA
tacaatgtctggattcaacttcaatgaatactggatgcactgggtccgccaagctccggggaaggggctggtgtgggtctcaggtattaataacgatgggagtggcacaaagtatgcggactccgtgaagggccgattcaccatctccagagacaacgccaagaatacgctgtttctgcaaatgaacagtctgagagccggagacacggctgtatattactgtgtaagagacctgcctcacaactggttcgacccctggggccagggaatcctagtcaccgtctcctca

SEQ ID NO: 9072 - DNA, 292 bp, Homo sapiens
  source 1..292: mol_type = other DNA
tgtcgcctctggattcacctttagcgactatgccatgagttgggtccgccaggctccagggaaggggctggagtgggtctcagttattactggtgatgatgtcaacacagcctacggagactccgtaaaggaccgattcgccacctccagagacaattccgagaacacagtctttctgcaaatgaacaacctgcgaaccgaggacacgggcatgtattactgtgcgaaaacggggggcgtcacctgggcctttgactactggggccagggaactctggtctccgtctcctca

SEQ ID NO: 9073 - DNA, 292 bp, Homo sapiens
  source 1..292: mol_type = other DNA
tgcagcctctggattcacctttagcgactatgccatggcatgggtccgccaggctccagggaaggggctggagtgggtctcaattattgttggcactgctactagtacattctacgcagactccgtgaacggccggtccaccatctccagagacaatttcaagaacactctgtatctgcaaatggacagcctgagggccgaagacacggccgtatattactgtgcgaaaacggggggcgtcacctgggcctttgactactggggccagggaaccctggtcaccgtctcctca

SEQ ID NO: 9074 - DNA, 283 bp, Homo sapiens
  source 1..283: mol_type = other DNA
tgcagcctctggattcattttcagtcacgcctggatgagttgggtccgccaggctccagagaaggggctggagtgggttggccatattaaaagcaaagctgatggtgggacaacagactacgctgcacccgtgaaaggcagattcaccatctcaagagatgattcaaaaaacacgctgtatctacaaataaacagcctaaaaaccgaggacacagccgtctattactgtgccacagcgggttttagcaactggggccagggaaccctggtcaccgtctcctca

SEQ ID NO: 9075 - DNA, 283 bp, Homo sapiens
  source 1..283: mol_type = other DNA
tgtagcctctggattcactctcagtaacgcctggatgagctgggtccgccaggctccagggaaggggctggagtgggttggccgtattaaaagcaaaactgatggtgggacaacagactacgctgcacccatgaaaggcacattcaccatctcaagagaggattcaaaaaacacgctgtatctgcaaatgaacagcctgaaagccgaggacacagccgtgtattactgtgccacggccgggtttagcaactggggccagggaaccctggtcaccgtctcctca

SEQ ID NO: 9076 - DNA, 283 bp, Homo sapiens
  source 1..283: mol_type = other DNA
tgcagcctctggattcaccttgagcaactatggcatgagctgggtccgccaggctccaggggaggggctggagtgcgtctcatttattgatagaagtggcacttattatgcagactccgtgaagggccgtttcaccatctccagagacaattccaagaacacgctgtatttgcaaatgaacagcctgagagtcgcggacacggccgtatattactgtgcgaaactggtgggaaataacccctttgaccactggggccagggaactttggtcaccgtctcctca

SEQ ID NO: 9077 - DNA, 289 bp, Homo sapiens
  source 1..289: mol_type = other DNA
tgcagcctctggattcacctttacgaactatgccatggcctgggtccgccagcctccagggaaggggctggagtgggtctcaactgttgtcgttagtgatggccgcacattctacgcggactccgtgaagggccggttcaccatctccagagacagttccaagagcacgctgtttctccaaatgaacagcctgagagcggacgacacggccgtatattactgtgcgaaactggtggggaataatccctttgaccactggggccagggaaccctggtcaccgtctcctca

SEQ ID NO: 9078 - DNA, 289 bp, Homo sapiens
  source 1..289: mol_type = other DNA
tgcagcctctggattcaccttcagtggttactggatgcactgggtccgccaagctccagggaaggggctggtgtgggtctcacgtattagtagtgatgggagtagaacaagctacgcggactccgtgaagggccgattcaccatctccagagacaacgccaagaacacgctgtatctgcaaatgaacagtctgagagccgaggacacggctgtgtattactgtgcaagaattcggagtgggacctactttgactactggggccagggaaccctggtcaccgtctcctca

SEQ ID NO: 9079 - DNA, 289 bp, Homo sapiens
  source 1..289: mol_type = other DNA
tgcagcctctggattcaccttcagtagctcctggatgcactgggtccgccaagctccagggaaggggctggtgtgggtctcacgtattgatagtgatgggagtagcacaacctacgcggactccgtgaagggccgattcaccatctccagagacaacgccaagaacacgctgtttctgcaaatgaacagtctgagagtccaggacacggctgtgtattactgtgcaagaataaggagtgggacctactttgactactggggccagggaaccctggtcaccgtctcctca

SEQ ID NO: 9080 - DNA, 304 bp, Homo sapiens
  source 1..304: mol_type = other DNA
tgcagcctctggattcacctttagtaactatgccatgagctgggtccgccaggctccagggaaggggctggagtgggtctcatctattaccggtagtggtggtaacacatattacgcagactccgtggagggccggttcaccatctccagagacaattccaagaacacgctgtatctgcaaattaacagcctgagagtcgaggacacggccgtatatttctgtgcgaaagtttggcatagcgatggctggtacgccggcccttttgactactggggccagggagccctggtcaccgtctcctca

SEQ ID NO: 9081 - DNA, 304 bp, Homo sapiens
  source 1..304: mol_type = other DNA
tgcagcctctggattcacctttagtagccatggcatggactgggtccgccaggctccagggagggggctggagtgggtctcaggtattagtggtagtggtgataaaacgtactacgcagaattcgtgaagggccggttcaccgtctccagagacaattccaagaacacgctgtatctgcaaattaacagcctgagagtcgaggacacggccgtatatttctgtgcgaaagtttggcatagcgatggctggtacgccggcccttttgactactggggccagggagccctggtcaccgtctcctca

SEQ ID NO: 9082 - DNA, 304 bp, Homo sapiens; identical to SEQ ID NO: 9081
  source 1..304: mol_type = other DNA

SEQ ID NO: 9083 - DNA, 304 bp, Homo sapiens; identical to SEQ ID NO: 9081
  source 1..304: mol_type = other DNA

SEQ ID NO: 9084 - DNA, 304 bp, Homo sapiens; identical to SEQ ID NO: 9081
  source 1..304: mol_type = other DNA

SEQ ID NO: 9085 - DNA, 310 bp, Homo sapiens
  source 1..310: mol_type = other DNA
tgcagcctctggattcacctttagcagctatgccatgagctgggtccgccaggctccagggaaggggctggagtgggtctcagctattcgtggtaggggtagtagtacattctacgcagactccgtgaagggccggttcaccatctccagagacaattccaagaacacgctgtatctgcaaatgaacagcctgagagccgaggacacggccgtatattactgtgcgaaacggggagatttttggagtggtctctactactactactacatggacgtctggggcaaagggaccacggtcaccgtctcctca

SEQ ID NO: 9086 - DNA, 310 bp, Homo sapiens
  source 1..310: mol_type = other DNA
tgcagcctctggattcacctttggcacctatgccatgagctgggtccgccaggctccagggaaggggctggagtgggtctcaggtattagaggtagtggtggtagcacatactacgcagactccgtgaagggccggttcaccatctccagagacaattccaagaatatgttgtatctgcaaatgaacagcctgagagccgaggacacggccgtatattactgtgcgaaaaggggcgatttttggagtggtttatactactactactacatggacgtctggggcaaagggaccacggtcaccgtctcctca

SEQ ID NO: 9087 - DNA, 292 bp, Homo sapiens
  source 1..292: mol_type = other DNA
tgtagcctctggattcacctttagcagctatgccatgaactgggtccgccaggctccagggaagggactggagtgggtctcaggtattagtggtaatggtggtgacacatactacgcagactccgcgaagggccggttcaccatctccagagacaactccaagaacacgctgtttctgcagatgtacagcctgagagccgacgacacggccctttattactgtgcgtccagtggctacgattcagactactttgactactggggccagggaacccgggtcaccgtctcctca

SEQ ID NO: 9088 - DNA, 292 bp, Homo sapiens
  source 1..292: mol_type = other DNA
tgcagcctctggattcacctttagaagctataccatgagctgggtccgccaggctccagggaaggggctggagtgggtctcagctattagtggtagtggtagtagtacatactacgcagactccgtgaagggccggttcaccatctccagagacaattccaagaacacgctgtttctgcaaatgaacagcctgagagccgaggacacggccgtatattactgtgcgtcaagtggctacgattcggactactttgactactggggccagggaaccctggtcaccgtctcctca

SEQ ID NO: 9089 - DNA, 289 bp, Homo sapiens
  source 1..289: mol_type = other DNA
tgcagcctctggattcaccttcagtagttatgaaatgaattgggtccgccagtctccagggaaggggctggagtgggtttcatacattagtagtagtggtactagcatcaagtacgcagactctgtgaagggccgattcaccatctccagagacaacgccaagagctctctgtttctgcagatgaacagcctcagagccgaggacacggctacttattactgtgcgagagatgactacgctgacaattttgactactggggccagggaaccctggtcaccgtctcctca

SEQ ID NO: 9090 - DNA, 289 bp, Homo sapiens
  source 1..289: mol_type = other DNA
tgcagcctctggatttaccttcagtagttatgaaatgaactgggtccgccaggctccagggaaggggctggagtgggtttcatacattagtagtagtggtaatagcataaagtacgcagactctgtgaagggccgattcaccatctccagagacaacgccaagagttctctgtttctgcaaatgaacagcctcagagccgaggacacggctatttattactgtgcgagagatgactacgctgacaattttgactactggggccagggaaccctggtcaccgtctcctca

SEQ ID NO: 9091 - DNA, 289 bp, Homo sapiens
  source 1..289: mol_type = other DNA
tacagcctctggattcaccttcagagattatgaaatgaactgggtccgccaggctccagggaaggggctggagtgggtttcatacattggtcgtagtggagaatccatattttacgcagactctgtggagggccgattcaccatctccagagacaacgccaaggactctctatatctacaaatgaacagcctaagagccgaggacacggctgtttattattgtgcgagagatgactacgctgataactttgactactggggccggggaaccctggtcaccgtctcctca

SEQ ID NO: 9092 - DNA, 289 bp, Homo sapiens
  source 1..289: mol_type = other DNA
cactgtctctggtggctccatcaataattactactggagctggatccggcagcccccagggaagggactggagtggatcggctatatctattacagtgggagcaccaactacaacccctccctcaagagtcgagtcaccatatcagtagacacgtccaagagccagttctccctgaagctgagctctgtgaccgccgcagacacggccgtgtattactgtgcgagacattacgggcagcagctgccccctggatactggggccagggaaccctggtcaccgtctcctca

SEQ ID NO: 9093 - DNA, 289 bp, Homo sapiens
  source 1..289: mol_type = other DNA
cactgtctctggtggctccatcactagtcactactggagctggatccggcagcccccagggaagggactagagtggatcgggtatatctattacagtgggagcgccaactacaacccctccctcaagagtcgagtcaccatatcactagacgcgtccgagaaccagttctccctgaagctgagctctgtgaccgccgcagacacggccgtatattactgtgcgagacattatggacaacagctgccccccggctactggggccagggaattctggtcaccgtctcctca

SEQ ID NO: 9094 - DNA, 283 bp, Homo sapiens
  source 1..283: mol_type = other DNA
cggaggctctggaatcactcttagtaattattggatgacttgggtccgccaggcgccagggaggggcctggagtgcctggccaacataaagactgatggaagtgagaagtactatgcagactctgtgaagggccgtttctccatctccagagacaatgccaaaaattcactgtatttgcaactgagcagcctgggagtcgaggacacgggaatatattattgtgcgacagacctcaactggagcgctacctggggccagggaaccctggtcaccgtgtcctca

SEQ ID NO: 9095 - DNA, 283 bp, Homo sapiens
  source 1..283: mol_type = other DNA
tgcagcctctggattcacctttagtgacaattttatgacctgggtccgtcaggctccagggaggggcctggagtgggtggccaacataaacccagttggaactgagacattctatgtggactctgtgaagggccgattcaccatctccagagacaacgccaagaactcactgtttctgcaaatgaacagcctgagagccgaagacacggccctatattactgtgcgacagaccttaattggagcgcaacctggggccagggaaccctggtcaccgtctcctca

SEQ ID NO: 9096 - DNA, 280 bp, Homo sapiens
  source 1..280: mol_type = other DNA
tgcagcctctggaatcactttcaaaaacgtctggattagctgggtccgccaggctccagggaaggggctggagtgggttggccgtattagcagcgaaagtcatggtgggacaacagactacgctgcacccgtgaaaggcagatttatcatctcaagagatgattcaaaaaacacgctatatctgcaaatgaacagcctgaaaaccgaagacacagccgtgtattactgcctgggaaggttcgacccctggggccagggaaccctggtcaccgtctcctca

SEQ ID NO: 9097 - DNA, 280 bp, Homo sapiens
  source 1..280: mol_type = other DNA
tgcagcctctggattcacgctcaaaaacgcctgggtgagctgggtccgccaggctccagggaaggggctggagtgggttggccgtattagaagcaaaactgatggtgggacaacagactacgctgtacccgtgaaaggcagattcaccatctcaagagatgatgcaaaaaatacgctgtatctgcaaatggacagcctgaaaaccgaggacacagccgtgtattactgtctcggaaggtttgacccctggggccagggaaccctggtcaccgtctcctca

SEQ ID NO: 9098 - DNA, 301 bp, Homo sapiens
  source 1..301: mol_type = other DNA
tgcagcctctggactcaactttagtaattcttggatgagctgggtccgccaggccccagggaaggggctggagtgggtggccaacataaagaaagatggaagtgagaaaaactatttagactctgtgaagggccgattcaccatctccagagacaacgccaagaattcagtgtatctgcaaatgaacagcctaagagccgaggacacggctgtatactactgtgcgactgggtacagcagcatctggcacccatattactttgactgctggggccagggaaccctggtcaccgtctcctca

SEQ ID NO: 9099 - DNA, 301 bp, Homo sapiens
  source 1..301: mol_type = other DNA
tgcagcctctggatttacctttagtaactcttggatgagctgggtccgccaggctccagggaaggggctggaatgggtggccaacataaagcgagatggaagtgagaaaaactatgtggggtctgttaagggccgattcaccatctccagagacaatgccgagaatttactatatctggaaatgaacagcctgagaaccgaggacacggccctctattactgtgcgaccgggtatagcagcatctggcacccctactattttgactgctggggccagggaaccccggtcatcgtctcttca

SEQ ID NO: 9100 - DNA, 286 bp, Homo sapiens
  source 1..286: mol_type = other DNA
tgcagcctctggattccccttcagtgactatagcatgaactgggtccgccaggctccaggaaaggggctggagtgggtttcatacatccgtactagttctagtgccgtatcctacgcagactctgtgaagggccgattcaccatctccaaagacaatgccaagaactcactgtatctgcaaatgaacagcctgcgagacgaggacacggctgtgtattactgtgtgagagattacatttatggttttgactactggggccagggaacccaggtcaccgtctcctca

SEQ ID NO: 9101 - DNA, 286 bp, Homo sapiens
  source 1..286: mol_type = other DNA
tgcagcctctggatttaccttcaatagttatagtatgaattgggtccgccaggctccagggaaggggctggagtgggtttcatacgttggtattagtagtagtaccatacactacgcagactctgtgaagggccgattcaccatctccagagacaacgccaagaactcactgtttctgcaaatgaacagcctgagagccgaggacacggctgtgtattattgtgtgagagactatatatacggctttgactactggggccagggaaccctggtcaccgtctcctca

SEQ ID NO: 9102 - DNA, 283 bp, Homo sapiens
  source 1..283: mol_type = other DNA
tgcagcctctgggttcacctttagaacctattcgatgacctgggtccgccaggctccagggaaagggctggagtgggtggccaccataaacgaagatggaggtcagacatactatgtggactctgtgaagggccgattcaccatctccagagacaacgccaagaactcactgtatttgcaaatgaacagcctgagagccgaggacacggccgtttattactgtgcgacccgggggggggcaccagctaactggggccagggaaccctggtcaccgtctcctca

SEQ ID NO: 9103 - DNA, 283 bp, Homo sapiens
  source 1..283: mol_type = other DNA
tgcagcctctggattcaatttcagtacttattacatgacctgggtccgccaggctccagggaaggggctggagtgggtggccaacataaaggaagatggaagtgtacaaaactatgtggactctgtgaagggccggttcaccatctccagagacaacgccaagagctcactgtatctgcacatgaacatcctgagagccgaggacacggctatttattactgtgcgacccgtgggggagccccggcgaactggggccagggaaccctagtcaccgtctcctca

SEQ ID NO: 9104 - DNA, 304 bp, Homo sapiens
  source 1..304: mol_type = other DNA
caccgtctctggtggctccatgagcagtgatggtggtgattactactgggcctggatccgccagaccccagggacgggactggagtggattgcaaatatcaattacagtgggaggacatattacagagcgtccctcaagagtcgagtcaccatatccggagacacgtccagcaaccagttctccctggagttgaactctgtgaccgccgcagacacggctatatattattgtgcgagacaagtgggaaatggactctggtacttcgatctctggggccgtggcaccctggtcactgtctcctca

SEQ ID NO: 9105 - DNA, 298 bp, Homo sapiens
  source 1..298: mol_type = other DNA
cactgtctctggtggctccatcagcagtagtggttactactggggctggatccgccagcccccagggaaggggctggagtggattgggagtatctattatagtgggaaaacctactacaacccgtccctcaagagtcgagtcaccatatcggtagacacgtccgagaaccagttctccctgaggctgacctctgtgaccgccgcagacacggctgtgtattactgtgcgagacaagtaggaaatggtctctggtacttcgatctctggggccgtggcaccctggtcactgtctcctca

SEQ ID NO: 9106 - DNA, 283 bp, Homo sapiens
  source 1..283: mol_type = other DNA
tgcagcctctgggttcaccttcagtggctactggatgcactgggtccgtcaagctccagggaaggggctggtgtggctctcaagtattaggggtgatggggatgacacagcctacgcggacttcgtgaagggccgattgaccgtctccagggacaacgccaagaataccttgtatctgcaaatggacagtctgagagccgaggactcggctctctattactgtgctagagaggcggatggttttgatgtctggggccaggggacaatggtcaccgtctcctca

SEQ ID NO: 9107 - DNA, 283 bp, Homo sapiens
  source 1..283: mol_type = other DNA
tgaagcctctgaattcaccttcagtgacttctggatgcactgggtccgccaagttccagggaaggggctggtgtgggtctcaagtagtcgtggtgatggccatgactcagcctacgcggactccgtgaagggccgattcatcatctccagagacaacgccaagaaaacactgtatctgcaaatgaacaatctgagagccgaggacacggctgtgtattactgtgcaagagaggcggatggttttgatgtttggggccaagggacaatggtcaccgtttcttca

SEQ ID NO: 9108 - DNA, 284 bp, Homo sapiens
  source 1..284: mol_type = other DNA
tgaagcctctgaattcaccttcagtgacttctggatgcactgggtccgccaagttccagggaaggggctggtgtgggtctcaagtagtcgtggtgatggccatgactcagcctacgcggactccgtgaagggccgattcatcatctccagagacaacgccaagaaaacactgtatctgcaaatgaacaatctgagagccgaggacacggctgtgtattactgtgcaagagaggcggatggttttgatgttttggggccaagggacaatggtcaccgtttcttca

SEQ ID NO: 9109 - DNA, 298 bp, Homo sapiens
  source 1..298: mol_type = other DNA
cactgtctctggtggctccatcagtggttactactggacgtggatccggcagcccccagggaagggactggagtggattgggtatatctattccagtgggagcaccaagcacaatccctccctcaagagtcgagtcaccatatcagtagacacgtccaagaatcagttctccctgaagctgacctctgtgaccgccgcggacacggccgtgtattactgtgcgagaaagacggtggcgcataactggaaccccgggtttgactactggggccagggaaccctggtcaccgtctcctct

SEQ ID NO: 9110 - DNA, 298 bp, Homo sapiens
  source 1..298: mol_type = other DNA
cactgtctctggtggctccatcagtggttactactggacgtggatccggcagcccccagggaagggactggagtggattgggtatatctattccagtgggagcaccaagtacaatccctccctcaagagtcgagtcaccatatcagtagacacgtccaagaatcagttctccctgaagctgacctctgtgaccgccgcggacacggccgtgtattactgtgcgagaaagacggtggcgcataactggaaccccgggtttgactactggggccagggaaccctggtcaccgtctcctct

SEQ ID NO: 9111 - DNA, 286 bp, Homo sapiens
  source 1..286: mol_type = other DNA
tgcagcctctggattcacctttatcaactatgccatgacctgggtccgccaggctccagggaaggggctggagtgggtctcatcgattagtgatagtggttatagcacatactacgcagactccgtgaagggccggttctccatctccagagacaattccaagaacacgctgtatcttcaaatgaacagcctgagagccgaggacacggccgtgtattactgtgcgaaagatgaagtcagaagacatgactactggggccagggaaccctggtcaccgtctcctca

SEQ ID NO: 9112 - DNA, 286 bp, Homo sapiens
  source 1..286: mol_type = other DNA
tgcagcctctggattcacctttagcagctctgccatgagctgggtccgccaggctccagggaaggggctggagtgggtctcagctattagtaccagtggtgatagcacacactacgcagactccgtgaagggccggttcaccattaccagagacaattccaagaacacgctgtatctgcaaatcaatagcctgagagccgaggacacggccgtatactactgtgcgaaagacgaagtccgccgccatgactactggggccagggaaccctggtcaccgtctcctca

SEQ ID NO: 9113 - DNA, 286 bp, Homo sapiens
  source 1..286: mol_type = other DNA
tgcagcctctggattcacctttagcagctctgccatgagctgggtccgccaggctccagggaaggggctggagtggctctcagctattagtaccagtggtgatagcacacactacgcagactccgtgaagggccggttcaccattaccagagacaattccaagaacacgctgtatctgcaaatcaatagcctgagagccgaggacacggccgtatactactgtgcgaaagacgaagtccgccgccatgactactggggccagggaaccctggtcaccgtctcctca

SEQ ID NO: 9114 - DNA, 274 bp, Homo sapiens
  source 1..274: mol_type = other DNA
tgcagcctctggattcacctttagtaattattggatgagttgggtccgccaggctccagggaaggggctggagtgggtggccaacattaagggagatggaagcctggaacaatatttggcctctgtgaagggccgattcaccatctccagagacaacgccaagaagtcactatatctgcaaatgaatagcctgagagccgaggacaccgctgtttattactgtgtgaaagaatgggaccactggggccagggaacgctggtcaccgtctcctca

SEQ ID NO: 9115 - DNA, 274 bp, Homo sapiens
  source 1..274: mol_type = other DNA
tacagcctatggattcatgtttagtagtcattggatgagctgggtccgccaggccccagggaaggggctggagtgggtggccaacataaagcaagatgaaagtgagaaatactatgtggactctgtgaagggccgattcaccatctccagagacaacgccaagaactcattgtttctgcaaatgaacagcctgagagtcgaggacacggcgatatattattgtgtcaaagaatgggaccactggggccagggagccctggtcaccgtctcctcg

SEQ ID NO: 9116 - DNA, 282 bp, Homo sapiens
  source 1..282: mol_type = other DNA
aagggtcttggatacaattttatcagtgcctggatcggctgggtgcgccaggtgcccgggaaaggcctggagtggatggggatcatctatcctcgtgactctgataccagatacagcccgtcgttccaaggccaggtcaccatctcagccgacgagtccatcagtaccgcctacctgcagtggaaaagcctgaaggcctcggacaccgccatatattactgtgcgagaaggggggactattttaattcctggggccagggaaccctggtcaccgtctcctca

SEQ ID NO: 9117 - DNA, 282 bp, Homo sapiens
  source 1..282: mol_type = other DNA
aagggtgttggatataattttaacagtgcctggatcggctgggtgcgccagatgcccgggaaaggcctggagtacataggaatcatctatcctcgtgactccgataccagatatgatccgtccttccaagtccacataaccatctcagtcgaccagtctgtcaataccgcctacttgcagtgggccagcctgcaggcctcggacaccgccatgtattactgtgcgagacgtggggactattttaattcgtggggccagggaacccgggtcactgtgtcgtca

SEQ ID NO: 9118 - DNA, 282 bp, Homo sapiens
  source 1..282: mol_type = other DNA
aagggtgttggatataattttaacagtgcctggatcggctgggtgcgccagatgcccgggaaaggcctggagtacataggaatcatctatcctcgtgactccgataccagatatgatccgtccttccaaggccacataaccatctcagtcgaccagtctgtcaataccgcctacttgcagtgggccagcctgcaggcctcggacaccgccatgtattactgtgcgagacgtggggactattttaattcgtggggccagggaacccgggtcactgtgtcgtca

SEQ ID NO: 9119 - DNA, 282 bp, Homo sapiens
  source 1..282: mol_type = other DNA
aaggcttctggatacaattttgttagcgcctggatcggctgggtgcggcagatgcccgggaaaggcctggagtggatgggaatcatctatcctcgtgactctgataccagatacagcccgtccttccaaggccaggtctccatctcggtcgacaagtccatcagcaccgcctacctgcagtggaacagcctgcgggcctcggacaccgccatgtattactgtgcgaggcggggggactactttaactcctggggccagggaaccctggtcaccgtctcctca

SEQ ID NO: 9120 - DNA, 283 bp, Homo sapiens
  source 1..283: mol_type = other DNA
tacagcctctggattcaccttcaatagctactcgatgcactgggtccgccaagttccagggaaggggctggtgtgggtctcacgtgttaatggtgatgggagtaacggattatatgcggactccgtgaagggccggttcaccatctccagagacaacgccaagaacaccgcatatctgcagatgaacaatctgagagtcgaggacacggctgtttattactgtgcaagagatcggccacctttcgacccctggggccagggaaccctggtcaccgtctcctca

SEQ ID NO: 9121 - DNA, 283 bp, Homo sapiens
  source 1..283: mol_type = other DNA
tgcagcctctggattcaccttcagtagctcctggatgcactgggtccgccaagctccagggaaggggctggtatgggtctcagttattaacagtgatgggagtaccacaaactacgcggactccgtgaagggccgatttaccatctccagagacaacgccaagaacacgctgtatctggaaatgaacagtctgagagccgaggacacggctgtctattactgtgcacgagaccggcccccgttcgacccctggggccagggaaccctggtcaccgtctcctca

SEQ ID NO: 9122 - DNA, 283 bp, Homo sapiens
  source 1..283: mol_type = other DNA
tgcagcctctggattcaccttcagtagctattggatgcactgggtccgccaagctccagggaaggggctggtgtgggtctcacgtattaacattgatgggagtaacacaggctacgcggacaccgtgaagggccgattcaccatctccagagacaacgccaagaacacgctgtatctgcaaatgagcagtctgagagtcgaggacacgggtgtgtattactgtgcaagagaccggcctcccttcgacccctggggccagggaaccctggtcaccgtctcctca

SEQ ID NO: 9123 - DNA, 284 bp, Homo sapiens
  source 1..284: mol_type = other DNA
cagcctccggattcaccttcagtagctactggatgcactgggtccgccaagctccagggaaggggctggtgtgggtctcacgtattaatagtgatgggagtagcacaagctacgcggactccgtgaagggccgattcaccatctccagagacaacgccaagaacacgctgtatttgcaaatgaacagtctgagagccgaggacacggctgtgtattactgtgcaagagacggtggttcggggttcgacccctggggccagggaaccctggtcaccgtctcctca

SEQ ID NO: 9124 - DNA, 286 bp, Homo sapiens
  source 1..286: mol_type = other DNA
tgcagcctctggattcaccttcagtagctactggatgcactgggtccgccaagctccagggaaggggctggtgtgggtctcacgtattaatagtgatgggaggagtagaaactacgcggactccgtgaagggccgattcaccatctccagagacaacgccaagaacacgctgtatctgcaaatgaacagtctgagagccgaggacacggctgtgtattactgtgcaagagatggtggaagcgggttcgacccctggggccagggaaccctggtcaccgtctcctca

SEQ ID NO: 9125 - DNA, 280 bp, Homo sapiens
  source 1..280: mol_type = other DNA
cactgtctctggtggctccatcaataattactactggagctggctccggcagccccctgggaaggaactggagtggattgcgtatatctattacaatgggaacaccaactacaacccctccctcaagagtcgagtcaccatatcagtggacacgtccaacaaccagttctccctgaagctggggtctctgaccgcctcagacacggccgtgtatttctgtgcgagaggggggtggtacttcgatgtctggggccgtggctccctagtcaccgtctcctca

SEQ ID NO: 9126 - DNA, 280 bp, Homo sapiens
  source 1..280: mol_type = other DNA
cactgtctctggtggctccatgagtagttactactggagctggatccggcagcccccagggaagggactggagtggattgcatatatctattacagtgggagtaccaactacaacccctccctccagagtcgagtcaccatatcagtagacacgtccaagaatcagttctccctgaagctgagctctgtgaccgctgcggacacggccgtgtattactgtgcgagagggggctggtacttcgatgtctggggccgtggcaccctggtcactggctcctca

SEQ ID NO: 9127 - DNA, 282 bp, Homo sapiens
  source 1..282: mol_type = other DNA
aagggttctggatacagctttaccagctactggatcggctgggtgcgccagctgcccgggaaaggcctggagtggatggggatcatctttcctgatgactctgatagcagatacagcccgtccttccaaggccaggtcaccatctcagccgacaagtccatcagcaccgccttcctgcagtggagcagcctgaaggcctcggacaccgccatgtattactgtgcgaggggtagtagcacctttgacttctggggccagggaaccctggtcaccgtctcctca

SEQ ID NO: 9128 - DNA, 282 bp, Homo sapiens
  source 1..282: mol_type = other DNA
aagagttctggatacagctttaccaactactggatcggctgggtgcgccagatgcccgggaaaggcctggagtggatggggatcatctatcctggtggctctgataccagatacagcccgtccttccaaggccaggtcaccatctcagccgacaagtccgacaataccgcctacctgcagtggagcagcctgaaggcctcggacaccgccatgtattactgtgcgaggggaagctccacctttgatttctggggccagggaacccaggttaccgtctcctca

SEQ ID NO: 9129 - DNA, 289 bp, Homo sapiens
  source 1..289: mol_type = other DNA
cactgtctctggtggttccatcagtagttactactggacctggattcggcagtccccaggggagggactagagtggattggatatatctcttacagtgggatcaccaactacaacccctccctcaagagtcgagtcaccatatcagtagacacgtccgagaatcagttctccctgaagctgacctctgtgaccgccgcagacacggccgtgtattactgtgcgagacatcgaataactggaacgggctttgactactggggccagggaaccctggtcaccgtctcctca

SEQ ID NO: 9130 - DNA, 289 bp, Homo sapiens
  source 1..289: mol_type = other DNA
cactgtctctggtggctccatcagtacttactactggagctggatccggcagcccccagggaagggactggagtggattgggtatatctcttacagtgggagcaccaactacaacccctccctcaagagtcgagtcaccatatcagtagacacgtccaagaaccagttctccctgaagctgagctctgtgaccgccgcagacacggccgtgtattactgtgcgagacaccgtataactggaactggttttgactactggggccagggaaccctggtcaccgtctcctca

SEQ ID NO: 9131 - DNA, 297 bp, Homo sapiens
  source 1..297: mol_type = other DNA
gcttctggttacacctttaccaactatggtatcagctgggtgcgacaggcccctggacaagggcttgagtggatgggatggatcagcgcttacaatgctaacacaaactatgcacagaaactccagggcagagtcaccatgaccacagacacatccacgagcacagcctacatggagctgaggagcctgagatctgacgacacggccgtgtattactgtgcgagagacacacattactctgatagtagtggttatccagactactggggccagggaaccctggtcaccgtctcctca

SEQ ID NO: 9132 - DNA, 297 bp, Homo sapiens
  source 1..297: mol_type = other DNA
gcttctggttacagctttaccaactatggtatcagctgggtgcgacaggcccctggacaagggcttgagtggatgggatggatcagcggttacaatggtaacataaactatgcacagaaactccagggcagagtcaccatgaccacagacacatccacgagcacagcctacatggagctgaggagcctgagatctgacgacacggccgtgtattactgtgcgagagatacccactactctgatagtagtggttatccagactactggggccagggaaccctggtcaccgtctcctca

SEQ ID NO: 9133 - DNA, 302 bp, Homo sapiens
  source 1..302: mol_type = other DNA
ccatctccggggacagtgtctctagcaacagtgttgcttggaactggatcaggcagtccccatcgagaggccttgagtggctgggaaggacatactacaggtccacgtggttgaatgattatgcagtatctgtgaaaagtcgaataaccatcaacccagacacatccaagaaccagttctccctgcagctgaactctgtgactcccgaggacacggctgtgtattactgtgcaagaggcgacaactggaacgacttcgactttgaccactggggccagggaaccctggtcaccgtctcctca

SEQ ID NO: 9134 - DNA, 302 bp, Homo sapiens
  source 1..302: mol_type = other DNA
tcatctccggggacagtgtctctagcaacagtgttgcttggcactggatcaggcagtccccatcgagaggccttgagtggctgggaaggacatactacaggtcctcctggcatactgattacgcagtctctgtgaaaggtcgaataaccatcagcccagacacagccaagaaccagttctccctgcagctgaactctgtgactcccgaggacacggctgtgtattattgtgcaagaggagataactggaacgactttgactttgaccactggggccagggagccctggtcaccgtctcctca

SEQ ID NO: 9135 - DNA, 280 bp, Homo sapiens
  source 1..280: mol_type = other DNA
tgcagcctctggattcacctttagtaccttttggatgacctggttccgccaggctccagggaaagggctggagtgggtggccaacataaagcacgatggaagtaagacatactatgtggactctgtgaggggccgattcaccatctccagagacaacgccaagaactcactgtatctgcaaatgaacagcctgagagccgacgacacggccgtatatttctgtgcgagaggggcctcggggggctactggggccagggaaccctggtcaccgtctcctca

SEQ ID NO: 9136 - DNA, 280 bp, Homo sapiens
  source 1..280: mol_type = other DNA
tgcagcctctggattcacctttagtacttattggatgacctgggtccgccaggctccagggaaggggctggagtgggtggccaacataaagcaagatggaagtgagaaatactatgtggactctgtgaagggccgattcaccatctccagagacaacgccaagaactcactgtatctgcaaatgaacagcctgagagtcgaggacacggctgtgtattactgtgcgagaggcgccagtgggggctactggggccagggaatcctggtcaccgtctcctca

SEQ ID NO: 9137 - DNA, 280 bp, Homo sapiens
  source 1..280: mol_type = other DNA
tgcagcctccggattcacctttagtgacttttggatgaactgggtccgccaagctccaggaaaggggctggagtgggtggcccacataaagggagatggaagtgagaaatactatgtggactctgtgaagggccgattcaccatctccagagacaacgccaagaattcactgtatctacaaatgaacagcctgagagccgaggacacggccgtatattactgtacgataggccattacggtgactactggcgccagggaaccctggtcaccgtctcctca

SEQ ID NO: 9138 - DNA, 280 bp, Homo sapiens
  source 1..280: mol_type = other DNA
tgcagcctctggattcacgtttagtagattttggatgaactgggtccgccaggctccagggaaggggctggagtgggtggccaacatggacccagatggaaatgagaaatactatgtggactctgtgaagggccgattcaccatctccagagacaacgccaagaactcactgtatcttcaaatgaacagcctgagagccgaggacacggctgtatatttgtgtacgataggacactacggtgactacaagggccagggaaccctggtcaccgtctcctca

SEQ ID NO: 9139 - DNA, 280 bp, Homo sapiens
  source 1..280: mol_type = other DNA
tgcgacctctggattcacgtttagcggtttttggatgaactgggtccgccaggccccagggaaggagctggagtgggtggccaatataaaggaagatggaagtgagaagttctatgcggactctgtgaagggccgtttcaccgtctccagagacaacgccaagaattcactgtatcttcaactgaacagcctgagagccgaggacacggctgtctattactgtacgatcggtcattatggtgattatgggggccagggaaccctggtcaccgtctcctca

SEQ ID NO: 9140 - DNA, 289 bp, Homo sapiens
  source 1..289: mol_type = other DNA
tgtaggctttggattcacgccgcagtttagtgactactccatggcctgggtccgccaggctccggggaaggggctggagtgggtcgcagccattaccactcctactgccccattctacgcggacttcgtgaggggccgattcaccatctccagagacaatgccagaaacacactgtttctgcaaatggacaacctgagagtcgaggacacggccacatatttctgtgcccggagggttgaagggaactttgactactggggccggggaaccctggtctccgtctcctca

SEQ ID NO: 9141 - DNA, 283 bp, Homo sapiens
  source 1..283: mol_type = other DNA
tgcagcctctggattcagctttgacatctataccatgggctgggtccgccaggctccagggaaggggctggggtgggtctcagctatcgtggctgctggcaccacatcctatgcagactccgtgaggggccggttcaccatctccagagacaattccaagaagaccatatatctgcaaatgaacagcctgagagccgaggacacggccgtgtattactgtgcgagaagggttgaaggaaactttgactactggggccagggaaccctggtcaccgtctcctca

SEQ ID NO: 9142 - DNA, 283 bp, Homo sapiens
  source 1..283: mol_type = other DNA
tgcagcctctggattcaactttgacatctataccatgggctgggtccgccaggctccagggagggggctggggtgggtctccgctatcgtggctgctggcaccacatcctatgcagactctgtgaggggccggttcaccatctccagagacaattccaagaagaccatatatctgcaaatgaacagcctgagagccgaggacacggccgtgtattactgtgcgagaagggttgaaggaaactttgactactggggccagggaaccctggtcaccgtctcctca

SEQ ID NO: 9143 - DNA, 283 bp, Homo sapiens
  source 1..283: mol_type = other DNA
tgcagcctctggattcagctttgacatctataccatgggctgggtccgccaggctccagggaaggggctggggtgggtctcagctatcgtggctgctggcaccacatcctatgcagactccgtgaggggccggttcaccatctccagagacaattccaagaagaccatatatctgcaaatggacagcctgagagccgaggacacggccgtgtattactgtgcgagaagggttgaaggaaactttgactactggggccagggaaccctggtcaccgtctcctca

SEQ ID NO: 9144 - DNA, 283 bp, Homo sapiens
  source 1..283: mol_type = other DNA
tggagcctctggattcaactttgacgactataccatgggttgggtccgccaggctccagggaaggggctggagtgggtctcagcaatcatttctgcatttagtacatactatggaggctccgtgaagggccggttcaccatctccagagacaattccaagaacacattgtatttacaaatgaacagcctgaggaccgaggacacggccgtatattattgtgcgagaagggttgaaggaaactttgactactggggccagggaaccctggtcaccgtctcctca

SEQ ID NO: 9145 - DNA, 283 bp, Homo sapiens
  source 1..283: mol_type = other DNA
tgcagcctctggattcaggtttgacatctataccatgggctgggtccgccaggctccagggaaggggctggggtgggtctcagctatcgtgtctgctggcaccacatcctatgcagagtccgtgaggggccggttcaccatctccagagacaattccaagaagaccatatatctgcaaatgaacagcctgagagccgaggacacggccctgtattactgtgcgagaagggttgaaggaaactttgactactggggccagggaaccctggtcaccgtctcctca

SEQ ID NO: 9146 - DNA, 283 bp, Homo sapiens
  source 1..283: mol_type = other DNA
tgtagcctctggattcaactttgacctctataccatgagttgggtccgccaggctccggggaaggggctggactgggtctcagctatcatttctggtggtagcacatactatacagactccgtgaagggccggttcaccatctccagagacaattccaagaacacgctgtatctgcaaatgaacagcctgagagccgaggacacggccgtatattactgtgcgagaagggttgaaggaaactttgactactggggccagggaaccctggtcaccgtctcctca

SEQ ID NO: 9147 - DNA, 283 bp, Homo sapiens
  source 1..283: mol_type = other DNA
tgcagcctctggattcaactttgacatctataccatgggctgggtccgcctggctccagggagggggctggggtgggtctccgctatcgtggctgctggcaccacatcctatgcagactccgtcaggggccggttcaccatctccagagacaattccaagaagaccatatatctgcaaatgaacagcctgagagccgaggacacggccgtgtattactgtgcgagaagggttgaaggaaactttgactactggggccagggaaccctggtcaccgtctcctcc

SEQ ID NO: 9148 - DNA, 283 bp, Homo sapiens
  source 1..283: mol_type = other DNA
tgcagcctctggattcaactttgacatctataccatgggctgggtccgccaggctccagggagggggctggggtgggtctcagctatcgtggctgctggcaccacatcctatgcagactccgtgaggggccggttcaccatctccagagacaattccaagaagaccatatatctgcaaatgaacagcctgagagccgaggacacggccgtgtattactgtgcgagaagggttgaaggaaactttgactactggggccagggaaccctggtcaccgtctcctca

SEQ ID NO: 9149 - DNA, 289 bp, Homo sapiens
  source 1..289: mol_type = other DNA
tgcagcgtctggattcaccttcagtagatatggcatgcactgggtccgccagactccaggcaaggggctggagtgggtggcagctatatggtatgatggaagtaataaaaactatgcagactccgtgaagggccgattcaccatctccagagacaatcccaagaacacgctgtatttgcaaatgaacagcctgagagccgaggacacggctgtgtattactgtgcgagggactacggcgactacgctattgactactggggccagggaaccctggtcaccgtctcctca

SEQ ID NO: 9150 - DNA, 289 bp, Homo sapiens
  source 1..289: mol_type = other DNA
tgcagcgtctggattcaccttcagtagctctggcatgcactgggtccgccaggccccaggcaaggggctggagtgggtggcatttatattgtatgatggaagtaataaatactatgcagactccgtgaagggccgattcaccatctccagagacaactccaagaacacgctgtatctgcaaatgaacggcctgagagccgaggacacggctgtgtattactgtgcgagagactacggtgactacgcgatcgactactggggccagggaaccctggtcaccgtctcctca

SEQ ID NO: 9151 - DNA, 298 bp, Homo sapiens
  source 1..298: mol_type = other DNA
cactgtctctggtggctccatcagtggatattactggaactggatccggcagcccccagggaagggactggagtggattgggtatatgtataatagtgggactaccaactacaacccctccctacagagtcgagtcaccatatcagtagacacgtcgaggaaccagttcttcctgaatctgagctctctgaccgctgcggacacggccgtgtatttctgtgcgagaggccgcaaggatgctacggggagttatggcactgactactggggccagggaaccctggtcaccgtctcctca

SEQ ID NO: 9152 - DNA, 298 bp, Homo sapiens
  source 1..298: mol_type = other DNA
cactgtctctggtggctccatcagtaattactactggaactggattcggcagcccccggggaagggactggaatggattgggtatatcttttacagtgggagtaccaattacagcccctccctcaagagtcgggtcaccatttcactggacacgtccaggaaccacttctccctgacgtttaattctgtgaccgctgcggacacggccgtgtattactgtgcgagaggaagaaaagatgctacgggaagttatgggactgactactggggcccgggaaccttggtcaccgtctcatca

SEQ ID NO: 9153 - DNA, 271 bp, Homo sapiens
  source 1..271: mol_type = other DNA
tgcagcctctggattcacctttagtaggaattggatgagctgggtccgccaggctccagagaaagggctggagtgggtggccaacataaaatatgatggaagagagaaatattatgtggactctgtgaagggccgattcaccatctccagagacaacgccaagaactcactgtatttgcaaatggacagcctgagagtcgaggacacggccatatattactgtgtgagagagtggaattggggccagggaaccctggtcaccgtctcctca

SEQ ID NO: 9154 - DNA, 271 bp, Homo sapiens
  source 1..271: mol_type = other DNA
tggagcctctggattcacgtttactaggaattggatgagctgggtccgccaggctccagggaaggggccggaatgggtggccaacataaacccagatggaagtgagaaatactatgtggactctgtgaagggccgattcaccatctccagagacaacgccaagaattcactgtatctgcaaatgaacagtctgagagccgaggacacggctatatattactgtgtgagagagtggaattggggccagggaaccctggtcaccgtctcctcc

SEQ ID NO: 9155 - DNA, 280 bp, Homo sapiens
  source 1..280: mol_type = other DNA
tgcagcctctggattcactctcaataattactggatgcactgggtccgccaagttccagggaagggactgatgtgggtcgcacgtattaagagtgatgggcgttccactatctacgcggactccgtgaaggaccgatttaccatctccagagacaacggcaagctctttctgcaaatgaacagtctgagagtcgaggacacggctgtctatttttgtgcaagagataattttggttccattgactactggggccagggaaccctggtcaccgtctcttca

SEQ ID NO: 9156 - DNA, 286 bp, Homo sapiens
  source 1..286: mol_type = other DNA
tgtaggctctggattcagcttcagtagctactggatgcactgggtccgccaagctccagggaaggggctggtgggggtctcacatataaaacctgatgggagtcccacagactacgcggagtcggtgaagggccgattcaccatctccagagacaacgccaagaacacgttgtatctgcaaatgaacagtctgagccccgacgacacggctctgtattactgtgcaagagacaactttggctcgattgactactggggccagggaaccctggtcaccgtctcctca

SEQ ID NO: 9157 - DNA, 300 bp, Homo sapiens
  source 1..300: mol_type = other DNA
aagggttctggatacagctttagcacctactggatcggctgggtgcgccagatgcccgggaaaggcctggagtggatggggatcatctatcctggtgactctgataccagatacagcccgtccttccaaggccaggtcaccatctcagccgacaagtccatcaataccgcctacctgcagtggagcagtctgaaggcctcggacaccgccatatattactgtgcgagaggggtactagtgggagctactcagaactggttcgacccctggggccagggaaccctggtcactgtctcctca

SEQ ID NO: 9158 - DNA, 300 bp, Homo sapiens
  source 1..300: mol_type = other DNA
aagggttctggatacagttttagcgcctactggatcggctgggtgcgccagatgcccgggaaaggcctggagtggatgggaatcatctatcctggtgactctgataccagatacagtccgtccttccaaggccaggtcaccatctcagccgacaagtccatcgataccgcctacctgcagtggagcagtctgaaggcctcggacaccgccatatattactgtgcgagaggggtactagtgggagctactcagaactggttcgacccctggggccagggaaccctggtcactgtctcctca

SEQ ID NO: 9159 - DNA, 300 bp, Homo sapiens; identical to SEQ ID NO: 9157
  source 1..300: mol_type = other DNA

SEQ ID NO: 9160 - DNA, 300 bp, Homo sapiens
  source 1..300: mol_type = other DNA
aagggttctggatacagctttaccacctactggatcggctgggtgcgccagatgcccgggaaaggcccggagtggatggggatcatctatcctggtgactctgataccagatacagcccgtccttccaaggccaggtcatcatctcagccgacaagtccatcagcaccgcctacctgcagtggagcagcctgaaggcctcggacaccgccatatattactgtgcgagaggggttctggtgggagctactcagaactggttcgacccctggggccagggaaccctggtcactgtctcctca

SEQ ID NO: 9161 - DNA, 300 bp, Homo sapiens
  source 1..300: mol_type = other DNA
aagggttctggatacagctttagcacctactggatcggctgggtgcgccagatgcccgggaaaggcctggagtggatggggatcatctatcctggtgactctgataccagatacagcccgtccttccaaggccaggtcaccatctcagccaacaagtccatcaataccgcctacctgcagtggagcagtctgaaggcctcggacaccgccatatattactgtgcgagaggggtactagtgggagctactcagaactggttcgacccctggggccagggaaccctggtcactgtctcctca

SEQ ID NO: 9162 - DNA, 300 bp, Homo sapiens
  source 1..300: mol_type = other DNA
aagggttctggatacagttttagcagctactggatcggctgggtgcgccagatgcccgggaaaggcctggagtggatgggaatcatctatcctggtgactctgatacccgatacagtccgtccttccaaggccaggtcaccatctcagccgacaagtccatcagcaccgcctacctgcagtggagcagcctgaaggcctcggacaccgccatgtattactgtgcgagaggagttttagtgggagctacccaaaactggttcgacccctggggccagggaaccctggtcaccgtctcctca

SEQ ID NO: 9163 - DNA, 300 bp, Homo sapiens
  source 1..300: mol_type = other DNA
aagggttctggatacagctttaccacccactggatcggctgggtgcgccagatgcccgggaaaggcctggagtggatgggcatcatctatcctggtgactctgatactagatacagcccgtccttccaaggccaggtcaccatctcagccgacaagtccatcagcaccgcctacctgcagtggagcagcctgaaggcctcggacaccgccatatattactgtgcgagaggggtactagtgggagctactcagaactggttcgacccctggggccagggaactctggtcactgtctcctca

SEQ ID NO: 9164 - DNA, 300 bp, Homo sapiens
  source 1..300: mol_type = other DNA
aagggttctggatacagctttaccacctactggatcggctgggtgcgccagatgcccgggaaaggcctggagtggatggggatcatctatcctggtgactctgataccagatatagcccgtccttccaaggccaggtcaccatctcagccgacaagtccatcagcaccgcctacctgcagtggagcagcctgaaggcctcggacaccgccatatattactgtgcgagaggggtactagtgggagctactcagaactggttcgacccctggggccagggaaccctggtcattgtctcctca

SEQ ID NO: 9165 - DNA, 300 bp, Homo sapiens
  source 1..300: mol_type = other DNA
aagggttctggatacagctttaccacctactggatcggctgggtgcgccagatgcccgggaaaggcctggagtggatggggatcatctatcctggtgactctgataccagatacagtccgtccttccaaggccaggtcaccatctcagccgacaagtccatcagcaccgcctacctgcagtggagcagcctgaaggcctcggacaccgccatatattactgtgcgagaggggttctagtgggagctactcagaactggttcgacccctggggccagggaaccctggtcactgtctcctca

SEQ ID NO: 9166 - DNA, 297 bp, Homo sapiens
  source 1..297: mol_type = other DNA
ggttctggatacagctttagcacctactggatcggctgggtgcgccagatgcccgggaaaggcctggagtggatggggatcatctatcctggtgactctgataccagatacagcccgtccttccaaggccaggtcaccatctcagccgacaagtccatcaataccgcctacctgcagtggagcagtctgaaggcctcggacaccgccatatattactgtgcgagaggggtactagtgggagctactcagaactggttcgacccctggggccagggaaccctggtcactgtctcctca

SEQ ID NO: 9167 - DNA, 300 bp, Homo sapiens
  source 1..300: mol_type = other DNA
aagggttctggatacagctttagcacctactggatcggctgggtgcgccagatgcccgggaaaggcttggagtggatggggatcatctatcctggtgactctgataccagatacagcccgtccttccaaggccaggtcaccatctcagccgacaagtccatcaataccgcctacctgcagtggagcagtctgaaggcctcggacaccgccatatattactgtgcgagaggggtactagtgggagctactcagaactggttcgacccctggggccagggaaccctggtcactgtctcctca

SEQ ID NO: 9168 - DNA, 300 bp, Homo sapiens
  source 1..300: mol_type = other DNA
aagggttctggttacagctttagcacctactggatcggctgggtgcgccagatgcccgggaaaggcctggagtggatggggatcatctatcctggtgactctgataccagatacagcccgtccttccaaggccaggtcaccatctcagccgacaagtccatcaataccgcctacctgcagtggagcagtctgaaggcctcggacaccgccatatattactgtgcgagaggggtactagtgggagctactcagaactggttcgacccctggggccagggaaccctggtcactgtctcctca

SEQ ID NO: 9169 - DNA, 283 bp, Homo sapiens
  source 1..283: mol_type = other DNA
tgtagcctctggattcaccttcagtaactacgacatgcactgggtccgccaagctacaggaaaaggtctggaatgggtctcaggtattggatatgctgatgacacaaactatccagactccgtgacgggccgattcaccgtctccagagaaaatgccaagaactccttgtatcttcaaatgaacagcctgacagccggggacacggctgtctactactgtgcaagaggtatagcagggggccttgactactggggccggggaaccctggtcaccgtcttctca

SEQ ID NO: 9170 - DNA, 283 bp, Homo sapiens
  source 1..283: mol_type = other DNA
tgcagcctctggattcaccttcagtggttacgacatgcactgggtccgccaagccacaggaaaaggtctggaatgggtctcaggtattggatatgctggtgacacaaattatccagagtcggtgacgggccgattcaccgtctccagagacaatggcaagaactccttgtatcttcaaatgaacaacctgagagccggggacacggctgtctattattgtgcaagaggtatagcagggggccttgactactggggccggggaaccctggtcaccgtctcctca

SEQ ID NO: 9171 - DNA, 283 bp, Homo sapiens
  source 1..283: mol_type = other DNA
tgcagcctctggattcaccttcagtaactacgacatgcactgggtccgccaagccacaggaaaaggtctggaatgggtcgcaggtattggatatgctggtgacacaaactatccaggctccgtgtcgggccgattcaccgtctccagagaaaatgccaaaaactccttgtttcttcaaatgaacagcctgagagtcggggacacggctgtctattactgtgcaagaggaatagcagggggccttgactactggggccggggaaccctggtcaccgtctcctca

SEQ ID NO: 9172 - DNA, 283 bp, Homo sapiens
  source 1..283: mol_type = other DNA
tgtagcctctggattcaccttcagtaactacgacatgcactgggtccgccaagctacaggaaaaggtctggaatgggtctcaggtattggatatgctgatgacacaaactatccagactccgtgacgggccgattcaccgtctccagagaaaatgccaagaactccttgtatcttcaaatgaacagcctgacagccggggacacggctgtctactactgtgcaagaggtatagcagggggccttgactactggggccagggaaccctggtcaccgtctcctca

SEQ ID NO: 9173 - DNA, 283 bp, Homo sapiens
  source 1..283: mol_type = other DNA
tgtagcctctggattcaccttcagtaactacgacatgcactgggtccgccaagctgcaggaaaaggtctggaatgggtctcaggtattggatatgctgatgacacaaactatccagactccgtgacgggccgattcaccgtctccagagaaaatgccaagaactccttgtatcttcaaatgaacagcctgacagccggggacacggctgtctactactgtgcaagaggtatagcagggggccttgactactggggccggggaaccctggtcaccgtcttctca

SEQ ID NO: 9174 - DNA, 283 bp, Homo sapiens
  source 1..283: mol_type = other DNA
tgtagcctctggattcaccttcagtaaccacgacatgcactgggtccgccaagctacaggaaaaggtctggaatgggtctcaggtattggatatgctgatgacacaaactatccagactccgtgacgggccgattcaccgtctccagagaaaatgccaagaactccttgtatcttcaaatgaacagcctgacagccggggacacggctgtctactactgtgcaagaggtatagcagggggccttgactactggggccggggaaccctggtcaccgtcttctca

SEQ ID NO: 9175 - DNA, 283 bp, Homo sapiens
  source 1..283: mol_type = other DNA
tacagcctctggattcaccttcagtagctacgacatgcactgggtccgccaaactacaggaaaaggtctggagtgggtctcttccattaatactggtggtgacacatactatacaggctccgtgaagggccgattcatcgtctccagagaaaatgccaagaactccttgtatcttcaaatgaacagcctgagagccggggacacggctgtatattactgtgcaagaggaatagcaggggggttagactactggggccagggaaccctggtcaccatctcctca

SEQ ID NO: 9176 - DNA, 292 bp, Homo sapiens
  source 1..292: mol_type = other DNA
tgctgcctctggattcaccttcagtaactactggatgcactgggtccgccaatctccaggaaagggtctggagtgtttctcacgtttgaataatgatgggagtcacacagactacgcggactccgtgaagggccgattcaccatctccagagacaacgccaagaacacgctgtatctgcaaatgaacagtctgcgggtcgaggacacggctctatattattgtgtaagagggaccaatgactgggtcggtattgactactggggccaaggaaccctggtcaccgtctcctca

SEQ ID NO: 9177 - DNA, 289 bp, Homo sapiens
  source 1..289: mol_type = other DNA
tgctgcctctggattcaccttcagtaactactggatgcactgggtccgccaatctccaggaaagggtctggagtgtttctcacgtttgaataatgatgggagtcacacagactacgcggactccgtgaagggccgattcaccatctccagagacaacgccaagaacacgctgtatctgcaaatgaacagtctgcgggtcgaggacacggctctatattattgtgtaagagggaccaatgactgggtcggtattgactactggggccaaggaaccctggtcaccgtctcc

SEQ ID NO: 9178 - DNA, 292 bp, Homo sapiens
  source 1..292: mol_type = other DNA
tgctgcctctggattcaccttcagtaactactggatgcactgggtccgccaatctccaggaaagggtctggagtgtttctcacgtttgaataatgatgggagtcacacagactacgcggactccgtgaagggccgattcaccatctccagagacaacgccaagaacacgctgcatctgcaaatgaacagtctgcgggtcgaggacacggctctatattattgtgtaagagggaccaatgactgggtcggtattgactactggggccaaggaaccctggtcaccgtctcctca

SEQ ID NO: 9179 - DNA, 292 bp, Homo sapiens
  source 1..292: mol_type = other DNA
tgctgcctctggattcaccttcagtaactactggatgcactgggtccgccaatctccaggaaagggtctggagtttgtctcacgtttgaataatgatgggagttacagagactacgcggactccgtgaagggccgattcaccatctccagagacaacgccaagcacacgctgtatctgcaaatgaacagtctgcgggtcgaggacacggctctatattattgtgtaagagggaccaatgactgggtcggtattgactactggggccaaggaaccctggtcaccgtctcctca

SEQ ID NO: 9180 - DNA, 292 bp, Homo sapiens
  source 1..292: mol_type = other DNA
tgctgcctctggattcaccttcagtaactactggatgcactgggtccgccaatctccaggaaagggtctagagtgtttctcacgtttgaataatgatgggagtcacacagactacgcggactccgtgaagggccgattcaccatctccagagacaacgccaagaacacgctgtatctgcaaatgaacagtctgcgggtcgaggacacggctctatattattgtgtaagagggaccaatgactgggtcggtattgactactggggccaaggaaccctggtcaccgtctcctca

SEQ ID NO: 9181 - DNA, 292 bp, Homo sapiens
  source 1..292: mol_type = other DNA
tgctgcctctggattcaccttcagtaactactggatgcactgggtccgccaatctccaggaaagggtctggagtgtttctcacgtttgaataatgatgggagtcacacagactacgcggactccgtgaagggccgattcaccatctccagagacaacgccaagaacacgctgtatctgcaaatgaacagtctgcgggtcgaggacacggctctatattattgtgtaagagggaccaatgactgggtcggtattgactaccggggccaaggaaccctggtcaccgtctcctca

SEQ ID NO: 9182 - DNA, 292 bp, Homo sapiens
  source 1..292: mol_type = other DNA
tgcagtctctggattcacgctcagtgactactggatgcattgggtccgccaagttccagggaaggggctggtgtgggtctcacgtattagtcatgatgagacgacgacagactacgcggactccgcgaagggccgatttaccatctccagagacgccgccaagaacatattgtatctgcaaatgaatagtctaagagacgaggacacggctgtgtatttctgtgtcaggggcaccaatgactgggtggggattgactattggggccagggaaccctggtcaccgtctccgca

SEQ ID NO: 9183 - DNA, 294 bp, Homo sapiens
  source 1..294: mol_type = other DNA
gcttctggttacacttttaccagttacggtatcacctgggtgcgacaggcccctggacaagggcttgagtggatgggctggatcagcgcttacaatggtaacacaaattatgcacagaagttccagggcagagtcaccatgaccacagacacatccacgagcacagcttatatggagctgaggagcctgagatctgacgacacggccgtgtattactgtgcgagggggggtaaagaagtggctggtacccccttatggtactggggccagggaaccctggtcaccgtctccgca

SEQ ID NO: 9184 - DNA, 294 bp, Homo sapiens
  source 1..294: mol_type = other DNA
gcttctggttacacctttactaattacggtatcacctgggtgcgacaggcccctggacaagggcttgagtggatgggctggatcagcgcttacaatggtaacacaaattatgcacagaagctccagggcagagtcaccatgaccacagacacatccacgagcacagcttatatggagctgaggagcctgagatctgacgacacggccgtgtattactgtgcgagggggggtaaagaagtggctggtacccccttatggtactggggccagggaagcctggtcaccgtctccgca

SEQ ID NO: 9185 - DNA, 294 bp, Homo sapiens
  source 1..294: mol_type = other DNA
gcctctggttacacttttaccagttacgggatcacctgggtgcgacaggcccctggacaagggcttgagtggatgggctggatcagcgcttacaatggtaacacaaattatgcacagaagttccagggcagagtcaccatgaccacagacacatacacgagtacagcttatatggagctgaggagcctgagatctgacgacacggccgtgtattactgtgcgagggggggtaaagaagtggctggtacccccttatggtactggggccagggaaccctggtcaccgtctccgca

SEQ ID NO: 9186 - DNA, 294 bp, Homo sapiens; identical to SEQ ID NO: 9183
  source 1..294: mol_type = other DNA

SEQ ID NO: 9187 - DNA, 294 bp, Homo sapiens
  source 1..294: mol_type = other DNA
gcttctggttacacttttaccagttacggtatcacctgggtgcgacaggcccctggacaagggcttgagtggatgggctggatcagcgcttacaatggtaacacaaattatgcacagaagttccagggcagagtcaccatgaccacagacacatccacgagcacagcttatatggagctgaggagcctgagatctgacgacatggccgtgtattactgtgcgagggggggtaaagaagtggctggtacccccttatggtactggggccagggaaccctggtcaccgtctccgca

SEQ ID NO: 9188 - DNA, 294 bp, Homo sapiens
  source 1..294: mol_type = other DNA
gcttctggttacacctttactaattacggtatcacctgggtgcgacaggcccctggacaagggcttgagtggatgggctggatcagcgcttacaatggtaacacaaattatgcacagaagctccagggcagagtcaccatgaccacagacacaaccacgagcacagcttatatggagctgaggagcctgagatctgacgacacggccgtgtattactgtgcgagggggggtaaagaagtggctggtacccccttatggtactggggccagggaaccctggtcaccgtctccgca

SEQ ID NO: 9189 - DNA, 294 bp, Homo sapiens; identical to SEQ ID NO: 9184
  source 1..294: mol_type = other DNA

SEQ ID NO: 9190 - DNA, 294 bp, Homo sapiens
  source 1..294: mol_type = other DNA
gcttctggttacacttttaccagttacggtatcacctgggtgcgacaggcccctggacaagggcttgagtggatgggctggatcagcgcttacaatggtaacacaaattatgcacagaagttccagggcagagtcaccatgaccacagacacatccacgagcacagcttatatggagctgaggagcctgagatctgacgacacggcagtgtattactgtgcgagggggggtaaagaagtggctggtacccccttatggtactggggccagggaaccctggtcaccgtctccgca

SEQ ID NO: 9191 - DNA, 294 bp, Homo sapiens
  source 1..294: mol_type = other DNA
gcgtctggttacacctttaccgcctatggagtcacctgggtgcgacaggcccctggacacgggcttgagtggatgggatggatcagcgcttacaatggtaacacaaactatgcacagaagttccagggcagagtcaccatgaccacagacacatccacgagcacagcctacatggagctgaggaccctgagatctgacgacacggccgtgtattactgtgcgagggggggtaaagaggtggctggaacccctttgtggtattggggccagggaaccctggtcaccgtctcctca

SEQ ID NO: 9192 - DNA, 294 bp, Homo sapiens; identical to SEQ ID NO: 9191
  source 1..294: mol_type = other DNA

SEQ ID NO: 9193 - DNA, 294 bp, Homo sapiens
  source 1..294: mol_type = other DNA
gcgtctagttacacctttaccgcctatggagtcacctgggtgcgacaggcccctggacacgggcttgagtggatgggatggatcagcgcttacaatggtaacacaaactatgcacagaagttccagggcagagtcaccatgaccacagacacatccacgagcacagcctacatggagctgaggaccctgagatctgacgacacggccgtgtattactgtgcgagggggggtaaagaggtggctggaacccctttgtggtattggggccagggaaccctggtcaccgtctcctca

SEQ ID NO: 9194 - DNA, 289 bp, Homo sapiens
  source 1..289: mol_type = other DNA
tgcagcctctggattcaccttcaatacctctcctatgaactgggtccgccaggctccagggaaggggctagagtgggtttcatatattaatggtggaagtggacgtatatactacgcagactctgtgaagggccgattcaccatctccagagacaatggcaagaggtcactgtatctgcaagtgaacagcctgagagacgaggacacggctgtctattattgtgcgagagatctgtcccactgggctatggacgtctggggccaagggaccacggtcaccgtctcctca

SEQ ID NO: 9195 - DNA, 289 bp, Homo sapiens
  source 1..289: mol_type = other DNA
tgcagcctctggattcaccttcaatacctctcctatgaactgggtccgccaggctccagggaaggggctagagtgggtttcatatattaatggtggaagtggacgtatatactacgcagactctgtgaagggccgattcaccatctccagagacaatggcaagaggtcactgtatctgcaagtgaacagcctgagagacgaggacacggctgtctattattgtgcgagagatctgtcccactgggctatggacgtctggggccaagggaccacggtcaccgtctcccca

SEQ ID NO: 9196 - DNA, 289 bp, Homo sapiens; identical to SEQ ID NO: 9194
  source 1..289: mol_type = other DNA

SEQ ID NO: 9197 - DNA, 289 bp, Homo sapiens
  source 1..289: mol_type = other DNA
tgcagcctctggattcaccttcaatacctctcctatgaactgggtccgccaggctccagggaaagggctagagtgggtttcatatattaatggtggaagtggacgtatatactacgcagactctgtgaagggccgattcaccatctccagagacaatggcaagaggtcactgtatctgcaagtgaacagcctgagagacgaggacacggctgtctattattgtgcgagagatctgtcccactgggctatggacgtctggggccaagggaccacggtcaccgtctcctca

SEQ ID NO: 9198 - DNA, 289 bp, Homo sapiens
  source 1..289: mol_type = other DNA
tgcagcctctggattcaccttcaatacctctcctatgaactgggtccgccaggctccagggaaggggctagagtgggtttcatatattaatggtggaagtggacgtatatactacgcagactctgtgaagggccgattcaccatctccagagacaatggcaagaggtcactgtatctgcaagtgaacagcctgagagacgaggacacggctgtctattattgtgcgagagatctgtcccactgggctatggacgtctggggccaagggaccacggtcaccgtctcttca

SEQ ID NO: 9199 - DNA, 301 bp, Homo sapiens
  source 1..301: mol_type = other DNA
tgcagcctctggattcaccttcagtacctatagcatgaactgggtccgccaggctccagggaaggggctggagtgggtctcatccattagtgatagtagtacttacatatactacgcagactcgctgaagggccgattcaccatctccagagacaacgccaggaactcactgtatctgcaaatgaacagcctgagagccgaggacacggctgtgtattactgtgcgagagacccctattgtagtagtaatacctgcctatttgactactggggccagggaattctggtcaccgtctcctca

SEQ ID NO: 9200 - DNA, 301 bp, Homo sapiens; identical to SEQ ID NO: 9199
  source 1..301: mol_type = other DNA

SEQ ID NO: 9201 - DNA, 301 bp, Homo sapiens
  source 1..301: mol_type = other DNA
tgcagcctctggattcaccttcagtagctatagcatgaactgggtccgccaggctccagggaaggggctggagtgggtctcatccattagtgatagaagtagttatatatactacgcagaatcagtgaagggccgattcaccatctccagagacaacgccaagaactcactgtatctgcaaatgaacagcctgagagccgaggacacggctgtgtattactgtgcgcgagatccctattgcagtagtaatacctgcctgtttgactactggggccggggaaccctggtcactgtctcctca

SEQ ID NO: 9202 - DNA, 301 bp, Homo sapiens
  source 1..301: mol_type = other DNA
tgcagcctctggattcaccttcagtgattatagcatgaactgggtccgccaggctccagggaaggggctggagtgggtctcatccattagtgatagtggtacttacatatactacgcagactcagtgaagggccgattctccatctccagagacaacgccaagaactcactgtatctgcaaatgaacagcctgagagccgaggacacggcgatctattactgtgcgcgagatccctattgtagtagtaacacctgcttatttgactactggggccagggaaccctggtcaccgtctcctca

SEQ ID NO: 9203 - DNA, 283 bp, Homo sapiens
  source 1..283: mol_type = other DNA
tgcagcctctggactcaccttcagtaggtatcggatgagttgggtccgccaggctccagggaaagggctggagtgggtggccaacataaaccaggatggaagagagaaaaactacatggactctgtgaagggccgattcaccatctccagagacaatgccaagagctcactgtttctgcaaatgagcagcctgagagtcgaggacacggccttatattactgtgcgagagatgaagagcagctgaacgtctggggccaagggaccacggtcaccgtctcctca

SEQ ID NO: 9204 - DNA, 283 bp, Homo sapiens
  source 1..283: mol_type = other DNA
tgcagcctctggattcacctttcgtaattttcggatgagctgggtccgccaggctccagggaaggggctggagtgggtggccaacataaaacaagatggcactgagaaaaactatgtggactctgtgaagggccgattcgccatctccagagacaacgccaagaactcgctgtatttgcaaatgaacagcctgagagccgaggacacggctgtctattactgtgcgagagacgaggagcaactgaacgtctggggccaagggaccacggtcaccgtctcttca

SEQ ID NO: 9205 - DNA, 283 bp, Homo sapiens
  source 1..283: mol_type = other DNA
tgcagcctctggattcacctttagaagcttttggatgagctgggtccgccaggctccagggaaggggctggagtgggtggccaacataaagcaagatggaagtgagaaaaactatgtggactctgtgaagggccgattcaccatctccagagacaacgccaagaactcactgtatttgcaaatgaacagcctgagagccgaggacacggctgtctattactgtgcgagagacgaggagcagttgaacgtctggggccaagggaccacggtcaccgtctcttca

SEQ ID NO: 9206 - DNA, 283 bp, Homo sapiens
  source 1..283: mol_type = other DNA
tgaagcctccggatttacctcgagtaactttgtgatgagttgggtccgccaggcgccagggaaggggctggagtgggtggccaacataaagcaaaatggacgtgagaggaactatgtggactctgtgaagggccgattcaccatctccagagacaacgctaagaactcactgtatctgcaaatgaatagcctgagagccgaggacacggctgtctattactgtgcgagagacgaggagcaactgaacgtctggggccaagggaccacggtcaccgtctcctca

SEQ ID NO: 9207 - DNA, 283 bp, Homo sapiens
  source 1..283: mol_type = other DNA
tgcagcctccggattcacttctagtaactatgtgatgagttgggtccgccaggcaccagggaaggggctggagtgggtggccaacataaagcaaaatggaggtgagaaaaactatgtggactctgtgaagggccgattcaccatctccagagacaacgccaagaactcactgtatctgcaaatgaacagcctgagaggcgaggacacggctgtctattactgtgcgagagacgaggagcagctgaacgtctggggccaagggaccacggtcaccgtctcctca

SEQ ID NO: 9208 - DNA, 283 bp, Homo sapiens
  source 1..283: mol_type = other DNA
tgaagcctccggatttacttcgagtaatttcgtgatgagttgggtccgccaggcgccagggaaggggctggagtgggtggccaacataaagcaaaatggacgtgagaggaactatgtggactctgtgaagggccgattcaccatctccagagacaacgctaagaactcactgtatctgcaaatgaatagcctgagagccgaggacacggctgtctattactgtgcgagagacgaggagcaactgaacgtctggggccaagggacgacggtcaccgtctcctca

SEQ ID NO: 9209 - DNA, 283 bp, Homo sapiens
  source 1..283: mol_type = other DNA
tgtagcctctggattcacatttagtaactttcggatgagctgggtccgccaggctccggggaaggggctggagtgggtggccaatataaagcaagatggaagtgagaaaaattatgtggactctgtaaagggccgattcaccatctccagagacaacgccaagaagttactgtatctacaaatgaacagcctgagaggcgaggacacggctgtgtattactgtgcgagagacgaggagcagctgaacgtctggggccgggggaccacggtcaccgtctcctca

SEQ ID NO: 9210 - DNA, 283 bp, Homo sapiens
  source 1..283: mol_type = other DNA
tgcaggctctggatttaccttcagtaggttttggatgagctgggtccgccaggctccaggtaaggggctggagtgggtggccaacataaagaaagatggaggcgagaaaaactatgtggactctgtgaagggccgattcaccatctccagagacaacgccaagaactcactgtatctgcaaatgaacagcctgagagtcgaggacacggctgtctattactgtgcgagagacgaggagcagctgaacgtctggggccaagggaccacggtcaccgtctcctca

SEQ ID NO: 9211 - DNA, 283 bp, Homo sapiens
  source 1..283: mol_type = other DNA
tgtaggctctggattcacctttagtaagtttcggatgagctgggtccgccaggctccagggaaggggctggagtgggtggccaatataaagcaagatggaagtgagaaaaattatgtggactctgtgaagggccgattcaccatctccagagacaacgccaagaactcactgtatctacaaatgaacagcctgagagccgaggacatggctgtctattactgtgcgagagacgaggagcagctgaacgtctggggccaggggaccacggtcatcgtctcctca

SEQ ID NO: 9212 - DNA, 283 bp, Homo sapiens
  source 1..283: mol_type = other DNA
tgcagcctccggattcacttctagtaattattggatgagttgggtccgccaggctccagggaaggggctggagtgggtggccaacataaagcaaaatggagccgagaagaactatgtggactctgtgaagggccgattcaccatctccagggacaacgccaagaactcactgtatctgcaaatgaacagcctgagagtcgaggacacggctgtctattactgtgcgagagacgaggagcagctgaacgtctggggccaagggaccacggtcaccgtctcctca

SEQ ID NO: 9213 - DNA, 283 bp, Homo sapiens
  source 1..283: mol_type = other DNA
tgcagcctctggattcagctttagtaggtacaggatgagctgggtccgccaggctccagggaaggggctggagtgggtggccaacataaagcaagatggaagtgagaaaaactatgtggactctgtgaagggccgagtcaccatctccagagacaacgccaagaactcactgtatctgcaaatgaacagcctgggagtcgaggacacggctatatattactgtgcgagagacgaggagcagctgaacgtctggggccaagggaccacggtcaccgtctcctca

SEQ ID NO: 9214 - DNA, 283 bp, Homo sapiens
  source 1..283: mol_type = other DNA
tgtagcctctggattcacctttcgtaactttcggatgagctgggtccgccaggctccagggaaggggctggagtgggtggccaatataaagcaagatggaagtgagaaatattatgtggactctgtgaagggccgattcaccatctccagagacaaccccaagaactcactgtacctgcaaatgaacagcctgagagcggaggacacggctgtttatttctgtgcgagagacgaggaacagctgaacgtctggggccaggggaccacggtcaccgtctcctca

SEQ ID NO: 9215 - DNA, 283 bp, Homo sapiens
  source 1..283: mol_type = other DNA
tgtaggctctggattcacctttagaagttattggatgagctgggtccgccaggctccagggaaggggctggagtgggtggccaacataaagcaagatggaagtgagaaaaactatgtggactctgtgaagggccgattcaccatctccagagacaacgccaggaactcactgtttttgcaaatgaacagcctgagagccgaggacacggctgtgtattactgtgcgagagacgaggagcagctgaacgtctggggccaagggaccacggtcaccgtctcctca

SEQ ID NO: 9216 - DNA, 283 bp, Homo sapiens
  source 1..283: mol_type = other DNA
tgcagcctctggattcacctttcgtagctttcggatgagctgggtccgccaggctccagggaaggggctggagtgggtggccaacataaaacaagatggcactgagaaaaactatgtggactctgtgaagggccgattcgccatctccagagacaacgccaagaactcactgtatttgcagatgaacagcctgagagccgaggacacggctgtctattactgtgcgagagacgaggagcaactgaacgtctggggccaagggaccacggtcaccgtctcttca

SEQ ID NO: 9217 - DNA, 283 bp, Homo sapiens
  source 1..283: mol_type = other DNA
tgtagcctctggactcacctttagtagatatcggatgagctgggtccgccaggctccagggaaggggctggagtgggtggccaacataaagcaagatggaagtgagaaaaactatgtggactctgtgaggggccgattcaccatctccagagacaacgccaagaactcagtgtatctgcaaatgaacagcctgagagccgaggacacggctatgtattactgtgcgagagacgaggagcagctgaacgtctggggccaagggaccacggtcaccgtctcctca

SEQ ID NO: 9218 - DNA, 283 bp, Homo sapiens
  source 1..283: mol_type = other DNA
tgaagcctctggattcacctttcgaaactttcggatgagttgggtccgccaggctccagggcagggcctggagtgggtggccaacataaaacaagatggcactgagaaaaactatgtggactctgtgaggggccgattcgccatctccagagacaacgccaggaatttactgtatttgcagatgaacagcctgagagtcgaggacacggctgtttattactgtgcgagagacgaggagcaactgaatgtctggggcccagggaccacggtcaccgtctcctca

SEQ ID NO: 9219 - DNA, 283 bp, Homo sapiens
  source 1..283: mol_type = other DNA
tgtagcctctggattcacttttagaaactttcggatgagctgggtccgccaggctccagggaaggggctggagtgggtggccaatataaagcaagatggaagtgagagatattatgtggactctgtgaagggccgattcaccatctccagagacaacgccaagaactcactgtatctgcaaatgaacagcctgagagtggaggacacggctgtgtatttctgtgcgagagacgaggagcagctgaacgtctggggccaggggaccacggtcaccgtctcctca

SEQ ID NO: 9220 - DNA, 283 bp, Homo sapiens
  source 1..283: mol_type = other DNA
tgtaggctctggattcacctttagaagttattggatgagctgggtccgccaggctccagggaaggggctggagtgggtggccaacataaagcaagatggaagtgagaaaaactatgtggactctgtgaagggccgattcaccatctccagggacaacgccaggaactcactgtttttgcaaatgaacagcctgagagtcgaggacacggctctatattattgtgcgagagacgaggagcagctgaacgtctggggccaagggaccatggtcaccgtctcctca

SEQ ID NO: 9221 - DNA, 283 bp, Homo sapiens
  source 1..283: mol_type = other DNA
tgcagcctcaggactcacctttagaagttatcgaatgagctgggtccgccaggctcctgggaaggggctggagtgggtggccaacataaagcaggatggaagtgagaaaaactatgcggactccgtgaagggccgattcaccatctccagagacaacgccaagaactcagtctatctgcaaatgaacagcctgagagtcgaggacacggctttctattactgtgcgagagacgaggagcagctgaacgtctggggccaagggaccacggtcaccgtctcctca

SEQ ID NO: 9222 - DNA, 283 bp, Homo sapiens
  source 1..283: mol_type = other DNA
tgaagcctccggattcacttctagtaattattggatgagttgggtccgccaggctccagggaaggggctggagtgggtggccaacataaagcaaaatggaggtgagaaaaactatgtggactctgtgaagggccgattcaccatctccagagacaacgccaagaactcactgtatttgcaaatgaacagcctgagagccgaggacacgggtgtctattattgtgcgagagacgaggagcagctgaacgtctggggccaagggaccacggtcaccgtctcctca

SEQ ID NO: 9223 - DNA, 283 bp, Homo sapiens
  source 1..283: mol_type = other DNA
tgcagcctccggattcacttctagtaactatgtgatgagttgggtccgccaggcaccagggaaggggctggagtgggtggccaacataaagcaaaatggaggtgagaaaaactatgtggactctgtgaagggccgattcaccatctccagagacaacgccaagaactcactgtatctgcaaatgaacagcctgagagccgaggacacggctgtctattactgtgcgagagacgaggagcagctgaacgtctggggccaagggaccacggtcaccgtctcctca

SEQ ID NO: 9224 - DNA, 283 bp, Homo sapiens
  source 1..283: mol_type = other DNA
cgcagtctctgggttaaccattagtagatattatatgagttgggtccgccaggctccagggaaggggctggagtgggtggccaacataaagcaagatggaagagagaaaaactatgtggacgctgtgaggggccgattcaccatctccagagacaacgcccagaactcactgcatctgcaaatgaacagcctgagagtcgaggacacggctgtgtattactgtgcgagagacgaggagcagctgaacgtctggggccaagggaccacggtcaccgtctcctca

SEQ ID NO: 9225 - DNA, 283 bp, Homo sapiens
  source 1..283: mol_type = other DNA
tgtagcctctggattcacatttagtaactttcggatgagctgggtccgccaggctccggggaaggggctggagtgggtggccaatataaagcaagatggaagtgagaaaaattatgtggactctgtaaagggccgattcaccatctccagagacaacgccaagaacttattgtatctacaaatgaacagcctgagaggcgcggacacggctgtgtattactgtgcgagagacgaggagcagctgaacgtctggggccgggggaccacggtcaccgtctcctca

SEQ ID NO: 9226 - DNA, 283 bp, Homo sapiens
  source 1..283: mol_type = other DNA
tgcagcctctggattcacctttagtaggttttggatgagttgggtccgccaggctccagggaagggactggagtgggtggccaacataaagcaagatggaagtgagaaatactatgtggactctgtgaagggccgattcaccatctcccgagacaacaccaagaattcactctatctgcaaatgagtagcctgagagccgaagactcggccgtgtattactgtgcgagagatgaggagcagttgaacgtctggggccaagggaccacggtcaccgtctcctca

SEQ ID NO: 9227 - DNA, 283 bp, Homo sapiens
  source 1..283: mol_type = other DNA
tgcagcctctggattcacccttagtaggttttggatgagctgggtccgccaggctccagggaaggggctggagtgggtggccaacataaaacaagatggaagtgagaaatactatgtggactctgtgaagggccgattcaccatctccagagacaacgccaagaactcactatatctgcaaatgaacagcctgagagccgaggacacggccgtgtattactgtgcgagagatgaggagcagctgaacgtctggggccaagggaccacggtcaccgtctcctca

SEQ ID NO: 9228 - DNA, 283 bp, Homo sapiens
  source 1..283: mol_type = other DNA
tgcagcctctggattcacccttagtaggttttggatgagctgggtccgccaggctccagggaaggggctggagtgggtggccaacataaaacaagatggaagtgagaaatactatgtggactctgtgaagggccgattcaccatctccagagacaacggcaagaactcactatatctgcaaatgaacagcctgcgagccgaggacacggccgtgtattactgtgcgagagatgaagagcagctgaacgtctggggccaagggaccacggtcaccgtctcctca

SEQ ID NO: 9229 - DNA, 283 bp, Homo sapiens
  source 1..283: mol_type = other DNA
tgcagcctctggattcacctttagtaggttttggatgagttgggtccgccaggctccagggaaggggctggagtgggtggccaacattaagcaagatggaggtgagaaatattatgtggactctgtgaagggccgattcaccatctccagagacaacgccaagaattcactgtatctgcaaatgagtagcctgcgagccgaggacacggccgtttattattgtgcgagagatgaggagcagctgaacgtctggggccaagggaccacggtcaccgtctcctca

SEQ ID NO: 9230 - DNA, 283 bp, Homo sapiens
  source 1..283: mol_type = other DNA
tgcagcctctggattcacctttagtaggttttggatgagctgggtccgccaggctccagggaaggggctggagtgggtggccaacataaagcaagatggaagtgagaaatactatgtggactctgtgaagggccgattcaccatctccagagacaacgccaagaattcactatatctgcaaatgagtagcctgagagccgaggacacggccatatattactgtgcgagagatgaggagcagctgaacgtctggggccaagggacaacggtcaccgtctcctca

SEQ ID NO: 9231 - DNA, 283 bp, Homo sapiens
  source 1..283: mol_type = other DNA
tgcagcctctggattcacccttagaagcttttggatgagctgggtccgccaggctccagggaaggggctggagtgggtggccaacataaaacaagatggaagtgagaaatactatgtggactctgtgaagggccgattcaccatctccagagacaacgccaagaactcactatatctgcaaatgaacagcctgagagccgaggacacggccgtgtattactgtgcgagagatgaggagcagctgaacgtctggggccaagggaccacggtcaccgtctcctca

SEQ ID NO: 9232 - DNA, 283 bp, Homo sapiens
  source 1..283: mol_type = other DNA
tgcagcccctggattcacccttagtaggttttggatgagttgggtccgccaggctccagggaaggggctggagtgggtggccaacataaaacaagatggaagtgagagatactatgtggactctgtgaagggccgattcaccatctccagagacaacgccaagaactcactatatctgcaaatgaacagcctgagagccgaggacacggccgtgtattactgtgcgagagatgaggagcagctgaatgtctggggccaagggaccacggtcaccgtctcctca

SEQ ID NO: 9233 - DNA, 283 bp, Homo sapiens
  source 1..283: mol_type = other DNA
tgcagcctccggattcacccttagtaggttttggatgagctgggtccgccaggctccagggaaggggctggagtgggtggccaacataaaacaagatggaagtgagaaaaactatgtggactctgtgaagggccgattcaccattttcagagacaacgccaagaactcactatatctgcaaatgaacagcctgagagccgaggacacggccgtgtattactgtgcgagagatgaggagcagctgaacgtctggggccaagggaccacggtcaccgtctcctca

SEQ ID NO: 9234 - DNA, 283 bp, Homo sapiens
  source 1..283: mol_type = other DNA
tgcaggctatggattcactcttagtaggttttggatgagctgggtccgccaggctccagggaaggggctggagtgggtggctaatataaaacaagatggaagtgagagatactatgtggactctgtgaagggccgattcaccatctccagagacaacgccaagaattcattatatctgcaaatgaacagcctgagagccgaggacacggccgtgtattactgtgcgagagatgaggagcagctgaacgtctggggccaagggaccacggtcaccgtctcctca

SEQ ID NO: 9235 - DNA, 283 bp, Homo sapiens
  source 1..283: mol_type = other DNA
tgcagcctctggattcacccttagtaggttttggatgagttgggtccgccaggctccagggaaggggctggagtgggtggccaacataaaacaagatggaagtgagaaatactatgtggactctgtgaagggccgattcaccatctccagagacaacgccaagaactcactatatctgcaaatgaacagcctgagagccgaggacacggccgtgtattactgtgcgagagatgaggagcagctgaacgtctggggccaagggaccacggtcaccgtctcctca

SEQ ID NO: 9236 - DNA, 283 bp, Homo sapiens
  source 1..283: mol_type = other DNA
tgaagcctctggattcacctttcgaaactttcggatgagttgggtccgccaggctccagggaaggggctggagtgggtggccaacataaaacaagatggcactgagaaaaactatgtggactctgtgaagggccgattcgccatctccagagacaacgccaggaactcactgtatttgcagatgaacagtctgagagtcgaggacacggctgtttattactgtgcgagagacgaggagcaactgaacgtctggggcccagggaccacggtcaccgtctcctca

SEQ ID NO: 9237 - DNA, 283 bp, Homo sapiens
  source 1..283: mol_type = other DNA
tgtagcctctggattcacctttagtaactttcggatgagctgggtccgccaggctccagggaaggggctggagtgggtggccaatataaagcaagatggaagtgagaaatattatgtggactctgtgaagggccgattcaccatctccagagacaacgccaagaactcactgtatctacaaatgaacagcctgagagccgaggacacggctgtgtattactgtgcgagagacgaggagcagctgaacgtctggggccaggggaccacggtcaccgtctcctca

SEQ ID NO: 9238 - DNA, 283 bp, Homo sapiens
  source 1..283: mol_type = other DNA
tgtaggctctggattcacctttagaagttattggatgagctgggtccgccaggctccagggaaggggctggagtgggtggccaacataaagcaagatggaagtgagaaaaactatgtggactctgtgaagggccgattcaccatctccagggacaacgccaggaactcagtgtttttgcaaatgaacagcctgagagtcgaggacacggctctatattattgtgcgagagacgaggagcagctgaacgtctggggccaagggaccatggtcaccgtctcctca

SEQ ID NO: 9239 - DNA, 283 bp, Homo sapiens
  source 1..283: mol_type = other DNA
tgcagcctctggactcacctttagtaggtattacatgagttgggtccgccaggctccagggaaagggctggagtgggtggccaacataaaacaggatggaagtgagaaaaattatcaggactctgtgaagggccgattcaccatctccagagacaacgccaagaactcactgtatctgcaaatgaacagcctgagagccgaggacacggccgtatattactgtgcgagagatgaagagcagctgaacgtctggggccaagggaccacggtcaccgtctcctca

SEQ ID NO: 9240 - DNA, 289 bp, Homo sapiens
  source 1..289: mol_type = other DNA
tgcagtctctggactcactttcactaacgcctggatgagctgggtccgccagactccagggaaggggctggagtgggttggccgtattaaaagcaagactaatggtgggacagcagactacgctacacccgtgaaaggcagattcaccatctcaagagatgattcaaaaaacacgctgtatctgcaaatgaacagcctgaaaaccgaggacacagccgtctattactgtaacacagatagtctggtacaaaactactggggccagggaaccctggtcaccgtctcctca

SEQ ID NO: 9241 - DNA, 289 bp, Homo sapiens
  source 1..289: mol_type = other DNA
tgcagtctctggactcactttcactaacgcctggatgggctgggtccgccagactccagggaaggggctggagtgggttggccgtattaaaagcaagactaatggtgagacagcagactacgctacacccgtgaaaggcagattcaccatctcaagagatgattcagaaaacacgctatatctgcaaatgaacagcctgaaaaccgaggacacagccgtctattactgtaacacagatagtctggtacaaaactactggggccagggaaccctggtcaccgtctcctca

SEQ ID NO: 9242 - DNA, 289 bp, Homo sapiens; identical to SEQ ID NO: 9240
  source 1..289: mol_type = other DNA

SEQ ID NO: 9243 - DNA, 289 bp, Homo sapiens
  source 1..289: mol_type = other DNA
cgcagtctctggattcaccttcagtgacgcctggatgagctgggtccgccaggctccagggaaggggctggagtgggtcggccgtattaaaaacaaaattaatggtgagacaacagactatggtgcccccgtgaaaggcagattcaccatctcaagagatgattcaaaaaacacactgtatctgcaaatgaccagcctgaaaagcgaagacacagccatatattactgtaacacagattcgctggtacagaactactggggccagggaatcctggtcaccgtctcctca

SEQ ID NO: 9244 - DNA, 289 bp, Homo sapiens
  source 1..289: mol_type = other DNA
cgcagtctctggattcaccttcagtgacgcctggatgggctgggtccgccaggctccagggaaggggctggagtgggtcggccgtattaaaaacaaaattaatggtgagacaacagactatggtgcccccgtgaaaggcagattcaccatctcaagagatgattcaaaaaacacactgtatctgcaaatgaccagcctgaaaagcgaagacacagccatatattactgtaacacagattccctggtacagaactactggggccagggaatcttggtcaccgtctcctca

SEQ ID NO: 9245 - DNA, 289 bp, Homo sapiens
  source 1..289: mol_type = other DNA
tgcagcctctggactcactttcagtaacgcctggatgagctgggtccgccaggctccagggaaggggctggagtgggttggccgtattaaaagcaaaactgatgctgggacaacagactacggtgcacccgtgaaaggcagattcactatctcaagagatgattcaaaaaacatgctgtatctgcaaatgaacagcctgaaaaccgaggacacagccgtgtattactgtaacacagatagtctggtacaaaactactggggccagggaaccctggtcaccgtctcctca

SEQ ID NO: 9246 - DNA, 271 bp, Homo sapiens
  source 1..271: mol_type = other DNA
tgcagcctctggattcacctttagtacctattggatgaactgggtccgccaggctccagggaaagggctggagtgggtggcccacataaaggaagatggaaatgagaaagagtatgtggactctgtgaagggccgattcaccatctccagagacaacgccaagaactccctgtatctgcaaatgaacagcttgagagtcgaggacacggccatttattattgtgcgagatacgacttctggggccagggaatcctggtcaccgtctcctca

SEQ ID NO: 9247 - DNA, 271 bp, Homo sapiens
  source 1..271: mol_type = other DNA
tacagcctctggattcacctttagtagttattggatgaactgggtccgccaggctccagggaaggggctggagtgggtggccagcatcaatcaacatggaagtgagaaatactatgtagactctgtgaagggccgattcaccgtctctagagacaacgccaagaactcactgtatctgcaaatgaacagcctgagagtcgaagacacggctgtctattactgtgcgaggtacgacttttggagccagggaatcctggtcaccgtctcctca

SEQ ID NO: 9248 - DNA, 276 bp, Homo sapiens
  source 1..276: mol_type = other DNA
gcttctggttacccttttaccagctatggtatcacctgggtgcgacaggcccctggacaagggcttgagtggatgggatggatcagcacttacaatggtaacacaaactatgcacagaagtttcagggcagagtcaccatgaccacagaaacatccacgaccacagcctacatggagctgaggagcctgagatctgacgacacggccgtgtattactgtgcgagacgtaattattgtgactactggggccagggaaccctggtcaccgtctcctca

SEQ ID NO: 9249 - DNA, 276 bp, Homo sapiens
  source 1..276: mol_type = other DNA
gcctctggttacacctttaccagttatggtatcacttgggtgcgacaggcccctggacaagggcttgagtggatggggtggatcagcccttacaatggtaaaacattgtatgcacagaagttccagggcagagtcaccatgaccacagacacatccacgaccacaatctacatggaactgaggagcctgatatctgacgacacggccctatattattgtgcgagacggaactactgtgactactggggccagggaaccctggtcaccgtctcctca

SEQ ID NO: 9250 - DNA, 301 bp, Homo sapiens
  source 1..301: mol_type = other DNA
cactgtctctggtggctccatcagcagtagtagtagcagttactactggggctggatccgccagcccccaggtaaggggctggagtggattgggagtatctattatagtgggagcacctactacaactcgtccctcaagagtcgagtcaccatatccgtagacacgtccaagaaccagttctccctgaagctgagctctgtgaccgccgcagacgcggctgtgtattactgtgcgagactttggttgggtttacgaccacccgactactggggccagggaaccctggtcaccgtctcctca

SEQ ID NO: 9251 - DNA, 301 bp, Homo sapiens
  source 1..301: mol_type = other DNA
cactgtctctggtggctccatcagcagtagcagtagtagttactactggggctggatccgccagcccccagggaaggggctggagtggattgggagtatctattatagtgggagcacctactacaacccgtccctcaagagtcgagtcaccatatccgtagacacgtccaagaaccagttctccctgaagctgagctctgtgaccgccgcagacacggctgtgtattactgtgcgagactttggttgggtttacgaccacccgactactggggccagggaaccctggtcaccgtctcctca

SEQ ID NO: 9252 - DNA, 295 bp, Homo sapiens
  source 1..295: mol_type = other DNA
cactgtctctagtggctccatcagcagtagtagttactactggggctggatccgccagcccccagggaaggggctggagtggattgggagtattttttatagtgggagcacctactacaacccgtccctcaagagtcgagtcaccatatccgtagacacgtccaagaggcagttctccctgaagctgaactctgtgaccgccgcagacacggctgtgtactactgtgcgagactatggctcggcctcagacctcctgactactggggccagggaaccctggtcaccgtctcctca

SEQ ID NO: 9253 - DNA, 295 bp, Homo sapiens; identical to SEQ ID NO: 9252
  source 1..295: mol_type = other DNA

SEQ ID NO: 9254 - DNA, 295 bp, Homo sapiens
  source 1..295: mol_type = other DNA
cactgtctctggtggctccctcagcagtagcagttactactggggctggatccgccagcccccagggaaggggctggagtggattgggagtatctattatagtgggagcacctactacaacccgtccctcaagagtcgagtcaccatatccgtagacacgtccaagaaccagttctccctgaagctgagctctgtgaccgccgcagatacggctgtgtattactgtgcgagactttggctgggtttacgaccgcccgactactggggccagggaaccctggtcatcgtctcctca

SEQ ID NO: 9255 - DNA, 288 bp, Homo sapiens
  source 1..288: mol_type = other DNA
aagggttctggatacatctttaccaactactggatcgcctgggtgcgccagatgcccgggaaagacctggagtggatgggaaacatcaaaactgctgactccaccaccacatacagcccgtctttccaaggccaggtcaccatgtccgtcgacaagtccatcagtaccgcctacctgcagtggagcagcctgaaggcctcggacaccgccatgtattactgtgcgagacattggagtagtagctggtttggctactggggccagggaacccgggtcaccgtctcctca

SEQ ID NO: 9256 - DNA, 288 bp, Homo sapiens
  source 1..288: mol_type = other DNA
aagggttctggatacatctttaccaactactggatcgcctgggtgcgccagatgcccgggaaagacctggagtggttgggaaacatcaaaactgctgactccaccaccacgtacagcccgtctttccaaggccaggtcaccatgtccgtcgacaagtccatcagtaccgcctacctgcagtggagcagcctgaaggcctcggacaccgccatgtattactgtgcgagacattggagtagtagctggtttggctactggggccagggaacccgggtcaccgtctcctca

SEQ ID NO: 9257 - DNA, 288 bp, Homo sapiens
  source 1..288: mol_type = other DNA
aagggttctggatacagctttaccaactactggatcgcctgggtgcgccagatgcccgggaaaggcctggagtggatgggaaacatccaacctgctgactccaccaccacagacagcccgtctttccaaggccaggttaccatgtcggtcgacaagtccatcagcaccgcctacctgcagttgagcagcctgaaggcctcggacaccgccatgtattactgtgcgagacattggagtagtagttggtttggctactggggccagggaacccgggtcaccgtctcctca

SEQ ID NO: 9258 - DNA, 288 bp, Homo sapiens
  source 1..288: mol_type = other DNA
aagggttctggatacagttttaccaactactggatcgcctgggtgcgccagatgcccgggaaaggcctggaatggatggggaacatcaatcctgctgactctatcaagatatacagtccgtccttccaaggccaggtcaccatctcagccgacaagtccatcagcaccgcctaccttcaatggaacagcctgaaggccgcggacaccgccatgtattactgtgcgagacattggagcagtagttggtttggctactggggccagggaaccccggtcaccgtctcctca

SEQ ID NO: 9259 - DNA, 288 bp, Homo sapiens
  source 1..288: mol_type = other DNA
aagggttctggatacagttttaccagctactggatcgcctgggtgcgccagatgcccgggaaaggcctggaatggatggggatcatcaatcctgctgactctaataagatatacagtccgtccttccaaggccaggtcaccatctcagccgacaagtccatcagcaccgcctaccttcaatggagcagcctgaaggccgcggacaccgccatgtattactgtgcgagacattggagcagtagttggtttggctactggggccagggaaccccggtcaccgtctcctca

SEQ ID NO: 9260 - DNA, 288 bp, Homo sapiens
  source 1..288: mol_type = other DNA
aagggttctggatacagttttaccagctactggatcgcctgggtgcgccagatgcccgggaaaggcctggaatggatggggaacatcaatcctgctgactctaataaggtatacagtccgtccttccaaggccaggtcaccatctcagccgacaagtccatcagcaccgcctaccttcaatggaacagcctgaaggccgcggacaccgccatgtattactgtgcgagacattggagcagtagttggtttggctactggggccagggaaccccggtcaccgtctcctca

SEQ ID NO: 9261 - DNA, 288 bp, Homo sapiens
  source 1..288: mol_type = other DNA
aagacttctggatacagcttcaccgactattggatcgcctgggcgcgccagacgcccgggaaaggcctagagtggatggggaacatcaatcctgcaaattttgatatcacatacagtccgtccttcgaaggccaggtcaccatctcagtcgacacggccatcagttccgcctacttccacttacacagcctggaggcctcggacaccggcacttattattgtgcgagacattggagcagtagttggttcggttactggggccagggaaccctggtctccgtctcctca

SEQ ID NO: 9262 - DNA, 288 bp, Homo sapiens
  source 1..288: mol_type = other DNA
aagacttctggatacagctttaccggctactggatcgcctgggcgcgccagacgcccgggaaaggcctagagtggatggggaacatcaatcctgcaaattttgatatcacatacagtccgtccttccaaggccaggtcaccatctcagtcgacacgtccatcagtaccgcctacctgcactggaatagcctggaggcctcggacaccggcatttattattgtgcgagacattggagcagtagttggttcggttactggggccagggaaccctggtcaccgtctcctca

SEQ ID NO: 9263 - DNA, 288 bp, Homo sapiens
  source 1..288: mol_type = other DNA
cagacttctggatacagctttagcgactactggatcgcctgggcgcgccagacgcccgggaaaggcctagagtggatggggaacatcaaccctgcaaattttgatattagatacagtccgtccttccaaggccaggtcaccatctcagtcgacacgtccatcagtaccgcctacctacactggagtagcctggaggcctcggacagcggcatttattattgtgcgagacattggagcagtagttggttcggttactggggccagggaaccctggtcaccgtctcctca

SEQ ID NO: 9264 - DNA, 288 bp, Homo sapiens
  source 1..288: mol_type = other DNA
aagggttctggatacagttttaccagctactggatcgcctgggtgcgccagatgcccgggaaaggcctggaatggatggggaacatcaatcctgctgactctaataagatatacagtccgtccttccaaggccaggtcaccatctcagccgacaagtccatcagtaccgcctaccttcaatggaacagcctgaaggccgcggacaccgccatgtattactgtgcgagacattggagcagtagttggtttggctactggggccagggaaccccggtcaccgtctcctca

SEQ ID NO: 9265 - DNA, 288 bp, Homo sapiens
  source 1..288: mol_type = other DNA
aagacttctggatacagctttagcgactactggatcgcctgggcgcgccagacgcccgggaaaggcctagagtggatggggaacatcaatcctgcaaattttgatattagatacagtccgtccttccaaggccaggtcaccatctcagtcgacacgtccatcagtaccgcctacctacactggagtagcctggaggcctcggacagcggcctttattattgtgcgagacattggagcagtagttggttcggttactggggccagggaaccctggtcaccgtctcctca

SEQ ID NO: 9266 - DNA, 288 bp, Homo sapiens
  source 1..288: mol_type = other DNA
aaggcttctggatacatctttaccaactactggatcgcctgggtgcgccagatgcccgggaaagacctggagtggttgggaaacatcaaaactgctgactccaccaccacgtacagcccgtctttccaaggccaggtcaccatgtccgtcgacaagtccatcagtaccgcctacctgcagtggagcagcctgaaggcctcggacaccgccatgtattactgtgcgagacattggagtagtagctggtttggctactggggccagggaacccgggtcaccgtctcctca

SEQ ID NO: 9267 - DNA, 288 bp, Homo sapiens
  source 1..288: mol_type = other DNA
aagggttctggatacagctttaccaactactggatcgcctgggtgcgccagatgcccgggaaagacttggagtggatgggaaacatcaaacctgctgactccaccaccacatacagcccgtctttccaaggccaggtcaccatgtccgtcgacaagtccatcagtaccgcctatttgcagtggagcagcctgaaggcctcggacaccgccatgtattactgtgcgagacattggagtagtagttggtttggctactggggccagggaacccgggtcaccgtctcctca

SEQ ID NO: 9268 - DNA, 305 bp, Homo sapiens
  source 1..305: mol_type = other DNA
ccatctccggggacagtgtctctagcaacagtgctacttggagctggatcaggcagtccccatcgagaggccttgagtggctgggaaggacatattacaggtccaagtggtctattgagtatgcaccatctgtgaaaagtcgaataaccatcaacccagacacatccaagaaccagttctccctgcagttgaactctgtgactcccgacgacacggctgtctattactgtgcaagagaggactggaaggacggggatgatgcttttgatatctggggccaagggacaatggtcaccgtctcttcg

SEQ ID NO: 9269 - DNA, 305 bp, Homo sapiens
  source 1..305: mol_type = other DNA
ccatctccggggacagtgtctctagtaacagtggtacttggagttgggtcaggcagtccccatcgagaggccttgagtggctgggaaggacttactacaggtccaggtgggcttgggaatatgcagtttctgtgaaaagtcgaatatccattaatccagacacagccaagaaccagttctccctgcagttgaactctgtgactcccgaggacacggctgtgtattattgtgcaagagaggactggaaggacggagatgatgcttttgacatctggggccaagggacagtggtcaccgtctcttca

SEQ ID NO: 9270 - DNA, 305 bp, Homo sapiens
  source 1..305: mol_type = other DNA
ccatctccggggacagtgtctctagcaacagtgctacttggagctggatcaggcagtccccatcgagaggccttgagtggctgggaaggacatattacaggtccaagtggtctattgagtatgcaccatctgtgaaaagtcgaatagccatcaacccagacacatccaagaaccagttctccctgcagttgaactctgtgactcccgacgacacggctgtctattactgtgcaagagaggactggaaggacggggatgatgcttttgatatctggggccaagggacaatggtcaccgtctcttca

SEQ ID NO: 9271 - DNA, 305 bp, Homo sapiens
  source 1..305: mol_type = other DNA
ccatctccggggacagtgtctctagcaacagtgctacttggagctggatcaggcagtccccatcgagaggccttgagtggctgggaaggacatattacaggtccaggtggtctattgagtatgcaccatctgtgaaaagtcgaataaccatcaattcagacacatccaagaaccagttctccctgcagttgaactctgtgactcccgacgacacggctgtctattactgtgcaagagaggactggaaggacggggatgatgcttttgatatctggggccaagggacaatggtcaccgtctcttcg

SEQ ID NO: 9272 - DNA, 305 bp, Homo sapiens
  source 1..305: mol_type = other DNA
ccatctccggggacagtgtctctagcaacagtgctacttggagctggatcaggcagtccccatcgagaggccttgagtggctgggaaggacatattacaggtccaagtggtctattgagtatgcaccatctgtgaaaagtcgaataaccatcaacccagacacatccaagaaccagttctccctgcagttgaactctgtgactcccgacgacacggctgtctattactgtgcaagagaggactggaaggacggggatgatgcttttgatatctggggccaagggacaatggtcaccgtctcttca

SEQ ID NO: 9273 - DNA, 305 bp, Homo sapiens
  source 1..305: mol_type = other DNA
ccatctccggggacagtgtctctagcaccagtgctacttggagctggatcaggcagtccccatcgagaggccttgagtggctgggaaggacatactacaggtccaagtggtctaatgattatgcagtatctgtgaaaagtcgaataaccatcaacccagacacattcaagaaccagttctccctgcagctgaactctgtgactcccgaggacacggctgtgtattactgtgcaagagaggactggaaggacggggatgatgcttttgatatctggggccaagggacaatggtcaccgtctcttta

SEQ ID NO: 9274 - DNA, 305 bp, Homo sapiens
  source 1..305: mol_type = other DNA
ccatctccggggacagtgtctctagtaacagtggtacttggagttgggtcaggcagtccccatcgagaggccttgagtggctgggaaggacttactacaggtccaggtgggcttgggaatatgcagcttctgtgaaaagtcgaatatccattaatccagacacagccaagaaccagttctccctgcagttgaactctgtgactcccgaggacacggctgtgtattattgtgcaagagaggactggaaggacggagatgatgcttttgacatctggggccaagggacagtggtcaccgtctcttca

SEQ ID NO: 9275 - DNA, 305 bp, Homo sapiens; identical to SEQ ID NO: 9272
  source 1..305: mol_type = other DNA

SEQ ID NO: 9276 - DNA, 305 bp, Homo sapiens
  source 1..305: mol_type = other DNA
ccatctccggggacagtgtctccagcaacagtgctacttggagctggatcaggcagtccccatcgagaggccttgagtggctgggaaggacatactacaggtccaagtggtcttttgaatatgcaccatctgtgaaaagtcgaataaccatcaacccagacacatccaagaaccagttctccctgcagttgaactctgtggctcccgacgacacggctgtctattactgtgcaagagaggactggaaggacggggatgatgcttttgatatctggggccaagggacaatggtcaccgtctcttca

SEQ ID NO: 9277 - DNA, 305 bp, Homo sapiens
  source 1..305: mol_type = other DNA
ccatctccggggacagtgtctctagcaacagtggtacttggagctggatcaggcagtccccatcgagaggccttgagtggctgggaaggacatactataggtccaagtggttttatgaatatgcaggatctgtgaaaagtcgaataaccatcaacccagacacatccaagaaccagttctccctgcagctggactctgtgactcccgaggacacggctgtgtattactgtgcaagagaggactggaaggacggggatgatgcttttgatatctggggccaagggacaatggtcaccgtctcttca

SEQ ID NO: 9278 - DNA, 305 bp, Homo sapiens
  source 1..305: mol_type = other DNA
ccatctccggggacagtgtctctagcaacagtgctacttggagctggatcaggcagtccccatcgagaggccttgagtggctgggaaggacatattacaggtccaagtggtctattgagtatgcaccatctgtgaaaagtcgaataaccatcaacccagacacatccaagaaccagttctccctgcagttgaactctgtgactcccgacgacacggctgtctattactgtgcaagagaggactggaaggacggggatgatgcctttgatatctggggccaagggacaatggtcaccgtctcttca

SEQ ID NO: 9279 - DNA, 305 bp, Homo sapiens
  source 1..305: mol_type = other DNA
ccatctccggggacagtgtctctagcaacagtgctacttggagctggatcaggcagtccccatcgagaggccttgagtggctgggaaggacatactacaggtccaagtggtctattgaatatgcaccatctgtgaaaagtcgaataaccatcaacccagacacatccaagaaccagttctccctgcagttgaactctgtgactcccgacgacacggctgtctattactgtgcaagagaggactggaaggacggggatgatgcttttgatatctggggccaagggacaatggtcaccgtctcttca

SEQ ID NO: 9280 - DNA, 305 bp, Homo sapiens
  source 1..305: mol_type = other DNA
ccatctccggggacagtgtctctagtaacagtgctacttggaactggatcaggcggtccccatcgagaggccttgagtggctgggaaggacatactacagatccaagtggtataaggagtatgcagaatctgtgaaaagtcgaataagcatcaacccagacacatccaagaaccaggtctccctgcagctgaattctgcgattcccgaggacacggctgtgtattactgtgcaagagaagactggaaggacggcgatgatgcttttgacatctggggccaagggacaatggtcaccgtctcttca

SEQ ID NO: 9281 - DNA, 305 bp, Homo sapiens
  source 1..305: mol_type = other DNA
ccatctccggggacagtgtctctagcaacagtgccacttggagctggatcaggcagtccccatcgagagggcttgagtggctgggaaggacatactacaggtccaagtggtttaaggaatatgaagtgtctgtgaaaagtcgaataaccatcaatccagacacatccaagaaccagttctccctgcagctgaactctgtgactcccgaggacacggctgtctattactgtgcaagagaagactggaaggacggcgatgatgcttttgatatctggggccaggggacattggtcaccgtctcttca

SEQ ID NO: 9282 - DNA, 305 bp, Homo sapiens
  source 1..305: mol_type = other DNA
ccatctccggggacagtgtctctagcaacagtgctacttggagctggatcaggcagtccccatcgagaggccttgagtggctgggaaggacatattacaggtccaagtggtctattgagtatgcaccatctgtgaaaagtcgaataaccatcaacccagacacatccaagaaccagttctccctgcagctgaattctgtgactcccgacgacacggctgtctattattgtgcaagagaggactggaaggacggggatgatgcttttgatatctggggccaagggacaatggtcaccgtctcttca

SEQ ID NO: 9283 - DNA, 305 bp, Homo sapiens
  source 1..305: mol_type = other DNA
ccatctccggagacagtgtctctagcaacagtgctacttggagctggatcaggcagtccccatcgagaggccttgagtggctgggaaggacatattacaggtccaagtggtctattgagtatgcaccatctgtgaaaagtcgaataaccatcaacccagacacatccaagaaccagctctccctgcagttgaactctgtgactcccgacgacacggctgtctattactgtgcaagagaggactggaaggacggggatgatgcttttgatatctggggccaagggacaatggtcaccgtctcttca

SEQ ID NO: 9284 - DNA, 295 bp, Homo sapiens
  source 1..295: mol_type = other DNA
tgcagcctctggattcatctttagtagatatgccatgagctgggtccgccaggctccagggagggggctggagtgggtctcaggtatcagtggtagtggtggtaccatatactacgcagactccgtgaagggccgattcaccatctccagagacaattccaagaacacgctgtctttgcaaatgaacagcctgagagccgaggacacggccgtatattactgtgcgaaagatccgagtcgggttattagcgcttttgatatctggggccaagggacaatggtcaccgtctcctca

SEQ ID NO: 9285 - DNA, 295 bp, Homo sapiens
  source 1..295: mol_type = other DNA
tgcagcctctggattcacctttagcagctatgccatgagttgggtccgccaggctccagggaaggggctggagtgggtctcagctatcagtggcagtggtggtactatttactacgcagactccgtgaagggccggttcaccatctccagagacaattccaagaacacgctgaatttgcaaatgaatagtttgagagccgaggacacggccctatattactgtgcgaaagatccctctagagttatttctgcttttgacatctggggccaagggacaatggtcactgtctcttca

SEQ ID NO: 9286 - DNA, 295 bp, Homo sapiens; identical to SEQ ID NO: 9284
  source 1..295: mol_type = other DNA

SEQ ID NO: 9287 - DNA, 301 bp, Homo sapiens
  source 1..301: mol_type = other DNA
cactgtctctggtgactccgtcacccgtgggagttactactggagctggatccggcagcccccagggaagggactggagtggattggatatattttttacagtgggagtaccagatacaacccctccctcgagagtcgagtcaccgtatcaatagacacgtccaagaaccaattctccctgaagctgacctctgtgaccgctgcggacacggccgtgtattactgtgcgcgagatcggggtagggatgggtacaataaggttgactactggggccggggaaccctggtcaccgtctcctca

SEQ ID NO: 9288 - DNA, 301 bp, Homo sapiens
  source 1..301: mol_type = other DNA
cactgtctctggtgactccgtcagcagtggtagttactactggacctggatccggcagtccccagggaagggactggagtggattggatatagcttttacagtgggagcaccaactacaacccctccctcgagagtcgagtcaccatatcagtagacacgtccaagaaccagttctctctgaagctgacctctgtgaccgctgcggacacggccgtgtattattgtgcgagagatcggggtagagatggctacaataaggttgactactggggccaggggaccctggtcaccgtctcctca

SEQ ID NO: 9289 - DNA, 301 bp, Homo sapiens
  source 1..301: mol_type = other DNA
cactgtctctggtggctccgtcaccagtggaagttactactggagctggatccggcagcccccagggaagggactggagtggattgggtatatattttacagtgggagcaccaagtacaacccctccctcaagagtcgagtcaccatatcagtagacacgtccaagaatcagttctctctgaagctgagctctgtgaccgctgcggacacggccgtgtattactgtgcgagagatcggggtagagatggatacaataaggttgactactggggccagggaaccctggtcaccgtctcctca

SEQ ID NO: 9290 - DNA, 301 bp, Homo sapiens
  source 1..301: mol_type = other DNA
cactgtctctggtgactccgtcacccgtgggagttattactggagctggatccggcagcccccagggaacggactggagtggattggatacattttttacagtgggagcaccaagtacaacccctccctcgagagtcgagtcaccgtatcaatagacacgtccaagaaccaattctacctgaaactgacctctgtgaccgcagcggacacggccgtgtattactgtgcgcgagatcggggtagagatggctacaataaggttgactactggggccggggaaccctggtcaccgtctcctca

SEQ ID NO: 9291 - DNA, 301 bp, Homo sapiens
  source 1..301: mol_type = other DNA
cactgtctctggtgactccgtcaccactggaagttactactggagctggatccggcagcccccagggaagggactggagtggattgggtatgtctattacagtgggagcaccaagtacagtctcgccctgcagagtcgagtcaccatatcaatagacacgtccaagaaccagttctccctgagcctaaggtctatgaccgcagcggacacggccgtgtattactgtgcgagagatcggggtagagatggctacaataaagttgactactggggccagggaaccctggtcaccgtctcctca

SEQ ID NO: 9292 - DNA, 301 bp, Homo sapiens
  source 1..301: mol_type = other DNA
cactgtctctggtgactccgtcagcagtggcagttactactggacctggatccggcagcccccggggaagggactggagtggattgggtatatcttttacagtgggagcaccagctacaacccctccctcaagagtcgagtcagcatatcagttgacacgtccaagaaccagttctccctgaagctaaactctgtcaccgctgcggacacggccgtgtattattgtgcgagagatcggggtagagatggctacaataaggttgactactggggccagggaaccctggtcagcgtctcctca

SEQ ID NO: 9293 - DNA, 301 bp, Homo sapiens
  source 1..301: mol_type = other DNA
cactgtctctggtgactccgtcagccgtgggagttactactggagctggatccggcagcccccagggaagggactggagtggattggatatattttttacagtgggagcaccaagtacaacccctccctcgagagtcgagtcaccgtatcaatagacacgtccaagaaccaattctccctgaagctgacctctgtgaccgctgccgacacggccgtgtattactgtgcgcgagatcggggtagagatgggtacaataaggttgactactggggccggggaaccctggtcaccgtctcctca

SEQ ID NO: 9294 - DNA, 301 bp, Homo sapiens; identical to SEQ ID NO: 9288
  source 1..301: mol_type = other DNA

SEQ ID NO: 9295 - DNA, 301 bp, Homo sapiens
  source 1..301: mol_type = other DNA
cactgtctctggtgactccgtcacccgtgggagttactactggaactggatccggcagcccccagggaagggactggagtggattggatatattttttacagtgggagtaccagatacaacccctccctcgagagtcgagtcaccgtatcaatagacacgtccaagaaccaattctccctgaagctgacctctgtgaccgctgcggacacggccgtgtattactgtgcgcgagatcggggtagggatgggtacaataaggttgactactggggccggggaaccctggtcaccgtctcctca

SEQ ID NO: 9296 - DNA, 300 bp, Homo sapiens
  source 1..300: mol_type = other DNA
gcctctggatacaccttcagtaactatgctatgcattgggtgcgccaggcccccggacaaaggcttgagtggatgggatggatcaacggtggcaatggtaacacagaatattcacagaagttccagggcagaatcaccattaccagggacacatccgcgaacacagcctacatggaactgagcagcctgagatctgaagacacggctgtgtattactgtgcgagagtatattgtagtagtaccagctgcctctactacctcgactactggggccagggaacactggtcaccgtctcctca

SEQ ID NO: 9297 - DNA, 300 bp, Homo sapiens
  source 1..300: mol_type = other DNA
gcttctggatacaccttcactagctatgctatgcattgggtgcgccaggcccccggacagagccttgagtggatgggatggatcaacgttggcaatggtaacgcagaatattcgcagaagttccagggcagagtcaccattaccagggacacatccgcgagcacagcctacatggaggtgagcagcctgagatctgaagacacggctatttattactgcgcgagagtctattgtagtagtaccagctgtctttactaccttgactactggggccagggaaccccggtcaccgtctcctca

SEQ ID NO: 9298 - DNA, 277 bp, Homo sapiens
  source 1..277: mol_type = other DNA
tgcagtctctggattcaccttcagaaggtactggatgcactgggtccgccaagttccaggggaggggctggtgtgggtctcacggattaatgaggatggaaggatcacaacgtccgcggactccgtgacgggccgactcaccatctccagagacaacgccaagagctcgctgtatctgcaaatcaacagcctgagagccgaagatacggctgtttattattgtgtaaggggtatgggtgactgctggggccagggaaccctggtcaccgtcgcttca

SEQ ID NO: 9299 - DNA, 277 bp, Homo sapiens
  source 1..277: mol_type = other DNA
tgcagcctctggattctctttcagaagctactggatgcactgggtccgccaagttccaggggtggggctggtgtgggtctcacgcattaatagggatggaacgattacaacctccgcggactccgtgacgggccgattcaccatctccagagacaacgccaagagctcgctgcttctgcaaatcgacagtctcaggcccgaagacacggctgtctattactgtgtaaggggcatgggtgactgctggggccagggaaccctggtcaccgtcgcgtca

SEQ ID NO: 9300 - DNA, 277 bp, Homo sapiens
  source 1..277: mol_type = other DNA
tgcagcctctggattcaccttcagaagctactggatgcactgggtccgccaagttccaggggtggggctggtgtgggtctcacgtattaatagggatggaacgatcacaacctccgcggactccgtgacgggccgattcaccatctccagagacaacgccaagagctcgctgtttctgcaaatcgacagtctgaggcccgaagacacggctgtctattactgtgtaaggggcatgggtgactgctggggccagggaaccctggtcaccgtcgcgtca

SEQ ID NO: 9301 - DNA, 277 bp, Homo sapiens
  source 1..277: mol_type = other DNA
tgcagcctctggattcaccttcagaaatgactggatgcactgggtccgccaagttccaggaaaggggctggtgtggatctcacgtattaatggtggggggagtcttataagttatgcggactccgtgaagggccgattcaccgtctccagagacaacgccaagaaaacactgtatcttcaaatgaacaatctgagagccgaggacacggctgtgtattcttgtgtgaggggtatgggtgactgctggggccggggaaccctggtcaccgtctcctcg

SEQ ID NO: 9302 - DNA, 277 bp, Homo sapiens
  source 1..277: mol_type = other DNA
tgtagcctctggattcaccttcagaagctactggatgcactgggtccgccaagttccaggggaggggctggcgtgggtctcacgtattaatagagatggaacgatcacaacttccgcggactccgtgacgggccgattcaccatctccagagacaacgccaagagctcgctgtatctgcaaatcaacagtctgagagccgaagacacggctgtctattattgtgtaaggggcatgggtgactgctggggccagggaaccctggtcaccgtcgcgtca

SEQ ID NO: 9303 - DNA, 292 bp, Homo sapiens
  source 1..292: mol_type = other DNA
tgcagcctctggattcacttttaacacctatgccatgaactgggtccgccaggctccagggaaggggctggagtgggtctcagctgttggtggtagtggtactaacacatactacgcagactccgtgaagggccggttcaccatctccagagacaatcccaagaacacgctgtatctgcaaatgaacagcctgagagccgacgacacggccgtatattactgcgcgaaagatcgcggcagtggctggacgtttgactactggggccagggaaccctggtcaccgtctcctca

SEQ ID NO: 9304 - DNA, 292 bp, Homo sapiens; identical to SEQ ID NO: 9303
  source 1..292: mol_type = other DNA

SEQ ID NO: 9305 - DNA, 292 bp, Homo sapiens
  source 1..292: mol_type = other DNA
tgcagcctctggattcatctttagctcctatgccatgagctgggtccgccaggctccagggaaggggctggagtgggtctcacttatttatagcggtggtagtagcacatactatgcggactccgtgaagggccggttcaccatctccagagataattccaagaacacgctgtttctgcaaatgaacagcctgagagccgacgacacggccgtatatttctgtgcgaaagatcgcggcagtggctggacctttgactactggggccagggaaccctggtcaccgtctcctca

SEQ ID NO: 9306 - DNA, 292 bp, Homo sapiens
  source 1..292: mol_type = other DNA
tgtagcctctggattcagcttcagtgactactacatgacctggatccgccaggctccagggaaggggctggagtgggtgtcatacattactactagtggtacttacacaaacgacgcagactctgtgaagggccgattcaccatctccagagacaacgcaaagaattcactgtttctgcaaatgaacagcctgagagtcgaagacacggctgtgtactactgtgcgagattagggggcagcggctggtcgaaggactactggggccagggaaccctggtcgccgtctcctca

SEQ ID NO: 9307 - DNA, 292 bp, Homo sapiens
  source 1..292: mol_type = other DNA
tgcagcctctggattcaccttcagtgactactacatgacttggatccgccaggctccagggaaggggctggagtgggtttcatacattactagtagtggtactcacacaaacgacgcagactctgtgaagggccgattcaccatctccagagacaacgccaagaattcactgtttctgcaaatgaacagcctgagagtcgaagacacggctgtgtattactgtgcgagattagggggcagtggctggtcgaaggactactggggccagggaaccctggtcgccgtctcctca

SEQ ID NO: 9308 - DNA, 292 bp, Homo sapiens
  source 1..292: mol_type = other DNA
tgcagcctctggattcaccttcagtgactactacatgacctggatccgccaggctccagggaaggggctggagtgggtttcatacattactagtagtggtacttacacaaacgacgcagactctgtgaagggccgattcaccatctccagagacaacgccaagaattctctgtttctgcaaatgaacagcctgagagccgaagacacggctgtgtattactgtgcgagattagggggcagtggctggtcgaaggactactggggccagggaaccctggtcgccgtctcctca

SEQ ID NO: 9309 - DNA, 292 bp, Homo sapiens
  source 1..292: mol_type = other DNA
tgcagcctctggattcaccttcagtgactactacatgacctggatccgccaggctccagggaaggggctggagtgggtttcatacattactagtagtgggactcacacaaacgacgcagactctgtgaagggccgattcaccatctccagagacaacgccaagaattcactgtttctgcaaatgaacagcctgagagtcgaagacacggctgtgtattactgtgcgagattagggggcagtggctggtcgaaggactactggggccagggaaccctggtcgccgtctcctca

SEQ ID NO: 9310 - DNA, 292 bp, Homo sapiens
  source 1..292: mol_type = other DNA
tgcagcctctggattcaccttcagtgactactatatgacttggatccgacaggctccagggaaggggctggagtgggtttcatacatcactagtagtagcactcacacaaactacgcagactctgttaagggccgattcaccatctccagagacaacgccaagaactcactgtatctgcaaatgaacagcctgagaggcgacgacacggctgtttactactgtgcgagattagggggcagtggctggtcgaaggactactggggccagggaaccctggtcaccgtctcctca

SEQ ID NO: 9311 - DNA, 292 bp, Homo sapiens
  source 1..292: mol_type = other DNA
tgcagcctctggattcaccttcagtgactactacatgacctggatccgccaggctccagggaaggggctggagtgggtgtcatacattactagtagtggtacttacacaaacgacgcagactctgtgaagggccgattcaccatctccagagacaacgccaagaattcactgtttctgcaaatgaacagcctgagagccgaagacacggctgtgtattactgtgcgagattagggggcagtggctggtcgaaggactactggggccagggaaccctggtcgccgtctcctca

SEQ ID NO: 9312 - DNA, 292 bp, Homo sapiens
  source 1..292: mol_type = other DNA
tacagtctctggattcaccttcagtgactactacatgacctggatccgccaggctccagggaaggggctggagtgggtttcatacattactaatagtggtagccacacaaactacgcagactctgtgaagggccgattcaccatctccagagacaacgccaagaactcactgtatctgcaaatgaacagcctgagagccgaggacacggccgtttattactgtgcgagactagggggcagtggctggtcaaaagactactggggccagggaaccctggtcaccgtctcctca

SEQ ID NO: 9313 - DNA, 292 bp, Homo sapiens
  source 1..292: mol_type = other DNA
tgcagcctctggattcaccttcagtgactactacatgacctggatccgccaggctccagggaaggggctggagtgggtttcatacattactagtagtggtacttacacaaacgacgcagactctgtgaagggccgattcaccatctccagagacaacgccaagaattcactgtttctgcaaatgaacagcctgagagtcgaagacacggctgtgtattactgtgcgagattagggggcagtggctggtcgaaggactactggggccagggaaccctggtcgccgtctcctca

SEQ ID NO: 9314 - DNA, 292 bp, Homo sapiens
  source 1..292: mol_type = other DNA
tgcagcctctggattcaccttcagtgactactacatgacctggatccgccaggctccagggaaggggctggagtgggtgtcatacatttctagtactggtactcacacaaacgacgcagactctgtgaagggccgattcaccatctccagagacaacgccaagaattcactgtttctgcaaatgaacagcctgagagtcgaagacacggctgtgtattactgtgcgagattagggggcagcggctggtcgaaggactactggggccagggaaccccggtcgccgtctcctca

SEQ ID NO: 9315 - DNA, 292 bp, Homo sapiens
  source 1..292: mol_type = other DNA
tgcagcctctggattcaccttcagtgactactacatgacctggatccgccaggctccagggaaggggctggagtgggtttcatacattactagtagtagtagttacacaaacgacgcagactctgtgaagggccgattcaccatctccagagacaacgccaagaactcactgtatctgcaaatgaacaacctgagagccgaagacacggctgtgtattactgtgcgagattagggggcagtggctggtcgaaggactactggggccagggaaccctggtcaccgtctcctca

SEQ ID NO: 9316 - DNA, 292 bp, Homo sapiens
  source 1..292: mol_type = other DNA
cgcagcctctggattcaccttcagtgactactacatgacctggatccgccaggctccagggaaggggctggagtgggtttcatacattactaatagtggaacttccacaaacgacgcagactctgtgaagggccgattcaccatctccagagacaacgccaagaattcactgtttctgcaaatgaacagacttagagtcgaagacacggctgtatattattgtgcgagattagggggcagtggctggtcgaaggactactggggccagggaaccctggtcgccgtctcctca

SEQ ID NO: 9317 - DNA, 292 bp, Homo sapiens
  source 1..292: mol_type = other DNA
tgcagcctctggattcaccttcagtgactactacatgacctggatccgtcaggctccagggaaggggctggagtgggtttcatatattagtactagtagcagtcatacaaactacgcagactctgtgaagggccgattcaccatctccagagacgacgccaagaactcactgtatctgcaaatgaacagcctgagagccgaagacacggccgtgtattactgtgcgagactagggggcagtggctggtcaaaagactactggggccagggaaccctggtcgccgtctcctca

SEQ ID NO: 9318 - DNA, 289 bp, Homo sapiens
  source 1..289: mol_type = other DNA
tgcagcctctggattcacctttagcacctattccatgagctgggtccgccaggttccagggaaggggctggagtgggtggccaccatacaccgagatgaaacaaaatactatgtggactctgtgaagggccgattcaccatctccagagacaacgccaagaactcagtgtatctgcagatgaacagcctgagcgccgaggacacggccgtgtattactgtgcgagatggagatggcaacaatctgaattcgactcttggggccagggaaccctggtcaccgtctcctca

SEQ ID NO: 9319 - DNA, 292 bp, Homo sapiens
  source 1..292: mol_type = other DNA
tgcagcctctggattcatatttagaaactattatatgagttgggtgcgccaggctccagggatggggctggagtgggtggccagcgttgagcacgatgggagtaaggaatactatgcggactctgtgaagggccgcttcaccatctccagagacaacaccaagaactcaatgtctctgcaaatgcacagcctgacagtcgacgacacggccgtgtattactgtgcgaggtggagatggcaacagtcggaattcgactcctggggccagggaatcctggtcaccgtctcctcc

SEQ ID NO: 9320 - DNA, 295 bp, Homo sapiens
  source 1..295: mol_type = other DNA
tgcagcctctggattcacctttagcaactatgccatgagctgggtccgccaggctccagggaaggggctggagtgggtctcatctattagtgctagtagtggtagcacatactacacagactccgtgaagggccggttcaccatctccagagacacttccaagaacacgctgtatcttcaaatgaacagcctgagagccgaggacacggccgtatattactgtgcgaaagatcgaggcatggttcggggagttggcgactcctggggccagggaaccctggtcaccgtctcctca

SEQ ID NO: 9321 - DNA, 295 bp, Homo sapiens
  source 1..295: mol_type = other DNA
tgcagcctctggattcacctttactaactatgccttgacctgggtccgccaggctccagggaaggggctggactgggtctcatctattagtgctagtagtggtagcacatactacacagactccgtgcagggccggttcaccatctccagagacactcccaagaacacactatttcttcaaatgaacagcctgagagccgaggacacggccgtatattactgtgcgaaagatcgaggcatggttcggggagttggcgactcctggggccagggaaccctggtcaccgtctcctca

SEQ ID NO: 9322 - DNA, 295 bp, Homo sapiens
  source 1..295: mol_type = other DNA
tgcagcctctggattcgccataagtatttattggatgagctgggtccgccaggctccaggggagcggctggagtgggtggccaacataaagccagatggaagtgagatttactatgtggactctgtgaagggccgattcaccatctctagagacaacgccaagaactcactgtatctgcaaatgaacaacctgagagccgaggacacggccgtgtattactgtgcgagacacgcatataccagtgcctggtacgggggcttctggggccagggaaccccggtcaccgtctcctca

SEQ ID NO: 9323 - DNA, 295 bp, Homo sapiens
  source 1..295: mol_type = other DNA
tgcagcctctggattctcctttagtacttattggatgaactgggtccgccaggctccagggaaggggctggagtgggtggcctgcataaagccagacggaagtgagatattctatgtggactcagtgaagggccgattcaccatctccagagacaaccccaagaactcgctgtttctgcaaatgaacagcctgagagccgaggacacggctgtctactactgtgcgaggcatgcttataccagtgcctggtacggtggcttctggggccagggaaccctggtcaccgtctcctca

SEQ ID NO: 9324 - DNA, 280 bp, Homo sapiens
  source 1..280: mol_type = other DNA
tgcagcctctggattcaccttcagtaccaatagtatgaactgggtccgccaggctccagggaaggggctggagtggctttcattcattagtagtagtggtagtgccatatacaacgcagactctgcgaagggccgattcatcatctccagagacaatgccaagaattcactgtttctgcaaatgaacagcctgagagacgaggacacggctgtgtattactgtgcgagagatacgattttggacttctggggccagggaaccctggtcaccgtctcctca

SEQ ID NO: 9325 - DNA, 280 bp, Homo sapiens
  source 1..280: mol_type = other DNA
tgcagcctctggattccccttcacaacctatagcatgaactgggtccgccaggctccagggaaggggctggagtgggtttcatacataagtagtagtagtactgttatatactacgcagactctgtgaggggccgattcaccgtctccagagacaatgccaagaactcactgtatctggacatgaacagcctgagagacgaggacacggctttttattactgtgcgagagacactatattggacttcgggggccagggaaccctggtcaccgtctcctca

SEQ ID NO: 9326 - DNA, 277 bp, Homo sapiens
  source 1..277: mol_type = other DNA
tgtagcctctggattcacctttagcagctatgccatgagctgggtccgccaggctccagggaaggggctggagtgggtctcagctattagtggtagtggtggtagcactttctccgcagactcagtgaagggccggttcaccatctccagagacaatcccaagaacaccctgtatctgcaaatgaacagcctgagagccgaggacacggccgtatattactgttactactacggtctggacgtctggggccaagggaccacggtcaccgtcgcctca

SEQ ID NO: 9327 - DNA, 277 bp, Homo sapiens
  source 1..277: mol_type = other DNA
tgcagcctctggattcacctttagcaactatgccatgagctgggtccgccaggctccagggaaggggctggagtgggtctcagctattagtggtagtggtgatagcacatactacgcagactccgtgaagggccggttcaccatctccagagacaattccaagaacacactgtatctgcaaatgaacagcctgagagtcgaggacacggccgtatactactgttattactacggtctggacgtctggggccaagggaccacggtcaccgtctcctca

SEQ ID NO: 9328 - DNA, 277 bp, Homo sapiens
  source 1..277: mol_type = other DNA
tgcagcctctggattcacctttagcagctatgccatgagctgggtccgccaggctccagggaaggggctggagtgggtctcaggtattagtagtaatggtggtagcacatactacgcagactccgtgaagggccggttcaccatctccagagacaattccaagaacacactgtatctgcaaatgaacagcctgagagccgaggacacggccgtatattactgttactactacggtttggacgtctggggccaagggaccacggtcaccgtctcctca

SEQ ID NO: 9329 - DNA, 277 bp, Homo sapiens
  source 1..277: mol_type = other DNA
tgcagcctctggattcacctttagcagctatgccatgagctgggtccgccaggctccagggaaggggctggagtgggtctcagctattagtggtagtgatgatagcacatactacgcagactccgtgaagggccggttcaccatctccagagacaattccaagaacacgctgtatctgcaaatgaacagcctgagagccgaggacacggccgtatattactcctactactatggtttggacgtctggggccaagggaccacggtcaccgtctcctca

SEQ ID NO: 9330 - DNA, 277 bp, Homo sapiens
  source 1..277: mol_type = other DNA
tgcagcctctggattcacctttagcagctatgccatgagctgggtccgccaggctccagggaaggggctggagtgggtctcagctattagtgctaatggtggtagcacatactacgcagactccgtgaagggccggttcaccatctccagagacaattccaagaacacgctgtatctgcaaatgaacagcctgagagccgaggacacggccgtatattactcctactactacggtctggacgtctggggccaagggaccacggtcaccgtctcctca

SEQ ID NO: 9331 - DNA, 277 bp, Homo sapiens
  source 1..277: mol_type = other DNA
tgcagcctctggattcacctttagcagctatgccttgagctgggtccgccaggctccagggaaggggctggagtgggtctcagctttgagtagtagtggtgctagcacgtactacgcggactccgtgaagggccggttcaccatctccagagacaattccaagagcacgctctatctgcaaatgaatagcctgagagccgaggacacggccgtatattactgttattactacggtttggacgtctggggccaagggaccacggtcaccgtctcctca

SEQ ID NO: 9332 - DNA, 301 bp, Homo sapiens
  source 1..301: mol_type = other DNA
tgcagcctctggattcacctttgataggttttggatgatctgggtccgccaggctccagggaaagggctggagtgggtggccaacataaaggaagatggaagtcagagatactatgtggactctgtgaagggccgattcaccatctccagagacaacgccaagaactcactgtatctgcaaatgaacagcctgagagccgaggacacggccgtctattactgtgcgaggcttcatagtggctacgattggggggatgcttttgatatctggggccaagggacaatggtcaccgtctcttca

SEQ ID NO: 9333 - DNA, 301 bp, Homo sapiens
  source 1..301: mol_type = other DNA
tgcagcctctggattcacctttagtagttcttggatgatctgggtccgccaggctccagggaaagggctggagtgggtggccaacataaaggaagatggaggtcagagatactatatagactctgtgaagggccgattcaccatctccagagacaacgccaagaactcactgtatctgcaaatgaacagcctgagagccgaggacacggccgtgtattactgtgcgaggcttcacagtggctacgattggggggatgcttttgatatctggggccatgggacaatggtcaccgtctcttca

SEQ ID NO: 9334 - DNA, 301 bp, Homo sapiens
  source 1..301: mol_type = other DNA
tgcagcctctggattcacctttggttcctattggatgacgtgggtccgccaggctccagggaaagggctggagtgggtggccaacataaaggaagatggaagtcagaaatactatgtagactctgtgaggggccgattcagattctccagggacaacgccaagaactcactgtatctgcaaatggacagcctgagagtcgaggacacggccgtgtattactgtgcgaggcttcatagtggctacgattggggggatgcttttgatatctggggccaagggacaatggtcaccgtctcttca

SEQ ID NO: 9335 - DNA, 301 bp, Homo sapiens
  source 1..301: mol_type = other DNA
tacagcctctggattcacctttagtagttattggatgagttgggtccgccaggctccagggaaggggctggagtgggtggccaacataaaggaagatggaagtgaaaaatactatgtggactctgtgaaggggcgattcaccatctccagagacaacgcccagaagtcactgtatttgcaaatgaacagcctgagagccgaggacacggccatgtattcctgtgcgagacttcacagtggctacgattggggtgatgcttttgatatctggggccaagggacaatggtcaccgtctcttca

SEQ ID NO: 9336 - DNA, 301 bp, Homo sapiens
  source 1..301: mol_type = other DNA
tgtagcctctggattcacatttagtagttcttggatgatctgggtccgccaggctccagggaaagggctggagtgggtggccaacataaaggaagatggaagtcagaaatactatatagactctgtgaagggccgattcaccatctccagagacaacgccaagaactcactgtatctgcaaatgaacagcctgagagccgaggacacggccgtgtattactgtgcgaggcttcatagtggctacgattggggggacgcttttgatatctggggccatgggacaatggtcaccgtctcttca

SEQ ID NO: 9337 - DNA, 301 bp, Homo sapiens
  source 1..301: mol_type = other DNA
tctagcctctggattcacctttagcaactatgccatgagctgggtccgccaacatccagggaaggggctggagtgggtctcaactattagtggtggtggttacacatataatgcagactccgtgaagggccgactcaccatctccagagacaactccaagaacacactgtatctccaaatgaacagtctgaaagtcgacgacacggccgtatattactgtgcgagagccggttgcagtggtggtaactgctaccgcccccctgacttctggggccagggaaccctggtcacggcctcctca

SEQ ID NO: 9338 - DNA, 304 bp, Homo sapiens
  source 1..304: mol_type = other DNA
tgcagcctctggattcacctatagcgactatgccatgagctgggtccgccaggctccagggaaggggctggagtgggtctcaattattaatggtggtggtgataccacgtactacgcaggctccgtgaagggccgcttcaccgtctccagagacaattccaagaacacactgtatctgcgaatgaacagcctgagagccgaggacacggccgtgtattactgtgcgcgagcgggttgtagtggtggtaactgctaccgacccccggacttctggggccagggaaccctggtcaccgtctcctca

SEQ ID NO: 9339 - DNA, 286 bp, Homo sapiens
  source 1..286: mol_type = other DNA
tgcagcctctggattcacctttagcagttattggatgacctgggtccgccaggctccagggaaagggctggagtgggtggccaacataaaacaagatggaagtgagaaatactatgtggactctgtgaagggccgattcaccatctccagagacaacgccaagaactcactgtatctgcaaatgaacagcctgagagccgaggacacggccgtatattattgtgcgagagctataggagcagctgagagctattggggccagggaaccctggtcaccgtctcctca

SEQ ID NO: 9340 - DNA, 286 bp, Homo sapiens
  source 1..286: mol_type = other DNA
tgcagcctctggattcacgtttagtgactattggatgcactgggtccgccaggctccagggaaggggctggagtgggtggccaatgtagacccagatggagccacgaaatactatgtggactctgtgaagggccgattcaccatctccagagacaacgccaagaactcactgtctctgcaaatgaacagcctgagagccgaagacacggccgtgtattactgtgcgagagccataggagcagccgagagctattggggcaagggaagcctggtcaccgtctcctca

SEQ ID NO: 9341 - DNA, 292 bp, Homo sapiens
  source 1..292: mol_type = other DNA
cactgtctttggcggctccatcatcactagtacttacttctggggctggatccgccagcccccagggaaggggctggagtggattgggagtatatattacagtgggagtactgagtacaacccgtccctcgagagtcgagtcaccatgtccgtagacatgtccaggaaccagttctccctgaatctgaggtctgtgagcgcctcagacacggctatttattactgtgcgagacgagcaccccgcaactggttcgacccctggggccagggaaccctggtcagcgtctcctca

SEQ ID NO: 9342 - DNA, 292 bp, Homo sapiens
  source 1..292: mol_type = other DNA
cactgtctctggtggctccatcagcagtagtagttactactggggctggatccgccagtccccagggaaggggctggagtggattgggagtatctattatagtgggagcacctactacaacccgtccctcaagagtcgagtcaccatatccgtagacacgtccaagaaccagttctccctgaagctgagctctgtgaccgccgcagacgcggctgtgtattactgtgcgagacgcgccccccggaactggttcgacccctggggccagggaaccctggtcaccgtctcctca

SEQ ID NO: 9343 - DNA, 289 bp, Homo sapiens
  source 1..289: mol_type = other DNA
tgcagcgtctggattcacctttagtaattatggcatgcactgggtccgccaggctccaggcaaggggctggagtgggtggcaattatttggcatgatggaagtaataaatattatgcagactccgtgaagggccgattcaccatctccagagacagttccaagaacacactatatctgcaaatgaatagcctgagagccgaggacacggctgtttattactgtgcgaggaacactgggacttactctcttgactactggggcctgggaaccctggtcaccgtctcctca

SEQ ID NO: 9344 - DNA, 289 bp, Homo sapiens
  source 1..289: mol_type = other DNA
tgcagcgtctggattcaccttcagtggctttggcatgcactgggtccgccaggctccaggcaaggggctggagtgggtgtcaattatttggcatgatggaagtaataaatactatggagactctgtgaagggccggttcaccatctccagagacgattccaagaacacgctgtatctgcaaatgaacagcctaggagccgacgacacggctgtctattactgtgcgagaaatactgggacctactcacttgactactggggccaggggaccctggtcaccgtctcctca

SEQ ID NO: 9345 - DNA, 290 bp, Homo sapiens
  source 1..290: mol_type = other DNA
tcatctccggggacagtgtctctagcaacagtgctgcttggaactggatcaggcagtccccatcgggaggccttgagtggctgggcaggacatactacaggtccaaatggtatcatgattatgcagcatctgtgaaaagtcgaataaccatcaacccagacacatccaagaacctcttctccctgcagttgaactctgtgactcccgaggacacggctgtgtattactgtgcaggagggactggaacttttgactactggggccagggaaccctggtcaccgtctcctca

SEQ ID NO: 9346 - DNA, 290 bp, Homo sapiens
  source 1..290: mol_type = other DNA
ccatctccggggacagtgtctctagtaatactgctgcttggaactggttcaggcagtccccatcgagaggccttgagtggctgggaaggacatactataggtccaagtggtattatgattacgcagtatctgtgaaaggtcgaataaccatcgacccggacacatccaagaaccagttctccctgcaactgaagtctctgactcccgaggacacggctgtgtactattgtgcaggggggactggtacatttgactactggggccaggggaccctggtcaccgtctcctca

SEQ ID NO: 9347 - DNA, 290 bp, Homo sapiens; identical to SEQ ID NO: 9346
  source 1..290: mol_type = other DNA

SEQ ID NO: 9348 - DNA, 290 bp, Homo sapiens
  source 1..290: mol_type = other DNA
ccatctccggggacagtgtctctagtaatactgctgcttggaactggttcaggcagtccccatcgagaggccttgagtggctgggaaggacatactataggtccaagtggtattatgattacgcagtatctgtgaaaggtcgaataaccatcgacccggacacatccaagaaccagttctccctgcagctgaagtctctgactcccgaggacacggctgtgtactattgtgcaggggggactggtacatttgactactggggccaggggaccctggtcaccgtctcctca

SEQ ID NO: 9349 - DNA, 290 bp, Homo sapiens
  source 1..290: mol_type = other DNA
tcatctccggggacagtgtctctagtaatagtgaagcttggaactggttcaggcagtccccatcgagaggccttgagtggctgggaaggacatactacaggtccaagtggtatcatgattacgcagtatctgtgaaaagtcgaataactatcgacccggacacatccaagaaccagttctccctgcagctgaagtctctgactcccgaggacacggctgtgtactactgtgcaggggggactggtacatttgactactggggccaggggacactggtcaccgtctcctca

SEQ ID NO: 9350 - DNA, 290 bp, Homo sapiens
  source 1..290: mol_type = other DNA
tcatctccggggacagtgtctctagtaatagtgaagcttggaactggttcaggcagtccccatcgagaggccttgagtggctgggaaggacatactacaggtccaagtggtatcatgattacgcagtatctgtgaaaagtcgaataactatcgacccggacacatccaagaaccagttctccctgcacctgaagtctctgactcccgaggacacggctgtgtactactgtgcaggggggactggtacatttgactactggggccaggggacactggtcaccgtctcctca

SEQ ID NO: 9351 - DNA, 290 bp, Homo sapiens
  source 1..290: mol_type = other DNA
ccatctccggggacagtgtctctagtaatactgctgcttggaactggttcaggcagtccccatcgagaggccttgagtggctgggaaggacatactataggtccaagtggtattatgattactcagtttctgtgaaaggtcgaataaccatcgacccggacacatccaagaaccagttctccctgcaactgaagtctctgactcccgaggacacggctatctactattgtgcgggggggactggtacatttgactactggggccaggggaccctggtcaccgtctcctca

SEQ ID NO: 9352 - DNA, 290 bp, Homo sapiens
  source 1..290: mol_type = other DNA
ccatctccggggacagtgtctctagtaatactgatgcttggaactggttcaggcagtccccatcgaggggccttgagtggctgggaaggacatactataggtccaagtggtattatgattacgcagtatctgtgaaaggtcgaataaccatcgacccggacacatccaagaaccagttctccctgcaactgaagtctctgactcccgaggacacggctgtgtactactgtgcaggggggactggcacatttgactactggggccaggggaccctggtcaccgtctcctca

SEQ ID NO: 9353 - DNA, 290 bp, Homo sapiens
  source 1..290: mol_type = other DNA
ccatctccggggacagtgtctctagtaatagtgctgcttggaactggttcaaacagtccccatcgagaggccttgagtggctgggaaggacatactacaggtccaagtggtattatgattacgcagtatctgtgaaaagtcgaataaccatcgacccggacacatccaagaaccagttctccctgcaactaaagtctctgactcccgaggacacggctgtgtactactgtgcaggggggactggtacatttgactactggggccaggggaccctggtcaccgtctcctca

SEQ ID NO: 9354 - DNA, 290 bp, Homo sapiens
  source 1..290: mol_type = other DNA
tcatctccggggacagtgtctctagtaatactgctgcttggaactggttcaggcagtccccatcgagaggccttgagtggctgggaaggacatactataggtccaagtggtattatgattacgcagtatctgtaaaaggtcgaataaccatcgacccggacacatccaagaaccagttctccctgcaactgaagtctctgactcccgaggacacggctgtgtactattgtgcaggggggactggtacatttgactactggggccaggggaccctggtcaccgtctcctca

SEQ ID NO: 9355 - DNA, 290 bp, Homo sapiens
  source 1..290: mol_type = other DNA
ccatctccggggacagtgtctctagtaatagtgctgcttggaactggttcaggcagtccccatcgagaggccttgagtggctgggaaggacatactacaggtccaagtggtattatgattacgcagtatctgtgaaaagtcgaataaccatcgacccggacacatccaagaaccagttctccctgcagctgaagtctctgactcccgaggacacggctgtgtactactgtgcaggggggactggtacatttgactactggggccaggggaccctggtcaccgtctcctca

SEQ ID NO: 9356 - DNA, 290 bp, Homo sapiens; identical to SEQ ID NO: 9348
  source 1..290: mol_type = other DNA

SEQ ID NO: 9357 - DNA, 289 bp, Homo sapiens
  source 1..289: mol_type = other DNA
tgtagtgtctggattcaccttcagtagctatagaatgaactgggtccgccaggctccagggaaggggctggagtgggtttcacacattagtagtagtggtaccaccacatactacgcagactctgtgaagggccgattcaccgtctccagagacaatgccaagaactcactgtatctgcaaatgaacagcctgagagacgaggacacggctgtgtattactgtgcgagggcctcactcgccggaactccaccgcactggggccagggaaccctggtcaccgtctcctca

SEQ ID NO: 9358 - DNA, 289 bp, Homo sapiens
  source 1..289: mol_type = other DNA
tgcagcgtctggattcagcttcagtacgtatagaatgaactgggtccgccaggctccagggaaggggctggagtgggtttcacacattactagtagtggtagcaccacatactacgcagactctgtgaagggccgattcaccgtctccagagacaatgccaagaactcactgtttctgcaaatgaacagcctgagagacgaggacacggctgtgtactactgtgcgagggcctcactcgccggaactccaccgcactggggccagggaaccctggtcaccgtctcctca

SEQ ID NO: 9359 - DNA, 289 bp, Homo sapiens
  source 1..289: mol_type = other DNA
tgcagcgtctggattcaccttcagtagctatagaatgaactgggtccgccaggctccagggaaggggctggagtgggtttcacacattactagtagtggtagcaccacatactacgcagactctgtgaagggccgattcaccgtctccagagacaatgccaagaactcactgtttctgcaattgaacatcctgagagacgaggacacggctgtgtattactgtgcgagggcctcactcgccggaactccaccgcactggggccagggaaccctggtcaccgtctcctca

SEQ ID NO: 9360 - DNA, 289 bp, Homo sapiens
  source 1..289: mol_type = other DNA
tgcagcgtctggattcaccttcagtacctatagaatgaactgggtccgccaggctccagggaaggggctggagtggatttcacacattactagtagtggtagcaccacatactacgcagactctgtgaagggccgattcaccgtctccagagacaatgccaagaactcactgtttctgcaaatgaacagcctcagagacgaggacacggctgtgtattactgtgcgagggcctcactcgccggaactccaccgcactggggccagggaaccctggtcaccgtctcctca

SEQ ID NO: 9361 - DNA, 289 bp, Homo sapiens
  source 1..289: mol_type = other DNA
tgcagcgtctggattcacgttcagtagctatagaatgaactgggtccgccaggctccggggaaggggctggagtgggtttcgcacattactagtggtggtagcagcatgtactacgcaggctctgtgaagggccgattcaccgtctccagagacaatgccaagaactcactatatttgcaaatgaacagcctgagagacgaggacacggctgtgtattactgtgcgagggcctcactcgctggaactccaccgcactggggccagggaaccctggtcaccgtctcctca

SEQ ID NO: 9362 - DNA, 289 bp, Homo sapiens
  source 1..289: mol_type = other DNA
tgcagcgtctggattcaccttcagtagctatagaatgaactgggtccgccaggctccagggaaggggctggagtgggtttcacacatcactagtagtggtagcaccacatactacgcagactctgtgaagggccgattcaccgtctccagagacaatgccaagaactcactgtttctgcaaatgaacggcctgagagacgaggacacggctgtgtattactgtgcgagggcctcactcgccggaactccaccgcactggggccagggaaccctggtcaccgtctcctca

SEQ ID NO: 9363 - DNA, 289 bp, Homo sapiens
  source 1..289: mol_type = other DNA
tgcagcgtctgggttcaccttcagtagctatagaatgaactgggtccgccaggctccagggaaggggctggagtgggtttcacacattagtagtagtggtagcaccacatactacgcagactctgtgaaggtccgattcaccgtctccagagacaatgccaagaattcactgtatctgcaaatgaacagcctgagagacgaggacacggctgtgtattactgtgcgagggcctcactcgccggaactccaccgcactggggccagggaaccctggtcaccgtctcctca

SEQ ID NO: 9364 - DNA, 289 bp, Homo sapiens
  source 1..289: mol_type = other DNA
tgcagcgtctgggttcaccttcagtagctatagaatgaactgggtccgccaggctccagggaaggggctggagtgggtttcacacattagtagtagtggtagcaccacatactacgcagactctgtgaagggccgattcaccgtctccagagacaatgccaagaattcactgtatctgcaaatgaacagcctgagagacgaggacacggctgtgtattactgtgcgagggcctcactcgccggaactccaccgcactggggccagggaaccctggtcaccgtctcctca

SEQ ID NO: 9365 - DNA, 289 bp, Homo sapiens
  source 1..289: mol_type = other DNA
tgcagcgtctggattcaccttcagtagctatagaatgaactgggtccgccaggctccagggaaggggctggagtgggtttcacacattactagtagtggtagcaccacatactacgcagactctgtgaagggccgattcaccgtctccagagacaatgccaagaactcactgtttctgcaaatgaacagcctgagagacgaggacacggctgtgtattactgtgcgagggcctcactcgccggaactccaccgcactggggccagggaaccctggtcaccgtctcctca

SEQ ID NO: 9366 - DNA, 289 bp, Homo sapiens
  source 1..289: mol_type = other DNA
tgcagcgtctggattcgccttcagtagctatagaatgaactgggtccgccaggctccagggaaggggctggagtgggtttcacacattagtaggagtggtggcaccatatactacgcagactctgtgaagggccgattcaccgcctccagagacgatgccaagaactcactgtatctgcaactgagcagcctgagagacgaggacacggctgtgtattactgtgcgagggcctcactcgctggaactccaccgcactggggccagggaaccctggtcaccgtctcctca

SEQ ID NO: 9367 - DNA, 289 bp, Homo sapiens
  source 1..289: mol_type = other DNA
tgcagcgtctggattcaccttcagtagctatagaatgaactgggtccgccaggctccagggaaggggctggagtgggtttcacacattaataatattggcagcaccatatactacgcagactctgtgaagggccgattcaccgtctccagagacaatgccaagaactcactgtatctgcaaatgaacagcctgagagacgaggacacggctgtgtattactgtgcgagggcctcactcgctggaactccaccgcactggggccagggaaccctggtcaccgtctcctca

SEQ ID NO: 9368 - DNA, 289 bp, Homo sapiens
  source 1..289: mol_type = other DNA
tgcagcgtctggattcaccttcagtagctatagaatgaactgggtccgccaggctccagggaaggggctggagtgggtttcacacattaataatgttggcagcaccatatactacgcagactctgtgaagggccgattcaccgtctccagagacaatgccgagaactcactgtatctgcaaatgaacagcctgagagacgaggacacggctgtgtattactgtgcgagggcctcactcgctggaactccaccgcactggggccagggaaccctggtcaccgtctcctca

SEQ ID NO: 9369 - DNA, 289 bp, Homo sapiens
  source 1..289: mol_type = other DNA
tgcagcgtctggattcaccttcagtagctatagaatgaactgggtccgccaggctccagggaaggggctggagtgggtttcacacattactagtagtggtagcaccacatactacgcaggctctgtgaagggccgattcaccgtctccagagacaatgccaagaactcactgtttctgcaaatgaacagcctgagagacgaggacacggctgtgtattactgtgcgagggcctcactcgccggaactccaccgcactggggccagggaaccctggtcaccgtctcctca

SEQ ID NO: 9370 - DNA, 277 bp, Homo sapiens
  source 1..277: mol_type = other DNA
ttcagtctctggattcaccttcagcacttactggatgcactgggtgcgccaagctccagggaaggggctggtgtgggtcgcacgtattaatgctcatgggagtatcacaaactacgcggactccgtgaagggccgattcaccatctccagagacaacgccaagaatgctctgtatctgcaaatgaaaagtttgagagtcgacgacacggctgtttattattgtgtcaaaggtatgggtgactcctggggccagggaagcctggtcaccgtctcctca

SEQ ID NO: 9371 - DNA, 277 bp, Homo sapiens
  source 1..277: mol_type = other DNA
tgcagcctcgggattcaccttcggagggtcatggatgcactgggtccgccaagttccagggaaggggctggtctgggtcgcacgtattaacagagatgcgagcctctcaacctgtgcggactccgtgaggggccgattcaccatctccagagacaacacgaggaacactttgtctctgcagatgaaaaatctgagagccgaggacacggctctatattattgtgtaaaggggatgggtgactcctggggccagggaaccctggtcaccgtctcctca

SEQ ID NO: 9372 - DNA, 277 bp, Homo sapiens
  source 1..277: mol_type = other DNA
ttcagtctctggattcaccttcagcactcactggatgcactgggtgcgccaagctccagggaaggggctggtgtgggtcgcacgtattaatgctcatgggagtatcacaaactacgcggactccgtgaagggccgattcaccatctccagagacaacgccaagaatgctctgtatctgcaaatgaaaagtttgagagtcgacgacacggctgtttattattgtgtcaaaggtatgggtgactcctggggccagggaagcctggtcaccgtctcctca

SEQ ID NO: 9373 - DNA, 277 bp, Homo sapiens
  source 1..277: mol_type = other DNA
tgtagcctctggattcaacttcaatgctcattggatgcactgggtccgccgagctccagggaaggggctggtgtgggtctcacgtattaatagtgacggaagtctcacaaactatgcggactccgtgaagggccgcttcaccatctccagagacaacgccaagaacacactgtatctgcagatgaacagtttgagagtcgaggacacggctgtgtatttttgtgtgaaaggtatgggtgactcctggggccagggaagcctggtcaccgtctcctca

SEQ ID NO: 9374 - DNA, 289 bp, Homo sapiens
  source 1..289: mol_type = other DNA
cgcagtctcaggattcacctttaccaattattggatgagttgggcccgccagactccagggagagggctggagtgggtggccaacattaacgaaggtggaagtgcaagatggtatgtggattctgtggagggccgatttaccatctccagagacaacgccaggaagctagtatatctgcaaatggacggactgacagccgaggacacggccatttattactgcgcgagaaaccccgacgccgggactgctgactactggggccagggaattctggtcaccgtctcctca

SEQ ID NO: 9375 - DNA, 289 bp, Homo sapiens
  source 1..289: mol_type = other DNA
tgaaacatctggattctccttcagtgattattggatgagttgggcccgccaggctccaggaaagggtctagagtgggtggccaacataaacgaacctggaaatgacaaatattatgtggactctgtgaggggccgattcaccatctccagagacaacgtcaggaggtcagtgtttctggaaatccacagcccgagagccgaagacacggctgtctattattgtgcgagaaacccggacgccggcacagctgactactggggcctcggaaccctggtcaccgtctcctca

SEQ ID NO: 9376 - DNA, 295 bp, Homo sapiens
  source 1..295: mol_type = other DNA
cactgtctctggtgcctccatcagcaataggaattactactggagctggatccgccagtccccagggaaggggctggagtggattgggggtgtctcttatagtgggaacacctactacaatccgtccctcaagagtcgagtcacaatatccgtagacgcgtccaagaaccagttctccctgaaactgaggtctgtgaccgccgcagatgcggctctcttttactgtgcgagacggggttcggagaattattggattgactcgtggggccagggaaccctggtcatcgtctcctca

SEQ ID NO: 9377 - DNA, 295 bp, Homo sapiens
  source 1..295: mol_type = other DNA
cagtgtctctggtgactccatcagcagtggtagtttctactggggctggatccgccagccccccgggaaggggctggagtggattgggggcatcttttatactggaaaaacctactacaatccgtccctcaagagtcgagtcaccatatccgtagacacgtccaagaaccagttctccctgaaactgagctctgtgaccgccgcagacacggctgtctattactgtgcgagacggggttcggagaattattggattgactcctggggccagggaaccctggtctccgtctcctca

SEQ ID NO: 9378 - DNA, 295 bp, Homo sapiens
  source 1..295: mol_type = other DNA
cactgtctctggtggctccatcagcagtaggatttactactggagctggatccgccagtccccagggaaggggctggagtggattgggggtgtctcttatagtgggaacacctactacaacccgtccctcaagagtcgagtcaccatatccctagacacgtccaagaaccagttctccctgaaactgacctctgtgaccgccgcagacacggctgtctattactgtgcgagacggggttcggagaattattggattgactcctggggccagggaaccctggtcaccgtctcctca

SEQ ID NO: 9379 - DNA, 295 bp, Homo sapiens
  source 1..295: mol_type = other DNA
cactgtctctggtgcctccatcagcaataggaattactactggagctggatccgccagtccccagggaaggggctggagtggattgggggtgtctcttatagtgggaacacctactacaatccgtccctcaagagtcgagtcacaatatccgtagacgcgtccaagaaccagttctccctgaaagtgagctctgtgaccgccgcagatacggctctctattactgtgcgagacggggttcggagaattattggattgactcgtggggccagggaaccctggtcatcgtctcctca

SEQ ID NO: 9380 - DNA, 295 bp, Homo sapiens
  source 1..295: mol_type = other DNA
cagtgtctctggtggctccatcagcagtagtcgttactactggggctggatccgccagtcccccgggaaggggctggagtggattgggggtgtctcctatggtgggaacacctactataactcgtccctcaagagtcgagtcaccatcttcgtagacacgtccaataacaagttctccctgaaaatgaggtctgtgaccgccgcagacacggctgtctattactgtgcgagacggggttcggagaattattggattgactcctggggccagggaaccctggtcaccgtctcctca

SEQ ID NO: 9381 - DNA, 295 bp, Homo sapiens
  source 1..295: mol_type = other DNA
cactgtctctggtggctccatcagcagtaggatttactactggagctggatccgccagtccccggggaaggggctggagtggattgggggtgtctcttatagtgggaacacctactacaacccgtccctcaagagtcgagtcaccatatccctagacacgtccaagaaccagttctccctgaaactgacctctgtgaccgccgcagacacggctgtctattactgtgcgagacggggttcggagaattattggattgactcctggggccagggaaccctggtcaccgtctcctca

SEQ ID NO: 9382 - DNA, 295 bp, Homo sapiens
  source 1..295: mol_type = other DNA
cactgtgtctggtggctccatcagcagtaggagttactactggagctggatccgccagtccccagggaaggggctggagtggattgggggtgtctcgtatagtgggaacagctactacaacccgtccctcaagagtcgagtcaccatatccgtagacacgtccaagaaccagttctccctgaaactgacctctgtgaccgccgcagacacggctgtctattactgtgcgagacggggttcggagaattattggattgactcctggggccagggaaccctggtcaccgtctcctca

SEQ ID NO: 9383 - DNA, 295 bp, Homo sapiens
  source 1..295: mol_type = other DNA
cactgtctctggtggctccatcagcagtagtagttattactggggctggatccgccagcccccagggaaggggctggagtggattgggggtatctcttttggtgggaacacctactacaacccgtccctcaagagtcgagtcaccatatccgtagacacgtccaagaaccagttctccctgaaagtgaactctgtgaccgccgcagacacggctgtctattactgtgcgagacggggttcggagaattattggattgactcgtggggccagggaaccctggtcaccgtctcctca

SEQ ID NO: 9384 - DNA, 295 bp, Homo sapiens
  source 1..295: mol_type = other DNA
cactgtctctggtggctccatcatcagtagtagttattactggggctggatccgccagcccccagggaaggggctggagtggattgggagtatctcttctagtgggagaacctactacaacccgtccctcaagagtcgagtcaccatatccgtcgacatgtccaagaaccatttctacctgaaactgaggtctgtgaccgccgcagaaacggctgtgttttattgtgcgagaaggggttcggagaattattggattgactcctggggccagggaaccctggtcatcgtctcctca

SEQ ID NO: 9385 - DNA, 295 bp, Homo sapiens
  source 1..295: mol_type = other DNA
cactgtctctggtggctccatcagcaggagtagttactactggggctggatccgccagcccccagggaaggggctggagtggattgggggtatcttttatagtgggaaaacctactacaatccgtccctcaagagtcgagtcaccatatccgtagacacgtccaagaaccagttctccttgaaactgaactctgtgaccgccgcagacacggctgtctattactgtgcgagacgggggtcggagaattattggattgactcctggggccagggaaccctggtcaccgtctcctcg

SEQ ID NO: 9386 - DNA, 295 bp, Homo sapiens
  source 1..295: mol_type = other DNA
cactgtctctggtggctccatcagcagtaggaattactactggagctggatccgccagtccccagggaaggggctggagtggattgggggtatctcttatagtgggaacacctactacaacccgtccctcaagagtcgagtcaccatatccttagacacgtcgaagaaccagttctccctgaaactgacctctgtgaccgccgcagacacggctgtctattactgtgcgagacggggctcggagaattattggattgactcttggggccagggaaccctggtcaccgtctcctca

SEQ ID NO: 9387 - DNA, 316 bp, Homo sapiens
  source 1..316: mol_type = other DNA
tacagcttctggattcatctttggtgatcatggtgtgagctggttccgccaggctccagggaagggtctggagtgggtaggtttcattagaaagaaaactcatggtgggacaacagaatacgccgcgtctgtgaagggcagattcaccatctcaagagatgattccaaaagcgtcgcctatctgcaaatgaacagcctgaaaaccgaggacacagccatatattactgtagtagagatttttcgggatattgtagtatgaccagttgttatgcctttgactactggggccagggaaccctggtcaccgtctcctca

SEQ ID NO: 9388 - DNA, 316 bp, Homo sapiens
  source 1..316: mol_type = other DNA
tacagcttctggattcatctttggtgatcatggtgtgagctggttccgccaggctccaggaaagggtctggagtgggtaggtttcattagaaagaaaactcatggtgggacaacagaatacgccgcgtctgtgaagggcagattcaccatctcaagagatgattccaaaagcgtcgcctatctgcaaatgaacagcctgaaaaccgaggacacagccatatattactgtagtagagatttttcgggatattgtagtatgaccagttgttatgcctttgactactggggccagggaaccctggtcaccgtctcctca

SEQ ID NO: 9389 - DNA, 316 bp, Homo sapiens
  source 1..316: mol_type = other DNA
tacagcttcgggattcacctttggtgattatggtttgagctggttccgccaggctccagggaaggggctgcagtgggttggtttcattagaaggaaagctcacggtgggacaacagaatacgccgcgtctgtgaaaggaagattcaccatttcaagagatgactccaaaagcatcgcctatctgcaaatgaacagcctgaaaaccgaggacacaggcgtgtattactgtagtcgagatttcagtggatattgtagtatgaccagctgctatgcctttgactactggggccagggaaccctggtcaccgtctcctca

SEQ ID NO: 9390 - DNA, 289 bp, Homo sapiens
  source 1..289: mol_type = other DNA
cacagtctctggtggctccatgagtaattactattggagctggatccggcagcccccggggaagggactggagtggattggctacatctactacagtggagccaccaactacaacccctccctcaagagtcgagtcaccatgtcagcagacacgtccaagaatcagttgtccctgaagctgacctctgtgaccgctgcggacacggccgtatattactgtgcgagacgagatagtagcagatggttccttgactactggggccagggagcgctagtcaccgtctcctca

SEQ ID NO: 9391 - DNA, 289 bp, Homo sapiens
  source 1..289: mol_type = other DNA
cactgtctctgatggctccctcagtggttactactggagctggatccggcagcccccagggatgggactggagtggattggttatttgtattacactgggaccaccaactacaacccctccctcaagagtcgagtcaccatatctttgggcacgtccaagaaccagttctccctgaagctgagctctgtgacagccgcagacacggccgtgtatttctgtgcgagacgggatagcagcaggtggtttctagactactggggccggggaacactggtcaccgtctcctcc

SEQ ID NO: 9392 - DNA, 295 bp, Homo sapiens
  source 1..295: mol_type = other DNA
tgcagcctctgggttcaccgtcagtggcaactacttgagctgggtccgccaggctccagggagggggctggaatgggtctcagttatttatgccggtggtaccacatactacgtggactccgtgaagggccgattcaccatctccagagacaattcccagaacacactgtatcttcaaatgaacagcctgagagccgaggacacggccgtgtattactgtgcgagagactttcacgatttttggagtggtacccttggctactggggccagggaacccaggtcaccgtctcctca

SEQ ID NO: 9393 - DNA, 295 bp, Homo sapiens
  source 1..295: mol_type = other DNA
tgcagcctctgggttcaccgtcagtagtaactacatgacctgggtccgccaggctccagggaaggggctggagtgggtctcagttctttatagcggtggtaccacatattatgcagactccgtgaagggccgattcaccatctcccgacacaattccaaggacactctgtatcttcaaatgaacagcctgagagtcgaggacacggccgtttattactgtgcgagagattttcacgatttttggagtgggacccttggctactggggccagggaagcctggtcagcgtctcctca

SEQ ID NO: 9394 - DNA, 295 bp, Homo sapiens
  source 1..295: mol_type = other DNA
tgcagcctctgggttcaccgtcagtggcaactacttgagctgggtccgccaggctccagggagggggctggaatgggtctcagttatttatgccggtggtaccacacactacgtggactccgtgaagggccgattcaccatctccagagacaattcccagaacacactgtatcttcaaatgaacagcctgagaggcgaggacacggccgtgtattactgtgcgagagactttcacgatttttggagtggtacccttggctactggggccagggaacccaggtcaccgtctcctca

SEQ ID NO: 9395 - DNA, 292 bp, Homo sapiens
  source 1..292: mol_type = other DNA
tgtagtctctggattcaccttcagtagctactggatgcactgggtccgccaagttccagggaaggggctgatgtgggtctcacgtacaaatactgatgggagtagcacgaattacgcggactccgtgaagggccgattcaccatctccagagacaacgccaagggcacgctgcatttgcaaatgaacagtctgagagacgacgacacggctgtgtattactgtgtaagggggaccaatggctggtacggaattgactactggggccagggagtcctagtcaccgtctcctca

SEQ ID NO: 9396 - DNA, 292 bp, Homo sapiens
  source 1..292: mol_type = other DNA
tgcagcctctggattcattttcagaagttactggatgcactggttccgccaagctccagggaaggggctggtgtgggtctcacgtattaatactgacgggagtagcatagactacgcggactccgtgaagggccgattcaccatctccagagacaacgccaagaacacactgtatctgcaaatgaacagtctgggagccgacgacgcggctctgtattactgtgtaagaggtaccaatggctggtacgggattgactactggggccagggggccctggtcaccgtctcctca

SEQ ID NO: 9397 - DNA, 292 bp, Homo sapiens
  source 1..292: mol_type = other DNA
tgcagcctctggattctttttcagaagttactggatgcactgggtccgccaagctccagggaaggggctggtgtgggtctcacgtattgataatgatgggagtaccataaactacgcggactccgtgaagggccgattcaccatctccagagacaacgccaagaacacactgtatctgcaaatgaacagtctgggagccgacgacacggctctatattactgtgtaagaggtaccaatggctggtacgggattgactactggggccagggaaccctggtcaccgtctcctca

SEQ ID NO: 9398 - DNA, 292 bp, Homo sapiens
  source 1..292: mol_type = other DNA
tgcagcctctggattcaccttcagtagctactggatgcactgggtccgccaagctccagggaaggggctggtgtgggtctcacgtattaataatgatgggaatttcgcaaactacgcggactccgtgcagggccgattcaccatctccagagacaacgccatgaacacgctgtacctgcaaatgaacagtctgggagccgaggacacggctgtgtattactgtgtaagaggtaccaatggctggtacgggattgactactggggccagggaaccctggtcaccgtctcctca

SEQ ID NO: 9399 - DNA, 295 bp, Homo sapiens
  source 1..295: mol_type = other DNA
cactgtctctggtggctccatcagtagtaggagttactactggagctggatccgccagtccccagggaaggggctggagtggattgggggtgtctcttatactgggaacacctactacaacccgtccctcaagagtcgagtcatcatatccatagacacgtccaagaaccaattctccctgaaactgacctctgtgaccgccgcagacacggctatcttttactgtgcgagacggggttcggagaattattgggttgactcctggggccagggaaccctggtcaccgtctcctca

SEQ ID NO: 9400 - DNA, 295 bp, Homo sapiens
  source 1..295: mol_type = other DNA
cactgtctctggtggctccatcagcaggagtaattactactggggttggatccgccagcccccagggaagggactggagtggattgggagtattcattatagtgggaggatatactacaattcgtccctcaagagtcgagtcaccatatccgtagacaccaccaagaaccagttctccctgaaggtgagctctgtgaccgccgcagacacggctgtgtactactgtgcgagaaggggttcggagaattattgggttgactcctggggccagggagccccggtcaccgtctcctca

SEQ ID NO: 9401 - DNA, 295 bp, Homo sapiens
  source 1..295: mol_type = other DNA
cactgtctctggtggctccatcattggtagtggttactactggggctggatccgccagcccccagggaaggggctggagtggattgggagtatctcttctagtgggagaacctactacaacccgtccctcaagagtcgagtcaccatatccgtagacacgtccaagaaccatttctccctgaagctgagctctgtgaccgccgcagaaacggctgtgtattattgtgcgagaaggggttcggagaattattgggttgactcctggggccagggaaccctggtcatcgtctcctca

SEQ ID NO: 9402 - DNA, 295 bp, Homo sapiens
  source 1..295: mol_type = other DNA
cactgtctctggtgactccgtcagcagtggtagtttttactggggctggatccgccagcccccagggaaggggctggagtggattgggagtgtctcttatagtgggagaacctactacaacccgtccctcaagagtcgagtcaccatatccgtagacccgtccaagaaccagttctccctgaagttgaactctgtgaccgccacagacacggctgtgtattactgtgcgagaaggggttcggagaattattgggttgattcttggggccagggagccctggtcaccgtttcctca

SEQ ID NO: 9403 - DNA, 295 bp, Homo sapiens
  source 1..295: mol_type = other DNA
cactgtctctggtggctccatcagcaggagtagttactactggggttggatccgccagcccccagggaagggactggagtggattgggagtattcattacagtgggaggatatattacaacccgtccctcaagagtcgagtcaccatatccgtagacaccaccaagaaccagttctccctgaagttgagctctgtgaccgccgcagacacggctgtgtactactgtgcgagaaggggttcggagaattattgggttgactcctggggccagggagccccggtcaccgtctcctca

SEQ ID NO: 9404 - DNA, 295 bp, Homo sapiens
  source 1..295: mol_type = other DNA
cactgtctctggtggctccatcattagtagaagttactactggggctggatccgccagcccccagggaaggaactggagtggattgggagtatctcttctagtgggagaacctactacaacccgtccctcaagagtcgagtcaccatatccgtagacacgtccaagaaccagttctccctgaaactgagctctgtgaccgccgcagaaacggctgtctattattgtgcgagaaggggttcggagaattattgggttgactcctggggccagggaaccctggtcatcgtctcctca

SEQ ID NO: 9405 - DNA, 295 bp, Homo sapiens
  source 1..295: mol_type = other DNA
cactgtctctggtggctccatcagcaggagtagttactactggggttggatccgccagcccccagggaagggactggagtggattgggagtattcattacagtgggaggatatattacaacccgtccctcaagagtcgagtcaccatatccgtagacaccaccaagaaccagttctccctgaagctgagctctgtgaccgccgcagacacggctgtgtactactgtgcgagaaggggttcggagaattattgggttgactcctggggccagggagccccggtcaccgtctcctca

SEQ ID NO: 9406 - DNA, 295 bp, Homo sapiens
  source 1..295: mol_type = other DNA
cactgtctctggtggctccatcattagtagtagttactactggggctggatccgccagcccccagggaaggggctggagtggattgggagtatctcttctagtgggagaacctactacaacccgtccctcaagagtcgagtcaccatatccgtagacacgtccaagaaccatttctccctgaaactgagctctgtgaccgccgcagaaacggctgtgtattattgtgcgagaaggggttcggagaattattgggttgactcctggggccagggaaccctggtcatcgtctcctca

SEQ ID NO: 9407 - DNA, 295 bp, Homo sapiens
  source 1..295: mol_type = other DNA
cattgtctctggtggctccatcattagcagtagttattactggggctggattcgccagcccccagggaaggggctggagtggattgggagtatctcttctagtgggagaacctactacaacccgtccctcaagagtcgagtcaccatatccgtagacacgtccaagaaccatttctccctgaaactgaactctgtgaccgccgcagaaacggctgtgtattattgtgcgagaaggggttcggagaattattgggttgactcctggggccagggaaccctggtcatcgtctcctca

SEQ ID NO: 9408 - DNA, 295 bp, Homo sapiens
  source 1..295: mol_type = other DNA
cactgtctctggtggctccatcggcagtggtgcttactactgggcctggatccgccagcccccagggaaggggctggagtggattgggggtggccattatagtgggagcgcctacttcaatccgtccctcaagagtcgggtcaccatatccgtagacacgtccaagaaccagttctccctgaagctgacctctgtgaccgccacagacacggctgtctattactgtgcgcgaaggggttcggagaattattgggttgactcctggggccagggaaccctggtcaccatttcctca

SEQ ID NO: 9409 - DNA, 295 bp, Homo sapiens
  source 1..295: mol_type = other DNA
cactgtctctggtggctccatcagcaggagtagctactactggggttggatccgccagcccccagggaagggactggagtggattgggagtattcattatagtgggaggatatattacaacccgtccctcaagagtcgagtcaccatatccgtagacaccaccaagaaccagttctccctgaagctgagctctgtgaccgccgcagacacggctgtatactactgtgcgagaaggggttcggagaattattgggttgactcctggggccagggagccccggtcaccgtctcctca

SEQ ID NO: 9410 - DNA, 285 bp, Homo sapiens
  source 1..285: mol_type = other DNA
gcatctgggtacaccttcaccgactaccttctacactgggtgcgacaggcccctggacaaggacttgagtacatgggattcatcgtcccttatgatggtgtcacgggttatggacagaggttgcagggcagactcaccatggccagggacacgtccgcgatgacagtctacatggaactgagaagcctgagatctgacgacacggccgtttattactgtgtgagagaacgcagtggcggtttttgggactactggggccagggaagtctggtcaccgtctcctca

SEQ ID NO: 9411 - DNA, 285 bp, Homo sapiens
  source 1..285: mol_type = other DNA
acatctggatacaccttcaccacctactatctacactggatgcgacaggcccctggacaagggcttgagtggatgggaacaatcaggccgagtggtggtggcaccgtctacgcacagaagttgcaggggagggtcaccatgaccagggacacgtccacgagcacagtctacatggacctgagcagcctgaggtctgaggacacggccgtgtattactgtgtgagagagcgaagcgggggtttctgggactactggggccagggaaccctggtcaccgtctcctca

SEQ ID NO: 9412 - DNA, 288 bp, Homo sapiens
  source 1..288: mol_type = other DNA
gcatctggatacactttcaccagctactatatgcactgggtccgacaggcccctggacaagggcttgagtggatgggaataatcaaccctagtggtgataccacaacctacgctcagaagttccaggacagagtcaccatgaccagggacacgtccacgaggacagtctatatggaactgagcagtttgaaatccgaggacacggccgtgtattactgtgcgaggggggcagcagctggtagggctcttgactactggggccagggaaccctggtcaccgtctcctca

SEQ ID NO: 9413 - DNA, 288 bp, Homo sapiens
  source 1..288: mol_type = other DNA
gcatctggatacaccttcaccaactactatatgcactgggtgcgacaggcccctggacaagggcttgaatggatgggattaatcaaccctagtggtgatactacatcctacgcacagaaattccaggacagagtcaccatgaccagggacacgtccacgagcacagtctacctggacctgagcagcctgagatctgaggacacggccgtttattactgtgcgagaggggcagcagctggtagagcccttgactactggggccagggaaccctggtcaccgtctcctca

SEQ ID NO: 9414 - DNA, 288 bp, Homo sapiens
  source 1..288: mol_type = other DNA
gcttctggatacaccttcactaactatgctatacattgggtgcgccaggcccccggacaaaggcttgagtggatgggatggatcaacgctgccaatggtaacacaaaatattcacagaaattccggggcagagtcaccattaccagggacacatccgcgagcacagtctacatggacctgaggagcctgacatctgaagacacgtctgtgtattactgtgcgagtctatccagagatggctataactctgactactggggccagggaaccctggtcaccgtctcctca

SEQ ID NO: 9415 - DNA, 288 bp, Homo sapiens; identical to SEQ ID NO: 9414
  source 1..288: mol_type = other DNA

SEQ ID NO: 9416 - DNA, 288 bp, Homo sapiens
  source 1..288: mol_type = other DNA
gcttctggatacaccttcactaactatgctatccattgggtgcgccaggcccccggacaaaggcttgagtggatgggatggatcaacgctggcaatggtaacacaaaatattcacagaagttgcagggcagagtcaccattaccagggacacatccgcgagcacagcctacatggagctgagcagcctgagatctgaagacacggctgtgtatttctgtgcgagtcttagtagagatggctacaattcggactactggggccagggaaccctggtcaccgtctcctca

SEQ ID NO: 9417 - DNA, 288 bp, Homo sapiens
  source 1..288: mol_type = other DNA
gcttctggatactccttcactaactatgctatccattgggtgcgccaggcccccggacaaaggcttgagtggatgggatggatcaacgttggcaatggtaacacaaaatattcacagaagttgcagggcagagtcaccattaccagggacacatccgcgaccacagtctacatggagctgaccagcctgagatctgaagacacggctgtgtatttctgtgcgagtcttagtagagatggctacaattcggactactggggccagggaaccctggtcaccgtctcctca

SEQ ID NO: 9418 - DNA, 288 bp, Homo sapiens; identical to SEQ ID NO: 9416
  source 1..288: mol_type = other DNA

SEQ ID NO: 9419 - DNA, 288 bp, Homo sapiens
  source 1..288: mol_type = other DNA
gcttctggacacaccttcagtaactatgctatgcattgggtgcgccaggcccccggacaaaggcttgagtggatgggatggatcaacactggcaatggtaacacaaaatattcacagaagttccagggcagagtcaccattaccagggacacatccgcgagcacagtctacatggagctgagcagcctgagatctgaagacacggctgtgtatttctgtgcgagtcttagtagagatggctacaattcagactactggggccagggaaccctggtcaccgtctcctca

SEQ ID NO: 9420 - DNA, 292 bp, Homo sapiens
  source 1..292: mol_type = other DNA
tgcagcctctgggttcagtgtcagtgacatctacacgacatgggtccgacaggctccagggaaggggctggagtgggtctcagttatttataccggtggaagcacatactacgcagactccgtgaagggccgattcaccatctccagagacatttcaaagaatacgctgtatcttcaaatgaacagcctgagagccgaggacacggccgtctattattgtgcgagagcctacaataactacgtttactactttgactactggggccagggaaccctggtcaccgtctcctca

SEQ ID NO: 9421 - DNA, 292 bp, Homo sapiens
  source 1..292: mol_type = other DNA
tgcagcctctgggttcagcgtcactaataactacatgatctgggtccgccaggctccagggaaggggctggagtgggtctcagttatttatagcggcggtggtacatactacgcagactccgtgaagggccgattcaccatctctagagacaattccaagaacacgctgcatctgcagatgaacagcctgagagtcgaggacacggccgtgtattactgtgcgagagcatataataactacgtgtactactttgactactggggccagggaaccctggtcaccgtctcctca

SEQ ID NO: 9422 - DNA, 295 bp, Homo sapiens
  source 1..295: mol_type = other DNA
tgcagcctctggattcagtttcagtaacgcctggatgacctgggtccgccaggctccagggaaggggctggagtgggttggccgtattgaaggcaaaactgatggtgagacaacagcctacgctgcacccgtgaaaggcagattcaccatctcaagagatgcttcaaaggacaccctgtatctgcaaatgaacagcctgaaaatcgaggacacagccgtgtattactgtaccacacaattcaattggaacgacggggaccactggggccagggaaccctggtcaccgtctcctca

SEQ ID NO: 9423 - DNA, 295 bp, Homo sapiens
  source 1..295: mol_type = other DNA
tgcagcctctggattcactttcagtaacgcctggatgacctgggtccgccaggctccagggaaggggctggagtgggttggccttattaagaccaaaaatgatggtgtgacaacacattacggtgcacccgtaaaaggcagattcaccatctcaagagatgattcaagaagtacgctgtatctgcagatgaacagcctgaaaaccgaggacatggccgtatattactgtaccacccaattcaattggaacgacggggaccactggggccagggagccctggtcatcgtctcctca

SEQ ID NO: 9424 - DNA, 289 bp, Homo sapiens
  source 1..289: mol_type = other DNA
tgcagcgtctggaatccccttcaattcctctggcatgcactgggtccgccaggctccaggcaagggactggagtgggtggcgatgatctggtctgatggaagtaatgatttctatgcagactccgtgaagggccgattctccatctccagagacaacttgaagaacacgctgtatctgcaaatgaacagcctgagagccgaggacacggctatgtattactgtgcgagagataaaggggtcacttccattgaccagtggggccagggaaccctggtcaccgtctcctca

SEQ ID NO: 9425 - DNA, 289 bp, Homo sapiens
  source 1..289: mol_type = other DNA
tgcagcgtctggaatccctttcagcagttctggcatgcactgggtccgccaggctccaggcaaggggctggagtgggtggcatttatatggtctgatggaagtaagacatattatacagactccgtgaagggccgattcaccatttccagagacaattcgaataacatggtgtatctgcaaatgaacagcctgagagccgaggacacggctgtctattactgtgcgagagataagggggtgacatcgattgaccaatggggccagggaaccctggtcaccgtctcctca

SEQ ID NO: 9426 - DNA, 300 bp, Homo sapiens
  source 1..300: mol_type = other DNA
acatctggatacaccttcaccagccagtatctgcactgggtgcgacaggcccctggacaagggcttgagtggatgggaataatcaaccctactggtggcaattcaaactacgcacagaaattccggggcagagtcaccatgaccagggacacgtccacgagcacagtctacatggagctgagcagcctgacatctgaggacacggccttgtattactgtgcgagagggaaggagtatagtggctaccaggaatactactttgactactggggccagggaaccctggtcaccgtctcatca

SEQ ID NO: 9427 - DNA, 300 bp, Homo sapiens
  source 1..300: mol_type = other DNA
acatctggatacaccttcaccagttactatgtaaactgggtgcgacaggcccctggacaagggcttgagtggatggggatagtcaaccctactagtggtagcgcaagcctcgcacagaagttccagggcagagtcaccatgaccagggacaggtccacagccacaatgtacatggagctgagcagcctgagatctgaggacacggccgtatattactgtgcgagaggaaaggagtacagtggttatcaggaatactactttgactactggggccagggaaccctggtcaccgtctcctca

SEQ ID NO: 9428 - DNA, 295 bp, Homo sapiens
  source 1..295: mol_type = other DNA
cactgtctctggtggctccatcagcaggagtagttactactggggctggatccgccagcccccagggaaggggctggagtggattgggggtatctattatagtgggaaaacttactacaacccgtccctcaagagtcgagtcaccatattcgtagacacgtccaagaaccagttctccctgaaactgaactctgtgaccgccgcagacacggctgtctatttctgtgcgagacggggttcggagaattattggattgactactggggccagggaaccctggtcaccgtctcctca

SEQ ID NO: 9429 - DNA, 295 bp, Homo sapiens
  source 1..295: mol_type = other DNA
cactgtctctggtggctccatcagcaggagtagttactactggggctggatccgccagcccccagggaaggggctggagtggattgggagtatctattatagtgggaaaacctactacaacccgtccctcaagagtcgagtcaccatatccgtagacacgtccaagaaccagttctccctgaaactgaactctgtgaccgccgcagacacggctgtctattactgtgcgagacggggttcggagaattattggattgactactggggccagggaaccctggtcaccgtctcctca

SEQ ID NO: 9430 - DNA, 295 bp, Homo sapiens
  source 1..295: mol_type = other DNA
cactgtctctggtggctccatcagcagtagtacttactactggggctggattcgccagcccccagggaaggggctggagtggattgggagtatccactatagtgggaaaacctactacaacccgtccctcaagagtcgagtcaccatatccgtagacacgtccaagaaccagttctccctgagactgaactctgtgaccgccgcagacacggctgtctattactgtgcgagacggggttcggagaattattggattgactactggggccagggaaccctggtcaccgtctcttca

SEQ ID NO: 9431 - DNA, 292 bp, Homo sapiens
  source 1..292: mol_type = other DNA
cactgtctctggtggctccatcagcagtagttactactggggctggatccgccagcccccagggaaggggctggagtggattgggagtatccattatagtgggaaaacctactacaacccgtccctcaagagtcgagtcaccatatccgtagacacgtctaagaaccagttctccctgaaactgaactctgtgaccgccgcagacacggctgtctattactgtgcgagacggggttcggagaattattggattgactactggggccagggaaccctggtcaccgtctcctca

SEQ ID NO: 9432 - DNA, 295 bp, Homo sapiens
  source 1..295: mol_type = other DNA
cagtgtctctggtggctccatcgacagtagtaattactactggggctggatccgccagcccccagggaaggggctggagtggattgggagtatccattatagtgggaaaacctactacaacccgtccctcaagagtcgagtcaccatatccgtagacacgtccaagaaccagttctccctgaaactgaactctgtgaccgccgcagacacggctgtctattactgtgcgagacggggttcggagaattattggattgactactggggccggggaaccctggtcaccgtctcctca

SEQ ID NO: 9433 - DNA, 295 bp, Homo sapiens
  source 1..295: mol_type = other DNA
cactgtctctggtggctccatcagtagtagtaattattactggggctggatccgccagcccccagggaaggggctggagtggattgggagtatctattatagtgggaaaacctactacaacccgtccctcaagagtcgagtcaccatatccgtagacacgtccaagaaccagttctccctgaaactgagctctgtgaccgccgcagacacggctgtctattactgtgcgagacggggttcggagaattattggattgactactggggccagggaaccctggtcaccgtctcctcc

SEQ ID NO: 9434 - DNA, 295 bp, Homo sapiens
  source 1..295: mol_type = other DNA
cactgtctctggtggctccatcagctatagtaattactactggggctggatccgccagcccccagggaaggggctggagtggattgggagtatcaactatcgtggcatcacctactataacccgtccctcaagagtcgagtcgccatatccgtagacacgtccaagaaccagttctccctgaagttgagttctgtggccgccgcagacacggctgtatattactgtgcgagaaggggttcggagaattattggattgactactggggccagggaaccctggtcaccgtctcctca

SEQ ID NO: 9435 - DNA, 295 bp, Homo sapiens
  source 1..295: mol_type = other DNA
cactgtctctggtggctccatcagcagtagtaattactactggggctggatccgccagcccccagggaaggggctggagtggattgggagtatctattatagtgggaacacctactacaacccgtccctcaagagtcgagtcaccatatccgtagacacgtccaagaaccagttctccctgaaactgaactctgtgaccgccgcagacacggctgtctattactgtgcgagacggggttcggagaattattggattgactactggggccagggaaccctggtcaccgtctcctca

SEQ ID NO: 9436 - DNA, 295 bp, Homo sapiens
  source 1..295: mol_type = other DNA
cactgtctctggtggctccattggcagtagtagttactactggggctggatccgccagcccccagggaaggggctggagtggattgggagtatctattacagtgggaaaacctactacaacccgtccctcaagagtcgagtcaccatatccgttgacacgtccaagaaccagttctccctgaaactgaactctgtgaccgccgcagacacggctgtctattactgtgcgagacggggttcggagaattattggattgactactggggccagggaaccctggtcaccgtctcctca

SEQ ID NO: 9437 - DNA, 286 bp, Homo sapiens
  source 1..286: mol_type = other DNA
tgcagcctctggattcaccttcagagtctatagcatgaactgggtccgccaggctccagggaaggggcaggaatggatttcatacatgactagtgatatgagaaccatacactacgcagattctgtgaagggccgattcaccatctccagagacaatgacaactattccctttacctacaattgaacaacctcagagacgaggacacggctgtgtactattgtgtgagatcagtggctggggcctttgactactggggccagggaaccctggtcaccgtctcctca

SEQ ID NO: 9438 - DNA, 286 bp, Homo sapiens
  source 1..286: mol_type = other DNA
tgcagcctctggattcagtttcagtatttatagtatgaactgggtccgccaggctccagggaagggactggagtgggtttcacacatgactagtgatgagagaaccatacactacgcagactctgtgaagggccgattcaccatctccagaaacaacgccaggaggtcagtgtatttgcaaatgaacagcctgagagccgaggacacggctgtgtattactgtgtgagatcagtggctggcgcttttgactactggggccagggaacccaggtcaccgtctcccca

SEQ ID NO: 9439 - DNA, 298 bp, Homo sapiens
  source 1..298: mol_type = other DNA
tgcagtctctggattctccttcagtagctactggatgcactgggtccgccaagctccagggaaggggctggtgtgggtctcacgtattaatactgatgggagtagcagaacctacgcggactccgtgaagggccgattcaccgtctccagagacaactccaagaacacgctgtatttgcaaatgaacagtctgagggccgaggacacggctgtatattactgtgcaagaggggcagcacctggtatttctggatgggtcgacccctggggccagggaaccctggtcaccgtctcctca

SEQ ID NO: 9440 - DNA, 298 bp, Homo sapiens
  source 1..298: mol_type = other DNA
tgcagtctctggattctccttcagtagctactggatgcactgggtccgccaagctccagggaaggggctggtgtgggtctcacgtattaatactgatgggagtagcagaacctacgcggactccgtgaagggccgattcaccgtctccagagacaactccaagaacacgctgtatttgcaaatgaacagtctgagggccgaggacacggctgtatattactgtgcaagaggggcagcacctggtatttctggatgggtcgacccctggggccagggaaccctagtcaccgtctcctca

SEQ ID NO: 9441 - DNA, 298 bp, Homo sapiens
  source 1..298: mol_type = other DNA
tgcagcctctggattcaccttcagtagctactggatgcactgggtccgccaagctccagggaaggggctggtctgggtctcacgtattaatacagatgggagcagcacaaactacgcggactccgtgaagggccgattcaccatctccagagacaacgccaagaacacgctgtatctgcaactgaacagtctgagagacgaggacacggctgtgtatttttgtgcaagaggggctgcacctggtatttcgggctgggtcgacccctggggccagggaaccctggtcagcgtctcctca

SEQ ID NO: 9442 - DNA, 282 bp, Homo sapiens
  source 1..282: mol_type = other DNA
gcctctggatacaacttcacaaacaatggcatttattgggttcgacaggcccctggacaagggcttgagtggatgggatggatcaacaccatctctgggaccccaatatatgcccaggacttcacaggacggtatgtcttttcgttggactcctctgtcagcacggcatatctgcagatcagcagcctaaagcctgaggacactgccgtctatttctgtgcgagagggactcggggcgactttgactactggggccagggaaccctggtcatcgtctcgtca

SEQ ID NO: 9443 - DNA, 282 bp, Homo sapiens
  source 1..282: mol_type = other DNA
gcttctggatataacttcagtgacaatggtatctattgggtgcgacaggcccctggacaggggcttgagtggatgggatggatcaacaccaagactggcaacccaacgtatgcccagggcttcacaggacgctttgtcttctccttggacacctctgtcagtacggcatatctgcagatcagcagcctaaaggctgaggacactgccgtcttttactgtgcgagaggtacgaggggtgacttcgactattggggccagggaaccctggtcaccgtctcgtca

SEQ ID NO: 9444 - DNA, 282 bp, Homo sapiens
  source 1..282: mol_type = other DNA
gcttctggatataacttcagtgacaatggtatctattgggtgcgacaggcccctggacaggggcttgagtggatgggatggatcaacaccaagactggcaacccaacgtatgcccagggcttcacaggacgctttgtcttctccttggacacctctgtcagtacggcatatctgcagatcagcagcctaaaggctgaggacactgccgtcttttactgtgcgagaggtacgaggggtgacttcgactattggggccagggaaccctagtcaccgtctcgtca

SEQ ID NO: 9445 - DNA, 282 bp, Homo sapiens
  source 1..282: mol_type = other DNA
gcttctggatacaacttcagtgacaatggtatctattgggtgcgacaggcccctggacaggggcttgagtggatgggatggatcaacaccaagactggcaacccaacgtatgcccagggcttcacaggacgctttgtcttctccttggacacctctgtcagtacggcatatctgcagatcagcagcctaatggctgacgacactgccgtcttttactgtgcgagaggtacgaggggtgacttcgactactggggccagggaaccctggtcaccgtctcgtca

SEQ ID NO: 9446 - DNA, 282 bp, Homo sapiens; identical to SEQ ID NO: 9443
  source 1..282: mol_type = other DNA

SEQ ID NO: 9447 - DNA, 295 bp, Homo sapiens
  source 1..295: mol_type = other DNA
agcttctggatacaccttcactagctatgctatgaattgggtgcgacaggcccctggacaacggcttgagtggatggggtggatcaacacgaacactgggaacccaacgtatgcccagggcttcacaggacgctttgtcttctccttggacacctctgtcagcacggcatatctacagatcagcagcctaaaggctgaagacactgccgtgtattactgtgcgagagggacagcagtagctggtactgactggctcgacccctggggccagggaaccctggtcaccgtctcctca

SEQ ID NO: 9448 - DNA, 295 bp, Homo sapiens
  source 1..295: mol_type = other DNA
agcttctggatacaccttcactaactatgctatgaattgggtgcgacaggcccctggacaacggcttgagtggatggggtggatcaacacgaacactgggaagccaacatatgcccagggcttcacaggacgctttgtcttttccttggacacctctgtcagcacggcatatctacagatcaacagcctaaaggctgaagacactgccgtgtattactgtgcgagagggacagcagtagctggtactgactggctcgacccctggggccagggaagcctggtcaccgtctcctca

SEQ ID NO: 9449 - DNA, 294 bp, Homo sapiens
  source 1..294: mol_type = other DNA
gcttctggatacaccttcagtacttatgccatgaattgggtgcgacaggcccctggacaagggcttgagtggatgggatggatcaacaccaacactgggaacccaacgtatgcccagggcttcacagggcggtttgtcttctccttggacacctccgtcagcacggcttatctgctgatcagcagcctaaaggctgaggacactgccgtctattattgtgcgagaggtacggcagtggctggtacagactggctcgacccctggggccagggaacccaggtcaccgtctcctca

SEQ ID NO: 9450 - DNA, 279 bp, Homo sapiens
  source 1..279: mol_type = other DNA
gcctctggatacagcctcactaacaatggtgtgggttgggtgcgacaggtccctggaaaagggcttgaatggatgggatggatcaacacccacagtgggaacgcagcgtatgcccagggcttcacaggacggtttgtcttctccttggacacctctctcaatacggcatatctgcagatcaacagcctgaggactgacgacactgccatatattactgtgcgagagagccacgtcgacttgactactggggccagggaaccctggtcaccgtctcctca

SEQ ID NO: 9451 - DNA, 279 bp, Homo sapiens
  source 1..279: mol_type = other DNA
gcctctggatacagtctcagtagttttggtatgtgttgggtgcggcaggcccctggacaaggacttgagtggctgggatggatcaacacccacactgggcacccacaatatgtccaggccttagcagggcgtattgccttctccttcgacacctctgtcaacacggcatatctagagatcaactacctaagggctgacgacactgccgtctactactgtgcgagagaaccacgtcggcttgactattggggccagggaaccctggtcactgtctcctca

SEQ ID NO: 9452 - DNA, 301 bp, Homo sapiens
  source 1..301: mol_type = other DNA
tgcagcgtctggattcagtttcagtgattatggcatacactgggtccgccaggctccaggcaagggcctagagtgggtggcagctgtgtggtatgatggaagtaagacatattatggagactccgtgaagggccgattcaccatctccagagacatttccaagaacacggcgtttctgcagctgaacagcctgagagtcgaggacacggctgcttattactgtgcgagaggtgcggcctattacgatagcagtggtcatccggactactggggccagggaaccctggtcaccgtctcctca

SEQ ID NO: 9453 - DNA, 301 bp, Homo sapiens
  source 1..301: mol_type = other DNA
tggagtgtctggattcagcttcagtgactatggcatacactgggtccgccaggctccagacaaggggctggagtgggtggcagtcatttggtatggtggaagtaagaaattttatagagactccgtgaagggccgattcaccatctccagagacacttccgagaacaccatgtatctgcaaatgaatagccttagacccgaggacacggctgtctactattgtgcgagaggggccgcttactacgacagcagtggtcaccctgactactggggcccgggaaccctggtcaccgtctcctca

SEQ ID NO: 9454 - DNA, 301 bp, Homo sapiens
  source 1..301: mol_type = other DNA
tggagtgtctggattcagcttcagtgaccatggcatacactgggtccgccaggctccagacaaggggctggagtgggtggcagtcatttggtatggtggaagtaagaaattttatagagactccgtgaagggccgattcaccatctccagagacacttccgagaacaccatgtatctgcaaatgaatagccttagacccgaggacacggctgtctactattgtgcgagaggggccgcttactacgacagcagtggtcaccctgactactggggcccgggaaccctggtcaccgtctcctca

SEQ ID NO: 9455 - DNA, 316 bp, Homo sapiens
  source 1..316: mol_type = other DNA
tgcagcgtctggattcaccttcagcagctatggcatgcactgggtccgtcaggctccaggcaaggggctggagtgggtggcagttatatggtatgatggaagtaataaatactatggagactccgtgaagggccgattcaccatctccagagacaattccaagaacacgctgaatctgcaattgaacagcctgagagtcgaggacacggctgtatattactgtgcgagagatcgggttactatggttcggggggaagcctaccactactacggtatggacgtctggggccaagggaccacggtcaccgtctcctca

SEQ ID NO: 9456 - DNA, 316 bp, Homo sapiens
  source 1..316: mol_type = other DNA
tgcagcgtctggattcaccttcactaaatatggcatgcactgggtccgccaggctccaggcaaggggctggagtgggtggcagttatatggtatgatggaagtaataaaaagtatgcaagctccgtgaagggccgattcaccatctccagagacaattccaagaacacgctgtatatgcaaatgaacagcctgagagccgaggacacggctgtgtactactgtgcgagagatagggttactatggttcggggagaagcctaccactactacggtatggacgtctggggccaagggaccacggtcaccgtctcctca

SEQ ID NO: 9457 - DNA, 316 bp, Homo sapiens
  source 1..316: mol_type = other DNA
tgcagcgtctggattcaccttcagtagctatggcatgcactgggtccgccaggctccaggcaaggggctggagtgggtggcagttatatggtatgatggaagtaataaatactatgcagactccgtgaagggccgattcaccatctccagagacaattccaggaacacgctatatctgcaaatgaacagcctgcgagccggggacacggctgtctattactgtgcgagagatcgggttactatggttcggggagaggcctaccactactatggtatggacgtctggggccaagggaccacggtcaccgtctcctca

SEQ ID NO: 9458 - DNA, 292 bp, Homo sapiens
  source 1..292: mol_type = other DNA
cactgtctctggtgactcgatcagtggttactactggacctggatccggcagtccccggggaagggactggagtggattgggtacatacattacagagggagcaccaattacaacccctccctcaagagtcgagtcaccatatcactagacacgtccaagagtcaggtctccctgatgctgaggtttgtgaccgctgcggacacggccgtgtattactgtgcgagaggatggcgtggatactcctatggttttgactactggggccagggaaacctggtcaccgtctcctca

SEQ ID NO: 9459 - DNA, 292 bp, Homo sapiens
  source 1..292: mol_type = other DNA
cactgtctctggtggctccatcagtagttactactggagctggatccggcagcccccagggaagggactggagtggattggctatatccattacagtgggagcaccaactacaattcctccctcaagagtcgagtcaccatatcagtagacacgtccaggaacctgttctccctgaagctgagctctgtgaccgctgcggacacggccgtgtattactgtgcacgaggttggcgtggatacagctatggttttgactactggggccagggaaccctggtcaccgtctcctca

SEQ ID NO: 9460 - DNA, 286 bp, Homo sapiens
  source 1..286: mol_type = other DNA
cactgtctccggtgcctccatcaggagttactactggacctggatccggcagcccccggggaagggactggagtggattgggtatatctattacggtgggagcaccaactacaacccctccctcaagagtcgagtcaccatatcactagacacgttcaaggaccagttctccctgaagctgacctctgtgaccgctgcggacacggccgtgtattactgtgcgagcggaattgtgggagcgaacggggcttactggggccaggggaccctggtcaccgtctcctca

SEQ ID NO: 9461 - DNA, 286 bp, Homo sapiens
  source 1..286: mol_type = other DNA
cactgtctctggtggctccatcaatgattactactggagctggatccggcagtccccagggaagggactggagtggattggatatatctattacactgggagtaccaagtacaacccctccctcaagagtcgagtcaccatctcacttgacacgtccaagagtcagttctccctgaagctgagctctgtgaccgccgcagacacggccgtatattactgtgcgagcggtatagtgggagctaatggggcctactggggccagggaaccctggtcaccgtctcctca

SEQ ID NO: 9462 - DNA, 283 bp, Homo sapiens
  source 1..283: mol_type = other DNA
tacagtttctggattcacctttggtgattatgctatgagctggttccgccaggctccagggaaggggctggaatgggtaggtttcattagaagcaaagcttatggtgggacaccagaatacgccgcgtctgtgaaaggcagattctccttctcaagagatgattccaaaagcatcgcctatctgcaaatgaacagcctgaaaatcgaggacacagccgtgtattactgtactagatctctatttgactactggggccagggaaccctggtcaccgtctcctca

SEQ ID NO: 9463 - DNA, 283 bp, Homo sapiens
  source 1..283: mol_type = other DNA
taaaacttctggattcacctttggtgaatatgctatgacctgggtccgccaggctccaggaaaggggctggagtgggtcggttttattagaagcaaagcttatgatgagacaacagaatacgccgcgtctgtgaaaggcagattcattttctcaagagatgattccaaaagcatcgcctatctgcagatgaacagcctgagaaccgaggacacagccgtgtatttctgtactagatccctttttgactactggggccagggaaccctggtcaccgtctcctca

SEQ ID NO: 9464 - DNA, 289 bp, Homo sapiens
  source 1..289: mol_type = other DNA
tgcagcccctggattcactttcagtaacgcctggatgagctgggtccgccaggctccagggaaggggctggagtgggttggccgtattaaaagcaaaactgatggtgggacaacagactacgctgcacccgtgaaaggcagattcaccatctcaagagatgagtcaaaaaacacgctatatctgcaaatgaacagcctgaaaaccgaggacacagccgtgtattattgtaccacagatcggggagcagcacctgactggggccagggaaccctggtcatcgtctcttca

SEQ ID NO: 9465 - DNA, 289 bp, Homo sapiens
  source 1..289: mol_type = other DNA
tgcagcctctggactcactttcagtaacgcctggatgagctgggtccgccaggctccagggaaggggctggagtgggtcggccgtattcaaagtaagactgatggtgggacaacagactccgctgcacccgtgaaaggcagattcaccatctcaagagatgattcaaaaaacacgctgtatctgcaaatgaacagcctgaaaaccgaggacacagccatttattactgtaccacagatcgaggagcagcaccagactggggccagggaaccctcgtcaccgtctcctca

SEQ ID NO: 9466 - DNA, 301 bp, Homo sapiens
  source 1..301: mol_type = other DNA
tgcagcctctggattcaccttttccagctatgccatgagctgggtccgccaggctccagggaaggggctggagtgggtctcagctattagtggtagtggtggtagcacatactacgcagactccgtgaagggccggttcaccatctccagagacaattccaagaacacgctgtatctgcaaatgaacagcctgagagccgaggacacggccgtatattactgtgcgaaaggggtaaatacttactcctactattacggtatggacgtctggggccaagggaccacggtcaccgtctcctca

SEQ ID NO: 9467 - DNA, 301 bp, Homo sapiens
  source 1..301: mol_type = other DNA
tgcagcctctggattcacctttagcagctttggcatgagctgggtccgccaggctccagggaaggggctggagtgggtctcaactattagtggtagtggtggtagcacatactacgcagagtccgtgaagggccggttcgccatctccagagacaactccaagaacacgctgtatctccaaatgaacagcctgagagccgaggacacggccatttattactgtgcgaaaggggtgaacacttactcctactactacggtatggacgtctggggccaagggaccacggtcaccgtctcctca

SEQ ID NO: 9468 - DNA, 292 bp, Homo sapiens
  source 1..292: mol_type = other DNA
tgcagcgtccggattcaccttcagtagctatggcatgcactgggtccgccaggctccaggcaaggggctgcagtgggtggcaaccatatggtatgatggaagtaagaaatactattcagactccgtgaagggccgattcaccatctccagagacaattccaagtatgtgctgtatctgcaaatgaacaccctgagagccgaggacacggctgtgtattactgtgcgagaggtaggagcagcagctgggatactgactactggggccagggaaccctggtcaccgtctcctcg

SEQ ID NO: 9469 - DNA, 292 bp, Homo sapiens
  source 1..292: mol_type = other DNA
tgcagcgtctggattcaccttcagtaactatggcatgcactgggtccgccaggctccaggcaaggggctggagtgggtggcagctatatggtatgatggaagtaaaaaattctatgtagagtccgtgaagggccgattcaccatctccagagacaattccaagaacacgatgtatctgcaattgaatagcctgagcgtcgaggacacggctgtgtattactgtgcgagaggtcgtagcagcagctgggacactgactactggggccagggaaccctggtcaccgtctcctca

SEQ ID NO: 9470 - DNA, 292 bp, Homo sapiens
  source 1..292: mol_type = other DNA
tgcagcgtccggattcaccttcagtaactatggcatgcactgggtccgccaggctccaggcaaggggctgcagtgggtggcaaccatatggtatgatggaagtaagaaatactattcagactccgtgaagggccgattcaccatctccagagacaattccaagtatgtgctgtatctgcaaatgaacaccctgagagccgaggacacggctgtgtattactgtgcgagaggtaggagcagcagctgggatactgactactggggccagggaaccctggtcaccgtctcctcg

SEQ ID NO: 9471 - DNA, 292 bp, Homo sapiens
  source 1..292: mol_type = other DNA
tgcagcgtccggattcaccttcagtagctatggcatgcactgggtccgccaggctccaggcaaggggctgcagtgggtggcaaccatatggtatgatggaagtaagaaatactattcagactccgtgaagggccgattcaccatctccagagacaattccaagtatgtgctgtatctgcaaatgaacaccctgagagccgaggacacggctgtgtattactgtgcgagaggtaggagcagcagctgggatactgactactggggccagggaaccctggtcaccgtctcttcg

SEQ ID NO: 9472 - DNA, 292 bp, Homo sapiens
  source 1..292: mol_type = other DNA
tgcagcgtccggattcaccttcagtagctatggcatgcactgggtccgccaggctccaggcaaggggctgcagtgggtggcaaccatatggtatgatggaagtaagaaatactattcagactccgtgaagggccgattcaccatctccagagacaattccaagtacgcgctgtatctgcaaatgaacaccctgagagccgaggacacggctgtgtattactgtgcgagaggtaggagcagcagctgggatactgactactggggccagggaaccctggtcaccgtctcctcg

SEQ ID NO: 9473 - DNA, 292 bp, Homo sapiens
  source 1..292: mol_type = other DNA
tacagcctctggattcaccttcagtagctactggatgcactgggtccgccaagttccagggaaggggctggtgtgggtctcacttattgacggtattgggacaaccacattctacgcggactccgtgaagggccgattcaccatctccagagacaacgtcaagaacacactgtatctgcaaatgaacagtctgacagccgaggacacggctgtgtattactgtgcaagagacgatgatggccggaagccccttgactactggggccagggaaccctggtcaccgtctcctca

SEQ ID NO: 9474 - DNA, 292 bp, Homo sapiens
  source 1..292: mol_type = other DNA
ttcagtctctggattcatcttcacaagttattggatgcactgggtccgccaagttccagggaaggggctggtttgggtctcaggtatggaccctgatgggactgacataaggtacgcggactccgtgaagggccgattcaccatctccagagacaacgccaagaacaccctgtatttgcaaatgaacagtctgagagtcgaggacacggctgtatattattgtgcaagagatgacgatggccgcaaacctcttgactactggggccagggaaccctggtcaccgtctcttca

SEQ ID NO: 9475 - DNA, 286 bp, Homo sapiens
  source 1..286: mol_type = other DNA
tgcagcctctggattcaccttcagtaccaactggatgcactgggtccgccaagctccggggaaggggctagtggtggtctcacttattcgacatgacggcagcagcccatactacgcggactccgtgaagggccgattcaccatctccagagacaacgccagaaacacactgtatctgcaaatgaacagtctgagagccgaggactcggctgtttattactgcgcaagggattactattattcgatagaatcttggggccagggaaccctggtcaccgtctcctca

SEQ ID NO: 9476 - DNA, 286 bp, Homo sapiens
  source 1..286: mol_type = other DNA
tgcagcctctggattcccctttagtactaactggatgcactgggtccgccaagctccagggaaggggctggtgtgggtctcacatattactagtgatgggagtaggacagattacgcggactccgtgaagggccgattcaccatctccagagacaacgccaagcacacgctgtatctgcaaatgaacagtctgagagccgaggacacggctgtgtattactgtgcaagggactattattattctattgaatcgtggggccagggaaccctggtcaccgtctcctca

SEQ ID NO: 9477 - DNA, 279 bp, Homo sapiens
  source 1..279: mol_type = other DNA
gcttctggatacaccttcactaaccatggtatgcagtgggtgcgccaggcccccggacaaggccttgagtggatgggatggatcaacgttgacaatggtgaaacaacacagtcgcagaagttccagggcagagtcaccattaccagtgacacatccgcgaccacagcctacatggagctgaacagcctgacttctgaagacacggctgtgtattactgtgcgagacatggagccggcatggacgtctggggcccagggaccacggtcaccgtctcctca

SEQ ID NO: 9478 - DNA, 280 bp, Homo sapiens
  source 1..280: mol_type = other DNA
ggcctctggatacaccttcactcgtaatggcatgcagtgggtgcgccaggcccccggacaaaggcttgagtggatgggatggatcgacgctggcaatggagagacagtatattcgcagaagttccaagacagagtcacccttaccagagacacatccgcgagcacagcgtacatggagttgagcagcctgacatctgaagacacggctgtgtattactgtgcgagacatggtgcggggatggacgtctggggccaagggagtgcggtcatggtctcctca

SEQ ID NO: 9479 - DNA, 286 bp, Homo sapiens
  source 1..286: mol_type = other DNA
cgctgtctatggtgggtccttcagtggttactactgcacctggatccgccagcccccagggaaggggctggagtggattggggaaatcaatcttcgtggaagcaccaactacaacccgtccctcaagagtcgagtcaccatatcactagacacatccaagaaccagttctccctgaagctgagctctgtgaccgccgcggacacggctgtgtattattgtgcgagaggtgatatagcagctcgcatgggctactggggccagggaaccctggtcaccgtctcctca

SEQ ID NO: 9480 - DNA, 286 bp, Homo sapiens
  source 1..286: mol_type = other DNA
cgctgtctatggtgggtccttcagtggttactactggagctggatccgccagccccccgggaaggggctggagtggattggggaaatcaatcatagtggaagcaccaactacaacccgtccctcaagagtcgagtcactatatcagtagacacgtccaagaaccagttctccctgaaactgaactctgtgaccgccgcggacacggctgtgtattactgtgcgaggggggatatagcagctcggatgggatactggggccagggaaccctggtcaccgtctcctca

SEQ ID NO: 9481 - DNA, 301 bp, Homo sapiens
  source 1..301: mol_type = other DNA
tgcaacgtctggattcaccttcacttcctatggcatacactgggtccgccaggctccaggcaaggggctggagtgggtggcagttatgtggtatgatggaattaataaatactatgcagactccgtgaagggccgattcaccgtctccagagacaattccaagagcacggtgtatctgcaaatgaacagcctgagagccgaggacacggctgtgtattactgtgcgagagatgttgatactactagtcattacggcaggttcgacccctggggccagggagccctggtcaccgtctcctca

SEQ ID NO: 9482 - DNA, 301 bp, Homo sapiens
  source 1..301: mol_type = other DNA
cgcagcgtctggattcattttcaatcactatggcatgcactgggttcgccaggctccaggcaaggggctggagtgggtggcagtgctctggtctaatggaaaggataaatattatgcagactccgtgaagggccgattcaccatctccagagacagtttcaagaacacggtctatctgcaaatgaaccgtctgagcgacgaggacacggctgtatattactgtgcgagagatgttgacactactagtcattacggccggttcgacccctggggccagggaacccgggtcaccgtctcctca

SEQ ID NO: 9483 - DNA, 301 bp, Homo sapiens
  source 1..301: mol_type = other DNA
tgcaacgtctggattcaccttcagtcactatggcatgcactgggtccgccaggctccaggcaaggggctggagtgggtggcagttgtttggtctgatggaactagaacaaactatgcagactccgtgaagggccgattcaccatctccagagacatttccgagagcacggtgtatctgcaaatgaacagcctgagagccgacgacacggctgtgtactcctgtgcgagagatgttgatactactagtcattacggtcgattcgacccctggggccagggaaccctggtcaccgtctcctca

SEQ ID NO: 9484 - DNA, 289 bp, Homo sapiens
  source 1..289: mol_type = other DNA
tgcagcctctgggtttacctttgattactattggatgagttgggtccgccaggccccagggaaggggctggagtgggtggccaacataaacgagggtggcagtgagacattctatgtggactctgtgaagggccgattcaccatctccagagacaacgccaagaacacactgtatctgcaaatgaacagcccgagagtcgaggacacggccgtgtattactgtgcgagagaccctgatactggaaccgcagactactggggccagggaaccctggtcaccgtctcctca

SEQ ID NO: 9485 - DNA, 289 bp, Homo sapiens
  source 1..289: mol_type = other DNA
tgcagtctctggattcacctttagtagctattggatgagctgggtccgccaggctccagggaaggggctggagtgggtggccaacattaacgagaatggacgtgagaaatactatgtggactctgtggagggccgattcaccatctccagagacaacgccaagaactcactgtatctgcaaatgaacagcctgagagtcgaggatatggctgtgtatttctgtgcgagagatccggatacgggtaccgccgactactggggccagggaaccctggtcaccgtctcctca

SEQ ID NO: 9486 - DNA, 274 bp, Homo sapiens
  source 1..274: mol_type = other DNA
tgcggtctctggattcgacttcagtaattttcccatgaactgggtccgacagtctccagagaggggtctggagtgggttgcatacatcactaagactggcgatgagacatactatgcagattctgtgaagggtcgattcaccgtctccagagacaatgccaggagctcactgtttctgcagatgaacagtctgagagacgaggacacggctatttattattgtacgacctggtctgactattggggccagggaaccctggtcaccgtctcctca

SEQ ID NO: 9487 - DNA, 274 bp, Homo sapiens
  source 1..274: mol_type = other DNA
tgcagtgtctggatttaccttcagtgattttcccatgaactgggtccgccagactccagggaaggggctgcaatggcttgcatatattagtcgtgatggtgatgacatattttacgcagactctgtgaagggccgattcaccatctccagagacaatgccaagagttcgctgtatctggaattgaacagtctgggaaaggacgacacgggtatttattattgcactacgtggtctgactactggggccagggaaccctggtcaccgtctcctca

SEQ ID NO: 9488 - DNA, 292 bp, Homo sapiens
  source 1..292: mol_type = other DNA
tgcagcctctggattcaactttagtaattgttggatgggctgggtccgccaggctccagggaaggggctggagtgggtggcctacataaaggaggatggaggtcagaagttctatgtggactctgtgatgggccgattcaccatttccagagacaacgccaagagttcactgtatgtgcaaatgaacagcctgagagccgaggacgcggccgtgtattattgtgtgagagatagaggggggcggagcggtatggacgtctggggccaagggaccacggtcaccgtctcctca

SEQ ID NO: 9489 - DNA, 292 bp, Homo sapiens
  source 1..292: mol_type = other DNA
tgaagcctctggattcaccttttggacctattggatgggctgggtccgccaggctccagggcagggactggagtgggtggcctggataaaggaagatgggggtgaaaagttctatgtggactccgtggagggccgattcaccatttccagagacaacgccaagaactcaatgttcttgcaaatgaacagcctgatagacgaggacacggccgtgtattattgtgtgagagatcgtggagggcggtccggtatggacgtctggggccaagggaccacggtcgtcgtctcctca

SEQ ID NO: 9490 - DNA, 292 bp, Homo sapiens
  source 1..292: mol_type = other DNA
tgaagcctctggattcagcttttggacttattggatgggctgggtccgccaggctccagggcagggactggagtgggtgacctacataaaggaagatggggatgaaaagcactatgtggactccgtgaagggccgattcaccatttccagagacaacgccaagaactcattgttcttgcaaatgaacagcctgatagacgaggacacggccgtgtattactgtgtgagagatcgtggagggcggtccggtatggacgtctggggccaagggaccacggtcatcgtctcctca

SEQ ID NO: 9491 - DNA, 292 bp, Homo sapiens
  source 1..292: mol_type = other DNA
tgcagcctctggattcccctttagtgatcattggatgggttgggtccgccaggctccagggatggggctggagtgggtggcctacttaaaggaagatggtggtcagagacattttgtggactctgtgaagggccgcttcaccatctccagagacaacgccaagaaagccttgtatctacaaatgaacagtctgacagtcgaggacacggccgtgtatttttgtgtgagagaccgggggggtagaagtggtatggacgtctggggccaagggaccacggtcatcgtctcctca

SEQ ID NO: 9492 - DNA, 289 bp, Homo sapiens
  source 1..289: mol_type = other DNA
tgcagcctctggattcacttttagtgattattggatgggttgcgtccgccaggctccagggaagggactggagtgggtggcctacataaaggaagatggaggtgagaaatattatgtggactctgtgaagggccgattcaccatcaccagagacaacgctcagaactcactgtttctgcaaatgaacagcctgagagccgaggacacggccgtctattactgtgtgagagaccgggggggcagaagtggtatggacgtctggggccaagggaccacggtcaccgtctcc

SEQ ID NO: 9493 - DNA, 301 bp, Homo sapiens
  source 1..301: mol_type = other DNA
tgcagcctctggattcacctttagcagctttgccatgacctgggtccgccaggctccaagggagggcctggagtgggtctcagcgattagtgatagtggtggtgccatatactacgcagactccgtgaggggccggttctccatctccagagacaattccaagaacacactgtatctgcaaatgaacagcctgagagccgaagacacggccgtatattactgtgcgaccctctacgatttttggagtggttacggcggtatggacgtctggggccaagggaccacggtcaccgtctcctca

SEQ ID NO: 9494 - DNA, 301 bp, Homo sapiens
  source 1..301: mol_type = other DNA
tgcagcctctggattcacctttagcaactttgccatgacctgggtccgccagactccagggaaggggctggagtgggtctcaggtataaatgacattggtggcagcacaaagtacgcagactccgtgaagggccggttcaccatttccagagacaattccaagaacatgttgtatctgcaaatgaacagcctgagagccgaggacacggccgtatatcactgtgcgacactttacgatttttggagtggttacggcggtatggacgtctggggccaagggaccacggtcaccgtctcctca

SEQ ID NO: 9495 - DNA, 289 bp, Homo sapiens
  source 1..289: mol_type = other DNA
tgcagcctctggattcacctctagcagctatgccatgagctgggtccgccaggctccagggaaggggctggagtgggtctcagctattagtggtagtggtggtagcacatactacgcagactccgtgaagggccggttcaccatctccagagacaattccaagaacacgctgtatctgcaattgaacagcctgagagccgaggacacggccgtgtattactgtgcgaaaggtggggtgactgccccctttgactactggggccagggaaccctggtcaccgtctcctca

SEQ ID NO: 9496 - DNA, 289 bp, Homo sapiens
  source 1..289: mol_type = other DNA
tgcagcctctggattcacctttagcagctatgccatgagttgggtccgccaggctccagggaaggggctggaatgggtctcacttatttatagcgttgatactagcacatactatgcagactccgtgaagggccggttcaccatctccagagataattccaggaacacgctgtatctgcaaatgaacagcctgagagccgaagacacggccgtatattactgtgcgaaagggggggttactgcgccttttgactactggggccagggaaccctggtcaccgtctcctca

SEQ ID NO: 9497 - DNA, 294 bp, Homo sapiens
  source 1..294: mol_type = other DNA
gcttctggatacatcttcactagctttgctatccaatgggtgcgccaggcccccggacaaaggcttgagtggatgggatggatcaatgctggtaatgctaacacaaaatattcagagaagtttcagggcagagtcaccattaccagggacacatccgcgaccacagcctacatggagctgagcagcctgaaatctgaagacacggctgtgtattactgtgcgagagagcacgatactttgactggttatggttttgatatctggggccaagggacaaaggtcaccgtctcttca

SEQ ID NO: 9498 - DNA, 294 bp, Homo sapiens
  source 1..294: mol_type = other DNA
acttctggattcaccttcactacatatgctatccaatgggtgcgccaggcccccggacaggggcttgaatggatggcatggatcaacgctggcaatggtaatattagatattcacagaaatttcagggcagaatcatcattaccagggacacatccgcgagcacagcctacatggacctgagcagcctgagatctgaagacacggctgtatatttctgtgcgagagagcacgatactttgactggttatggatttgatatctggggccaagggacaatggtcaccgtctcttca

SEQ ID NO: 9499 - DNA, 294 bp, Homo sapiens
  source 1..294: mol_type = other DNA
acttctggattcaccttcactatgtatgctatccattgggtgcgccaggcccccggacaggggcttgaatggatggcatggatcaacgctggcaatggtaacataagatattcacagaagtttcagggcagactcatcattaccagggacacatccgcgagcacagcctacatggacctgagcagcctgagatctgaagacacggctgtatatttctgtgcgagagagcacgatactttgactggttatggatttgatatctggggccaagggacaatggtcaccgtctcttca

SEQ ID NO: 9500 - DNA, 294 bp, Homo sapiens
  source 1..294: mol_type = other DNA
acttctggattcaccttcaccacctatgctatccagtgggtgcgccaggcccccggacaggggcttgaatggatggcatggatcaacgctggcaatggtaacacaagatattcacagaagtttcagggcagactcctcattaccagggacacatccgcgagcacagcctacatggacctgagcagcctgagatctgaagacacggctgtatatttctgtgcgagagagcacgatactttgactggttatggatttgatatctggggccaggggaccgtggtcaccgtctcttca

SEQ ID NO: 9501 - DNA, 294 bp, Homo sapiens
  source 1..294: mol_type = other DNA
gcttctggatacatcttcactagctttgctatccaatgggtgcgccaggcccccggacaaaggcttgagtggatgggatggatcaatgctggtaatgctaacacaaaatattcagagaagtttcagggcagagtcaccattaccagggacacatccgcgaccacggcctacatggagctgagcagcctgaaatctgaagacacggctgtgtattactgtgcgagagagcacgatactttgactggttatggttttgatatctggggccaagggacaaaggtcaccgtctcttca

SEQ ID NO: 9502 - DNA, 286 bp, Homo sapiens
  source 1..286: mol_type = other DNA
tgcagcctctggattcaccttcagcacctattggatgcactgggtccgccaagtcccagggaagggactggtgtgggtctcacgtatgaatgaagatgggagtaccacaaactacgcggactccgtgaagggccgattcatcatctccagagacaactccaagggcaccttatatctgcaaatgaacagtctgagagtcgaagacacggctgtgtattattgcgcgagagatcttagtgggaggttcgactactggggccagggaaccctggtcaccgtctcgtca

SEQ ID NO: 9503 - DNA, 286 bp, Homo sapiens
  source 1..286: mol_type = other DNA
tgtagcctctggattcagcctcagtagttactggatgcactgggtccgccaagttccagggaaggggctggtgtgggtctcacgtattgatgagaatgggaggactgtagattacgctgactccgtggagggccgattcaccatctccagagacaacgccaagaacacgttgtttctgcaaatgagcggtctgagagccgaagacacggctgtttatttctgtgcaagagatctcagcggaagatttgactactggggccagggaaccctggtcaccgtctcctca

SEQ ID NO: 9504 - DNA, 301 bp, Homo sapiens
  source 1..301: mol_type = other DNA
cattgtttctggtggctccatcagtggttactactggagctggatccggcagcccccggggaagggactggagtacattgggtatatgtcttacagtgggagcaccaactacaacccctccctcaggagtcgagtcaccatatccgtagacaggtccaagagccagttctccctgaagctgcgctctgtgaccgctgcggacacggccgtgtattactgtgcgagagcgtcagcagatctaccatactactactacggtatggacgtctggggccaagggaccacggtcaccgtctcctca

SEQ ID NO: 9505 - DNA, 301 bp, Homo sapiens; identical to SEQ ID NO: 9504
  source 1..301: mol_type = other DNA

SEQ ID NO: 9506 - DNA, 301 bp, Homo sapiens
  source 1..301: mol_type = other DNA
cactgtctctggtggctccatcagtagttactactggacctggatccggcagcccccggggaagggactggagtggattgggtatatgtcttacagcgggagcaccaactacaacccctccctcaagagtcgagtcaccatttcagtagacacgtccaagaaccagttctccctgaagctgagctctgtgaccgctgcggacacggccgtgtattactgtgcgagggcatcagctgacttaccctactactactacggtatggacgtctggggccaagggaccacggtcaccgtctcctca

SEQ ID NO: 9507 - DNA, 301 bp, Homo sapiens
  source 1..301: mol_type = other DNA
cactgtctctggtggctccatcagtagttactactggagctggatccggcagcccccggagaaggggctggagtggattgggtatatgtcttacagtgggagcaccaactacaacccctccctcaagagtcgagtcatcatttcagtagacacgtccaagaaccagttctccctgaagctgagctctgtgaccgctgcggacacggccatgtattactgtgcgagggcatcagctgacttaccctactactactacggtatggacgtctggggccaggggaccacggtcaccgtctcctca

SEQ ID NO: 9508 - DNA, 301 bp, Homo sapiens
  source 1..301: mol_type = other DNA
cattgtctctggtggctccatcagtggttactactggagctggatccggcagcccccggggaagggactggagtggattgggtatatctcttacagtgggagcaccaactacaatctctcccttaagagtcgagtcaccatatcactagacacgtccaagaaccagttctccctgaagctgacctctgtgaccgctgcggacacggccgtgtatttctgtgcgagagcctcggccgacttaccttactactactacggtatggacgtctggggccaagggaccacggtcaccgtctcctca

SEQ ID NO: 9509 - DNA, 301 bp, Homo sapiens
  source 1..301: mol_type = other DNA
cactgtctctggtggctccatcagtggttactactggagctggatccggcagcccccggggaagggactggagtcggttgggtatatctcctacagtgggagcaccaactacaacccctccctcaagagtcgagtcaccatatcactagacacgtccaagaaccagttctccctgaagctgagctctgtgaccgctgcggacacggccctgtattactgtgcgagggcatcagctgacttaccctactattactacggtatggacgtctggggccaagggaccacggtcaccgtctcctca

SEQ ID NO: 9510 - DNA, 280 bp, Homo sapiens
  source 1..280: mol_type = other DNA
tgcagcctctgggttcacctttagtaagttttttatgagctgggtccgccacgttccagggaaagggctggagtgggtggccaatatgaacgaggatggaagtgtgaaactctatgtggactctgtgaggggccgattcaccatctccagagacaacgcccagaactcagtgtatctgcaaatgaatagcctgagagccgacgacacgggcttttattactgtgcgaacggagttcgggggggcttctggggccagggaaccctggtcaccgtctcttca

SEQ ID NO: 9511 - DNA, 280 bp, Homo sapiens
  source 1..280: mol_type = other DNA
ttcagcctctggattcacctttcgtagatcctggatgagctgggtccgccaggctccagggaaggggctggagtgggtggccaacatgaaggaagatggaactgtgacattatatgcggactctgtgaagggccgattcaccatctccagagacaacgccaagaattctctgtatctgcaaatgaacagcctgagagccgaggacacgtctgtatatttctgtgcgaacggggtacggggtggcttctggggccagggaaccctggtcaccgtctcctcc

SEQ ID NO: 9512 - DNA, 280 bp, Homo sapiens
  source 1..280: mol_type = other DNA
ttcagcctctggattcacctttcgtagatcctggatgagctgggtccgccaggctccagggaaggggctggagtgggtggccaacatgaaggaagatggaactgtgacattatatgcggactctgtgaagggccgattcaccatctccagagacaacgccaagaattctctgtatctacaaatgaacagcctgagagccgaggacacgtctgtatatttctgtgcgaacggggtacggggtggcttctggggccagggaaccctggtcaccgtctcctcc

SEQ ID NO: 9513 - DNA, 286 bp, Homo sapiens
  source 1..286: mol_type = other DNA
tgtagcctctggattcggttttacttataacgccatggcctgggtccgccaggctccagggcaggggctggagtgggtcgccggaatcggtggtgatgtaagaacacactacagaggctccgtgaagggccggttcatcatctccagagacaactccaaaaacatgctgtatctgcaaatgaatagcctgagagtcgaagacacgggcgtgtattattgtgcgaaagatattttaggttggacctttgaccactggggccagggcaccctggtcaccgtctcctca

SEQ ID NO: 9514 - DNA, 286 bp, Homo sapiens
  source 1..286: mol_type = other DNA
tgcagcctctggattcgactttggtcccaatgccatggcttgggtccgccaggctccagggaaggggctggagtgggtctcaggtagtggtggtgatggaaacaaactctatgcagactccgtgaagggccgatttaccatctccagagacaattccaaaaatatgttgtatctgcaaatgaacagtttgcgagcagaggacacggccgtttactactgtgcgaaagatatcttgggatggacctttgaccactggggccagggaatccaggtcaccgtctcctca

SEQ ID NO: 9515 - DNA, 286 bp, Homo sapiens
  source 1..286: mol_type = other DNA
tgaagcctctggattcgactttggtcccaatgccatggcttgggtccgccaggctccagggaaggggctggagtgggtctcaggtagtggtggtgatggaaacaaactctatgcagactccgtgaagggccggtttaccatctccagagacatttccaaaaatatgttgtatctgcaaatgaacagcttgcgaccggaggacacggccgtttactactgtgcgaaagatatcttgggatggacctttgaccactggggccagggaatcctggtcaccgtctcatca

SEQ ID NO: 9516 - DNA, 286 bp, Homo sapiens
  source 1..286: mol_type = other DNA
tgcagcctctggactcgactttggtcccaatgccatggcttgggtccgccaggctccagggaaggggctggagtgggtctcaggtagtggtggtgatggaaacaaactctatgcagactccgtgaagggccgatttaccatctccagagacaattccaaaaatatgttgtatctgcaaatgaacagtttgcgagcagaggacacggccgtttactactgtgcgaaagatatcttgggatggacctttgaccactggggccagggaatccaggtcaccgtctcctca

SEQ ID NO: 9517 - DNA, 286 bp, Homo sapiens; identical to SEQ ID NO: 9515
  source 1..286: mol_type = other DNA

SEQ ID NO: 9518 - DNA, 286 bp, Homo sapiens; identical to SEQ ID NO: 9515
  source 1..286: mol_type = other DNA

SEQ ID NO: 9519 - DNA, 286 bp, Homo sapiens
  source 1..286: mol_type = other DNA
tgaagcctctggattcgactttggtcccaatgccatggcttgggtccgccaggctccagggaaggggctggagtgggtctcaggtagtggtggtgatggaaacaaactctacgcagactccgtgaagggccggtttaccatctccagagacatttccaaaaatatgttgtatctgcaaatgaacagcttgcgaccggaggacacggccgtttactactgtgcgaaagatatcttgggatggacctttgaccactggggccagggaatcctggtcaccgtctcatca

SEQ ID NO: 9520 - DNA, 286 bp, Homo sapiens
  source 1..286: mol_type = other DNA
tgaagcctctggattcgactttggtcccaatgccatggcttgggtccgccaggctccaaggaaggggctggagtgggtctcaggtagtggtggtgatggaaacaaactctatgcagactccgtgaagggccggtttaccatctccagagacatttccaaaaatatgttgtatctgcaaatgaacagcttgcgaccggaggacacggccgtttactactgtgcgaaagatatcttgggatggacctttgaccactggggccagggaatcctggtcaccgtctcatca

SEQ ID NO: 9521 - DNA, 286 bp, Homo sapiens
  source 1..286: mol_type = other DNA
tgaagcctctggattcgactttggtcccaatgccatggcttgggtccgccaggctccagggaaggggctggagtggatctcaggtagtggtggtgatggaaacaaactctatgcagactccgtgaagggccggtttaccatctccagagacatttccaaaaatatgttgtatctgcaaatgaacagcttgcgaccggaggacacggccgtttactactgtgcgaaagatatcttgggatggacctttgaccactggggccagggaatcctggtcaccgtctcatca

SEQ ID NO: 9522 - DNA, 286 bp, Homo sapiens
  source 1..286: mol_type = other DNA
tgaagcctctggattcgactttggtcccaatgccatggcttgggtccgccaggctccagggaaggggctggagtgggtctcaggtagtggtggtgatggaaacaaactctatgcagactccgtgaagggccggtttaccatctccagagacatttccaaaaatatgttgtatctgcaaataaacagcttgcgaccggaggacacggccgtttactactgtgcgaaagatatcttgggatggacctttgaccactggggccagggaatcctggtcaccgtctcatca

SEQ ID NO: 9523 - DNA, 286 bp, Homo sapiens
  source 1..286: mol_type = other DNA
tgaagcctctggattcgactttggtcccaatgccatggcttgggtccaccaggctccagggaaggggctggagtgggtctcaggtagtggtggtgatggaaacaaactctatgcagactccgtgaagggccggtttaccatctccagagacatttccaaaaatatgttgtatctgcaaatgaacagcttgcgaccggaggacacggccgtttactactgtgcgaaagatatcttgggatggacctttgaccactggggccagggaatcctggtcaccgtctcatca

SEQ ID NO: 9524 - DNA, 283 bp, Homo sapiens
  source 1..283: mol_type = other DNA
ttcagcctctggattcatcttcagtgtctataatatgaattgggtccgccaggctccagggaaggggctggagtgggtctcattcattagtggtagtggtaattacatattctatgtagactcagtgaagggccgattcaccatctccagagacaacgccaacaactcagtgtatctgcaaatgaacagcctgagagccgaggacacggctgtatattactgtgcgagagacagaggagtatccgactattggggccagggaaccctggtcaccgtctcctcc

SEQ ID NO: 9525 - DNA, 280 bp, Homo sapiens
  source 1..280: mol_type = other DNA
tgcagcctctggattcaccttcagtagttataacatgaactgggtccgccaggctccagggaaggggctggagtgggtctcatccattatcagtagtcgttacatatattacgcagactcagtgaagggccgattcaccatctccagagacaacgccaagaactcactgtatttgcaaatgaacagcctgagagccgaggacacggctgtgtattactgtgcgagagatcggggtgtttccgactactggggccagggaaccctggtcaccgtctcctca

SEQ ID NO: 9526 - DNA, 298 bp, Homo sapiens
  source 1..298: mol_type = other DNA
tgcagtgtctggattcagcttcacaaattatggcttgcactgggtccgccaggctccaggcaaggggctggagtgggtggcagttgtttggtatgatggaagtactaaattctatgtagactccgtgaagggccgattcaccatctccacagaccattccaagaacattgtgtatctgcaaatgaacagcctgcgagccgaagacacggctgtttattactgtgcgagagatgcctccgggggtgactggcgctactttgactactggggccagggaagcctggtcaccgtgtcctca

SEQ ID NO: 9527 - DNA, 298 bp, Homo sapiens
  source 1..298: mol_type = other DNA
tgcagcgtctggattcagcttcagtgactatggcatgcactgggtccgccaggctccaggcaaggggctggagtggctggcacgtatatggtatgatgggagtaatgaatattatgcagactccctgaagggccgattcaccatctccagagacaattccaagaacacagtctatctccaaatgaacagcctgagagccgaggacacggctatttattactgtgcgagagatgctagtggcggggattggaggtactttgactactggggccagggaatcttggtcaccgtctcctca

SEQ ID NO: 9528 - DNA, 298 bp, Homo sapiens
  source 1..298: mol_type = other DNA
tgcagcgtctggattcagcttcagtgactatggcatgcactgggtccgccaggctccaggcaaggggctggagtggctggcacgtatatggtatgatgggagtaatgaatactatgcagactccctgaagggccgattcaccatctccagagacaattccaagaacacactttatctccaaatgaatagcctgagagtcgaggacactggcatttattactgtgcgagagatgctagtggcggggattggcgttactttgactactggggccaggggatcttggtcaccgtctcctca

SEQ ID NO: 9529 - DNA, 298 bp, Homo sapiens
  source 1..298: mol_type = other DNA
tgtagcgtctggattcagcttcagtgactatggcatgcactgggtccgccaggctccaggcaaggggctggagtggctggcacgtatatggtatgatgggagtaatgaatactatgcagactccctgaagggccgattcaccatctccagagacaattccaagaacacagtccatctccaaatgaacagcctgagagccgaggacacggctatttattactgtgcgagagatgctagtggcggggattggaggtactttgactactggggccagggaatcttggtcaccgtctcctca

SEQ ID NO: 9530 - DNA, 298 bp, Homo sapiens
  source 1..298: mol_type = other DNA
tgtagcgtctggattcagcttcagtgactatggcatgcactgggtccgccaggctccaggcaaggggctggagtggctggcacgtatatggtatgatgggagtaatgaatactatgcagactccctgaagggccgattcaccatctccagagacaattcgaagaacacagtccatctccaaatgaacagcctgagagccgaggacacggctatttattactgtgcgagagatgctagtggcggggattggaggtactttgactactggggccagggaatcttggtcaccgtctcctca

SEQ ID NO: 9531 - DNA, 298 bp, Homo sapiens
  source 1..298: mol_type = other DNA
cgcagtgtctggattcagcctcagaaattatggcttgcactgggtccgccaggctccaggcaagaggctggagtgggtggcagttgtttggtttgatggaagtactaaattctatggagactccgtgaagggccgattcgccatctccacagaccattccaagaacattgcgtatctacaaatgaacagtctgcgagccggggacacggctgtttattactgtgcgagagatgcctccgggggtgactggcgctactttgactactggggccagggaagcctggtcaccgtgtcctca

SEQ ID NO: 9532 - DNA, 279 bp, Homo sapiens
  source 1..279: mol_type = other DNA
gcttctggatacaccttcactccttatggaatccattgggtgcgccaggctcccggacaagggcttgagtggatgggatggatcaacgctgacaatggtcacacaggatattcacaggagttccagggcagagtcaccattactagggacacatccgcgaccacagcctacatggagctgagcagcctgagatctgaagacacggctatgtattattgtgcgagaggggcaatagggtttgaccactggggccagggaaccctggtcaccgtctcctca

SEQ ID NO: 9533 - DNA, 279 bp, Homo sapiens
  source 1..279: mol_type = other DNA
tcttctggatacaccttcactaattatgctatacattgggtgcgccaggcccccggacaaaggcttgagtggatgggatggatcaacggtggtgatggttacacaaaatattcgcagaagttccagggcagagtcaccattatcaacgacacacccgcgagcacagcctacctggagctgaacagcctgagatctgaagacacggctgtttattactgtgcgagaggagctataggatttgaccactggggccagggaaccctggtcaccgtctcctca

SEQ ID NO: 9534 - DNA, 301 bp, Homo sapiens
  source 1..301: mol_type = other DNA
cactgtctctggtaactccctcaccagtggtagttactactggagttggatccggcagcccccagggaagggactggagtggattggctatatctattacagtgggagcaccaagtacaacccctccctgaagagtcgagtcaccatatcagtagacacgtccaagaaccagttctccctgaagctgagctctgtgaccgctgcggacacggccgtgtattactgtgcgagagatcggggtagagatggctacaacaagtttgactactggggccagggaaccctggtcaccgtctcctca

SEQ ID NO: 9535 - DNA, 301 bp, Homo sapiens
  source 1..301: mol_type = other DNA
cactgtctccggtgactccgtcaccagtggcagttactactggagctggatccggcagcccccagggaaggaactggagtggattgggtatgtctactacgctgggagcacctactacaatccctccctcaagagtcgagtcaccatatcaatagacacgtccaagaacgtcttcttcctgaagctgagctctgtgaccgctgcagacacggccgtatattactgtgcgagagatcggggtagagacggctacaataaatttgactactggggacagggaaccctggtcaccgtctcctca

SEQ ID NO: 9536 - DNA, 271 bp, Homo sapiens
  source 1..271: mol_type = other DNA
cgctgtctatggtgggtccttcagtggttactactggagctggatccgccagcccccagggaaggggctggagtggattggggaaatcaatcatagtggaagcaccaattacaacccgtccctcaagagtcgagtcaccatatcactagacacgtccaagaaccagttctccctgaagctgagctctatgaccgccgcggacacggctgtgtattactgtgcgagaggaggggactcctggggccagggaaccctggtcaccgtctcctca

SEQ ID NO: 9537 - DNA, 271 bp, Homo sapiens
  source 1..271: mol_type = other DNA
cagtgtctatggtgggtccctcagtggttactactggagttggatccgccagcccccagggaaggggctggagtggattggggaaatcaatcatagtggaagcaccaactacagcccgtccctcaagagtcgactcaccatatcaatagacacgtccaagaagcagttctccctgaagctgaggtctgtgaccgccgcggacacggctatatattactgtgcgagaggcggagactcctggggccagggaaccctggtcaccgtctcctca

SEQ ID NO: 9538 - DNA, 280 bp, Homo sapiens
  source 1..280: mol_type = other DNA
cactgtctctactgcctccctcagtaattactactggacctggatccggcagtccccggggaagggactggagtggattgggtatatccatttcagtgggagcaccaactacaactcctccctcaagagtcgagtcaccatcttagtagacacgtccaagaaccagttctccctgaaactgagctctgtgaccgctgcggacacggccgtgtattactgtgcgggagggaatggctacaacctttactggggccagggaatccaggtcaccgtcccctca

SEQ ID NO: 9539 - DNA, 280 bp, Homo sapiens
  source 1..280: mol_type = other DNA
cactgtctctggtggctccatgaacacttactactggagttggatccggcagcccccagggaagggactggagtggattgcggatatctattacagtggaagcaccacctacaacccgtccctcaggagtcgagtcaccatatcagtggatacctccaagaatcagttctccctgaagttgaggtctgtgaccgcagcggacacggccttttattactgtgcgggaggtaatggctacaatctctactggggccagggaaccctggtcaccgtctcctca

SEQ ID NO: 9540 - DNA, 280 bp, Homo sapiens
  source 1..280: mol_type = other DNA
cactgtctctggtggctccatgaacacttactactggagttggatccggcagcccccagggaagggactggagtggattgcggatatctattacagtggaagcaccacctacaacccctccctcaggagtcgagtcaccatatcagtggatacctccaagaatcagttctccctgaagttgaggtctgtgaccgcagcggacacggccttttattactgtgcgggaggtaatggctacaatctctactggggccagggaaccctggtcaccgtctcctca

SEQ ID NO: 9541 - DNA, 280 bp, Homo sapiens
  source 1..280: mol_type = other DNA
cactgtctctactgcctccctcagtaattactactggacctggatccggcagtccccggggaagggactggagtggattgggtatatccatttcagtgggagcaccaactacaactcctccctcaagagtcgagtcaccatattagtagacacgtccaagaaccagttctccctgaaactgagctctgtgaccgctgcggacacggccgtgtattactgtgcgggagggaatggctacaacctttactggggccagggaatccaggtcaccgtcccctca

SEQ ID NO: 9542 - DNA, 280 bp, Homo sapiens
  source 1..280: mol_type = other DNA
cactgtctctggtggctccatcaccagtagtagttactattggggctggatccgccagcccccagggaaggggctggagtggattgggagtatgttttatagtgggaccacgtactacaacccgtccctcaagagtcgagtcaccatatccgttgacacgtccaagaaccaattctctctgaggctgagctctgtgaccgccgcagacacggctgtgtattactgtgcgagaccattcggtaactactggggccggggaaccctggtcaccgtctcctca

SEQ ID NO: 9543 - DNA, 280 bp, Homo sapiens
  source 1..280: mol_type = other DNA
cactgtctctggtggctccatcaccagtagtagttactactggggctggatccgccagcccccagggaaggggctggagtggattgggactatctattatactgggggcacctactacaacccgtccctcaagagtcgagtcaccatgtccgtagacacgtccaagaaccagttctccctgagcctgacctctgtgaccgccgcagacacggctgtatattactgtgcgagacctttcggcaattactggggccagggaaccctggtcagcgtctcctca

SEQ ID NO: 9544 - DNA, 295 bp, Homo sapiens
  source 1..295: mol_type = other DNA
cactgtctctggtggctccatcagcagtagtagttactactggggctggatccgccagcccccagggaaggggctggagtggattgggagtatctattatagtgggagcacctactacaacccgtccctcaagagtcgagttaccatatcagtagacacgtctaagaaccagttctccctgaagctgagctctgtgactgccgcggacacggccgtgtattactgtgcgagggtcaagggtggtagtgatgcttttgatatctggggccaagggacaatggtcaccgtctcttca

SEQ ID NO: 9545 - DNA, 295 bp, Homo sapiens
  source 1..295: mol_type = other DNA
cactgtctctggtggctccgtcaggagcagtagttactactggggctggatccgccagcccccagggaaggggctggagtggattgggactttcttttatagtgggagtacctactacaacccgtccctcaagagtcgagtcaccatatccgtagacacgtccaagaaccagttctccctgaagctgagctctgtgaccgccgcagacacggctgtgtattactgtgcgagagtgaagggtggttctgatgcttttgatatctggggccaaggggcaatggtcaccgtctcttca

SEQ ID NO: 9546 - DNA, 288 bp, Homo sapiens
  source 1..288: mol_type = other DNA
acatctggatacaccttcagcgactactatctccaatgggtgcgacaggcccctggacaagggcttgagtggatgggaacaatcaaccgtagcgatggcagaatgatttacgcacgggacttccagggcagaatcaccatgaccagagacacgtccgcgaacacagtctacatggaactgaacagcctgcgatctgaagacacggccgtctattattgtgcgagagaaaggcccgaatcgtacttctttgactactggggccagggaaccctggtcaccgtctcctca

SEQ ID NO: 9547 - DNA, 288 bp, Homo sapiens
  source 1..288: mol_type = other DNA
gcatctggttacacttttagcagttattatatacactggttccgacaggcccctggacaagggcttgagtgggtgggaatattctaccttactactggtgtcacaaaatatccaccgaagttccagggcagagtcaccatgaccagggacacgtccacgagcacagtctacatggaattgagcagcctgacctctgccgacacggccgtgtattactgtgcgagagagagaccggagtcttacttctttgactactggggccagggaaccctggtcaccgtctcctca

SEQ ID NO: 9548 - DNA, 288 bp, Homo sapiens
  source 1..288: mol_type = other DNA
gcatctggatacacttttaccagttattatatacactggttccgacaggcccctggacaagggcttgagtgggtgggaatattctaccttactactagtgtcacaaaatatccacagaagttccagggcagagtcaccatgaccagggacacgtccacgagcacagtctacatggaactgagcagcctgacctctgacgactcggccgtgtattactgtgcgagagagagaccggagtcttacttctttgactactggggccagggaaccctggtcaccgtctcctca

SEQ ID NO: 9549 - DNA, 288 bp, Homo sapiens
  source 1..288: mol_type = other DNA
gcttctggatacactttcaccagttactatatacactggttccgacaggcccctggacaagggcttgagtgggtgggaatactctaccttactactagtgtcacaaagtatccacagaaattccagggcagagtcaccctgaccagcgacacgtccacgagcacagtctacatgcaactgagcagcctgacctctgacgacacggccgtgtattactgtgcgagagagagaccggagtcgtacttctttgactactggggccagggaaccctggtcaccgtctcctca

SEQ ID NO: 9550 - DNA, 288 bp, Homo sapiens
  source 1..288: mol_type = other DNA
gcatctggatacacttttaccagttattatatacactggttccgacaggccccgggacaagggcttgagtgggtgggaatattctaccttactactagtgtcacaaaatatccacagaagttccagggcagagtcaccatgaccagggacacgtccacgagcacagtctacatggaactgagcagcctgacctctgacgactcggccgtgtattactgtgcgagagagagaccggagtcttacttctttgactactggggccagggaaccctggtcaccgtctcctca

SEQ ID NO: 9551 - DNA, 288 bp, Homo sapiens
  source 1..288: mol_type = other DNA
gcatctggatacacttttaccagttattatatacactggttccgacaggcccctggacaagggcttgagtgggtgggaatattctaccttactactagtgtcacaaaatatccacagaagttccagggcagagtcaccatgaccagggacacgtccacgagcacagtctacatggaactgagcagcctgacctctgacgactcggccgtgtattactgtgcaagagagagaccggagtcttacttctttgactactggggccagggaaccctggtcaccgtctcctca

SEQ ID NO: 9552 - DNA, 288 bp, Homo sapiens
  source 1..288: mol_type = other DNA
gcatctggttacacttttagcagttattatatacactggttccgacaggcccctggacaagggcttgagtgggtgggaatattctaccttactactggtgtcacaaaatatccaccgaagttccagggcagagtcaccatgaccagggacacgtccatgagcacagtctacatggaattgagcagcctgacctctgccgacacggccgtgtattactgtgcgagagagagaccggagtcttacttctttgactactggggccagggaaccctggtcaccgtctcctca

SEQ ID NO: 9553 - DNA, 288 bp, Homo sapiens
  source 1..288: mol_type = other DNA
gcatctggatacacttttaccagttattatatacactggttccgacaggcccctggacaggggcttgagtgggtgggaatattctaccttactactagtgtcacaaaatatccacagaagttccagggcagagtcaccatgaccagggacacgtccacgagcacagtctacatggaactgagcagcctgacctctgacgactcggccgtgtattactgtgcgagagagagaccggagtcttacttctttgactactggggccagggaaccctggtcaccgtctcctca

SEQ ID NO: 9554 - DNA, 288 bp, Homo sapiens
  source 1..288: mol_type = other DNA
gcatctggatacacttttaccagttattatatacactggttccgacaggcccctggacaagggcttgagtgggtgggaatattctaccttactactagtgtcacaaaatatccacagaagttccagggcagagtcaccatgaccagggacacgtccacgagcacagcctacatggaactgagcagcctgacctctgacgactcggccgtgtattactgtgcgagagagagaccggagtcttacttctttgactactggggccagggaaccctggtcaccgtctcctca

SEQ ID NO: 9555 - DNA, 286 bp, Homo sapiens
  source 1..286: mol_type = other DNA
tgcagcctctagattcatctttagtaggtattggatgagttgggtccgccaggctccagggaaggggctggagtgggtggccaacataaagcaagatggaagtgagaagtactatgtggactctgtgaagggccgattcaccgtctccagagacaacgccaagaactcactgtttctacaaatgaacagcctgggagccgacgacacggccgtatattactgtgcgagaaacagtggctggtcatttgactactggggccagggaaccctggtcaccgtctcttca

SEQ ID NO: 9556 - DNA, 286 bp, Homo sapiens
  source 1..286: mol_type = other DNA
tgcagcctctggattcacttttcgtaattattggatgacctgggtccgccaggctccagggaaggggctggagtgggtgtccaacataaagccagatggaagtgagaaatactatgtggactctgtgaagggccgattcaccatctccagagacaacgccaagaactcactggatctgcaaatgaacagcctgagagccgaggacatggctgtatattactgtgcgagaaacagtggctggtcatttgactactggggccagggaaccctggtcaccgtctcctca

SEQ ID NO: 9557 - DNA, 286 bp, Homo sapiens; identical to SEQ ID NO: 9555
  source 1..286: mol_type = other DNA

SEQ ID NO: 9558 - DNA, 283 bp, Homo sapiens
  source 1..283: mol_type = other DNA
tgcaggctctggattcactttgagtaatgtctggatgagttgggtccgccaggctccagggaaggggctggagtgggttggccgtattaaaatgaaaactgatggtgacacaacagactacgccgcacccgtgaaaggcagattcaccgtctcaagagatgattcgaaaaacacgctgtatgtgcaaatgaacagcctgaaaaccgaggacacagccgtctattactgtaccaatcagtactttgactattggggccagggaaccctggtcaccgtctcctca

SEQ ID NO: 9559 - DNA, 283 bp, Homo sapiens
  source 1..283: mol_type = other DNA
tgcagcctctggattcactttcagtaacgcctggatgaactgggtccgccaggctccagggaaggggctggagtgggttggccgtattaaaaggaaaattgatggtgagacaacagactacgctgcacccgtgaaaggcagcttcaccatctcaagagatgattcaataaacacgctgtatttgcaaatgagcagcctgaaaatcgaggacacagccgtgtattactgtaccaatcagtattttgactactggggccagggaaccctggtcaccgtctcctca

SEQ ID NO: 9560 - DNA, 283 bp, Homo sapiens
  source 1..283: mol_type = other DNA
tgcagcctctggattcactttcagtaacgcctggatgaactgggtccgccaggctccagggaaggggctggagtgggttggccgtattaaaaggaaaattgatggtgggacaacagactacgctgcacccgtgaaaggcagcttcaccatctcaagagatgattcaataaacacgctgtatttgcaaatgagcagcctgaaaatcgaggacacagccgtgtattactgtaccaatcagtattttgactactggggccagggaaccctggtcaccgtctcctca

SEQ ID NO: 9561 - DNA, 283 bp, Homo sapiens; identical to SEQ ID NO: 9559
  source 1..283: mol_type = other DNA

SEQ ID NO: 9562 - DNA, 286 bp, Homo sapiens
  source 1..286: mol_type = other DNA
tgcagcctctggtttcaccttcactagttatagcatgaactgggtccgccaggctccagggaaggggctggagtgggttgcatacatttacagtggtagtgacagcatacagtacgcagactctgtgaagggccgattcaccatctccagagacaatgccaagaattcactgtatctgcaaatgaacagcctgagagacgaggacacggctctatattactgtgcgagagatcatcactgggcctttgactactggggccggggaatcctggtcaccgtctcctca

SEQ ID NO: 9563 - DNA, 286 bp, Homo sapiens
  source 1..286: mol_type = other DNA
tgcagcctctggattcaccttcagtagctatagcatgaactgggtccgccaggctccagggaaggggctggagtgggtttcatacattagtggtacttatactaccatagcctacgcagactctgtaaagggccgattcaccatctccagagacaatgccaagaactcactgtatctggaaatgagcagcctgagagacgaggacacggctgtgtattactgtgcgcgagatcaccactgggcctttgactactggggccagggagccctggtcaccgtctcctca

SEQ ID NO: 9564 - DNA, 295 bp, Homo sapiens
  source 1..295: mol_type = other DNA
tgaagcgtctggattcaccttcagtggatatgccatgcactgggtccgccaggctccaggcaaggggctggagtgggtggcaattatatggtctaatggaagtcataagtataatgaagactccgtgaagggccgtttcaccatctccagagacaattccaagaacacactgtatctgcaaatgaacagcctgagagtcgaggacacggctgtatattactgtgtgagagatggggacagtaacacctggccacttgactactggggccagggaaccctggtcaccgtctcctca

SEQ ID NO: 9565 - DNA, 295 bp, Homo sapiens
  source 1..295: mol_type = other DNA
tgtagcgtctggatttaccttcaggagatacggcatgcactgggtccgccaggctccaggcaaggggctggagtgggtggcgattatttggcctgatggaaatgtgaaatataatgaagactccgtgaagggccgattcaccatctccagagacaattccaagaacacgctgtatctccaaatgaacagcctgagagtcgaggatacggctgtgtattattgtgtgagagatggtgacagcaacacctggccccttgactactggggccagggaaccctggtcaccgtctcctca

SEQ ID NO: 9566 - DNA, 277 bp, Homo sapiens
  source 1..277: mol_type = other DNA
tggagcctctggattcacctttagcagccataccatgagctgggtccgccaggctccagggaaggggctggagtgggtctcagatattagtggtagcggtgataacacatactacgcagactccgtgaagggccggttcaccatctccagagacaattccgagaacacggtgttcttgcaaatgaacagcctgagagccgaggacacggccctatattactgtgcgaaaggatatagcagcgactggggccggggaacccaggtcaccgtctcctca

SEQ ID NO: 9567 - DNA, 277 bp, Homo sapiens
  source 1..277: mol_type = other DNA
tgcagcctctggattcacctttagcagccataccatgagctgggtccgccaggctccagggaagggactggagtgggtctcagatattagtggtagtggtgataacacattctacgcagactccgtgaagggccggttcaccatctccagagacaattccaagaacacgctctatctgcaaatgaacagcctgagagccgaggacacggccgtatattactgtgcgaaagggtatagctctgactggggccagggaaccctggtcaccgtctcctca

SEQ ID NO: 9568 - DNA, 301 bp, Homo sapiens
  source 1..301: mol_type = other DNA
tgcagcctctggattcaccttgaccaataatgccgtgacctggggcatgagctgggtccgccaggctccagggaaggggctggagtgggtctcagcgattaggagtggcgctggtaccacagtctacgcagactccgtgaagggccgattcaccatctccagagacacttccaagaacacgctgtatctggaaatgaacagcctgagagccgaggacacggccgtatattactgtgcgaaacacggcagtggctggtacgttgactactggggcgagggaaccctggtcaccgtctcctca

SEQ ID NO: 9569 - DNA, 289 bp, Homo sapiens
  source 1..289: mol_type = other DNA
tgcagcctctggattcacctttaccaattatgccatgagctgggtccgccaggctccagggaaggggctggagtgggtctcagctgttactaataatggtggtagaacattctacgcagactccgtgaagggccggttcaccatatccagagacaattccaagaacacgctgtctctgctaatgaacagcctgagagccgaggacacggccgtatattactgtgcgaaacatggcagtggctggtacgttgactactggggccagggaaccctggtcaccgtctcctca

SEQ ID NO: 9570 - DNA, 286 bp, Homo sapiens
  source 1..286: mol_type = other DNA
tgcagcctctggattcacctttagcaactatgccatgagctgggtccgccaggctccagggaaggggctggagtgggtctcagctattagtggtggtggtggtaccacatactacgcagactccgtgaagggccggttcaccatctccagagacaattccaagaacacgctgtatctgcaaatgaacagcctgagagccgaggacacggccgtatattactgtgcgaaaaggcagcagctggtctttgactactggggccagggaaccctggtcaccgtctcctca

SEQ ID NO: 9571 - DNA, 286 bp, Homo sapiens
  source 1..286: mol_type = other DNA
tgcagcctctggattcagctttagcacctatgccatgacctgggtccgccaggctccagggaagggactggagtgggtctcaattattagtggtagtggtgctagtacatactacgcagactccgtgaagggccgattcaccatctccagagacaattccaagaacacgctgaatctgcaaatgaacagcctgacagccgaggacacggccgtatattactgtgcgaaacgtcagcagctggtttttgactactggggccagggaaccctggtcaccgtctcctca

SEQ ID NO: 9572 - DNA, 289 bp, Homo sapiens
  source 1..289: mol_type = other DNA
tgcagcctctggattcaccttcagtacctatagcatgaactgggtccgccaggctccagggaaggggctggagtgggtttcatacattagtagtagtagtagtaccatatactacgcagactctgtgaagggccgattcaccatctccagagacaatgccaagaactcactgtatctgcaaatgaatagcctgagagacgaggacacggctgtgtattactgtgcgagagaatttctgtattcttctggtgactactggggccagggaaccctggtcaccgtctcctca

SEQ ID NO: 9573 - DNA, 289 bp, Homo sapiens
  source 1..289: mol_type = other DNA
tgcagcctctggattcacattcagtagttatgaaatgaactgggtccgccaggcttcagggaaggggctggagtggattgcatacattagtagtaacgctagaagcatctattacgcagactctgtgaagggccgattcaccatctccagagacaacgccaagaactcactttatctgcaaatgaacagcctgagagccgaggacacggctgtttactactgtgcgagagaatttttgtatagtagcggtgactactggggccagggaaccctggtcaccgtctcctca

SEQ ID NO: 9574 - DNA, 301 bp, Homo sapiens
  source 1..301: mol_type = other DNA
cactgtctctggtggctccgtcagcagtagtacttactactgggcctggattcgccagcccccagggatggggctggagtggcttgggactatctattacaatgggaacacctactacaacccgtccctcaagagtcgaatcagcatttccttagacacgtccaagaaccaattctccctgaagctgaggtctgtgaccgccgcagacacggctttttattactgtgcgagacgtcatgactacggtgactccccttactttgacttctggggccagggacccctggtcaccgtctcctca

SEQ ID NO: 9575 - DNA, 301 bp, Homo sapiens
  source 1..301: mol_type = other DNA
tagtgtctctggtgcgtccatcagcagtaatacttactactggggctggatccgccagtccccaggggaggggctggagtggattgggagtatctattatagtgggagcacctactataacccgtccgtcaagagtcgagtcaccatatccgtagacacgtccaagaaccagttctccctgaggctgagttctgtgaccgccgcagacacggctgtgtattactgtgcgagacgccatgactacggtgactccccctattttgacttctggggccagggagccctggtcaccgtctcgtca

SEQ ID NO: 9576 - DNA, 289 bp, Homo sapiens
  source 1..289: mol_type = other DNA
tggtgtctatggtgggtccctcggtggttactggtggagttggattcgtcagcccccaggggagggcctggagtggattggggaaataatccccggtggaagcgccaactacaacccgtccctcaagagtcgagtcttcctgtcagtagacgcgtccaagaaccaattttccctgagggtgacctctgtgaccgccgcagatacggctatgttttactgtgcgaggcacaaaagaggaagtaacacttttgatatttgggaccaaggggcaatggtcatcgtctcttca

SEQ ID NO: 9577 - DNA, 289 bp, Homo sapiens
  source 1..289: mol_type = other DNA
cgctgtctatgatgagtccttcagtggttactactggagctggatccggcagcccccagggaaggggctggagtggattggggaaatcattcaaagtggaaacaccaattacaattcgtccctcaagagtcgagtcaccatatcagtagacacgtccaagaaccagttctccctgaacctgaggtctgtgaccgccgcggacacggctgtgtattactgtgcgagacacaaaaggggaagcaatactttcgatatctggggccaagggacaatggtcatcgtctcttca

SEQ ID NO: 9578 - DNA, 289 bp, Homo sapiens
  source 1..289: mol_type = other DNA
tgcagcctctggattcacctttagcagctatgccttgagctgggtccgccaggctccagggaaggggctggagtgggtctcaactattactggtagtggtggtaccacttactacgcagactccgtgaagggccgcttcgccatctccagagacaattccaagaccacactatatctgcaaatgagcagcctgagagccgaggacacagccctatattactgtgcgaaagaggggcgcacatattattttgactactggggccagggaaccctggtcaccgtctcctca

SEQ ID NO: 9579 - DNA, 289 bp, Homo sapiens
  source 1..289: mol_type = other DNA
tgcagcctctggattcacctttagcagctatgccatgagctgggtccgccaggctccagggaaggggctggagtgggtctcagctattagtggtagtggtggtagcacatactacgcagactccgtgaagggccggttcaccatctccagagacaattccaagaacacgctgtatctgcaaatgaacagtgtgagagccgaggacacggccgtatattactgtgcgaaagaaggaaggacttactactttgactactggggccagggaaccctggtcaccgtctcctca

SEQ ID NO: 9580 - DNA, 283 bp, Homo sapiens
  source 1..283: mol_type = other DNA
tgcagcctcaggattcacctttagtagttactggatgagctgggtccgccaggctccagggaaagggctggagtgggtggccaatataaagaaagatggacgtgagaagtactatgtggactctgtgaagggccgattcacaatctccagagacaacgccaagaattcactgtatttggagatgaatagcctgagagccgaggacacggccgtgtattattgtgcgagaggctcgggagccccggacaactggggccagggaaccctggtcaccgtctcctca

SEQ ID NO: 9581 - DNA, 283 bp, Homo sapiens
  source 1..283: mol_type = other DNA
tgcagcctctggattcagctttagtagctattggatgagctgggtccgccaggctccagggaaggggctggagtgggtggccaacgttaagcaagatggaattgacaaatactatgtggactctgtgaagggccgattcaccatctccagagacaacgccaagaattcactgtatctgcaaatgaacagcctgagagccgaggacacggctgtctattattgtgcgagaggatcgggagcacctgacaactggggccggggaaccctggtcaccgtctcctca

SEQ ID NO: 9582 - DNA, 283 bp, Homo sapiens
  source 1..283: mol_type = other DNA
tgcagcctcaggattcacctttagtagttattggatgagttgggtccgccaggctccagggaaagggctggagtgggtggccaacataaagaaagatggacgtgaaaaatactatgtggactctgtgaagggccgattcacaatctccagagacaacgccaagaattcactgtatttggaaatgaatagcctgagagccgaggacacggccgtatattattgtgcgagaggctcgggagccccggacaactggggccagggaaccctggtcaccgtctcctca

SEQ ID NO: 9583 - DNA, 273 bp, Homo sapiens
  source 1..273: mol_type = other DNA
acttctggttacacctttgccaactatgctatcagctgggtgcgacaggcccctggacaagggcttgagtggatgggatggatcagcggttacaatggtaacacaaattatgcacagaagttccagggcagagtcaccatgaccacagacacatccacgaccacagccttcatggagctgaggagcctgagatctgacgacacggccgtgtattactgtgcgagagggaggggagtctactggggccagggaaccctggtcagcgtctcctca

SEQ ID NO: 9584 - DNA, 273 bp, Homo sapiens
  source 1..273: mol_type = other DNA
gcttctggtttcacctttgtcgactattttatgacttgggtgcgacaggcccctggacaagggcttcagtggatgggatggatcagcgtttacagtggtgacgcaagctatgcacggcaattccagggcagagtcatcatgaccagagacacatccacggacacaacatatttggagttgaacaacctcgagtctgacgacacggccgtttattactgtgcgagaggcagaggggtctattggggccagggaaccctggtcaccgtctcgtca

SEQ ID NO: 9585 - DNA, 273 bp, Homo sapiens
  source 1..273: mol_type = other DNA
gcttctggttacacctttgccaactatgctatcagctgggtgcgacaggcccctggacaagggcttgagtggatgggatggatcttcgcttacaatggtaacacaaattatgcacagaagttccagggcagagtcaccatgaccacagacacatccacgaccacagccttcatggagctgaggagcctgagatctgacgacacggccgtgtattactgtgcgagagggaggggagtctactggggccagggaaccctggtcaccgtctcctca

SEQ ID NO: 9586 - DNA, 301 bp, Homo sapiens
  source 1..301: mol_type = other DNA
tgcagcctctggattcacctttagcacctattggatgagctgggtccgccaggctccagggaaagggctggagtgggtggccaacataaaacaggatggaagtgagatgtactatgtggactctgtgaagggccgattcaccatctccagagacaacgccaagagttcactgtatctgcaaatgaacagcctgagagccgaggacacggccgtgtattactgtgcgagagatttggcctttacagtgactcatcccagctttgactactggggccagggaaccctggtcaccgtctcctca

SEQ ID NO: 9587 - DNA, 301 bp, Homo sapiens
  source 1..301: mol_type = other DNA
cgcagcctctggattcacctttagcacctattggatgagctgggtccgccaggctccagggaaagggctggagtgggtggccaacataaaacaggatggaagtgagatgtactatgtggactctgtgaagggccgattcaccatctccagagacaacgccaagagttcactgtatctgcaaatgaacagcctgagagccgaggacacggccgtgtattactgtgcgagagatttggcctttacagtgactcatcccagctttgactactggggccagggaaccctggtcaccgtctcctca

SEQ ID NO: 9588 - DNA, 283 bp, Homo sapiens
  source 1..283: mol_type = other DNA
tgcagcctcgggattcacctttagtagctctggcatgagctgggtccgccaggctccagggagggggctagagtgcgtctcagcaattagtgttagtggttctggcacagactacgcagactccgtgaagggccggttcaccatctccagagacaattccaagaacacagtatatctgcaaatgcacagcctgagaaccgaggacacggccctgtattactgtgcaaaaggaacaactgatgttgactactgcggccagggaaccctggtcaccgtctcctcg

SEQ ID NO: 9589 - DNA, 283 bp, Homo sapiens
  source 1..283: mol_type = other DNA
tgcggcctctggattcagctttagaagctctggcatgacgtgggtccgccaggctccaggggggggcctggagtgtgtctcagcaattggtgtaaatgctgataacagagactacgcagactccgtgaggggccgcttcaccatctccagagacaattccaagaatacgctgtatctgcaaatgaacagcctgagagtcgaggacacggccctatacttctgcgcgaaggggacaactgacgtggactacttgggccagggaaccctggtcaccgtctcctca

SEQ ID NO: 9590 - DNA, 283 bp, Homo sapiens
  source 1..283: mol_type = other DNA
tgtaggctctggattcacttttagaagtactggcatgacgtgggtccgccagcctccagggggggggctggagtgtgtctcagcaattggtgtgaatgctgccaatacagactacgcagactccgtgaggggccggttcaccatctctagagacaattcccagaacacgctgtatctgcaaatgaacagcctgagagtcgaggacacggccgtatatttctgcgcgaaggggaccactgacgtggactactggggccagggaaccctggtcaccgtctcctca

SEQ ID NO: 9591 - DNA, 283 bp, Homo sapiens
  source 1..283: mol_type = other DNA
tgcggcctctggtttcagctttagaagctctggcatgacgtgggtccgccaggctccaggggggggcctggagtgtgtctcagcaattggtgtaaatgctgataacagagactacgcagactccgtgaggggccgcttcaccatctccagagacaattccaagaatacgctgtatctgcaaatgaacagcctgagagtcgaggacacggccctatacttctgcgcgaaggggacaactgacgtggactacttgggccagggaaccctggtcaccgtctcctca

SEQ ID NO: 9592 - DNA, 283 bp, Homo sapiens
  source 1..283: mol_type = other DNA
tgcagcctctggattcacctttagctcctctggcatgagctgggtccgccaggctccagggaaggggctggagtgggtctcagccattggtgttaatgctggtaacacagactacgcaggctccgtgaagggccggttcaccatctccagagacaattccaagagcacactgtatgtgcaaatgaacagcctgagagccgaggacacggccgtgtattactgtgcgaaaggtaccaccgatgttgactactggggccagggaaccctggtcaccgtctcctca

SEQ ID NO: 9593 - DNA, 291 bp, Homo sapiens
  source 1..291: mol_type = other DNA
gcttctgggttcagcttcactacctatactatcaattgggtgcgacaggcccctggacaagggcttgagtggatgggatggatcaacaccgacactggaaagccatcctatggccaaggcttcacaggacggtttgtcttctcctgggaaacctctgtcagcacggcatatctgcagatcgacaacctaaaggctggggacagtgccttctattactgtgtgagagactcccacggcggcaaagttcaccttgagtactggggccagggaaccctgatcaccgtctcctca

SEQ ID NO: 9594 - DNA, 291 bp, Homo sapiens
  source 1..291: mol_type = other DNA
gcttctgggttcagcttcactacctatactatcaattgggtgcgacaggcccctggacaagggcttgagtggatgggatggatcaacaccgacactgggaagccatcctatggccaaggcttcacaggacggtttgtcttctcctgggaaacctctgtcagcacggcatatctgcagatcgacaacctaaaggctggggacagtgccttctattactgtgtgagagactcccacggcggcaaagttcaccttgagtactggggccagggaaccctgatcaccgtctcctca

SEQ ID NO: 9595 - DNA, 291 bp, Homo sapiens
  source 1..291: mol_type = other DNA
gcttctggatacagcttcactacctatactataaattgggtgcgccaggcccctggacaagggtttgagtggatgggatgggtcaacaccaacactgggaacccaacttatgcccagggcttcacaggacggtttgtcttctcctcggacacctctgtcaccacggcatatctgcagatcagtagcctgaaggctgaagactctgccatttattactgtgtgagagattcacacggtggtaaagtacaccttgagtactggggccagggaaccctggtcaccgtctcctca

SEQ ID NO: 9596 - DNA, 291 bp, Homo sapiens
  source 1..291: mol_type = other DNA
gcttctggatatacattcactacttatactatcaattgggtgcgccaggcccctggacaagggtttgagtggatgggatgggtcaacaccgacactgggaaggcaacctatgcccagggcttcacaggacgctttgtcttctcctccgacacctctgtcaccacggcacatctgcagatcactgaccttgaggctgaagactctgccatttatttctgtgtgagagattcacacggtggtaaagtgcaccttgaatactggggccagggaaccccggtcaccgtctcctca

SEQ ID NO: 9597 - DNA, 315 bp, Homo sapiens
  source 1..315: mol_type = other DNA
gcttctggatatacattcactacttatactatcaattgggtgcgccaggcccctggacaagggtttgagtggatgggatgggtcaacaccgacactgggaaggcaacctatgcccagggcttcacaggacgctttgtcttctcctccgacacctctgtcaccacggcacatctgcagatcactgaccttgaggctgaagactctgccatttatttctgtgtgagagattcacacggtggtaaagtgcaccttgaatactggggccagggaaccccggtcaccgtctcctcagggaccacggtcaccgtctcctca

SEQ ID NO: 9598 - DNA, 291 bp, Homo sapiens
  source 1..291: mol_type = other DNA
gcttctggatatacattcactacttatactatcaattgggtgcgccaggcccctggacaagggtttgagtggatgggaggggtcaacaccgacactgggaaggcaacctatgcccagggcttcacaggacgctttgtcttctcctccgacacctctgtcaccacggcacatctgcagatcactgaccttgaggctgaagactctgccatttatttctgtgtgagagattcacacggtggtaaagtgcaccttgaatactggggccagggaaccccggtcaccgtctcctca

SEQ ID NO: 9599 - DNA, 286 bp, Homo sapiens
  source 1..286: mol_type = other DNA
tgcagcatctggattcaccttcagtaacttctggctgcactgggtccgccaagttccaggtaaggggctcgtgtgggtctcacgtattaatgagaatgggcgtattacagactacgcggattccgtgaggggccgattcagcatctccagagacaacgccatggacactctctatctgcacatgaacagtctgacaaccgacgacacggctgtgtattactgtgcaagagatctgggcggagccgcaggtggctggggccagggaaccctggtcaccgtctcctca

SEQ ID NO: 9600 - DNA, 283 bp, Homo sapiens
  source 1..283: mol_type = other DNA
tgcagcatctggattcaccttcagtaacttctggctgcactgggtccgccaagttccaggtaaggggctcgtgtgggtctcacgtattaatgagaatgggcgtattacagactacgcggattccgtgaggggccgattcagcatctccagagacaacgccatggacactctctatctgcacatgaacagtctgacaaccgacgacacggctgtgtactgtgcaagagatctgggcggagccgcaggtggctggggccagggaaccctggtcaccgtctcctca

SEQ ID NO: 9601 - DNA, 286 bp, Homo sapiens
  source 1..286: mol_type = other DNA
tgtagcctcggggttcaccttcagtaactactggatgcactgggtccgccaagctccagggaaggggctggtgtgggtctcacatatcaatagagatgggacttacagaaattacgcggactccgtgaagggccgattcaccatctccagagacaatgccaagaacacgctatatctacacatgagcggtctagaagtcgaggacatggctgtctattattgtgcaagagatttagggggagcagcaggcggctggggccagggaaccctggtcaccgtctcctca

SEQ ID NO: 9602 - DNA, 289 bp, Homo sapiens
  source 1..289: mol_type = other DNA
tgcagtctttggaatcacctctcatgatcatggcattcactgggtccggcaagctccagggaggggcctggagtgggtctcaggcataatttggaaaactggtaggatagactatgcggactctgtgaagggccgattcaccgtctccaaagacaactccaagaactcggtgtatctacaaatgaacagtctgagacccgaggacacggccctgtattattgcacagaagatctagtcccgggcggcgcggacgtctggggccaagggaccccggtcaccgtctcctca

SEQ ID NO: 9603 - DNA, 289 bp, Homo sapiens
  source 1..289: mol_type = other DNA
tgcagcctctggattcacctctcatgatattgccatacactgggtccgccaaactccagggaagggcctggagtgggtctcagggattttttggaagagtggtgactcaggctatgcggactccgtgaagggccgattcaccatctccagagacatcgccaagagctccctctatctgcaaatgaacagtctgagaattgaagacacggccttgtattattgtacagaagatttagttccagggggggcggacgtctggggccaagggaccgcggtcaccgtctcctca

SEQ ID NO: 9604 - DNA, 289 bp, Homo sapiens
  source 1..289: mol_type = other DNA
tgtggcctctggattcacctctcatgacattgccatacactgggtccgccaaactccagagaggggcctggagtgggtctcagcaatattttggaagagtggttactcaggctatgcggactctgtgaagggccgattcaccatctccagagacatcgccacgagttccctgtatctccaaatgaacagtctaagaactgaggacacggccttatattactgtacagaagatttagtcccagggggggcggacgtctggggccaagggaccacggtcaccgtctcctca

SEQ ID NO: 9605 - DNA, 292 bp, Homo sapiens
  source 1..292: mol_type = other DNA
cactgtcgctggtggttctctcagtccttactactgggcctggatccggctgcccccagggaagggactggagtggattgcttatatctttcatactgggaccaccgcctacaacccctctctccagagtcgagtcaccatatccgttgacacgtccaagaaccagttttccctggccctgagctctgtgaccgccgccgacacggccttatattactgtgcgagactgcattactatcgttccgaagaatttgactcctggggccagggaaccctggtcaccgtctcctca

SEQ ID NO: 9606 - DNA, 292 bp, Homo sapiens
  source 1..292: mol_type = other DNA
cactgtctctggtgcctccgtcagtagttactactggagctggatccggcagcccccagggaagagactggagtggattgcgtatatgtattataaagagagcagcaactacaacccctccctcaagagtcgagtcaccatttcagtagacccgtccaggaaccggttctccttgagtctgagctctgtgaccgccgcagacacggccgtgtattactgtgcgagacttcattactatcgctcggaagaatttgactcctggggccagggaagcctggtcaccgtctcctcc

SEQ ID NO: 9607 - DNA, 292 bp, Homo sapiens
  source 1..292: mol_type = other DNA
cactgtcgctggtggttccctcagtccttactactggacctggatccggcagcccccagggaagggactggagtggattgcttatatctattacactgggaccaccgcctacaacccctctctccagagtcgagtcaccatatccgttgacacgtccaagaaccagttttccctgaccctgagctctgtgaccgccgccgacacggccttatattactgtgcgagactgcattactatcgttccgaagaatttgactcctggggccagggaaccctggtcaccgtctcctca

SEQ ID NO: 9608 - DNA, 292 bp, Homo sapiens
  source 1..292: mol_type = other DNA
cactgtctctggtggctctatcagtggttactactggagctggatccggcagcccccagggaagggcccggagtggattggctatatattttccaatgggggaacccgatacaacccctccctccagagtcgagtcaccatgtctgtagacacgtccaagaaccagtactccctgagtctcagctctgtgaccgccgcagacacggccgtgtattactgtgcgagactccattactatcgttcggaagaatttgactcctggggccaggggaccctggtcatcgtctcctca

SEQ ID NO: 9609 - DNA, 292 bp, Homo sapiens
  source 1..292: mol_type = other DNA
cactgtctctggtgcctccatcagtgggcattattgggcctggatccggcagcccccagggaagggactggagtggattggatacatctattacattgcgaccaccaactacaatccttccctccagagtcgagtcaccttatcattagacacgtccaggaaccagttctccctgcagctgacctctgtgaccgctgcggacacggccgtgtattactgtgcgcgactccattactatcgttcggaggagtttgactcttggggccagggaaccctggtcaccgtctcctca

SEQ ID NO: 9610 - DNA, 292 bp, Homo sapiens
  source 1..292: mol_type = other DNA
cactgtctctggcggcttcatcagtccttactactggagctggatccggcagcccccagggaagggactggaatggattggatatatccattacactgggagcgccaattatagtccctccctcaagagtcgagtcaccatatcagtagacacgtccaagaaccaattctccctgaagttgagttctgtgaccgctgcggacacggccgtttattactgtgcgcgactccattattatcgttcggaggagtttgactcctggggccagggaaccctggtcaccgtctcctca

SEQ ID NO: 9611 - DNA, 306 bp, Homo sapiens
  source 1..306: mol_type = other DNA
aagggttctggatacaggtttaccagcctctggatcggctgggtgcgccagatgcccgggaaaggcctggagtggatggggatcatctatcctggtgactctgataccagctacagcccgtccttccaaggccaggtcaccatctcagtcgacgagtccatcagcaccgcctacctgcagtggagcagcctgaaggcctcggacaccgccatgtattactgcgcgaggggttactatgatagtagtggtaattccaactggtacttcgatctgtggggccgtggcaccctggtcactgtctcctca

SEQ ID NO: 9612 - DNA, 306 bp, Homo sapiens
  source 1..306: mol_type = other DNA
aagggttctggatacagttttaccaccttgtggatcggctgggtgcgccagatgcccgggaaaggcctggagtggatggggatcatctatcctggtgactctgataccaaatacagcccgtccttccaaggccaggtcaccatctcggccgacaagtccatcagcaccgcctacctgcagtggagcagcctgaaggcctcggacaccgccatatattactgtgcgaggggttactatgatagtagtggtaactccaactggtacttcgatctctggggccgtggcaccctggtcactgtctcctca

SEQ ID NO: 9613 - DNA, 306 bp, Homo sapiens
  source 1..306: mol_type = other DNA
aagggttctggatacagttttaccagcttgtggatcggctgggtgcgccagatgcccgggaaaggcctggagtggatggggatcatctatcctggtgactctgataccaaatacagcccgtccttccaaggccaggtcaccatctcggccgacaagtccatcagcaccgcctacctgcagtggagcagcctgaaggcctcggacaccgccatatattactgtgcgaggggttactatgatagtagtggtaactccaactggtacttcgatctctggggccgtggcaccctggtcactgtctcctca

SEQ ID NO: 9614 - DNA, 304 bp, Homo sapiens
  source 1..304: mol_type = other DNA
tgcagcctctggcttcgacttcgatggcgcctggatgagctgggtccgccaggttccagggaagggactggagtgggttggccgtattactcaccgagctgatggtgcgtcaacagaatacgcttcacccgtgagaggcaggttcaccatctcaagagatgattcaagagacacactgtatctggaaatgaatggcctgaagacagaggactccgccctgtattactgtaccacagacttaccgcgcagtgatcgatactcacacgactactggggccagggagcactggtcaccgtcgcctca

SEQ ID NO: 9615 - DNA, 304 bp, Homo sapiens
  source 1..304: mol_type = other DNA
tgcagcctctggcttcgacttcgatggcgcctggatgagctgggtccgccaggttccagggaagggactggagtgggttggccgtattactcaccgagctgatggtgcgtcaacagaatacgcttcacccgtgagaggcaggttcaccatctcaagagatgattcaagagacacactgtatctggaaatgaatggcctgaagacagaggactccgccctgtattactgtaccacagacttaccgcgcagtgatcgatactcacacgactaccggggccagggagcactggtcaccgtcgcctca

SEQ ID NO: 9616 - DNA, 304 bp, Homo sapiens
  source 1..304: mol_type = other DNA
tgcaggctctggattcactttcgctgacgcctggatgagctgggtccgccaggctcccgggaaggggctggagtgggttggtcggattactctccaacgtgacggtgaacatacagactatgccacagccgtgagaggcagattcagcatctcaagagatgattcgatggccactcactatctccagatggacggcctgagaatcgaggacacagccatgtattattgcaccacagacttgccaagatccgatagatacagccatgactactggggccagggaaccctggtcaccgtctcctca

SEQ ID NO: 9617 - DNA, 292 bp, Homo sapiens
  source 1..292: mol_type = other DNA
tgcagcctctggattcacctttagcaactatgccatgagctgggtccgccaggctccagggatggggctggagtgggtctcaggaattagtggtgttggtggtagtacatactacgcagacgccgtgaagggccggttcaccatctccagagacaattccaagaacacgatgtatctgcaaatgaacagcctgagagccgaggacacggccctatattactgtgcgaaagtaccgctagggacttggtggttcgacccctggggccagggaaccctggtcaccgtctcctca

SEQ ID NO: 9618 - DNA, 292 bp, Homo sapiens
  source 1..292: mol_type = other DNA
tgcagcctctggattcacctttagcaactttgccatgtgctgggtccgccaggctccagggaaggggctggagtgggtctcaggtattagtggtggtggtactagcacattctacccagactccgtgaagggccggttcgccatctccagagacaattccaagaacacgctgtatctacaaataaacagcctgagagccgaggacacggccgtatattactgtgcgaaagtaccacttggtacgtggtggttcgacccctggggccagggaaccctggtcaccgtctcctca

SEQ ID NO: 9619 - DNA, 292 bp, Homo sapiens
  source 1..292: mol_type = other DNA
tgcagcctctggattcacctttagcaactatgccatgagttgggtccgccaggctccagggatggggctggagtgggtctcaggaattagtggtgttggtggtagtacatactacgcagacgccgtgaagggccggttcaccatctccagagacaattccaagaacacgatgtatctgcaaatgaacagcctgagagccgaggacacggccctatattactgtgcgaaagtaccgctagggacttggtggttcgacccctggggccagggaaccctggtcaccgtctcctca

SEQ ID NO: 9620 - DNA, 292 bp, Homo sapiens
  source 1..292: mol_type = other DNA
tgcagcctctggattcacctttagcaactatgccatgagctgggtccgccaggctccagggatggggctggagtgggtctcaggaattagtggtgttggtggtagtacatactatgcagacgccgtgaagggccggttcaccatctccagagacaattccaagaacacgatgtatctgcaaatgaacagcctgagagccgaggacacggccctatattactgtgcgaaagtaccgctagggacttggtggttcgacccctggggccagggaaccctggtcaccgtctcctca

SEQ ID NO: 9621 - DNA, 295 bp, Homo sapiens
  source 1..295: mol_type = other DNA
cgcagcctctggattcacttttagtaactattggatgagctgggtccgccgggctccagggaagggactggagtgggtggccgccataaagcaagatggaagtgcgaaatactatgtggactctgtgaagggccgattcaccatatccagagacaacgccaagaactcactgtctctgcaaatgaacaacctgggggtcgaggacacggctgtgtattcctgtgcgagagcagtgactaatactgctggtgcctttgatatctggggccaagggacaatggtcaccgtctcttca

SEQ ID NO: 9622 - DNA, 295 bp, Homo sapiens
  source 1..295: mol_type = other DNA
cgcagcctctggattcacttttagtaactattggatgagctgggtccgccgggctccagggaagggactggagtgggtggccgccataaagcaagatggaagtgcgaaatactatgtggactctgtgaagggccgattcaccatatccagagacaacgccaagaactcactgtctctgcaaatgaacaacctgggggtcgaggacacggctctgtattcctgtgcgagagcagtgactaatactgctggtgcctttgatatctggggccaagggacaatggtcaccgtctcttca

SEQ ID NO: 9623 - DNA, 295 bp, Homo sapiens
  source 1..295: mol_type = other DNA
tgcagcctcaggattcaccttcagtagctattggatgacctgggtccgccaggctccagggaaggggctggagtgggtggccaacataaaacaagatggaagtgagaaatactatgtggactctgtgaggggccgattcaccacctccagagacaacgccaagaactcactgtttctccaaatgaacagcctgagagccgaggacacggctgtttattactgtgcgagagcagtgactaatacggcgggtgcttttgatatctggggccaagggacaatggtcaccgtctcttca

SEQ ID NO: 9624 - DNA, 280 bp, Homo sapiens
  source 1..280: mol_type = other DNA
tgtaggctctggattcaaagtcgatgagtattcgatgcactgggtccggcaggctccagggaagggcctggagtgggtctcaggtgtcaattcgaaaggtgacaatgtagggtatggggggtctgtgaagggccgattcaccatctccagagacagagccacgaataccctgtatttgcaaatgaacagtctgagacctgaagacacggccttgtattactgtgcaaaaggtgacgcgatggacgtctggggccaagggactacggtcaccgtctctgca

SEQ ID NO: 9625 - DNA, 280 bp, Homo sapiens
  source 1..280: mol_type = other DNA
tgcagcctctggattcagcgtcgatgattattccatgcactgggtccgaaaagctccgggggagggcctggagtgggtcgcaggtataaattcgaagggggataatacagggtatgggggctctgtgaagggccgattcaccatctccagagacaaaaccacgaatgcgctgtatctgcaaatgaacagtctgagagttgaggacacggccctgtattattgtgcaaaaggggacgcaatggacgtctggggcgaagggaccacggtcaccgtcactgca

SEQ ID NO: 9626 - DNA, 280 bp, Homo sapiens
  source 1..280: mol_type = other DNA
tgcagcctctggattcaaagttgatgattatgccatgcactgggtccggcaagctccagggaagggcctggagtgggtctcaggtattaattggaaaggtgataacgtaggctatggggcttctgtgaagggccgattcaccatctccagagacgcagccaagaactccctgtatttgcaaatgtacagtctgagaggtgaggacacggccttgtattactgtgcaaaaggggacgctatggacgtctggggccaagggaccacggtcaccgtctcttca

SEQ ID NO: 9627 - DNA, 280 bp, Homo sapiens
  source 1..280: mol_type = other DNA
tgcagcctttgaattcagcgttgatgattattccatgcactgggtccggcagcctccagggaagggcctggagtgggtctcatgtactaatcgggatggcactaatatagcctatgcggcctctgtgaagggccgattcaccatctccagagacaacgccaggaactccttctatctgcaaatgaacagtctgagagctgaggacacggccttctattactgtgcaaagggggacgctatggacgtctggggccaagggaccacggtcatcgtctcctca

SEQ ID NO: 9628 - DNA, 280 bp, Homo sapiens
  source 1..280: mol_type = other DNA
tgcagcctctggattcagcgttgatgattattccatgcactgggtccggcaacctccagggaagggcctggagtgggtctcatgtactaatcgggatggcactaatatagcctatgcggcctctgtgaagggccgattcaccatctccagagacaacgccaagaactccttctatctgcaaatgaacagtctgagaggtgaggacacggccttgtattactgtgcaaagggggacgctatggacgtctggggccaagggaccacggtcatcgtctcctca

SEQ ID NO: 9629 - DNA, 280 bp, Homo sapiens
  source 1..280: mol_type = other DNA
tgcagcctctggattcagcgttgatgattatgccatgcactgggtccggcaagttccagggaagggcctggagtgggtcgcaggtattaattgggatagtagtaatgtagggtatgcgggctctgtgaagggccgattcaccatctccagagacaacgccaagaacgccctgcatctgcaaatgaacaatctgagagctcaggacacggccctctattactgtgcaaaaggcgacgctatggacgtctggggccaagggaccacggtcaccgtctcttca

SEQ ID NO: 9630 - DNA, 280 bp, Homo sapiens
  source 1..280: mol_type = other DNA
tgcagcctctggattcaccgttgagaattatgccatgcactgggtccggcaagctccagggaagggcctggagtgggtctcaggtattaattggaaaggtgataacataggctatgcgggctctgtgaagggccgattcaccatctccagagacaaggccaagaactccctctacttgcaaatgaccagtctgagagctgaggacacggccttgtattactgtgcaaaaggggacgctatggacgtctggggccaagggacgacggtcaccgtctcctca

SEQ ID NO: 9631 - DNA, 280 bp, Homo sapiens
  source 1..280: mol_type = other DNA
tgcagcctctggattcatttctgatctttatgccatgcactgggtccggcaaggtccagggaagggcctggagtgggtctcaggtattaatcacaacagtaataatataggctatgcggactctgtgaagggccgattcaccatctccagagacaaggccaagaactccctgtatctgcaaatgaacagtctgagacctgaggacacggccttgtattactgtgcaaaaggggacgctatggacgtctggggccaagggaccacggtcaccgtctcctca

SEQ ID NO: 9632 - DNA, 280 bp, Homo sapiens
  source 1..280: mol_type = other DNA
tgcagcctctggattcagcgttgatgattatgccatgcactgggtccggcaagttccagggaagggcctggagtgggtcgcaggtattaattgggatagtagcaatatagggtatgggggctctgtgaagggccgattcaccatctccagagacaacgccaagaacgccctgcatctgcaaatgaacaatctgagacctcaggacacggccctctattactgtgcaaaaggcgacgctatggacgtctggggccaagggaccacggtcaccgtctcctca

SEQ ID NO: 9633 - DNA, 280 bp, Homo sapiens
  source 1..280: mol_type = other DNA
tgcagcctctggattcagcgttgatgattatgccatgcactgggtccggcaagttccagggaagggcctggagtgggtcgcaggtgttaattgggataggagtaaagtagactatgcgggctcagtgaagggccgattcaccatctccagagacaacgccaagaacgccctgcatctgcaaatgaacaatctgagagctcaggacacggccctctattactgtgcaaaaggcgacgctatggacgtctggggccaagggaccacggtcaccgtctcctca

SEQ ID NO: 9634 - DNA, 280 bp, Homo sapiens
  source 1..280: mol_type = other DNA
tgcagcctctggattcaacgttggtgattatgccatgcactgggtccggcaagctccagggaagggcctggagtgggtctcaggcattaattggaggggtgataatataggctatgcggactctgtgaagggccgattcaccatctccagagacaacgccaagaactccttttatctgcaaatgaacagtctgagactagaggacacggccttgtattactgtgctaaaggggacgctatggacgtctggggccaagggaccacggtcaccgtctcctca

SEQ ID NO: 9635 - DNA, 280 bp, Homo sapiens
  source 1..280: mol_type = other DNA
tgcagcctctggattcaacgttggtgattatgccatgcactgggtccggcaagctccagggaagggcctggagtgggtctcaggcattaattggaggggtgataatataggctatgcggactctgtgaagggccgattcaccatctccagagacaacgccaagaactccttttatctgcaaatgaacagtctgagactagaggacacggccttgtattactgtgctaaaggggacgctatggacgtccggggccaagggaccacggtcaccgtctcctca

SEQ ID NO: 9636 - DNA, 280 bp, Homo sapiens
  source 1..280: mol_type = other DNA
tgcagcctttggattcaaagctgatgattatgccatgcactgggtccggcaagctccagggaagggcctggagtgggtctcaggtatcaaccggaaaagtgataacataggctatggggagtctgtgaagggccgattcaccatctccagagacaaagtcaggaattcgctatatctccaaatgaacagtctcagaggggacgacacggccttgtattattgtgcaaaaggtgacgctatggacgtctggggccaagggaccactgtcaccgtctcttta

SEQ ID NO: 9637 - DNA, 280 bp, Homo sapiens
  source 1..280: mol_type = other DNA
tgcagcctctggattcagcgtcgatcagtattccatgcactgggtccgaaaagctccgggggagggcctggagtgggtcgcaggtataaattggaagggggataatacagggtatgggggctctgtgaagggccgattcaccatctccagagacaaaaccacaaatgcgctgtatctacaaatgaacagtctgagagttgcggacacggccctgtattattgtgcaaaaggggacgcaatggacgtctggggcgaagggaccacggtcaccgtcactgca

SEQ ID NO: 9638 - DNA, 280 bp, Homo sapiens
  source 1..280: mol_type = other DNA
tgcagcctttggattcaacgctgatgattatgccatgcactgggtccggcaagctccagggaagggcctggagtgggtctcaggtatcaaccggaaaagtgataacataggctatggggagtctgtgaagggccgattcaccatctccagagacaaagtcaggaattcgctatatctccaaatgaacagtctcagaggggacgacacggccttgtattattgtgcaaaaggtgacgctatggacgtctggggccaagggaccactgtcaccgtctcttca

SEQ ID NO: 9639 - DNA, 280 bp, Homo sapiens
  source 1..280: mol_type = other DNA
tgcagcctctggattcagcgtcgatcattattccatgcactgggtccgaaaagctccgggggagggcctggagtgggtcgcaggtataaattcgaagggggataatacagggtatgggggctctgtgaagggccgattcaccatctccagagacaaaaccacaaatgcgctgtatctgcaaatgaacagtctgagagttgcggacacggccctgtattattgtgcaaaaggggacgcaatggacgtctggggcgaagggaccacggtcaccgtcactgca

SEQ ID NO: 9640 - DNA, 280 bp, Homo sapiens
  source 1..280: mol_type = other DNA
tgcagccgctggattcaaagttgacaatttcgccatgcactgggtccggcaggctccagggaagggcctggagtgggtctcaggtatcaattggaggggtaataacgtgggctatggggactctgtaaagggccgattcaccatctccagagacaaagtcaacaataccctgtatctgcaaatgaacagtctcagaggtgaggacacggccctctattattgtgcaaaaggggacgccatggacgtctggggccaagggaccacggtcaccgtctcttca

SEQ ID NO: 9641 - DNA, 280 bp, Homo sapiens
  source 1..280: mol_type = other DNA
tgcagcctctggattcagcattgatgattatgccatgcactgggtccggcaagttccagggaagggcctggagtgggtcgcaggtgttaattgggataggagtaaagtagactatgcgggctcagtgaagggccgattcaccatctccagagacaacgccaagaacgccctgcatctgcaaatgaacaatctgagagctcaggacacggccctctattactgtgcaaaaggcgacgctatggacgtctggggccaagggaccacggtcaccgtctcctca

SEQ ID NO: 9642 - DNA, 280 bp, Homo sapiens
  source 1..280: mol_type = other DNA
tgcaggctctggattcaccgttgataattatgccatgcactgggtccggcaagctccagggaagggcctggagtgggtctcaggtattaattggagtagtactaacataggctatgcggactctgtgaagggccgatttaccatctccagagacagcggcaagaactccctgtatctgcaaatgagcagtctgagagctgatgactcggccgtctattactgtgcaaaaggggacgctatggacgtctggggccaagggaccacggtcaccgtctcctca

SEQ ID NO: 9643 - DNA, 280 bp, Homo sapiens
  source 1..280: mol_type = other DNA
tgcaacctctggattcacctttgatgattatgcctttcactgggtccggcaagctccagggaagggcctggagtgggtctcatgtattacttggaacagtggtaataaaggttacgcggcctctgtgaagggccgattcaccatttccagagacaacgccaagaagtccgtgtatctacaaatgaatagtctgagacctgaggacacggccttgtattactgtgcaaaaggcgacgctatggacgtctggggccaagggaccacggtcaccgtctcctca

SEQ ID NO: 9644 - DNA, 309 bp, Homo sapiens
  source 1..309: mol_type = other DNA
acacagaccctcacactgacctgcaccttctctgggttctcactcagtactagtggaatgtgtgtgacctggatccgtcagcccccagggaaggccctggagtggctcgcactcattgattgggatgataataaatactacagcacatctctgaagaccaggctcaccatctccaaggacacctccaaaaaccaggtggtccttataatgaccaacatggaccctgtggacacaggcacatattactgtgcacgcaggtgggacggtatggacgtctggggccaagggaccacggtcaccgtctcctca

SEQ ID NO: 9645 - DNA, 309 bp, Homo sapiens; identical to SEQ ID NO: 9644
  source 1..309: mol_type = other DNA

SEQ ID NO: 9646 - DNA, 309 bp, Homo sapiens
  source 1..309: mol_type = other DNA
acacagaccctcacactgacctgcaccttctctgggttctcactcaacactaatggaatgtgtgtgagttggatccgtcagcccccagggaaggccttagagtggcttgcactcattgattgggatgataataagtactacagtacatctctgaagaccaggctcaccatctccaaggacacctccaaaaatcaggtggtccttattatgattaacgtggaccctgtggacacagccacgtattactgtgcacggaggtgggacggtatggacgtctggggccaagggaccacggtcaccgtctcctca

SEQ ID NO: 9647 - DNA, 309 bp, Homo sapiens
  source 1..309: mol_type = other DNA
acacagaccctcacactgacctgcaccttctctgggttctcactcagcaccagtggaatgtgtgtgagctggatccgccagcccccagggaaggccctggagtggcttgcactcattgattgggatgataataaatactacagtagatctctgaagaccaggctcaccatctccaaggacacctccaaaaatcaggtggtccttataatgaccaacatggaccctgtggacacagccatgtattattgtgcacggaggtgggacggtatggacgtctggggccaagggaccacggtcaccgtctcctca

SEQ ID NO: 9648 - DNA, 279 bp, Homo sapiens
  source 1..279: mol_type = other DNA
gcttctggatacaaattcactagctatggtatgaattgggtgcgacaggcccctggacaagggcttgagtggatgggatggatcaacaccaacactgggaacccaacgtatgcccagggcttcacaggacggtttgtcttctccttggacacctctgtcagcacggcatatctgcagatcagcagcctaaaggctgaggacactgccgtgtattactgtgcgaaaaataggtggctacctgactactggggccagggaaccctggtcaccgtctcctca

SEQ ID NO: 9649 - DNA, 279 bp, Homo sapiens
  source 1..279: mol_type = other DNA
gcttctggatacaccttcagtaactatggtatgaattgggtgcgacaggcccctggacaagggcttgagtggatgggatggatcaacaccaagactgggaacccaacgtatgcccagggcttcacaggacggtttgtcttctccttggacacctctgtcagcacggcatatctgcagatcagcagcctaaaggctgaggacactgccgtgtattactgtgcgaaaaataggtggctacctgactactggggccagggaaccctggtcaccgtctcctca

SEQ ID NO: 9650 - DNA, 298 bp, Homo sapiens
  source 1..298: mol_type = other DNA
tgcagcctctggattcacctttagcagctatgccatgagctgggtccgccaggctccagggaaggggctgaagtgggtctcaggtattagtggtagtggtagcagtacatactatgcagactccgtgaagggccggttcaccatctccagagacaactccaagaacacgctgtatctgcaaatgaacagcctgagagccgaggactcggccgtatattactgtgcgaaaggaaggaattactatgatagtagtggttattactcttggggccagggaaccctggtcaccgtctcctca

SEQ ID NO: 9651 - DNA, 298 bp, Homo sapiens
  source 1..298: mol_type = other DNA
tgcagcctctggattcaccttgagcagctatgccatgagctgggtccgccaggctccagggaaggggctggagtgggtctcaggcattagtggtactggaagtagcacatactacgcagactccgtgaagggccggttcaccatctccagagacaattccaagaacacgctgtctctgcaaatgaacagcctgagagccgaggacacggccgtatattactgtgcgaaagggcgaaattactatgatagtagtggttattactcctggggccagggaaccctggtcaccgtctcctca

SEQ ID NO: 9652 - DNA, 298 bp, Homo sapiens
  source 1..298: mol_type = other DNA
tgcagcctctggattcacctttagcagttatgccatgagctgggtccgccaggctccagggaaggggctggagtgggtctcaggtattagtggtagtggtagtagcacatactacgcagactccgtgaagggccggttcaccatctccagagacaattcccagaacacgttgtatctgcaaatgaacagcctgagagccgaggacacggccgtatattactgtgcgaaaggacgtaattactatgatagtagtggttattactcttggggccagggaaccctggtcaccgtctcctca

SEQ ID NO: 9653 - DNA, 298 bp, Homo sapiens
  source 1..298: mol_type = other DNA
tgcagcctctggattcacctttagcagttatgccatgagctgggtccgccaggctccagggaaggggctggagtgggtctcaggtattagtggtagtggtagtagcacatactacgcagactccgtgaagggccggttcaccatctccagagacaattcccagaacacgctgtatctgcaaatgaacagcctgagagccgaggacacggccgtatattactgtgcgaaaggacgtaattactatgatagtagtggttattactcttggggccagggaaccctggtcaccgtctcctca

SEQ ID NO: 9654 - DNA, 298 bp, Homo sapiens
  source 1..298: mol_type = other DNA
tgcagcctctggattcaccttgagcacctatgccatgagctgggtccgccaggctccagggaaggggctggagtgggtctcagccattagtggtactggaagtagcacatactacgcagactccgtgaagggccggttcaccatctccagagacaattccaagaacacgttgtctctgcaaatgaacagcctgagagccgaggacacggccgtatattactgtgcgaaagggcgaaattactatgatagtagtggttattactcctggggccagggaaccctggtcaccgtctcctca

SEQ ID NO: 9655 - DNA, 298 bp, Homo sapiens
  source 1..298: mol_type = other DNA
tgcagcctctggattcaccttgagcagctatgccatgagctgggtccgccaggctccagggaaggggctggagtgggtctcagccattagtggtactggaagtagcacatactacgcagactccgtgaagggccggttcaccatctccagagacaattccaagaacacgctgtctctgcaaatgaacagcctgagagccgaggacacggccgtatattactgtgcgaaagggcgaaattactatgatagtagtggttattactcctggggccagggaaccctggtcaccgtctcctca

SEQ ID NO: 9656 - DNA, 298 bp, Homo sapiens
  source 1..298: mol_type = other DNA
tgtagcctctggattcacctttagcagttatgccatgagctgggtccgccaggctccagggaaggggctggagtgggtctcaggtattagtggtagtggtagtagcacatactacgcagactccgtgaagggccggttcaccatctccagagacaattcccagaacacgttgtatctgcaaatgaacagcctgagagccgaggacacggccgtatattactgtgcgaaaggacgtaattactatgatagtagtggttattactcttggggccagggaaccctggtcaccgtctcctca

SEQ ID NO: 9657 - DNA, 289 bp, Homo sapiens
  source 1..289: mol_type = other DNA
tgtagcctctggattcacctttagcagctatgccatgacctgggtccgccaggctccagggaaggggctggagtgggtctcagctattagtcatagtggtgataacacatactacgcagactccgtgaagggccggttcaccatctccagagacaattccaagaacacactgtatctgcaaatgaacagcctgagagccgacgacacggccgtatattactgtgcgaaagacagtcgggcgtactactttgactactggggccagggaaccctggtcaccgtctcctca

SEQ ID NO: 9658 - DNA, 289 bp, Homo sapiens
  source 1..289: mol_type = other DNA
tgtagcctctggattcacctttagcagctatgccatgaactgggtccgccaggctccagggaaggggctggagtgggtctcaattatttatagcggtggtggtagcacatactatgcagactccgtgaagggccggttcaccatctccagagataattccaagaacacgctgtatctgcaaatgaacagcctgagagccgaggacacggccgtatattactgtgcgaaagattcccgcgcttactactttgactactggggccagggaaccctggtcaccgtctcctca

SEQ ID NO: 9659 - DNA, 274 bp, Homo sapiens
  source 1..274: mol_type = other DNA
tgcagcctctggaatcgccgtcagtgacaacttcatgagttgggtccgccaggctccagggaagggtctggagtgggtctcactaattactggcggtggaaccacagtgtacgcagactccgtgaagggccgattcaccatctccacagacaagtccaagaataccctctatcttctaatgaacagcctgagagccgaggacacggccgtgtattactgtacgacaggggctatggacgtctggggccaagggaccacggtcaccgtctcatca

SEQ ID NO: 9660 - DNA, 274 bp, Homo sapiens
  source 1..274: mol_type = other DNA
tgcagcctctgggttcaccgtcagtagcaccttcgtgaactgggtccgccaggctccagggaaggggctggagtgggtctcacttattgctaccggtggtactacatattacgtagactccgtgaagggccggttcaccgtctccagggacatttccaagaacacgctgtatcttcacatgaacagcctgagagccgaagacacggccgtgtattattgtacgacaggcgctatggacgtctggggccaagggaccacggtcaccgtctcctcg

SEQ ID NO: 9661 - DNA, 274 bp, Homo sapiens
  source 1..274: mol_type = other DNA
tgcagcctctgggttcggcgtcagtgacaacttcatgagctgggtccgccaggctccagggaaggggctggagtgggtctcactcattactggcagtgggggcacagtgtacatagactccgtgaagggccgattcaccgtctccacagacaagtccaagaacaccctctatcttctaatgaacagcctgagagtcgaggacacggccgtgtattactgtacgacaggggctatggacgtctggggccaagggaccacggtcaccgtctcatca

SEQ ID NO: 9662 - DNA, 274 bp, Homo sapiens
  source 1..274: mol_type = other DNA
tgcagcctctggattcgccgtcagtgacaacttcatgagctgggtccgccaggctccagggaaggggctggagtgggtctcactaattactggcggtggaaccacagtgtacgcagactccgtgaagggccgattcaccatctccgcagacaagtccaagaacaccctctatcttctaatgaacagcctgagagccgaggacacggccgtgtattactgtacgacaggggctatggacgtctggggccaagggaccacggtcaccgtctcatca

SEQ ID NO: 9663 - DNA, 280 bp, Homo sapiens
  source 1..280: mol_type = other DNA
tgcagcctcggggttcggcgtcagtgacaccttcaacttcatgagctgggtccgccaggctccagggaaggggctggagtgggtctcactaattactggccgtggaaccacagtgtacgcagactccgtgaagggccgattcaccatctccacagacaagtccaagaacaccctctatcttctaatgaacagcctgagagccgaggacacggccgtgtattactgcacgacaggggctatggacgtctggggccaagggaccacggtcaccgtctcaaca

SEQ ID NO: 9664 - DNA, 286 bp, Homo sapiens
  source 1..286: mol_type = other DNA
tgcggcctctggattcagcttcagtcgctacacaatgcactgggtccgccaggctccagggaaggggctgatgtgggtctcacgtataactagtgatgagaggaccataagccacgcggactccttgaatggccgattcaccatctccagagacaacgccaagaacacgctgtatttgcaaatgaacagtctgagagccgaggacacggctgtgtatttttgtgcaagaagtgtcgagcacggtttggatgtctggggccaagggaccccggtcaccgtctcctca

SEQ ID NO: 9665 - DNA, 286 bp, Homo sapiens
  source 1..286: mol_type = other DNA
tgcgacatctggattcaggttcagtgtgtacaccatgcactgggtccgccaagctccagggaaggggctgatgtgggtctcacgcatgactagtgatgagaggaccacaagccacgcggactccgtgaatggccgattcaccatctccagagacaacgccaagaacacgctgtatctgcaaatgaacagtctgagagccgaggacacggctgtgtattattgtgcaagaagtgtcgagcacggtttggacgtctggggccaagggaccacggtcaccgtctcctca

SEQ ID NO: 9666 - DNA, 286 bp, Homo sapiens
  source 1..286: mol_type = other DNA
ttcaacctctggattcaacttcagtccctacacatttcactgggtccgccaaggtccagggaaggggctggtgtgggtctcacgtcttaatggtaatgggaatatcagatcctacgcggacgccgtgaagggccgattcaccatctccagagacaacgccaagagcacactctttcttcaaatgaacagtctgagagtcgaggacacgggtgtctactactgtgcaagaagtgttgaacatggtttggacgtctggggccaagggaccatggtcaccgtctcctca

SEQ ID NO: 9667 - DNA, 286 bp, Homo sapiens
  source 1..286: mol_type = other DNA
ttcaacctctggattcaacttcagtccctacacatttcactgggtccgccaagatccagggaaggggctggtgtgggtctcacgtcttaatggtaatgggaatatcagatcctacgcggacgccgtgaagggccgattcaccatctccagagacaacgccaagagcacactctttcttcaaatgaacagtctgagagtcgaggacacgggtgtctactactgtgcaagaagtgttgaacatggtttggacgtctggggccaagggaccatggtcaccgtctcctca

SEQ ID NO: 9668 - DNA, 286 bp, Homo sapiens
  source 1..286: mol_type = other DNA
tatagcctctgaattcagtttcagtccctacacgatgcactgggtccgccaacctccagggaaggggctgatgtgggtctcacgcattattggtaatgggaggaccataagccacgcggattccgtcaatggccgattcaccatctccagagacaacgccaagaacacgctgtatttgcaaatgaacagtctgagagccgaggacacggctgtatattattgtgcaagaagtgtcgagcacggtttggacgtctggggccaagggaccacggtcaccgtctcctca

SEQ ID NO: 9669 - DNA, 286 bp, Homo sapiens
  source 1..286: mol_type = other DNA
cagaacctctggattcaacttcaatatctacacaatgcactgggcccgccaagttacagggaaggggctgatatgggtctcacgtattaatggtgatgggcgtaccacatcctacgcggactccgtgaagggccgattcaccatctccagagacaacgccaagagcacgttgtatctgcaaatgagcagtctgaaagtcgaggacacgggtatattctactgtgcaagaagtgttgagcacggtttggacgtctggggccaagggaccacggtcaccgtctcctca

SEQ ID NO: 9670 - DNA, 286 bp, Homo sapiens; identical to SEQ ID NO: 9666
  source 1..286: mol_type = other DNA

SEQ ID NO: 9671 - DNA, 286 bp, Homo sapiens
  source 1..286: mol_type = other DNA
tgtagcctctggattcaccctcagttcctactatattcactgggtccgccaagctccagggaaggggctggtgtgcgtctcacgtattaatattgatgggagtgtcacaaaatacgcggactccgttaagggccgattcaccatctcccgagacaacgccaagaacacgctgtatctggaaatgaacagtctgacagccgaggacacggctgtctattactgtgcgagaggttaccgctacggtatggacgtctggggccaagggaccacggtcaccgtctcctca

SEQ ID NO: 9672 - DNA, 286 bp, Homo sapiens; identical to SEQ ID NO: 9671
  source 1..286: mol_type = other DNA

SEQ ID NO: 9673 - DNA, 286 bp, Homo sapiens
  source 1..286: mol_type = other DNA
tgaagcctctggattcaccttcagtggctttgcgatgcattgggtccgccaagctcccgggaaggggctggcgtgggtctcgttcattaggaatgatgggagtggcacaagctacgcgggctccgtgaagggccgattcacaatctccagagacaacgccaaggggacgctgtatctgcaaatgaacagtctgagagccgaggacacggctgtttattactgtgcaagaggttatcgttacggcatggacgtctggggccaagggaccacggtcaccgtctcctca

SEQ ID NO: 9674 - DNA, 301 bp, Homo sapiens
  source 1..301: mol_type = other DNA
tacagcctctgggttcactttcagtaatgcctggatgagctgggtccgccaggctccagggaaggggctggagtgggttggccgtattaaaaggaaaattgatggtgggacaacagagtacgctgcacccgtgaaagacagattcaccatttcaagagatgattcaaaaaacacactgtatctggaaatgaacagcctgaaaatcgacgacacagccgtgtactactgtactccagaccgagtagttccaggtgcctactttgactactggggccagggaaccctggtcaccgtctcctca

SEQ ID NO: 9675 - DNA, 301 bp, Homo sapiens
  source 1..301: mol_type = other DNA
tggaacttctggattcagtttcagtgacgcctggatgagctgggtccgccaggctccagggaaggggctggagtggcttggccgtattaaaagtaagactgatggtggggcaacagactacgctgcacccgtgaaaggcagattcaccatctcaagagatgattcaacaaacacgctgtttctgcaaatgaacagcctgaaaaccgaggacacagccgtctattactgtaccccagatagggtggtaccaggtgcttactttgactactggggccagggaaccctggtcaccgtctcctca

SEQ ID NO: 9676 - DNA, 286 bp, Homo sapiens
  source 1..286: mol_type = other DNA
tgcaacctctggattcacttttagtaacaattggatgagctgggtccgccaggctccagggaaggggctggagtgggtggccaacataaagccagatggaagtgtgaagaactatgtgggctctgttaagggccgattcaccatctccagagacaacgccgagaattcattgtatctgcaaatgaacagcctgagagccgaggacacggctgtctattactgtgcgaaggactcgtattcccggggggactactggggccagggaaccctggtcaccgtctcctca

SEQ ID NO: 9677 - DNA, 286 bp, Homo sapiens
  source 1..286: mol_type = other DNA
tgcagcctctggattcacctttagtaacgattggatgagctgggtccgccaggctccagggaaggggctggagtgggtggccaacataaacccagatggaagtgcgaaaaactatgtgggctctgttaagggccgattcaccatctccagagacaacgccaagaactcactgtatctgcaaatgaacagcctgagagccgaggacacggctgtctattactgtgcgaaggactcgtattcccggggggactactggggccagggaaccctggtcaccgtctcctca

SEQ ID NO: 9678 - DNA, 286 bp, Homo sapiens
  source 1..286: mol_type = other DNA
tgcagcctctggattcacctttagtagttcttggatgagttgggtccgccaggctccagggaaggggctggagtgggtgaccaacataaaggcagatggaagtgagcaaaactatgtggactctgtgaagggccgattcaccatctccagagacaacgccaagaactcactgtatctgcaaatgaacagcctgagagccgaggacacggctgtgtattactgtgcgaaagattcatatagcaggggggattactggggccagggaaccctggtcaccgtctcctca

SEQ ID NO: 9679 - DNA, 283 bp, Homo sapiens
  source 1..283: mol_type = other DNA
tgaagcctctggattcagttttagtggttattggatgagttgggtccgccaggctccagggaagggtctggagtgggttgccaacataaattacgctgaaggtgacaaatactatgtggactctgtgaagggccgattcaccatctccagagacaacgcccagaactcagtgtatctgcaactgaacagcctgaaagccgaagacacggctgtctattactgtgcgagagacaagtggatatatgactactggggccagggaatcctggtcaccgtctcctca

SEQ ID NO: 9680 - DNA, 283 bp, Homo sapiens
  source 1..283: mol_type = other DNA
tgccgcctctggattcagttttagtggttattggatgagttgggtccgccaggctccagggaaggggctggagtgggtggccaacataaatcaaggtgaaggtgagaagaattatgtggactctgtgaagggccgattcaccatctccagagacaacgccaggaattcactgtttttgcaaatgaacagcctgaaaatcgaggacacgggtgtatattactgtgcgagagacaagtggatctatgactactggggccagggaaccctggtcaccgtctcctca

SEQ ID NO: 9681 - DNA, 277 bp, Homo sapiens
  source 1..277: mol_type = other DNA
tgcagcctctgaattcagtgttagtgatttttggatgacctgggtccgccaggctccagggaaggggctggagtgggtggccaccatgaacgaagatggatctaagaagtactatgtggactctgtgaagggccgattcaccatctccagagacaacgccaagaactcactgtatctgcaattgaacagcctgagagccgaggacacggctgtgtatttctgtgcgagaggtcatgggagtatctggggccagggaaccctggtcaccgtctcctca

SEQ ID NO: 9682 - DNA, 277 bp, Homo sapiens
  source 1..277: mol_type = other DNA
tgcagcctctgaattcagtgttaatgatttttggatgacctgggtccgccaggctccagggaaggggctagagtgggtggccaccatgaacgaagatggatctaagaagtactatgtggactctgtgaagggccgattcaccatctccagagacaacgccaagaactcactgtatctgcaactgaacagcctgagagccgaggacacggctgtgtatttctgtgcgagaggtcatgggagtatctggggccagggaagcctggtcaccgtctcctca

SEQ ID NO: 9683 - DNA, 277 bp, Homo sapiens
  source 1..277: mol_type = other DNA
tgtagactctggactcagttttagttcctactggatgggatgggtccgccaggctccagggaaggggctggagtgggtggccaccataaggcaagatggaagtgacaaatattatgtggactctgtgaggggccgattcaccatctccaaagacaacgccaagaactcactgtatctgcaaatgaacagcctgagaggcgacgacacggctgtgtattcctgtgcgaggggccacggctcgatctggggccagggaaccctggtcaccgtctcctca

SEQ ID NO: 9684 - DNA, 274 bp, Homo sapiens
  source 1..274: mol_type = other DNA
tgcagcctctggattcacctttgatgattatgccatgcactgggtccggcaagctccagggaagggcctggagtgggtctcaggtattagttggaatagtggtgccatagggtatgcggactctgtgaagggccgattcaccatctccagagacaacgccgagaactccctgtttctgcaaatgaacagtctgacagataaggacacggccttatattactgtacaaaagatttctggctctggggccagggaaccctggtcaccgtctcctcc

SEQ ID NO: 9685 - DNA, 274 bp, Homo sapiens
  source 1..274: mol_type = other DNA
tggagcctctggcttcagttttgatgacattgccatgcattgggtccggcaggttccagggaagggcctggagtgggtctcaggaattagttacaatagtgtttatataggatatgcggcctctgtgaagggccgattcaccatctccagagacaacgccaagaactccctctatttggaaatgaacagtctgagaggtgatgacacggccttgtattactgtacaaaagatttttggctctggggccagggagtccaggtcaccgtctcctca

SEQ ID NO: 9686 - DNA, 274 bp, Homo sapiens
  source 1..274: mol_type = other DNA
tggagcctctggcttcagttttgatgacattgccatgcattgggtccagcaggttccagggaagggcctggagtgggtctcaggaattagttacaatagtgtttatataggatatgcggcctctgtgaagggccgattcaccatctccagagacaacgccaagaactccctctatttggaaatgaacagtctgagaggtgatgacacggccttgtattactgtacaaaagatttttggctctggggccagggagtccaggtcaccgtctcctca

SEQ ID NO: 9687 - DNA, 277 bp, Homo sapiens
  source 1..277: mol_type = other DNA
cactgtctctggtaactccatcagtgattactactggaactggatccggcagtcccccgggaagggactggagtggattgggtacctctctaccagtgggagcaccacctacaacccctccctcaagagtcgagtcaccatatcagtggacacctccaagaatcagttgtccctgaagttgacctctgtgaccgccgcagacacggccgtctattactgtgcgagacgggggttcttggactactggggccagggaaccctggtcaccgtctcctca

SEQ ID NO: 9688 - DNA, 277 bp, Homo sapiens
  source 1..277: mol_type = other DNA
cactgtctctggtgactccatcactaattactactggaactggatccggcagcccccagggaagggactggagtggattgggtacctctctaccagtgggagcaccacctacaacccctccctcaagagtcgagtcaccatatcagtggacacctccaagaatcagctctccctgaagttgacctctctgaccgccgcagacacggccgtatattactgtgcgagacgggggttcttggactactggggccagggaaccctggtcaccgtctcctca

SEQ ID NO: 9689 - DNA, 277 bp, Homo sapiens
  source 1..277: mol_type = other DNA
cactgtctctggtgactccatcactaattactactggaactggatccggcagcccccagggaagggactggagtggattgcgtacctctctaccagtgggagaaccgcctacaacccctccctcgagagtcgagtcaccatatcagtggacacctccaagaatcagatctccctgaagttgacctctctgaccgccgcagacacggccgtatattactgtgcgagacgggggttcttggactactggggccaggggaccctggtcaccgtctcctca

SEQ ID NO: 9690 - DNA, 277 bp, Homo sapiens
  source 1..277: mol_type = other DNA
cactgtctctggtgactccatcactaatcgttactggaactggatccggcagcccccagggaagggactggagtggattgggtacctctctaccagtgggagcaccacctacaacccctccctcaagagtcgagtcaccatatcagtggacacctccaagaatcagctctccctgaacttgacctctctgaccgccgcagacacggccgtatattactgtgcgagacgggggttcttggactactggggccagggagccctggtcaccgtctcctca

SEQ ID NO: 9691 - DNA, 277 bp, Homo sapiens
  source 1..277: mol_type = other DNA
cactgtctctggtgactccatcactaattactactggaattggatccggcagcccccagggaagggactggagtggattgggtatatctctaccagtgggagcaccgcctacaacccctccctcaagagtcgagtcaccatatcagtggacacctccaagaatcaggtctccctgaagttgacctctgtgaccgccgcagacacggccgtgtattactgtgcgagacggggattcttggactactggggccagggaaccctggtcaccgtctcctca

SEQ ID NO: 9692 - DNA, 277 bp, Homo sapiens
  source 1..277: mol_type = other DNA
cactgtctctggtggctccatcagtagttactactggagctggatccggcagcccgccgggaagggactggagtggattgggcgtatctataccagtgggagcaccaactacaacccctccctcaagagtcgagtcaccatgtcagtagacacgtccaagaaccagttctccctgaagctgagctctgtgaccgccgcggacacggccgtctattattgtgcgagacggggtttccttgactactggggcccgggaatcctggtcaccgtctcctca

SEQ ID NO: 9693 - DNA, 274 bp, Homo sapiens
  source 1..274: mol_type = other DNA
cactgtctctggtgtctccgtcaatgattactactggagttggatccggcagcccccagggaagggcctggaatggatcggctatatttctaacaatgggaccaactacaatccctccctcacgagtcgactcaccatatccgtagatctgtccaagaaccagttctccctgaagctggactctgtgaccgccgcagacacggccgtctattattgtgcgagacggggtttccttgactactggggcccgggaatcctggtcaccgtctcctca

SEQ ID NO: 9694 - DNA, 277 bp, Homo sapiens
  source 1..277: mol_type = other DNA
cactgtctctggtgactccatcactaattactactggaactggatccggcagcccccagggaagggactggagtggattgggtacctctctaccagtgggagcaccacctacaacccctccctcaagagtcgagtcaccatatcagtggacacctccaagaatcagttctccctgaagttgacctctctgaccgccgcagacacggccgtatattactgtgcgagacgggggttcttggactactggggccagggaaccctggtcaccgtctcctca

SEQ ID NO: 9695 - DNA, 277 bp, Homo sapiens
  source 1..277: mol_type = other DNA
cactgtctttggtgactccatcactaattactactggaactggattcggcagcccccagagaagggactggagtggattggctacctcgctaccagtgggagtaccacctacaacccctccctcaagagtcgagtcagcatatcagtggacacctccaagaatcaggtctccctgaagttgacgtctctgaccgccgcagacacggccgtatattactgtgcgagacgggggttcttagactactggggccagggaaccctggtcaccgtctcctca

SEQ ID NO: 9696 - DNA, 277 bp, Homo sapiens
  source 1..277: mol_type = other DNA
cactgtgtctggcgactccatcactaattactactggaactggatccggcagcccccagggaagggactggagtggattgggtaccgctctaccagtgggagcaccacctacaacccctccctcaagagtcgagtcaccatatcagtggacacctccaagaatcaaatctccctgaagttgacctctctgaccgccgcagacacggccgtatattactgtgcgagacggggattcttggactattggggccagggaaccctggtcaccgtctcctca

SEQ ID NO: 9697 - DNA, 277 bp, Homo sapiens
  source 1..277: mol_type = other DNA
cactgtctctggtgactccatcactaattactactggaactggatccggcagcccccagggaagggactggagtggattgggtacctctctaccagtgggagcaccacctacaacccctccctcaagagtcgagtcaccatatcagtggacacctccaagaatcaggtctccctgaagttgacctctctgaccgccgcagacacggccgtatattactgtgcgagacgggggttcttggactactggggccagggaaccctggtcaccgtctcctca

SEQ ID NO: 9698 - DNA, 277 bp, Homo sapiens
  source 1..277: mol_type = other DNA
cactgtctctggtgactccatcactaatcactactggaattggatgcggcagcccccagggaagggactggagtggattgggtacctctctaccagcgggaccaccacctataacgcctccctgaagagtcgtgtcgccatatcagtggacacctccaagaatcaggtctccctgacgttgacctctgtgaccgccgcagacacggccgtgtattattgtgcgagacgggggttcttggattactggggccagggaaccctggtcaccgtctcctca

SEQ ID NO: 9699 - DNA, 298 bp, Homo sapiens
  source 1..298: mol_type = other DNA
tgcagcctctggattcacccttagcagctatgccatgagctgggtccgccaggctccaggggaggggctggagtgggtctcagctattagtggtagtggtggtaacacagactacgcagactccgtgaagggccggttcaccatctccagagacaattccaagaacacgttgtatctgcaaatgaacagcctgagagccgaggacacggccgtatattactgtgcgaaagattttgttggggtagtagcggatgcttttgatatctggggccaagggacaatggtcaccgtctcttca

SEQ ID NO: 9700 - DNA, 298 bp, Homo sapiens
  source 1..298: mol_type = other DNA
tgcagcctccggattcacctttagcaactatgccatgacctgggtccgccagactccagggaaggggctggagtgggtctcaggtgttagtggtagtggtggtggcacatactacgcagactccgtgatgggccggttcaccatctccagagacaattccaagaacacactttatctacaaatgaacagcctgagagccgaagacacagccgtttattactgtgcgaaagatttcgtgggagtcgtcgccgatgcttttgatatctggggccaagggacaatggtcaccgtctcttca

SEQ ID NO: 9701 - DNA, 298 bp, Homo sapiens; identical to SEQ ID NO: 9700
  source 1..298: mol_type = other DNA

SEQ ID NO: 9702 - DNA, 296 bp, Homo sapiens
  source 1..296: mol_type = other DNA
cagcctccggattcacctttagcaactatgccatgacctgggtccgccagactccagggaaggggctggagtgggtctcaggtgttagtggtagtggtggtggcacatactacgcagactccgtgatgggccggttcaccatctccagagacaattccaagaacacactttatctacaaatgaacagcctgagagccgaagacacagccgtttattactgtgcgaaagatttcgtgggagtcgtcgccgatgcttttgatatctggggccaagggacaatggtcaccgtctcttca

SEQ ID NO: 9703 - DNA, 298 bp, Homo sapiens
  source 1..298: mol_type = other DNA
tgcagcctccggattcacctttagcaactatgccatgacctgggtccgccagactccagggaaggggctggagtgggtctcaggtgttagtggtagtggtggtggcacatactacgcagactccgtgatgggccggttcaccatctccagagacaattccaagaacacactttatctacaaatgaacagcctgaaagccgaagacacagccgtttattactgtgcgaaagatttcgtgggagtcgtcgccgatgcttttgatatctggggccaagggacaatggtcaccgtctcttca

SEQ ID NO: 9704 - DNA, 298 bp, Homo sapiens
  source 1..298: mol_type = other DNA
tgcagcctccggattcacctttagcaactatgccatgacctgggtccgccagactccagggaaggggctggagtgggtctcaggtgttagtggtagtggtggtggcacatactacgcagactccgtgatgggccggttcaccatctccagagacaattccaagaacacactttatctacaaatgaacagcctgagagccgaagacacagccgtttattactgtgcgaaagatttcgtgggagtcgtcgccgatgcttttgatatctggggccaagggacaatggtcaccgcctcttca

SEQ ID NO: 9705 - DNA, 301 bp, Homo sapiens
  source 1..301: mol_type = other DNA
tacagcttctggattcacctttggtgattatgctatgagctggttccgccaggccccaggcaaggggctggagtgggtaggtttcattagaagcaaaacttatggtgggacaacagaatacgccgcgtctgtgaaaggcagattcaccatctcaagagatgattccaaaagcgtcgcctatctgcaaatgaacagcctgaaaaccgaggacacagccgtgtattactgtactagagtcccctatagcagtggctggtacggggactactggggccagggaaccctggtcaccgtctcctca

SEQ ID NO: 9706 - DNA, 301 bp, Homo sapiens
  source 1..301: mol_type = other DNA
tacagcttctggattcacctttggtgattatggtatgagctgggtccgccaggctccagggaaggggctggactgggtaggtttcattagcagcaaagcttatggtgagacaacaaaatacgccgcgtctgtgaaaggcagattcaccatctcaagagatgattccaaaagcatcgcctatctgcaaatgaacagcctgaaaaccgacgacacagccgtgtattactgtactagagttccgtatagcagtggctggtacggtgactactggggccagggaaccctggtcaccgtctcctca

SEQ ID NO: 9707 - DNA, 301 bp, Homo sapiens
  source 1..301: mol_type = other DNA
tacagcttctggattcacctttggtgattatggtatgagctgggtccgccaggctccagggaaggggctggactgggtaggtttcattagcagcaaagcttatggtgagacaacaaaatacgccgcgtctgtgaaaggcagattcaccatctcaagagatgattccaaaagcatcgcctatctgcaaatgaacagcctgaaaaccgacgacacagccgtgtattactgtactagagttccgtatagcagtggctggtacggtgactacgggggccagggaaccctggtcaccgtctcctca

SEQ ID NO: 9708 - DNA, 280 bp, Homo sapiens
  source 1..280: mol_type = other DNA
tgcagcctctggattcacctttagtagctattggatgaactgggtccgccaggctccagggaaggggctggagtgggtggccaacataaagcaagatggaagtgagaaaaactatgtggactctgtgaagggccgattcaccatctccagagacaacgccaagaactcactgtatctgcaaatgaacagcctgagagccgaggacacggctgtatatttttgtgcgagaggatcagcagctgctttctggggccagggaaccctggtcaccgtctcctca

SEQ ID NO: 9709 - DNA, 280 bp, Homo sapiens
  source 1..280: mol_type = other DNA
tgcagcctctggattcacctttagtagttattggatgaactgggtccgccaggctccagggaaggggctggagtgggtggccaacataaagcaagatggaggtgagaaatactatgtggactctgtgaagggccgattcaccatctccagagacaacgccaagaactcactgtatctgcaaatgaacagcctgagagccgaggacacggctgtgtattactgtgcgagaggttcggcggctgcgttctggggccagggaaccctggtcaccgtctcctca

SEQ ID NO: 9710 - DNA, 307 bp, Homo sapiens
  source 1..307: mol_type = other DNA
tgaagcgtctggattcgccttcagtacctatgccatgatctgggtccgccaggctccaggcaaggggctggagtgcgtgacaattatatggtatgatggaagtcaggagtattatgtagactccgtgaggggccgattcaccgtctccagagacaattccaagaacacggtgtatctgcaaatgaacggcctgagaggcgaggacacggctgtgtattactgtgcgagagatccccccgatagtagtggttattaccataatgcttttgatctctggggccaagggacaatggtcaccgtctcttca

SEQ ID NO: 9711 - DNA, 307 bp, Homo sapiens
  source 1..307: mol_type = other DNA
tgcagcgtctggattccccttcagtacctatgccatgatctgggtccgccagcctccaggcgaggggctggagtgcgtggcaattatatggtatgatggaagtcaggaatactatgcagactccgtgaagggccgattcaccatctccagagacaattccaggaacacgctgtttctgcaaatggacagcctgagagccgacgacacggctttttattactgtgcgagagacccaccggatagtagtggttattaccataatgcttttgatctctggggccaagggacaatggtcatcgtctcttca

SEQ ID NO: 9712 - DNA, 307 bp, Homo sapiens
  source 1..307: mol_type = other DNA
tgcagcgtctggattccccttcagtacctatgccatgatctgggtccgccaggctccaggcgaggggctggagtgcgtggcaattatatggtatgatggaagtcaagaatactatgcagactccgtgaagggccgattcaccatctccagagacaattccaggaacacgctgtttctgcaaatggacagcctgagagccgacgacacggctttttattactgtgcgagagacccaccggatagtagtggttattaccataatgcttttgatctctggggccaagggacaatggtcatcgtctcttca

SEQ ID NO: 9713 - DNA, 307 bp, Homo sapiens; identical to SEQ ID NO: 9711
  source 1..307: mol_type = other DNA

SEQ ID NO: 9714 - DNA, 307 bp, Homo sapiens
  source 1..307: mol_type = other DNA
tgcagcgtctggattccccttcagtacctatgccatgatctgggtccgccaggctccaggcgaggggctggagtgcgtggcaattatatggtatgatggaagtcaagaatactatgcagactccgtgaagggccgattcaccatctccagagacaattccaggaacacgctgtttctgcaaatggacagcctgagagccgacgacacggctgtttattactgtgcgagagacccaccggatagtagtggttattaccataatgcttttgatctctggggccaagggacaaaggtcatcgtctcttca

SEQ ID NO: 9715 - DNA, 307 bp, Homo sapiens; identical to SEQ ID NO: 9710
  source 1..307: mol_type = other DNA

SEQ ID NO: 9716 - DNA, 301 bp, Homo sapiens
  source 1..301: mol_type = other DNA
cactgtctctggtgcctccatcaacagtggtccttactactggggctggatccgccagcccccagggaaggggctggagtggattgggtccatcgattatagtggcaccacctactacaacccgtccctcaagagtcgagtcatcgtatctgcagacacttccaagaatcagttctccctgaatctgatctctgtgaccgccgcagacacggctgtctattactgtgcgagacggggcccttatgggagcgggggctggttcgacccctggggccagggaaccctggtcaccgtctcctca

SEQ ID NO: 9717 - DNA, 301 bp, Homo sapiens
  source 1..301: mol_type = other DNA
tactgtctctggtgactccatcagtagtaggaattactactggggctggatccgccagcccccagggaaggggctggagtggattgggaccatctattatagtggcaccacctactataacccgtccctcaagagtcgagtcaccgtatctacagacacgtccaagaatcagttctccctgaacctgaggtctgtgaccgccgcagacacggctgtctattattgtgcgagacggggcccttatggcagcgggggctggttcgacccctggggccagggaaccctggtcaccgtctcctca

SEQ ID NO: 9718 - DNA, 304 bp, Homo sapiens
  source 1..304: mol_type = other DNA
cattgtctctggtggctccatcagcagtggtagttactactggggctgggtccgccagcccccagggaagggcctggagtggattgggagtttttattatagtgggaacaactactactacaacccgtccctcaagagtcgagtcaccatatccgtagactcgcccaagaaccagttctccctgaagctgagttctgtgaccgccgcagacacggctgtgtattactgtgcgagacgggggccttatgggtccgggggctggttcgacccctggggccagggaaccctggtcaccgtctcctca

SEQ ID NO: 9719 - DNA, 282 bp, Homo sapiens
  source 1..282: mol_type = other DNA
aagggttctggatacagctttagcacccactggatcggctgggtgcgccagatgcccgggaaaggcctggagtggatggggatcatctatcctggtgactctgacaccagatacagtccgtccttccaaggccaggtcaccatctcagccgacaagtccatcagcaccgcctacctgcagtggagcagcctgaaggcctcggacagcgccatgtattactgtgcgagacggtcgggtggtgtggacgtctggggccaagggaccacggtcaccgtctcctca

SEQ ID NO: 9720 - DNA, 282 bp, Homo sapiens; identical to SEQ ID NO: 9719
  source 1..282: mol_type = other DNA

SEQ ID NO: 9721 - DNA, 282 bp, Homo sapiens
  source 1..282: mol_type = other DNA
aagggttctggatataactttcccaattattggatcggctgggtgcgccagatgcccgggaaaggcctggagtggatgggaatcatctatcctggtaactctgataccagatacagtccgtccttccaaggccaggtcaccatctcagccgacaagtccatcagcaccgcctacctgcagtggagcagcctgaaggcctcggacaccgccatgtattactgtgcgagacgaagtggtggggtggacgtctggggcaaagggaccacggtcaccgtctcctca

SEQ ID NO: 9722 - DNA, 286 bp, Homo sapiens
  source 1..286: mol_type = other DNA
tgcagcctctggattcagcttcagtttttatagcatgagctgggtccgccaggctccagggaaggggctggagtggatttcatacattcgtagtagtagtagtaccatatactacgcagactctgtgaagggccgattcaccatctccagcgacaacgccgagaactcactgtttctgcaaatgaacagcctgagagacgacgacacggctgtctattactgtgcgagagatgagggctacgcttttgatatctggggccaagggacaatggtcaccgtctcttca

SEQ ID NO: 9723 - DNA, 286 bp, Homo sapiens
  source 1..286: mol_type = other DNA
tgcagcctctggattcagcttcagtagctattccatgaactgggtccgccaggctccagggaaggggctggagtggctttcatacattaggcatagtagtggaaccatgggctacgcagactctgtgaagggccgattcaccgtctccagagacaatgccaagacgtcactgtttctgcaaatgaacagcctgagagacgaggacacggctgtctattactgtgcgagagatgaggggtatgcttttgatatctggggccaagggacagaggtcaccgtctcttca

SEQ ID NO: 9724 - DNA, 286 bp, Homo sapiens; identical to SEQ ID NO: 9722
  source 1..286: mol_type = other DNA

SEQ ID NO: 9725 - DNA, 284 bp, Homo sapiens
  source 1..284: mol_type = other DNA
cagcctctggattcagcttcagtttttatagcatgagctgggtccgccaggctccagggaaggggctggagtggatttcatacattcgtagtagtagtagtaccatatactacgcagactctgtgaagggccgattcaccatctccagcgacaacgccgagaactcactgtttctgcaaatgaacagcctgagagacgacgacacggctgtctattactgtgcgagagatgagggctacgcttttgatatctggggccaagggacaatggtcaccgtctcttca

SEQ ID NO: 9726 - DNA, 286 bp, Homo sapiens
  source 1..286: mol_type = other DNA
tgcagcctctggattcagcttcagtttttatagcatgagctgggtccgccaggctccagggaaggggctggagtggatttcatacattcgtagtagtaatagtaccatatactacgcagactctgtgaagggccgattcaccatctccagcgacaacgccgagaactcactgtttctgcaaatgaacagcctgagagacgacgacacggctgtctattactgtgcgagagatgagggctacgcttttgatatctggggccaagggacaatggtcaccgtctcttca

SEQ ID NO: 9727 - DNA, 286 bp, Homo sapiens
  source 1..286: mol_type = other DNA
tgcagcctctggattcagcttcagtttttatagcatgagctgggtccgccaggctccagggaaggggctggagtggatttcatacattcgtagtagtagtagtaccatatactacgcagactctgtgaagggccgattcaccatctccagcgacaacgccgagaactcactgtctctgcaaatgaacagcctgagagacgacgacacggctgtctattactgtgcgagagatgagggctacgcttttgatatctggggccaagggacaatggtcaccgtctcttca

SEQ ID NO: 9728 - DNA, 289 bp, Homo sapiens
  source 1..289: mol_type = other DNA
tgcagcctctggattcaccttcaatagcttctggatgcactgggtccgccaagctccagggaaggggctggtgtgggtctcacgtattaatagtgatgggagtagcacaagttatgcggactccgtgaagggccgattctccatctccagagacaacgtcaagaacacgttgtatttgcaaatgaacagtctgagagccgaggacacgggtgtgtattattgtgcaaggaggggtgactacggtgacttcgactattggggccagggaaccctggtcaccgtctcctca

SEQ ID NO: 9729 - DNA, 289 bp, Homo sapiens
  source 1..289: mol_type = other DNA
tgtagcctctggattccccttcagtgactactggatgcactgggtccgccaaggtccagggaaggggctggtgtgggtctcacgtattaaaagtgatgggagtagcacaagctacgcggactccgtgaagggccgattcaccatctccagagacaacgccaagaacacgctgtatctgcaaatgaacagtctgagagccgaggacacggctgtgtattactgtgcaaggcggggggactacggtgattttgactactggggccagggaaccctggtcaccgtctcctca

SEQ ID NO: 9730 - DNA, 289 bp, Homo sapiens
  source 1..289: mol_type = other DNA
tgcagtctctggactcacctttgatctttatgccatgcactgggtccggcaagctcccgggaagggcctggagtgggtctcaagtattagcttagatagtgatagagtcgactatgcggactctgtgaagggccgattcaccatctccagagacaccgccaagaagtccgtatatctgcagatgaacagtctgagagctgaagacacggccttgtattactgtggaaaagatcttgtcccgggaggtctggacgtctggggccaagggaccgcaatcaccgtctcgtca

SEQ ID NO: 9731 - DNA, 289 bp, Homo sapiens
  source 1..289: mol_type = other DNA
tacaatctctggattcacgtctgagaaatatgccatgcactgggtccggcaagctccagggaaggccctggagtgggtctcaggtttcagtttagatactagtaggatcgactatgcggactctgtgaagggccgattcaccacttccagagacaacggcaagaataccctgtatctgcaaatgaacagtctgagacctgaagacacggccgtttattactgtggaaaagatttagtaccaggagggctggacgtctggggcccagggaccacggtcaccgtctcctca

SEQ ID NO: 9732 - DNA, 290 bp, Homo sapiens
  source 1..290: mol_type = other DNA
tacagtctctggagtcccctttagggattatgccatgcactggatccggcaagttccagggaagggcctggagtgggtctcaggtatttttttggaaagtgatagaataagttatgcggactctgtgaggggccgattcagcgtctccagagacaacaccaagaactccctatatctccaaatgaatagtctgagaactgaagacacgggcgtgtattattgtggaaaagatcttgtgccgggcggtttggacgtctggggcccagggaccacggtcaccgttttcctca

SEQ ID NO: 9733 - DNA, 293 bp, Homo sapiens
  source 1..293: mol_type = other DNA
ccatctccggggacagtgtctctagcaacagtgctgcttggaactggatcaggcagtccccatcgagaggcctggagtggctgggaaggacatactacaggtccaagtggtataatgattatgcagtatctgtgaaaagtcgaataaccatcaacccagacacatccaagagccagttcttcctgcaggtgaactctgtgactcccgaggacacggctgtgtattactgtgcaagagagcggcaaaggctttttgactactggggccagggaaccctggtcaccgtctcctca

SEQ ID NO: 9734 - DNA, 293 bp, Homo sapiens
  source 1..293: mol_type = other DNA
acatctccggggacagtgtctctagcaacagtgctgcttggatctggatcaggcagtccccatcgagaggccttgagtggctgggaaggacatactacaggtccaagtggtctaatgattatgcagtatccgtgaaaagtcgaataaccatcaacccagacacatccaagaaccagttctccctgcagctgaactctgtgactcccgaggacacggctgtgtattactgtgcaagagagcggcagcggctctttgactactggggccagggaaccctggtcaccgtctcctca

SEQ ID NO: 9735 - DNA, 286 bp, Homo sapiens
  source 1..286: mol_type = other DNA
tgcagcctctggattcaccttcagtagctactggatgcactgggtccgccaagctccagggaaggggctggtgtgggtctcacgtattaatagtgatgggagtagcacaagttacgcggactccgtgaagggccgattcaccatctccagagacaacgccaagaacacgctgtctctgcaaatgaacagtctgagagccgaggacacggctgtgtattactgtgtaaggcaagacagtgggagccctggttactggggccagggaaccctggtcaccgtctcttca

SEQ ID NO: 9736 - DNA, 286 bp, Homo sapiens
  source 1..286: mol_type = other DNA
tgcagcctctggattcaccttcagtagctactggatgcactgggtccgccaagctccagggaaggggctggtgtgggtctcacgtattaatagtgatgggagtagcacaagttacgtggaccccgtgaagggccgattcaccatctccagagacaacgccaagaacacgctgtctctgcaaatgaacagtctgagagccgaggacacggctgtgtattactgtgtaaggcaagacagtgggagccctggttactggggccagggaaccctggtcaccgtctcttca

SEQ ID NO: 9737 - DNA, 286 bp, Homo sapiens
  source 1..286: mol_type = other DNA
tgcagcctctggattcaccttcagtagctactggatgcactgggtccgccaagctccagggaaggggctggtgtgggtctcacgcattaatagtgatgggagtagcacaagctacgcggactccgtgaagggccgattcaccatctccagagacaacgccgagaacacgctgtctttgcaaatgaacagtctgagggtcgaggacacggctgtgtactactgtgtaagacaggatagtgggagccccggctactggggccagggaaccctggtcaccgtctcctca

SEQ ID NO: 9738 - DNA, 289 bp, Homo sapiens
  source 1..289: mol_type = other DNA
tgcagcgtctggattcaccttcagtagctatggcatggactgggtccgccagactccaggcagggggctggagtgggtggctgttatatggtatgatggaggtactaaatactatgcagactccgtgaagggccgattcaccatctccaaagacaattccaggaacacgctctatctgcaaatgaacagcctaagagccgaggacacggctgtgtattactgtgcgagattaactagcacctgggcttttgatatctggggccaagggacaatggtcaccgtctcttca

SEQ ID NO: 9739 - DNA, 289 bp, Homo sapiens; identical to SEQ ID NO: 9738
  source 1..289: mol_type = other DNA

SEQ ID NO: 9740 - DNA, 289 bp, Homo sapiens
  source 1..289: mol_type = other DNA
tgaagcgtctggatttacgttcagtagttatggcatggactgggtccgccaggctccaggcaaggggctggagtgggtggcaattatatggtatgacggaagtaaaaaatactatgcagactccgtgaagggccgattcaccatctccaaagacaattccaagaacacactgtatctgcaaatgaacagcctgagagtcgaggacacggctgtgtattactgtgcgagacttaccagcacgtgggcttttgatatctggggccacgggacattggtcaccgtctcttca

SEQ ID NO: 9741 - DNA, 286 bp, Homo sapiens
  source 1..286: mol_type = other DNA
tgcagcctctggattcaccttcagcagctactggatgtactgggtccgccaaggtccagggaaggggctggtgtgggtctcaggtattaagagagatgggactatcacaagctacgcggactccgtgaagggccgattcaccatctccagagacaacgccaagaacacgctgtatctgcaaatgaacagtctgagaggcgaggacacggctgtgtattactgtgcaagaggactaaactacggtatggacgtctggggccaagggaccacggtcaccgtctcctca

SEQ ID NO: 9742 - DNA, 286 bp, Homo sapiens
  source 1..286: mol_type = other DNA
tgcagcctctggattcaccttcagtagcaacaatatacactgggtccgccaagctccagggaaggggctggtgtgggtctcacgtattaatagtgatggtagtaggacaatctacgcggactccgtgaagggccgattcaccatctccagagacaacgccaagaacacgctgtatctgcaaatgaacagtctgagagccgaggacgcggccgtgtattactgtgcaagagggctcaactacggtatggacgtctggggccaagggaccacggtcaccgtctcctca

SEQ ID NO: 9743 - DNA, 271 bp, Homo sapiens
  source 1..271: mol_type = other DNA
tgcagcctctggattcacctttaggaagacctccatggcctggctccgccaggctccagggagggggccagaatgggtctcagatatcaccggtaacggtcgtaagacagactacgcagactccgtgaggggccggttcaccatctccagagacaattccaggaacaccctatttctgcaaatgaccagccttagaagcgaagatacggccgtatactactgtgctggtttgtggtcctggggcccgggaaccctggtcaccgtcgcctca

SEQ ID NO: 9744 - DNA, 271 bp, Homo sapiens
  source 1..271: mol_type = other DNA
tgcagcctctggatttacctttagcacctctgacatgaactgggtccgccaggctccagggaaggggctggagtgggtctcacgtatcagtggtgctggtgatagaacatactacgcagactccgtgaagggccgcttcaccatctccagagacaattccaagaacacggtgtctctgcaaatggacagcgtgagagccgacgacacggccgtgtattactgtgcgggtctctggtcctggggccagggaaccctggtcaccgtctcctca

SEQ ID NO: 9745 - DNA, 292 bp, Homo sapiens
  source 1..292: mol_type = other DNA
tgcagtctctggattcaccctcagtgaacccttcatggactgggtccgccaggctccagggaaggggctggagtggattggccttattcaaaacaaagcctggagccacaccacatattatgccgcgtctgtgaaaggcagattcaccatctcaagagatgattcacagaacttggtgtttctgcaaatgaacagcctgaaaaccgaggacacggccgtgtattattgtgctaaggattggaatgggagtcctgagtattggggccagggagtcctggtcaccgtctcatcc

SEQ ID NO: 9746 - DNA, 292 bp, Homo sapiens
  source 1..292: mol_type = other DNA
tgcagcctctggattcatcttcagtgatacctacatggactgggtccgccaggctccagggaaggggctggagtggattggccttattcgagacaaagctcacggttacaagacagaatacgccgcgtctgtgaaaggcagattcaccatctcaagagatgattcaaagacctcattgtatctgcaattgaacaggctggaaagtgaggacacagccgtctactattgtgctaaagattggaatgggtcccctgagtactggggccggggatccctggtcaccgtctcctca

SEQ ID NO: 9747 - DNA, 292 bp, Homo sapiens
  source 1..292: mol_type = other DNA
tgcagtctctggattcaccctcagtgaacccttcatggactgggtccgccaggctccagggaaggggctggagtggattggccttattcaaaacaaagcctggagccacaccacatattatgccccgtctgtgaaaggcagattcaccatctcaagagatgattcacagaacttggtgtttctgcaaatgaacagcctgaaagccgaggacacggccgtgtattattgtgctaaggattggaatgggagtcctgagtattggggccagggagtcctggtcaccgtctcatcc

SEQ ID NO: 9748 - DNA, 298 bp, Homo sapiens
  source 1..298: mol_type = other DNA
tgtagcgtctggattcacgttcagtggtcatgccatgcactgggtccgccaggccccaggcaaggggctggagtggttggcacaaatatggtttgatggaagtaagaaatattatgcagactccgtgaagggccgattcaccatctccagagacaattccaagaacacggtgtctctgcaaatgaacagcgtgagagacgaggacacggctatgtattattgtgcgagagatgggcagcagctggctgcttacgctatggacgtctggggccaagggaccacggtcaccgtctcccca

SEQ ID NO: 9749 - DNA, 298 bp, Homo sapiens
  source 1..298: mol_type = other DNA
tgtagcgtctggattcacgttcagtggtcatgccatgcactgggtccgccaggccccaggcaaggggctggagtggttggcacaaatatggtctgatggaagtaggaaatattatgcagactccgtgaggggccgattcaccatctccagagacacttccaagaacacggtgtatctgcaaatgaacagcgtgaaagacgaggacacggctatgtattattgtgcgagagatgggcagcagctggctgcttacgctatggacgtctggggccaggggaccacggtcaccgtctcccca

SEQ ID NO: 9750 - DNA, 298 bp, Homo sapiens
  source 1..298: mol_type = other DNA
tgtagcgtctggattcacgttcagtaatcatgccatgcactgggtccgccaggccccaggcaaggggctggagtggttggcacaaatatggtatgatggaagcaagaaatattatgcagactccgtgaagggccgattcaccatctccagagacaactccaagaacacggtgcatctgcaaatgaacagcgtgagagacgaggacacggctatgtattattgtgcgagagatgggcagcagctggctgcttacgctatggacgtctggggccaagggaccacggtcaccgtctcccca

SEQ ID NO: 9751 - DNA, 298 bp, Homo sapiens
  source 1..298: mol_type = other DNA
ttcagcgtctggattcaccttcaaagatcatgccatgcactgggtccgccaggccccaggcaaggggttggagtggttgacacaagtatggtatgatggaagtaataaaaattatgcagactccgtgaagggccgattcaccgtctccagagacaattccaagaacacattgtacctacaaatgaatagcctaagagccgaggacacggctgtgtattattgtgcgagagatgggcagcagctggctgcttacgctatggacgtctggggccaagggaccacggtcaccgtctcccca

SEQ ID NO: 9752 - DNA, 298 bp, Homo sapiens
  source 1..298: mol_type = other DNA
tgaagcgtctggattcaccttcagtagacatgccatacactgggtccgccaggctccaggcaaggggctggagtgggtggcacaaatttggtctgatggaagtaataagtactatgctgactccgtgaagggccgattcaccatctccagagacaattccaagaacacggtgtttctgcagatgaacaccctgagagccgaggacacggctgtgtattactgtgcgagagatgggcagcaactggcagcctacgctatggacgtctggggccaagggaccaccgtcgccgtctcctca

SEQ ID NO: 9753 - DNA, 285 bp, Homo sapiens
  source 1..285: mol_type = other DNA
acatctggatacaccttcagtaactacgctatacattgggtgcgccaggcccccggacaaggacttgagtgcatgggatggatcaacggtggcgatgcttacacaaaatattcacagaagttccagggcagagtcaccattaccagggacacatccgcgaacacagtctacatggagctgagtagcctcagatctgaagacacggctgtgtattactgtgcgagagattggctgacttcgggctttgactactggggccagggaaccctggtcaccgtctcctca

SEQ ID NO: 9754 - DNA, 285 bp, Homo sapiens
  source 1..285: mol_type = other DNA
gcttctggatacaccttttctaactatgctatacattgggtgcgccaggcccccggacaagggcttgagtgcatggggtggatcaacggtggcgatggtaggacgacatactcacggaagttccagggcagactcaccattacccaggacaccaccgcgaccacagcctacatggagctgagcggcctgacatctgaagacacggctaagtatttctgtgcgagagattggctaacttcgggctttgactactggggccagggagccctggtcaccgtctcctca

SEQ ID NO: 9755 - DNA, 285 bp, Homo sapiens
  source 1..285: mol_type = other DNA
acatctggatacaccttcagtaactacgctatacattgggtgcgccaggcccccggacaaggacttgagtgcatgggatggatcaacggtggcgatgcttacacaaaatattcacagaagttccagggcagagtcaccattaccagggacacatccgcgaacacagtctacatggagctgagtagcctcagatctgaagacacgactgtgtattactgtgcgagagattggctgacttcgggctttgactactggggccagggaaccctggtcaccgtctcctca

SEQ ID NO: 9756 - DNA, 289 bp, Homo sapiens
  source 1..289: mol_type = other DNA
tgcagcctctggattcaccttcaatagttataacatgaattgggtccgccaggctccagggaaggggctggagtgggtctcatccattagtggtagtagtgataacatatactacgcggactcactgaagggccgattcaccatctccagagacaacgccaagagctcactgtatctgcagataaacagcctgcgagccgaggacacggccgtgtattactgtgcgaaaggatggttcgggacagtcggggactactggggccagggaaccctggtcaccgtctcctca

SEQ ID NO: 9757 - DNA, 289 bp, Homo sapiens
  source 1..289: mol_type = other DNA
tgcagcctctggattcaccttcagtaactataacctgaactgggtccgccaggctccagggaaggggctggagtgggtctcgtccattagtggtagtagtacttacatatactacgcagagtcagtgaagggccgattcaccatctcccgagacaacgccaagaactcactgtatctgcaaatgaacagcctgagagccgaggacacggctgtgtattactgtgcgaaagggtggttcgggaccgtaggcgactactggggccagggaaccctggtcaccgtctcctca

SEQ ID NO: 9758 - DNA, 293 bp, Homo sapiens
  source 1..293: mol_type = other DNA
ccatctccggggagagtgtctctagcaacaatgctgcttggaactggatcaggcagtccccatggagaggccttgagtggctgggaaggacatactacaggtccacgtgggttcatgagtatgcagtctctgtgaggagtcgaataaccatcaacccagacacatccaagaacctgctctccctgcagctgaaatcggtgactcccgaggacacggctgtctattactgtacgcgaggtcaccacctggcatttgcctactggggccagggaacactggtcaccgtctcctca

SEQ ID NO: 9759 - DNA, 296 bp, Homo sapiens
  source 1..296: mol_type = other DNA
ccatctccggggaaagtgtctctagcgacaatgctgcttggaactggatcaggcagtccccatcgagaggccttgagtggctgggaaggacatactaccgacggtccaagtggtttcatgaatatgcagtctctgtgagaagtcgaataaccatcaacccagacacatccaagaaccacctctccctgcagctgaactctgtgactcccgaggacacggctatttattactgcacgcgaggtcatcacctggcatttgcctactggggccagggaaccctggtcaccgtctcctca

SEQ ID NO: 9760 - DNA, 293 bp, Homo sapiens
  source 1..293: mol_type = other DNA
ccatctccgcggaaagcgtctctagtgaaaatgctgcttggaactggattaggcagtccccatcgagaggccttgagtggctgggaaggatatactacaggtccaagtggcatattgaatatgccccatctgtgaaaagtcgaatcaccatcgacccggacacatccaagaatcagttttccctgcagttgacctctgtgactcccgaggacacggctgtatattattgtacaagggggcaccatctggcctttgcctactgggcccagggaaccctggtcaccgtctcctca

SEQ ID NO: 9761 - DNA, 277 bp, Homo sapiens
  source 1..277: mol_type = other DNA
tgcagcctctggattcacctttagtaggtcctggatgagctgggtccgccaggctccagggaaggggctggagtgggtggccaacataaagcaagatggaagtgagaaatactatgtggactctgtgaagggccgattcaccatctccagagacaacgccaagaactcactgtttctgcaaatgaacagcctgagagccgaggacacggctatatattactgtgcgagagatgtcgggacggggtggggccagggaaccctggtcaccgtctcctca

SEQ ID NO: 9762 - DNA, 277 bp, Homo sapiens
  source 1..277: mol_type = other DNA
tgtagtctctggattcacctttagtagcgaatggatggcctgggtccgccaggctccagggaaggggctggagtgggtggccaatttaaaccaagatggaagtaacaaatactatgtggactctgtgaagggccgattcaccatctccagagacaacgccaaaaactcactatatctgcaaatgaacagcctgagagccgaggacacggctgtatatttctgtgcgagagatgtaggcacggggtggggccagggaaccctggtcaccgtctcctca

SEQ ID NO: 9763 - DNA, 286 bp, Homo sapiens
  source 1..286: mol_type = other DNA
cgctgtgtatggtgggtccctcagtggtcactaccggggctggatccgccagcccccagggaaggggctggagtggattggagaagtccatcatagtggaagcaccaactacaacccgtccctcaagagtcgagtcaccatatcactggacacgtccaacaaccagttctccctgaagctgaactctgtgaccgccgcggacacggctgtgtattactgtgcgacaagcagtggctggtacagacttgactactggggccagggaaccctggtcaccgtctcctca

SEQ ID NO: 9764 - DNA, 286 bp, Homo sapiens; identical to SEQ ID NO: 9763
  source 1..286: mol_type = other DNA

SEQ ID NO: 9765 - DNA, 286 bp, Homo sapiens
  source 1..286: mol_type = other DNA
cgctgtccatagtgggtccctcagcgattactactggggctggattcgccagcccccagggaaggggctggaatggattggcgatatcagtcacagtggagcccccaactacaatccgtccctcaagagtcgagtcaccatgtcaagagacacgtccaaaagccaattttccctgaagttgacctctgtgaccgccgcggacacggctgtatattactgtgcgactagtagtggctggtaccgacttgactactggggccagggaaccctggtcaccgtctcctca

SEQ ID NO: 9766 - DNA, 292 bp, Homo sapiens
  source 1..292: mol_type = other DNA
tacagtctctggattcatcttcagttcttatggcatgacctgggtccgccaggctccagggaaggggctggagtgggtctcacacattaatgctagggctagtgtcaagtcttacgcagactctgtgaagggccgattcaccatctccagagacgacgccaagagcacattgcatctgcaaatcgacagcctgagagccgaagacacggctgtctattattgtgcgagggatgaagagggagaccgtgactttgactattggggccagggaaccctggtcaccgtctcctca

SEQ ID NO: 9767 - DNA, 292 bp, Homo sapiens
  source 1..292: mol_type = other DNA
tgcagtctctggattcatcttcagtgcctttggcatgaattgggtccgccaggctccagggaaggggctggagtgggtttcacacataaatagtcgtggtagttacatatactacgcagactctgtgaagggccgattcaccatctccagagacaatgccaagaatttactgtatctgcaaatgaatagcctgagagacgacgacacggctgtctattactgtgcgagagatgaagagggtgaccgcgactttgactactggggccagggaacgctggtcaccgtctcctca

SEQ ID NO: 9768 - DNA, 292 bp, Homo sapiens
  source 1..292: mol_type = other DNA
cactgtctctggtggctccatcagtccttactactggacgtggatccggcagcccccagggaggggactggaatatattggctatatatattacactgggagtgccaactacaacccctccctcaacagtcgagtcaccatatctgtggacacgtccaggaaccagttctccctgaggttgagttctgtgaccgccgcagacacggccgtttattactgtgcgagactccattactatgcctcggaagaatttgactcttggggccagggaaccctggtcaccgtttcctca

SEQ ID NO: 9769 - DNA, 292 bp, Homo sapiens
  source 1..292: mol_type = other DNA
tagtgtctctggtgcctccattagtggtcactactggagctggatccgacagtcccccggacaggggctggaatacattggatacatccactctactgggagcacccactatacaccctccctcaggagtcgactcaccttgtcagtagacacgtcgaggaaccagttctccctgaggctgacttctgtgaccactgcggacacggccgtatacttttgcgcgcgactccactactatgcttcggaggagtttgactcttggggccagggaaccctggtcaccgtctcctca

SEQ ID NO: 9770 - DNA, 289 bp, Homo sapiens
  source 1..289: mol_type = other DNA
tgcagcctctggattcatctttagcaactatgccatgagctgggtccgccaggcgccagggaaggggctggagtgggtctcaggtatcagtggtagtggtggcagcacatactatgtagactccgtgaagggccggttcaccatctccagagacaattccaagaatacactgtatctgcaagtgaacagcctgagagccgaggacacggccatatattactgtgcgaaggagggaacggcgactacttattattactggggccagggaaccctggtcatcgtctcctca

SEQ ID NO: 9771 - DNA, 289 bp, Homo sapiens
  source 1..289: mol_type = other DNA
tgcaacctctggattcacttttagcaactatgccatgaactgggtccgccaggctccagggaagggactggagtgggtctcaggtattagttctagtggtggttctacatactacgcagactccgtgaagggccgcttcaccatctccagagacaattccaagagcactctgtatctgcaaatgaacaccctgagacccgaggacacggccgtatattactgtgcaaaagagggtacggcaacgacgtactattattggggccagggaaccctggtcaccgtctcctca

SEQ ID NO: 9772 - DNA, 277 bp, Homo sapiens
  source 1..277: mol_type = other DNA
tgcagcctctggattcacctttaataactattggatgaactgggtccgccaggctccagggaaggggctggagtgggtggccaacataaagcaagatggaagtgagaaatactatgtggactctgtgaagggccgattcaccatctccagagacaacgccaagaagtcactgtatctgcaaatgaacagcctgagagccgaggacacggctatgtattactgtgtgagaggatcggggggtatctggggccaagggacaatggtcaccgtctcttca

SEQ ID NO: 9773 - DNA, 277 bp, Homo sapiens
  source 1..277: mol_type = other DNA
tgcagcctctggattcacctttagtaactattggatgaactgggtccgccaggctccagggaaggggctggagtgcgtggccaacataaaacaagatggaagtgagaaaaactatgtggactctgtgaagggccgattcaccatctccagagacaacgccaagaattcattgtatctgcaaatgaacagcctaacagccgaggactcggctgtgtattactgtgtgagaggctccggtgggatctggggccaagggacaatggtcaccgtctcttca

SEQ ID NO: 9774 - DNA, 280 bp, Homo sapiens
  source 1..280: mol_type = other DNA
cactgtctctggtgactccatcatcaacagtggtatttactactggggctggatccgccagcccccagggaaggggccggagtggattgggagtatctattatggtgggagcacctactacaacccgtccctcaagagtcgagtcaccatatccgtagacacgtccaagaaccagttctccctgaagctgaggtctgtgactgccgcagactcggctctctattactgtgcgagggggcttgaccactggggccagggaagccttgtcaccgtctcctca

SEQ ID NO: 9775 - DNA, 277 bp, Homo sapiens
  source 1..277: mol_type = other DNA
cactgtctctggtggctccatcagcagtagtgtttactcctggggctggatccgccagcccccagggaaggggctggagtggattgggagcatgtatcatagtgggagcacctactacaatgcgtccctcaagagtcgagtcaccatatcagttgacacgtccaagaaccagttctccctgatgctgagctctgtgaccgccgcggacacggccgtgtattattgtgcgagaggattggaccactggggccagggaaccctggtcaccgtctcctca

SEQ ID NO: 9776 - DNA, 282 bp, Homo sapiens
  source 1..282: mol_type = other DNA
gcttctggataccccctcacgagatactatatgcactgggtgcgacaggcccctggacaagggcttgagtggatggggataattgaccctagtgctgataccacaatttacgcacagaggttccagggcagagtcaccatggccagggacacgtccacgagtacagtctacatggagttgagcagcctaaaatctgaagacacggccgtttattattgtgcggccggaatggttcggggagttgactactggggccagggaaccctggtcaccgtctcctcc

SEQ ID NO: 9777 - DNA, 282 bp, Homo sapiens
  source 1..282: mol_type = other DNA
gcatctggataccccctcaccagatactatatgcactgggttcgacaggcccctggacaagggcttgagtggatgggaataatcgaccctagtgctgatagcacagtctacgcacagaaattccagggcagagtcaccatgaccagggacacgtccacgagcacagtctacatggagttgagcagcctaaagtctgaagacacggccgtgtattattgtgcggccggaatggttcggggggttgactactggggccagggaaccctggtcaccgtctcttca

SEQ ID NO: 9778 - DNA, 282 bp, Homo sapiens
  source 1..282: mol_type = other DNA
gcatctggaaacacgtttaccaagtactatttacactgggtgcgacaggcccctggacaagggcttgagtggatggcaataatcaatcctaatgatggtggcactatttacgcacagaagttccagggcagactcaccttgaccagggacacgtccacgagcacagtctacatggaactgagcaaattgagatctgacgacacggccgtatattattgtgcggccggaatggttcggggagttgactactggggccagggaaccctggtcaccgtctcatca

SEQ ID NO: 9779 - DNA, 282 bp, Homo sapiens
  source 1..282: mol_type = other DNA
gcatctggatacaccttcaccaagtactatttacactgggtgcgacaggcccctggacaaggacttgagtggatgggaataatcaaccctagtgatggtggcacaacttatgcacagaacttccagggcagagtcatcttgaccagggacacgtccacgagcacagtctacatggacctgatcaacctgacatctgaagacacggccatatattattgtgcggccggaatggttcggggagttgactactggggccagggaaccctggtcaccgtctcctca

SEQ ID NO: 9780 - DNA, 282 bp, Homo sapiens
  source 1..282: mol_type = other DNA
gcatctggatacaccttcaccaggtactacttacactgggtgcgacaggcccctggacaagggcttgagtggatgggaataatcaatcctagtgatggtggcacaacctacgcacagaacttccagggcagaatcaccttgaccagagacacgtccacgagcacagtctacatggaactgaacagcctgagatctgaagacacggccatatattactgtgcggccggaatggttcggggagttgactactggggccagggaaccctggtcaccgtctcctcg

SEQ ID NO: 9781 - DNA, 282 bp, Homo sapiens
  source 1..282: mol_type = other DNA
gcatctggataccccctcaccagatactatatgcactgggtgcgacaggcccctggactagggcttgagtggatgggaataatcgaccctggtgctgataccacaatctacgcacagaggttccagggcagagtcaccatgaccagggacacgtccacgagcacagtctacatggagctgagcagcctaaaatctgaggacacggccgtgtattactgtgcggccggaatggttcggggagttgactactggggccagggaaccctggtcaccgtctcctca

SEQ ID NO: 9782 - DNA, 292 bp, Homo sapiens
  source 1..292: mol_type = other DNA
tgcagcctctggattcacctttagaagctctgccatgagctgggtccgccaggctccagggaagggtctggagtgggtctcaagtattactgagagtggtggtggcacaaactacgcagactccgtgaagggccggtttatcatctccagagacaattccaagaacaccctgtttctgcaaatgaacaccctgagagccgaggacacggccatttattactgtgcgaatcgtagaagtgactacaggcaatttcacttctggggccagggaaccctggtcacggtctcctca

SEQ ID NO: 9783 - DNA, 292 bp, Homo sapiens
  source 1..292: mol_type = other DNA
tgtagcctctggattcacctttagcagttatgccatgagctgggtccgccaggctccagggaagggtctggagtgggtctcaagtattagtgaagggggtagtagcacaagctacgcagactccgtgaagggccggttcatcatctccagagacaattccaaaaacacgctgtctctgcagatgaacaccctgagagccgaggacacggccctttactactgtgcgaatcgtagaagtgactacaggcaatttcacttctggggccggggaaccctggtcacggtctcctca

SEQ ID NO: 9784 - DNA, 301 bp, Homo sapiens
  source 1..301: mol_type = other DNA
tgaagcctccggattcactttcaattacgcctggatgagttgggtccgccagggtccagggaaggggctggagtgggttggccgtattaggagcaaagttgatggtggagcaatagagtacgctgcgcccgtgagaggcagattcaccatctccagagatgattcaaaggacaccctgtatctgcaaatgaacagcctgacaaccgaggacacaggcgtgtatttctgtgccacagacgggtgggaattactgggctactttgactactggggccagggaagcctggtcaccgtctcttca

SEQ ID NO: 9785 - DNA, 301 bp, Homo sapiens
  source 1..301: mol_type = other DNA
tgcagcctctggattcactttcattaacgcctggatgaactgggtccgccaggctccagggaaggggctggagtgggtagcccgcattaaaagcaacattgatggtgggacaacagactacgctgcgtccgtgaaaggcagattcaccatctcaagagatgattcaaaaaacacactgtatctgcaaatgagtgggctcgaaatcgaggacacagccgtctattactgtgccacagatggttgggagttactaggttactttgactactggggccggggaaccctggtcaccgtctcctca

SEQ ID NO: 9786 - DNA, 298 bp, Homo sapiens
  source 1..298: mol_type = other DNA
tgcagcctctggattcaccttcagtgcctactacatggactgggtccgccaggctccagggaaggggctggagtgggttggccgtattagaaccaatgctagagggtacaccacagaatacgccgcgtctgcgaaaggcagattcaccatctcaagagatgactcaaagaactcactgtatctgcaaatgaacagcctgaccaccgcggacacggccgtctatttctgtgctagaggtccactcctgggtgatgcttatgatgtctggggccaagggacaatggtcactgtctcttca

SEQ ID NO: 9787 - DNA, 298 bp, Homo sapiens
  source 1..298: mol_type = other DNA
tgcagcctctggattcaccttcagtgactactacatggactgggtccgccaggctccagggaaggggctggagtgggttggccgtattagaaccaatgctagaaggtacaccacagaatacgccgcgtctgcgaaaggcagattcaccatctcaagagatgactcaaagaactcactgtatctgcaaatgaacagcctgagcaccgcggacacggccgtgtatttctgtgctagaggtccactcctgggtgatgcttatgatgtctggggccaagggacaatggtcactgtctcttca

SEQ ID NO: 9788 - DNA, 298 bp, Homo sapiens
  source 1..298: mol_type = other DNA
tgcagcctctggattcaccttcagtgcccactacatggactgggtccgccaggctccagggaaggggctggagtgggttggccgtattagaaacaaagatagaaggtacaccacagaatacgccgcgtctgtgaaaggcagattcaccatctccagagatgactcaaagaactcactgtatctgcaaatgaacagcctgagcaccgaggacacggccgtgtatttctgtgctagaggtccactcctgggtgatgcttatgatgtctggggccaagggacaatggtcactgtctcttca

SEQ ID NO: 9789 - DNA, 298 bp, Homo sapiens
  source 1..298: mol_type = other DNA
tgcagcctctggattcaccttcagtgaccactacatggactgggtccgccaggctccagggaaggggctggagtgggttggccgtactagaaacaaagctagaagttacaccacagaatacgccgcgtttgtgaaaggcagattcaccatctcaagagatgattcaaagaactcactgtttttgcaaatgaacagtctgaataccgaggacacggccgtgtatttctgtgctagaggtccactcctgggtgatgcttatgatgtctggggccaagggacaatggtcactgtctcttca

SEQ ID NO: 9790 - DNA, 298 bp, Homo sapiens
  source 1..298: mol_type = other DNA
tgcagcctctggattcatcttcagtgcctactacatggactgggtgcgccaggttccagggaaggggctggagtgggttggccgtattagaacaaaagctaaaggttacaccacagaatacgccgcgtctgtgaaaggcagattcatcgtctcaagagatgattcacagaactcactgtatctgcaaatgaacagcctgaaaaccgaggacacggccgtgtatttctgtgctagaggccctttgttaggtgatgcttatgatgtctggggccaagggacaatggtcagcgtctcttca

SEQ ID NO: 9791 - DNA, 297 bp, Homo sapiens
  source 1..297: mol_type = other DNA
gcctctggatacaccttcaccaattatgatatccactgggtgcgacaggccactggacaagggcttgagtggatgggatggatgcaccctaagactgggaacacaggctatgctcagaagttccagggcagagtcatcatgaccagaaccaactccataaccacagcctacatggagctgagcagcctgagacctgaggacacggccgtctattactgtgcgagagctgatagcagtggctggtacggggggggtatggacgtctggggccaagggaccacggtcatcgtctcctcg

SEQ ID NO: 9792 - DNA, 297 bp, Homo sapiens
  source 1..297: mol_type = other DNA
gctgctggatacaccttcaggaattatgatatccactgggtgcgacaggccactggccaggggcttgagtggatgggatgggtgagccctaagagtggtaacacaggctctgcacagaacttccagggcagattcagcatgaccaggaacaccgccacaagtacagcctacatggagctgagtagcctgagatctgaggacacggccatttattactgtgcgagagccgactcgtctggctggtatgggggcggtatggacgtttggggccaagggaccacggtcaccgtctcctca

SEQ ID NO: 9793 - DNA, 277 bp, Homo sapiens
  source 1..277: mol_type = other DNA
tgcagcctctggattcacctttagtacctactggatgagctgggtccgccaggctccagggaaggggctggagtgggtggccaagataaaggaagatggaagtgagaaatactatgtggactctgtgaagggccgattcaccatctccagagacaacgccaagaactcactgtatctgcaaatgaacagcctgagagccgaggatacggctgtgtattactgtgcgaaagggtgggggtcttcctggggccagggaaccctggtcaccgtctcctca

SEQ ID NO: 9794 - DNA, 277 bp, Homo sapiens
  source 1..277: mol_type = other DNA
tgcagcctctggattcactttcagtaacgcctggatgagctgggtccgccaggccccagggaaggggctggagtgggtggccaaaataaaagaagatggaagtgagaagtactatgtggactctgtgaagggccgattcaccatctctagagacaatgccaagaactctctgtatctgcaaatgaacagcctgagagccgaagacacggccatatattactgtgcgaaaggatggggcagctcctggggccagggaaccctggtcaccgtctcctca

SEQ ID NO: 9795 - DNA, 286 bp, Homo sapiens
  source 1..286: mol_type = other DNA
tgcagcctctggattcaccttcacttcttacagcgtgaactggatccgccaggctccagggaaggggctggagtggatttcatacatcagtagccgcgctaattttatatattacgcagagtctgtgaggggccgcttcaccatctccagagacaatgccaaggagtcactgtatctgcaaatgaacagcctgagagacgaggactcgggtgtctattactgtgtgacagataaagactgggcctttgactcctggggccagggaatcctggtcaccgtctcctca

SEQ ID NO: 9796 - DNA, 286 bp, Homo sapiens
  source 1..286: mol_type = other DNA
tgcagcctctgaaatcacgtttagtagatatactttcaactgggtccgccagggtccagggaaggggctggagtgggtttcatacattggcggtactagtcataacatatggtacgcagactctgtgaagggccgattcaccatctccagagacgacgtcgggaattcagtgtttctgcaaatgaccagcctgagagacgaggacacggctgtgtattactgtgtgacagacaaggactgggcatttgactcctggggccagggaaccctggtcgccgtctcctca

SEQ ID NO: 9797 - DNA, 277 bp, Homo sapiens
  source 1..277: mol_type = other DNA
tgcagcctctgcattcagtctcagtaactttgacatgagctgggtccgccaggctccaggggaggggctggagtggatctcatacattagtgccagtggcagatccacatactacacagactctgtgaagggccgactcaccatctccagagacagtgccaggaactctctgtatctgcaaataaacagcctgagagacgacgacacggctgtgtattactgtgtcagaggccatatgggcctgtggggccaggggaccacggtcatcgtctcctca

SEQ ID NO: 9798 - DNA, 277 bp, Homo sapiens
  source 1..277: mol_type = other DNA
tgcggcctctggattcacgctcagtaatgttgacatgaattgggtccgccaggctccagggaagcggctggaatggttttcatacattagtggtcgtagtggtgccacatactacgcagactctgtgaggggccgattcaccatttccagagacagcgccaggaactcactgcatctgcaaatgaacagcctgagagccgaggacacggctgtgtattactgtgtgagaggccatatgggcctctggggccaagggaccacggtcaccgtctcctca

SEQ ID NO: 9799 - DNA, 277 bp, Homo sapiens
  source 1..277: mol_type = other DNA
tgcagcctctgcattcagtctcagtaactatgacatgagctgggtccgccaggctccaggggaggggctggagtggatctcatacattagtgccagcggcagagccacatactacacagactctgtgaagggccgactcaccatctccagagacagtgccaggaactctctgtatctgcaaataaacagcctgagagacgacgacacggctgtgtattactgtgtcagaggccatatgggcctgtggggccaggggaccacggtcatcgtctcctca

SEQ ID NO: 9800 - DNA, 277 bp, Homo sapiens
  source 1..277: mol_type = other DNA
cactgtctctggtggctccatcagtagtgactactggcaatggatccggcagcccccaggggagggactggagtggattgggtacatctacaacagtgggaacatcaactacaacccctccctcaagagtcgagtcaccatatcagtagacacgtccaagaatcagttctccctgaagatgagttctgtgaccgctgcggacacggccgtttattactgtacgagagggcgatggtccgacccctggggccagggaaccctggtcaccgtctcctcg

SEQ ID NO: 9801 - DNA, 277 bp, Homo sapiens
  source 1..277: mol_type = other DNA
ctctgtctctggtgactccatcagtagtaactactggagctggatccggcagcccccagggaagggactggagtggattggctatatctataatagtgggaccacctactacaacccctccctcaagagtcgagtcaccatatcagtagacacgtccaagaatcagttctccctcaacctgacctctgcgaccgctgcggacacggccgtgtattattgtacgagaggccgttggtccgacccctggggccagggaaccctggtcaccgtctcctca

SEQ ID NO: 9802 - DNA, 286 bp, Homo sapiens
  source 1..286: mol_type = other DNA
tgcagcccctggattcaccttcagtaaatactggatgcactgggtccgccaagctccagggaaggggctggtgtgggtctcacgtattactagtgatggaaatatcgcaaactacgcggactccgtgaggggccgattcaccatctccagagacaacgccaagaacacgctgtatctgcaaatgaacagtctgagagtcgaggacacggctgtctattactgtgcaagagcttggaactacggtatggacgtctggggccaagggaccacggtcagcgtctcctca

SEQ ID NO: 9803 - DNA, 286 bp, Homo sapiens
  source 1..286: mol_type = other DNA
tgcagcctctggattcaccttcagtcactactggatgcactgggtccgccaagctccagggaaggggctggtgtgggtctcacgtgtaactagtgatgggcgtatcacaatctacgcggactccgtgaagggccgattcaccatttccagagacaacgccaggaacacgctgtacctgcaaatggacagtctgagagccgacgacacggctgtgtattactgtgcaagagcttggaattacggtatggacgtctggggccaagggaccacggtcaccgtctcctca

SEQ ID NO: 9804 - DNA, 286 bp, Homo sapiens
  source 1..286: mol_type = other DNA
tgcagcctctggattcaccttcagtcactactggatgcactgggtccgccaagctccagggaaggggctggtgtgggtctcacgtgtaactagtgatgggcgtatcacaatctacgcggactccgtgaggggccgattcaccatttccagagacaacgccaggaacacgctgtacctgcaaatggacagtctgagagccgacgacacggctgtgtattactgtgcaagagcttggaattacggtatggacgtctggggccaagggaccacggtcaccgtctcctca

SEQ ID NO: 9805 - DNA, 285 bp, Homo sapiens
  source 1..285: mol_type = other DNA
gcatctggataccccttcaccacctattatatgcactgggtgcgacaggcccctggacaagggcttgagtggatgggaataatcaagcctagcggtggtagcacaaggtacgcgcagaagttccggggcagagtcaccatgaccagggacacgtccacgaccacagtcttcatggagctgagcagcctgagatctgaagacacggccgtatattactgtgtgagagagttagatggcggctactttgactactggggccagggaaccctggtcaccgtctcctca

SEQ ID NO: 9806 - DNA, 285 bp, Homo sapiens
  source 1..285: mol_type = other DNA
gcatctggatacaccttcacccgctactatatgcactgggtgcgacaggcccctggacaagggcttgagtggatggggataatcaaaggtggtgatggtaacacaggctacgcacagaagttccagggcagagtcaccatgaccagggacacgtccacgagcacagtctatatggagctgagcggcctgagatctgaggacacggccgtatattactgtgtgagagaattggacggagggtactttgactactgcggccagggaaccctggtcaccgtctcctca

SEQ ID NO: 9807 - DNA, 277 bp, Homo sapiens
  source 1..277: mol_type = other DNA
cactgtctctggtggctccgtcagcactattaatgaccactggggctggatccggcagcccccagggaagggactggagtggattggatatttctattctagtggggtcaccaactacaacccctccctcaagagtcgagtcaccatatcactagacacgtccaagaaccagttctccctgaagttgagctctatgaccgctgcggacacggccatttattactgtgcgagaggggttgccttctggggccagggaatcttggtcaccgtctcctca

SEQ ID NO: 9808 - DNA, 277 bp, Homo sapiens
  source 1..277: mol_type = other DNA
cactgtctctggtggctccgtcagcactactaatgaccactggggctggatccggcagcccccagggaagggactggagtggattggatatttctattctagtggggtcaccaactacaacccctccctcaagagtcgagtcaccatatcactagacacgtccaagaaccagttctccctgaagttgagctctatgaccgctgcggacacggccatttattactgtgcgagaggggttgccttctggggccagggaatcttggtcaccgtctcctca

SEQ ID NO: 9809 - DNA, 277 bp, Homo sapiens
  source 1..277: mol_type = other DNA
cactgtctctggtggctccatcagcagtggtaattaccactggaactggatccggcagcccgccgggaagggactggagtggattgggcgtatctatggcagtgggaacgccaactacaacccctccctcatgagtcgagtcaccatatcactagacacgtccaagaaccagttctccctgaagctgagctctgtgaccgccgcagacacggccgtgtattactgtgcgcggggggtagccttctggggccagggaaccctggtcaccgtctcctca

SEQ ID NO: 9810 - DNA, 277 bp, Homo sapiens
  source 1..277: mol_type = other DNA
cactgtctctggtggctccatcagcagtggtaattaccactggaactggatccggcagcccgccgggaagggactggagtggattgggcgtatctatggcagtgggaacgccaactacaacccctccctcatgagtcgagtcaccatatcactagacacgtccaagaaccagttctccctgaagctgaactctgtgaccgccgcagacacggccgtgtattactgtgcgcggggggtagccttctggggccagggaaccctgatcaccgtctcctca

SEQ ID NO: 9811 - DNA, 289 bp, Homo sapiens
  source 1..289: mol_type = other DNA
tgcagcctctggctttgactttagtggatctgctatgcactgggtccgccaggcttccgggagagggctggagtggcttggccgtattagaggcaaagctaacagttacgcgacatcacttgctgcgccggtgaaaggcaggttcatcgtctccagagatgattcaaagaacacggcgtatctggaaatgacgagcctgaaaaccgaggacacggccgtctattactgtacttgtggatacggccgatttgactactggggccagggaaccctggtcaccgtctcccca

SEQ ID NO: 9812 - DNA, 289 bp, Homo sapiens
  source 1..289: mol_type = other DNA
tgtagcctctggctttaacttcagtggatctgctatgcactgggtccgccaggcttccgggaaggggctggagtggcttggccgtattagaggcaaagctaacaattacgcgacaacacacgctgcgccggtgagaggcagattcaccatctccagggacgattcaaggaacacggcctatctgcaaatgaacagcctgaagaccgaagacacggccgtctattattgcacttgcggctacggccgctttgactattggggcctgggaattctggtgaccgtctccccg

SEQ ID NO: 9813 - DNA, 289 bp, Homo sapiens
  source 1..289: mol_type = other DNA
tgcagcctctgggttcaccttcagtggctctgctatgtactgggtccgccaggcttccgggaaagggctggagtgggttggccgtattagaagtaaagctaacaattatacgacagcatatgctgtgtcggtgaaaggcaggttcaccatctccagagatgattcaaagaacacggcttatctgcagatgaacagcctgaagaccgacgacacggccgtttattactgtacttgtggctacggtcgatttgactactggggccagggatccctggtcaccgtctcctca

SEQ ID NO: 9814 - DNA, 277 bp, Homo sapiens
  source 1..277: mol_type = other DNA
cagtgtctctggtggctccatcagtagtttctactggagttggatccggcagcccccaaacatgggactggaatggattgcatatatctcttctgatggtagaaccaactacaacccctccctcaagagtcgagtcaccatgtcagtagacacgtccaagaaccagttctccctgaggctgacctctgtgaccgctgcggacacggccatatattattgtgcgagagccccagaccacgactactggggccagggaaccctggtcaccgtctcctca

SEQ ID NO: 9815 - DNA, 277 bp, Homo sapiens
  source 1..277: mol_type = other DNA
ctctgtctttggtatttccctcaattcttactactggagctggatccggcagtccccagggaagggactggagtggattgggtacatcgattatggtggcagcgccaaatacaacccctccctcaagagtcgagtcaccatgtcactggacacgtcgcagaaccagttctccctgaaattgagttctgtaaccggtacggacacggccatttattactgtgcgagagcccccgaccatgactactggggccaggggagcctggtcaccgtctcctcg

SEQ ID NO: 9816 - DNA, 277 bp, Homo sapiens
  source 1..277: mol_type = other DNA
ctctgtctttggtatttccctcaattcttattactggagctggatccggcagtccccagggaagggactggagtggattgggtacatcgattatagtggcagcgccaattacaacccctccctcaagagtcgagtcaccatgtcagtggacacggcggagaaccagttctccctgaaattgagttctgtaaccggtgcggacacggccgtttattactgtgcgagagcccccgaccatgactactggggccagggaagcctggtcaccgtctcctcg

SEQ ID NO: 9817 - DNA, 298 bp, Homo sapiens
  source 1..298: mol_type = other DNA
tgcagcctctggattcacctttaatgagtatgccatgcactgggtccggcaagctccagggaagggcctggagtgggtctcaggcattagttggaatagtaataatattggctatgcggactctgtgaagggccgattcaccatctccagagacaacgccaagaactcgctgtttttgcaaatgaacagtctgagagctgaggacacggccttgtattattgtgcaagaggtgactaccgtggttcggggggtcatgctgactactggggccagggaatcctggtcaccgtctcctca

SEQ ID NO: 9818 - DNA, 298 bp, Homo sapiens
  source 1..298: mol_type = other DNA
tgcagcctctggattcagttttgatgattatgccatgcactgggtccggcaagccccagggaagggcctggagtgggtctcaggtattagttggaagagtcgtaatatagactatgcggtctctgtgaagggccgattcaccatctccagagacaacgccaagaactccctgtatctggaaatgaacggtctgagacctgacgacacggccctctattattgtgcaagaggggattatcgtggttcggggggccatgccgactactggggccagggaaccctggtcaccgtctcctca

SEQ ID NO: 9819 - DNA, 298 bp, Homo sapiens
  source 1..298: mol_type = other DNA
tgcagcctctggattcacctttaatgattatgccatgcactgggtccggcaaactccagggaagggccttgagtgggtctcagttatcagttggaatagtgataacctaggttacgcgggctctgtgaggggccgattcaccatctccagagacgacgtcaagaattccctctatctgcaaatgaacagtctgagcattgacgacacggccttgtattactgtgcaagaggagattaccgtggttcggggggtcatgcggactactggggccagggaaccctggtcaccgtctcctca

SEQ ID NO: 9820 - DNA, 295 bp, Homo sapiens
  source 1..295: mol_type = other DNA
cgctttgtctggcggctccgtcactaatacagatttctactgggactggatccgtcagtccccaggacagggtctggagtggattgggagcatcgattattctggggccaccgactacaacccgtcccttcggggtcgagtcaccctttccgtggacacctctaataaccgattctctttgagactgacctctgtcactaccgctgacacctccgtctattactgtgcgaggcgaggaccctacttctacggattcgacgtctggggccaagggaccacggtcatcgtctcctca

SEQ ID NO: 9821 - DNA, 295 bp, Homo sapiens
  source 1..295: mol_type = other DNA
cactgtctctggtggctccattagtaatagtgattattattgggactggatccgccagacccccgggaagggactggagtggattgcgactattgattatactggggacaccaggtacactccgtccctcaaggctcgggtcacctcatctatagatacgtccaggaaccacttctccctgacggtgacgtctgtgaccgccgcagacacggctgtttacttctgtgcgagacggggtccgtacttttacggtttcgacgtctggggccaggggaccaccgtcaccgtctcctcc

SEQ ID NO: 9822 - DNA, 280 bp, Homo sapiens
  source 1..280: mol_type = other DNA
cactgtctctggtggctccatgagtgataaccactggagctggatccggcagcccccgggagaggcactggagtggattgggtatatccattccagtgggaccaccaactacaacccgtccctcatgggtcgagtcaccatatcagcagacacgtccaagaaccagttctccttgaaactgagctcagtgaccgctgcggacacggccgtctaccactgtgcgagtggggccgggtggtggcagtactggggccagggaaccctggtcaccgtctcctca

SEQ ID NO: 9823 - DNA, 280 bp, Homo sapiens
  source 1..280: mol_type = other DNA
caccgtctctggtggctccctcagtctttactactggagttggatccggcagtccccagggatgggactggagtggattgggtatatctcttacagtgggaccaccaactactacccctccctcaagagtcgagtcagcatttcgattgacacgtccacgaatcagttctccctgaggctgaactctgtgacttctgcggacacggccatatactactgtgcgagcggcgctggctggtggcaatactggggccggggagccctggtcaccgtctccccc

SEQ ID NO: 9824 - DNA, 280 bp, Homo sapiens; identical to SEQ ID NO: 9823
  source 1..280: mol_type = other DNA

SEQ ID NO: 9825 - DNA, 294 bp, Homo sapiens
  source 1..294: mol_type = other DNA
gcctctgggttcacctttagtagctctactatacactgggtgcgacaggctcgtggacaacgccttgagtggataggatggatcgccgttggcagtggtaacacaaactacgcacagcagttccagggaagagtcaccattaccagggacatgtccacaagcacagcctacatggaggtgagcagcctgagatccgaggacacggccgtctattactgtgcggcagagcgatatgatggcagctgttgctggttcgacccctggggccagggaaccctggtcaccgtctcctca

SEQ ID NO: 9826 - DNA, 294 bp, Homo sapiens
  source 1..294: mol_type = other DNA
gcttctggattcacctttagtgggtcaactattcagtggatacgacaggctcgtggacagggcctcgagtggataggatacatggtcataggcaatggcatcacaaagtacgcagagaaggtgcaggaaagagtcacctttatcagggacatgtccacaaccacagtgtacatggaattgagtagcctgagagccggcgacacggccgtgtattattgtgcggcggagcgatatgacggcagttgttgttggttcgacccctggggccagggaaccctggtcaccgtctcctca

SEQ ID NO: 9827 - DNA, 285 bp, Homo sapiens
  source 1..285: mol_type = other DNA
gcttcgggatacacctttaataattttgctgtgaattgggtgcgacaggcccctggacaagggcttgagtacatgggatggatcaacacgaactctgggaacccaacgtatgcccagggcttcgcaggacggtttgtcttctccttggacacctctgtcagcacggcgtatctgcagatcaacaccctagaggctgaggacactgccgtgtattactgtgcgagagctagcagcagctggtcgatagactactggggccagggaaccctggtcaccgcctcctca

SEQ ID NO: 9828 - DNA, 285 bp, Homo sapiens
  source 1..285: mol_type = other DNA
gcttccggatacaccttcactaactatgctataaattgggtgcgacaggcccctggacaagggcttgagtggatgggatggatcaacaccaacactgggagcccagactatgcccagggcttcacaggacggtttgtcttctccttggacacctctgtcagcacggcatatctgcagatcagcaccctaaaggctgaagacactgccgtgtatttctgtgcgagagcaagcagcagctggtccattgactactggggccagggaaccctggtcaccgtctcctca

SEQ ID NO: 9829 - DNA, 292 bp, Homo sapiens
  source 1..292: mol_type = other DNA
tgcagcgtctggattcaccttcagtagctatggcatgcactgggtccgccaggctccaggcaaggggctggagtgggtggcagttatatggtatgatggaagtaagaaatactatacagactccgtgaagggccgattcaccatctccagagacaattccaagaacacgctgtatctgcaaatgaacaccctgagaggcgaggacacggctgtatattactgtgcgagataccggtatagtgagagttattttgactactggggccagggaaccctggtcaccgtctcctca

SEQ ID NO: 9830 - DNA, 292 bp, Homo sapiens
  source 1..292: mol_type = other DNA
tgcagcgtctggattcaccttcagtaactatggcatgcactgggtccgccaggctccaggcaaggggctggagtgggtggcagctatatggtttgatggaagtaaaaaatactttgcagactccgtgaagggccgattcaccatctccagagacaattccaagaaaacgctgtatttgcaaatgaacagcctgagagtcgaggacacggccgtgtattactgtgcgagataccggtatagtgagagctactttgactactggggccagggaaccctggtcaccatctcctca

SEQ ID NO: 9831 - DNA, 289 bp, Homo sapiens
  source 1..289: mol_type = other DNA
tgcagcctctggatttagctttatcaactattggatgacctgggtccgccaggctccagggaaggggctggagtgggtggccagcataaagccagatggaagtgagcaaaaatatgtggactctgtgaagggccgattcaccatctccagagacaacgccaagaactcactctttctgcacatgaacagcctgagagccgacgacacggctttctattactgtgcgagagcgcagggttgggggcggttcgactcctggggccagggaaccctggtcaccgtctcctca

SEQ ID NO: 9832 - DNA, 289 bp, Homo sapiens
  source 1..289: mol_type = other DNA
tgcagcctctgaattcacctttagttccttttggatgacgtggatccgccaggctccagggaagggtctggagtgggtggccagcataaagtttgatggaagtgacaaaaagtatttggactctgtggagggccgattcatcatctccagagacaacgccaagaactcgctgtctctacaaatgaacagcctgagagtcgaggacacggctgtctactactgtgcgagagcccaggggtggggccggttcgactcctggggccagggaaccctggtcaccgtctcctca

SEQ ID NO: 9833 - DNA, 289 bp, Homo sapiens
  source 1..289: mol_type = other DNA
tgtagcctctggattcacctttagtgattattggatgacctgggtccgccaggctccagggaaggggcttcagtgggtggccagtgtaaagtacgatggaagtgagagacgtcacgcggactctgtgaagggccgactcaccagctccagagacaatgccaggaactcactgtatctgcaaatgaacagcctgagagtcgaggacacggctatatattactgtgcgagagcacaaggatggggcaggttcgactcctggggccagggaactctggtcactgtctcctca

SEQ ID NO: 9834 - DNA, 289 bp, Homo sapiens
  source 1..289: mol_type = other DNA
tgtagcctctggattcacctttagtgattattggatgacctgggtccgccaggctccagggaaggggctgcagtgggtggccagtgtaaagtacgatggaactgagaaacgtcatgtcgactctgtgaagggccgactcacctgctccagagacaatgccaggaacgctctctatctggaaatgaacagcctgagagtcgaggacacggctatatattactgtgcgagagcacaaggatggggcaggttcgactcgtggggccggggaactctggtcgctgtctcctca

SEQ ID NO: 9835 - DNA, 289 bp, Homo sapiens
  source 1..289: mol_type = other DNA
tgcagcctctggattcacctttagtgattattggatgacctgggtccgccaggctccagggaaggggctgcagtgggtggccagtgtaaaatacgatggaactgagaaacgtcatgtcgactctgtgaagggccgactcacctgctccagagacaatgccaggaactcactctatctgcaaatgaacagcctgagagtcgaggacacggctatatattactgtgcgagagcacaaggatggggcaggttcgactcgtggggccagggaactctggtcgctgtctcctca

SEQ ID NO: 9836 - DNA, 289 bp, Homo sapiens
  source 1..289: mol_type = other DNA
tgtagcctctggattcacctttagtgattattggatgacctgggtccgccaggctccagggaaggggcttcagtgggtggccagtgtaaagtacgatggaagtgagagacgtcacgcggactctgtgaagggccgactcaccagctccagagacaatgccgggaactcactgtatctgcaaatgaacagcctgagagtcgaggacacggctatatattactgtgcgagagcacaaggatggggcaggttcgactcctggggccagggaactctggtcactgtctcctca

SEQ ID NO: 9837 - DNA, 289 bp, Homo sapiens
  source 1..289: mol_type = other DNA
tgtagcctctggattcacctttagtgactattggatgacctggatccgccaggctccagggaaggggcttcagtgggtggccagtgttaagtacgatggaagtcagagacgtcacgcgggctctgtggagggccgactcaccagctccagagacaatgccaggaactcactgtatctgcaaatgaacagcctgagagtcgaggacacggctatttattactgtgcgagagcacaaggatggggcaggttcgactcctggggccagggaactctggtcactgtctcctca

SEQ ID NO: 9838 - DNA, 289 bp, Homo sapiens
  source 1..289: mol_type = other DNA
tgtagcctctggattcacctttagtgactattggatgacctggatccgccaggctccagggaaggggcttcagtgggtggccagtgttaagtacgatggaagtcagagacgtcacgcgggctctgtggagggccgactcaccagctccagagacaatgccaggaactcactgtatctgcaaatgaacagcctgagagtcgaggacacggctatatattactgtgcgagagcacaaggatggggcaggttcgactcctggggccagggaactctggtcactgtctcctca

SEQ ID NO: 9839 - DNA, 289 bp, Homo sapiens; identical to SEQ ID NO: 9833
  source 1..289: mol_type = other DNA

SEQ ID NO: 9840 - DNA, 277 bp, Homo sapiens
  source 1..277: mol_type = other DNA
cggtgtctatggtgggtccctcagtggtcactactggcactggttccgccagcccccagggaaggggctggagtggattggggaaaccactcttagtggaggccccaactacaacccgtccctcaagagtcgagtcaccatatcactagacacgtccaagaaccagttctccctgaagctgaattctgtgaccgccgcggacacggctgtgtattactgtgcggggcggtggcacttcgatctctggggccgtggcaccctggtcactgtctcctca

SEQ ID NO: 9841 - DNA, 277 bp, Homo sapiens
  source 1..277: mol_type = other DNA
cgctgtcgatggtgggtccctcagaggtcatttctggcactggatgcggcagccccctgggaaggggctggagtggattggtcagatcagtcaaagtggagacaccaagttcaacccgtccctcaagagtcgagtcaccatatcgatagacacgtccaacgatcagctctccctgaagctgacctctgtgaccgccgcggacacggctgtgtattactgtgcggggcgctggcacttcgatctctggggccgtggcacccttgtcactgtctcctca

SEQ ID NO: 9842 - DNA, 289 bp, Homo sapiens
  source 1..289: mol_type = other DNA
tgcagcctctggattcacctttagtaactattggatgagctgggtccgccaggctccagggaaggggctggagtgggtggccaacataaaccaagctggaagtgaggaatactatgtggactctgtgaagggccgattcaccatctccagagacaacgccaagaactcactatctctgcaaatgaacagcctgagagccgaagacacggctgtgttttactgtgcgagagcgggggcaactggaacgacggactactggggccagggatccctggtcaccgtctcctca

SEQ ID NO: 9843 - DNA, 289 bp, Homo sapiens
  source 1..289: mol_type = other DNA
tgcagcctctggattcacctttagtagctattggatgagctgggtccgccaggctccagggaaggggctggagtgggtggccaacataaaccaagatggaagtgagaaatactatgtggactctgtgaagggccgattcaccatctccagagacaacgccgagaactcgctgtatctgcaaatgaacagcctgagagccgaggacacggctgtgtattactgtgcgagggccggtgcaactggaacgactgactactggggccagggaaccctggtcaccgtctcctca

SEQ ID NO: 9844 - DNA, 274 bp, Homo sapiens
  source 1..274: mol_type = other DNA
tgtagcctctggattcagctttagtgactattggatgaactgggtccgccaggctccagggaaggggctggagtgggtggccagcataaggcaagatggcagtcttaaacactatatggactctgtgaagggccgattcaccatctccagagacaacgccaagaactcactgtatctgcaaatgaacagcctgagaagcgaggacgcggctgtttatttctgtgcggcatctttcgaccactggggtcagggaaccctggtcaccgtctcctca

SEQ ID NO: 9845 - DNA, 274 bp, Homo sapiens
  source 1..274: mol_type = other DNA
tgtaggcactggattcggttttagggactattggatgaattgggtccgccaggctccagggagggggctggagtgggtgggcaacatgaaccaggatggaagtataaagtcctatgtggactctgttaagggccgattcaccatcttcagagacaacgccaagaattcagtgtatctgcaaatgaacagcctgagagccgaggacacggctgtgtattattgtgcggcgtcgttcgaccattggggccacggaaccctagtcaccgtctcctca

SEQ ID NO: 9846 - DNA, 274 bp, Homo sapiens
  source 1..274: mol_type = other DNA
tgtaggcactggattcggttttagggactattggatgaattgggtccgccaggctccagggagggggctggagtgggtgggcaacatgaaccaggatggaagtataaagtcctatgtggactctgttaagggccgattcaccatcttcagagacaacgccaagaattcagtgtatctgcaaatgaacagcctgagagccgaggacacggctgtgtattattgtgcggcgtcgttcgaccactggggccacggaaccctagtcaccgtctcctca

SEQ ID NO: 9847 - DNA, 280 bp, Homo sapiens
  source 1..280: mol_type = other DNA
tgcagcctctggattcaccctcagtagccactggatgcagtgggtccgccaagttccagggaaggggctggtgtgggtctcacatattaatggtgatgggagaattataaattacgcggactccgtgaagggccgattcaccatgtccagagacaacgccaagaacacgctgtatctacaaatgaacagtctgagagccgaggacacggctgtatattactgtgtaagagatagtagtgcttcgtgctggggccagggaaccctggtcaccgtctcctca

SEQ ID NO: 9848 - DNA, 280 bp, Homo sapiens
  source 1..280: mol_type = other DNA
tgcagcctctggattcaccctcagtagccactggatgcactgggtccgccaagctccagggaaggggctggtgtgggtctcacatattaatagtgatgggactgctataaggtacgcggactccgtgaagggccgattcaccatctccagagacaacgccaagaacacgctgtatctgcaaatgaacagtctaagagccgaggacacggctatttattattgtgtaagagatagtagtgcttcatgctggggccagggagccctggtcaccgtctcctca

SEQ ID NO: 9849 - DNA, 280 bp, Homo sapiens
  source 1..280: mol_type = other DNA
tgcagcctcaggattcaccttcagtgcacactggatgtactgggtccgccaacctccaggaaaggggctggtgtgggtctcacgtatgaatggtgatgggacttatatagactacgcggagtccgtggagggccgattcaccatctccagagacaacgccaagaacacgttgtatctgcacatgaacgctctgagagtcgaggacacggctgtgtattactgtgtaagggacagtagtgcttcttgctggggccagggaaccctggtcaccgtctcctca

SEQ ID NO: 9850 - DNA, 298 bp, Homo sapiens
  source 1..298: mol_type = other DNA
tgcaggcgctggattcacctttagcaactatgccatgacctgggtccgccaggctccagggaaggggctggagtgggtctcaattattagtggtggtggcgctagcatattctacgcagcctccgtgaagggccggttcaccatctccagagacaattccaagaacacgctgtatctgcaaatgaacagcctgagagccgaggacacggccgtatattactgtgcgaaaggttcagcaccaggtgatcggtactactttgactactggggccagggaaccctggtcaccgtctcctca

SEQ ID NO: 9851 - DNA, 298 bp, Homo sapiens
  source 1..298: mol_type = other DNA
tgcagcgtctggattcacctttaggaattatgccatgagctgggtccgccaggctccagggaaggggctggagtgggtctcagttattagtggtggtagtgctagcatattctatgcagactccgtgaagggccggttcaccatctccagagacaattccaggaatacactgtatctgcagctgaacagcctgagagccgaggacacggccgtatattattgtgcgaaaggctcggcaccaggtgatagatactactttgactactggggccagggaagcccggtcaccgtttcctca

SEQ ID NO: 9852 - DNA, 298 bp, Homo sapiens
  source 1..298: mol_type = other DNA
tgcaggcgttggattcacctttagcaactatgccatgacctgggtccgccaggctccagggaaggggctggagtgggtctcaattattagtggtggtggcgctagcatattctacgcagcctccgtgaagggccggttcaccatctccagagacaattccaagaacacgctgtatctgcaaatgaacagcctgagagccgaggacacggccgtatattactgtgcgaaaggttcagcaccaggtgatcggtactactttgactactggggccagggaaccctggtcaccgtctcctca

SEQ ID NO: 9853 - DNA, 298 bp, Homo sapiens
  source 1..298: mol_type = other DNA
tgcagtctctggattcatctttgatgattatgccatgcactgggtccggcaagctccagggaagggcctggagtgggtctcagctattagttggaatagtggtgttataggctatgcggactctgtgaagggccgattcaccatctccagagacaacgccaagaactccctctatctgcaaatgaacagtctcagaactgacgacacggccttctattactgtgcaagaggggattaccgtggtgcagggggttactctgactattggggccaggggaccctggtcaccgtctcctca

SEQ ID NO: 9854 - DNA, 298 bp, Homo sapiens
  source 1..298: mol_type = other DNA
tgcagtctctggattcatctttgatgattatgccatgcactgggtccggcaagctccagggaagggcctggagtgggtctcagctattagttggaatagtagtgttataggctatgcggactctgtgaagggccgattcaccatctccagagacaacgccaagaactccctctatctgcaaatgaacagtctcagaactgacgacacggccttctattactgtgcaagaggggattaccgtggtgcagggggttactctgactattggggccaggggaccctggtcaccgtctcctca

SEQ ID NO: 9855 - DNA, 298 bp, Homo sapiens
  source 1..298: mol_type = other DNA
tgaaggctctggattcacctttgaagattatgccatgcactgggtccggcaagctccagggaagggcctggagtgggtctcagccattagttggactggtatttacataggctatgcggactctgtgaagggccgattcaccatctccagagacaacgccaagaagtccctgtatttgcaaatgaacagtctgagaactgaggacacggccttgtactactgtgcaagaggggattaccgtggtgcggggggttactctgactactggggccagggaaccccggtcaccgtctcctca

SEQ ID NO: 9856 - DNA, 280 bp, Homo sapiens
  source 1..280: mol_type = other DNA
cactgtctctggtggctccgtcagcagtagtaattactactggggctggatccgccagcccccagggaaggggctggagtggattgggaatatctattatagtgggagcacctactacaacccgtccctcaagagtcgagtcaccatatccataaacacgtccaagaaccagttctccctgaagctgagctctgtgaccgccgcagacacggctgtgtattattgtgccgtttttcagggtgactactggggccagggaaccctggtcaccgtctcctca

SEQ ID NO: 9857 - DNA, 280 bp, Homo sapiens
  source 1..280: mol_type = other DNA
cagtgtctctggtggctccatcaacagtacttcttactactggggctggatccgccagcccccagggaagggactggagtgggtcgggactatctattataatgggaacacctactacaacccgtctcttaagagtcgagccaccgttgccgtggacatgtccaagaaccactactccctgaccctgaactctgtgaccgccgcagacacggctgtatattattgtgcggtttttcaaggggactactggggccagggaatcctcgttaccgtctcctca

SEQ ID NO: 9858 - DNA, 279 bp, Homo sapiens
  source 1..279: mol_type = other DNA
gcttctggatacaccttcactgactatgctttgaattggctgcgacaggcccctggacaagggcctgagtggatgggatggatcaacaccaacactgggaatccaacatatgcccagggcttcacaggacggtttgtcttctccttggacacctctgtcagcacggcttttctacaaatcagcaacctaaagactgaggacactgccgtttattattgtgcgcgagaccgtgggtcgggtgactactggggccagggaaccctggtcaccgtctcctca

SEQ ID NO: 9859 - DNA, 279 bp, Homo sapiens
  source 1..279: mol_type = other DNA
gcttctggatacatcttcactagttatcctatgaattgggtgcgacaggcccctggacaagggcttgagtggatgggatggatcaacaccaacactgggaacccaacgtatgcccagggcttcacaggacggtttgtcttctccttggacacctctgtcagcacggcatatctgcagatcagcagcctaaaggctgaggacactgccttttattactgtgcgagagatcgagggagtggtgactactggggccagggaaccctggtcaccgtctcctca

SEQ ID NO: 9860 - DNA, 289 bp, Homo sapiens
  source 1..289: mol_type = other DNA
cactgtctctggtggctccatcaataattactactggagttggttccggcagcccgccgggaagggactggagtggattgggcgtatctataccagtgggagcaccaactacaacccctccctcaagagtcgagtcaccatgtcaatagacacgtccaagaatcagttctccctgaagctgaactctgtgaccgccgcggacacggccgtgtattattgtgcgagaacttccccccgctatgggggttttgactactggggccagggaaccctggtcaccgtctcctca

SEQ ID NO: 9861 - DNA, 289 bp, Homo sapiens
  source 1..289: mol_type = other DNA
cactgtctctggtggctccatcagtagttactactggagctggatccggcagcccgccgggaagggactggagtggattgggcgtatctatagcagtgggagcaccaactacaacccctccctcaagagtcgagtcaccatgtcagtagacacgtccaagaaccagttctccctgaaggtgaactctgtgaccgccgcggacacggccgtgtattactgtgcgagaacttcccctaggtacggggggtttgactactggggccagggaaccctggtcaccgtctcccca

SEQ ID NO: 9862 - DNA, 289 bp, Homo sapiens; identical to SEQ ID NO: 9861
  source 1..289: mol_type = other DNA

SEQ ID NO: 9863 - DNA, 295 bp, Homo sapiens
  source 1..295: mol_type = other DNA
tgcagtctctggattcactttcagtgacgcctggatgaattgggtccgccaggctccagggaaggggctggagtgggttggccgctctaaaaagagaagtgacggtgggacaatagactacacagcacccgtgaaaggcagattcaccatctcaagagatgattcaaaagacacgctgtatctggaaatgaacagtctgaaaatcgaggacacagccgtgtattactgcaccacagaattgacttacggtgacaaatttcactggggccagggaaccctggtcaccgtctcctca

SEQ ID NO: 9864 - DNA, 298 bp, Homo sapiens
  source 1..298: mol_type = other DNA
tgcagcctctggattcactttcagtcggcacaactggatgaactgggtccgccaggctccagggaagggcctggagtgggttggccgtattaaaaccaagtctgagggtgggacaacagactacggtgcacccgtgaaaggcagattcagcatttcgagagacgactcgagagatattctgtatctgcaaatgaacagcctgaagtccgaggacacagccctatattactgtaccacagagttgacttacggtgacaaatttcattggggccagggagccctggtcaccgtctcctca

SEQ ID NO: 9865 - DNA, 300 bp, Homo sapiens
  source 1..300: mol_type = other DNA
aagggttctggatacagctttaccagccactggatcggctgggtgcgccagatgcccgggaaaggcctggagttgatggggatcatctatgctagtgactctgataccagatacagcccgtccttccaaggccaggtcaccatctcagccgacaagtccatcaacaccgcctacctgcagtggagcagcctgaaggcctcggacagcgccatgtattactgtgcgaggtttggaggaaacagtggctggtatggggggtttgactactggggccagggaaccctggtcaccgtctcctca

SEQ ID NO: 9866 - DNA, 300 bp, Homo sapiens
  source 1..300: mol_type = other DNA
aagggttctggatacagctttaccagccactggatcgcctgggtgcgccagatgcccggaaaaggcctggagttgatgggaatcatctatgctagtgactctgataccagatacagcccgtccttccaaggccaggtcaccatctcagccgacaagtccatcaacaccgcctacctgcagtggagcagcctgaaggcctcggacaccgccatgtattactgtgcgaggtttggaggaaacagtggctggtatggggggtttgactactggggccagggaaccctggtcaccgtctcctca

SEQ ID NO: 9867 - DNA, 300 bp, Homo sapiens
  source 1..300: mol_type = other DNA
aagggttctggatacagctttaccagccattggatcggctgggtgcgccagatgcccgggaaaggcctggagttgatggggatcatctatgctagtgactctgatacgagatacagcccgtccttccaaggccaggtcaccatctcagccgacaagtccatcaacaccgcctacctgcagtggagcagcctgaaggcctcggacaccgccatgtattactgtgcgaggtttggaggaaacagtggctggtatggggggtttgactactggggccagggaaccctggtcaccgtctcctca

SEQ ID NO: 9868 - DNA, 300 bp, Homo sapiens
  source 1..300: mol_type = other DNA
aagggctctggatatagctttaccacccactggatcggctgggtgcgccagctgcccgggaaaggcctggagtgcatggggatcatctatcctggtgactctgataccagatacagcccgtccttccaaggccaggtcaccatctcagccgacaagtccatcagtactgcctacctgcagtggagcagcctgaaggcctcggacaccgccatatattactgtgcaagattcggggggaacagtggctggtacgggggctttgactactggggccagggaaccctggtcaccgtctcttcc

SEQ ID NO: 9869 - DNA, 300 bp, Homo sapiens
  source 1..300: mol_type = other DNA
aagggctctggatatagctttaccacccactggatcggctgggtgcgccagatgcccgggaaaggcctggagtgcatggggatcatctatcctggtgactctgataccagatacagcccgtccttccaaggccaggtcaccatctcagccgacaagtccatcagtactgcctacctgcagtggagcagcctgaaggcctcggacaccgccatatattactgtgcgagattcggggggaacagtggctggtacgggggctttgactactggggccagggaaccctggtcaccgtctcttcc

SEQ ID NO: 9870 - DNA, 300 bp, Homo sapiens
  source 1..300: mol_type = other DNA
aagggctctggatatagctttaccacccactggatcggctgggtgcgccagatgcccgggaaaggcctggagtgcatggggatcatctatcctggtgactctgataccagatataccccgtccttccaaggccaggtcaccatctcagccgacaagtccatcagtactgcctacctgcagtggagcagcctgaaggcctcggacaccgccatatattactgtgcaagattcggggggaacagtggctggtacgggggctttgactactggggccagggaaccctggtcaccgtctcttcc

SEQ ID NO: 9871 - DNA, 300 bp, Homo sapiens
  source 1..300: mol_type = other DNA
aagggctctggatatagctttaccacccactggatcgcctgggtgcgccagatgcccgggagaggcctggagtgcatggggatcatctatcctggtgactctgataccagatacagcccgtccttccaaggccaggtcaccatctcagccgacaagtccatcaatactgcctacctgcagtggagcaccctgaaggcctcggacaccgccatatattactgtgcaagattcggggggaacagtggctggtacgggggctttgactactggggccagggagccctggtcaccgtctcttcc

SEQ ID NO: 9872 - DNA, 280 bp, Homo sapiens
  source 1..280: mol_type = other DNA
cgtttttggatacaccttcaccagctatgatatcaactgggtgcgacaggccactggacaagggcttgagtggctgggatggatgaaccctaacagtggtaacacaggctatacacagaagttccaggacagagtcgccatgaccaggaacacctccataagcacagcctacatggagctgagcagcctgagacctgaggacacggccgtgtattactgtgcgagaggcagccgctcgtttgactactggggccagggaaccctggtcaccgtctcctca

SEQ ID NO: 9873 - DNA, 279 bp, Homo sapiens
  source 1..279: mol_type = other DNA
gcttctggatacaccttcagcagttatgatctcaactgggtgcgacaggccactggacaagggcttgagtggatgggatggatgaaccctaacagtggaaacacaggctatgcacagaactttcagggcagagtcaccatgacttggaacacctccatgagcacagcctacatggagctgagcagcctgagatctgatgacacggccatgtattactgtgcgagaggtagtaggtcctttgattactggggccagggaaccctggtcaccgtctcctca

SEQ ID NO: 9874 - DNA, 286 bp, Homo sapiens
  source 1..286: mol_type = other DNA
tgcagcctctggattcacatttagtaattattggatgacctgggcccgccaggctccaggaaaggggctggcgtgggtggccaggataaacccagatggaagtgagaaatatattgtggactctgtgaagggccgattcaccgtctccagagacaacgccaagaactcactgtatctgcaaatgaacagcctgagagccgaggacacggctgtgtattattgtgcgagagcgggcagtggctggtttaactactggggccagggaaccctggtcaccgtctcctca

SEQ ID NO: 9875 - DNA, 286 bp, Homo sapiens
  source 1..286: mol_type = other DNA
tgcagcctctggattcatctttagtaggtattggatgagctgggtccgccaggctccagggaaggggctggagtgggtggccaacataaacgaagatggaagtgagaaaaagtatgtggactctgtgaagggccgattcaccatctccagagacaacgccaagaactcactgtatctgcaaatgaacagcctgagagccgaggacacggctgtatattactgtgcgagagccggcagtggctggttcaactactggggccagggaaccctggtcaccgactcctca

SEQ ID NO: 9876 - DNA, 286 bp, Homo sapiens
  source 1..286: mol_type = other DNA
tgcagcctctggattcacctttagtagctattggatgagctgggtccgccaggctccagggaaggggctggagtgggtggccaacataaaggaagatggaagtgagaaatactatggggactctgtgaagggccgattcaccatctccagagacaacgccaagaactcactatatctgcaaatgaacagcctgagagccgaggacacggctgtgtattactgtgcgagagccggcagtggctggttcaactactggggccagggaaccctggtcaccgactcctca

SEQ ID NO: 9877 - DNA, 286 bp, Homo sapiens
  source 1..286: mol_type = other DNA
tgcagcctctggattcacctttagtagctattggatgagctgggtccgccaggctccagggaaggggctggagtgggtggccaacataaaggaagatggaagtgagaaatactatgtggactctgtgaagggccgattcaccatctccagagacaacgccaagaactcactgtatctacaaatgaacagcctgagagtcgaggacacggctgtgtattactgtgcgagagccggcagtggctggttcaactactggggccagggaaccctggtcaccgactcctca

SEQ ID NO: 9878 - DNA, 298 bp, Homo sapiens
  source 1..298: mol_type = other DNA
tgcagcctctggcttcacctttagcagctttgccatgagctgggtccgccaggctccggggaaggggctggaatgggtctcgagtatcagcggtggtgctgctggcacatactacgcagacaccgtgaaggggcggttcaccatctccagagacacttccaataatacgctgtatctgcaattgagcagcctgaaagtcgaggacacggccatttattactgtgcgaaagcacgctctgaagtggtggcagctgctaacaactactggggccagggaattctggtcaccgtctcccca

SEQ ID NO: 9879 - DNA, 298 bp, Homo sapiens
  source 1..298: mol_type = other DNA
tacagcctctggattcacctttaacaactatgccatgagctgggtccgccaggctccagggaaggggctggagtgggtctcagttattagtggtagtggtgatagcacatactacgcagactccgtgaagggccggctcaccatctccagagacaattccaggaacacgctgtatctgcaaatgaacagcctgagagccgaggacacggccgtatatttctgtgcgaaagccagatcagaggtggtggcagctgctaacaactactggggccagggaaccctggtcaccgtctcctca

SEQ ID NO: 9880 - DNA, 277 bp, Homo sapiens
  source 1..277: mol_type = other DNA
tgcagcctctggattcaccttcagtagttatgaaatgaactgggtccgccaggctccagggaaggggctggagtgggtttcatacattagtagtagtagtagtatcacacactacgcagactctgtgaagggccgattcaccatctccagagacaacgccaagaactcactgtatctgcaaatgaacagcctgagagccgaggacacggctgtttattactgtgcgagagatagatttgcctactggggccagggaacccttgtcaccgtctcttca

SEQ ID NO: 9881 - DNA, 277 bp, Homo sapiens
  source 1..277: mol_type = other DNA
tgcagcctctggattcaccttcaataattatgaaatgaactgggtccgccaggctccagggaaggggctggagtgggtttcatacattagtagtagtggtagtaccatatactacgcagactctgtgaagggccgattcaccatctccagagacaacgccaagaactcactgtatctgcaaatgaacagcctgagagccgaggacacggctatttattactgtgcgagagatcgtttcgcctactggggccagggaaccctggtcaccgtctcctca

SEQ ID NO: 9882 - DNA, 277 bp, Homo sapiens
  source 1..277: mol_type = other DNA
tgtggccgctggattctcctttaacacctatgtcatgacctgggtccgccaggctccagggaagggactggaatgggtctcgtttatttatggcgatggtactacatactatgtagactccgtgaagggccgcttcaccgtctccagagacaattccaagaacacgatgtttctggaaatgaacagcctgagagtcgacgacacggccatatattactgtgcgaaaggcgggtgggtggactcctggggccggggatccctggtcatcgtctcctca

SEQ ID NO: 9883 - DNA, 280 bp, Homo sapiens
  source 1..280: mol_type = other DNA
tgcagcctctggattcaactttagtggatatgacatgacgtgggtccgccagattccagggaaggggctggattgggtctcatatattaatactcctggtgattacacatactacgcagactccgtgaagggccggttcaccatctccagagacaattccaggaacaccctacatctgcaaatgaacagcctgagagtcgaggacacggccatatattactgtgccaaaggggggtgggttgactcctgtggccagggaaccctggtcaccgtctcctca

SEQ ID NO: 9884 - DNA, 283 bp, Homo sapiens
  source 1..283: mol_type = other DNA
tgaaggctctggattcacctttagcagttacggcatgagttgggtccgccaggctccagggaaggggctggagtgggtcgcaagtgttagtggcggcgcaatagatatccattatgcagactccgtgaggggccgattcaccatctccagagacaactcgaagaagattctgtatctgcaaatggacagcctgagatccgacgactcggccatatattactgtgcaaaagaggtccccgcttttgatctctggggccacgggacaatggttaccgtctcctca

SEQ ID NO: 9885 - DNA, 283 bp, Homo sapiens
  source 1..283: mol_type = other DNA
tgaaggctctggattcacatttggaagtttcggcatgagttgggtccgccacattccaggaaagggacttgagtgggtggcaggaatcagtgggggaagtgtcgacattaactatgcggactccgtgaagggccgattcaccatttccagagacaatggcaagaccatggtatatcttcaaatggacagtctgagaatcgacgactcgggcacatacttttgcgcgaaagaggtcccggcttttgacctgtggggccaagggacaacggtcaccgtctcctca

SEQ ID NO: 9886 - DNA, 286 bp, Homo sapiens
  source 1..286: mol_type = other DNA
tacagcctctggattcacgtttagtaattattggatgaactgggtccgccaggctccaggaaaggggcttgagtgggtggccaacatcaaacaaaatggacgtgagacaaactatgtggactctgtgaggggccgattcaccatctccagagacaacgccaagaactcagtgtttctgcaaatgaacagcctgagagtcgaggacacggctctgtattactgcgcgggaggtcgggggtggctgatcgacttctggggccagggaaccctggtcaccgtctcctcc

SEQ ID NO: 9887 - DNA, 286 bp, Homo sapiens
  source 1..286: mol_type = other DNA
tacagcctctggattcacgtttagtaattattggatgaactgggtccgccaggctccaggaaaggggcttgagtgggtggccaacatcaaacaaaatggacgtgagacaaactatgtggactctgtgaggggccgattcaccatctccagagacaacgccaagaactcagtgtttctgcaaatgaacagcctgagagtcgaggacacggctctgtattactgcgcgggaggtcgggggtggctgatcgacttctggggccagggaaccctggtcaccgcctcctcc

SEQ ID NO: 9888 - DNA, 286 bp, Homo sapiens
  source 1..286: mol_type = other DNA
cgcagcctctgggttcacctttagtactcactggatgagttgggtccgccaggctccagggaaggggctggagtgggtggccaacataaagcaagatggaagtgagaaatactatgtggactctgtgaagggccgattcaccatctccagagacaacgccaagaactcactgtatctgcaaatgagcagcctgagagccgaggacacggccgtatatttctgtgcggggggccgcgggtggctaattgacttttggggccagggatccctggtcaccgtctcctca

SEQ ID NO: 9889 - DNA, 286 bp, Homo sapiens
  source 1..286: mol_type = other DNA
tgtagtctctggattcagctttagtaactattggatgaactgggtccgccaggctccagggaaggggctggagtggatggccaacatacagaaagatggaagtgagaaaaactatgtggactctgtgaggggccgcttcacgatctccagagacaacgtcaagaattcactgtatctgcaaatgaacagcctgagagacgaggacacggccgtgtattactgtgcgggaggccgtggctggttaattgacttctggggccagggaaccctggtcaccgtctcctca

SEQ ID NO: 9890 - DNA, 280 bp, Homo sapiens
  source 1..280: mol_type = other DNA
tgccgtctctgggttcatctttaccaggcaggacatgaactgggtccgccaggctccagggaagggactagagtgggtcgcatatataagtggcgacgccactgccgcttactacgcagactccgtgaagggccgcttcaccatctccagagacaatttcgggaacacattgtctctgcacatgagcagcctgagatccgaggacacggccacatattattgcacgagaaatgcgggcctagattactggagccagggagtcctggtcaccgtctcgtca

SEQ ID NO: 9891 - DNA, 280 bp, Homo sapiens
  source 1..280: mol_type = other DNA
tgcaatgtctggattcacctttgtcagacaagacttaaattggatccgtcaggctccagggaagggactggagtgggtcgcgagtattgatggaactggttatgccacatactacgccgaccccgtgaagggccggttcaccatctccagagacaatactgagaacaccttatatctacaaatgaacacgttgagagccgaggacacggccgtctattattgtacaagaaacgctggcctcgattattggggccagggaaccctggtgaccgtctcctcg

SEQ ID NO: 9892 - DNA, 280 bp, Homo sapiens
  source 1..280: mol_type = other DNA
tgcaatgtctggattcacctttgtcagacaagacttaaattggatccgtcaggctccagggaagggactggagtgggtcgcgagtattgatggaactggttatgccacatactacgcagaccccgtgaagggccggttcaccatctccagagacaatactgagaacatgttatatctacaaatgagcaggttgagagccgaggacacggccgtctattattgtacaagaaacgctggcctcgattattggggccagggaaccctggtgaccgtctcctcg

SEQ ID NO: 9893 - DNA, 280 bp, Homo sapiens
  source 1..280: mol_type = other DNA
tgcagcctttggattcacctttaccagccaggccatgaactgggtccgccaggctccagggaaggggctggagtgggtctcgactgttactggcagcggtggcggcacttactacgcagactccgtgaagggccggttcaccatctccagggacaattccaggaacacggtatctctacaaatgaccagcctgagagccgaggacacggccgtatatttctgtacccgcaatgccggccttgactactggggccagggaaccctggttaccgtctcctca

SEQ ID NO: 9894 - DNA, 274 bp, Homo sapiens
  source 1..274: mol_type = other DNA
tgcagcctctggattcaccttcagtagttataccatgaactgggtccgccaggcgccagggaaggggctggagtgggtctcatccattactcccagtggtggttacataaactacgcagactcagtgaagggccgattcaccatctccagagacaacgccaagaagtcactgtctctgcaaatgaacagcctgagagccgaggacacggctgtatattactgtgcgagtgtcagggggcactggggccagggagccctggtcaccgtctcctca

SEQ ID NO: 9895 - DNA, 274 bp, Homo sapiens
  source 1..274: mol_type = other DNA
tgcagcctctagattcaccttcagtgactatagcatgaactgggtccgccaggctccagggaagggactggagtgggtctcatccattaggggtgatagtaatttcatatactattcagactcagtgaagggccgattcaccatctccagagacaacgccaagaattcactgtatctgcaaatggacagcctgagagccgaggacacggctatatattactgtgcgagtgtccgaggccactggggccagggaaccctggtcaccgtctcctca

SEQ ID NO: 9896 - DNA, 274 bp, Homo sapiens
  source 1..274: mol_type = other DNA
tgcagcctctggattcaccttcagtggttataccatgacctgggtccgccaggctcctgggaaggggctggtctgggtctcatccattggtgtgagtggtggttccatattctacgcagactcagtgaagggccgattcaccatctccagagacaacgccaagacctcactgtatctacaaatggacagcctgagagccgaggacacggctgtctatttctgtgcgagcgtcaggggtcactggggccagggaaccctggtcaccgtctcctca

SEQ ID NO: 9897 - DNA, 274 bp, Homo sapiens
  source 1..274: mol_type = other DNA
tgcagcctctggattcaccttcagtggttataccatgacctgggtccgccaggctcctgggaaggggctggtctgggtctcatccattggtgtgagtggtggttccatattctacgcagactcagtgaagggccgattcaccatctccagagacaacgccaagacctcactgtatctacaaatggacagcctgagagccgaggacacggctgtctatttctgtgcgagcgtcaggggtcattggggccagggaaccctggtcaccgtctcctca

SEQ ID NO: 9898 - DNA, 283 bp, Homo sapiens
  source 1..283: mol_type = other DNA
tgcagcctctggattcacctttgatgattatgccatgcactgggtccggcaagctccagggaagggcctggagtgggtctcaagtattagttggaatagtggtagcataggctatgtggactccgtgaagggccgattcaccatctccagagacaacgccaagagctccctgtatctgcaaatgaacagtctgagacccgaggacacggccttgtattactgtgccagaagtcgatacggtatggacgtctggggccaagggaccacggtcaccgtctcctca

SEQ ID NO: 9899 - DNA, 283 bp, Homo sapiens
  source 1..283: mol_type = other DNA
tgcagcctctggattcacctttgatgattatgccatgcactgggtccggcaagctccagggaagggcctggagtgggtctcaagtattagttggaatagtggtagcataggctatgtggactccgtgaagggccgattcaccatctccagagacaacgccaagagctccctgtatctgcaaatgaacagtctgagacctgaggacacggccttgtattactgtgccagaagtcgatacggtatggacgtctggggccaagggaccacggtcaccgtctcctca

SEQ ID NO: 9900 - DNA, 283 bp, Homo sapiens
  source 1..283: mol_type = other DNA
tgcagcctctggattcacctttgatgattatgccatgcactgggtccggcaagctccagggaagggcctggagtgggtctcaagtattagttggaatagtggtagcataggctatgtggactctgtgaagggccgattcaccatctccagagacaacgccaagaactccctgtatctgcaaatgaacagtctgagacctgaggacacggccttgtattactgtgccagaagtcgatacggtatggacgtctggggccaagggaccacggtcaccgtctcctca

SEQ ID NO: 9901 - DNA, 283 bp, Homo sapiens
  source 1..283: mol_type = other DNA
tgcaggctctggattcacctttgatgattatgccatgcactgggtccggcaagttccagggaagggcccggagtgggtctcaagtattagttggaacagtggtaacataggctatgcagactctgtgaaggaccgattcaccatctccagagacaacgccaagaactccctgtatctggaaatgaatagtctgagaaccgaggacacggccttgtattactgtgctcgaagccgatacggcatggacgtctggggccaagggaccacggtcaccgtctcctca

SEQ ID NO: 9902 - DNA, 283 bp, Homo sapiens
  source 1..283: mol_type = other DNA
tgcaggctctggattcacctttgatgattatgccatgcactgggtccggcaagttccagggaagggcctggagtgggtctcaagtattagttggaatagtggtaacataggctatgcggactctgtgaaggaccgattcaccatctccagagacaacgccaagaactccctgtatctggaaatgaatagtctgagaaccgaggacacggccttgtattactgtgctcgaagccgatacggtatggacgtctggggccaagggaccacggtcaccgtctcctca

SEQ ID NO: 9903 - DNA, 283 bp, Homo sapiens
  source 1..283: mol_type = other DNA
tgcaggctctggattcacctttgatgattatgccatgcactgggtccggcaagttccagggaagggcccggagtgggtctcaagtattagttggaacagtggtaacataggctatgcggactctgtgaaggaccgattcaccatctccagagacaacgccaagaactccctgtatctggaaatgaatagtctgagaaccgaggacacggccttgtattactgtgctcgaagccgatacggtatggacgtctggggccaagggaccacggtcaccgtctcctca

SEQ ID NO: 9904 - DNA, 283 bp, Homo sapiens
  source 1..283: mol_type = other DNA
tgtaggctctggattcagctttgatgattatgccatgcactgggtccggcaagttccagggaagggcccggagtgggtctcaagtattagttggaatagtggtaatataggctatgcggactctgtgaaggaccggttcaccatctccagagacaacgccaagaactccctgtatctgcaaatgaatagtctgagaaccgaggacacggccttgtattactgtgctcgaagccggtacggtatggacgtctggggccaagggaccacggtcaccgtctcctca

SEQ ID NO: 9905 - DNA, 283 bp, Homo sapiens
  source 1..283: mol_type = other DNA
tgtaggctctggattcagctttgatgattatgccatgcactgggtccggcaagttccagggaagggcccggagtgggtctcaagtattagttggaatagtggtaatataggctatgcggactctgtgaaggaccgattcaccatctccagagacaacgccaagaactccctgtatctgcaaatgaatagtctgagaaccgaggacacggccttgtattactgtgctcgaagccggtacggtatggacgtctggggccaagggaccacggtcaccgtctcctca

SEQ ID NO: 9906 - DNA, 283 bp, Homo sapiens
  source 1..283: mol_type = other DNA
tgcaggctctggattcacctttgatgattatgccatgcactgggtccggcaagttccagggaagggcctggagtgggtctcaagtattagttggaatagtggtaacataggctatgcggactctgtgaaggaccgattcaccatctccagagacaacgccaagaactccctgtatctggaaatgaatagtctgagaaccgaggacacggccttgtattactgtgctcgaagccggtacggtatggacgtctggggccaagggaccacggtcaccgtctcctca

SEQ ID NO: 9907 - DNA, 283 bp, Homo sapiens
  source 1..283: mol_type = other DNA
tgcagcctctggattcagctttgatgattatgccatgcactgggtccgccaaggtccagggaagggcctggagtgggtctcaagtattagttgggatggtggtagtacaggctatgcggactctgtgaagggccgattcaccatttccagagacaacgccaagaactccctgtatctggaaatgaacagtctgagagctgaggacacggccctctattactgtgcaagatctaggtacggtatggacgtttggggccaagggaccacggtcaccgtctcctca

SEQ ID NO: 9908 - DNA, 301 bp, Homo sapiens
  source 1..301: mol_type = other DNA
tgcagcctctggattcatctttaggaattatgccatgagttgggtccgccaggctccagggaaggggctggagtgggtctcagttatttatagcggtgactttagcacacactatgcagactccgtgaagggccggttcaccatctccagagataattccaagaacatggtatatctggaaatgaacagcctgagagccgaagacacggccgtatattattgtgctaaagaccttgatgccagtggctggtacttgtacttccagcactggggccagggcaccctggtaaccgtctcctca

SEQ ID NO: 9909 - DNA, 301 bp, Homo sapiens
  source 1..301: mol_type = other DNA
tgcagcctctggattcacctttagcaattatgccatgagctgggtccgccaggctccagggaaggggctggagtgggtctcagttatttatagcggtgatagtaccacatactatgcagactccgtggagggccggttcaccatctccagagataattccaagaacacgctgtatttgcacatgaacagtctgagagccgaggacacggccgtatattactgtgcgaaagatctggatgccagtggctggtacttatacttccagcactggggccagggcaccctggtcaccgtctcccca

SEQ ID NO: 9910 - DNA, 301 bp, Homo sapiens
  source 1..301: mol_type = other DNA
tgcaggctctggattcacccttaccgagtatgccatgaactgggtccgccaggctccagggaaggggctggagtgggtctcaactattagtgctagtggtcataggacatactacgcagactccgtgaagggccggttcaccatctccagagacacttccaagaacacagtatatttgcaaatgaacagcctgagagccgacgacacggccgtctattactgtgcgaaagatcgttattgtcctggtggcatttgcccgactgactactggggccagggaacccgggtcaccgtctcctca

SEQ ID NO: 9911 - DNA, 301 bp, Homo sapiens
  source 1..301: mol_type = other DNA
tgcagcctctggattcgccttaaccgagtacgccatgaattgggtccgccaggctccagggaagggactggagtgggtctcaactatgagtgctagtggtgggatcacagactacgcagactccgtgaagggccgcttcaccatctccagagacacttccaagcacacagtgtatctgcaaatgaacagcctgagagccgacgactcggccgtctattactgtgcgaaagatcggtattgccctggtggtatctgcccgactgactactggggccggggaaccctggtcaccgtctcgtca

SEQ ID NO: 9912 - DNA, 280 bp, Homo sapiens
  source 1..280: mol_type = other DNA
tgcaggctctggattcattgtcagtcagaactggatgcagtgggtccgccaagccccagggaaggggccggtgtgggtctcacgtattagtagtgatgggcttagcacagcctacgcggactccgtgaagggccgattcaccatctccagagacagcgccacgaacacactgtttctgcaaatgaacagtctgagagtcgaggacacggctgtctattattgtgtgaaagacagcagtgcttcctactggggccagggaaccctggtcaccgtctcctca

SEQ ID NO: 9913 - DNA, 280 bp, Homo sapiens
  source 1..280: mol_type = other DNA
tgaagtctctggattcaccctcagcaaccactggatgtactgggtccgccaagctccagggaaggggctggagtgggtctcacgtatcaatactgatgggagtagcacaaactacgcggactccgtgaagggccgattcaccgtctccagagacaacgccaagaacacgctgtatctgcaaatggacagtctgagagccgaggacacggctatctattactgtgtaaaagatagtagtgcctcatactggggccagggaaccctggtcaccgtctcctca

SEQ ID NO: 9914 - DNA, 280 bp, Homo sapiens
  source 1..280: mol_type = other DNA
tgcagcctctggattcaccttcagtagtaactggatgcagtgggtccgtcaagttccagggaaggggctggtgtgggtctcacgtattaacactgatgggcgcagcacagaatacgcggcctccgtgaagggccgattcaccatctccagagacaacgccaagagcacactgtatctgcaaatgaacagtctgagagccgaggacacggcggtttattattgtgtaaaagacagcagtgcctcctactggggccagggaaccctggtaaccgtctcctca

SEQ ID NO: 9915 - DNA, 292 bp, Homo sapiens
  source 1..292: mol_type = other DNA
tgcagcctctcgattcggcttcagtacctatgctatgcactgggtccgccgggctccaggcaaggggctggagtgggtggcagctatatcatttcatggaaagaatacatactacctagactccgtgaagggccgattcaccatctccagagacaattccaagaatactctatatctgcaaatgaacagcctgagagctgaggacacggctgtctattactgtgcgaggggtcactatgacagtagtgcggttgactactggggccagggcaccctggtcaccgtctcctca

SEQ ID NO: 9916 - DNA, 292 bp, Homo sapiens; identical to SEQ ID NO: 9915
  source 1..292: mol_type = other DNA

SEQ ID NO: 9917 - DNA, 292 bp, Homo sapiens
  source 1..292: mol_type = other DNA
tgcagcctctaaattcgccttcagtacttatgctatgcactgggtgcgccaggctccaggcaaggggctggagtgggtggcacttatatcatttaacggaagaaatgaatattacgcagactccgtgcagggccgattcgccatctccagagacaattccaagaacacactctttctacaaatgaacagccttagaactgaggacacggctgtctactactgtgcgagagggcactatgatagtagtgcagttgactattggggccagggaaccctggtcaccgtctcctca

SEQ ID NO: 9918 - DNA, 304 bp, Homo sapiens
  source 1..304: mol_type = other DNA
tgcagcctctggattcagcgtcagtaactacgacatgcactgggtccgccaaagtacaggaaaaggtctggagtgggtctcagctcttggtcctggtggtagcatattctatccagactccgtgaagggccggttcaccatctccagagaaaacgccaagaattccttgtatcttcaaatgaacagcctgagacccggggacacggctgtttattactgtgcaagagggggcgggtacggtggtaatcccctgtactggtacttcgatctctggggccgtggcaccctggtcactgtctcctca

SEQ ID NO: 9919 - DNA, 304 bp, Homo sapiens
  source 1..304: mol_type = other DNA
tgcagcctctggattcaccctcagtagctacgacatgcactgggtccgccaagttgaaggaagaggtctggagtgggtctcagctcttggtcctgctggtgacacatactatccaggctccgtgaagggccgattcaccgtctccagagaaagtgccaagaactccttatatcttcaaatgaacagcctgagcgccggggacacggctgtgtattactgtgcaagagggggagggtacggcggtaacccactctactggtacttcgatctctggggccgtggcaccctggtcactgtctcttca

SEQ ID NO: 9920 - DNA, 304 bp, Homo sapiens
  source 1..304: mol_type = other DNA
tgcagcctctggattcaccctcagtaactacgacatgcactgggtccgccatgctacaggaaaaggtctggagtgggtctcaactcttggtcctgctggtgacacatactatccaggctccgtgaagggccgattcaccatctccagagaaaatgccaagaattccgtgtatcttcaaatgaacagcctgagagccggggacacggctgtgtattactgtgcaagaggaggcggctacggtggtaaccctttatactggtacttcgatctttggggccgtggcaccctggtcactgtctcccca

SEQ ID NO: 9921 - DNA, 280 bp, Homo sapiens
  source 1..280: mol_type = other DNA
tgcagcctctggattcacctttagtaactattggatgagctgggtccgccaggctccagggaaggggctggagtgggtggccaacataaagcaagatggaagtgagatatactatgtggactctgtgaagggccgattcaccatttccagagacaacgccaagaactcactgtatctgcaaatgaacagcctgagagccgaggacacggctgtgtattactgtgcgagaaagaatgtttttgatatctggggccaagggacaatggtcaccgtctcctca

SEQ ID NO: 9922 - DNA, 280 bp, Homo sapiens
  source 1..280: mol_type = other DNA
tgcagcctctggattcatctttagtaggttttggatgagctgggtccgccaggctccagggaaggggctggagtgggtggccaacataaagcaagatggaagtgagaaatactatgtggactctgtgaagggccgattcaccatctccagagacaacgccaagaattcactgtatctggaaatgaacagcctgagagccgaggacacggctgtgtattactgtgcgagaaaaaatgtttttgatatctggggccatgggacaatggtcaccgtctcttca

SEQ ID NO: 9923 - DNA, 283 bp, Homo sapiens
  source 1..283: mol_type = other DNA
tgcagcctctggattcacctttagtagttcttggatgacctgggtccgccaggctccagggaaggggctggagtgggtggccaatataaaagaagctggaagtgagtcacactatgtggactctgtgaagggccgattcaccattaccagagacaacaccaacaactcagtgtatctgcaagtgagtagcctgagagccgaggacacggctgtatattattgtgcgagagggagattctcattcgactcctggggccaggggattccggtcaccatctcctca

SEQ ID NO: 9924 - DNA, 283 bp, Homo sapiens
  source 1..283: mol_type = other DNA
tgcagcctctggattcacctttaataactattggatgacctgggtccgccgggctccagggaaggggctggagtgggtggccaacataaagcaaggtggaactgagaaaaactatgtggattctgtgaagggccgcttcaccatctccagagacaacgccaacaactcattgcttctgcagttgaacagcctgagagtcgaggatacggctgtctattactgtgcgagaggaagattctccttcgactcttggggccagggaaccctggtcaccgtctcgtca

SEQ ID NO: 9925 - DNA, 304 bp, Homo sapiens
  source 1..304: mol_type = other DNA
ttcagcctctggattcagcttcagtaactattacatgaactgggtccgccaggctccagggaaggggctggagtgggtctcaggcgttagtggtgatagtgaccgcatatactacggacactcagtgaggggccgattcaccgtctccagagaaaacgccaagaactccctatatctgcaattgaacaacctgagagccgaggacacgggtgtctattattgtgcgagagatctagatcgcagtgactggtacggcggttactttgactcctggggccagggaaccctggtcctcgtctcctca

SEQ ID NO: 9926 - DNA, 304 bp, Homo sapiens
  source 1..304: mol_type = other DNA
tgcagcctctggattcaccttcagtaactattacatgaactgggtccgccaggctccagggaaggggctggagtgggtctcatccattactggtagtagtagttacagatactacacagactcagtgaagggccgattcaccatctccagagacaacgccaagaactcattgtatctgcaaatgaacagcctgagagccgaggacacggctgtgtattactgtgcgagagatctcgataggagtgactggtacggggggtactttgactcctggggccagggatccctggtcaccgtctcctca

SEQ ID NO: 9927 - DNA, 304 bp, Homo sapiens
  source 1..304: mol_type = other DNA
ttcagcctctggattcactttcagtagtactttcatgaactgggtccgccaggctccagggaaggggctggagtgggtctcatgcattagcagtagtggttctcgcatatactacgcagactcagcgaagggccgattcaccatctccagagacgacgccaagaactcactctatctgcaaatgaacagcctgagagtcgaggacacggctgtgtattactgtgcgagagatctcgataggagtgactggtacgggggttacttcgactcttggggccagggaaccctggtcaccgtcgcctca

SEQ ID NO: 9928 - DNA, 304 bp, Homo sapiens
  source 1..304: mol_type = other DNA
tgcagcctctggattcatgttcagtagttatttcatgaactgggtccgccgggctccagggaaggggctggagtgggtctcagtcattagtagtagtggttcttccatatactacgcagactcagtgaagggccgattcaccatctccagagacaacgccaagaactcactatatctgcaaatgaacagcctgagagccgaagacacgggtgtctattattgtgcgagagatctcgatagaagtgactggtacgggggttacttcgactcctggggccagggaaccctgatcaccgtctcctca

SEQ ID NO: 9929 - DNA, 298 bp, Homo sapiens
  source 1..298: mol_type = other DNA
tgcagcctctggattcacctttagcagctatgccatgagctgggtccgccaggctccagggaaggggctggagtgggtctcagctattagtggtagtggtggtagcacatactacgcagactccgtgaagggccggttcaccatctccagagacaattcccagaacacgctgtttttgcagatgagcagcctgagagccgaggacacggccgtatattactgtgcgaaagatcaatatagtggctacggggggctttttgactactggggccagggaaccctggtcaccgtctcctca

SEQ ID NO: 9930 - DNA, 298 bp, Homo sapiens
  source 1..298: mol_type = other DNA
tgaagcctctggattcacctttagtagctacgccatgacctgggtccgccaggctccagggaaggggctggagtgggtctcaggtattaatgatagtggtggtaggacatactacgcagactccgtgaagggccggttcaccatctccagagacaattccaagaacacactgtatctgcaaatgaacagcctgagagccgaggacacggccgtatattactgtgcgaaagatcaatatagtggctacggaggcctatttgactactggggccagggaaccctggtcaccgtctcctca

SEQ ID NO: 9931 - DNA, 295 bp, Homo sapiens
  source 1..295: mol_type = other DNA
tgcagcctctggattcgcctttaatgcccattggatgagctgggtccgccaggctccagggaaggggctggagtgggtggccaacataaaccaagatggaggtgagaaatactatgtggactctgtgaagggccgattcgccatctccagagacaacgccaagaactctctgtatctgcaaatgagcggcctgagagccgaggacacggccgtctattactgtgcgagggatcatgtgggacctggtgtatactttgactactggggccagggagccctggtcaccgtctcctca

SEQ ID NO: 9932 - DNA, 295 bp, Homo sapiens
  source 1..295: mol_type = other DNA
tgcagcctctggattcacctttagtagctattggatgaactgggtccgccaggctccagggaaggggctggagtgggtggccaacataaaccaagatggaagtgagaaatactatgtggactctgtgaagggccgattcaccatctccagagacaacgccaggaactcactgtatctgcaaatgaacagcctgagagccgaggacacggctgtatattactgtgcgcgagatcatgttggcccaggagtctactttgactactggggccagggaaccctggtcaccgtctcctca

SEQ ID NO: 9933 - DNA, 286 bp, Homo sapiens
  source 1..286: mol_type = other DNA
tgcagcctctggattcacctttggtagttattggatgacctgggtccgccaggctccagggaaggggctggagtgggtggccaacataaagcaaggtggaggtgagaaatactatgtggactctgtgaagggccgattcaccgtctccagagacaacgccaagaactcactgtatctgcaaatgaacagcctgagagccgaggacacggctgtgtattactgtgcgaggggtggccccagaggtatggacgtctggggccaagggaccacggtcatcgtctcttca

SEQ ID NO: 9934 - DNA, 286 bp, Homo sapiens
  source 1..286: mol_type = other DNA
tgcagcctctggattcagctttagtatctattggatgagctgggtccgccaggctccagggaaggggctggagtgggtggccaacataatacaagatggaagtgagaaatactatgtggactctgtgaagggccgattcaccatctccagagacaacgccaagaactcactgtatctgcaaatgaacagtctgagagccgaggacacggctgtgtattattgtgcgagaggagggcctcggggtatggacgtctggggccaagggaccacggtcaccgtctcctca

SEQ ID NO: 9935 - DNA, 289 bp, Homo sapiens
  source 1..289: mol_type = other DNA
tgcagcctctggattcaccttcagtaactactggatgcactgggtccgcctagctccagggaaggggctggtgtgggtctcacgtattaatgaggatgggcgggacacaaactacgcggactccgtgaggggccggttcaccgtctccagagacaacaccaagaacaccctgtatctgcaaatgaacaatctgagagccgaggacacggcgatgtattactgtgcacgaggtgggctggggctgggcattgactactggggccagggaaccctggtcaccgtctcctca

SEQ ID NO: 9936 - DNA, 289 bp, Homo sapiens
  source 1..289: mol_type = other DNA
tgcagcctctggattcaccttcagtaactactggatgcactgggtccgcctagctccagggaaggggctggtgtgggtctcacgtattaatgaggatgggcgggacacaaactacgcggactccgtgaggggccggttcaccatctccagagacaacaccaagaacaccctgtatctgcaaatgaacaatctgagagccgaggacacggcgatgtattactgtgcacgaggtgggctggggctgggcattgactactggggccagggaaccctggtcaccgtctcctca

SEQ ID NO: 9937 - DNA, 289 bp, Homo sapiens
  source 1..289: mol_type = other DNA
tacagcctctggattcacgttcagttactactggattcactgggtccgccaagcttcaggggaggggccggtgtgggtctcccgcattgatggtgatgggagtagcacaatctacgcggactccgtgaagggccgattcaccatctccagagacaacgccaagaaaacactgtatctgcaaatgaacagtctgagagccgaggacacggctgtgtattattgtgcaagagggggactcgggctgggcattgactactggggcaagggaaccctggtcaccgtctcctca

SEQ ID NO: 9938 - DNA, 286 bp, Homo sapiens
  source 1..286: mol_type = other DNA
tgcagcctctggattcatctttaccgactttgccatgacctgggtccgccaggctccagggaaggggctggagtgggtctcaagtattagtgctcgtgctcgtggcacatactacacagactccgtgaggggccggttcaccatctccagagacaattccaagaacacggtgtatctgcaaatgaacggcctgagagtcgacgacacggccgagtattactgtgcgagagggggggtccactactttgactactgcggccagggaaccctggtcaccgtctcctca

SEQ ID NO: 9939 - DNA, 286 bp, Homo sapiens
  source 1..286: mol_type = other DNA
tgcagcctctggattcacctttaccagctatgccatgagctgggtccgccaggctccagggaaggggctggagtgggtctcatctattactggtagtgatgataaaacattctacgcagactccgtgaagggccggttcaccatctccagagacaattccaagaacacgctgtttctgcaaatgaacagcctgagagccgaggacacggccgtatattactgtgcgagagggggagtccactactttgactactggggccagggagccctggtcaccggctcctca

SEQ ID NO: 9940 - DNA, 286 bp, Homo sapiens
  source 1..286: mol_type = other DNA
tgcagcctctggattcacctttagcagctatgccatgagctgggtccgccaggctccagggaaggggctggagtgggtctcagttatttatggcggtggtagtagcacaaactatgcagactccgtgaagggccggttcaccatctccagagagaattccaagaacacgctgtatctgcaaatgaacagcctgagacccgaggacacggccgtatattattgtgcgagaggtggggtccattactttgactactggggccagggaaccctggtcaccgtctcctca

SEQ ID NO: 9941 - DNA, 280 bp, Homo sapiens
  source 1..280: mol_type = other DNA
tgcagcctctggattcacttttggaagttattacttgggctgggtccgccaggctccaggaaaggggctggagtggttggcctacatagtcccagatggaacaaataaatactatgtggattccgtgaagggccgattctccatctccagagacaacgccaggacctcactgtatctgcaaatgaacagcctgagagtcgacgacacggctgtttattactgtgcgagaggacgtgatcctccccactggggccggggaaccctggtcaccgtctcctca

SEQ ID NO: 9942 - DNA, 280 bp, Homo sapiens
  source 1..280: mol_type = other DNA
tgcagcctctggattcacctttagttcatattggatgagctgggtccgccaggctccagggaaggggctggagtgggtggccaacataaggccagatggaagtgataaatactatgtggactctgtgaagggccgattcaccatctccagagacaacgccaagaactcactgtatctgcaaatgaacagcctgagagccgaagacacggctgtgtattactgtgcgagaggcagggaccccccccactggggccagggaaccctggtcaccgtctcctca

SEQ ID NO: 9943 - DNA, 304 bp, Homo sapiens
  source 1..304: mol_type = other DNA
tgcagcgtctggattcagcttcattagttatggcatgcactgggtccggcaggctccaggcaaggggctggagtgggtggcagttatatggtatggtggaagtaggcaattctatgcggactccgtgaagggccgattcaccatctccagagacgatccccagagcaccctgtatctgcaaatgaacagcctcagagacggggacacggctgtttatcactgtgtgaaagggaactacggtgaccacgtcagcggtgatgcttttgatatctggggccaagggacgatggtcaccgtctcctca

SEQ ID NO: 9944 - DNA, 304 bp, Homo sapiens
  source 1..304: mol_type = other DNA
tgcagcgtccggattcagcttcagaagttatggcatgcactgggtccgccaggcaccaggcaaggggctggagtgggtggcagttatttggtatgatgggactaaggaatattatgcagactccgggaagggccgattcaccatctccagagacgactccaagaacatgctttatctacaaatgaacagcctgagagccgaggacacggctttatattactgtgtgaaggggaactacggtgatcacgtttcgggtgatgcttttgatatttggggccaagggacaatgctcaccgtctcttca

SEQ ID NO: 9945 - DNA, 304 bp, Homo sapiens
  source 1..304: mol_type = other DNA
tgtagcgtctggattcatcttcagtcactatggcatgcactgggtccgccaggccccaggcaaggggctggagtgggtggcagttatatggtatgacggaacaaagaaatactatctggactccgtgaagggccgattcaccatctccagagacaattccaagaatacgctgaatttgcaaatgaacagcctgagagccgaggacacggctatgtatttctgtgtcaaagggaactacggtgaccacgtttcgggcgatgcttttgatatctggggccaagggacaatggtcaccgtctcttca

SEQ ID NO: 9946 - DNA, 307 bp, Homo sapiens
  source 1..307: mol_type = other DNA
tgcagcgtccggattcatcttcagtgcctatggcatgcactgggtccgccaggctccaggcaagggactggagtgggtggcagttatatggtatgaagatggaactaaaaaaaactatgcagactccgtgaagggccgattcaccatctccagagacaattccaagagcacgctgcaactgcaaatgaacagcctgagagccgaagacacggctgtgtattattgtgtgaaagggaactacggtgaccacgtttcgggtgatgcttttgatatctggggccaaggggcattggtcaccgtctcgtca

SEQ ID NO: 9947 - DNA, 304 bp, Homo sapiens
  source 1..304: mol_type = other DNA
tgcagcgtccggattcagcttcagaagttttggcatgcattgggtccgccaggccccaggcaaggggctggagtgggtggcagttatatggtatggtggcactaaggaatattatgcagactccgggaagggccggttcaccatctccagagacgactccaagaacgcgctttatctacaaatgaacagcctgagagtcgaggacacggctttatactattgtgtgaaggggaactacggtgatcacgtttcgggtgatgcttttgatatttggggccaagggacaatggtcaccgtctcttca

SEQ ID NO: 9948 - DNA, 292 bp, Homo sapiens
  source 1..292: mol_type = other DNA
cgcagcctctggattcaagtttagtgactattatatgacttgggtccgccaggctccagggaaggggctggagtgggtggccaacataaacgaaaatggaagagtgacataccttgtggagtctgtgaggggccgattcaccgtctccagagacaacgccaagacctcactgtatttagaaatgaacagcctgagagtcgaggacacggctctatattactgtgtgcgggcgggtggacctcacaatcgctttgactattggggccagggaaccctagtcaccgtctcctca

SEQ ID NO: 9949 - DNA, 292 bp, Homo sapiens
  source 1..292: mol_type = other DNA
tgcagcctctggattgagctttagtaactcttggatgggttgcgtccgccaggctccggggaaggggctggagtgggtggccaacataaacccagatggaagtgggacgtactatgtggactctgtgaagggccgattcacaatcttcagagacaacgccaagaactcactgtatctgcaaatggacagcctgagacccgaagacacggccatgtattactgtgtgagagccgggggtccgcataatcgatttgactactggggccagggaaccctggtcaccgtctcctca

SEQ ID NO: 9950 - DNA, 291 bp, Homo sapiens
  source 1..291: mol_type = other DNA
gcttctgattacaccttcgacaactatggtatcagctgggtgcgacaggcccctggagaagggcttgagtggatgggatggatcagcactcacaacggtcacacaaattatgcacagaagatccagggcagcgtcactatgaccacagacacatccacgagcacagcctacatggagttgaggagcctgagatctggcgacacggccgtgtattactgtgcgagagataagggaggaggtcctgatacatttgatgtgtggggccaagggacaatggtcaccgtctcttca

SEQ ID NO: 9951 - DNA, 291 bp, Homo sapiens
  source 1..291: mol_type = other DNA
gcttctggttacacatttatcgactatggtatcagctgggtgcgacaggcccctggacaagggcttgagtggatgggatggatcagcgctcaaaacggtgacacacactatgcgcagagactccagggcagagtcaccatgaccagagacacaaccacgaccacagtgtacatggagatgaggagtcttacatctgacgacacggccatttattactgtgcgagagataagggtgggggcccggatacttttgatgtctggggcccagggacaatggtcaccgtcgcttca

SEQ ID NO: 9952 - DNA, 286 bp, Homo sapiens
  source 1..286: mol_type = other DNA
tgtagcctctggattgaccttaagttcttccccgatgcactgggttcgccaagctccagggaaggggctgatgtgggtctcacgtattggtcttcgtgggagtgacacaacctacgcggactccgtgaagggccgattcaccatctccagagacaacgccaagaacacggtgtggctgcaaatgaacagtctgagagtcgaggatacggctgtgtattactgtgcaggagatcgagggagtgtgggaggcccctggggccagggaaccctggtcatcgtctcctca

SEQ ID NO: 9953 - DNA, 283 bp, Homo sapiens
  source 1..283: mol_type = other DNA
tgcagcctctggattcaccttcagtaggtctccgatgcactgggtccgccaagctccagggaaggggctggtgtgggtctcacgcattgatggtaatgggcttacaacctacgcggagtccgtgaagggccgattcaccttctccagagacgacgccaagaacacggtgtatctgcaaatgaacagtctgacagccgaggacacggctgtatatttctgtgccggagaccggggttctgttggtggcccctggggccagggaaccctggtcaccgtctcctca

SEQ ID NO: 9954 - DNA, 295 bp, Homo sapiens
  source 1..295: mol_type = other DNA
tgcaggctctggattcaccttcaatggcaatagcatgaactgggtccgccaggctccagggaaggggctggagtgggtcgcatccattagtactactagtcgtgacatattctatgcagactcagtgaagggccgattcaccatctccagagacaacgccaagaactcactgtatctgcaaatgaacagcctgagagccgaggacacggctgcgtattactgtgcgaaaagtttaacatcagatcgggactggttcgacccctggggccagggaaccctggtcaccgtctcccca

SEQ ID NO: 9955 - DNA, 295 bp, Homo sapiens
  source 1..295: mol_type = other DNA
tgcagcctctggattcagcatcagtagtcatagcatgaactgggtccgccaggctccagggcaggggctggagtgggtctcatccattagtagtactagtcgtgacatattttacggagactcagtgaagggccgattcaccatctccagagacaacgccaacaatttagtgtttctgcaaatgtacagcctgagaggcgaggacacgggtgtgtattactgtgcgaaatcccttacatcagaccgtgattggttcgacccctggggccagggaaccctggtcattgtctcctca

SEQ ID NO: 9956 - DNA, 288 bp, Homo sapiens
  source 1..288: mol_type = other DNA
gcttctggatacaccatcactgagtctgctgtgcactgggtgcgccaggcccctggacaaggacttcagtggatgggatggatcaacaccgacactgagcaggcaagatatgcccagggcttcagaggacgatttgtcttctccttagacacctctgtcaatacggcatatctccagatccacaacctagaggttgaggacactgccgtgtattattgtacgagagatcgtgggacttatctccgaattgactactggggccagggaaccatggtcaccgtttcctca

SEQ ID NO: 9957 - DNA, 288 bp, Homo sapiens
  source 1..288: mol_type = other DNA
gcttctggatacgccttcactacttctgctatccattgggtgcgacaggcccctggacaagggcttgagtggatgggatgggttaacaccgacactgggaatccaacgtatgtccagggcttcacaggacggtttgtcttctccttggacacctctgtcagcacggcatatctgcagatcagcagcctaaaggctgaggacactgccgtgtattactgtacgagagatcgtggcacctacttgaggatcgactactggggccagggaaccctggtctccgtctcctca

SEQ ID NO: 9958 - DNA, 287 bp, Homo sapiens
  source 1..287: mol_type = other DNA
gcttctggatacagcttcactacttctgctatccattgggtgcgacaggcacctggacaaggacttgagtggatgggatgggtcaacaccgacactgggaatccgacgtatgtccagggcttcacaggacggtttgtcttctccttggacacctctgtcagcacggcatatctgcagatcaacagcctaaaggctgaggacactgccgtgtattactgtacgagagatcgtggcacctacttgaggatcgactactggggccaggggaccctgtctccgtctcctca

SEQ ID NO: 9959 - DNA, 288 bp, Homo sapiens
  source 1..288: mol_type = other DNA
gcttctggatacaccatcactacttctgctatccattgggtgcgacaggcccctggacaagggcttgagtggatgggatggattaacaccgacactgggaatccaacgtatgtccagggcttcacaggacggtttgtcttctccttggacacctctgtcaacacggcatatctgcagatcagcagcctaaaggctgaggacactgccgtctattactgtacgagagatcgtggcacctacttgaggatcgactactggggccagggaaccctggtctccgtctcctca

SEQ ID NO: 9960 - DNA, 289 bp, Homo sapiens
  source 1..289: mol_type = other DNA
tgcagcctctggattcacctttagcagctatgccatgagctgggtccgccaggctccagggaaggggctggagtgggtctcagttatctatagaggtggtagtagcacatactatgcagactccgtgaagggccggttcaccatctccagagatacttccaagaacacgctgtatctgcaaatgaacagcctgagagccgaggacacggccgtctattactgtgcgaaagatcggagtggctggcaatatgactactggggccagggaaccctggtcaccgtctcctca

SEQ ID NO: 9961 - DNA, 289 bp, Homo sapiens
  source 1..289: mol_type = other DNA
tgcagcctctggattcacctttagcacctatgccatgagctgggtccgccaggctccagggaaggggctggagtgggtctcaattatttctggcggtggtactgtcacatactatgcagactccgtgaagggccggttcaccatctccagagataattccaagaacacgttgtatctgcaaatgaacagcctgagagccgaggacacggccgtatattactgtgcgaaagataggagtggctggcagtacgactactggggccagggaaccctggtcaccgtctcccca

SEQ ID NO: 9962 - DNA, 295 bp, Homo sapiens
  source 1..295: mol_type = other DNA
cactgtctctggtggctccataagtagttactactggagctggatccgacagcccccggggaagggactggagtggattgggtatatctattacagtgggagcaccaactacaacccctccctcaagagtcgagccaccatatcagtagacacgtccaagaaccagttctccctgaagctgagctctgtgaccgctgcggacacggccgtgtattactgtgcgagagaaggagatggctacaacttgtactactttgactactggggccagggaacccaggtcaccgtctcctca

SEQ ID NO: 9963 - DNA, 295 bp, Homo sapiens
  source 1..295: mol_type = other DNA
cactgtctctggtggctccatcagtacttactactggacctggatccggcagcccccaggaaagggactggagtggattggctatatctattacactgggaccaccaactacaacccctccctcaggagtcgagtcaccatatcagcagacacgtccaagaaccagttctccctgaagctgaactctgtgacccctgcggacacggccgtgtactactgtgcgagagagggagatggctacaacctctactactttgactactggggccagggaaccctggtcaccgtctcctca

SEQ ID NO: 9964 - DNA, 295 bp, Homo sapiens
  source 1..295: mol_type = other DNA
cactgtttctggtggctccatcagtagtttctactggagctggatccgacagcccccagggaagggactggagtggattggatatatctattacactgggagcaccgacttcaacccctccctcaagagtcgagccaccatatcactagacacgtccaagaatcaattctccctgaggctgagctctgtgaccgctgcggacacggccgtctattactgtgcgagagagggagatggctacaacttatactactttgactactggggacagggaaccctggtcaccgtctcctca

SEQ ID NO: 9965 - DNA, 295 bp, Homo sapiens
  source 1..295: mol_type = other DNA
cactgtctctggtggctccatcagtacttattactggagctggatccggcagttcccagggaagggactggaatggattggctatatctattacactgggacctccaactacaaccccaccctcaggagtcgagtcaccatatcatcagacacgtccaagaaacagttcttcctgaggctgacgtctgtgaccgctgcggacacggccgtttattactgtgcgagagagggagatggctacaacctatactactttgactattggggccagggaaccctggtcaccgtctcctca

SEQ ID NO: 9966 - DNA, 277 bp, Homo sapiens
  source 1..277: mol_type = other DNA
cactgtctctggtggctccatcagcagcggtagttactgctggcactggatccggcagcccgccgggaagggactggagtggattgggcgtgtctgtaccagtgggagcaccgactacaacccctccctcaagagtcgcgtcaccatatcaatagacacgtccgagaaccagttctccctgaagctgagctctgtgaccgccgcagacacggccgtgtattactgtgcgagcgacctaggctactggggccagggaaccctggtcaccgtctcctca

SEQ ID NO: 9967 - DNA, 277 bp, Homo sapiens
  source 1..277: mol_type = other DNA
cactgtctctggtggctccatcagcagtggtagttactactggagctggatccggcagcccgccgggaagggactggagtggattgggcgtatctataccagtgggagcaccaactacaacccctccctcaagagtcgagtcaccatatcagtagacacgtccaagaaccagttctccctgaagctgagctctgtgaccgccgcagacacggccgtgtattactgtgcgtcagacttgggctactggggccagggaaccctggtcaccgtctcctca

SEQ ID NO: 9968 - DNA, 310 bp, Homo sapiens
  source 1..310: mol_type = other DNA
tgcagcctctggattcatcttcagtagctactggatgcactgggtccgccaagctccagggaaggggctggtgtgggtctcacgtattaaaagtgacgggagtagcacaagctacgcggactccgtgaagggccgattcaccatctccagagacaacgccaagaacacgctgtatctgcaaatgaacagtctgagagccgaggacacggctgtgtattactgtgcaagggctcggtattgtagtggtggtagctgctattactacggtatggacgtctggggccaagggaccacggtcaccgtctcctca

SEQ ID NO: 9969 - DNA, 310 bp, Homo sapiens
  source 1..310: mol_type = other DNA
tgcagcctctggattcaccttcagtagctactggatgcactgggtccgccaagctccagggaaggggctggtgtgggtctcacgtattaatagtgatgggagtagcacaaactacgcggactccgtgaagggccgattcaccatctccagagacaacgccaagaacacgctgtatctgcaaatgaacagtctgagagccgacgacacggctgtgtattactgtgcaagagcccgatattgtagtggtggtagctgctactactacggtatggacgtctggggccaagggaccacggtcaccgtctcctca

SEQ ID NO: 9970 - DNA, 289 bp, Homo sapiens
  source 1..289: mol_type = other DNA
tacaacctctggattcacctttggcagctatgccatgacctgggtccgccaggctccagggaaggggctggagtgggtctcaactataagtggtaggggagatattacatacaacgcagactccgtgaagggccggttcaccatctccagagacaattccaaggacacggtgtatctgcaaatgaacagcctgagagccgaggacacggccttatattactgtgcgaagggtggtcattactccgtattcgacccctggggccagggaatcctggtcaccgtctcgtca

SEQ ID NO: 9971 - DNA, 289 bp, Homo sapiens
  source 1..289: mol_type = other DNA
tacagcctctggattgacctttagctcatatgccatgacttgggtccgccagactccagggaaggggctggagtgggtctcaactattagtggtagtggtcgtgacacatattatggagactccgtgaagggccggttcaccatctccagagacaattccaagaacacgttctatctgcaaatgaacagcctgaaagccgaggacacggccatatattactgtgcgaaaggggggcattacagtgtgttcgacccctggggccagggaaccctggtcaccgtctcctca

SEQ ID NO: 9972 - DNA, 289 bp, Homo sapiens
  source 1..289: mol_type = other DNA
ttcagcctccggattgacctttggatcatatgccgtgacttgggtccgccagagtccagggaagggtctggagtgggtctcaactattagtggtaatggtcgtgacacatattatggagactccgtgaagggccggttcaccatttccagagacattttcaaaaacacgtgctatctgcaaatgaacagcctgaaagtcgaggatacggccatatattactgtgcgaaaggggggcattacagtgtgttcgacccctggggccagggaaccccggtcaccgtctcctca

SEQ ID NO: 9973 - DNA, 289 bp, Homo sapiens
  source 1..289: mol_type = other DNA
cactgtctctggtggctccatcagtggttactactggagctggatccggcagtccccagggaagggactggagtggactgggaatatctattacagtgggagcaccaactacaacccctccctcaagagtcgagtcaccatgtcagtagacaggtccaagaaccagttctccctgaaactgacctctgcgaccgctgcggacacggccgtgtatcactgtgcgagaaggagcaacagcgagaactactttgactactggggccagggagccctggtcacagtctccgca

SEQ ID NO: 9974 - DNA, 289 bp, Homo sapiens
  source 1..289: mol_type = other DNA
cactgtctctggtggctccatcagtggttactactggagctggatccggcagtccccagggaagggactggagtggactgggaatatctattatagtgggagcaccaactacaacccctccctcaagagtcgagtcaccatgtcagtagacaggtccaagaaccagttctccctgaaactgacctctgcgaccgctgcggacacggccgtgtatcactgtgcgagaaggagcaacagcgagaactactttgactactggggccagggagccctggtcaccgtctccgca

SEQ ID NO: 9975 - DNA, 289 bp, Homo sapiens
  source 1..289: mol_type = other DNA
cactgtctctggtggctccatcagtggttactactggagctggatccggcagtccccagggaagggactggagtggactgggaatatctattacagtgggagcaccaactacaacccctccctcaagagtcgagtcaccatgtcagtagacaggtccaagaaccagttctccctgaaactgacctctgcgaccgctgcggacacggccgtgtatcactgtgcgagaaggagcaacagcgagaactactttgactactggggccagggagccctggtcaccgtctccgca

SEQ ID NO: 9976 - DNA, 289 bp, Homo sapiens
  source 1..289: mol_type = other DNA
cactgtctctggtggctccatcagtagttactactggagctggatgcggcagcccccagggaagggactggagtggattggctatataaattacagtgggagcaccaactacaacccctccctcaagagtcgagtcaccatatcagtagacacgtccaagaaccagttctccctgaagctgagctctgtgaccgccgcagacacggccgtgtattactgtgcgagacgctccaactctgagaactactttgactactggggccggggaaccctggtcaccgccgcctca

SEQ ID NO: 9977 - DNA, 307 bp, Homo sapiens
  source 1..307: mol_type = other DNA
cactgtttctggtggctccatcaacagtttttactactggggctggatccgccagcccccagacaaggggctggagtggattgggagtatctattatagtgggagcacctattacaacccgtccctcaagagtcgagtcaccatatccgtagacacgtccaagaaccagttctccctgaagctgaggtctgtgaccgccgcagacacggctgtgtattactgtgcgagacgggattgtagtagtaccagctgctctaccaactggttcgacccctggggccagggaaccctggtcatcgtctcctca

SEQ ID NO: 9978 - DNA, 307 bp, Homo sapiens
  source 1..307: mol_type = other DNA
cactgtctctggtggctccatcagcagtagttactactggggctggatccgccagtccccagggaaggggctggagtggattgggagtatctattatactgggaccacctactacaacccgtccctcaagagtcgagtcaccatatccggagacacgtccaagaaccagttctccctgaagctgaggtctgtgaccgccgcagacacggctgtgtattactgtgcgagacgagattgtagtagtaccagctgctcaacgaactggttcgacccctggggccagggaaccctggtcaccgtctcctca

SEQ ID NO: 9979 - DNA, 295 bp, Homo sapiens
  source 1..295: mol_type = other DNA
tgaagccagcgggttcagctcaagcaactatgtcatggcttgggtccgccaggctccagggaagggactggagtgggtctcaagtctcactcagagtggtcgcacacactacgcgggctccgtgaagggccgctttaccgtctccagagacaattcgcagaactcgctgtctctgcaactgaccaacctgatggtcgaggacacggccacatatcactgtgcgaaagggaagagtggtggtctcctcgactggttcgacccctggggcccgggaaccccggtcaccgtctcgtca

SEQ ID NO: 9980 - DNA, 295 bp, Homo sapiens
  source 1..295: mol_type = other DNA
tgcagcctctggattcaaaattagtgactatgtcgttacctgggtccgccagggtccaggtaaccggctggagtgggtctcaagtcttactgcaattgggaatacacactatgcagactccgtgaagggccggttcaccgtctccagagacaattccgacaacatgttgtatttggaaatgaacaacctgagagccgacgacacggccgtatacttttgtgccaaaggaaaatcaggtggtctacttgattggttcgacccctggggccagggaaccctggtcaccgtctcctca

SEQ ID NO: 9981 - DNA, 280 bp, Homo sapiens
  source 1..280: mol_type = other DNA
tgcagcctctggattcaccttcattagttatgatatgaactgggtccgccaggctccagggaaggggctggagtgggtttcatacattagtagtggtggtaataccatatattacacagactcggtgaagggccgattcaccatctccagagacaacgccaagaactcactgtatctgcaaatgaacagcctgagagccgaggacacggctgtttactactgtgcgagagggaaagcgggcggctactggggccagggaactctggtcaccgtctcctca

SEQ ID NO: 9982 - DNA, 280 bp, Homo sapiens
  source 1..280: mol_type = other DNA
tgcagcctctggattccccttcagtatttatgaattgaactgggtccgccaggctccagggaaggggctggagtgggtttcatacattagtagtagtggtagtgccagatactacgcagactctgtgaagggccgattcaccatctccagagacaacgccaagaactcactgtatctgcaaatgaacagcctgagagccgaggacacggctgtttattactgtgcgagagggaaggctggaggatactggggccagggaaccctggtcaccgtctcctca

SEQ ID NO: 9983 - DNA, 286 bp, Homo sapiens
  source 1..286: mol_type = other DNA
cactgtctctggtgagtccattagaagtgactattggagctggatccggcagtccccagggaagggactggagtggattgggtacatctactacagtggaagcaccgagtacaacccctccctcaaccgtcgagtcaccatatcaatagacacatccaagaagaaccagttcctcctggacctgacctctgtgaccgctgcggacacggccgtgtatttctgcgcgagatggaggacaggctggttcgacccctggggcgaggggatcctggtcaccgtctcctca

SEQ ID NO: 9984 - DNA, 283 bp, Homo sapiens
  source 1..283: mol_type = other DNA
cactgtctctggcgaccccattgccagcgactattggagttggatccggcagtccccaggaaagggactggagtggattggatatatctattatagtgggagcaccgactacaacgcctccctcaggagtcgagtcaccatttcagtagacaggtccaagaagcagttctccctgaaactgaactctgtgaccgctgcggacacggccgtatattattgtgcgagatggcgaacggggtggttcgacccctggggccagggaacccgggtcactgtctcctca

SEQ ID NO: 9985 - DNA, 316 bp, Homo sapiens
  source 1..316: mol_type = other DNA
tgcagcctctggattcattttcagtgaccactacatggactgggtccgccaggctccagggaaggggctggagtgggttggccgtattaaaaacaaagctgaccgttacaccacacaatacgccgcgtctgtgaaaggcagattcaccatctcaagagatgattcaaagaactcactgtctctgcaaatgaacagcctgaaaaccgaggacacggccgtgtattactgtgttagaggggggataggttattgtagtagcaccacctgctatgatcttgactactggggccagggaaccctggtcaccgtctcctca

SEQ ID NO: 9986 - DNA, 316 bp, Homo sapiens
  source 1..316: mol_type = other DNA
tgcagcctctggattcaccttcagtgaccactacatggactgggtccgccaggctccagggaaggggctggagtgggttggccgttgtagaaacaaagctaagagttacaccacagactacgccgcgtctgtgaaaggcagattcatcgtctcaagagatgattcaaaaaactcactgtatctgcaaatgaacagcctgaaaaccgaggacacggccgtgtatttctgtgttagagggggtataggatattgtagtagcactacctgctatgacctggactactggggccggggaaccctggtcaccgtctcctca

SEQ ID NO: 9987 - DNA, 286 bp, Homo sapiens
  source 1..286: mol_type = other DNA
tgcagcctcgggattcactttcagtacctatagcatgaactgggtccgccaggctccagggaaggggctggagtggatttcatacattggtagtagtagtagtaccatatcctacgcagactctgtgaagggccgattcaccatctccagagacaatgccaagaactcactggatctgcaaatgaacagcctgagagacgaggacacggctgtctattactgtgcgagagactccgcatgggcgttcgactcctggggccagggaaccctggtcaccgtctcctca

SEQ ID NO: 9988 - DNA, 289 bp, Homo sapiens
  source 1..289: mol_type = other DNA
tgcagcctctggattcacattcaaaacttaccccatgaactgggtccgccaggctccagggaaggggctggagtggatttcaaacattcgtactagtactgaaggtggcgtcacttacgcagagtctgtgaagggccgattcaccgtctccagagacgacgcccagaacttaatgtttctgcaaatgagcagcctgagagccgaggacacggctagatactactgtgcgagagacagcgcctgggcattcgactcctggggccagggagccttggtcaccgtctcccca

SEQ ID NO: 9989 - DNA, 295 bp, Homo sapiens
  source 1..295: mol_type = other DNA
cactgtctctggtggctccatcagtagttactactggagctggatccggcagcccccagggaagggactggagtggattgggtacatctattatagtgggagcaccaactacaacccctccctcaagagtcgagtcaccatatcagtagacacgtccaagaaccagttctccctgaagctgagctctgtgaccgctgcggacacggccgtgtattactgtgcgagagcgcaacgtggatacagctatggtccatttgactactggggccagggaatcctggtcaccgtctcctca

SEQ ID NO: 9990 - DNA, 295 bp, Homo sapiens
  source 1..295: mol_type = other DNA
cactgtctctggtggctccatcagtagttactactggagctggatccggcagcccccagggaaagaactggagtggattgggtatattaattacagtgggagcaccaactacaatccctccctcaagagtcgagtcaccatatcagtagacacgtccaagaaccagttctccctgaagctgagctctgtgaccgctgcggacacggccgtgtattactgtgcgagagcccaacgtggatatagctacggtccctttgactactggggccagggaaccctggtcaccgtctcctca

SEQ ID NO: 9991 - DNA, 277 bp, Homo sapiens
  source 1..277: mol_type = other DNA
tgcagcctctggattcacctttagcagctatggcatgagttgggtccgccaggctccagggaaggggctggagtgggtctcaggtattagtggtagtggtggtagcacatactacgcagactccgtgaagggccggttcaccatctccagagacaattccaagaacacgctgtatctgcaaatgaacagcctgagagccgaggacacggccgtatattactgtgggggggctgctattggctactggggccagggaaccctggtcaccgtctcctca

SEQ ID NO: 9992 - DNA, 277 bp, Homo sapiens
  source 1..277: mol_type = other DNA
tgcagcctctggattcacctttcgcagctatgccatgagctgggtccgccagactccagggaaggggctggaatgggtctcaggtattagagttagtgatggtaacacatactacgcagactccgtgaagggccggttcaccatctccagagacaattccaagaacacgctgtatatgcaaatgaacagcctgagagccgaggacacggccgtatattactgtgggggagctgctattggctactggggccagggaaccctggtcaccgtctcctca

SEQ ID NO: 9993 - DNA, 292 bp, Homo sapiens
  source 1..292: mol_type = other DNA
tgcagcgtctggattcaccttcagaacctatggcatgcactgggtccgccaggctccaggcaaggggctggagtgggtgacagttatttggtctgatggaaataataaattctatgcagagtccgtgaagggccgattcaccgtctccagagacaattccaagaacacgctggatctgcaaatgaacagcctgagagccgaggactcggctgtgtattattgtgtgaaagaggttggcccttttagtgggtttgactactggggccagggaaccctggtcaccgtctcctca

SEQ ID NO: 9994 - DNA, 292 bp, Homo sapiens
  source 1..292: mol_type = other DNA
tgcagcgtctggattcaccttcagtcgctatggcatgcactgggtccgccaggctccaggcaaggggctggagtgggtggcagttatatggtctaatggaataaatcaatattatgcagattctgtgaggggccgattcaccttctccagagacaattccaggaacacgctggatctccaaatgaacagcctgagagccgaggacacggctgtgtacttctgtgtgaaagaagtgggacctttctcgggctttgactactggggccagggagccctggtcaccgtctcttca

SEQ ID NO: 9995 - DNA, 292 bp, Homo sapiens
  source 1..292: mol_type = other DNA
tgaagcctctggattcacctttattgggtactggatgacctgggtccgccaggctccagggaaggggctggagtgggtggccaacataaaagaggatggaagtgagaaatggtatgtggactctgtgaagggccgattcaccatctccagagacaacgccaagaactccatctatctgcaaatgaacagcctgagagtcgaggacacggctgtgtattactgtgcgagatacgctaacggctactatggtatggacgtctggggccaagggaccacggtcaccgtgtcctca

SEQ ID NO: 9996 - DNA, 292 bp, Homo sapiens
  source 1..292: mol_type = other DNA
cacagcctctggattcacctttagtcacttttggatgacctgggtccgccaggctccagggaaggggctggagtgggtggccaacataaaggaagatggaagtcagggatactatgtggattctgtgaagggccgattcaccgtctccagagacaacgccaagaattcacaatatctgcaaatgaacagcctgagagtcgacgacacggctgtgtattactgtgcgagatacgcaaatggttactatggtatggacgtctggggccaagggaccacggtcaccgtctcctca

SEQ ID NO: 9997 - DNA, 298 bp, Homo sapiens
  source 1..298: mol_type = other DNA
tgcagcctctggattcaccttcagtgactactacatgggctggttccgccaggctccagggaaggggctggagtggatttcatacattagtaatagtggtgataccatctcctactctgactctgtgaagggccgattcaccctctccagggacaacgccaggaactcactgtttctgcaaatgaacagcctgagagccgaggacacggccgtgtattactgtgcgagagtgggggtgatagtggcagctggaacctatgactactggggccagggaaccctggtcaccgtctcctca

SEQ ID NO: 9998 - DNA, 298 bp, Homo sapiens
  source 1..298: mol_type = other DNA
tgcagcctctggattcaccttcagtgactactacatgagctggatccgccaggctccacggaaggggctggagtgggtttcatacattagcagtagtggcgagaccatatactactcagactctgtgaagggccgattcatcatctccagggacaacgccaagaactcactgtatctgcaaatgaacagcctgagagccgaggacacggccgtgtattactgtgcgagagtaggagtgatagtagcagctggtacctatgactactggggccagggaaccctggtcaccgtctcctca

SEQ ID NO: 9999 - DNA, 280 bp, Homo sapiens
  source 1..280: mol_type = other DNA
tgcagcctctggattcaatttcagtgacgcctggatggtctgggtccgccaggctccagggaaggggctggagtgggttggccgtattaaaagcaaaactgatggtggggcaatagattacgctgtacccgtgaaaggcagattcaccatctcaagagatgattcaaaaaacatggtgcatctagaaatgaacagcctgaaaaccgaggacacagccctctattactgttcttgggtaggcgccgcctggggccagggaaccctggtcaccgtctcatca

SEQ ID NO: 10000 - DNA, 280 bp, Homo sapiens
  source 1..280: mol_type = other DNA
tacagcctctggattcactttcagcgacgcctggatgtattgggtccgccaggctcctgggaaggggctggagtgggttggccatattaagagtaagactgatggcgggacaatagattacgctggccccgtgaaaggaagattcatcgtctcgagagatgattcaaaaaacactctgtttctccaaatgaacggtctgaaaattgaagacacagccaaatattattgttcgtgggtgggagcggcctggggccagggaagtctggtcaccgtctcctca

SEQ ID NO: 10001 - DNA, 283 bp, Homo sapiens
  source 1..283: mol_type = other DNA
tgcagcctctggattcagcctcagtagctactggatgcactgggtccgccaagttccagggaaggggctggtgtgggtctcacgtattaatggtgatgggagtagcacaacctacgcggactccgtgaagggccgattcaccatctccagagacaacgccaagaacacgctgtatctgcaaatgaacagtctgagagtcgaggacacggcggtgtattactgtgccagagccttaggctattcggcctactggggccagggaaccctggtcaccgtctcctca

SEQ ID NO: 10002 - DNA, 283 bp, Homo sapiens
  source 1..283: mol_type = other DNA
tgcagcctctggattcaccttcagtacctactggatgcactgggtccgccaggctccagggaaggggctggtgtgggtctcaggtattaatggtgacggcagcatcacaacctacgcggactccgtgaagggccgattcaccatctccagagacaacgccaagaacacgctggatctgcaaatgaacagtctgagagccgaggacacggctctgtattactgtgcaagagctctaggatatagtgcctactggggccagggaaccctggtcaccgtctcctca

SEQ ID NO: 10003 - DNA, 277 bp, Homo sapiens
  source 1..277: mol_type = other DNA
tgcagcctctggattcacctttagtagctattggatgacctgggcccgccaggctccagggaaggggctggagtgcgtggccaacataaagcaaggtggaagtgacacttcctatgtggactctgtgaagggccgattcaccatctccagagacaacgccaagaactcagtgtatctgcaaatgaacagcctgagagccgaggacacggctgtctactactgtgcgattggtagcgggtcccactggggccagggaacactggtcaccgtctcttca

SEQ ID NO: 10004 - DNA, 277 bp, Homo sapiens
  source 1..277: mol_type = other DNA
tgcagcctctggattcacctttagtaactcttggatgagctgggtccgccaggctccagggaaggggctggagtgggtggccatcataaaccaagatggaagtgaaaaatactatgtggactctgtgaagggccgattcaccatctccagagacaacgccaagaactcactgtatctccaaatgaacagcctgagacccgaggacacggctctgtattactgtgcaataggaagtggcagtcactggggccggggaaccctggtcaccgtctcctca

SEQ ID NO: 10005 - DNA, 277 bp, Homo sapiens
  source 1..277: mol_type = other DNA
tgcagcctctggattcacctttagtaactcttggatgagctgggtccgccaggctccagggaaggggctggagtgggtggccatcataaaccaagatggaagtgaaaaatactatgtggactctgtgaagggccgattcaccatctccagagacaacgccaagaattcactgtatctccaaatgaacagcctgagacccgaggacacggctctgtattactgtgcaataggaagtggcagtcactggggccagggaaccctggtcaccgtctcctca

SEQ ID NO: 10006 - DNA, 277 bp, Homo sapiens
  source 1..277: mol_type = other DNA
tgcagcctctggattcacctttagtaactcttggatgagctgggtccgccaggctccagggaaggggctggagtgggtggccatcataaaccaagatggaagtgaaaaatactatgtggactctgtgaagggccgattcaccatctccagagacaacgccaagaactcactgtatctccaaatgaacagcctgagacccgaggacacggctctgtattactgtgcaataggaagtggcagtcactggggccagggaaccctggtcaccgtctcctca

SEQ ID NO: 10007 - DNA, 295 bp, Homo sapiens
  source 1..295: mol_type = other DNA
tgcagcctctggattcacctttagtagttatgcaatggactgggtccgccaggctccagggaaggggctggagtgggtttcatacattagtagtagtggtagtaccatatactacgcagactctgtgaagggccgattcaccatctccagagacaacgccaagaactcactgtatctgcaaatgaacagcctgagagccgaggacacggctgtttattactgtgcgagagtcgcgtggatacagctatggttctttgactactggggccagggaaccctggccaccgtctcctca

SEQ ID NO: 10008 - DNA, 295 bp, Homo sapiens
  source 1..295: mol_type = other DNA
tgcagcctctggattcagcttcagtagctatagcatgagctgggtccgccaggctccagggaaggggctggagtgggtttcacacattagtagcagtagtgattccatatactacgcagactctgtgaagggccgattcaccatctccagagacaatgccaagaactcactgtatttgcaaatgaacagcctgagaggcgaggacacggctgtctattactgtgcgagggtggcgtggatacaactatggttctttgactactggggccagggaaccctggtcaccgtctcctca

SEQ ID NO: 10009 - DNA, 298 bp, Homo sapiens
  source 1..298: mol_type = other DNA
tgcagcgtctggattcaccttcagtagctatggcatgcactgggtccgccaggctccaggcaaggggctggagtgggtggcagttatatggtatgatggaagtaataaatactatgcagactccgtgaagggccgattcaccatctccagagacaattccaaggacacgctgtatctgcaaatgaacagcctgagagccgaggacacggctgtgtattactgtacgagaggtgggaccgggtatagcagcagctggtacctctactggggccagggagccctggtcaccgtctcctca

SEQ ID NO: 10010 - DNA, 298 bp, Homo sapiens
  source 1..298: mol_type = other DNA
tgcagcctctggattcaccttcagtagttatggcatgcactgggtccgccagggtccaggcaaggggctggagtgggtggcagttatatggtatgatggaagtaataaatactatgcagactccgtgaagggccgattcaccatctccagagacaattccaagaacacgctctatctgcaaatgaacagcctgagagccgaggacacggctgtgtattactgtacgagaggggggaccgggtatagtagcagttggtacctctactggggccagggaaccctagtcaccgtctcctca

SEQ ID NO: 10011 - DNA, 298 bp, Homo sapiens
  source 1..298: mol_type = other DNA
tgcagcctctggattcaccttcagtaactatggcatgcactgggtccgccagggtccaggcaaggggctggagtgggtggcagttatatggtatgatggaagtaataaatactatgcagactccgtgaagggccgattcaccatctccagagacaattccaagaacacgctctatctgcaaatgaacagcctgagagccgaagacacggctgtgtattactgtacgagaggggggaccgggtatagtagtagttggtacctctattggggccagggaatcctagtcaccgtctcctca

SEQ ID NO: 10012 - DNA, 283 bp, Homo sapiens
  source 1..283: mol_type = other DNA
tgcagcctctggattcacctttaccacctataccataaactgggtccgccaggctccagggaaggggctggagtgggtttcagctattagtggtagtggcgataccacatactacgcagactccgtgaagggccggttcaccatctccagagacaattccaggaacacggtgtatctgcaaatgaacagcctgagagccgaggacacggccgaatattactgtgcgaggtctaactggggctttgactactggggccagggaaccctggtcaccgtctcctca

SEQ ID NO: 10013 - DNA, 283 bp, Homo sapiens
  source 1..283: mol_type = other DNA
tgcagcctctggattcaggtttagcagctataccatgagctgggtccgccaggctccacggaaggggctggagtgggtctcaagtattagtgataatggtggtagcacatactacctagactccgtgaagggccggttcaccatctccagagacaattccaagaacaccctgtatctgcaaatgaacagcctgagagccgaggacacggccatatattactgtgcgagaagtaactggggctttgactactggggccagggaaccctggtcaccgtctcctca

SEQ ID NO: 10014 - DNA, 283 bp, Homo sapiens
  source 1..283: mol_type = other DNA
tgcagtctctggactcaggtttagcagctacaccatgagttgggtccgccaggctccacggaagggactggagtgggtctcaagtatcagtgataacggtattggcacatactacttagactccgtgaagggccggttcaccatctccagagacaattccaagagtatcctatatctgcaaatgagcagcctgagagccgaggacacggccatctattattgtgcgagaagtaactggggctttgactactggggccagggaaccctggtcaccgtctcctca

SEQ ID NO: 10015 - DNA, 283 bp, Homo sapiens
  source 1..283: mol_type = other DNA
tgcagcctctggattcacatttcatatatattcgatgtactgggtccgccaacctccagggaaggggctggtgtgggtctcacgtattagtcctgatggcagcagtacaaactacgcggactccgtggagggccgattcaccgtctccagagacaacgccaggaataccctatatctgcaaatgaacagtctgagagccgaggacacggctgtttattattgtgtaagggccacttggtacttcgatttctggggccgtggcaccctggtcactgtctcctca

SEQ ID NO: 10016 - DNA, 283 bp, Homo sapiens
  source 1..283: mol_type = other DNA
tgcagcctctggattcagcttcagtgactactccatgtattgggtccgccaggctccagggaaggggctggtgtgggtctcacgtatcaatggtgatgggactgacacaacgtatgcggactccgtgaagggccgcttcaccatctccagagacaacgccaagaacactctctatctgcaaatgaacagcctgagagccgacgacacggctgtgtttcattgtgtcagagccacctggtacttcgatttctggggccgtggcaccctggtcactgtctcctca

SEQ ID NO: 10017 - DNA, 280 bp, Homo sapiens
  source 1..280: mol_type = other DNA
tgcagcctctggattcaccttcagcagctatgccatgagctgggtccgccaggctccagggaaggggctggagtgggtctcagctattagtggtagtggtagtagcacatactacgcagactccgtgaagggccggttcaccatctccagagacaattccaagaacacgctgtatctgcaaatgaacagcctgagagccgaggacacggccgtatataactgtgcgaggggagaacggactgactactggggccagggaaccctggtcaccgtctcctca

SEQ ID NO: 10018 - DNA, 280 bp, Homo sapiens
  source 1..280: mol_type = other DNA
tgaagtctctggattcacctttagtagctttaccatgacctgggtccgccaggctccagggaaggggctggagtgggtctcaactgttagtgcttccggtattagcacatactacgcagactccgtgaagggccgcttcaccagctccagagacaattccaggaacacgctgtttctgcaaatggacagcctgagagccgaggacacggccgtatattactgtgcgcggggggaacggactgactactggggccagggaaccctggtcaccgtctcctca

SEQ ID NO: 10019 - DNA, 307 bp, Homo sapiens
  source 1..307: mol_type = other DNA
tgcagcctctggatttacctttagcacctacgccatgacctgggtccgccaggcgccagggaaggggctggagtgggtctcgagtattagtgcaagcacattttatacaatctacgcggactccgtgaagggccggttctccatctccagagacaattccaagaacacggtgcatctggaaatgaacagcctgagagccgaggacacggccgtatattattgtgcgaagaggggggccgatggaacggcactgggacactggtacttcgatctctggggccgtggcaccctggtcactgtctcctca

SEQ ID NO: 10020 - DNA, 307 bp, Homo sapiens
  source 1..307: mol_type = other DNA
tgcagcctctggattcacctttagcacctatgccatgagctgggtccgccagactccagggaaggggctggagtgggtctcatctattagtggtaatgctgctaacacatactacgcagactccgtgaaggaccggttcaccatctccagagacaattccaagaacacggtgcatctgcaaatgaacagcctgagagccgaggacacggccgtatatttctgtgcgaagcgtggggctgatgggaccgctttgggtcattggtacttcgatctctggggccgtggcaccctggtcactgtctcctca

SEQ ID NO: 10021 - DNA, 283 bp, Homo sapiens
  source 1..283: mol_type = other DNA
tgcagcctctggattcacctttactgattattggatgagctgggtccgccaggctccagggaaggggctggagtgggtggccaacataaagcaagatggaagtgagaaatattatgtggactctgtgaagggccgattcaccatctccagagacaacgccaagagatcattgtatctgcaaatgaacagcctgagagccgaggacacggctgtgtattactgtgcctcacacagtagtggttattacgtttggggccagggaaccctggtcaccgtctcctca

SEQ ID NO: 10022 - DNA, 283 bp, Homo sapiens
  source 1..283: mol_type = other DNA
tagagcctcaggaatcaattttagcttctggtggatgagctgggtccgccaggctccagggaaggggctggagtgggtggccaatataaagccagatggaagtgagaagtactatgtggactctgtaaacggccgattcaccatctccagagacaacgccaagacctcactatatctgcaaatgaatagcctgagacccgaggacacggctttgtattactgtgcgagtcacagtagtggctattatgtctggggccggggaaccctggtcaccgtctcctca

SEQ ID NO: 10023 - DNA, 283 bp, Homo sapiens
  source 1..283: mol_type = other DNA
tagagcctcaggaatcaattttagtttttggtggatgagctgggtccgccaggctccagggaagggactggagtgggtggccaatataaagccagatggaagtgagaagtactatgtggactctgtaaacggccgattcaccatctccagagacaacgccaagacctcactatatctgcaaatgaatagcctgagacccgaggacacggctttgtattactgtgcgagtcacagtagtggctattatgtctggggccggggaaccctggtcaccgtctcctca

SEQ ID NO: 10024 - DNA, 289 bp, Homo sapiens
  source 1..289: mol_type = other DNA
tgcagcctctggattcaccttcactagctatgctattcactgggtccgccaggctccaggcaaggggctggagtgggtggcagttgtatcatctgatggaagtaataagtcctacctagagtccgtgaagggccgattcaccatctccagagacaattccaagaacacgttgtatctgcagctgaacagcctgagagctgaggactcggctgtgtattactgtgcgagacttccgcccgggaccggctttgactactggggccagggaaccctggtcaccgtctcctca

SEQ ID NO: 10025 - DNA, 289 bp, Homo sapiens
  source 1..289: mol_type = other DNA
tgcagcctctggatacaccttcaccagctatgctatacactgggtccgccaggctccaggcaaggggctggagtgggtggcagttgtgtcatctgatggaaataataaattctacgcagactccgtgaagggccgattcgccatctccagagacaattccaagaacacacagtatctgcaaatgaacagcctgagagctgaagacacggctgtgtattactgcgcgagactcccgcccggtactggttttgactattggggccagggtgccttggtcaccgtctcctca

SEQ ID NO: 10026 - DNA, 293 bp, Homo sapiens
  source 1..293: mol_type = other DNA
gcatctccggagacactgtctctaacaagtatgtttcttggaactggatcaggcagtccccatcgagaggccttgagtggctgggaaggacacactacacgtccaaatgggattttgattatgcagtatctgtgaaaagtcgaataatcttcaacgcagacacatccaagaaccagttctccctgcagctgaactctgtgactcccgaggacacggctgtgtattactgtgcgagaagtaagaactacgcctttgactactggggccagggaatcttggtcaccgtctcgtca

SEQ ID NO: 10027 - DNA, 293 bp, Homo sapiens
  source 1..293: mol_type = other DNA
ccatctccggggacagtgtctctagtaacagtgttgtttggaactggatcaggcagtccccatcgagaggccttgagtggctgggaaggacatactacaggtccaagtggtataatgattatgcagtatctgtgaaaagtcgaataaccttcaacccagacacatccaagaaccagttctccctgcagctgaactctgtgactcccgaggacacggctgtgtattactgtgcaagaagtaagaactacgcttttgactactggggccagggaaccctggtcaccgtctcctca

SEQ ID NO: 10028 - DNA, 295 bp, Homo sapiens
  source 1..295: mol_type = other DNA
tgcagcctctggattcacctttagtgactattggatgaactgggtccgccaggctccagggaaggggctggagtgggtggccaacataaagcaagatggaagtgagaaatactatgtggactctgtgaagggccgattcaccatctccagagacaacgccgagaactcactttatctgcaaatgaacagcctgacagtcgaggacacggctgtatattactgtgcgagagacgggacagcacctggaatttactttgaccgctggggccagggaaccctggtcaccgtctcctca

SEQ ID NO: 10029 - DNA, 295 bp, Homo sapiens
  source 1..295: mol_type = other DNA
tgcagcctctggattcacgtttagtagtcattggatgagctgggtccgccaggctccagggaaggggctggagtgggtggccaacataaaccaagatggaagtgagaaacattatgtggactctgtgaagggccgattcaccatctccagagacaacgccaagaactcactgtttctgcaaatgaacagcctgagagtcgaggacacggccgtgtattattgtgcgagagatgggacagcacctggcatctactttgaccgatggggccagggaaccctggtcaccgtctcctca

SEQ ID NO: 10030 - DNA, 298 bp, Homo sapiens
  source 1..298: mol_type = other DNA
cactgtctctggtgcctccatcagcagtaatagttactactgggcctggatccgccagcccccagggaaggggctggagtggattgggagtatctattatagtgtgagcacccactacaacccgtccctcaagagtcgagtcaccatatccgtagacacgtccaagaatcagttttccctgaagctgagctctgtgaccgccgcagacacggctgtgtatttctgtgcgagtccttttggagtggtttccaactggttcgacccctggggccagggaaccctggtcaccgtctcctca

SEQ ID NO: 10031 - DNA, 298 bp, Homo sapiens
  source 1..298: mol_type = other DNA
cactgtctctggtggctccatcagtattggcaattactactggggctggatccgccggcccccagggaagggactggagtggattgggagttttcattatagtgggcgcacctactacaatccgtccctcaagagtcgagtcaccatatccgtagacacgtccaagaaccagttctccctgaacgtgaactctgtgaccgccgcagacacggctgtgtattactgtgcgagcccttttggagtggtctctaattggttcgacccctggggccagggaaccctggtcaccgtctcctca

SEQ ID NO: 10032 - DNA, 289 bp, Homo sapiens
  source 1..289: mol_type = other DNA
tacaggttctggattcacctttggtgatcatgctgtgacctggttccgccaggctccagggaaggagctggagtgggtaggtctcattagaagcaaaccttatggtgggacaccagaacacgccgcgtctttgaaaggcagattcaccatctcaagagatgattccagaggcatcgcctttctgcaaatgaacagcctgaaaatcgaggacacagccgtgttttactgtgctagaggcgcgggggcggttgactactggggccagggaaccctggtcaccgtctcctcg

SEQ ID NO: 10033 - DNA, 289 bp, Homo sapiens
  source 1..289: mol_type = other DNA
tacagcttctggattcacctttggtgattatactataaactgggtccgccaggctccaggacaggggctggagtgggtaggtttcattagagtcaaagcttctggtgggacaacagaatacaccgcgtctgtgaaaggcagattcaccatctcaagagatgattccaaaagcatcgcctatctgcaaatgaacagcctgaaaatcgaggacacagccgtgtattactgtgctagaggagctggtgcagttgactattggggccagggaaccctggtcaccgtctcctca

SEQ ID NO: 10034 - DNA, 289 bp, Homo sapiens
  source 1..289: mol_type = other DNA
tgcagcctctggattcaccttcagtagctattggatgagctgggtccgccagtctccagggaaggggctggagtgggtggccaacataaaccaacgtggaagtgagacatactatgtggactctgtgaagggccgattcaccatttcgagagacggcgccacgaactcactgtttctgcaaatgaacagcctgagagccgaggacacgggcgtgtattactgtgcgagagacgtctatagcagctcgtcagcctactggggccagggaaccctggtcaccgtctcctca

SEQ ID NO: 10035 - DNA, 289 bp, Homo sapiens
  source 1..289: mol_type = other DNA
tgaagcctctggattcacctttagtagctattggatgagctgggtccgccaggctccagggaaggggctggagtgggtggccaacatacagaaagatggaagtgagcaatactatgtggactctgtgaagggccgattcaccatctccagagacaacgccaagaactcattgtatctgcagatgaacagcctgagagccgaggacacggctgtgtattactgtgcgagagatgtgtatagcagctcgtctgcctactggggccagggaaccctggtcaccgtctcctca

SEQ ID NO: 10036 - DNA, 289 bp, Homo sapiens
  source 1..289: mol_type = other DNA
tgcagcctctggattcagctttagtacctattggatgagctgggtccgccaggctccagggaaggggctggagtgggtggccaatataaacaaagacgccagtgaaaaatactatgcggactctgtgaagggccgattcaccatctccagagacaacgccgggaactcactgtttctgcaaatgaacagcctgagagccgaggacacggctgtgtattactgtgcgagagatgtgtacagcagttcgtctgcctactggggtcagggaaccctggtcaccgtctcctca

SEQ ID NO: 10037 - DNA, 282 bp, Homo sapiens
  source 1..282: mol_type = other DNA
aagggttctggatacagctttaccggctactggatcggctgggtgcgccagatgcccgggaaaggcctggagtggatggggatcatctatcctgctgactctgataccagatatagcccgtccttccaaggccaggtcaccatgtcggccgacaagtccatcagcaccgcctacctacagtggagcagcctgaaggcctcggacaccgccatgtattactgtgcgagaggggggcgaggatttgatgtctggggccaagggacaatggtcaccgtctcttca

SEQ ID NO: 10038 - DNA, 282 bp, Homo sapiens
  source 1..282: mol_type = other DNA
cggggttctggatacagcttttccggctcctggatcgcctgggtgcgccagctgcccgggaaaggcctcgagtgggtgggaatcatctatcctggtgactctgataccagatacagcccgtccttccgaggccaggtcaccatctcagccgacacgtccatcggcaccgcctacctgcagtgggacagcctgaaggcctcggacaccgccatgtatttctgtgcgagagggggccggggttttgatgtctggggccaagggacaggggtcaccgtctcttca

SEQ ID NO: 10039 - DNA, 283 bp, Homo sapiens
  source 1..283: mol_type = other DNA
tgcagcctctggactcacctttagtagcttttggatgagctgggtccgccaggctccagggaaggggctggagtgggtggccaacatcaagcaagatggaagtgagaaacattatgtggactctgtgaagggccgattcaccatctccagagacaacgccaagagctcactgtatctgcaaatgaacagcctgagaggcgaggacacggctgtgtattactgtgcgaggggttacgggtggttcgacccctggggccagggaaccttggtcaccgtctcctca

SEQ ID NO: 10040 - DNA, 283 bp, Homo sapiens
  source 1..283: mol_type = other DNA
tgcagcctctggattcagttttagttacaattggatgacctgggtccgccaggctccagggaaggggctggagtgggtggccaacataaagaaagatggaagtgagaaatactatgtggactctgtgaagggccgattcaccatctccagagacaacgccaagaactcactgtatctgcaaatgaacagcctgagagccgaagacacggctgtgtattactgtgcgagagggtatggttggttcgacccctggggccagggaaccctggtcaccgtctcctca

SEQ ID NO: 10041 - DNA, 289 bp, Homo sapiens
  source 1..289: mol_type = other DNA
tgcagccactggattcagttttgccggctttggtatgacctgggtccgccaggctccaggaaaggggctggagtgggtctcagttatttatcccggtggaagttacacaaactatgtagactccgtgaagggccgcttcaccacctccagagatgattccaagaataccgtgtatctgcaaatgaacagcctgagagccgaggacacggccatatattactgtgcgaaggataccactggctggtcacgtgactactggggccggggagttctggtcaccgtctcctca

SEQ ID NO: 10042 - DNA, 289 bp, Homo sapiens
  source 1..289: mol_type = other DNA
tgcagcctctggattcacctttaacaactatggcatgacctgggtccgccaggctccagggaaggggctggagtgggtctcaactattaatcataatggtggccgcacatactacgcagactccgtgaaggaccggttcaccatctccagagacgattccaagaacacggtgtatctgcaaatgaacagcctgagagtcgaggacacggccgtatattactgtgcgaaagataccactggctggtcaagggactactggggcctgggagccctggtcaccgtctcctca

SEQ ID NO: 10043 - DNA, 280 bp, Homo sapiens
  source 1..280: mol_type = other DNA
tgcagcctctggattgatgttaagtgactattggatgacctgggtccgtcaggctccagggaaggggctggagtgggtggccaccataaagccagatggaactgagacatactatgcggcctctgtgaagggccgcttcaccatctccagagacaacgccaggaactcactgtatctacagatgagcaggctgagagccgaggacacggccctatatttctgtgcgaggagaggaagagttgattactgcggccagggaaccctggtcaccgtctcctca

SEQ ID NO: 10044 - DNA, 280 bp, Homo sapiens
  source 1..280: mol_type = other DNA
tgcagcctctggattcacctttagtggttattggatgagctgggtccgccaggctccagggaaggggctggagtgggtggccctcataagtcacgatggaagtgacaaattctatgtgaactctgtgaagggccgattcagtgtctccagagacaacgcccataacgcactgtctctacaaatggacagcctgagagccgaggacacggctctatattactgtgcgaggaggggtcgagttgactactggggccagggaaccctggtcaccgtctcctca

SEQ ID NO: 10045 - DNA, 286 bp, Homo sapiens
  source 1..286: mol_type = other DNA
tgcagcctctgggttcaccgtcagtagcaactacatgagctgggtccgccaggctccagggaaggggctggagtgggtctcacttatttatagcggtggtagcacatactacgcagactccgtgaagggccgattcaccatctccagagacaattccaagaacacgctgtatcttcaaatgaacagcctgagagccgaggacacggccgtctattactgtgcgagagtgggactatggtttggggttgactactggggccagggaaccctggtcaccgtctcctca

SEQ ID NO: 10046 - DNA, 286 bp, Homo sapiens
  source 1..286: mol_type = other DNA
tgcagcctctgggttcaccatcagtaccaagtacatgagctgggtccgccaggctccagggaaggggctggagtgggtctcagtcatttatagcggtggtaacacatactacgcaaactccgtgaagggccgattcaccatctccagagacaattccaagaacacgctgtatcttcaaatgaacagcctgagagtcgaggacacggccgtgtattactgtgcgagagtgggactatggttcggggttgactactggggccagggatccctggtcaccgtctcctca

SEQ ID NO: 10047 - DNA, 276 bp, Homo sapiens
  source 1..276: mol_type = other DNA
gcctctggatacactatcaccggcaactattttcactgggtgcgacaggcccctgggcaagggcttgagtggatgggatggatcaaccctaatactggtcgcacaagttatgcacagaggtttcagggcagggtcaccatgaccagggacacgtccatcaacacagtctacatggaactgagtagcctgagatatgacgacacggccgtgtattactgtgcgaggaataatagtggctacacttggggccagggaacccaggtcaccgtctcctca

SEQ ID NO: 10048 - DNA, 276 bp, Homo sapiens
  source 1..276: mol_type = other DNA
gcttctggatacacctttaccgacaactatttgcactgggtccgacaggcccctggacaagggcttgagtggatgggatggatcaatccgaacactggcgtcacaaagtatgcacagaagtttcagggcagggtcaccgtgactagggacacgtccatcagcacagcctacatggagctgagcggactgacatctgacgacacggccgtgtattactgtgcgagaaacaatagtggctacacttggggccagggaaccctagtcaccgtctcctca

SEQ ID NO: 10049 - DNA, 274 bp, Homo sapiens
  source 1..274: mol_type = other DNA
tgcagcctctggattcccctttagtaactcttggatgacctgggtccgccaggctccagggaaggggctggagtgggtggccaacataaatgaagatggaactgagaagtcctatctggactctgtgaagggccgattcaccatctccagagacaacgccaagaactcactgtatctacaactgaacagcctgagagtcgacgacgcggctgtgtattactgtgcgagattcggcatcatcgggggccggggaacgctggtcaccgtctcctca

SEQ ID NO: 10050 - DNA, 274 bp, Homo sapiens
  source 1..274: mol_type = other DNA
tgcagcctctggattcacctttagtcagacttggatgaactggctccgccaggctccagggaaggggctggagtgggtggccagcataaacgaagatgcaagtgaaaaatactatgtggactctgtgaagggccgattcaccatctccagggataacgccaagaactcaatgtatctacaaatgaacagcctgagcgccgaagacacggccgtgtatttctgtgcgaggtttggcattatctgcggccagggaaccctggtcaccgtctcctca

SEQ ID NO: 10051 - DNA, 285 bp, Homo sapiens
  source 1..285: mol_type = other DNA
gcttctggatacaccttcatcggctactttatgcactggatgcgacaggcccctggacaaggacccgagtggatgggatggatcaaccctaaaaatggtgacacaaagtatgaacagaagtttcagggcagggtcaccatgaccagggacacgtccatcagcacagcccacatggaactaagcagcctgagatctgacgacacggccctgtatttctgtacgagaggcccacgtggtgggttctttgactactggggccagggaaccctggtcaccgtctcctca

SEQ ID NO: 10052 - DNA, 285 bp, Homo sapiens; identical to SEQ ID NO: 10051
  source 1..285: mol_type = other DNA

SEQ ID NO: 10053 - DNA, 286 bp, Homo sapiens
  source 1..286: mol_type = other DNA
ggcctctggatacaccttcaccaactactatatacactggatgcgacaggcccctggccaagggcttgagtggctgggatggatcaaccctaacaatggtgatacaaaacttggacagaagtttcagggcagggtcaccatgaccagggacacgtccatcagcacagcccacatggaactgagtagcctaagatatgacgatacggccgtctattactgtacgagaggccccaggggagggttctttgactactggggccagggaaccctagtcaccgtcttctca

SEQ ID NO: 10054 - DNA, 285 bp, Homo sapiens; identical to SEQ ID NO: 10051
  source 1..285: mol_type = other DNA

SEQ ID NO: 10055 - DNA, 295 bp, Homo sapiens
  source 1..295: mol_type = other DNA
cactgtctctggtggctccatcagtagtgactactggagctggatccggcagcccccagggaagggactggagtggattgggtatatctattacagtgggagcaccagctccaacccctccctcaagagtcgagtcaccatatcagtagacacgtccaagaaccacttctccctgaagctgacctctgtgaccgctgcggacacggccgtgtattactgtgcgagagccttacgtggatacacctatggcccttttgactactggggccagggaaccctggtcaccgtctcctca

SEQ ID NO: 10056 - DNA, 295 bp, Homo sapiens
  source 1..295: mol_type = other DNA
cactgtctctggtggctccatcagtagtgactactggagctggatccggcagcccccagggaagggactggagtggattgggtatatcttttacagtgggagcaccagctccaacccctccctcaagagtcgagtcaccatatcagtagacacgtccaagaaccacttctccctgaagctgacctctgtgaccgctgcggacacggccgtgtattactgtgcgagagccttacgtggatacacctatggcccttttgactactggggccagggaaacctggtcaccgtctcctcg

SEQ ID NO: 10057 - DNA, 295 bp, Homo sapiens
  source 1..295: mol_type = other DNA
cactgtctctggtggctccatcagtagtgactactggagctggatccggcagcccccagggaagggactggagtggattggatatatctattacagtgggagcaccagctccaacccctccctcaagagtcgagtcaccatatcagtagacacgtccaagaaccacttctccctgaagctgacctctgtgaccgctgcggacacggccgtgtattactgtgcgagagccttacgtggatacacctatggcccttttgactactggggccagggaaccctggtcaccgtctcctca

SEQ ID NO: 10058 - DNA, 295 bp, Homo sapiens
  source 1..295: mol_type = other DNA
cactgtctctggtggctccatcaggagtgactactggagctggatccggcagcccccagggaagggactggagtggattgggtatatctattacagtgggagcaccagctccaacccctccctcaagagtcgagtcaccatatcagtagacacgtccaagaaccacttctccctgaagctgacctctgtgaccgctgcggacacggccgtgtattactgtgcgagagccttacgtggatacacctatggcccttttgactactggggccagggaaccctggtcaccgtctcctca

SEQ ID NO: 10059 - DNA, 295 bp, Homo sapiens
  source 1..295: mol_type = other DNA
cactgtctctggtggctccatcagtagtgactactggagctggatccggcagcccccagggaagggactggagtggattgggtatatattttacagtgggagcaccagctccaacccctccctcaagagtcgagtcaccatatcagtagacacgtccaagaaccacttctccctgaagctgacctctgtgaccgctgcggacacggccgtgtattactgtgcgagagccttacgtggatacacctatggcccttttgactactggggccagggaaccctggtcaccgtctcctcg

SEQ ID NO: 10060 - DNA, 295 bp, Homo sapiens
  source 1..295: mol_type = other DNA
cactgtctctggtggctccatcagttattactacttgagctggatccggcagcccccagggaagggactggagtggattgggtatatcttttacagtgggggtaccagcttcaatccctccctcacgagtcgagccaccatatcattagacacgtccaagaaccacttctccctgaaactgagctctgtgaccgctgcggacacggccgtgtattactgtgcgagagcgttacgtggatatacctatggtccttttgactactggggccagggaaccctggtcactgtctcctca

SEQ ID NO: 10061 - DNA, 295 bp, Homo sapiens
  source 1..295: mol_type = other DNA
cactgtctctggtggctccatcagttattactacttgagctggatccggcagcccccagggaagggactggagtggattgggtatatcttttacagtgggggtaccagcttcaatccctccctcacgagtcgagccaccatatcattagacacgtccaagaaccacttctccctgaaactgagctctgtgaccgctgcggacacggccgtgtattactgtgcgagagcgttacgtggatatacctatggtccttttgactactggggccagggaaccctggtcaccgtctcctca

SEQ ID NO: 10062 - DNA, 295 bp, Homo sapiens
  source 1..295: mol_type = other DNA
cactgtctctggtggctccatcagtagtgactactggagctggatccggcagcccccagggaagggactggagtggattgggtatatcttttacagtgggagcaccagctccaacccctccctcaagagtcgagtcaccatatcagtagacacgtccaagaaccacttctccctgaagctgacctctgtgaccgctgcggacacggccgtgtattactgtgcgagagccttacgtggatacacctatggcccttttgactactggggccagggaaccctggtcaccgtctcctcg

SEQ ID NO: 10063 - DNA, 295 bp, Homo sapiens; identical to SEQ ID NO: 10055
  source 1..295: mol_type = other DNA

SEQ ID NO: 10064 - DNA, 289 bp, Homo sapiens
  source 1..289: mol_type = other DNA
tgcagcctctggattcatctttagtgaccactacatggactgggtccgccaggctccagggaaggggctggagtgggttggccgttctggaaacaaagctaacagttacaccacagagtacgccgcgtctgtgaaaggcagattcaccatctcaagagatggttcaaagaactcactgtatctgcacatgaacagcctgcaaaccgaggacacggccgtgtattactgtgctagaggggctaccccccttgactactggggccagggaaccctggtcaccgtctcctca

SEQ ID NO: 10065 - DNA, 289 bp, Homo sapiens
  source 1..289: mol_type = other DNA
tgtagtctctggattcaccttcagagaccactacatggactgggtccgccaggctccaggaaaggggctggagtgggttggccgcactgcaaataaagctaacagttacaccacagaatacgccgcgtctgtgaaaggcagattcaccatctcaagagatgattcaaagaactcactgtatctgcaaatgaacagcctgaaaaccgaggacacggccgtgtattattgtgctagaggggctacgccccttgattactggggccagggaaccctggtcaccgtctccgca

SEQ ID NO: 10066 - DNA, 289 bp, Homo sapiens
  source 1..289: mol_type = other DNA
tgcagcctctggattcatcttcagtgaccactacatggactgggtccgccaggctccagggaaggggctggagtgggttggccgtactggaaacaaagctaacagttacaccacagaatacgccgcgtctgtgaaaggcagattcaccatctcaagagatggttcaaagaactcactgtatctgcacatggacagcctgaaaaccgaggacacggccgtgtattactgtgctagaggggctacgccccttgactactggggccagggaaccctggtcaccgtctcctca

SEQ ID NO: 10067 - DNA, 289 bp, Homo sapiens
  source 1..289: mol_type = other DNA
tgtagcctctggattcaccttcagtgaccactacatggactgggtccgccaggctccagggaaggggctggagtgggttggccattccagaaacaaagctaacagttataccacagaatacgccgcgtctgtgaagggcaggttcaccatctcaagagatgattcaaagaactcactgtatctgcaaatgaacagcctgagaaccgaggacacggccgtgtattactgtgctagaggggcgacaccccttgactactggggccggggaaccctggtcaccgtctcctca

SEQ ID NO: 10068 - DNA, 280 bp, Homo sapiens
  source 1..280: mol_type = other DNA
tgcagcctctggattcacccttagtacctcttggatgaactgggtccgccaggctccagggaaggggctggagtgggtggccaacataaaccaagatggaggtgagaaacactatgtggactctgtgaagggccgattcaccatctctagagacaacgccaagaattcattgtatctgcaaatgaacagcctgagagccgaggacacggctgtgtattactgtgcgaggagccgtggtttggactcctggggccagggagccctggtcaccgtctcctca

SEQ ID NO: 10069 - DNA, 280 bp, Homo sapiens
  source 1..280: mol_type = other DNA
tgcagcctctggattcatgcttagtacctcttggatgaactgggtccgccaggctccagggaaggggctggagtgggtggccaacataaaccaagatggaggtgagaaacactatgtggactctgtgaagggccgattcaccatctctagagacaacgccaagaattcattgtatctgcaaatgaacagcctgagagccgaggacacggctgtgtattactgtgcgaggagccgtggtttggactcctggggccagggagccctggtcaccgtctcctca

SEQ ID NO: 10070 - DNA, 280 bp, Homo sapiens
  source 1..280: mol_type = other DNA
tgcagcctctggattcacttttagtagctatttgataaactgggtccgccaggctccaggaaaagggctggagtgggtggccaacataaagcaagatggaagtgagaaatactatgtggactctgtgaagggccgattcaccatctccagagacaacgccaagaactcactgtatctgcaaatgaacagcctgagagtcgaggacacggccgtgtattactgtgcgagatctcggggccttgactcctggggccagggaaccctggtcaccgtgtcctca

SEQ ID NO: 10071 - DNA, 292 bp, Homo sapiens
  source 1..292: mol_type = other DNA
tgcagcctctggattcatctttagtcagcattggatgtgctgggtccgccaggctccagggaaggggctggagtgggtggccaatattaagcaagatggaagtgagaaaaactatgtggactctgtgaagggccgattcaccatctccagagacaacgccaagaactcactgtatctccaaatgaacagcctgagagccgaggacacggctgtgtattactgtgcgaaagatcgcactcacagggatggttttgatatctggggccaagggacagtggtcaccgtctcttca

SEQ ID NO: 10072 - DNA, 292 bp, Homo sapiens
  source 1..292: mol_type = other DNA
tgcagcctctggattcatctttagtcagcattggatgtgctgggtccgccaggctccagggaaggggctggagtgggtggccaatattaagcaagatggaagtgagaaaaactatgtggactctgtgaagggccgattcaccatctccagagacaacgccaagaactcactgtatctccaaatgaacagcctgagagccgaggacacggctgtgtattactgtgcgaaagatcggactcacagggatggttttgatatctggggccaagggacagtggtcaccgtctcttca

SEQ ID NO: 10073 - DNA, 292 bp, Homo sapiens
  source 1..292: mol_type = other DNA
tgcagcctctgggttcagttttagtgaccattggatgagttgggtccgccaggctccaggggaggggctggagtgggtggccaacataaggcaagatggaagtgagatgtactatgtgggctctgtgaagggccgattcaccatctccagagacaacgccaagaactcactgtatctgcaaatgaacaacctgagagccgaggacacggctgtctactactgtgcgaaagatcgtacgcaccgtgatggttttgatatctggggccaagggacaatggtcaccgtctcttca

SEQ ID NO: 10074 - DNA, 292 bp, Homo sapiens
  source 1..292: mol_type = other DNA
tgcagcctctggattcagctttagtgaccattggatgagttgggtccgccaggctccaggggaggggctggagtgggtggccaacataaagcaagatggaagtgagatgtactatgtgggctctgtgaagggccgattcaccatctccagagacaacgccaagaactcactgtatctgcacatgaacaacctgagagccgaggacacggctgtctactactgtgcgaaagatcgtacgcaccgtgatggttttgatatctggggccaagggacaatggtcaccgtctcttca

SEQ ID NO: 10075 - DNA, 292 bp, Homo sapiens
  source 1..292: mol_type = other DNA
tgcagcctctggattcatctttagtaaccattggatgtgctgggtccgccaggctccagggaaggggctggagtgggtggccaatattaagcaagatggaagtgagaaaaactatgtggactctgtgaagggccgattcagcatctccagagacaacgccaagaactcactgtatctccaaatgaacagcctgagagccgaggacacggctgtgtattactgtgcgaaagatcggactcacagggatggttttgatatctggggccaagggacagtggtcaccgtctcttca

SEQ ID NO: 10076 - DNA, 292 bp, Homo sapiens; identical to SEQ ID NO: 10072
  source 1..292: mol_type = other DNA

SEQ ID NO: 10077 - DNA, 292 bp, Homo sapiens
  source 1..292: mol_type = other DNA
tgcagcctctagattcatgtttagtgaccattggatgagctgggtccgccaggctccagggaaggggctggagtgggtggccaacataaagcaagatggaagtgagaaatactatgtggactcggtgaaggggcgattcaccatctccagagacaacactaagaattcgctgtatctgcaaatgaacagcctgagagccgaggacacggctgtatattactgtgcgaaagatcgtactcatcgtgatggttttgatatctggggccaagggacaatggtcaccgtctcttca

SEQ ID NO: 10078 - DNA, 289 bp, Homo sapiens
  source 1..289: mol_type = other DNA
tgcagcctctggattcacctttagtggttctgccatgacttgggtccgccaggctccagggaaggggctggagtgcgtctcacttattagatttaatggtaatgacaaatactacgcagactccgtaaagggccggttcaccatctccagagacaattccaggaacacgttgtctctagaaatgaacagcctgcgagccgaggacacggccgtatattactgtgcgaagactggcagtggctggttccttgattactggggcctgggaaccctggtcaccgtctcctca

SEQ ID NO: 10079 - DNA, 289 bp, Homo sapiens
  source 1..289: mol_type = other DNA
tgcagcctctggattcacctttagcagctatgccatgacctgggtccgccaggctccagggaaggggctggactgggtctcacttatttatagcggtggtactagcacatactatgcagactccatgaagggccggttcaccatctccagagataattccaagaacacgctgtttctgcaaatgaacagcctgagagacgaggacacggccgtatattactgtgcgaaaactggcagtggctggttccttgactactggggccagggaaccctggtcaccgtctcctca

SEQ ID NO: 10080 - DNA, 304 bp, Homo sapiens
  source 1..304: mol_type = other DNA
tgcagcctctggattcacctttgatgattatgccatgcactgggtccggcaagttccagggaagggcctggagtgggtctcaggttttagttggaatagaggtaccataggctatgcggactctgtgaagggccgattcaccatttccagagacaacgccaagaactccctgtatctgcaaatgaacagtctgagagctgaggacacggccttgtattactgtgcaaaagataaccttcgatatggttcggggagttatcttattgactactggggccagggaaccctggtcaccgtctcctca

SEQ ID NO: 10081 - DNA, 304 bp, Homo sapiens
  source 1..304: mol_type = other DNA
tgcagcctctggattcacctttgaagattatgccatgcactgggtccggcaagttccagggaagggcctggagtgggtctcaggttttagttggaatagaggtaccataggctatgcggactctgtgaagggccgattcaccatttccagagacaacgccaagaactccctgtatctgcaaatgaacagtctgagagctgaggacacggccttctattactgtgcaaaagataaccttcggtatggttcggggagttatcttattgactactggggccagggaaccctggtcaccgtctcctca

SEQ ID NO: 10082 - DNA, 304 bp, Homo sapiens
  source 1..304: mol_type = other DNA
tgcagcctctggattcacctttgatgattatgccatacactgggtccggcaagctccagggaagggcctggagtgggtctcaggtattagttggagaagtactaccataggctatgcggactctgtgaagggccgattcaccatctccagagataacgccaagaagtccctgtatctgcaaatgaacagtctgagagctgaggacacggccttgtattattgtgcaaaagataatctccgctatggttcagggagttatttaattgactactggggccagggaaccctggtcaccgtctcctca

SEQ ID NO: 10083 - DNA, 304 bp, Homo sapiens
  source 1..304: mol_type = other DNA
tgcagcctctggattcacctttgatgattatgccatacattgggtccggcaagctccagggaagggcctggagtgggtctcaggtattagttggcgaagtactaccataggctatgcggactctgtgaagggccgattcaccatctccagagataacgccaagaagtccttgtatctgcaaatgaacagtctgagagctgaggacacggccttgtattattgtgcaaaagataatctccgctatggttcagggagttatttaattgactactggggccagggaaccctggtcaccgtctcctca

SEQ ID NO: 10084 - DNA, 277 bp, Homo sapiens
  source 1..277: mol_type = other DNA
tgcagcctctggattcaattttagaagttattggatgaactgggtccgccaggctccagggaaggggctggagtgggtggccaacatcaaccaaaatggaagtgagagatactatgtggactctctgaagggccgattcaccatctccagatacaacgccaagaactcactgtatctgcaaatgaacagcctgagagtcgacgacacggctgtttattactgtgcgagaggggactcgaattactggggccagggaactctggtcaccgtctcctca

SEQ ID NO: 10085 - DNA, 277 bp, Homo sapiens
  source 1..277: mol_type = other DNA
tgcagcctctggattcacctttagtagctcttggatgggctgggtccgccaggctccagggaaggggctggagtgggtggccaacataaagcgagatggaagtcagcaatactatgtggactctgtgaagggccgattcaccgtctccagagacaccgccaagagctcactgtatctgcaaatgaacagcctgagagccgaggacacggctgtctattactgtgcgagaggagacagcaactactggggccagggaaccctggtcaccgtctcctca

SEQ ID NO: 10086 - DNA, 289 bp, Homo sapiens
  source 1..289: mol_type = other DNA
tgcagcctctggattcaccttcagtggcttctggatgcactgggtccgccaaactccagggaaggggctggtgtgggtctcacatattacgggtgatgggaatgggatagcgtacgcgggctccgtgaagggccgattcaccatctccagagacaacgccaagaacacgctgtatctgcaaatgaacagtctgagaggcgatgacacggctgtttattattgtgcaagagggggggtagtgggagctatggactactggggccagggaaatttggtcaccgtctcctca

SEQ ID NO: 10087 - DNA, 289 bp, Homo sapiens
  source 1..289: mol_type = other DNA
tgcaggctctggattcaccctcagtcactactggatgcactgggtccgccaagctccagggaaggggctggtgtgggtctcacgtattagtaatgatggaagtacctcaagctacgcggactccgtgaagggccgattcaccatctccagagacaacgtcaagaacacggtgtctttgcaaatgaacagtctgagagccgaggacacggctgtgtattactgtgcaagagggggcgtagtgggagctatggactactggggccagggaaccctggtcaccgtctcctca

SEQ ID NO: 10088 - DNA, 295 bp, Homo sapiens
  source 1..295: mol_type = other DNA
cgctgtctctggtgcctccatcagcagtggtggctactactggagctggatccgccatcacccagggaggggcctggagtggattgggtacatctactacagtgggagcacctactacaacccgtccctcgagagtcgagtttccatatcagtagacacgtctaacagccagttctccctgaggctggcctctgtgtctgcggcggacacggccgtgtattactgtgcgagatactatgatagtggtggttaccatgactactggggccagggaaccctggtcaccgtctcctca

SEQ ID NO: 10089 - DNA, 295 bp, Homo sapiens
  source 1..295: mol_type = other DNA
cgctgtctctggtgcctccattagcagtggtggctactactggagctggatccgccatcccccagggaagggcctggagtggattgggtacatctattacagtgggagcacctactacaacccgtccctcgagagtcgagtttccatatcagtagacacgtctaagaaccagttctccctgaagttgagctcggcgactgccgcggacacggccgtgtattactgtgcgagatactatgatagtggtggttaccatgactactggggccagggaaccctggtcaccgtctcctca

SEQ ID NO: 10090 - DNA, 295 bp, Homo sapiens
  source 1..295: mol_type = other DNA
cgctgtctctggtgcctccatcagcagtggtggctactactggagctggatccgccatcccccagggaagggcctggagtggattgggtacatctattacagtgggagcacctactacaacccgtccctcgagagtcgagtttccatatcagtagacacgtctaagaaccagttctccctgaagttgagctcggcgactgccgcggacacggccgtgtattactgtgcgagatactatgatagtggtggttaccatgactactggggccagggaaccctggtcaccgtctcctca

SEQ ID NO: 10091 - DNA, 295 bp, Homo sapiens
  source 1..295: mol_type = other DNA
cgctgtctctggtgcctccatcagcagtggtggctactactggagctggatccgccatcacccagggaggggcctggagtggatggggtacatctactacagtgggagcacctactacaacccgtccctcgagagtcgagtttccatatcagtagacacgtctaacagccagttctccctgaggctggcctctgtgtctgcggcggacacggccgtgtattactgtgcgagatactatgatagtggtggttaccatgactactggggccagggaaccctggtcaccgtctcctca

SEQ ID NO: 10092 - DNA, 295 bp, Homo sapiens
  source 1..295: mol_type = other DNA
cactgtctctggtgcctccatcagcagtggtggctactactggagctggatccgccatcacccagggaggggcctggagtggattgggtacatctattacagtgggagcacctactacaacccgtccctcgagagtcgagtttccatatcagtagacacgtctaagagccagttctccctgaggctggcctctgtgtctgcggcggacacggccgtgtattactgtgcgagatactatgatagtggtggttaccatgactactggggcctgggaaccctggtcaccgtctcctca

SEQ ID NO: 10093 - DNA, 295 bp, Homo sapiens
  source 1..295: mol_type = other DNA
cgctgtctctggtgcctccatcggccgtggtggctactactggagctggatccgccatcacccagggaggggcctggagtggattgggtacatctactacagtgggagcacctacttcaacccgtccctcgagagtcgagtttccatatcagtagacacgtctaacggccagttctccctgaggctggcctctgtgtctgcggcggacacggccgtgtattactgtgcgagatactatgatagtggtggttaccatgactactggggccagggaaccctggtcaccgtctcctca

SEQ ID NO: 10094 - DNA, 295 bp, Homo sapiens
  source 1..295: mol_type = other DNA
cgctgtctctggtgcctccatcggccgtggtggctactactggagctggatccgccatcacccagggaggggcctggagtggattgggtacatctactacagtgggagcacctactacaacccgtccctcgagagtcgagtttccatatcagtagacacgtctaacggccagttctccctgaggctggcctctgtgtctgcggcggacacggccgtgtattactgtgcgagatactatgatagtggtggttaccatgactattggggccagggaaccctggtcaccgtctcctca

SEQ ID NO: 10095 - DNA, 295 bp, Homo sapiens
  source 1..295: mol_type = other DNA
cactgtctctggtggctccatcagcagtgctggttactactggagctggatccgccagcacccagagaagggcctggagtggattgggtacatctattacagtgggaccacctactacaacccgtccctcaagagtcgacttaccatatcagtagacacgtctaagaaccaattctccctgaatctgagctctgtgactgccgcggacacggccttatattactgtgcgagatattatgacagtggtggttatcatgactactggggccagggaaccctggtcaccgtctcctca

SEQ ID NO: 10096 - DNA, 295 bp, Homo sapiens
  source 1..295: mol_type = other DNA
cgctgtctctggtgcctccatcggcagtggtggctactactggagctggatccgccatcacccagggaggggcctggagtggattgggtacatctactacagtgggagcacctactacaacccgtccctcgagagtcgagtttccatatcagtagacacgtctaacggccagttctccctgaggctggcctctgtgtctgcggcggacacggccgtgtattactgtgcgagatactatgatagtggtggttaccatgactactggggccagggaaccctggtcaccgtctcctca

SEQ ID NO: 10097 - DNA, 295 bp, Homo sapiens
  source 1..295: mol_type = other DNA
cgctgtctctggtgcctccatcagcagtggtggctactactggagctggatccgccatcacccagggaggggcctggagtggattgggtacatctattacagtgggagcacctactacaacccgtccctcgagagtcgagtttccatatcagtagacacgtctaacagccacttctccctgaggctggcctctgtgtctgcggcggacacggccgtgtattactgtgcgagatactatgatagtggtggttaccatgactactggggccagggaaccctggtcaccgtctcctca

SEQ ID NO: 10098 - DNA, 295 bp, Homo sapiens; identical to SEQ ID NO: 10096
  source 1..295: mol_type = other DNA

SEQ ID NO: 10099 - DNA, 295 bp, Homo sapiens
  source 1..295: mol_type = other DNA
cgctgtctctggtggctccatcagcagtggtggctactactggagctggatccgccatcacccagggaggggcctggagtggattgggtacatctattacagtgggagcacctactacaacccgtccctcgagagtcgagtttccatatcagtagacacgtctaagagccagttctccctgaggctggcctctgtgtctgcggcggacacggccgtgtattattgtgcgagatactatgatagtggtggttaccatgactactggggccagggaaccctggtcaccgtctcctca

SEQ ID NO: 10100 - DNA, 293 bp, Homo sapiens
  source 1..293: mol_type = other DNA
ccatctccggggacaatgtctttaatactcgtgtagcttggaactggatcaggcagtccccatcgagaaaccttgagtggctgggaaggacatactacaactccaagtggaatcatgattatgcagattctgtgaaaagtcgaataaccataaacctagacacatccaagaaccagttgtccctgcagctcaactctgtgactcccggggacacggctgtatatttttgtgcaagaggtcagaatcacgcttttgatatctggggccaaggcacaatggtcaccgtctctgca

SEQ ID NO: 10101 - DNA, 284 bp, Homo sapiens
  source 1..284: mol_type = other DNA
ccatctccggggacagtgtctctgacaacagtgttgcttggaactggatcaggcagtccccatcgagaggccttgagtggctgggaaggatatatcgcgggtctaatgattatgcactatttgtgaaaagtcgactaaccatcaacccagacacatccaagaaccagttctccctgcacttgaactctgtgactcccgaagacacggctgtgtattactgtgctcggggtcagaatcatgcttttgatatctggggccaagggacaatggtcaccgtctcttca

SEQ ID NO: 10102 - DNA, 284 bp, Homo sapiens
  source 1..284: mol_type = other DNA
ccatctccggggacagtgtctctagcaacagtgttgcttggaactggatcaggcagtccccatcgagaggccttgagtggctgggaaggatatatcgcgggaataaggattatgcactgaatgtgaaaagtcgactaaccattaacccagacacatccaagaaccagttctccctgcacttgaactctgtgactcccgaagacacggctgtgtattactgtgctcggggtcagaatcatgcttttgatatctggggccaagggacaatggtcaccgtctcttca

SEQ ID NO: 10103 - DNA, 284 bp, Homo sapiens
  source 1..284: mol_type = other DNA
ccatctccggggacagtgtctctagcaacagtgttgcttggaactggatcaggcagtccccatcgagaggccttgagtggctgggaaggatatatcgcgggtctaatgattatgcactctttgtgaaaagtcgactaaccatcaacccagacacatccaagaaccagttctccctgcacttgaactctgtgactcccgaagacacggctgtgtattactgtgctcggggtcagaatcatgcttttgatatctggggccaagggacaatggtcaccgtctcttca

SEQ ID NO: 10104 - DNA, 284 bp, Homo sapiens
  source 1..284: mol_type = other DNA
ccatctccggggacagtgtctctgacaacagtgttgcttggaactggatcaggcagtccccatcgagaggccttgagtggctgggaaggatatatcgcgggtctaatgattatgcactatttgtgaaaagtcgactaaccatcaaaccagacacatccaagaaccagttctccctgcacttgaactctgtgactcccgaagacacggctgtgtattactgtgctcggggtcagaatcatgcttttgatatctggggccaagggacaatggtcaccgtctcttca

SEQ ID NO: 10105 - DNA, 284 bp, Homo sapiens
  source 1..284: mol_type = other DNA
ccatctccggggacagtgtctctagcaacagtgttgcttggaattggatcaggtactccccatcgagaggccttgagtggctgggaaggacataccgcaggtcctatgattatgcagtatctgtgaaaagtcgaataaccatcaatgcagacacatccaagaaccagttgtccctgcacctgagctctgtgactcccgaggacacggctgtgtattattgtgcaaggggacaaaatcatgcttttgacatttggggccaggggacagtggtcaccgtccatgca

SEQ ID NO: 10106 - DNA, 295 bp, Homo sapiens
  source 1..295: mol_type = other DNA
cagtgtctctggtgactccatcagcagtggtggaaacttctggagctggatccgccagcacccaggagagggcctggagtggattgggtatatgtatcatggtgggagcagccactacaacccgaccctcaggagtcgagtcatcatatcaacagacgcgtctaagaaccagttttccctgaatctgagctctgtgactgccgcggacacggccgtatattactgtgcgagagatattacggggaagtattactttgactactggggccagggaaccctggtcaccgtctcctcg

SEQ ID NO: 10107 - DNA, 295 bp, Homo sapiens
  source 1..295: mol_type = other DNA
cactgtctctggtgactccctcagcagcggtggttacttctggagctggatccgccagcacccagggaagggcctggagtggatcgggtacacctattacggtgggaccacccactacaacccgtccctcgagagtcgagttagcatctcagtagacgcgtctaagaaccagttctccctgaagctggcctctgtgactgccgcggacacggccatgtattactgtgcgagagatattacggggaaatactactttgactactggggccagggaaccccggccatcgtctcctca

SEQ ID NO: 10108 - DNA, 295 bp, Homo sapiens
  source 1..295: mol_type = other DNA
cactgtctctggtggctccatcagcagtggtggatacttctggagctggatccgccagctcccagggaagggcctggagtggattgggtacacctatcacggtgggactacccactacaagccgtccctcaggagtcgagtgaccatatcaacagacgcgtctaagaaccagttctccctgaagctgaactctgtgactgccgcggacacggccgtgtatttctgtgcgagagatataactggaaagtactactttgactattggggccagggaaccctggtcaccgtctcctca

SEQ ID NO: 10109 - DNA, 283 bp, Homo sapiens
  source 1..283: mol_type = other DNA
tgcagcctctggattcaccttcagtacctactggatgcactgggtccgccaagctccagggaaggggctggtgtgggtctcacgtattgatactgatgggagtgccacaagctacgcggactccgtgaagggccgattcaccatctccagagacaacgccaagagcacggtgtatctgcaaatgaacagtctgagagccgaggacacggctgtgtattactgtgcaagaggttttaactggttcgactcctggggccagggaaccctggtcaccgtctcctca

SEQ ID NO: 10110 - DNA, 283 bp, Homo sapiens
  source 1..283: mol_type = other DNA
tgcagcctctggattcaccttcagtaactattggatgcactgggtccgccaagctccagggaaggggctggtatgggtctcacgtattaatagtgatgggagtagtacaacctacgcggactccgtgaagggccgattcaccatctccagagacaacgccgagaacacgctgtatctgcaaatgaacagtctgagcgccgaggacacggctgtatattactgtgcaagaggtttcaactggttcgactcctggggccagggaaccctggtcaccgtctcctca

SEQ ID NO: 10111 - DNA, 292 bp, Homo sapiens
  source 1..292: mol_type = other DNA
cactgtctttggtggctccatcagtggttactactggaactggatccgccagcccgccggaaaggggctggagtggcttgggcgtatctattccagcgggagcatcaataacaacccctccctcgagagtcgagtcaccatgtcagtagacacgtccaagaaccagttctccctgaagctgagttctgtgaccgccgcggacacggccatgtattactgtgcgagagaagatagtgggagctcctactactttgactactggggccagggaaccctggtcaccgtctcttca

SEQ ID NO: 10112 - DNA, 292 bp, Homo sapiens
  source 1..292: mol_type = other DNA
cactgtctttggtggctccatcagtggttactactggaactggatccgccagcccgccggaaaggggctggagtggcttgggcgtatctcttccagcgggaacatcaataacaacccctccctcgagagtcgagtcaccatgtcagtagacacgtccaagaaccagttctccctgaagctgagttctgtgaccgccgcggacacggccatgtattactgtgcgagagaagatagtgggagctcctactactttgactactggggccagggaaccctggtcaccgtctcttca

SEQ ID NO: 10113 - DNA, 292 bp, Homo sapiens
  source 1..292: mol_type = other DNA
cactgtctctggtggctccatcagtagttactactggaactggatccggcagcccgccgggaagggactggagtggcttgggcgtatctatagcaccgggagcaccaacgacaacccctccctcaagagtcgagtcaccatgtcagttgacacgtcccagaaccagttctccctgaagctgagctctgtgaccgccgcggacacggccgtgtatttctgtgcgagagaagatagtgggagctcctactactttgactactggggccagggaaccctggtcaccgtctcctca

SEQ ID NO: 10114 - DNA, 292 bp, Homo sapiens; identical to SEQ ID NO: 10111
  source 1..292: mol_type = other DNA

SEQ ID NO: 10115 - DNA, 292 bp, Homo sapiens
  source 1..292: mol_type = other DNA
cactgtctctggtggctccatcagtacttacttctggaattggatccggcagcccgccgggaagggactggagtggattgggcgtatctatactggtgggaataccgacgacaatccctccctcaagagtcgagtcaccatgtcagtagacacgtccaagaaccagatctccctgaagctgagctctgtgaccgccgcggacacggccgtgtatttctgtgcgagagaagatagtgggagctcctactactttgactactggggccagggaaccctggtcaccgtctcctca

SEQ ID NO: 10116 - DNA, 292 bp, Homo sapiens
  source 1..292: mol_type = other DNA
cactgtctctggtgactccatcagtagttactactggagttggatccggcagcccgccgggaagggactggagtggattgggcgtatctatagtagtgggagcaccaactacaacccctccctcatcaggcgagtcaccatgtcaatagacacgtccaagaatcagttctccctgaaactgagctctgtgaccgccgcggacacggccgtgtattactgtgcgagagaggatagtgggagttcctactactttgactattggggccagggaaccctggtgaccgtctcccca

SEQ ID NO: 10117 - DNA, 295 bp, Homo sapiens
  source 1..295: mol_type = other DNA
tgcagcctctggattcacctttaatgaatatgccatgcactgggtccggcaagctccagggaagggcctggagtgggtctcaagtattaattggaatagtggcagcatcggctatgcggactctgtgaagggccgattcaccatctccagagacaacgccaagaactccctgtatctgcaaatgaacagtctgagagctgaggacacggccttgtattactgtgtcaaagatcttgatagtagtggttattaccctgactactggggccagggaaccctggtcaccgtctcctca

SEQ ID NO: 10118 - DNA, 295 bp, Homo sapiens
  source 1..295: mol_type = other DNA
tacagcctctggattcacctttgatgagtatgccctgcactgggcccgacaacgtccagggaagggcctggagtgggtctcaggtattagttggaacagtggcagcataggctatgcggactctgtgaagggccgattcaccatctccagagacaatgccaagaactccctgtatctgcaaatgaacagtctgagagctgaggacacggccttctattactgtgtaaaagatttggatagtagtggttattaccccgactactggggccagggaaccctagtcaccgtctcctca

SEQ ID NO: 10119 - DNA, 301 bp, Homo sapiens
  source 1..301: mol_type = other DNA
tgcagcctctggattcaccttcagcaactatgccatgacttgggtccgcaaggctccagggaaggggctggagtgggtctcaagtattagtggtagtggtgacaacacatactacgcagactccgtgaagggccggtttaccatctccagagacaattccaagaaaacgctgtatatgcaactgaacagcctgagagccgaggacacggccaaatattactgtgcgagagaccgggtggttcggggagttatgggggcctttgactactggggccagggaaccctggtcaccgtctcttca

SEQ ID NO: 10120 - DNA, 301 bp, Homo sapiens
  source 1..301: mol_type = other DNA
tgcagcctctggattcaccttcagcaactatgccatgacttgggtccgccaggctccagggaaggggctggagtgggtctcaagtattagtggtagtggtgacaacacatactacgcagactccgtgaagggccggtttaccatctccagagacaattccaagaaaacgctgtatatgcaactgaacagcctgagagccgaggacacggccaaatattactgtgcgagagaccgggtggttcggggagttatgggggcctttgactactggggccagggaaccctggtcaccgtctcttca

SEQ ID NO: 10121 - DNA, 301 bp, Homo sapiens
  source 1..301: mol_type = other DNA
tgcagcctctggattcacctttagcacctatgccatgaactgggtccgccaggctccagggaaggggctggagtgggtctcaacgattagtggtagtggtgatagcacatactacgctgactccgtgaagggccggttcaccatctccagagacaaatccaagaacactctgtatctgcaaatgaacagcctgagagccgaggacacggccgtctattattgtgcgagagatcgagtggttcggggggttatgggggcttttgactactggggccagggaacccttgtcaccgtctcctca

SEQ ID NO: 10122 - DNA, 292 bp, Homo sapiens
  source 1..292: mol_type = other DNA
tgcagcctctggattcagcttcaacagttatgaaatgaactgggtccgccaggctccagggaaggggctggagtgggtctcatacattagtagtactgctggtaccatatactacgcagactctgtgaggggccgattcaccatctccagagacaacgccaagaactcactgtatctgcaaatgaacagcctgagagccgaggacacggctgtttattactgtgcgagagacagtcgcacctctggtgaatttgacccctggggccagggaaccctggtcaccgtctcctca

SEQ ID NO: 10123 - DNA, 292 bp, Homo sapiens
  source 1..292: mol_type = other DNA
tgcagcctctggattcaccttcagtagttatgaaatgaactgggtccgccaggctccagggaaggggctggagtgggtttcatacattagtagtagtggtagtaccatatactacgcagactctgtgaagggccgattcaccatctccagagacaacgccaggaactcactgtatctgcaaatgaacagcctgagagacgaggacacggctgtttattactgtgcgagagatagccgtacgtccggggagttcgacccctggggccagggaaccctggtcaccgtctcctca

SEQ ID NO: 10124 - DNA, 292 bp, Homo sapiens
  source 1..292: mol_type = other DNA
tgcagcctctggattcaccttcaggacttatgaaatgaactgggtccgccaggcgccagggaaggggctggagtgggtttcatacattagtggtagtggtgataccatatactacgcagactctgtgaagggccgcttcaccatctccagggacaacgccaagaactcactgtatctgcaattgaacagcctgagagacgaggacacggctatttattactgtgcgagagatagccgtacgtccggggagttcgacccctggggccagggaaccctggtcaccgtctcctca

SEQ ID NO: 10125 - DNA, 280 bp, Homo sapiens
  source 1..280: mol_type = other DNA
tgcagcctctggattcacctttagtagctattggatgacctgggtccgccaggctccagggaaggggctggagtgggtggccaacataaagcaagatggaagtgagaaatactatgtggactctgtgaggggccgattcaccatctccagagacaacgccaagaactcactgttcctgcaaatgaacagcctgagagtcgaggacatggctgtgtattactgtgcgagagggcggttcgggccatattggggccagggaatcctggtcaccgtctcctca

SEQ ID NO: 10126 - DNA, 280 bp, Homo sapiens
  source 1..280: mol_type = other DNA
tgcagcctctggattcacctttaatagctattggatgacctgggtccgccaggctccagggaaggggctggaatgggtggccaacataaaacaagatagaagtgagaaatactattcggactctgtgagggggcgattcaccatctccagagacaacgccgagaactcagtgtacctgcaaatgaacagcctgagagccgaggacacggctgtctattactgtgcgagagggcggttcgggccatactggggccagggaatcctggtcaccgtctcctca

SEQ ID NO: 10127 - DNA, 280 bp, Homo sapiens
  source 1..280: mol_type = other DNA
tgcagcctctgaattcacctttagcagctattggatgacctgggtccgccaggctccagggaaggggctggagtgggtggccaacataaagcaagatggaagtgagaaatactatgtggactctgtgaagggccgattcaccatctccagagacaacgccaagaactcactgtatctgcagatgaacagcctgagaggcgaggacacggccgtgtattactgtgcgagggggcgctttggcccttactggggccagggaaccctggtcaccgtctcctca

SEQ ID NO: 10128 - DNA, 280 bp, Homo sapiens
  source 1..280: mol_type = other DNA
tgcagcctctgaattcacctttagcagctattggatgacctgggtccgccaggctccagggaaggggctggagtgggtggccaacataaagcaagatggaagtgagaaatactatgtggactctgtgaagggccgattcaccatctccagagacaacgccaagaactcactgtatctgcagatgaacagcctgagagccgaggacacggccgtgtattactgtgcgagggggcgctttggcccttactggggccagggaaccctggtcaccgtctcctca

SEQ ID NO: 10129 - DNA, 289 bp, Homo sapiens
  source 1..289: mol_type = other DNA
cactgtctctggtggctccatcaatagttactactggagctggatccggcagcccgccgggaagggactggagtggattgggcgtatctatgccagtgggggcaccaactacaacccctccctcaagagtcgagtcaccatgtcagtagacacgtccaagaaccagttatccctgaagctgagctctgtgaccgccgcggacacggccgtatactactgtgcgagggggccgtatacaggccactggttcgacccctggggccagggaaccctggtcaccgtctcctca

SEQ ID NO: 10130 - DNA, 292 bp, Homo sapiens
  source 1..292: mol_type = other DNA
cactgtctctggtgactccttcaggactgactgctggagctggatccggcagcccgccgggaagggactggagtggattggacgtgtttgtagtagtgggggcagcagcaactacaacccctccctcaagagtcgagtcaccatgtcagtagacacgtccaagaaccagttctccctgaacctgaactcggtgaccgccgcggacacggccgtgtattactgtgcgagagggccctatacgggccactggttcgacccctggggccaggaaaccctggtcaccgcctcctca

SEQ ID NO: 10131 - DNA, 289 bp, Homo sapiens
  source 1..289: mol_type = other DNA
cactgtctctggtggctccatcagtggttcctgctggagctggatccgacagcccgccgggaagggactggagtggattgggcgtgtcttcaccagtgggagcaccgactacaacccctccctcaagagtcgagtcaccatgtcaatagacacgtccaagaaccagttctccctgaagttgagttctgtgaccgccgcggacaaggccgtgtattactgtgcgagaggaccctatacaggccactggttcgacccctggggccagggaaccctggtcaccgtctcctca

SEQ ID NO: 10132 - DNA, 274 bp, Homo sapiens
  source 1..274: mol_type = other DNA
tacagcctctggattcaccttcagtaactataacatgaactgggtccgccaggctccagggaaggggctggagtgggtttcatacattagtactagcagtgataccatatactacgcagactctgtgaagggccgattctccatctccagagacaatgccaagaactcactgtttctgcaaatgaacagcctgagagacgaggacacggctgtatattactgtgcgagaggactcgcctactggggccagggaaccctggtcaccgtctcctca

SEQ ID NO: 10133 - DNA, 274 bp, Homo sapiens
  source 1..274: mol_type = other DNA
tgaagcctctggattcaccttcagtacttatgacatgaactgggtccgccaggctccagggaaggggctggagtgggtttcatacattagtagtagtagcggagccatatattacgcagactctgtgaagggccgattcaccatctccagagagaacgccaagaactcactgtatttgcaaatgaacagcctgagagccgaggacacggctctgtattactgtgcgagagggttggcctactggggccagggaaccctggtcaccgtctcctca

SEQ ID NO: 10134 - DNA, 274 bp, Homo sapiens; identical to SEQ ID NO: 10133
  source 1..274: mol_type = other DNA

SEQ ID NO: 10135 - DNA, 283 bp, Homo sapiens
  source 1..283: mol_type = other DNA
tgtagcctctggtttcacgtttagtgacttttggatgagctgggtccgccaggttccagggaaggggctggagtgggtggccaatataaaaccagatggaaatgagaaatactatgtggactctgtgaagggccgattcaccatctccagagacaacgccaagaactccctgttcttgcagatgaacaacctgagagtcgaggacacggctttatattactgtgcgagtcacagtagtggttatttttgttggggccagggaaccctggtcaccgtctcctca

SEQ ID NO: 10136 - DNA, 283 bp, Homo sapiens
  source 1..283: mol_type = other DNA
tgcagcctctggtttcacgtttagtgacttttggatgagctgggtccgccaggttccagggaaggggctggagtgggtggccaatataaaaccagatggaaatgagaaatattatgtggactctgtgaagggccgattcaccatctccagagacaacgccaagagctccctgttcttgcagatgaacaacctgagagtcgaggacacggctgtgtattactgtgcgagtcacagtagtggttatttttgttggggccagggaaccctggtcaccgtctcctca

SEQ ID NO: 10137 - DNA, 283 bp, Homo sapiens
  source 1..283: mol_type = other DNA
tgtagcctctggcttttccttgagtaatcattggatgagctgggtccgccaggctccagggaaggggctggagtgggtggccaacataaaacaagatggaagtgagaaatactatgtggactctgtgaggggccgattcagcatctccagagacaacgccaagaactcactgtatctgcaaatgaacagtctgagagccgaggacacggctgtgtattattgtgcgagtcacagtagtggttacttttgctggggccagggaaccctggtcaccgtctcctca

SEQ ID NO: 10138 - DNA, 286 bp, Homo sapiens
  source 1..286: mol_type = other DNA
tgcagcctctggattcaggttcaacatgtatagcatgaactggatccgccaggcccctgggaaggggctggagtggatttcatacatgacaagcgacaccagaaccatacatcacgcagactctgtgaggggccgattcaccatctctagagacaatgacaagagcttagtgtttctccaaatgaacagcctgagagacgaggacacggctgtgtattactgtgcgagatccgtggaaggccactttgacctctggggccagggaacccaggtcaccgtctcctca

SEQ ID NO: 10139 - DNA, 286 bp, Homo sapiens
  source 1..286: mol_type = other DNA
cgtagcctctggattcaccttcagtatttatagcatgaactggatccgccaggctccagggaaggggctggagtggattgcatacgagactagtgatactaaaaccataaagtacgtagactctgtgaggggccgattcaccatctccagagacaacgccaagaaattgttgtatctgcaaatgaacagcctgagacccgacgacacggctgtgtattattgtgcgagatctgtggaaggccactttgacctctggggccagggaaccctggtcaccgtctcctca

SEQ ID NO: 10140 - DNA, 289 bp, Homo sapiens
  source 1..289: mol_type = other DNA
tgcagcctctggattcacctttaccacctatgccatgagctgggtccgccaggctccagggaaggggctggagtgggtctcagctattagtcaaagtggttataacacgtactacgcagactccgtgaagggccggttcaccatctccagagacaattccgagaacacgctgtttctgcaaatgaacagcctgagagccgaggacacggccgtatattattgtgcgagagatcgggatcggccctactttgactactgggcccagggaaccctggtcaccgtctcctca

SEQ ID NO: 10141 - DNA, 289 bp, Homo sapiens
  source 1..289: mol_type = other DNA
tgcagcctctggattcagctttagcaactatgccatgagctgggtccgccaggctccagggaaggggctggagtgggtctcagctattggtagtagtgatgataacacatactacgcagactccgtgaagggccgcttcaccatctccagagacaattccaagaacacgctgtatctgcaaatgaacagcctgagagccgaggacacggccgtatattactgtgcgagagatagggatagaccctactttgactactggggccagggaaccctggtcaccgtctcctca

SEQ ID NO: 10142 - DNA, 283 bp, Homo sapiens
  source 1..283: mol_type = other DNA
tgcagtgtctgggttcatcgtcaatgaaaactacatgagttggctccgccaggctccagggaaggggctggagtgggtctcaatgatttatagcagtggtgaaatacattacacagactccgtgaagggccgattcaccatctccagacacaattccaacaacatactgtatcttcagatgaacggtctgagagtcgatgacacggccgtctattactgtgcgaggtggagtgggacattctacgactactggggccgcggaaacctggtcaccgtctcttcc

SEQ ID NO: 10143 - DNA, 283 bp, Homo sapiens
  source 1..283: mol_type = other DNA
tgcagcctctgggctcaccgtcagtagcaattacatgagctgggtccgccagcctccaggcaagggactggagtgggtctctattatgtatagcgatggcaccacatactacgcagactccgtgaagggccgattcaccatctccagagacaattccaagaacacgctttattttcaagtgaacagcctgaggaccgaggacacggccgtatattactgtgcgagatggagtgggaccttctatgactactggggccagggaaccctggtcaccgtctcctca

SEQ ID NO: 10144 - DNA, 283 bp, Homo sapiens
  source 1..283: mol_type = other DNA
tgcagtgtctgggttcatcgtcaatgaaaactacatgagttggctccgccaggctccagggaaggggctggagtgggtctcaatgatttatagcagtggtgaaatacattacacagactccgtgaagggccgattcaccatctccagacacaattccaacaacatactgtatcttcagatgaacagtctgagagtcgatgacacggccgtctattactgtgcgaggtggagtgggacattctacgactactggggccacggaaacctggtcaccgtctcttcc

SEQ ID NO: 10145 - DNA, 298 bp, Homo sapiens
  source 1..298: mol_type = other DNA
tgcagcctctggattcaccttcagtaggcactggatgcactgggtccgccaagctccagggaaggggctgatgtgggtctcacgtattaatagtgaggcgagaaggacaaactacgcggactccgtgaagggccgattcaccatctccagagacaacgccaagaacacgctgtatctgcaaatgaacagtctgagagacgacgacacggctgtgtattactgtgcaagagatcccagagatgggcgcgaatctcctccagattactggggccagggaaccctggtcaccgtctcttca

SEQ ID NO: 10146 - DNA, 298 bp, Homo sapiens
  source 1..298: mol_type = other DNA
tgcagcctctggattcaccttcagtaatcactggatgcactgggtccgccaaggtccagggaaggggctggtgtgggtctcacgtattaatggtgaagggagtaggacaaactacgcggtctccgtgaagggccgattcaccatctccagagacaacgccaagaacacactgtatctgcaaatgaacagtctgagagccgaggacacggctgtgtattactgtgcaagagatcccagagatggccgcgagtccccccccgactactggggccagggaattctggtcaccgtctcctca

SEQ ID NO: 10147 - DNA, 298 bp, Homo sapiens
  source 1..298: mol_type = other DNA
tgcagcctctggattcaccttcagtaggcactggatgcactgggtccgccaagctccagggaaggggctgatgtgggtctcacgtattaatagtgaggcgagaaggacaaactacgcggactccgtgaagggccgattcaccatctccagagacaacgccaagaacacgctgtatctgcaaatgaacagtctgagagacgacgacacggctgtgtattactgtgcaagagatcccagagatgggcgcgaatctcctccagactactggggccagggaaccctggtcaccgtctcttca

SEQ ID NO: 10148 - DNA, 277 bp, Homo sapiens
  source 1..277: mol_type = other DNA
tacaatctctggattcatgtttacaaccgatcacatgacctgggcccgccaggctccagagaaggggctggagtgggtctcagtttttcgtgccagtgattctaccacatactacgcagactccgtgaagggccggttcaccatctccagagacaattccaagaacacggtgtatctgcagatgaacagcctgaaagtcgacgacacggccatatattactgtgtcaaaggacgaggtgaccactggggccagggatccctggtcaccgtctcctca

SEQ ID NO: 10149 - DNA, 274 bp, Homo sapiens
  source 1..274: mol_type = other DNA
tgcagcctctgggttcacctttaccaactatgtcatgagctgggtccgccaggctccagggaagtggctggagtgcgtctcagttattagtgatgttgataaaacatactacgcagactccgtgaagggccgattcaccatctccagagacagtaccaagaacacactgtatctgcaaatgaacaccctgagagccgaggacacggccctgtattactgtgtgaaaggtcgaggtgaccattggggccagggaaccctggtcaccgtctcctca

SEQ ID NO: 10150 - DNA, 283 bp, Homo sapiens
  source 1..283: mol_type = other DNA
tacaacctctggattcacctttagtagcttttggatgagctgggtccgccaggctccaggaaaggggctggagtgggtggccaacgttaaacaaaatggaagtgagagatactatgtggactctgtgaagggccgattcaccatctccagagacgacgccacgaaatcattgtatctacaaatgagcaacctgagagccgaggacacggctgtttattactgtgtgagaggctctgcacacctgcgttactggggccagggaaccctggtcgccgtctcctca

SEQ ID NO: 10151 - DNA, 283 bp, Homo sapiens
  source 1..283: mol_type = other DNA
tgcagcctctggattcaccttaagtagctattggatgagttgggtccgccaggctccagggaaggggctggagtgggtggccaacataaagcaaaatggaagtgagaaatactatgtggactctgtgaagggccgattcaccatctccagagacgacgccaagaactcactgtatctgcaaatgaacagcctgagagccgaggacacggctgtgtattactgtgtgagagggtcggcacacctccgctactggggccagggaaccctggtcaccgtctcctca

SEQ ID NO: 10152 - DNA, 283 bp, Homo sapiens; identical to SEQ ID NO: 10151
  source 1..283: mol_type = other DNA

SEQ ID NO: 10153 - DNA, 283 bp, Homo sapiens
  source 1..283: mol_type = other DNA
tgcaacctcaggattcacctttagtagtttttggatgagctgggtccgccaggttccaggacaggggctgcagtgggtggccaacataaagcaaagtggaagtgagaaatactatgtggactctgtgaagggccgattcaccatctccagagacgacgccaagaaatcactgtatctacaaatgaacagcctgagagccgaggacacggctgtctattactgtgtgagaggctccgcacacctgcgttactggggccagggaaccctggtcgccgtctcctca

SEQ ID NO: 10154 - DNA, 279 bp, Homo sapiens
  source 1..279: mol_type = other DNA
gcttctggatataccttcaccggctaccatatccactgggtgcgacaggcccaagggcttgagtggatgggacggatcaaccctaacagtggtgacacaaaatatgcacagaagtttcagggcagggtcaccatgagcagggacacgtccatcaccacaacctacatggaactgaacagactgacatctgacgacacggccgtctattactgtgcgagaggcgccggatccaacaggttcgatccctggggccagggaaccctggtcaccgtctcctca

SEQ ID NO: 10155 - DNA, 285 bp, Homo sapiens
  source 1..285: mol_type = other DNA
gctcctggagacaccttcaccgacgactatatacactgggtgcggcaggcccccggacaaggtcttgagtggatgggctggatcagccctaaaagtggtggaacaaactatatacagaggtttcagggcagggtcaccctgaccagggacacgtccattaccacagtctacatggaactgaagagcctaacatctgacgacacggccgtctatttttgtgcgagaggggccggaagcaaccggttcgacccctggggccaggggaccctggtcatcgtctcctct

SEQ ID NO: 10156 - DNA, 285 bp, Homo sapiens
  source 1..285: mol_type = other DNA
gctcctggagacaccttcaccgacgactatatacactgggtgcggcaggcccccggacaaggtcttgagtggatgggctggatcagccctaaaagtggtggaacaaactatatacagaggtttcagggcagggtcaccctgaccagggacacgtccattaccacagtctacatggaactgaagagcctaacatctgacgacacggccgtctatttttgtgcaagaggggccggaagcaaccggttcgacccctggggccaggggaccctggtcatcgtctcctct

SEQ ID NO: 10157 - DNA, 279 bp, Homo sapiens
  source 1..279: mol_type = other DNA
gcttctggatacaccttcaccggctcctatatacactgggtgcgacaggcccaagggcttgagtggatgggatggatcagcccgaccagtggtgacacaaagtatgcacagaagtttcagggcagggtcaccatgagcagggacacgtccatcaccacaatttacttggaactgaacagactgacatctgacgacacggccgtgtattactgtgcgagaggcgccggatccaaccggttcgacccctggggccagggaaccccggtcaccgtctcctca

SEQ ID NO: 10158 - DNA, 280 bp, Homo sapiens
  source 1..280: mol_type = other DNA
tgcagcctctggattcacctttattagttcctggatgaactgggtccgccaggctccagggaaggggctggagtgggtggccaacataaaccaagatggaagtgagacacactatgtggactctgtgaagggccgattcaccatctccagagacaacgccaagaattcagtgtatctgcaaatgaacagcctgagagacgaggacacggctgtgtacttctgtgcgagacatcggggactagcctattggggccagggaaccctggtcaccgtctcctca

SEQ ID NO: 10159 - DNA, 280 bp, Homo sapiens
  source 1..280: mol_type = other DNA
tgcagcctctggattcacctttagtagtgattggatgagctgggtccgccaggctccagggaaggggctggagtgggtggccaacattaagcaagatggaagtgagaaatactatgtggactctgttaagggccgattcaccatctccagagacaacgccgagaactcactgtttctgcaaatgaacagcctgagagccgaggacacggctgtgtattattgtgcgagacatagggggctggcttactggggccagggaaccctggtcaccgtccccgca

SEQ ID NO: 10160 - DNA, 280 bp, Homo sapiens; identical to SEQ ID NO: 10158
  source 1..280: mol_type = other DNA

SEQ ID NO: 10161 - DNA, 298 bp, Homo sapiens
  source 1..298: mol_type = other DNA
cactgtctctggtggctccatcagcagtactaattcctactggggctggatccgccagcccccagggaaggagctggagtggattgggactatctattatactgggggcacctactacgacccgtccctcaagagtcgagtcaccatatccgtagacgcgtccaagaaccagttctccctgaggctgacctctgtgaccgtcgcagatacggctgtgtattactgtgcgagacgcatgactgggcctggagggtggttcgactcctggggccagggaaccctggtcaccgtctcctca

SEQ ID NO: 10162 - DNA, 298 bp, Homo sapiens
  source 1..298: mol_type = other DNA
cactgtctctggtggctccatcagcagtactaattcctactggggctggatccgccagcccccagggaaggagctggagtggattgggactatctattatagtgggggcacctactacgacccgtccctcaagagtcgagtcaccatatccgtagacgcgtccaagaaccagttctccctgaggctgacctctgtgaccgtcgcagatacggctgtgtattactgtgcgagacgcatgactgggcctggagggtggttcgactcctggggccagggaaccctggtcaccgtctcctca

SEQ ID NO: 10163 - DNA, 298 bp, Homo sapiens
  source 1..298: mol_type = other DNA
cactgtctctggtggctccatcagtagcagtaattcctactggggctggatccgccagtccccagggaaggggctggagtggatcgggactgttcattacaacgggaacacctactatcatccgtccctccagagtcgagtcaccatacccctagacacgtccaagaaccagttctccctgaggctgacctctgtgagcgccgcagacacgggtgtttattactgtgcgagacgtatgacaggtcctggaggctggttcgactcctggggccagggaaccctggtcaccgtctcctca

SEQ ID NO: 10164 - DNA, 298 bp, Homo sapiens
  source 1..298: mol_type = other DNA
tgcagcctctggattcacctttgatgattatgccatgcactgggtccggcaagctccagggaagggcctggagtgggtctccggtattagttggaataggaataccataggctatgcggactctgtgaagggccgattcaccatctccagagacaacgccaagaactccctgtatctgcaaatgaacagtctgagaactgaggacacgggcttgtattactgtgcaaaaggattattcggtcagctctccaactggatcgacccctggggccagggaaccctggtcaccgtctcctca

SEQ ID NO: 10165 - DNA, 298 bp, Homo sapiens
  source 1..298: mol_type = other DNA
tgcagcctctggattcacctttgatgattatgccatgcactgggtccggcaagttccagggaagggcctggagtgggtctcaggtattagttacaatagtgttaccataggatatgcggagtctgtgaagggccgattcaccatctccagagacaacgccaagaactccctgtatctgcaaatgaacagtctgagagctgaggacacggccttgtattactgtgcaaaaggcctgttcgggcagttatctaattggattgacccctggggccagggaaccctggtcaccgtctcctca

SEQ ID NO: 10166 - DNA, 292 bp, Homo sapiens
  source 1..292: mol_type = other DNA
cgctgtatatgatggctctttcagtccttactactggagctggctccgccagcccccagggaaggggctggagtggattggggaaatcaatcatcgtggaagcaccaactacaacccgtccctcaagagtcgggtcaccatatcagcagacacgtccaagaggcagttctccctgaaactgagctctatgaccgccgcggacacggctgtctattactgtgcgagagaggttaaaagtggtgatgatgcttttgatgtctggggccaagggacaatggtcaccgtctcttca

SEQ ID NO: 10167 - DNA, 292 bp, Homo sapiens
  source 1..292: mol_type = other DNA
cgctgtctatggtgggtccttaaataatttctactggacctggatccgccagcccccagggcaggggctggagtggattggggaaatcaatcatcgtggaagcaccaactgcaacccgtccctcaagagtcgagtcaccatatcagtggacgggtccaagaaccagttatccctgaaactgacctctgtgaccgccgcggacacggctgtgtattactgtgcgagagaagtgaaatcaggggatgatgcttttgatgtatggggccaggggacaatggtcaccgtctcctca

SEQ ID NO: 10168 - DNA, 283 bp, Homo sapiens
  source 1..283: mol_type = other DNA
tgcagcctctggaagcatctttagaagttattggatgacctgggtccgccaggctccagggaaggggctgcagtgggtggccaacatagaccaagatggaaatgagaaatactatatggactctgtgaagggccgattcaccatctccagagacaacgccgagaactcactgtatttgcaaatgaacagcctgagagtcgaggacacggctgtctatttctgtgcgagtcccccggcatacgggggctactggggccagggaaccctggtcaccgtctcctca

SEQ ID NO: 10169 - DNA, 283 bp, Homo sapiens
  source 1..283: mol_type = other DNA
tgcagcctctggattcacctttagtagctcttggatgacctgggtccgccaggctccagggaaggggctggagtgggtggccaacattaaccaaggtggaactgagaaaaagtatgtggactctgtgaagggccgattcaccgtctccagggacaacgccaagaactcactgtatctacaaatgaacagcctgagaggcgaggacacggctgtgtattactgtgcgagtcccccggcgtacgggggctactggggccagggaaccctggtcaccgtctcctca

SEQ ID NO: 10170 - DNA, 283 bp, Homo sapiens
  source 1..283: mol_type = other DNA
tacagcctctggattcacctttggtaactgttggatgagctgggtccgccaggctccagggaaggggctggagtgggtggccaacataaagcaagatggaagtgagaggatctacgtggactctgtgaagggccgattcaccatctccagagacaacgccaggaactcactgtttctgcaaatgaacaccctgagagccgaggacacggctgtttattactgtgcgagtcccccggcgtacgggggctactggggccagggaaccctggtcaccgtctcctca

SEQ ID NO: 10171 - DNA, 283 bp, Homo sapiens
  source 1..283: mol_type = other DNA
tgcagcctctggaatcatttttagaagttattggatgagctgggtccgccaggctccagggaaggggctggagtgggtggccaacataaaccaagatggaaatgagaaatactatatggactctgtgaagggccgattcaccatctccagagacaacgccgagaactcactgtatttgcaaatgaacagcctgagagtcgaggacacggctgtgtattactgtgcgagtcccccggcatacgggggctactggggccagggaaccctggtcaccgtctcctca

SEQ ID NO: 10172 - DNA, 283 bp, Homo sapiens
  source 1..283: mol_type = other DNA
tgcagcctctggattcacctttagtacgaattggatgacctgggtccgccaggctccagggaaggggctggagtgggtggccaacataagacaagatggaggtgagaaatactatgtggactctgtgaagggccgattcaccatctccagagacaacgccaagaattcactgtatctgcaaatgaacagcctgagagccgaggacacggctgtgtattactgtgcgagtcccccggcgtacgggggctactggggccagggaaccgtggtcaccgtctcctca

SEQ ID NO: 10173 - DNA, 283 bp, Homo sapiens
  source 1..283: mol_type = other DNA
tgtagcctctggattcacctttagtagctattggatgacctgggtccgccaggctccagggaaggggctggagtgggtggccaacataaaggaagatggaggtgagaaatactatgtggactctgtgaagggccggttcaccatctccagagacaacgccaagaaatcactgtatctgcaaatgaacagcctgagagccgaggacacggccgtgtattactgtgcgagtccgcccgcctatggcggctactggggccagggaaccctggtcaccgtctcctca

SEQ ID NO: 10174 - DNA, 283 bp, Homo sapiens
  source 1..283: mol_type = other DNA
tgtaggctctggattcacctttagtagctattggatgacctgggtccgccaggctccagggaaggggctggagtgggtggccaacataaaggaagatgggggtgagaagtactatgtggactctgtgaagggccggttcaccatctccagagacaacgccaagaaatcactgtatctgcaaatgagcagcctgagagccgaggacacggccgtttattactgtgcgagtccgcccgcctatggcggctactggggccagggaaccctggtcaccgtctcctca

SEQ ID NO: 10175 - DNA, 283 bp, Homo sapiens
  source 1..283: mol_type = other DNA
tgtggcctctggcttcacttttaataactattggatgacctgggtccgccaggctccagggaaggggctggagtgggtggccaacataaagcaagatggaggtgacaaatactatgtggactcggtgaagggccgcttcaccgtctccagagacaacgccaagaaatcactgtatctccaaatgaacagcctgagagccgaggacacggccgtgtattactgtgcgagtccgcccgcctatggcggctactggggccagggaaccctggtcaccgtctcctca

SEQ ID NO: 10176 - DNA, 286 bp, Homo sapiens
  source 1..286: mol_type = other DNA
tgcagcctctggattcaccttcagtaactactggatgcagtgggtccgccaagctccagggaaggggctggtgtcggtctcacatattaatagtgatgggagtagcacaacctacgcggactccgtgaagggccgattcaccatctccagagacaacgccaagaacacgctgtatctgcaaatgaacagtctgagagccgaggacacggctgtatattactgtgcaagagattactatggttcgtatgactactggggccagggaaccctggtcaccgtctcctca

SEQ ID NO: 10177 - DNA, 286 bp, Homo sapiens
  source 1..286: mol_type = other DNA
tgcagcctctggattcaccttcaatacctacagtatgcactgggtccgccaagctccagggagggggctagtgtgggtctcagatattaacaatgatgggaatattattacgtacgcggactccgtgaagggccgattcaccgtctccagagacaacgccaagaacaccctgtatctgcaaatgaacagtctgagagccgaggacacggctgtgtattactgtgcaagagactattatggttcgtacgactactggggccggggaaccctggtcaccgtctcctca

SEQ ID NO: 10178 - DNA, 282 bp, Homo sapiens
  source 1..282: mol_type = other DNA
gcctctgggtacaccttcactaccgatgctatcaattggctgcgacaggcccctggacaagggcttgagtggatgggatggatccacaccggcactggaaacccaacatatgtccagggcttcacaggacgatttgtcttctccttggacacctctgtcaacacggcatatctgcaggtcagcagcctaaaggctgaggacactgccgtgtattattgtgcgaaaggtgctagcagtagattggcggtctggggccaagggaccacggtcaccgtctcctca

SEQ ID NO: 10179 - DNA, 282 bp, Homo sapiens
  source 1..282: mol_type = other DNA
gcttttggatacagcttcactagcgatgcgattaattggttgcgactggcccctggacaaggtcttgactggatgggatggatcaacaccaacactgggaccccaacgtatgtcgagggcttcacaggacgatttgtcttctccttggacacctctgtcagcacggcatatctgcagatcagcagcctaaagactgaagacactgccatatattactgtgcgaaaggggctagcagcaggttggccgtctggggccaagggaccacggtcaccgtctcctca

SEQ ID NO: 10180 - DNA, 282 bp, Homo sapiens
  source 1..282: mol_type = other DNA
gcttctgggtacaccttcactaccgatgctatcaattggctgcgacaggcccctggacaagggcttgagtggatgggatggatcaacaccggcactgggaacccaacatatgtccagggcttcacaggccgatttgtcttctccttggacacctctgtcaacacggcatatctgcaggtcagcagcctaaaggctgaggacactgccgtgtattactgtgcgaaaggtgctagcagtagattggcggtctggggccaagggaccacggtcaccgtctcctca

SEQ ID NO: 10181 - DNA, 277 bp, Homo sapiens
  source 1..277: mol_type = other DNA
tgtagcctctggattcacctttagcaactatgccatgggctgggtccgccagtctccagggaaggggctggagtgggtctcaactatcggtgctagtgctggtggcacattctacgcagactctgtaaagggccggttcaccatctccagagacgattccagggacacgctgcatctacaaatgaacagcctgagtgtcgaagacacggccgtatattactgtgcgaaaggggaattagtcggttggggccagggaaccctggtcaccgtctcctca

SEQ ID NO: 10182 - DNA, 277 bp, Homo sapiens
  source 1..277: mol_type = other DNA
tgcagcctctggattcacctttagtagctatgtcatgggctgggtccgccaggctccagggaaggggctggagtgggtctcaagtattagtggtggtggtgagagcagtacctacgcagtctccgtgaagggccggttcaccatctccagagacaatcccaagaacacggtgtatctgcaaatgaacaatccgagagccgaggacacggccgtctattactgtgcgaaaggcgagttggtggggtggggccagggaaccctggtcaccgtctcgcca

SEQ ID NO: 10183 - DNA, 285 bp, Homo sapiens
  source 1..285: mol_type = other DNA
gcttctggaggcaccttcaacaactatgctctcagctgggtgcgacaggcccctggacaagggcttgagtggatgggagggatcatccctatctttggtaaagcaaactacgcacagaagttccagggcagagtcacgattaccgcggacgaatccacgagtacagcctacatggagctgagcagcctgagatctgaggacacggccgtatattactgtgcgagagacggaggtagtgggagctacttctactggggccagggaaccctggtcactgtctccaca

SEQ ID NO: 10184 - DNA, 285 bp, Homo sapiens
  source 1..285: mol_type = other DNA
gcttctggaggcaccttcagcagttatgctatcagctggctgcgacaggcccctggacaagggcttgagtggatgggagggatcatccctatttttggtagagcaaactacgcacagaagttccagggcagagtcacgattaccgcggacgaatccacgagcacagcctacatggagctgaacagtctgagatctgacgacacggccgtatattattgtgcgagagacggaggtagtgggagctacttctactggggccagggaaccctggtcaccgtctcctca

SEQ ID NO: 10185 - DNA, 285 bp, Homo sapiens; identical to SEQ ID NO: 10183
  source 1..285: mol_type = other DNA

SEQ ID NO: 10186 - DNA, 285 bp, Homo sapiens
  source 1..285: mol_type = other DNA
gcttctggaggcaccttcaacctctatgacatcagctgggtgcgacaggcccctggacaagggcttgagtggatgggaggaatcacccctatctttggtacagcaaagtacgcacagaagttccagggcagagtcacgataaccgcggacgaatccacgtacacagcctacatggagttgagcagcctgagatctgatgacacggccgtgtattattgtgcgagagatggcggaagtgggagttatttctactggggccagggaaccctggtcaccgtctcccca

SEQ ID NO: 10187 - DNA, 285 bp, Homo sapiens
  source 1..285: mol_type = other DNA
gcttctggaggcaccttcaacaactatgacatcagctgggtgcgacaggcccctggacaagggcttgagtggatgggaggaatcacccctgcctttggaacagcaaagtacgctcagaaattcctgggcagagtcacgataaccgcggacgtatccacgactacagcctacatggaggtgagaagcctgagatctgatgacacggccgtgtattattgtgcgagagatggcggaagtgggagttatttctactggggccagggaaccctggtcaccgtctcctcg

SEQ ID NO: 10188 - DNA, 285 bp, Homo sapiens
  source 1..285: mol_type = other DNA
gcttctggaggcactttcaccaactatgacatcagctgggtgcgacaggcccctggacaaggacttgagtggatgggaggaatcacccctatctttggttcagcacagtacgcacagaagttccagggcagagtcacaataaccgcggacgaatccacgaggacagcctacatggagctgagcaggctgacatctgatgacacggccgtgtattattgtgcgagagatggcggaagtgggagctatttctactggggccagggaaccctggtcaccgtctcctca

SEQ ID NO: 10189 - DNA, 285 bp, Homo sapiens
  source 1..285: mol_type = other DNA
gcttctggaggcaccttcaccaactatgagatcacctgggtgcgacaggcccctggacaagggcttgagtggatgggaggaatcacccctctgtttgctaaagcaaactatgcgcagaagttccagggcagagtcacgataaccgcggacgactccactaccacagcctacatggaactgagtagtctgagattcgatgacacggccatgtattattgtgcgagagatggcggcagtgggagttatttctactggggccagggaaccctggtcaccgtctcctca

SEQ ID NO: 10190 - DNA, 285 bp, Homo sapiens
  source 1..285: mol_type = other DNA
gcttctggaggcaccttcaccaactatgacatcagctgggtgcgacaggcccctggacaagggcttgagtggatgggaggaatcacccctatctttggcacaccaaaatacgcacagaacttccagggcagagtcacgataagcgcggacgaatccacgagcacagcctacatggacctgagcagcctgacctctgatgacacggccgtgtattattgtgcgagagatggcggaagtgggagttatttctactggggccagggaaccctggtcaccgtctcctca

SEQ ID NO: 10191 - DNA, 285 bp, Homo sapiens
  source 1..285: mol_type = other DNA
gcctctggaggcaccttcagcaactatgacatcagttgggtgcgacaggcccctggacaaggtcttgagtggatgggaggaatcacccctctctttgatagagccaagtatgcacagaaattccagggcagagtcacgataaccgcggacgaatcaacgaacacagcctacatggaattgagcagcctgagatctgatgacacggccgtgtattattgtgcgagagatggcggaagtgggagttatttctactggggccagggaaccctggtcaccgtctcctcg

SEQ ID NO: 10192 - DNA, 285 bp, Homo sapiens
  source 1..285: mol_type = other DNA
gcttctggaggcactttcaccaactatgacatcagctgggtgcgacaggcccctggacaaggacttgagtggatgggaggaatcacccctatctttggttcagcacagtacgcacagaagttccagggcagagtcacaataaccgcggacgaatccacgaggacagcctacatggagctgagcaggctgacatctgatgacacggccgtgtattattgtgcgagagatggcggaagtgggagctatttctactggggccaagggaccacggtcaccgtctcctca

SEQ ID NO: 10193 - DNA, 285 bp, Homo sapiens; identical to SEQ ID NO: 10186
  source 1..285: mol_type = other DNA

SEQ ID NO: 10194 - DNA, 285 bp, Homo sapiens
  source 1..285: mol_type = other DNA
gcctctggaggcaccttcagcaactatgacatcagttgggtgcgacaggcccctggacaaggtcttgagtggatgggaggaatcacccctctctttgatagagccaagtatgcacagaaattccagggcagagtcacgataaccgcggacgaatcaacgaacacagcctacatggaattgagcagcctgagatctgatgacacggccgtctattattgtgcgagagatggcggaagtgggagttatttctactggggccagggaaccctggtcaccgtctcctcg

SEQ ID NO: 10195 - DNA, 285 bp, Homo sapiens
  source 1..285: mol_type = other DNA
gcttctggaggcaccttcaccaactatgacatcagctgggtgcgacaggcccctggacaaggtcttgagtggatgggaggaatcacccctctctttggtagagccaaatacgcacagaagttccagggcagagtcacgataaccgcggacgaatccacgaacacagcctacatggagttgagcagcctgagatctgatgacacggccgtgtattattgtgcgagagatggcggaagtgggagttatttctactggggccagggaaccctggtcaccgtctcctca

SEQ ID NO: 10196 - DNA, 285 bp, Homo sapiens
  source 1..285: mol_type = other DNA
gcttctggaggcaccttcataaactatgacatcagctgggtgcgacaggcccctggacaaggacttgagtggatgggaggaatcacccctatctttggttcagcacagtacgcacacaacttccagggcagagtcacaataaccgcggacccatccacgaggacagtctacatggacctgagcaggctgacatctgatgacacggccgtctattattgtgcgagagatggcggaagtgggagttatttctactggggccagggaaccctggtcaccgtctcctca

SEQ ID NO: 10197 - DNA, 285 bp, Homo sapiens
  source 1..285: mol_type = other DNA
gcttctggaggcaccttcagcaactatgacatcagctgggtgcgacaggcccctggacaaggtcttgagtgggtgggaggaatcacccctctctttaatagagccaactacgcacagaaattccagggcagagtcacgataaccgcggacgaatcaacgaacacagcctacatggagttgagcagcctgagatctgatgacacggccgtgtattattgtgcgagagatggcggaagtgggagttatttctactggggccagggaaccctggtcaccgtctcctca

SEQ ID NO: 10198 - DNA, 285 bp, Homo sapiens
  source 1..285: mol_type = other DNA
gcttctggaggcaccttcattaattatgacatcagctgggtgcgacaggcccctggacaagggcttgagtggatgggaggaatcacccctatctttggtacagcaaagtacgcacagaagttccagggcagagtcacgataaccgcggacgaatccacgagcacagcctacatggagctgagcagcctgaaatctgatgacacggccgtgtattattgtgcgagagatggcggaagtggaagttatttctactggggccagggaaccctggtcaccgtctcctca

SEQ ID NO: 10199 - DNA, 285 bp, Homo sapiens
  source 1..285: mol_type = other DNA
gcttctggaggcaccttcaccaactatgctatcagctgggtgcgacaggcccctggacaagggcttgagtggatgggaggaatcacccctatctttggtatagtaaactacgcacagaagttccagggcagagtcacgataaccgcggacgaatccacgaccacagcctacatggaggtgagcagcctgagatctgatgacacggccgtatattattgtgcgagagatggcggaagtgggagttatttctactggggccagggaaccctggtcaccgtctcctca

SEQ ID NO: 10200 - DNA, 285 bp, Homo sapiens
  source 1..285: mol_type = other DNA
gcgtctggaggcaccttcagcaactatgaaatcagttgggtgcgacaggcccctggacaagggcttgagtggatgggaggaatcacccctatcttcgatacaccaaagtacgcaccgaagttccagggcagagtcacgataaccgcggacaaatccacgagcacaacctacatggagctgaccagactgagatctgatgacacggccatttattattgtgcgagagatggcggaagtgggagttatttctactggggccagggaaccctggtcaccgtctcctca

SEQ ID NO: 10201 - DNA, 285 bp, Homo sapiens
  source 1..285: mol_type = other DNA
gcttctggaggcaccttcataaactatgacatcagctgggtgcgacaggcccctggacaaggacttgagtggatgggaggaatcacccctatctttggttcagcacagtacgcacacaacttccagggcagagtcacaataaccgcggacccatccacgaggacagtctacatggacctgagcaggctgacatctgatgacacggccgcctattattgtgcgagagatggcggaagtgggagttatttctactggggccagggaaccctggtcaccgtctcctca

SEQ ID NO: 10202 - DNA, 283 bp, Homo sapiens
  source 1..283: mol_type = other DNA
tgtagcctcgggattcacctttaataaccattggatgaactgggtccgccaggctccagggaaggggctggagtgggtgggcaacattaacccagatggaagcaaaaaattctatgtggactctatgaagggccgattcaccatctccagagacaacgccaaggggtcattgtatctgcagatgaatagcctgagagtcgacgacacggctatgtattactgtgcgagagatgggaggacgggagactactggggccagggagccctggtcaccgtctcctca

SEQ ID NO: 10203 - DNA, 283 bp, Homo sapiens
  source 1..283: mol_type = other DNA
cgcagcctctggattcacttttagtatgcattggatgagttgggtccgtcaggctccagggaaggggctggagtgggtggccaacataaagcaagatggaagtgagaaatactatgtggactctgtgaagggccgattcattatctccagagacaacgccgagaattcactgtatctgcaaatgaacagcctgagagccgacgatacggctatgtattactgtgcgagagatggaaggacgggggactactggggccagggaaccctggtcaccgtctcctca

SEQ ID NO: 10204 - DNA, 274 bp, Homo sapiens
  source 1..274: mol_type = other DNA
tgtagcctctggattcaccttcagtagttatgaaatgaactgggtccgccaggctccaggggaggggctggagtgggtttcagaaattagtagtagtggtactaccatgtactacgcagactctgtgcagggccgattcaccatctccagagacaacgccaagaattcactgtatctgcaaatgaacagcctgagagtcgaggacacggctgtttattactgtgcgggacggggggactactggggccagggcaccctggtcaccgtctcctca

SEQ ID NO: 10205 - DNA, 274 bp, Homo sapiens
  source 1..274: mol_type = other DNA
tacggcctctggattcaccttcagtgactatgaaatgaattgggtccgccaggctccaggaaaggggctggaatggatttcagaaattagtgggagtgggactatcatacactacgcagactctgtgaagggccgattcaccatctccagagacaacgccaaaaagtcagtgcatctggaaatgaccagcctgcgaggcgaggacacgggtgtttattactgcgcggggagaggggactactggggccagggaaccctggtcaccgtctcctca

SEQ ID NO: 10206 - DNA, 293 bp, Homo sapiens
  source 1..293: mol_type = other DNA
ccatctccggggacagtgtctctagcaacagtgctgcttggaactggttcaggcagtccccatcgagaggccttgagtggctgggaaggacatactacaggtccaagtggtataatgactatgtagtatctgtgaaaagtcgaataatcatcaacccagacacatccaagaaccagttctccctgcagctgaactctgtgactcccgaggacacggctgtgtattactgtgcccggggtcggtcctatgcttttgatatctggggccaagggacaatggtcaccgtctcttca

SEQ ID NO: 10207 - DNA, 293 bp, Homo sapiens
  source 1..293: mol_type = other DNA
acatctccggggacagtgtctctagcaacagtgttgcttggaactggatcaggcagtccccatcgagaggccttgagtggctgggaaggacatactacgggtccaagtggtataatgattatgcagtatctgtgaaaagtcgaataactatcaacccagacacatccaaggaccaattctccctgcagctgaactctgtgactcccgaggacacggctgtgtattactgtgcccgggggcggtcctatgcttttgatatctggggccaagggacaatggtcaccgtctcttca

SEQ ID NO: 10208 - DNA, 293 bp, Homo sapiens
  source 1..293: mol_type = other DNA
ccatctccggggacagtgtctctagcgacagtgctgcttggaactggatcaggcagtccccatcgagaggccttgagtggctgggaaggacatactacaggtccaagtggtataatgattatgcagaatctgtagaaggtcgaataaccatcaacccagacacatccaagaaccacttctccctgcagctgaactctgtgactcccgaggacacggctgtgtattactgtgcaagaggacgctcctatgcttttgatatctggggccaagggacaatggtcaccgtctcttca

SEQ ID NO: 10209 - DNA, 293 bp, Homo sapiens
  source 1..293: mol_type = other DNA
ccatctccggggacagtgtctctagcaacagtgctgcttggaactggatcaggcagtccccatcgagaggccttgagtggctgggaaggacatactacaggtccaagtggtgtaatgattatgcagtatctgtgaagagtcgaataaccatcaacccagacacatccaagaaccagttctccctgcagctgaactctgtgactcccgaggacacggctgtgtattactgtgcaaggggaaggagttatgcttttgatatctggggccaagggacaatggtcaccgtctcttca

SEQ ID NO: 10210 - DNA, 303 bp, Homo sapiens
  source 1..303: mol_type = other DNA
gcatctggatacaccttcaccagctactatatgcactgggtgcgacaggcccctggacaagggcttgagtggatgggagtaatcaaccctagtggtggtagcacaaactacgtacagaaattccagggcagagtcaccatgaccagggacacgtccacgagcacagtctacatggagctgagcagcctgagatctgaggacacggccgtgtattactgtgcgagagggatcggagagagatggctacaattggggggctactttgactactggggccagggaaccctggtcaccgtctcctca

SEQ ID NO: 10211 - DNA, 303 bp, Homo sapiens
  source 1..303: mol_type = other DNA
gcatctggatacaccttcaccagctactatatgcactgggtgcgacaggcccctggacaagggcttgagtggatgggaataatcaaccctagtggtggtagcacaaactacgcacagaaattccagggcagagtcaccatgaccagggacacgtccacgagcacagtctacatggagctgagcagcctgagatctgaggacacggccgtgtattactgtgcgagagggatcggagagagatggctacaattggggggctactttgactactggggccagggaaccctggtcaccgtctcctca

SEQ ID NO: 10212 - DNA, 303 bp, Homo sapiens
  source 1..303: mol_type = other DNA
gcatctggatacaccttcaccaattactatatgcactgggtgcgacaggcccctggacaagggcttgagtggatgggaataatcaaccctagtggtggtagcacaaacttcgcacggaagttccagggtagagtcaccatgaccactgacacgtccacgaccacagtctatatggagttgagcagcctgagatctgaagacacggccgtgtattactgtgcgagggggatcggagagagatggctacaattggggggctactttgactactggggccagggaaccctggtcaccgtctcctca

SEQ ID NO: 10213 - DNA, 303 bp, Homo sapiens
  source 1..303: mol_type = other DNA
gcatctggatacagcttcaccaattactatatacactgggtgcgacaggcccctggacaaggacttgagtggatgggaatagtcaaccctaatagtggttccacaaactacgcacagaggttccagggcagagtcaccatgaccagggacacgtccacgagcacaacctacatggacctgagcagcctgacatctgacgacacggccatatattactgtgcgcgaggaataggagagagatggcttcaactcgggggctactttgactactggggccacggaaccctggtcaccgtctcctca

SEQ ID NO: 10214 - DNA, 289 bp, Homo sapiens
  source 1..289: mol_type = other DNA
tgcagcctctggattcaccttcagtgactactacatgagctggatccgccaggctccagggaaggggctggagtgggtttcatacattagtagtagtggttataccatatactacgcagactctgtgaagggccgattctccatctccagggacaacgccaagaactcactgtatctgcaaatgaacagcctgagagccgaggacacggccgtgtattactgtgcgagagattccggagggtactactttgactactggggccagggaaccctggtcaccgtctcctca

SEQ ID NO: 10215 - DNA, 289 bp, Homo sapiens
  source 1..289: mol_type = other DNA
tgcagtctctggattcaccttcagtgactactacatgacctggatccgccaggctccagggaaggggctggaatggttatcatacattagtagtagaggtagtaccatatactacgcagactctgtgaagggccgattcaccatctccagggacaacgccaagaactcactgtatctgcaaatgaacagcctgagagccgaggacacggccgtctattactgtgcgagagattctggtggctactattttgactactggggccagggaaccctggtcaccgtctcctca

SEQ ID NO: 10216 - DNA, 289 bp, Homo sapiens
  source 1..289: mol_type = other DNA
tgaagcctctggattcagttttagttcctattggattagttgggtccgccgggttccagagaaggggctggagttagtggcaaacataaatgaagatggaagtgtgaaaaactttgtggaatctgtgaggggccgattcaccatctccagagacaacgccaagaactcactgtatctgcaaatgaacagcctgagagtcgacgatacggcagtctattactgtgcgagagatccgggttcgggtgcatatgatgtctggggccaggggacaatggtcaccgtctcttca

SEQ ID NO: 10217 - DNA, 289 bp, Homo sapiens
  source 1..289: mol_type = other DNA
tgcagcctctggattcgactttaatacttattggatgagttgggtccgccagactccagggaaggggctggagttggtggccaacattaatcaagatggaggtcggaacaactatgtggactttgtgaagggccgattcaccatctccagagacaacaccaacaagtcactgtctctgcaaatgaacagcctgagagtcgaggacacggctctatattattgtgcgagagatccgggatctggcgcttatgatgtctggggccaagggacaatggtcaccgtctcttca

SEQ ID NO: 10218 - DNA, 283 bp, Homo sapiens
  source 1..283: mol_type = other DNA
tgcagcctctggattcaccttcagtagctatggcttgcactgggtccgccaggctccaggcaaggggctggagtgggtggcagttatttcatatgatggaagtgataaatactatgcggactccgtgaagggccgattcaccatctccagagacaattccaagaacacgctgtatctgcaaatgaacagcctgagagctgaggacacggctgtatattattgtgcgaaagattgggggtctctagattactggggccagggaaccctggtcaccgtctcctca

SEQ ID NO: 10219 - DNA, 283 bp, Homo sapiens
  source 1..283: mol_type = other DNA
tgcagcctctggattcaccttcagtagctatggcatgcactgggtccgccaggctccaggcaaggggctggagtgggtggcacttatatcacatgatggaagtaataaataccatgcagactccgtgaagggccgattcaccatctccagagacaattccaagaacacgctgtatctgcaaatgaacagcctgagagctgaggacacggctgtgtattactgtgcgaaagattggggatctttagactactggggccagggaaccctggtcaccgtctcctca

SEQ ID NO: 10220 - DNA, 280 bp, Homo sapiens
  source 1..280: mol_type = other DNA
tgcagcctctggattcgccttaggtggctactggatgcactgggtccgccaagctccggggaaggggctggtgtgggtctcacgtattaaatatgatgggagtatgacaacttacgcggactccgtgaagggccgattcaccacctccagagacaacgccaagaacacgctgtatctgcaaatgaacagtctgagagccgaggacacggctgtgtattactgtgcaaagtctgactggatcgaccccaggggccagggaaccctggtcaccgtctcctca

SEQ ID NO: 10221 - DNA, 280 bp, Homo sapiens
  source 1..280: mol_type = other DNA
tgcagcctctggattcaccctcagcggctactggatgcactgggtccgccaacctccagggaagggactgatgtgggtctcgcgtattaaatatgatgggagtttcacaacttacgcggactccgtgaagggccgattcaccatctccagagacaacgccaagaacacgctgtatttggaaatggacagtctgagagtcgaggacacggctgtttattattgtgcaaaatcagactggatcgacccctggggccagggaaccctggtcaccgtctcctca

SEQ ID NO: 10222 - DNA, 283 bp, Homo sapiens
  source 1..283: mol_type = other DNA
tgcagcctctggattcacatttagcagttcttggatgacatgggtccgccaggtcccagggaaggggctggagtgggtggccaccataaaacatgatgcaagtgaacaatactatgtggactctgtgaagggccgcttcaccatctccagagacaacgccgagaactcactgtatctgcaaatgaacagcctgagagccgaggacacgtctgtctattactgtgtgaggggaagatccagtatggacgtctggggccaagggaccacggtcaccgtctcctca

SEQ ID NO: 10223 - DNA, 283 bp, Homo sapiens
  source 1..283: mol_type = other DNA
tgcagcctctggattcacctttactacctcttggatgacctgggtccgccaggttccagggaaggggctggagtgggtggccaccataaaacaagatggaagtgagaaatactatgtggactctgcggagggccgattcaccatctccagagacaacgccaagaactcactgtatctgcaaatgaacagcctgagagccgaggacacggctgtgtattactgtgtgaggggaagatccagtatggacgtctggggccaagggaccacggtcaccgtctcctca

SEQ ID NO: 10224 - DNA, 283 bp, Homo sapiens; identical to SEQ ID NO: 10223
  source 1..283: mol_type = other DNA

SEQ ID NO: 10225 - DNA, 283 bp, Homo sapiens
  source 1..283: mol_type = other DNA
tgcagcctctggattcacctttggtagctcttggatgacctgggtccgccaggctccagggaaggggctggagtgggtggccgacataaagctagatgcaagtgagacatactatgtggactctgtgaagggccgattcaccatctccagagacaacgccaagagctcactgtatctgcaaatgaacagcctgagggccgaggacacggctgtatattactgcgtgagagggcgaagtagtatggacgtctggggccaagggaccacggtcaccgtctcctcg

SEQ ID NO: 10226 - DNA, 283 bp, Homo sapiens
  source 1..283: mol_type = other DNA
tgcagcctctggattcacatttagcagttcttggatgacatgggtccgccaggtcccagggaaggggctggagtgggtggccaccataaaacatgatggaagtgaacaatactatgtggactctgtgaagggccgcttcaccatctccagagacaacgccgagaactcactgtatctgcaaatgaacagcctgagagccgaggacacggctgtctattactgtgtgaggggaagatccagtatggacgtctggggccaagggaccacggtcaccgtctcctca

SEQ ID NO: 10227 - DNA, 283 bp, Homo sapiens
  source 1..283: mol_type = other DNA
tgcagcctctggattcacctttactacctcttggatgacctgggtccgccaggttccagggaaggggctggagtgggtggccaccataaaacaagatggaagtgagaaatactatgtggactctgcgaagggccgattcaccatctccagagacaacgccaagaactcactgtatctgcaaatgaacagcctgagagccgaggacacggctgtgtattactgtgtgaggggaagatccagtatggacgtctggggccaagggaccacggtcaccgtctcctca

SEQ ID NO: 10228 - DNA, 292 bp, Homo sapiens
  source 1..292: mol_type = other DNA
tgcagcctctggattcaccttcagtacttatgaaatgaactgggtccgccaggctccagggaaggggctggagtgcgtttcatacattcatggtagtggtactaccatttcctacgcagactctgtgaagggccgattcaccatctccagagacaacgccaagaactcactgtatctgcaaatgaacgacctgagagccgaagacacggctgtttactactgtgcgagagatatggggagtggctggtcgtttgactactggggccagggaaccctggtcaccgtctcctca

SEQ ID NO: 10229 - DNA, 289 bp, Homo sapiens
  source 1..289: mol_type = other DNA
tgcagcctctggaatcaccttcagcagatatgaaatgaactgggtccgccaggctccagggaaggggctggagtgcattgcatatattagtcctagtggtacaatatactacgcagactctgtgaggggccgattcaccatctccagagacaaagccaaggagtcactgtatctgcaaatgaacagcctgagagccgaggacacggctatttattactgtgcgagagacatgggcagtggctggtcttttgactactggggccagggaatccgggtcattgtctcctca

SEQ ID NO: 10230 - DNA, 289 bp, Homo sapiens
  source 1..289: mol_type = other DNA
tgcagcctctggaatcaccttcagcagatatgaaatgaactgggtccgccaggctccagggaaggggctggagtgcattgcatatattagtcctagtggtacaatatactacgcagactctgtgaggggccgattcaccatctccagagacaaagccaaggagtcactgtatctgcaaatgaacagcctgagagccgaggacacggctatttattactgtgcgagagacatgggcagtggctggtcttttgactactggggccagggaaccctggtcaccgtctcctca

SEQ ID NO: 10231 - DNA, 289 bp, Homo sapiens
  source 1..289: mol_type = other DNA
tgcagcctctggaatcaccttcagcagatatgaaatgaactgggtccgccaggctccagggaaggggctggagtgcattgcatatattagtcctagtggtacaatatactacgcagactctgtgaggggccgattcaccatctccagagacaaagccaaggagtcactgtatctgcaaatgaacagcctgagagccgaggacacggctatttattactgtgcgagagacatgggcagtggctggtcttttgactaccggggccagggaatccgggtcattgtctcctca

SEQ ID NO: 10232 - DNA, 292 bp, Homo sapiens
  source 1..292: mol_type = other DNA
tgcagcctctggattcaccttcagtacttatgaaatgaactgggtccgccaggctccagggaaggggctggagtgcgtttcatacattcatggtagtggtactaccatttcctacgcagactctgtgaagggccgattcaccatctccagagacaacgccaagaactcactgtatctgcaaatgaacgacctgagagccgaagacacggccgtttactactgtgcgagagatatggggagtggctggtcgtttgactactggggccagggaaccctggtcaccgtctcctca

SEQ ID NO: 10233 - DNA, 289 bp, Homo sapiens
  source 1..289: mol_type = other DNA
tgcagcctctggattcacctttagcagctatgccatgagctgggtccgccagtctccagggaaggggctggagtggctctcatctattggtggcagtggtgctaacacatactacgcagactccgtgaagggccgattcaccatctccagggacaattccaggaacacggtgtatttgcaaatgcacaacctgagactcgacgacacggccgtatactactgtgcgaaagtgaggggggagacttcgcctgactactggggccagggaacccaggtcaccgtctcctca

SEQ ID NO: 10234 - DNA, 289 bp, Homo sapiens; identical to SEQ ID NO: 10233
  source 1..289: mol_type = other DNA

SEQ ID NO: 10235 - DNA, 289 bp, Homo sapiens
  source 1..289: mol_type = other DNA
tgcagcctctggattcacctttagcagctatgccatgagctgggtccgccagtctccagggaaggggctggagtggctctcatctattggtggcagtggtagtaacacatactacgcagactccgtgaagggccgattcaccatctccagagacaattccaagaacacggtgtatctgcaaatgcacagcctgagagtcgaggacacggccgtatattactgtgcgaaagtgaggggggagacttcgcctgactactggggccagggaacccaggtcaccgtctcctca

SEQ ID NO: 10236 - DNA, 289 bp, Homo sapiens
  source 1..289: mol_type = other DNA
tgcagcctctggattcacctttagcagctatgccatgagctgggtccgccagtctccagggaaggggctggagtggctctcatctattggtgccagtggtagtaacacatactacgcagactccgtgaagggccgattcaccatctccagagacaattccaagaacacggtgtatttgcaaatgcacagcctgagagtcgaggacacggccgtatactactgtgcgaaagtgaggggggagacttcgcctgactactggggccagggaacccaggtcaccgtctcctca

SEQ ID NO: 10237 - DNA, 289 bp, Homo sapiens
  source 1..289: mol_type = other DNA
tgcagcctctggattcacctttagcagctatgccatgagctgggtccgccagtctccagggaaggggctggagtggctcacatctattagtggcagtactggtaacacatactacgcagactccgtgaagggccgattcaccatctccagagacaattccaagaacacggtgtatctgcaaatgcacagcctgagagtcgaggacacggccgtatactactgtgcgaaagtgaggggggagacttcgcctgactactggggccagggaacccaggtcaccgtctcctca

SEQ ID NO: 10238 - DNA, 289 bp, Homo sapiens
  source 1..289: mol_type = other DNA
tacagcctctggattcacctttagcaactatgccatggcctgggtccgccaggctccagggaaggggctggagtgggtctcatctattattggtagtggtgataacacattctacgcagactccgtgaagggccggttcaccatctccagagacaattccaagaacactctttatctgcaaatgaacagcctgagagccgaggacacggccatatattcctgtgcgaaagtccggggggagacttcccctgactactggggccagggaaccctggtcaccgtctcctca

SEQ ID NO: 10239 - DNA, 289 bp, Homo sapiens
  source 1..289: mol_type = other DNA
tgcagcctctggattcacctttagcagctatgccatgagctgggtccgccagtctccagggaaggggctggagtggctctcatctattggtggcagtactggtaagacatactacgcagactccgtgaagggccgattcaccatctccagagacaattccaagaacacggtgtatctgcaaatgcacagcctgagagtcgaggacacggccgtatactactgtgcgaaggtgaggggggagacttcgcctgactactggggccagggaacccaggtcaccgtctcctca

SEQ ID NO: 10240 - DNA, 289 bp, Homo sapiens
  source 1..289: mol_type = other DNA
tgcagcctctggattcacctttagcaactatgccatgagctgggtccgccagtctccagggaaggggctggagtggctctcatctattggtggcactggtattaacacatactacgcagactccgtgaagggccgattcaccatctccagagacaattccaagaacacggtgtatctgcaaatgcacagcctgagagtcgaggacacggccgtatactactgtgcgaaagtgaggggggagacttcgcctgactactggggccagggaacccaggtcaccgtctcctca

SEQ ID NO: 10241 - DNA, 291 bp, Homo sapiens
  source 1..291: mol_type = other DNA
gcttctggatacaccttcaccgactactatatacactgggtgcgacaggcccctggacaagggcttgagtggctgggacggatcaaccctaatagtggtggcgcaaactatgcacagaggtttcagggcagggtcaccatgacccgggacacgtccatcaccacagcctacatggaactgagcagactgagatctgacgacacggccgtgttttactgtgcgagaggagactattccagtggctggtacgaagactactggggccagggaaccctggtcaccgtctcctca

SEQ ID NO: 10242 - DNA, 291 bp, Homo sapiens
  source 1..291: mol_type = other DNA
gcttctggatacaccttcaccgactactatatgcactgggtgcgacaggcccctggacaagggcttgagtggatgggacggatcaaccctaacagtggtggcacgaactatgcacagaagtttcagggcagggtcaccatgaccagggacacgtccatcagcacagcctacatggagttgagcaggctgacatctgacgacacggccgtgtattactgtgcgagaggggattatagcagtggctggtacgaggactactggggccagggaaccctggtcaccgtctcctca

SEQ ID NO: 10243 - DNA, 304 bp, Homo sapiens
  source 1..304: mol_type = other DNA
tgtagcctctggattcagcttcagtagttatgaaatggattgggtccgccaggctccagggaaggggccggagtggatttcatacattagtagtagtggtagtaccatattcaacgcagactctgtgaagggccgattcatcatctccagagacaacgccaagaactcactgtatttgcaaatgaacaccctgagagtcgaggacacggctgtttattactgtgcgagggaagtcgtcccacatagcagcggctatgatgcttttgatatctggggccgggggacattggtcaccgtctcttca

SEQ ID NO: 10244 - DNA, 304 bp, Homo sapiens
  source 1..304: mol_type = other DNA
tgcagcctctggattcaccttcagtaattatgagatggactgggtccgccaggctccagggaaggggccggagtggatctcatacattagtagtggtgcttctaccaagttctacgcagactctgtgaagggccgattcaccatctccagagacgacgccaagaactcagtgtatctgcaaatgaatagcctgagagccgaggacacggctacttattactgtgcgcgagaggtggtgccgcacagtagtggatatgatgcttttgatatcaggggccaagggacaatggtcaccgtctcttcg

SEQ ID NO: 10245 - DNA, 304 bp, Homo sapiens
  source 1..304: mol_type = other DNA
tgcagcctctggattcactccattccccttcagtagttatgaaatgaactgggtccgccaggcaccggggaaggggctggagtggatttcatacattgattatagtagtagtgccatgtactatgcagactctgtgaagggccgattcatcatctccagagacaacgccaagaactcactgtttctgcaaatgaacagcctgagagtcgacgacacggctctttattactgtgcgagaagggctacggtcacctactacgctctggacgtctggggccaagggaccacggtcaccgtctcctca

SEQ ID NO: 10246 - DNA, 295 bp, Homo sapiens
  source 1..295: mol_type = other DNA
tgcagcctctggatacaccttcagtagttacgaaatgaactgggtccgccaggctccaggggaggggctggagtggatttcatatattaattatagtggtactaccatatactacgcagactctgtgaagggccgattcaccatctccagagacaacgccaagaattcactgtatctgcaaatgaacagcctgagagtcgaggacacggctgtttattactgtgcgagacgagctaccgtaacctactacgctttggacgtctggggccaagggaccacagtcaccgtctcctca

SEQ ID NO: 10247 - DNA, 283 bp, Homo sapiens
  source 1..283: mol_type = other DNA
tgcagcctctggattcaccttcagtgactactacatgaactggatccgccaggctccaggggaggggctggagtgcgttgcatacattagtggtggtggcactaccatatattatggagactctgtgaagggccgcttcaccgtctccagggacaacgccaagaactcactgtatctgcagatgaacagcctgagagccgaggacacggccgtgtattattgtgcgagaggcatatatggtatggacgtctggggccaagggaccacggtcaccgtctcctca

SEQ ID NO: 10248 - DNA, 283 bp, Homo sapiens
  source 1..283: mol_type = other DNA
tgcagcctctggatttagtttcagggacttctatatgagttgggtccgtcaggctccagggaaggggctggagtgggtttcatacatcagctatagaagtactcacatatcgtacgccgactctgtgaagggccgattcaccatctccagggacgacgccaagaatacactttatctgcaaatggacagcctgagaggcgaggacacggccgtctattactgtgcgagagggatatacggtatggacgtctggggccaagggaccacggtcaccgtctcctca

SEQ ID NO: 10249 - DNA, 292 bp, Homo sapiens
  source 1..292: mol_type = other DNA
tgcagtctctggattcaccttcagtggttatgaaatgaactgggtccgccaggctccagggaaggggttggagtgggtttcttacattagtactagtgggagtaccacatattacgcagactctgtgaagggccgattcaccatctccagagacaacgccaagaactcactgtatctgcaaatggacagcctgagagccgaggacacggctgtttattcctgtgcgagagaaagaggttcggggagtccctttgactactggggccagggaaccctggtcaccgtctcctca

SEQ ID NO: 10250 - DNA, 292 bp, Homo sapiens
  source 1..292: mol_type = other DNA
tacaggctctggattcaccttcagtagttttgaaatgaactgggtccgccaggctccagggaaggggctggagtgggtttcatacattactactagtggtactaccaaatattatgcagactctgtgaagggccgattcaccatctccagagacaacgccaagagctcactgtatctgcaaatgaacagcctgagagccgaggacacggctgtttattactgtgcgagagaaaggggttcggggagtccctttgactactggggccagggaaccctggtcaccgtctcctca

SEQ ID NO: 10251 - DNA, 292 bp, Homo sapiens
  source 1..292: mol_type = other DNA
tacaggctctggattcaccttcagtagttttgaaatgaactgggtccgccaggctccagggaaggggctggagtgggtttcatacattactactagtgatactaccaaatattatgcagactctgtgaagggccgattcaccatctccagagacaacgccaagagctcactgtttctgcaaatgaacagcctgagagccgaggacacggctgtttattactgtgcgagagaaaggggttcggggagtccctttgactactggggccagggaaccctggtcaccgtctcctca

SEQ ID NO: 10252 - DNA, 292 bp, Homo sapiens; identical to SEQ ID NO: 10251
  source 1..292: mol_type = other DNA

SEQ ID NO: 10253 - DNA, 301 bp, Homo sapiens
  source 1..301: mol_type = other DNA
tgcagcctctggattcactttcactaatgcctggatgagttgggtccgccaggctccagggaaggggctggagtgggttggccgtattaaaagcaaagctgctgctgagacaacagactacgctgcacccgcgaaaggcagattcaccatctcaagagatgattcaattaacacactgtatctgcaaatgaacagcctgaaaaccgaggacacagccgtgtattactgtatcacaacgaggggatatactggttacgatctcggctactggggccagggaaccctggtcaccgtctcctca

SEQ ID NO: 10254 - DNA, 301 bp, Homo sapiens
  source 1..301: mol_type = other DNA
tgcagcctctggattcactttcactaacgcctggatgagctgggtccgccaggctccagggaaggggctggagtgggttggccgcatcaaaagtaaagctggtggtgagacaacagactacgctgcacccgtgaaaggcagattcaccatctcaagagatgactcaaaaaccacggtgtatctgcaaatgaacagcctgaaaaccgaggacacagccgtctattactgtattacgacaagaggatatactggctacgatctcggctactggggccagggaaccctggtcaccgtctcctca

SEQ ID NO: 10255 - DNA, 301 bp, Homo sapiens
  source 1..301: mol_type = other DNA
tgcagcctctggattcactttcactaacgcctggatgagttgggtccgccaggctccagggaaggggctggagtgggttggccgcatcaaaagtaaagctggtggtgagacaacagactacgctgcacccgtgaaaggcagattcaccatctcaagagatgactcaaaaaccacggtgtatctgcaaatgaacagcctgaaaaccgaggacacagccgtctattactgtattacgacgagaggatatactggctacgatctcggctactggggccagggaaccctggtcaccgtctcctca

SEQ ID NO: 10256 - DNA, 280 bp, Homo sapiens
  source 1..280: mol_type = other DNA
tgcagcctctggattcaccctcaggagtttttggatgacctgggtccgccaggctccaggggaggggctggagtgggtggccaacataaagcatgatggaagtgacacttactatgtggactctgtgaagggccgattcaccatctccagagacaacgccaagaactcactgtatctgcaaatgaacagcctgagaggcgacgacacggctgtgtattactgtgggagaggtcgcggtattgacgtctggggccaggggaccacggtcaccgtctcctca

SEQ ID NO: 10257 - DNA, 280 bp, Homo sapiens
  source 1..280: mol_type = other DNA
tgcagcctctggattcacctttagtaaccattggatgagctgggtccgccaggctccagggaaggggctggagtgggtggccaacataaaacaagatggaagtgagaaatactatgtggactctgtgaagggccgattcaccatctccagagacaacgccaagaactcactgtatctgcaaatgaacagcctgagagccgaggacacggccgtgtattactgtgggagaggccgcggtatagacgtctggggccaagggaccacggtcaccgtctcctca

SEQ ID NO: 10258 - DNA, 285 bp, Homo sapiens
  source 1..285: mol_type = other DNA
gcttctggatacaccttcaccggctattatatgcactgggtgcgacaggcccctggacaagggcttgagtggctgggattgatcaaccctaataatagtggcacaaactatgcacagaagtttcggggcagggtcaccgtgaccagggacacgtccatcagcactgcctacatggagctgagcggcctgacatctgacgacacggccgtttatttttgtgcgagagaattgaggggcggtcactttgattactggggccacggaaccctggtcaccgtctcctca

SEQ ID NO: 10259 - DNA, 285 bp, Homo sapiens
  source 1..285: mol_type = other DNA
gcttctggatacactttcaccgactactatatacactgggtgcgacaggcccctggacaagggcctgagtggctgggattgatcaagcctcatgatggtggcacaaactatgcccagaagtttcagggccgggtcaccatgacgagggacacgtccatcagcacagccttcatggacctgagcaggctgggatctgacgacacggccgtgtacttctgtgcgagagaattacgcggtggacactttgactactggggccagggaaccctggtcaccgtctcctcg

SEQ ID NO: 10260 - DNA, 283 bp, Homo sapiens
  source 1..283: mol_type = other DNA
tgcagcctctggattcacctttagtagttatgtcatgagctgggtccgccaggctccagggaaggggctggagtgggtctcagttattagtggtaatggtggtagtacaaactacgcagactccgtgaagggccggttcaccgtttccagagacaattccaagaacacgctgtatctgcaaatgaacagtctgagagccgaggacacggccgtatattattgtgcgaagggggtgacctcgcttgactactggggccagggaaccctggtcaccgtctcctca

SEQ ID NO: 10261 - DNA, 280 bp, Homo sapiens
  source 1..280: mol_type = other DNA
tgcagcctctggattcatgattagcacctctggcatgagctgggtccgccgggctccagggaaggggctggagtgggtctcaggtgttagttatagtggtagtatttattacgcagactccgtgaagggccggttcaccatctccagagacaattccaagaacacgctgtctctgcaaatgaacagcctgagagccgaggacacggccctatattactgtgcgaaaggtgttaccagcctcgactactggggccagggaaccctggtcaccgtctcctca

SEQ ID NO: 10262 - DNA, 289 bp, Homo sapiens
  source 1..289: mol_type = other DNA
tgcagcctctggattcaccttcagtagctgctggatgcactgggtccgccaagctccagggatggggctggtgtgggtctcacgtatcaatagtgatgggagtagcacaacctacgcggactccgtgaagggccgattcaccatctccagagacaacgccaagaacacggtgtatctgcaaatgaacagtctgagagccgaggacacggctgtgtactactgtgcaagaggaggaccgggtaccggaatggactactggggccagggaaccctggtcaccgtctcctca

SEQ ID NO: 10263 - DNA, 289 bp, Homo sapiens
  source 1..289: mol_type = other DNA
tgtagcctctggatccaccttcagtcatttctggatgcactgggtccgccaagctccaggagagggactggtgtgggtctcatatgtaaccggtgatgggactgctacaacttacgcggactccgtgaagggccgattcaccgtttccagagacaatgccaagaacaccctgtttctgcaaatgaacagtctgagagtcgacgacacggctgtctattactgtgcaagagggggtccagggaccgggatggactactggggccagggaagcctggtcaccgtctcctca

SEQ ID NO: 10264 - DNA, 286 bp, Homo sapiens
  source 1..286: mol_type = other DNA
tgcagcctctggattcaccttcagtaactactggatgcactgggtccgccaagctccagggaaggggctggtgtgggtctcacgtattgacacgcgtgggactaccacaaattacgtggcctccgtgaagggccgattcaccatctccagagacaacgccaagaacattctgtatctgcaactgaacagtctgagagccgacgacacggctgtgtattactgtgcaagagatctaagcgggagatatgactactggagccagggaaccctggtcaccgtctcctca

SEQ ID NO: 10265 - DNA, 286 bp, Homo sapiens
  source 1..286: mol_type = other DNA
tacagactctggattcaccttaagaagttactggatgcactgggtccgccaagctccagggaagggactggtgtgggtctcacgtattaatattgatgggactattacaaattacgcggactccgtgaagggccgattcaccatctccagagacaacgccaagaacacgttgtatctgcaaatgaacagtctgagagccgaggacacggctatttattactgtgcgagagatctttctgggagatatgactactggggccagggaaccctggtcaccgtctcctca

SEQ ID NO: 10266 - DNA, 300 bp, Homo sapiens
  source 1..300: mol_type = other DNA
gcttctggttacgcctttaccacctatggtatcaactgggtccgacaggcccctggacaagggcttgagtggatgggatggatcagcgcttacaatggtaacacaaagtatgcacagaagctccagggcagagtcaccatgaccacagacacatccgcgaccacttcctacatggagctgaggagcctgagatctgacgacacggccgtgtattactgtgcgagagggagaactggaacgacgtggtactactacggtatggacgtctggggccaagggaccacggtcaccgtctcctca

SEQ ID NO: 10267 - DNA, 300 bp, Homo sapiens
  source 1..300: mol_type = other DNA
gcttctggttacagctttaccagctacggaatcagctgggtgcgacaggcccctggacaaggccttgagtggatgggatggatcagcgcttacaatggtaacacaaactttgcacagaagctccagggcagagtcaccatgaccacagacacatccacgagcacagcctacatggagctgaggagcctgagatctgacgacacggccgtgtattactgtgcccgaggtaggactggaactacctggtactactacggtatggacgtctggggccaagggaccacggtcaccgtctcctca

SEQ ID NO: 10268 - DNA, 286 bp, Homo sapiens
  source 1..286: mol_type = other DNA
tgcagcctctggattcaccttcagtagtcatgagatgaactgggtccgccaggctccagggaaggggctggagtgggtttcatacattagtagtagtggtagcaccatatactacgcagactctgtgaagggccgattcaccatctccagaaacaacgccaagaactcactgtatctgcaattgaacagcctgagaggcgaggacacggctgtttattactgtgcgagactgagaggagcagcagctgggtactggggccagggaaccctggtcaccgtctcctca

SEQ ID NO: 10269 - DNA, 286 bp, Homo sapiens
  source 1..286: mol_type = other DNA
tgcagcctctggattcaccttcagtagctatagcatcaactgggtccgccaggctccagggaaggggctggagtgggtttcatacattagtagtagtagtaataccatatactacgcagactctgtgaagggccgattcaccatctccagagacaacgccaagaactcactatatctgcaaatgaacagcctgagagccgaggacacggctgtttattactgtgcgagattaaggggggcagcagctggctactggggccagggaaccctggtcaccgtctcctca

SEQ ID NO: 10270 - DNA, 286 bp, Homo sapiens
  source 1..286: mol_type = other DNA
tgcagcctctggattcaccttcagtacctatagcatcaactgggtccgccaggctccagggaaggggctggagtgggtttcatacattagtagtagtagtaataccatatactacgcagactgtgtgaagggccgattcaccatctccagagacaacgccaaaaactcactatatttgcaaatgaacagcctgagagccgaggacacggctgtgtattactgtgcgagattaaggggggcagcagctggctactggggccagggaaccctggtcaccgtctcctca

SEQ ID NO: 10271 - DNA, 286 bp, Homo sapiens
  source 1..286: mol_type = other DNA
tgcagcctctggattcaccttcagtagctatagcatcaactgggtccgccaggctccagggaaggggctggagtgggtttcatacattagtagtagtagtaataccatatactacgcagactctgtgaagggccgattcaccatctccagagacaacgccaagaactcactatatctgcaagtgaacagcctgagagccgaggacacggctatttattactgtgcgagattaaggggggcagcagctggctactggggccagggaaccctagtcaccgtctcctca

SEQ ID NO: 10272 - DNA, 286 bp, Homo sapiens
  source 1..286: mol_type = other DNA
tgcagcctctggattcaccttcagtagctatagcatcaattgggtccgccaggctccagggaaggggctggagtgggtttcatatattagtggtagtagtaataccatatactacgcagactctgtgaagggccgattcaccatctcccgagacaacgccaagaactcactatatctgcaaatgaacagcctgagagccgaggacacggctatttattattgtgcgagattaaggggggcagcagctggctactggggccagggaaccctggtcgccgtctcctca

SEQ ID NO: 10273 - DNA, 286 bp, Homo sapiens
  source 1..286: mol_type = other DNA
tgcagcctctggattctccttcagtacatatagcatgaactgggtccgccaggctccagggaaggggctggagtgggtttcatacattagtagcagtagtaataccatatactacgcagactctgtgaagggccgattcaccatctccagagacaacgccaagaactcactatatctgcaaatgaacagcctgagagccgaggacacggctgtttattactgtgcgagattaaggggggccgcagctggctactggggccagggaaccctggtcaccgtctcctca

SEQ ID NO: 10274 - DNA, 286 bp, Homo sapiens
  source 1..286: mol_type = other DNA
tgcagcctctggattcaccttcagtagctatagcatcaactgggtccgccaggctccagggaaggggctggagtgggtttcatacattagtagtagtagtaataccatatactacgcagactctgtgaagggccgattcagcatctccagagacaacgccaagaactcactatatctgcaaatgaacagcttgagagccgaggacacggctgtttattactgtgcgagattaaggggggcagcagctggctactggggccagggaaccctggtcaccgtctcctca

SEQ ID NO: 10275 - DNA, 295 bp, Homo sapiens
  source 1..295: mol_type = other DNA
tgcagcctctggattcagccttagcagatatgacatgggctgggtccgccaggctccagggaaggggctggagtgggtctcaagtactaggaatagtgctggtatcacatactacgcagacttcgtgaagggccgattcaccatctccagagacaattccaagaacacgttgtttttgcaaatgaacagcctgggagccgaggactcggccgtatattactgtgcgaaagacttaggtactagcggctggtactttgactactggggccagggaaccctggtcaccgtctcctca

SEQ ID NO: 10276 - DNA, 292 bp, Homo sapiens
  source 1..292: mol_type = other DNA
tgcagcctctggattcacctttagcagctatgacatgagctgggtccgccaggctccagggaaggggctggagtgggtctcaactattgctagtggtggtaccacatactacgcagactccgtgaagggccggttcaccatctccagagacaattccaagaacacgctttatctgcaaatgaacagcctgacagccgaggtcacggccctatattactgtgcgaaagatctcgggaccagtggctggtactttgactactggggccagggagccctggtcaccgtctcctca

SEQ ID NO: 10277 - DNA, 292 bp, Homo sapiens
  source 1..292: mol_type = other DNA
tgcagcctctggattcacctttagcagctatgacatgagctgggtccgccaggctccagggaaggggctggagtgggtctcaactattgctagtggtggtaccacatactacgcagactccgtgaagggccggttcaccatctccagagacaattccaagaacacgctttatctgcaaatgaacagcctgacagccgaggtcacggccctatattacagtgcgaaagatctcgggaccagtggctggtactttgactactggggccagggagccctggtcaccgtctcctca

SEQ ID NO: 10278 - DNA, 295 bp, Homo sapiens
  source 1..295: mol_type = other DNA
tacagcctctggattcacctttagtagttatggcatgagctgggtccgccaggctccagggaaggggctggagtgggtctcaactattcctgctggtcctggtaacacatactacgcagactccgtgaagggccggttcaccatctccagagacaattccaagaacacgctgtatctgcaaatgaacagcctgagagccgaagacacggccatatattactgtgcgaaagatttgggaaccagtggctggtactttgactactggggccagggaaccctggtcaccgtctcctca

SEQ ID NO: 10279 - DNA, 292 bp, Homo sapiens
  source 1..292: mol_type = other DNA
tgcagcctctggattcacctttagcagctatgacatgagctgggtccgccaggctccagggaaggggctggagtgggtctcaactatttctagtggtggtaccacatactacgcagactccgtgaagggccgcttcaccatctccagagacaattccaagaacacgctgtatctgcaaatgaacagcctgacagccgaggtcacggccctatattactgtgcgaaagatctcgggaccagtggctggtactttgactactggggccagggaaccctggtcaccgtctcctca

SEQ ID NO: 10280 - DNA, 292 bp, Homo sapiens
  source 1..292: mol_type = other DNA
tgcagcctctggattcacctttagcagctatggcatgagctgggtccgccaggctccagggaaggggctggagtgggtctcaactattgctagtggtggtaccacatactacgcagactccgtgaagggccggttcaccatctccagagacaattccaagaacacactgtatctgcaaatgaacagcctgacagccgaggtcacggccctatattactgtgcgaaagatctcgggaccagtggctggtactttgactactggggccagggagccctagtcaccgtctcctca

SEQ ID NO: 10281 - DNA, 295 bp, Homo sapiens
  source 1..295: mol_type = other DNA
tgcagcctctggattcacctttagcagctatgccatgagctgggtccgccaggctccagggaaggggctggagtgggtctcaggtattagtggtagtggtgatagcacatactacgcagactccgtgaggggccggttcaccatctccagagacaattccaagaacacgctgtatctgcaaatgaacagcctgagagccgaggacacggccgtatattactgtgcgaagcggcattactatggttcggggagtttggacgtctggggccaagggaccacggtcaccgtctcctca

SEQ ID NO: 10282 - DNA, 295 bp, Homo sapiens
  source 1..295: mol_type = other DNA
tgcagcctctggattcacctttagcagctatgccatgagctgggtccgccaggctccagggaaggggctggagtgggtctcagctattagtggtagtggtgatagcacacactacgcagactccgtgaagggccggttcaccatctccagagacaattccaagaacacactgtatctgcaaatgaacagcctgagagccgaggacacggccgtatattactgtgcgaaacggcattactatggttcggggagtttggacgtctggggccaagggaccacggtcaccgtctcctca

SEQ ID NO: 10283 - DNA, 303 bp, Homo sapiens
  source 1..303: mol_type = other DNA
gcttctggaggcaccttcagcaactatgctttcaactgggtgcgacaggcccctggacaagggcttgagtggatgggagggatcatccctatctttggtacaacaaattacgcacagaagttccagggcagagtcacgattaccgcggacacatccgcatccacgaccacagcctacatggagctgagcagcctgagatctgaggacacggccgtgtattattgtgcgagagggaatccttattgtagtggtggtacctgctttgactactggggccagggaaccctggtcaccgtctcctca

SEQ ID NO: 10284 - DNA, 297 bp, Homo sapiens
  source 1..297: mol_type = other DNA
gcttctggaggcaccttcagcaactatgctatcaactgggtgcgacaggcccctggacaggggcttgagtggatgggaaggatcatccctatttcagctataagaaagttcgcacagacctttgaagacagagtcacgattaccgcggacatgtccacgagtacagtctacatggagctgaccagcctgagatctgaggacacggccgtgtattactgtgcgagagggaatccgtattgtagtggtggtacgtgctttgactactggggccagggaaccctggtcaccgtctcctca

SEQ ID NO: 10285 - DNA, 286 bp, Homo sapiens
  source 1..286: mol_type = other DNA
tgcagcctctggattcgccttcagtccctacactatgcactgggtccgccaggccccagggaaggggctagtgtgggtctcacgtattaatggtaatgggagaaccacaacctatgcggacgccgtgaagggccgactcacaatctccagagacaacgccaagaacaccctgtatctgcaaatgaacagtctgagagtcgaggacacggctgtctatttttgtgcaaggagtatcgaaaacggcatggacgtctggggccaagggaccacggtcaccgtctcctca

SEQ ID NO: 10286 - DNA, 286 bp, Homo sapiens
  source 1..286: mol_type = other DNA
tgccgcctctggattcgcctttagtgactacacaatgcattgggtccgccaagttccagggaaggggccggtgtgggtctctcgtatcaatagcgatggggccactagaacttacgcggactccgtgaggggcagattcaccatctccagagacaacgccaagagaacgctgtctcttcaattgaacagtcttagagccgaggacacgggtgtatattattgtgctagaagcattgagaacggtatggacgtctggggccaagggaccacgatcaccgtctcctca

SEQ ID NO: 10287 - DNA, 295 bp, Homo sapiens
  source 1..295: mol_type = other DNA
tgcagcctctggcttcacctttaacagctatgtcataagctgggtccgccaggctccaggggaggggctggagtgggtctcagcgattgattctagtggttttagcacatactacgcagactccgtgaagggccggttcaccatctccagagacaattccaagaacacgctgtggctgcagatgaacagcctgagagccgaggacacagccatattttactgtgcgagagtgaactacggtgccgggtactactttgactactggggccagggaaccctggtcaccgtctcctca

SEQ ID NO: 10288 - DNA, 295 bp, Homo sapiens
  source 1..295: mol_type = other DNA
tgcagcctctggattcatttttaataaccatgtcatgagctgggtccgccaggctccagggcaggggctgaagtgggtctcagcaattaatggtaatggtgatagcacatactacgcagactccgtgaagggccggttcaccatctccagagacaattccaagagcaccctgtctctgcaagtgaacagcctgagacccgaggacacgggcatatattattgtgcgagagttaattacggtgccgggtactactttgactactggggccagggagccctggtcaccgtctcctca

SEQ ID NO: 10289 - DNA, 289 bp, Homo sapiens
  source 1..289: mol_type = other DNA
tgcagcctctggattcatttttagtgactactatatggactgggtccgccaggctccagggaaggggctggagtgggttgcccgcattacaaagaaagctaccaattacatcacacaatacgccgcgtctgtgagaggcagattcaccatctcaagagatgattcaaagaactcactgtatctgcaaatgaacagtctggaaaccgaggacacggccgtctatttttgtgttagagatttaggaggatccgacaactggggccagggaaccctggtcaccgtctcctca

SEQ ID NO: 10290 - DNA, 289 bp, Homo sapiens
  source 1..289: mol_type = other DNA
tgcagcctctggattcaccttcagtgactactacatggactgggtccgccagactccagggaaggggctggagtgggttggccgtattcaaaataaagcttattcttacagcacacactacgccgcgtctgtgaaaggcagattcaccatctcaagagatgattcaaagacttcagtatatctgcaaatgaacagcctgaaaatcgaggacacggccgtgtattactgtgttagagatctcgggggatccgacaactggggccagggaaccctggtcaccgtctcctca

SEQ ID NO: 10291 - DNA, 286 bp, Homo sapiens
  source 1..286: mol_type = other DNA
tgcagcctctggattcaccttcaatacctatggtttccactgggtccgccaggctccaggcgaggggctggagtgggtgacatacacatcatatgatgggagtaataagtactacggagactccgtgaagggccgattcaccatctccagagacaattccaagaacacgctgtttttgcaaatgaacagcctgagacttgaggacacggctgtgtattactgtgcgagagatcgcgctagggctgttgatctctggggccaagggacactggtcatcgtctcttct

SEQ ID NO: 10292 - DNA, 286 bp, Homo sapiens
  source 1..286: mol_type = other DNA
tgcagcctctggattcaccttcaacatttatgctttccactgggtccgccaggctccaggcaaggggctggagtgggtggcatttatatcatatgatggaagtaataaatggtacgcagactccgtgaagggccgattcaccatctccagagacaattccaagaacacactatatctgcaaatgaacagcctgagagttgaggacacggctatatactactgtgcgagagatcgggcccgtgctgtagatctctggggccaagggacaatggtcaccgtctcttca

SEQ ID NO: 10293 - DNA, 280 bp, Homo sapiens
  source 1..280: mol_type = other DNA
tgcagcctctggatttactttcagtttctataatatggtctgggtccgccaggctccagggaaggggctggaatggatttcattcattagtggtagcggtgatatcatacactacagagactctgtgaagggccgcttcaccatctccagagacaatgccaagacctcattgtctctgcaaatgaacagcctgagagacgaggacacggctgtgtattactgtgtgagagccggaaatatggaagtctggggccaagggaccacggtcaccgtctcctca

SEQ ID NO: 10294 - DNA, 280 bp, Homo sapiens
  source 1..280: mol_type = other DNA
tgcagcctctggattcaccttcagtgactacaacatgaactgggtccgccaggctccagggaaggggctggagtgggtttcatttattgggagcattattagcagaacattctacgcagactctgtgaagggccgattcatcatctccagagacaatgccaagaacttactgtctctggagatgaacagcctcagagacgaagacacggctgtctattactgtgtgagagccggcaatatggaagtctggggccaagggatcacggtcaccgtctcctca

SEQ ID NO: 10295 - DNA, 286 bp, Homo sapiens
  source 1..286: mol_type = other DNA
tgcagcctctggattcacctttagcgcctatgccatgacctgggtccgccaggctccagggaagggactggagtgcgtctcatatattagtgatagtggtagtaggacaaactatgcagactccgtgaagggccggttcaccgtctccagagacaattccaagaacacgctgtatttgcaaatgaacagcctgagagccgacgacacggccgtttattactgtgtacagaaggtctacggtgacttcccctattggggccagggaaccctggtcaccgtctcctca

SEQ ID NO: 10296 - DNA, 286 bp, Homo sapiens
  source 1..286: mol_type = other DNA
tgcagcctctggattcacctttcccatctatgccatgacctgggtccgccaggctccagggaaggggctggagtgtgtctcatatattagtagtagtggttctaacacaaaacatgcagactccgtgaagggccggttcaccatctccagagacaactctgacaacacgctgtatctgcaaatgaacagcctgagagccgaagacacggccgtatattactgtgtgcaaaaagtctatggtgacttcccttattggggccagggaaccctggtcaccgtctcctca

SEQ ID NO: 10297 - DNA, 290 bp, Homo sapiens
  source 1..290: mol_type = other DNA
tcatctccggggacagtgtctctagcgacagtgctgcttggaactggatcaggcagtccccatcgagaggccttgagtggctgggaaggacatactacaggtccaagtggtataatgattatgcagtatctgtgaaaagtcgaataaccatcaacccagacacatccaagaaccagttctccctgcaactgaactctgtgactcccgaggacacggctgtgtattactgtgcaagagatcgggcggcttttgatatctggggccaagggacaatggtcaccgtctcttca

SEQ ID NO: 10298 - DNA, 290 bp, Homo sapiens
  source 1..290: mol_type = other DNA
ccatctccggggacagtgtctctagcaacagtgctgcttggaactgggtcaggcagtccccatcgagaggccttgagtggctgggaaggacatactacaggtccaagtggtataatgattatgcagtatctcttaaaagtcgaataactatcaccccagacacatccaagaaccagttctccctgcacctggactctgtgactcccgaggacacggctgtattttactgtgcaagagatcgggctgcttttgatatctggggccaagggacaatggtcaccgtctcttca

SEQ ID NO: 10299 - DNA, 289 bp, Homo sapiens
  source 1..289: mol_type = other DNA
tgcagcctctggattcacctttagtgactattggatgggctgggtccgccaggctccagggaaggggctggagtgggtggccaacataaggggagatacaagtacaattacctatgtggactctgtcaagggccgattcaccatctccagagacaacgccatgaactcactgtttctgcaaatgagtagcctgagagccgacgacacggctgtgtattactgtgcgagatggggggtgatcgccggccttgactactggggccagggaaccctggtcaccgtctcctca

SEQ ID NO: 10300 - DNA, 289 bp, Homo sapiens
  source 1..289: mol_type = other DNA
tgcagcctctggattcatccttaataactattggatgggttgggtccgccaggctccagggaaggggctggagtgggtggccaacataaaccaaggtggaagtgacaaatactatgtgggctctgtgaggggccgattcaccatttccaaagactacgccaagaactcaatgtatctgcaaatggacagcctgactaccgaggacacggctttgtattactgtgcgagatggggagtgatagcaggacttgactactggggccagggaaccctggtcaccgtctcctca

SEQ ID NO: 10301 - DNA, 279 bp, Homo sapiens
  source 1..279: mol_type = other DNA
aagggttctggatacagctttaccagctactggatcggctgggtgcgccagatgcccggggaaggcctggagtggatggggatcatctatcccggtgactctgaaaccagatatagtccgtccttccaaggccacgtcaccatctcagtcgacaagtccatcagcaccgcctacctgcagtggagcagcctgaaggcctcggacaccgccatatattactgtgcgagacatgacacttttgatgtctggggccaggggacaatggtcaccgtctcttca

SEQ ID NO: 10302 - DNA, 279 bp, Homo sapiens
  source 1..279: mol_type = other DNA
aagggttctggatacagttttagtagttactggatcggctgggtgcgccagatgcccgggaaaggcctggagtggatggggagcatttatgctggtgactctgaaaccagatatagtccgtccttccaaggccaggtcaccatctcagtcgacaagtccattaataccgcctacctgcagtggaagagtctgaaggcctcggacaccgccatgtattattgtgcgagacatgacacttttgatgtctggggccaagggacaatggtcaccgtgtcttca

SEQ ID NO: 10303 - DNA, 286 bp, Homo sapiens
  source 1..286: mol_type = other DNA
tgcagcctctggattcaccttcagtagttttagtatgaactgggtccgccaggctccagggaaggggctggagtggatttcatacattactcagagtggtggaaccacatacgatgcagactctgtgaggggccgattcaccatctccagagacaatgccaagaattcactgtatctgcaaatgaacagcctgagagacgaggacacggctgtctattactgtgtgagagatcacaactatggtcttgactattggggccagggaaccctggtcaccgtctcctca

SEQ ID NO: 10304 - DNA, 286 bp, Homo sapiens
  source 1..286: mol_type = other DNA
tgcagcctctggattcaccttcagtagttattccttgaactgggtccgccaggctccagggagggggctggagtgggtttcgtacattggaattgatggtgttactatatactcaatagactctgtgaagggccgattcaccatctccagagacaatgccaagaactcactgtacctgcaaatggacagcctgagagacgacgactcggctgtgtattactgtgtgagagaccacaattatggtcttgactactggggccagggaatcctggtcaccgtctcgtca

SEQ ID NO: 10305 - DNA, 283 bp, Homo sapiens
  source 1..283: mol_type = other DNA
tgcagcctttgacttcaacttcactaacgcctggatgagctgggtccgccaggctccagggaaggggctggagtgggttggccgtattaaaagcagatttcatggtgggactgcacactacgctgcacccgtgcaaggcagattcaccatctcgagagatgattcaaaaaggtcggtgtatctgcaaatgaacagccttgaaaccgaggacacagccgtgtattactgtgtcacggatcgccttgactactggggccagggagccctggtcaccgtctcctca

SEQ ID NO: 10306 - DNA, 283 bp, Homo sapiens
  source 1..283: mol_type = other DNA
tgcagcctctggattcactttcaatagcgcctggatgagctgggtccgccaggctccagggaaggggctggagtgggttggccgtgttaaaagcaaaactgatggtggggctgcagactacgctgcacccgtgaaaggcagattctccatctccagagatgattcaaagaacaccgtgtatgtgcaaatgaacagcctgaaaaccgacgacacagccgtatattattgtgtaacagatcgcctagactactggggccagggaaccctggtcagcgtctcctca

SEQ ID NO: 10307 - DNA, 283 bp, Homo sapiens
  source 1..283: mol_type = other DNA
tgtggcctctgaatttaatttcagtaatggctggatggcctgggtccgccaggctccagggaaggggctggagtgggttggccgtattaaaagcaaaactgatggtgggacagcagactacgctgcacccgtgaaaggcagattcaccatctctagagatgactcaaagaacacactgtctctgcaaatgagcagcctgaaaagcgaggacacagccgtgtactactgtgtcacagaccgacttgactactggggccagggaaccctggtcaccgtctcctca

SEQ ID NO: 10308 - DNA, 288 bp, Homo sapiens
  source 1..288: mol_type = other DNA
gcatctggatacatattcaccggatactttatacactgggtgcgacaggcccctggacagggacttgaatacatgggaatagtcagacctagtgatggtaagacaggttacgcacagaagttccagggcagagtcaccatgaccagggacacgtccacgagcacagtctacatgcaactgagcagcctgatatctgaggacacggccctgtattattgtgcgagagaacctcccaacagtttttactttgactactggggccagggaaccctggtcaccgtctcctca

SEQ ID NO: 10309 - DNA, 288 bp, Homo sapiens
  source 1..288: mol_type = other DNA
gcatctggatataccttcaccaactactatatgcactgggtgcgacaggcccctggacaagggcttgagtacatgggcatcatctaccctagtggtggaagcacatcctacgcactgaacttccagggcagagtcaccatgaccagggacacgtccacgagcacagtcttcatggagttgagcagcctgacatctgacgacacggccctgtattactgtgcgagagagccccccaactcattctactttgactactggggccagggaaccctggtcaccgtctcctca

SEQ ID NO: 10310 - DNA, 283 bp, Homo sapiens
  source 1..283: mol_type = other DNA
tggaacctctggattcacctttacaaactattggatgagctgggtccgccaggctccagggaaggggctggagtgggtgggcaacataaagccagatggaagtgagatatactatatggactctgtgaagggccgattcaccatctccagagacaacgcccataactcactggatctgcaaatgaacagcctgagagtcgaagacacggctgtgtattattgtgcgagagtccatctgggggagcgtttctggggccagggaaccctggtcaccgtctcctca

SEQ ID NO: 10311 - DNA, 283 bp, Homo sapiens
  source 1..283: mol_type = other DNA
tgcagcctctggattcacctttagtacctattggatgagctgggtccgccaggctccagggaaggggctagagtgggtgggcaacataaaccaagatggaagtgacaaatactatgtggactctgtgaagggccgattcaccatctccagagacaacgccaagaactcactgtatctgcaaatgaccagcctgagagccgaggacacggccgtctattactgtgcgagagtccatttgggggaaagattctggggccagggaaccctggtcaccgtctcgtca

SEQ ID NO: 10312 - DNA, 277 bp, Homo sapiens
  source 1..277: mol_type = other DNA
tgtagcctctggattcaccttcagtagtaataccatgaactgggtccgccaggctccagggaaggggctggagtgggtttcatacattagtagtagtagtagtatctactacgcagactctgtgaagggccgattcaccatctccagagacaatgccaagaactcactgtatctgcaaatgaacagcctgagagacgaggacacggctgtgtattactgtgcgagaaaagtgcctttcgatctctggggccgtggcaccctggtcactgtctcctca

SEQ ID NO: 10313 - DNA, 280 bp, Homo sapiens
  source 1..280: mol_type = other DNA
tgcagcctctggattcaccgtcagtacctataccatgaattgggtccgccaggctccagggaaggggctggagtgggtttcatacattagtggtagtagtagtaatgcatactacgcagactctgtgaagggccgattcaccatctccagagacaacgccaagaactcactgtatctgcaaatgaacagcctgagagccgaggacacggctatttattactgtgcgaggaaagtccccttcgatctctggggccgtggcaccctggtcactgtctcctca

SEQ ID NO: 10314 - DNA, 292 bp, Homo sapiens
  source 1..292: mol_type = other DNA
tgcagcctctggatacacttttcgcgcctatgccatgggctgggtccgccaggctccagggaaggggctggagtgggtctcagctattagtattagtggtgggagcacattctacgcagactccgtgaagggccggttcaccatctccagagacaattccaagaccacgctgtatctgcaaatgaacagcctgagaggcgaggacacggccatatattactgtgcgaaaagattcggagagggggggcactttgactactggggccagggaaccctggtcaccgtctcctca

SEQ ID NO: 10315 - DNA, 301 bp, Homo sapiens
  source 1..301: mol_type = other DNA
tgcagcctctggagcctctggattcacttttagtagatatggcatgggctgggtccgccaggctccagggaaggggctggagtgggtgtcagctattagtcgttccggtggtagcacattctacgcggcctccgtgaagggccggttcaccgtgtccagggacaattccaagaacacgctggatctgcaaatgaacagcctgagagtcgacgacacggccgtatattactgtgcgaaaaggtttggggagggtggccactttgactattggggccagggaattttggtcacggtctcctca

SEQ ID NO: 10316 - DNA, 289 bp, Homo sapiens
  source 1..289: mol_type = other DNA
tgcagcctctggattcaccttcagtatctatagcatgaactgggtccgccaggctccagggaaggggctggagtgggtctcatccattagtagtagtagtacttacatatacaacgcagactcagtgaagggccgattcaccatctccagagacaacgccaagaactcactgtatctgcaaatgaacagcctgagagccgaggacacggctgtgtattactgtgcgagagatggtggtggctggtactttgactactggggccagggaaccctggtcaccgtctcctca

SEQ ID NO: 10317 - DNA, 289 bp, Homo sapiens
  source 1..289: mol_type = other DNA
tgcagcctctggattcaccttcaatatgtatagtatgaactgggtccgccaggctccagggaaggggctggagtgggtctcatccattagtagtattagtacttacatatattactcagactcagtgaagggccggttcaccatctccagagacaacaccaagaactcactgtatctgcaaatgaacagcctgagagccgaggacacggctgtctattactgtgcgagagatggtggtggctggtactttgactactggggcccgggaatcctggtcaccgtctcctca

SEQ ID NO: 10318 - DNA, 283 bp, Homo sapiens
  source 1..283: mol_type = other DNA
tgcagcctctggattcaccttcagttactactggatgcactgggtccgccaagctccagggaaggggctggtgtgggtctcacgtattaatcctgatgggactagcacaaactacgcggactccgtgaagggccgattcaccatctccagagacaacgccaagaagacgctatatttgcaaatgaacagtctgacagccgaggacacggctgtgtattattgtgcaagagaccacaatggtcgtgactactggggccagggaagcctggtcaccgtctcctca

SEQ ID NO: 10319 - DNA, 283 bp, Homo sapiens
  source 1..283: mol_type = other DNA
tgcagcctctggattcaccttcagttactactggatgcactggttccgccaagctccagggaaggggctggtgtgggtctcacgaataaatagtgatgggagtagcaacagctatgcggactccgtgaagggccgattcaccatctccagagacaacggcaagaacacgctgtatctgcaaatgaacagtctgagagccgaggacacggctgtgtattactgtgcaagagatcataatggccgggactactggggccagggaaccctggtcaccgtctcctca

SEQ ID NO: 10320 - DNA, 283 bp, Homo sapiens
  source 1..283: mol_type = other DNA
tgcagcctctggattcaccttcagttactactggatgcactgggtccgccaagctccagggaaggggctggtgtgggtctcacgtattaacagtgatgggagtagcacaaactacgcggactccgtgaagggccgattcaccatttccagagacaacgccaagaacacgctgtatctgcaaatgaacagtctgagagccgaggacacggctgtgtattactgtgcaagagatcataatggccgggactactggggccagggaaccctggtcaccgtctcctca

SEQ ID NO: 10321 - DNA, 286 bp, Homo sapiens
  source 1..286: mol_type = other DNA
tgcagcctctggcttcagttttagtgatcattggatgatctgggtccgccaggctccagggaagggaccgcagtgggtggccaccataaagcaagatggaagtcagacacactatgtggactctgtgaggggccgattcaccatctccagagacaacgccaagaactcactgtatctgcaaatggacagcctgagagtcgacgacacggctgtgtatttctgtgcgaggggcagtggctggctttctgattactggggccagggaaccctggtcaccgtctcctcg

SEQ ID NO: 10322 - DNA, 286 bp, Homo sapiens
  source 1..286: mol_type = other DNA
tgcaggctctggattcagctttagtcactattggatgaactgggtccgccaggctccagggaaagggctggagtgggtggccatcataaatcaggatggaagtgagaagtattatgtggactctgtgaagggccgattcaccatctccacagacaacgccaagaactcactgtatctgcaaatgaacagcctgagagccgacgacacggccgtgtattactgtgcgaggggcagtggctggttgtctgactattggggccagggaaccttggtcacagtctcctca

SEQ ID NO: 10323 - DNA, 286 bp, Homo sapiens
  source 1..286: mol_type = other DNA
tgcagcctctggcttcaccttcagtgctcattggatgatctgggtccgccaggctccagggaaggggctggagtgggtggccaccataaagcaagatggaagtgagacatattatgtggactctgtgaagggccgattcaccatctccagagacaacgccaagaactcagtgtatctgcaaatgaacagcctgagagccgaggacacggctgtgtacttctgtgcgaggggcagtggctggctttctgactactggggccagggaaccctggtcaccgtctcctca

SEQ ID NO: 10324 - DNA, 286 bp, Homo sapiens
  source 1..286: mol_type = other DNA
tgcagcctctggcttcaccttcagtgctcattggatgatctgggtccgccaggctccagggaaggggctggagtgggtggccaccataaagcaagatggaagtgagacatattatgtggactctgtgaagggccgattcaccatctccagagacaacgccaagaactcagtgtatctgcaaatgaacagcctgagagccgaggacacggctgtgtacttctgtgcgaggggcagtggctggctttctgactactggggcccgggaaccctggtcaccgtctcctca

SEQ ID NO: 10325 - DNA, 295 bp, Homo sapiens
  source 1..295: mol_type = other DNA
tgcagcctctggattccccttcagtagccactggacgcactgggtccgccaagctccagggaaggggctggtgtgggtctcacgtattaatagtgatgggagtgacacaaaatacgcggactccgtgaagggccgattcaccatctccagagacaacgccaggaacacgctgtatctgcaaatgaacagtcttagagccgaggacacggctgtgtattactgtgcaagagggggttgtagtaatcccagctgccttgactactggggccagggaactctggtcaccgtctcctca

SEQ ID NO: 10326 - DNA, 295 bp, Homo sapiens
  source 1..295: mol_type = other DNA
tgcagcctctggattcaccttcagtacttactggatgcactgggtccgccaagctccagggaagggtctggtgtgggtctcacatattattagtgatgggagtagcacaaactacgcggacgccgtgaagggccgattcaccatctccagagacaacgccaagaacacgctgtatctgcaaatgaacagtctgagagccgaggacacggctgtctattactgtgcaagagggggttgttctaatcccagctgccttgactactggggccagggaaccctggtcaccgtctcctca

SEQ ID NO: 10327 - DNA, 295 bp, Homo sapiens; identical to SEQ ID NO: 10326
  source 1..295: mol_type = other DNA

SEQ ID NO: 10328 - DNA, 276 bp, Homo sapiens
  source 1..276: mol_type = other DNA
gcttctggattcaccttcaccgactactttatccactgggtgcgacaggcccctggacaagggcttgagtggatgggacggatcaaccctaaaagtggtggcgcaacttatgcacagaagtttaagggcagggtcaccatgaccagggacaggtccatcaccacagcctacatggaactgagcaggctgacatctgacgacacggccttttattactgtgcgagagaaaactacttccagccctggggccagggaaccctggtcaccgtctcctca

SEQ ID NO: 10329 - DNA, 276 bp, Homo sapiens
  source 1..276: mol_type = other DNA
gcttctggattcaccttcaccaactacttcttacactgggtgcgccaggcccccgggcaaggccttgagtggatgggacggatgaaccctgagactggtcgcgcgacctatgcacgggcgtttaggggcagactgaccatgacccgggacacgtcgacatccacaggctacatggagctgagtggattgacctccgccgacacggccgtctactactgtgcgagagaaaactacttccaaccgtggggacaggggaccctggtcatcgtctcctca

SEQ ID NO: 10330 - DNA, 289 bp, Homo sapiens
  source 1..289: mol_type = other DNA
tgcagcctctagattcacttttagtacctattacatgacctgggtccgccaggctccagggaaggggctggagtgggtggcccacataaaggaggatggaagtgagaaatactatgtggactctgtgaagggccgattcaccatctccagagacaacgccaagaactcactgtatctgcaaatgaacagcctgagagccgaggacacggctgtgtattactgtgcgagagatagttatagttcgggtgttgactactggggccagggaaccctggtcaccgtctcctct

SEQ ID NO: 10331 - DNA, 289 bp, Homo sapiens
  source 1..289: mol_type = other DNA
tgaagccggtgggctcacttttagtaactattacatgagttgggtccgccaggctccagggaaggggctggagtgggtggcccacataaaggaagatggaagtgagaaattctatgtggactctgtgaagggccgattcaccatctccagagacaacgccaagaactcactgtatctgcaaatgaacagcctgagagccgaggacacggctgtctattactgtgcgagagactcctatagtagtggtgttgactactggggccagggagccctggtcaccgtctcctca

SEQ ID NO: 10332 - DNA, 286 bp, Homo sapiens
  source 1..286: mol_type = other DNA
tgcagcctctggattcaccttcagtagctactggatgcactgggtccgccaagctccagggaaggggctggtgtgggtctcgcatattaatactggtgggagttccacaaactacgcggcctccgtgaagggccgattcaccatctccagagacaacgccaagaacacgctgtatctgcaaatgaacagtctgagagccgaagacacggctgtgtattactgtgcaagaggtgacggtgggacctacggctactggggccagggaaccctggtcaccgtctcctca

SEQ ID NO: 10333 - DNA, 286 bp, Homo sapiens
  source 1..286: mol_type = other DNA
tgcagcctctggattcaccttcagtagctactggatgcactgggtccgccaagctccagggaaggggctggtgtgggtctcagttattaatagtgatgggagtcgcactaactacgcggactccgtgaagggccgattcaccatctccagagacaacgcccagaacacgctgtatctgcaagtgaacagtctgagagccgaggacacggctgtgtattactgtgcaagaggtgatggtgggacctacggctactggggccagggaaccctggtcaccgtctcctca

SEQ ID NO: 10334 - DNA, 286 bp, Homo sapiens
  source 1..286: mol_type = other DNA
tgcagcctctggattcacctttagcaactatgccatgagctgggtccgccaggcgccagggaaggggctggagtgggtctcagctattactggcagtggtgggagcacatactacgcagactccgtgaggggccggttcaccatctccagagacaattccaagaacacggtgtatctgcaaatgaacagcctgagagccgaggacacggccgtatattactgtgcgaaacgatactacggtgccgttgactactggggccagggaaccctggtcaccgtctcctca

SEQ ID NO: 10335 - DNA, 286 bp, Homo sapiens
  source 1..286: mol_type = other DNA
tgcagcctctggattcacctttagcagctatgccatgagctgggtccgccaggctccagggaaggggctggagtgggtctcagatatttgtggtagtgatggtaacacatactacgcagactccgtgaagggccggttcaccatctccagagacaattccaagaacacgctgtctctgcaaatgaacagcctgagagccgaggacacggccgtatattactgtgcgaaacgctactatggtgccgttgactactggggccagggaaccctggtcaccgtctcctca

SEQ ID NO: 10336 - DNA, 277 bp, Homo sapiens
  source 1..277: mol_type = other DNA
tacagccgctacatttactatccgaagaagctggatacactggttccgccaagctccagggaaggggctggtgtgggtctcacgtattggtcctgaaggaaatgggataacctacgcggactccgtgaggggccgattcacgatctccagagacaacgcccagaacacggtatatctgcaaatgaatagtctgagaggcgaagacacggctgtctattactgttcgagggacaagcttgactactggggccagggaaccctggtcaccgtctcctcc

SEQ ID NO: 10337 - DNA, 277 bp, Homo sapiens
  source 1..277: mol_type = other DNA
tgcagcctctggattcaccttcagtaggagttggatacactggttccgccaagttccggggaaggggctggcgtgggtctcacgtattaatcctgatgggggcatcacaaactacgcggactccgtgaagggccgattcaccatctccagagacaacgccaagaacacggtgtatttgcaaatgaccagtctgagacccgaggacacggctctatattactgttcaagagacaaacttgactactggggcccgggaacccgggtcaccgtctcctca

SEQ ID NO: 10338 - DNA, 303 bp, Homo sapiens
  source 1..303: mol_type = other DNA
gcctctggatacaccttcacctactactatttgcactgggtgcgacaggcccctggacaagggcttgcgtggatgggatggatcaaccctaaaagtggtgacacaaactctgcacagaggtttcagggcagggtcaccatgaccagggacacgtccatcagtacagtgtacatggagctgaccagactgacatctgacgactcggccatgtattactgtgcgagagatggtagagaaggctacaatttcttctactacgctatggacgtctggggccaggggaccacggtcaccgtctcgtca

SEQ ID NO: 10339 - DNA, 303 bp, Homo sapiens
  source 1..303: mol_type = other DNA
gcttctggatataccttcaccttctactacatccactgggtgcgacaggcccctggacaagggcctgagtggatggggtggatcaactctaagggtggtgacacaaagtatgcacagaagtttcagggcagggtcaccatgaccagggacacgtccatcaacacagcctacatggagctgagtgggctgagttctgacgacacggccgtgtattactgtgcgcgagacggcagagaaggctacaacttcttctactacgcaatggacgtctggggccaggggaccacggtcaccgtttccgca

SEQ ID NO: 10340 - DNA, 280 bp, Homo sapiens
  source 1..280: mol_type = other DNA
tgcagcctctggattcacccttagcagctatgccatgagctgggtccgccaggctccagggaaggggctggagtgggtctcagtaattagtgctagcggtactactacatactacgcagactccgtgaagggccggttcaccatctccagggacaattccaagaacactctgtatctgcaaatgaacagcctgagagccgaggacacggccgtatattactgtgcgaaaaattacggtatggaggtctggggccaagggaccgcggtcaccgtctcctca

SEQ ID NO: 10341 - DNA, 280 bp, Homo sapiens
  source 1..280: mol_type = other DNA
tgcagcctctggattcacgtttagcagctatgccatgacctgggtccgccaggctccagggaaggggccggagtgggtctcacttattagaggtagtggtggtagcacatactacgcagactccgtgaagggccggttcaccatctccagagacaattccaagaacacactgtatttgcaaatgaacagcctgagagccgaggacacggccgtatattactgtgcgaaaaactacggtatggaagtctggggccaagggaccacggtcaccgtctcctca

SEQ ID NO: 10342 - DNA, 280 bp, Homo sapiens
  source 1..280: mol_type = other DNA
tgcagcctctggattcacgtttagcagctatgccatgacctgggtccgccaggctccagggaaggggccggagtgggtctcacttattagatatagtggtggtagcacatactacgcagactccgtgaagggccggttcaccatctccagagacaattccaagaacacactgtatttgcaaatgatcagcctgagagccgaggacacggccgtatattactgtgcgaaaaactacggtatggaagtctggggccaagggaccacggtcaccgtctcctca

SEQ ID NO: 10343 - DNA, 280 bp, Homo sapiens; identical to SEQ ID NO: 10341
  source 1..280: mol_type = other DNA

SEQ ID NO: 10344 - DNA, 286 bp, Homo sapiens
  source 1..286: mol_type = other DNA
tgcagtctctggatttacctttagaaactattggatgagctgggtccgccaggctccagggaaggggctggagtgggtggccaacataaagcaagatgaaagtgagaaattctatgtggactctgtgaagggccgattcaccatctccagagacaacgccaagaactcactgtatctgcagatgaacagcctgagagccgaggacacggctgtgtattactgtgcgagagcgactagcaacagctggtcctactggggccagggaaccctggtcaccgtctcctca

SEQ ID NO: 10345 - DNA, 286 bp, Homo sapiens
  source 1..286: mol_type = other DNA
tgcagcctctggattcacctttagtagttattggatgagctgggtccgccaggctccagggacggggctggagtgggtggccaacataaagcaagatgaaagtgagaaattctatgtggactctgtgaagggccgattcaccatctccagagacaacgccaagaactcactgtatctgcaaatgaacagcctgagagtcgaggacacggctgtgtattactgtgcgagagcgacaagcaacagctggtcctactggggccagggaaccctggtcaccgtctcctca

SEQ ID NO: 10346 - DNA, 283 bp, Homo sapiens
  source 1..283: mol_type = other DNA
tgcagcctctggattctccttcaatacctactggatgcactgggtccgccaagctccagggaaggggctggtgtgggtctcacgtattaatggtgatgggagtaccacaacctacgcggactccgtgaagggccgattcaccatctccagagacaacgccaagaatgcactgtatctgcaaatgaacagtctgagtgccgaggacacggctgtgtattactgtgcaagagatcgccccccctacgattactggggccagggaaccctggtcaccgtctcctca

SEQ ID NO: 10347 - DNA, 283 bp, Homo sapiens
  source 1..283: mol_type = other DNA
tgcagcctctggattcaccttcagtagctactggatgcactgggtccgccaagatccagggaaggggctggtgtcggtctcacgtattaatcctggtgggagtgtcacaagctacgcggactccgtgaagggccgattcaccatctccagagacaacgccaagaacacgctgtatctgcacatgaacagtctgagagccgaggacacggctgtgtattactgtgcaagagatcgacctccgtatgactactggggccagggagccctggtcaccgtctcctca

SEQ ID NO: 10348 - DNA, 289 bp, Homo sapiens
  source 1..289: mol_type = other DNA
tgcaggctctggattcgcctttagtacctattggatgagctgggtccgccagggcccagggaaggggctggagtgggtggccaacataaagcaagatggaagtgacaagtactatgtggactctctgaagggccgattcaccatctccagagacaacgccaagaactcactgtatctgcaaatgaacagcctgacaaccgaggacacggctgtgtattactgtgcggcctggtctagcagccactggtttgactactggggccagggaaccctggtcaccgtctcctca

SEQ ID NO: 10349 - DNA, 289 bp, Homo sapiens
  source 1..289: mol_type = other DNA
tgcaggctctggattcgactttagtacctattggatgagctgggtccgccagggcccagggaaggggctggagtgggtggccaatataaaatatgatggaagtgagaagaactatgtagactctctgaagggccgattcaccatctccagagacaacgccaagaactcactgtatctgcaaatgagcagcctgacaaccgaggacacggctgtgtattactgtgcggcctggtctagcagccactggtttgactactggggccagggaaccctggtcaccgtctcctca

SEQ ID NO: 10350 - DNA, 289 bp, Homo sapiens
  source 1..289: mol_type = other DNA
tgcaggctctggattcaccttcagtagttattggatgggttgggtccgccaggctccagggaaggggctggagtggatggccaacataaaacaagatggaagtgagaaattgtatctggactctgtgaagggccgattcaccatctccagagacaacgccaagaactcactgtatctgcaaatgaacagcctgagagccgaggacacggctatttactactgtgcggcatggtctagtagccactggtttgattactggggccagggaaccctggtcaccgtctcctca

SEQ ID NO: 10351 - DNA, 295 bp, Homo sapiens
  source 1..295: mol_type = other DNA
tgcagcgtctggattcatttttagtgaatatggcatgcactgggtccgccaacctgcaggcaggggcctggagtgggtgggactcatagtgagcgatgggcaggagaaacaatatgcagactccgtgaggggccgattcaccatctccagagacaattccaaggacgtcctatatctggaaatcgacaacgtgagagccgacgacacggctctctatttgtgtgcgagagatgacgaccgtggtgacaatgctttggatgtatggggccaagggacaatggtcaccgtctcttca

SEQ ID NO: 10352 - DNA, 295 bp, Homo sapiens
  source 1..295: mol_type = other DNA
tgcagcgtctggattcacgttcagtacatatggaatgcactgggttcgccagcctccaggcgaggggctggagtggctggcagttatattgagtgatggctctaaacaattctatgcagactccgtgaagggccgcttcaccatctcgagagacaattccgagaacacactgtatctacaaatgaacggcctgagagccgaggacacggctgtgtatttttgtgcgagagatgatgacagaggggacaacgctcttgatgtctggggccaagggacatcggtcaccgtctcttca

SEQ ID NO: 10353 - DNA, 291 bp, Homo sapiens
  source 1..291: mol_type = other DNA
gcttctggatacatctttactagctatgctgtacattggctgcgccaggcccccggacaaggacttgagtggatggcatggatcaacggtggcaatggtatcacgatgtcttcacaaaaattccagggcagagtcaccattacaagggacacaaccgcgagcacagcgtacatggagttgaggagtctgacatctgaagacacggctgtgtattactgtgcgagacaggcagtgtctggcctcaactggttcgacccctggggcccgggaaccgaggtcaccgtctccacc

SEQ ID NO: 10354 - DNA, 291 bp, Homo sapiens
  source 1..291: mol_type = other DNA
gcttctggatacatcttcattaattatgctgtccattgggtgcgccaggcccccggacaaaggcttgagtggatggggtggatcaacggtggcaacggttacagagactattcacagaagttccggggcagagtcaccattagcagggacacatccgcgaccacacattacatggaactgagcagcctgacatttgaagacacggctgtatattactgtgcgagacaggccgtgtctggtctcaactggttcgacccctggggtcagggaaccctggtcaccgtctcctca

SEQ ID NO: 10355 - DNA, 298 bp, Homo sapiens
  source 1..298: mol_type = other DNA
cactgtctctggtgactccatcagcagtagtagttactactggggctggatccgccagcccccagggaaggggctggagtggattgggagtatctattatagtgggaccacctactacaacccgtccctcaagagtcgagtcaccaaatccgtagacacgtccaagaaccagttctccctgaagctgagctctgtgaccgccccagacacggctgtgtattactgtgcgagacaggttggcagtggcaaatggtactttgactactggggccagggaaccctggtcaccgtctcctca

SEQ ID NO: 10356 - DNA, 298 bp, Homo sapiens
  source 1..298: mol_type = other DNA
cactgtctctggtggctccatcagcattattggttacttctggggctggatccgccagaccccaggggaggggctggagtggattgggattaagtactacactgggagttcctattacaatctgtccctcaagagtcgagtcaccatatccgtagacacgtccaagaaccagttctccctgaagctgagctctgtgaccgccgcagacacggctgtatattactgtgcgagacaggtggggagcggcaaatggtactttgactactggggccagggaaccctggtcaccgtctcctca

SEQ ID NO: 10357 - DNA, 294 bp, Homo sapiens
  source 1..294: mol_type = other DNA
aagggttctggatacagctttagcacctactggatcggctgggtgcgccagatgcccgggaaaggcctggagtggatggggatcatctatcctggtgactctgataccagatacagcccgtccttccaaggccaggtcaccatctcagccgacaagtccatcagcaccgcctacctacagtggagcagcctgaaggcctcggacaccgccatgtattactgtgcgagacggctgaactacggtgactactactttgactactggggccagggaaccctgatcagcgtctcctca

SEQ ID NO: 10358 - DNA, 294 bp, Homo sapiens
  source 1..294: mol_type = other DNA
aagggttctggatacagttttaccacctactggatcggctgggtgcgccagatgcccgggaaaggcctggagtggatggcgctcatctatcctggtgactctgatattagatacagcccgtccttccaaggccaggtcaccatctcagccgacaagtccatcactaccgcctacctgcagtggagcagcctgaaggcctcggacaccgccatgtattactgtgcgagacgattgaactacggtgactactactttgactactggggccagggaaccctggtcaccgtctcctca

SEQ ID NO: 10359 - DNA, 280 bp, Homo sapiens
  source 1..280: mol_type = other DNA
cgctgtctatggtgggtctttcagtaattactattggagttggatccgccagcccccagggagggggctggagtggattggggaaatcaatcattctggaaccaccaactacaacccgtccctcgagagtcgagtcaccatatcaatagacacgtccaagaatcagttctccctgaaactgaggtctgtgaccgccgcggacacggctgtatattattgcgcgagaggtcccggtagtaccagcgactggggccagggaaccctggtcaccgtcgcctca

SEQ ID NO: 10360 - DNA, 280 bp, Homo sapiens
  source 1..280: mol_type = other DNA
cgctatctatggtgggtccctcagtgattactactggagctggatccgccagcccccagggaaggggctggagtggattggggagatcaattacagtggaagcaccacctacaacccgtcccttaagagtcgagtcgccatgtcaattgacacgtccaagaatcagttctccctgaagctgacctctgtgaccgccgcggacacggctatatatttctgtgcgagaggccccggaagtacgtcggactggggccagggaaccctggtcagcgtctcctca

SEQ ID NO: 10361 - DNA, 286 bp, Homo sapiens
  source 1..286: mol_type = other DNA
tgcagcctctggattcaccttcagtagttatagcatgaattgggtccgccaggctccagggaaggggccggagtgggtttcatacattactagaggtagtgacaccatatattacgcagactctgtgaagggccgattcaccatctccagagacaatgccaagaactcactgtatctgcaaatgaacagcctgagagacgaggacacggctgtgtattactgtgcgagagatcgcaactatggtttcgactactggggccagggaaccccggtcaccgtctcctca

SEQ ID NO: 10362 - DNA, 286 bp, Homo sapiens
  source 1..286: mol_type = other DNA
tgcagcctctggattcaccttcagtagttatagcatgaactgggtccggcaggctccagggaaggggctggagtggatttcatactttggggctggtagtattacctcatactacgcagagtctgtgaagggccgattcaccatctccagagacaatgccaagaactcactgtatctacaaatgaacagcctgagagacgaggacacggctgtgtattactgtgcgagagaccggaactacggatttgactactggggccagggaatcttggtcaccgtctcctca

SEQ ID NO: 10363 - DNA, 282 bp, Homo sapiens
  source 1..282: mol_type = other DNA
gcttctggatacaccttcactaactatgttatgcattgggtgcgccaggcccccggacaaaggcttgagtggatgggatggatcaacgctggcaatggtaacacaaaatattcacagaagttccagggcagagtcaccattaccagggacacatccgcgagcacagcctacatggagctgagcagcctgagatctgaagacacggctgtatattactgtgcgaggggctatagtgggagttttgactactggggccagggaaccctggtctccgtctcctca

SEQ ID NO: 10364 - DNA, 282 bp, Homo sapiens
  source 1..282: mol_type = other DNA
gcttctggatacaccttcagtagctatattatacattgggtgcgccaggcccccggacaaaggtttcagtggatgggatggatcagcgttggcagtggtagcacaaaatattcacagaacttccagggcagagtctccattaccagggacacatccgcgagcacagcctatatggagctgagcagcctgagatctgaggacacggctgtatactactgtgcgagaggttatagcggcagctttgactactggggccagggaaccctggtcaccctctcctca

SEQ ID NO: 10365 - DNA, 286 bp, Homo sapiens
  source 1..286: mol_type = other DNA
tgcagcctctggattcaccttcagtatctatagcatgaactggatccgccaggctccagggaaggggctggagtgggtttcatacatgactagtgatatgaagaccataaagtatgcagactctgtgaggggccgattcaccatctccagagacaatgccaagaacacggtgtttctgcaaatgaacagcctgagagacgacgacacggctctatattattgtgcgagatccgtggctggccactttgacaactggggccagggaacccaggtcatcgtctcctca

SEQ ID NO: 10366 - DNA, 286 bp, Homo sapiens
  source 1..286: mol_type = other DNA
cgcagcctctggattcgacttcaatatatatagcatgaactgggtccgccaggctccagggaaggggctggagtgggtttcatacatgactagtaataaggctctcatacactacgcagactctgtgaggggccggttcaccatctccagagacaatgccgggcgttctctatatctgcaaatgaacagcctgggagccgacgacacggctgtttactactgtgcgaggtcagtggctggacactttgacaactggggccagggaaccctggtcaccgtctcctca

SEQ ID NO: 10367 - DNA, 293 bp, Homo sapiens
  source 1..293: mol_type = other DNA
ccatctccggggacagtgtctctagcaacagtgttgcttggaactggatcaggcagtccccatcgagaggccttgagtggctgggaaggacatactacaggtccaagtggtataatgattatgcaggttctgtgaaaagtcgaataaccgtcaacccagacacatccaagaaccagttctccctgcagctgaactctgtgactcccgaggacacggctgtctattactgtgcaagaggaaagtcctatgcttttgatatctggggccaagggacaatggtcaccgtctcctca

SEQ ID NO: 10368 - DNA, 293 bp, Homo sapiens
  source 1..293: mol_type = other DNA
ccatctccggggacactgtctctagttacaatgttggttggcactggatcaggcagtccccatcgagaggccttgagtggctgggaaggacattttacaggtccaagtggtataatgattatgcggtatctgtgaaaagtcgaataaccatcaacccagacgcatccaagaaccagttctccctgcagctgaactctgtgactcccgaggacacggctgtgtattactgtgcaagggggaagtcttatgcttttgatatctggggccaagggacaatggtcaccgtctcttca

SEQ ID NO: 10369 - DNA, 293 bp, Homo sapiens
  source 1..293: mol_type = other DNA
ccatctccggggacagtgtctctagcaacagtgcttcttggaactggatcaggcagtccccatcgagaggccttgagtggctgggaaggacatactacaggtccaactggtatcatgattatgcagtatctgtgaagagtcgaataaccgtcctcccagacacatccaagagccagttctccctgcagttgaactctgtgactcccgaggacacggctgtgtattactgtgcaagagggaagtcttatgcttttgatatatgggcccaagggacaatggtcaccgtctcttca

SEQ ID NO: 10370 - DNA, 304 bp, Homo sapiens
  source 1..304: mol_type = other DNA
tgcagcctctggattcacctttggcacctatgccatgagctgggtccgccaggctccagggaaggctccagggaaggggctggagtgggtctcaggtattactgctagtggcggtaccacagactacgcagactccgtgaagggccggttcaccatctccagagacaattccaagaacacgctgtacctgcaaatgaacagcctgagagccgaggacacggccgtttattactgtgcgaaagatcggggtagtagtggtttttttgactactggggccagggaaccctggtcagcgtctcctca

SEQ ID NO: 10371 - DNA, 288 bp, Homo sapiens
  source 1..288: mol_type = other DNA
gcttctggaggcaccttcagcagctatgctatcagctgggtccgccaggctccagggaaggggctggagtgggtctcagctattagtggtagtggtggtagcacatactacgcagactccgtgaagggccggttcaccatctccagagacaattccaagaacacgctgtatctgcaaatgaacagcctgagagccgaggacacggccgtatattactgtgcgaaagatcgcggtagcagtggcttctttgactactggggccagggaaccctggtcaccgtctcctca

SEQ ID NO: 10372 - DNA, 310 bp, Homo sapiens
  source 1..310: mol_type = other DNA
cgctgtctcaggtggctccatcggcagtagtagctacttctggggctggatccgccagcccccagggaagggcctggagtggattggcagtgtctattatagtggagatacgtactacaacccgtccctcaagaatcgagtcaccatatccgtagacacgtccaagaaccagttctccctgaaactaagttctgtgaccgccgcagacgcggctgtgtattactgtgcgagacgccatatagaagcaactggtaccgggagttggtactttgactactggggccagggaaccctggtcaccgtctcctca

SEQ ID NO: 10373 - DNA, 310 bp, Homo sapiens; identical to SEQ ID NO: 10372
  source 1..310: mol_type = other DNA

SEQ ID NO: 10374 - DNA, 310 bp, Homo sapiens
  source 1..310: mol_type = other DNA
cgctgtctcaggtggctccatcggcagtagtagctacttctggggctggatccgccagcccccagggaagggcctggagtggattggcagtgtctattatagtggagatacgtactacaacccgtccctcaagaatcgagtcaccatatccgtagacacgtccaagaaccagttctccctgaaactaagttctgtgaccgccgcagacgcggctgtgtattactgtgcgagacgccatatagaagcaactggtaccgggagttggtactttgactactggagccagggaaccctggtcaccgtctcctca

SEQ ID NO: 10375 - DNA, 310 bp, Homo sapiens
  source 1..310: mol_type = other DNA
cgctgtctcaggtggctccatcggcagtagtagctacttctggggctggatccgccagcccccagggaagggcctggagtggattggcagtgtctattatagtggagatacgtactacaacccgtccctcaagaatcgagtcaccatatccgtagacacgtccaagaaccagttctccctgaaactaagttctgtgaccgccgcagacgcggctgtgtattactgtgcgagacgccatatagaagcaactggtaccgggagttggtactttgactacgggggccagggaaccctggtcaccgtctcctca

SEQ ID NO: 10376 - DNA, 310 bp, Homo sapiens
  source 1..310: mol_type = other DNA
cgctgtctcaggtggctccatcggcagtagtagctacttctggggccggatccgccagcccccagggaagggcctggagtggattggcagtgtctattatagtggagatacgtactacaacccgtccctcaagaatcgagtcaccatatccgtagacacgtccaagaaccagttctccctgaaactaagttctgtgaccgccgcagacgcggctgtgtattactgtgcgagacgccatatagaagcaactggtaccgggagttggtactttgactactggggccagggaaccctggtcaccgtctcctca

SEQ ID NO: 10377 - DNA, 310 bp, Homo sapiens
  source 1..310: mol_type = other DNA
cgctgtctcaggtggctccatcggcagtagtagctacttctggggctggatccgccagcccccagggaagggcctggagtggattggcagtgtctattatagtggagatacgtactacaacccgtccctcaagaatcgagtcaccatatccgtagacacgtccaagaaccagttctccctgaaactaagttctgtgaccgccgcagacgcggctgtgtattactgtgcgagacgccatatagaagcaactggtaccgggagttggtacttcgactactggggccagggaaccctggtcaccgtctcctca

SEQ ID NO: 10378 - DNA, 310 bp, Homo sapiens
  source 1..310: mol_type = other DNA
cgctgtctcaggtggctccatcggcagtagtagctacttctggggctggatccgccagcccccagggaagggcctggagtggattggcagtgtctattatagtggagatacgtactacaacccgtccctcaagaatcgagtcaccatatccgtagacacgtccaagaaccagttctccctgaaactaaattctgtgaccgccgcagacgcggctgtgtattactgtgcgagacgccatatagaagcaactggtaccgggagttggtactttgactactggggccagggaaccctggtcaccgtctcctca

SEQ ID NO: 10379 - DNA, 308 bp, Homo sapiens
  source 1..308: mol_type = other DNA
ctgtctcaggtggctccatcggcagtagtagctacttctggggctggatccgccagcccccagggaagggcctggagtggattggcagtgtctattatagtggagatacgtactacaacccgtccctcaagaatcgagtcaccatatccgtagacacgtccaagaaccagttctccctgaaactaagttctgtgaccgccgcagacgcggctgtgtattactgtgcgagacgccatatagaagcaactggtaccgggagttggtactttgactactggggccagggaaccctggtcaccgtctcctca

SEQ ID NO: 10380 - DNA, 310 bp, Homo sapiens
  source 1..310: mol_type = other DNA
cgctgtctcaggtggctccatcggcagtagtagccacttctggggctggatccgccagcccccagggaagggcctggagtggattggcagtgtctattatagtggagatacgtactacaacccgtccctcaagaatcgagtcaccatatccgtagacacgtccaagaaccagttctccctgaaactaagttctgtgaccgccgcagacgcggctgtgtattactgtgcgagacgccatatagaagcaactggtaccgggagttggtactttgactactggggccagggaaccctggtcaccgtctcctca

SEQ ID NO: 10381 - DNA, 310 bp, Homo sapiens
  source 1..310: mol_type = other DNA
cgctgtctcaggtggctccatcggcagtagtagctacttctggggctggatccgccagcccccagggaagggcctggagtggattggcagtgtctattatagtggagatacgtactacaacccgttcctcaagaatcgagtcaccatatccgtagacacgtccaagaaccagttctccctgaaactaagttctgtgaccgccgcagacgcggctgtgtattactgtgcgagacgccatatagaagcaactggtaccgggagttggtactttgactactggggccagggaaccctggtcaccgtctcctca

SEQ ID NO: 10382 - DNA, 310 bp, Homo sapiens
  source 1..310: mol_type = other DNA
cactgtctctggtgcctccatcagcagtagcagttacttctggggctggatccgccagcccccagggaagggtctggagtggattgggagtatttattatagtggggacacctactacaacccgtccctcaagagtcgagtcaccatatccttacacacgtccaccaaccagttctccctgaggctgagctctgtgaccgccgcagatacggctgtctattactgtgcgagacgtcatatagaagcgactggtacggggtcgtggtactttgactactggggccagggaaccctggtcaccgtctcctca

SEQ ID NO: 10383 - DNA, 292 bp, Homo sapiens
  source 1..292: mol_type = other DNA
cactgtctctggtggctccatcagtagttactactggagttggatccggcagcccccagggaaggggctggagtggattgggtatatctattacagtgggagcaccaactacaacccctccctcaagagtcgagtcaccatatcagtagacacgtccaagaaccagttctccctgaagctgagttctgtgaccgctgcggacacggccgtgtattattgtgcggtggggggttcggggagaatgaattacttcgatctctggggccgtggctccatggtcactgtctcctca

SEQ ID NO: 10384 - DNA, 292 bp, Homo sapiens
  source 1..292: mol_type = other DNA
cactgtctctggtggctccatcagtaattattactggagttggatccggcagcccccagggaaggggctggagtggattgggtatatctattacagtgggagcaccaactacaatccctccctcaagagtcgagtcaccatatcagtagacacgtccaagaaccagttctccctgaagctgagttctgtgaccgctgcggacacggccgtgtattattgtgcggtggggggttcggggagaatgaattacttcgatctctggggccgtggctccatggtcactgtctcctca

SEQ ID NO: 10385 - DNA, 292 bp, Homo sapiens
  source 1..292: mol_type = other DNA
cactgtctctggtggctccatcagtagttactactggagttggatccggcagcccccagggaaggggctggagtggattgggtatatccacaacagtgggagcaccaattacaacccctccctcaagagtcgagtcaccatatcagtagacatgtccaagaaccagttctccctgaagctgagttctgtgaccgctgcggacacggccgtgtattattgtgcggtggggggttcggggagaatgaattacttcgatctctggggccgtggctccacggtcactgtctcctca

SEQ ID NO: 10386 - DNA, 292 bp, Homo sapiens
  source 1..292: mol_type = other DNA
cactgtctctggtggctccatcagtagttactactggagttggatccggcagcccccagggaaggggctggagtggattgggtatatccacaacagtgggagcaccaattacaacccctccctcaagagtcgagtcaccatatcagtagacatgtccaagaaccagttctccctgaagctgagttctgtgaccgctgcggacacggccgtgtattattgtgcggtggggggttcggggagaatgaattactttgatctctggggccgtggctccatggtcactgtctcctca

SEQ ID NO: 10387 - DNA, 292 bp, Homo sapiens
  source 1..292: mol_type = other DNA
cactgtgtctggtggctccatcaacagttacttctggagttggatccggcagcccccagggaagggactggagtggattggctatgtctcttacagtgggggcaccaactacaacccctccctcaagagtcgagtcaccatgtcagtagacacgtccaagaaccagttctccctgaagctgacttctgtgaccgctgcggacacggccctctattattgtgcggtggggggttcggggagaatgaattacttcgatctctggggccgtggcaccatggtcactgtctcctca

SEQ ID NO: 10388 - DNA, 292 bp, Homo sapiens
  source 1..292: mol_type = other DNA
cactgtttctggtggctccatcagtagtcactactggagttggatccggcagcccccagggaaggggctggagtggattgggtatacccattacagtgggagcaccaattacaacccctccctcaagagtcgagtcaccatatcaatagacacgtccaagaaccagttctccctgaagctgaattctgtgaccgctgcggacacggccgtgtattattgtgcggtggggggttcggggagaatgaattacttcgatctctggggccgtggctccatggtcactgtctcctca

SEQ ID NO: 10389 - DNA, 292 bp, Homo sapiens
  source 1..292: mol_type = other DNA
tactgtctctggtggctccatcactagtcactactggagttggatccggcagtccccagggaaggggctggagtggattgggtatatctctcacagtgggagctccaattacaacccctccctcaagagtcgagtcaccatatcaatagacacgtccaagaatcagttctccctgaagctgagttctgtgaccgctgcggacacggccgtgtattattgtgcggtggggggttcggggagaatgaattacttcgatctctggggccgtggctccatggtcactgtctcctca

SEQ ID NO: 10390 - DNA, 292 bp, Homo sapiens
  source 1..292: mol_type = other DNA
cactgtctctggtggctccatccgtagttattactggagttggatgcggcagcccccagggaaggggctggagtggattgggtatatctattacgatgggagcaccaactacaacccctccctcaagagtcgagtcaccatatcgctagacacgtccaagaaccagttctccctgaagctgagttctgtgatcgctgcggacacggccgtgtattattgtgcggtggggggttcggggagaatgaattacttcgatctctggggccgtggctccatggtcactgtctcctta

SEQ ID NO: 10391 - DNA, 292 bp, Homo sapiens
  source 1..292: mol_type = other DNA
cactgtctctggtggctccatcaacagttacttctggagttggatccggcagcccccagggaagggactggagtggattggctatatctcttacagtgggggcaccaactacaacccctccctcaagagtcgagtcaccatgtcagtagacacctccaagaaccagttctccctgaagctgacttctgtgaccgctgcggacacggccctctattattgtgcggtggggggttcggggagaatgaattacttcgatctctggggccgtggcaccatggtcactgtctcctca

SEQ ID NO: 10392 - DNA, 292 bp, Homo sapiens
  source 1..292: mol_type = other DNA
cactgtctctggtggctccatcagtagttactactggagttggatccggcagcccccagggaaggggctggagtggattgggtatattcatcacagtgggagcaccaactacaacccctctctcaagagtcgagtcaccatatcaatagactcgtccaagaaccagttctccctgaagctgagttatgtgaccgctgcggacacggccgtgtattattgtgcggtggggggttcggggagaatgaattacttcgatctctggggccgtggctccatggtcagtgtctcctca

SEQ ID NO: 10393 - DNA, 292 bp, Homo sapiens
  source 1..292: mol_type = other DNA
cactgtctctggtggctccatcagtagttactactggagttggatccggcagcccccagggaaggggctggagtggattgggtatatccacaacagtgggagcaccaattacaacccctccctcaagagtcgagtcaccatatcagtagacatgtccaagaaccagttctccctgaagttgagttctgtgaccgctgcggacacggccgtgtattattgtgcggtggggggttcggggagaatgaattacttcgatctctggggccgtggctccatggtcactgtctcctca

SEQ ID NO: 10394 - DNA, 292 bp, Homo sapiens
  source 1..292: mol_type = other DNA
cactgtctctggtggctccatcagttcttactactggagttggatccggcagtccccacgaaagggcctagagtggattgggtatatccattacagtgggagcaccaactacaacccttcccttaagagtcgactctccatatcaatagacacgtccaagaaccagttctccctgaaactaatttctgtgaccgctgcggacacggccgtgtattactgtgcggtggggggttcggggagaatgaattacttcgatctctggggccgtggctccatggttactgtctcctca

SEQ ID NO: 10395 - DNA, 292 bp, Homo sapiens
  source 1..292: mol_type = other DNA
cactgtctctggtggctccatcagttcttactactggagttggatccggcagtccccacgaaagggcctagagtggattgggtatatccattacagtgggagcaccaactacaacccttcccttaagagtcgactctccatatcaatagacacgtccaagaaccagttctccctgaaactaatttctgtgaccactgcggacacggccgtgtattactgtgcggtggggggttcggggagaatgaattacttcgatctctggggccgtggctccatggttactgtctcctca

SEQ ID NO: 10396 - DNA, 292 bp, Homo sapiens
  source 1..292: mol_type = other DNA
cactgtctctggtggctccatcagtagttactactggagttggatccggcagcccccagggaaggggctggagtggattggatatatctattacagtgggggcaccaactacaacccctccctcaagagtcgagtcaccatatcagtagacacgtccaagaagcagttctccctgaagctgagttctgtgaccgctgcagacacggccgtgtattattgtgcggtggggggttcggggagaatgaattacttcgatctctggggccgtggctccatggtcactgtctcctca

SEQ ID NO: 10397 - DNA, 292 bp, Homo sapiens
  source 1..292: mol_type = other DNA
cactgtctctggtggctccatccgtagttattactggagttggatccggcagcccccagggaaggggctggagtggattgggtatatctattacgatgggagcaccaactacaacccctccctcaagagtcgagtcaccatatcactagacacgtccaagaaccagttctccctgaagctgagttctgtgatcgctgcggacacggccgtgtattattgtgcggtggggggttcggggagaatgaattacttcgatctctggggccgtggctccatggtcactgtctcctta

SEQ ID NO: 10398 - DNA, 292 bp, Homo sapiens
  source 1..292: mol_type = other DNA
cactgtctctggtggctccatcagtagttactactggagttggatccggcagcccccagggaaggggctggagtggattgggtatatctattacagtgggagcaccaactacaacccctccctcaagagtcgagtcaccatatcagtagacacgtccatgaaccagttctccctgaagctgagttctgtgaccgctgcggacacggccgtgtattattgtgcggtggggggttcggggagaatgaattacttcgatctctggggccgtggctccatggtcactgtctcctca

SEQ ID NO: 10399 - DNA, 292 bp, Homo sapiens
  source 1..292: mol_type = other DNA
cactgtctctggtggctccatcagtagttactactggagttggatccggcagcccccagggaaggggctggagtggattgggtatatccacaacagtgggagcaccaattacaacccctccctcaagagtcgagtcaccatatcagtagacatgtccaagaaccagttctccctgaagctgagttctgtgaccgctgcggacacggccgtgtattattgtgcggtggggggttcggggagaatgaattacttcgatctctggggccgtggctccatggtcactgtctcctca

SEQ ID NO: 10400 - DNA, 292 bp, Homo sapiens
  source 1..292: mol_type = other DNA
cagtgtctctggtggctccatcagtaattactactggagttggatccggcagcccccagggaaggggctagagtggattggatatgtccattacagtgggagcaccaactacaacccctccctcaacagtcgagtcaccatatcacttgacgcgtccaagaacaaattctccatgaaactgacttctgtgaccgctgcggacacggccgtgtattattgtgcagtggggggttcggggagaatgaattacttcgatctctggggccgtggctccatggtcactgtctcctca

SEQ ID NO: 10401 - DNA, 292 bp, Homo sapiens
  source 1..292: mol_type = other DNA
cactgtctctggtggctccatcagtagttactattggagttggatccggcagcccccagggaaggggctggagtggattgggtatatccacaacagtgggagcaccaattacaacccctccctcaagagtcgagtcaccatatcattagacatgtccaagaaccagttctccctgaagctgagttctgtgaccgctgcggacacggccgtgtattattgtgcggtggggggttcggggagaatgaattacttcgatctctggggccatggctccatggtcactgtctcctca

SEQ ID NO: 10402 - DNA, 292 bp, Homo sapiens
  source 1..292: mol_type = other DNA
tagtgtctctggtggctccatcagtagttactactggacttggatccggcagcccccagggaaggggctggagtggattgggtatatctcttacagtgggggcaccaactacaacccctccctcaagagtcgagtcacaatatcagtagacacgtccaagaaccagttctccctgaagctgacttctgtgaccgctgcggacacggccgtgtattattgtgcggtggggggttcggggagaatgaattacttcgatctctggggccgtggctccatggtcactgtctcctca

SEQ ID NO: 10403 - DNA, 292 bp, Homo sapiens; identical to SEQ ID NO: 10385
  source 1..292: mol_type = other DNA

SEQ ID NO: 10404 - DNA, 292 bp, Homo sapiens
  source 1..292: mol_type = other DNA
cactgtctctggtggctccatccgtagttattactggagttggatccggcagcccccagggaaggggctggagtggattgggtatatctattacgatgggagcaccaactacaacccctccctcaagagtcgagtcaccatatcactagacacgtccaagaaccagttctccctgaagctgagttctgtgatcgctgcggacacggccgtgtatttttgtgcggtggggggttcggggagaatgaattacttcgatctctggggccgtggctccatggtcactgtctcctta

SEQ ID NO: 10405 - DNA, 292 bp, Homo sapiens
  source 1..292: mol_type = other DNA
cgctgtctctggtggctccatcagtgcttactactggagctggatccggcagcccccaggaaagggactggagtggattggttatgtccattacactgggagcaccaactacaacccctccctcaagagtcgagtcaccatttcaatagacacgtccaggaaccagttcgccctgaggctgagttcagtgaccgctgcggacacggccgtgtattattgtgcggtggggggttcggggagaatgaattacttcgatctctggggccgtggctccatggtgactgtctcctca

SEQ ID NO: 10406 - DNA, 292 bp, Homo sapiens
  source 1..292: mol_type = other DNA
cactgtctctggtggctccattagtagttattactggagttggatccgccagcccccagggaagggactggagtggattggatatatctcttacagtggtggcacaaactacaacccctccctcaggggtcgagtcaccatatcagtggacacgtccaagaaccagttctccctgaaactcagatctgtgaccggtgcggacacggccgtgtattattgtgcagtggggggttcggggagaatgaattacttcgatctctggggccgtggctccatggtcactgtctcctca

SEQ ID NO: 10407 - DNA, 292 bp, Homo sapiens
  source 1..292: mol_type = other DNA
cactgtctctggtggctccatcagtagttactactggagttggatccggcagcccccagggaaggggctggagtggattgggtatatccacaacagtgggagcaccaattacaacccctccctcaagagtcgagtcaccatatcagtagacatgtccaagaaccacttctccctaaagctgagttctgtgaccgctgcggacacagccgtgtattattgtgcggtggggggttcggggagaatgaattacttcgatctctggggccgtggctccatggtcactgtctcctca

SEQ ID NO: 10408 - DNA, 292 bp, Homo sapiens
  source 1..292: mol_type = other DNA
cactgtctctggtggctccatcagtagttactactggagttggatccggcagcccccagggaaggggctggagtggattgggtatatctattacagtgggagcaccaactacaacccctccctcaagagtcgagtcaccatatcagtagacacgtccaagaaccagttctccctgaagctgagttctgtgaccgctgcggacacggccgtgtattattgtgcggtggggggttcggggagaatgaattacttcgatctctggggccgtggctccctggtcactgtctcctca

SEQ ID NO: 10409 - DNA, 292 bp, Homo sapiens
  source 1..292: mol_type = other DNA
cgctgtctctggtggctccatcagtaattactactggagttggattcggcagcccccagggaaggggctggagtggattgggtatatccacaacagtgggagcaccaattacaacccctccctcaagagtcgagtcaccatatcactagacatgtccaagaaccagttctccctgaagctgagttctgtgaccgctgcggacacggccgtgtattattgtgcggtggggggttcggggagaatgaattacttcgatctctggggccatggctccatggtcactgtctcctca

SEQ ID NO: 10410 - DNA, 292 bp, Homo sapiens
  source 1..292: mol_type = other DNA
cactgtctctggtgcctccatcagtagttactactggagttggatccggcagcccccagggaaggggctggagtggattggctatatctattacagtgggagcaccaactacaacccctccctcaagagtcgagtcaccatatcagtagacacgtccaagaaccagttttccctgaagctgagttctgtgaccgctgcggacacggccgtgtattattgtgcggtggggggttcggggagaatgaattacttcgatctctggggccgtggctccatggtcactgtctcctca

SEQ ID NO: 10411 - DNA, 292 bp, Homo sapiens
  source 1..292: mol_type = other DNA
cactgtctctggtgcctccatcagtagttactactggagttggatccggcagcccccagggaaggggctggagtggattggatatatctattacagtgggagcaccaactacaacccctccctcaagagtcgagtcaccatatcagtagacacgtccaagaaccagttctccctgaagctctattctgtgaccgctgcggacacggccgtgtattattgtgcggtggggggttcggggagaatgaattacttcgatctctggggccgtggttctatggtcactgtctcctca

SEQ ID NO: 10412 - DNA, 292 bp, Homo sapiens
  source 1..292: mol_type = other DNA
cactgtctctggtggctccatcagtagttactactggacttggatccggcagcccccagggaaggggctggaatggattgggtatatctattacagtgggagcaccaactacaacccctccctcaagagtcgagtcaccatggcaatagacacgtccaagaaccagttctccctgaagctgaattctgtgaccgctgcggacacggccgtgtattattgtgcggtggggggttcggggagaatgaattacttcgatctctggggccgtggctccatggtcactgtctcctca

SEQ ID NO: 10413 - DNA, 292 bp, Homo sapiens
  source 1..292: mol_type = other DNA
cactgtctctggtggctccatcagtagttattattggagttggatccggcagcccccagggaagggcctggagtggattggatatgtctattacactgggagcaccaactacaacccctccctcaagagtcgagtcaccatatcaatagacacgtccaagaatcagttctccctgaagttgagttctgtgaccgctgcggacacggccgtgtattattgtgcggtggggggttcggggagaatgaattacttcgatctctggggccgtggctccatggtcactgtctcctca

SEQ ID NO: 10414 - DNA, 292 bp, Homo sapiens
  source 1..292: mol_type = other DNA
cactgtctctggtggctccatcagtaattactactggagttggatccggcagcccccagggaaggggctggagtggattgggtatatctattacagcggggacaccaactacaacccctccctccagagtcgagtcaccatatcaatagacacgtccaagaaccagttctccctgaagctgacttctgtgaccgctgcggacacggccgtgtattattgtgcggtggggggttcggggagaatgaattacttcgatctctggggccgtggctccatggtcactgtctcctca

SEQ ID NO: 10415 - DNA, 292 bp, Homo sapiens
  source 1..292: mol_type = other DNA
cactgtctctggtggctccatcagtagttactattggagttggatccggcagccccccgggaaggggctggagtggattggatatatccattatagtgggagcaccaactacaacccctccctcaagagtcgagtcaccatatcagtagacacgtccaagaaccagttctccctgaagctgagttctgtgaccgctgcggacacggccgtgtattattgtgcggtggggggttcggggagaatgaattacttcgatctctggggccgtggctccatggtcactgtctcctca

SEQ ID NO: 10416 - DNA, 292 bp, Homo sapiens
  source 1..292: mol_type = other DNA
cactgtctctggtggctccatccgtagttattattggagttggatccggcagcccccagggaaggggctggagtggattgggtatatctattacgatgggagcaccaacttcaacccctccctcaagagtcgagtcaccatatcactcgacacgtccaagaaccagttctccctgaagctgagttctgtgatcgctgcggacacggccgtgtattattgtgcggtggggggttcggggagaatgaattacttcgatctctggggccgtggctccatggtcactgtctcctta

SEQ ID NO: 10417 - DNA, 292 bp, Homo sapiens
  source 1..292: mol_type = other DNA
cactgtctctggtggctccatcagtagttactactggagttggatccggcagcccccagggaaggggctggagtggattggatttgtctattacactgggagcaccaactacaacccctccctcaagagtcgagtcaccatatcagtagacacgtccaagaaccagttttccctgaagctgagttctgtgaccgctgctgacacggccgtgtattattgtgcggtggggggttcggggagaatgaattacttcgatctctggggccgtggctccatggtcactgtctcctca

SEQ ID NO: 10418 - DNA, 292 bp, Homo sapiens
  source 1..292: mol_type = other DNA
cactgtctctggtggctccatcagtggtttctactggagttggatccggcagcccccagggaaggggctggagtggattgggtatatccattacagtgggagcaccaactacaacccctccctcaagagtcgagtcaccatatcaatagacgcgtccaagaaccagttctccctgaaactgagttctgtgaccactgcggacacggccctgtattattgtgcggtggggggttcggggagaatgaattacttcgatctctggggccgtggctccatggtcactgtctcctca

SEQ ID NO: 10419 - DNA, 292 bp, Homo sapiens
  source 1..292: mol_type = other DNA
cactgtctctggtggctccatcagtagttactactggagttggatccggcagcccccagggaaggggctggagtggattggatatatccacaacagtgggagcaccaattacaacccctccctcaagagtcgagtcaccatatcagtagacatgtccaagaaccacttctccctgaagctgagttctgtgaccgctgcggacacggccgtatattattgtgcggtggggggttcggggagaatgaattacttcgatctctggggccgtggctccatggtcactgtctcctca

SEQ ID NO: 10420 - DNA, 292 bp, Homo sapiens
  source 1..292: mol_type = other DNA
cactgtctctggtggctccatcagtagttactactggagttggatccggcagcccccagggaaggggctggagtggattgggtatatccacaacagtgggagcaccaattacaacccctccctcaagagtcgagtcaccatatcagtagacatgtccaagaaccagttctccctgaagctgagttctgtgaccgctgcggacacggccgtgtattattgtgcggtggggggttcggggagaatgaattacttcgatctgtggggccgtggctccatggtcactgtctcctca

SEQ ID NO: 10421 - DNA, 292 bp, Homo sapiens
  source 1..292: mol_type = other DNA
cactgtctctggtggctccatcagtagttactactggagttggatccgacagcccccagggaaggggctggagtggattgggtatatctattacagtgggagcaccaactacaacccctccctcaagagtcgagtcaccatatcagtagacacgtccaagaaccagttctccctgaagctgagttctgtgaccgctgcggacacggccgtgtattattgtgcggtggggggttcggggagaatgaattacttcgatctctggggccgtggctccatggtcactgtctcctca

SEQ ID NO: 10422 - DNA, 292 bp, Homo sapiens
  source 1..292: mol_type = other DNA
cactgtctctggtggctccatccgtagttattactggagttggatccggcagcccccagggaaggggctggagtggattgggtatatctattacgatgggagcaccaactacaacccctccctcaagagtcgagtcaccatatcattagacacgtccaagaaccagttctccctgaagctgagttctgtgatcgctgcggacacggccgtgtattattgtgcggtggggggttcggggagaatgaattacttcgatctctggggccgtggctccatggtcactgtctcctta

SEQ ID NO: 10423 - DNA, 292 bp, Homo sapiens
  source 1..292: mol_type = other DNA
cactgtctctggtggctccatcagtaattactactggagttggatccggcagcccccagggaaggggctggagtggattgggtatatctattacagtgggagcaccaaccacaacccctccctcaagagtcgagtcaccatatcaatagacacgtccaggaaccaattctccgtgaagctgagctctgtgaccgctgcggacacggccgtgtattattgtgcggtggggggttccgggagaatgaattacttcgatctctggggccgtggctccatggtcactgtctcctca

SEQ ID NO: 10424 - DNA, 292 bp, Homo sapiens
  source 1..292: mol_type = other DNA
cactgtctctggtggctccatcagtaattactactggagttggatccggcagcccccagggaaggggctggagtggattgggtatatccattacagtgggagcaccaactacaacccctcccttaagagtcgagtcaccatatcacttgacacgtccaagaaccagttctccctgaggctgaattctgtgaccgctgcggacacggccgtgtatttttgtgcggtggggggttcggggagaatgaattacttcgatctctggggccgtggttccatggtcactgtctcctca

SEQ ID NO: 10425 - DNA, 292 bp, Homo sapiens
  source 1..292: mol_type = other DNA
cactgtctctggtggctccatcaataattactactggagttggatccggcagcccccagggaaggggctgcagtggattggctatgtctcctacagtgggagcaccaactacaacccctccctcaagagtcgcgtcaccatatcgatagacacgtccaagaaccagttctccctgaagctgaattctgtgaccgctgcggacacggccgtgtattattgtgcggtggggggttcggggagaatgaattacttcgatctctggggccgtggctccatggtcactgtctcctca

SEQ ID NO: 10426 - DNA, 292 bp, Homo sapiens
  source 1..292: mol_type = other DNA
cactgtctctggtgcctccatcaataattactactggagttggatccggcagcccccagggaaggggctacagtggattgggtacatccataatagtgggagcaccaactacaacccctccctcaagagtcgagtcaccatatcagtagacgtgtccaaaaaccagttctccctgagattgaattctgtgaccgctgcggacacggccgtgtattattgtgcggtggggggttcggggagaatgaactacttcgatctctggggccgtggctccatggtcactgtctcctca

SEQ ID NO: 10427 - DNA, 292 bp, Homo sapiens
  source 1..292: mol_type = other DNA
cactgtctctggtggctccatcagtagttactactggagttggatccggcagcccccagggaaggggctggagtggattgggtttatctatcacagtgggagcaccaactacaacccctccctcaagagtcgagtcaccatgtcagtagacacgtccaagaatcagttctccctgaagttgagtgctatgaccgctgcggacacggccgtgtattattgtgcggtggggggttcggggagaatgaattacttcgatctctggggccgtggctccatggtcactgtctccaca

SEQ ID NO: 10428 - DNA, 292 bp, Homo sapiens
  source 1..292: mol_type = other DNA
cactgtctctggtggctccatcagtagttactactggagttggatccggcagcccccagggaaggggctggagtggattgggtatatctcttacagtgggggcaccaactacaacccctccctcaagagtcgagtcaccatgtcagtagacacgtccaagaaccaattctccctgaagctgatttctgtgaccgctgcggacacggccgtgtattattgtgcggtggggggttcggggagaatgaattacttcgatctctggggccgtggctccatggtcactgtctcctca

SEQ ID NO: 10429 - DNA, 292 bp, Homo sapiens
  source 1..292: mol_type = other DNA
cgctgtctctggtggctccatcagtagttactactggagctggatccgccagcccccaggaaagggactggagtggattggttatgcccattacactgggagcaccaactacaacccctccctcaagagtcgagtcaccatttcaatagacacgtccaggaaccagttcgccctgaggctgacttcagtgaccgctgcggacacggccgtgtattattgtgcggtggggggttcggggagaatgaattacttcgatctctggggccgtggctccatggtgactgtctcctca

SEQ ID NO: 10430 - DNA, 292 bp, Homo sapiens
  source 1..292: mol_type = other DNA
cactgtctctggtgactccatcagtagttactactggagttggatccggcagcccccagggaaggggctggagtggattgggtatatccacaacagtgggagcaccaattacaacccctccctcaagagtcgagtcaccatatcagtagacatgtccaagaaccagttctccctgaagctgagttctgtgaccgctgcggacacggccgtgtattattgtgcggtggggggttcggggagaatgaattactttgatctctggggccgtggctccatggtcactgtctcctca

SEQ ID NO: 10431 - DNA, 292 bp, Homo sapiens
  source 1..292: mol_type = other DNA
cactgtgtctggtggctccatgagtagttactactggagttggatccggcagtccccagggaaggggctggagtggattgggtatatctattacagtgggagcaccaactacaacccctccctcaagagtcgagtcaccatatcagtagacacgtccaagaaccagttctccctgaaactgaattctgtgaccgctgcggacacggccgtatattattgtgcggtggggggttcggggagaatgaattacttcgatctctggggccgtggctccatggtcactgtctcctca

SEQ ID NO: 10432 - DNA, 292 bp, Homo sapiens
  source 1..292: mol_type = other DNA
cactgtctctggtggctccatcagtagttactactggagttggatccggcagcccccagggaaggggctggagtggcttgggtatattcacaacagtgggagcaccaattacaacccctccctcaggagtcgagtcaccatatcagtagacatgtccaagaaccacttctccctgaagctgagttctgtgaccgctgcggacacggccgtgtattattgtgccgtggggggttcggggcgaatgaattacttcgatctctggggccgtggctccatggtcactgtctcctca

SEQ ID NO: 10433 - DNA, 292 bp, Homo sapiens
  source 1..292: mol_type = other DNA
cactgtctctggtggctccatccgtagtttttactggagttggatgcggcagcccccagggaaggggctggagtggattggctatatctattacgatgggagcaccaactacaacccctccctcaagagtcgagtcaccatatcgctagacacgtccaagaatcagttctccctgaagttgagttctgtgatcgctgcggacacggccgtgtattattgtgcggtggggggttcggggagaatgaattacttcgatctctggggccgtggctccatggtcactgtctcctta

SEQ ID NO: 10434 - DNA, 292 bp, Homo sapiens
  source 1..292: mol_type = other DNA
cgctgtctctggtggctccatcagtagttactactggagctggatccgccagcccccaggaaagggactggagtggattggttatgtccattacactgggagcaccaactacaacccctccctcaagagtcgagtcaccatttcaatagacacgtccaggaaccagttcgccctgaggctgagttcggtgaccgctgcggacacggccgtgtattattgtgcggtggggggttcggggagaatgaattacttcgatctctggggccgtggctccatggtgactgtctcctca

SEQ ID NO: 10435 - DNA, 292 bp, Homo sapiens
  source 1..292: mol_type = other DNA
cactgtctctggtggctccatcagtagttacttctggagttggatccggcagtccccaaggaaggggctggaatggattggctatattcattccagtgggagtgtcaactacaacccctccctcaagagtcgaatcaccatatcaatagacacgtccaagaatcagttctccctgaagttgagttctgtgaccgctgcggacaccgccatgtattattgtgcggtggggggttcggggagaatgaattacttcgatctctggggccgtggctccatggtcactgtctcctca

SEQ ID NO: 10436 - DNA, 292 bp, Homo sapiens
  source 1..292: mol_type = other DNA
cattgtctctggtggctccatcagtaattactactggagttggatccggcagcccccggggaaggggctggagtggattgggtatatctcttacagtgggagcaccaactccaacccctccctcaagagtcgagtcaccatatcactagacacgtccaagaaccagttctccctgaagctgagttctgtgaccgctgcggacacggccgtgtattattgtgcggtggggggttcggggagaatgaattacttcgatctctggggccgtggctccatggtcactgtctcctcg

SEQ ID NO: 10437 - DNA, 292 bp, Homo sapiens
  source 1..292: mol_type = other DNA
cactgtctctggtggctccatccgtagttattactggagttggatgcggcagtccccagggaaggggctggagtggattgggtatatctattacgatgggagcaccaactacaacccctccctcaagagtcgagtcaccatatcgctagacacgtccaagaaccagttctccctgaagctgagttctgtgatcgctgcggacacggccgtgtattattgtgcggtggggggttcggggagaatgaattacttcgatctctggggccgtggctccatggtcactgtctcctta

SEQ ID NO: 10438 - DNA, 292 bp, Homo sapiens
  source 1..292: mol_type = other DNA
cactgtctctggtggctccatcaataattactactggagttggatccggcagcccccagggaaggggctggagtggattggatatatccattacagtgggagtaccaactacaacccctccctcaagagtcgagtcgccatatcaatagacccgtccaagaaccagttctccctgaaactgagttctgtgaccgctgcggacacggccgtgtattattgtgcggtggggggttcggggagaatgaattacttcgatctctggggccgtggctccatggtcactgtctcctca

SEQ ID NO: 10439 - DNA, 292 bp, Homo sapiens
  source 1..292: mol_type = other DNA
cactgtctctggtggctccatcagtagttactactggagttggatccggcagcccccagggaaggggctggagtggattgggtttatctattccagtgggagcaccaattacaacccctccctcaggagtcgagtcaccatatcagtagacacgtccaagaaccagttctccctgaagctgagttctgtgaccgctgcggacacggccgtgtattattgtgcggtggggggttcggggagaatgaattacttcgatctctggggccgtggctccatggtcactgtctcctca

SEQ ID NO: 10440 - DNA, 292 bp, Homo sapiens
  source 1..292: mol_type = other DNA
cactgtctctggtggctccatccgtagttattactggagttggatgcggcagcccccagggaaggggctggagtggattgggtatatctattacgatgggagcaccaactacaacccctccctcaagagtcgagtcaccatatcgctagacacgtccaagaaccagttctccctgaagctgagttctgtgatcgctgcggacacggccgtgtattattgtgcggtggggggttcggggagaatgaattacttcgatctttggggccgtggctccatggtcactgtctcctta

SEQ ID NO: 10441 - DNA, 292 bp, Homo sapiens
  source 1..292: mol_type = other DNA
cactgtctctggtggctccatcagtagttactactggagttggatccggcagcccccagggaaggggctggaatggattgggtatatctattccagtgggagcaccaactacaacccctccatcaagagtcgagtcaccatatcactagacacgtccaagaaccagttctccctgaagctgagttctgtgaccgctgcggacacggccgtgtattattgtgcggtggggggttcggggagaatgaattacttcgatctctggggccgtggctccatggtcactgtctcctca

SEQ ID NO: 10442 - DNA, 292 bp, Homo sapiens
  source 1..292: mol_type = other DNA
cactgtctctggtggctccatcagtagttactactggagttggatccggcagcccccagggaaggggctggagtggattgggtatatccattacagtgggagcaccaactacaacccctccctcaagagtcgagtcaccatttcagtagacacgtccaagaaccagttctccctgaagctgagttctgtgaccgctgcggacacggccgtctattattgtgcggtggggggttcggggagaatgaattacttcgatctctggggccgtggctccatggtcactgtctcctca

SEQ ID NO: 10443 - DNA, 292 bp, Homo sapiens
  source 1..292: mol_type = other DNA
cactgtctctggtggctccatcagtagttactactggagttggatccggcagcccccagggaaggggctggagtggattgggtatatccacaacagtgggagcaccaattacaacccctccctcaagagtcgagtcaccatatcagtagacatgtccaagaaccagttctccctgaagctgagttctgtgaccgctgcggacacggccgtgtattattgtgcggtggggggttcggggagaatgaattactttgatctttggggccgtggctccatggtcactgtctcctca

SEQ ID NO: 10444 - DNA, 292 bp, Homo sapiens
  source 1..292: mol_type = other DNA
cactgtctctggtggctccatcagtagttactactggagttggatccggcagcccccagagaaggggctggagtggattgggtatatccacaacagtgggagcaccagttacaacccctccctcaagagtcgagtcaccatatcactagacatgtccaagaaccggttctccctgaagctgagttctgtgaccgctgcggacacggccgtgtattattgtgcggtggggggttcggggagaatgaattactttgatctctggggccgtggctctatggtcactgtctcctca

SEQ ID NO: 10445 - DNA, 292 bp, Homo sapiens
  source 1..292: mol_type = other DNA
cactgtctctggtggctccatcagtagttactactggagttggatccggcagcccccagggaagagattggagtggattggatatgtctcttacactgggggcgccaactacaacccctccctcaagggtcgagtcaccatatcacttgacacatccaagagccagttctccctgaacctgaggtctgtgaccgctgcggacaccgccgtgtattactgtgcggtggggggttcggggagaatgaattacttcgatctctggggccgtggcactctggtcactgtctcctca

SEQ ID NO: 10446 - DNA, 292 bp, Homo sapiens
  source 1..292: mol_type = other DNA
cactgtgtctggtggctccatcaccaattactactggagttggatccggcagcccccagggaaggggctggagtggattgggtttatccattacagtgggagcaccaactacaacccctccctcaagagtcgagtcaccatatcagtggacacgtccatgaatcagttctccctgaagctgagttctgtgaccgctgcggacacggccgtgtattattgtgcggtggggggttcggggagaatgaattacttcgatctctggggccgtggctccatggtcactgtctcctca

SEQ ID NO: 10447 - DNA, 292 bp, Homo sapiens
  source 1..292: mol_type = other DNA
cactgtctctggtggctccatcagtagttactactggagttggatccggcagcccccagggaaggggctggagtggattgggtatgtccattacagtgggagcaccaactacagcccctccctcaagagtcgagtcaccatatcagtagacacgtcgaagaaccagttctccctgaagctgagttctgtgaccgctgcggacacggccgtgtattattgtgcggtggggggttcggggagaatgaattacttcgatctctggggccgtggctccatggtcactgtctcctca

SEQ ID NO: 10448 - DNA, 292 bp, Homo sapiens
  source 1..292: mol_type = other DNA
cactgtctctggtggctccatcaacagttacttctggagttggatccggcagcccccagggaagggactggagtggattggctatatctcttacagtgggggcaccaactacaacccctccctcaagagtcgagtcaccatgtcagtagacacgtccaagaaccagttctccctgaagctgacttctgtgaccgctgcggacacggccctctattattgtgcggtggggggttcggggagaatgaattacttcgatctctggggccgtggcaccatggtcactgtctcctca

SEQ ID NO: 10449 - DNA, 292 bp, Homo sapiens
  source 1..292: mol_type = other DNA
cactgtctctggtggctccatcagtagttactactggagttggatccgacagcccccaggggaggggctggagtggattgggtatatctattacagtgggagcaccaactacaacccctccctcaagagtcgagtcaccatatcaatagacacgtccaagaaccagttctccctgaagctgacttctgtgaccgctgcggacacggccgtatattattgtgcggtggggggttcggggagaatgaattacttcgatctctggggccgtggctccatggtcactgtctcctca

SEQ ID NO: 10450 - DNA, 292 bp, Homo sapiens
  source 1..292: mol_type = other DNA
cactgtctctggtggctctattagcacttactactggagttggatccggcagccccccgggaaggggctggagtggattgggtatatcaattacagtgggggcaccaactacaaccccaccctcaagagtcgagtcaccatatcggtagacacgtccaagaaccagttctccctgaagctgagttctgtgaccgctgcggacacggccgtgtattattgtgcggtggggggttcggggagaatgaattacttcgatctctggggccgtggctccatggtcactgtctcctca

SEQ ID NO: 10451 - DNA, 292 bp, Homo sapiens
  source 1..292: mol_type = other DNA
cagtgtctctggtggctccatcagtagttactactggagttggatccggcagccccccgggaaggggctggagtggattgggtatatccatgccagtgggagcaccaactacaacccctccctcaagagtcgagtcaccatatcagtagacacgtcccaaaaccaattttccctgaagctgacttctgtgaccgctgcggacacggccgtgtattattgtgcggtggggggttcgggaagaatgaattacttcgatctctggggccgtggctccatggtcactgtctcctca

SEQ ID NO: 10452 - DNA, 292 bp, Homo sapiens
  source 1..292: mol_type = other DNA
tactgtctctggtgcctccatcactagtcactactggagttggatccggcagtccccagggaaggggctggagtggattgggtatatttatcacagtgggggcaccaattacaacccctccctcaagagtcgagtcaccatatcaatagacacgtccaagaatcagttctccctgaagctgagttctgtgaccgctgcggacacggccgtgtattattgtgcggtggggggttcggggagaatgaattacttcgatctctggggccgtggctccatggtcactgtctcctca

SEQ ID NO: 10453 - DNA, 292 bp, Homo sapiens
  source 1..292: mol_type = other DNA
cactgtctctggtggctccatcagtacttactactggagttggatccggcagcccccagggaaggggctggagtggattggctatatccattacagtgggagcaccaactacaacccctccctcaagagtcgagtctccatatcactagacacctccaagaatcggttctccctgaaactgacttctgtgaccgctgcggacacggccgtgtattattgtgcggtggggggttcggggagaatgaattacttcgatctctggggccgtggctccatggtcactgtctcctca

SEQ ID NO: 10454 - DNA, 292 bp, Homo sapiens
  source 1..292: mol_type = other DNA
cactgtctctggtggctccatcagtaattactactggagttggatccggcagcccccagggaagggactggagtggattgggtatatctattacagtggggacaccaactacaacccctccctcaagagccgagtcaccatttcagtagacacgtcaaagaaccagttctccctcaggctgaattctgtgaccgctgcggacacggccgtgtattattgtgcggtggggggttcggggagaatgaattacttcgatctctggggccgtggctccatggtcactgtctcctca

SEQ ID NO: 10455 - DNA, 292 bp, Homo sapiens
  source 1..292: mol_type = other DNA
cactgtctctggtggctccatcagtagttactactggagttggatccggcagctcccagggaaggggctggagtggattgggtatatccacaacagtgagagcaccaattacaacccctccctcaagagtcgagtcaccatatcagtagacatgtccaagaaccagttctccctgaagctgagttctgtgaccgctgcggacacggccgtgtattattgtgcggtggggggttcggggagaatgaactactttgatctctggggccgtggctccatggtcactgtctcctca

SEQ ID NO: 10456 - DNA, 292 bp, Homo sapiens
  source 1..292: mol_type = other DNA
cactgtctctggtggctccatcagtagttactactggagttggattcgacagcccccagggaaggggccggagtggattggatatatccattacagtgggagcaccaactacaacccctccctcaagagtcgagtcaccatctccctagacacgtccaagaaccgattctccctggaggtgacttctgtgaccgctgcggacacggccgtgtattattgtgcagtggggggttcggggagaatgaattacttcgatctctggggccgtggctccatggtcactgtctcctca

SEQ ID NO: 10457 - DNA, 292 bp, Homo sapiens
  source 1..292: mol_type = other DNA
cagtgtctctggtggctccatcagtagttattattggagttggctccggcagcccccagggaaggggctggagtggattgggtatgtccactccagtgggagcaccaactaccacccctccctgaagagtcgagtcaccatatcactagacacgtccaggaaccagttctccctgaagttgaattctgtgactgccagggacacggccatatattattgtgcggtggggggttcggggagaatgaattacttcgatctctggggccgtggctcgatggtcactgtctcctca

SEQ ID NO: 10458 - DNA, 292 bp, Homo sapiens
  source 1..292: mol_type = other DNA
cactgtctctggtggctccatcagtagctactactggagttggatccggcagccccccgggaaggggctggaatggattgggtatatccatcaaagtgggagcaccaactacaacccctccctcaagagtcgaatcaccatatcagtagacacgtccaagaaccagttctccttgaagttgagttctatgaccgctgcggacacggccgtgtattattgtgcggtggggggttcggggagaatgaattacttcgatctctggggccgtggctccatggtcactgtctcctca

SEQ ID NO: 10459 - DNA, 292 bp, Homo sapiens
  source 1..292: mol_type = other DNA
cactgtctctggtggctccatcagtagttactactggagttggatccggcagtccccagggaaggggctggagtggattggctatatctattacgatgggagtaccaactacaacccctccctcaagagtcgagtcagcatatcagtggacacgtccaagaaccagttctccctgaagttgagttctgtgaccgctgcggacacggccgtatattattgtgcggtggggggttcggggagaatgaattacttcgatctctggggccgtggctccatggtcactgtctcctca

SEQ ID NO: 10460 - DNA, 292 bp, Homo sapiens
  source 1..292: mol_type = other DNA
cactgtctctggtggctccatcagttcttactactggagttggatccggcagcccccagggaaggggctggagtggattgggtatatctattacagtgggagcaccaactacaacccctccctcaagagtcgagtcaccatatcagtagacacgtccaagaaccagttctccctgaatctgcgttctgtgaccgctgcggacacggccgtgtattattgtgcggtggggggttcggggagaatgaattacttcgatctctggggccgtggctccatggtcactgtctcctca

SEQ ID NO: 10461 - DNA, 292 bp, Homo sapiens
  source 1..292: mol_type = other DNA
cactgtctctggtggctccatcagtagttactactggagttggatccggcagcccccagggaaggggctggagtggattgggtatatctattacagtgggagcaccaactacaacccctccctcaagagtcgagtcaccatatcagtagacacgtccaagaaccagttctccctgaagctgagttctgtgaccgctgcggacacggccgtgtattattgtgcggtggggggttcggggagaatgaattacttcgatctttggggccgtggctccatggtcactgtctcctca

SEQ ID NO: 10462 - DNA, 292 bp, Homo sapiens
  source 1..292: mol_type = other DNA
cactgtctctggtgcctccatcagtagttactactggagttggatccggcagcccccagggaaggggctggagtggattggctatgtccacaacagtgggagcaccatttacaacccctccctcaagagtcgggccaccatatctatagacatgtccaagaaccagttctccctgaagctgacttctgtgaccgctgcggacacggccgtgtattattgtgcggtggggggttcggggagaatgaattactttgatctttggggccgtggctccatggtcactgtctcctca

SEQ ID NO: 10463 - DNA, 292 bp, Homo sapiens
  source 1..292: mol_type = other DNA
cactgtctctggtggctccatcagtagttactactggagttggatccggcagcccccagggaaggggctggagtggattgggtatatccacaacagtgggagcatcaattacaacccctccctcaagagtcgagtcaccatgtcagtagacatgtccaagaaccagttctccctgaagctgagttctgtgaccgctgcggacacggccgtgtattattgtgcggtggggggttcggggagaatgaattacttcgatctctggggccgtggctccatggtcactgtctcctca

SEQ ID NO: 10464 - DNA, 292 bp, Homo sapiens
  source 1..292: mol_type = other DNA
cactgtctctggtggctccatcagtaattactactggagttggatccggcagcccccagggaaggggctggagtggattgggtatatccattacagtgggagcaccaactacaacccctccctcaagagtcgagtcaccatatcagtagacacgtccaagaaccagttctccctgaagctgagttctgtgaccgctgcggacacggccgtgtattattgtgcggtggggggttcggggagaatgaattacttcgatctctggggccgtggctccatggtcactgtctcctca

SEQ ID NO: 10465 - DNA, 292 bp, Homo sapiens
  source 1..292: mol_type = other DNA
cactgtctctggtggctccatcagtagttactactggagttggatccggcagcccccagggaaggggctggagtggattgggtacatccattatagtggcagcaccaactacaacccctccctcaagagtcgagtcaccatatcactacacacgtccaagaatcagttctccctgaagctgagttccgtgaccgctgcggacacggccgtgtattattgtgcggtggggggttcggggagaatgaattacttcgatctctggggtcgtggctccatggtcactgtctcctca

SEQ ID NO: 10466 - DNA, 292 bp, Homo sapiens
  source 1..292: mol_type = other DNA
cagtgtctctggtggctccatcagtagttactactggagttggatccggcagcccccagggaaggggctggagtggattgggtatatccacaacagtgggagtaccagttacaacccctccctcaagagtcgagtcactatatcagtagacatgtccaagaaccagttctccctgaagctgagttctgtgaccgctgcggacacggccatgtattattgtgcggtggggggttcggggagaatgaattactttgatctctggggccgtggctccatggtcactgtctcctca

SEQ ID NO: 10467 - DNA, 292 bp, Homo sapiens
  source 1..292: mol_type = other DNA
cactgtctctggtggctccatcagtagttactactggagttggatccggcagcccccagggaaggggctggagtggattgggtatatctattacagtgggagcaccaactacaacccctccctcaagagtcgagtcaccatatcagtagacacgtccaagaaccagttctccctgaagctgggttctgtgaccgctgcggacacggccgtgtattattgtgcggtggggggttcggggagaatgaattacttcgatctctggggccgtggctccatggtcactgtctcctca

SEQ ID NO: 10468 - DNA, 292 bp, Homo sapiens
  source 1..292: mol_type = other DNA
cactgtctctggtggctccatcagtagttactactggagttggatccggcagcctccagggaaggggctggagtggattgcgtatatccatcacagtgggagcaccaactacaacccctccctcaggggtcgagtcgccatatcagtagacacgtccaagaaccagttctccctgaagctgagatctgtgaccgctgcggacacggccgtgtattattgtgcggtggggggttcggggagaatgaattacttcgatctctggggccgtggctccatggtcactgtctcctca

SEQ ID NO: 10469 - DNA, 292 bp, Homo sapiens; identical to SEQ ID NO: 10402
  source 1..292: mol_type = other DNA

SEQ ID NO: 10470 - DNA, 292 bp, Homo sapiens; identical to SEQ ID NO: 10405
  source 1..292: mol_type = other DNA

SEQ ID NO: 10471 - DNA, 292 bp, Homo sapiens
  source 1..292: mol_type = other DNA
cactgtctctggtggctccatcactacttactactggagttggatccggcagcccccagggaaggggctggagtggattggctatgtctattacagtgggagcaccaactacaacccctccctcaagagtcgagtcaccatgtccatagacacgtccaagaaccagttctccctgaagctgaggtctgtgaccgctgcggacacggccgtctattattgtgcggtgggcggttcggggagaatgaattacttcgatctctggggccgtggctccatggtcactgtctcttca

SEQ ID NO: 10472 - DNA, 292 bp, Homo sapiens
  source 1..292: mol_type = other DNA
cactgtctcaggtggctccatcaggaattaccactggagttggatccggcagcccccagggaaggggctggagtggattggctacgttcatgacagtgggagcgccagttacaacccctccctcaagagccgagtcaccatatcaatagacacgtccaagaaccagttctccctgaagctgaactctttgaccgctgcggacacggccgtgtattactgtgcggtggggggttcggggagaatgaattacttcgatctctggggccgtggctccatggtcactgtctcctca

SEQ ID NO: 10473 - DNA, 292 bp, Homo sapiens
  source 1..292: mol_type = other DNA
cactgtctctggtggctccatcagtacttactactggagttggatccggcagcccccagggaaggggctggagtggattggatatatccattacagtgggagcaccaactacaacccctccctcaagagccgagtcaccatatcaatagacatgtccaagaaccagttctccctgaagttgagttctgtgaccgctgcagacacggccgtgtattattgtgcggtggggggttcggggagaatgaattacttcgatctctggggccgtggctccatggtcactgtctcctca

SEQ ID NO: 10474 - DNA, 292 bp, Homo sapiens
  source 1..292: mol_type = other DNA
cactgtctctggtggctccatcagtacttactactggagttggatccggcagcccccagggaaggggctggaatggattgggtatttccattccagtgggagcaccatctacaatccctccctcaagagtcgagtcaccatatcaatagacacgtccaagaaccaattctccctgaagctgagttctgtgaccgcagcggacacggccgtgtattattgtgcggtggggggttcggggagaatgaattacttcgatctctggggccgtggctccatggtcactgtctcctca

SEQ ID NO: 10475 - DNA, 292 bp, Homo sapiens
  source 1..292: mol_type = other DNA
cactgtctctggtggctccatcagtagttactactggagttggatccggcagcccccagggaaggggctggagtggattggctatatccattacagtgggagcaccaactacaacccctccctcaagagtcgagtcaccatatcagcagacacgtccaggaaccagttctccctgaagctgagttctgtgaccgctgcggacacggccgtgtattattgtgcggtggggggttcggggagaatgaattacttcgatctctggggccgtggctccatggtcactgtctcctca

SEQ ID NO: 10476 - DNA, 292 bp, Homo sapiens
  source 1..292: mol_type = other DNA
cactgtctctggtggctccatccgtagttattactggagttggatccggcagcccccagggaaggggctggagtggattgggtatatctattacgatgggagcaccaactacaacccctccctcaagagtcgagtcaccatatcactagacacgtccaagaaccagttctccctgaagttgagttctgtgatcgctgcggacacggccgtgtattattgtgcggtggggggttcggggagaatgaattacttcgatctctggggccgtggctccatggtcactgtctcctta

SEQ ID NO: 10477 - DNA, 292 bp, Homo sapiens
  source 1..292: mol_type = other DNA
cgctgtctctggtggctccatcagtagttactactggagctggatccgccagcccccaggaaagggactggagtggattggttatgtccattacactgggagcaccaactacaacccctccctcaagagtcgagtcaccatttcgatagacacgtccaggaaccagttcgccctgaggctgagttcagtgaccgctgcggacacggccgtgtattattgtgcggtggggggttcggggagaatgaattacttcgatctctggggccgtggctccatggtgactgtctcctca

SEQ ID NO: 10478 - DNA, 292 bp, Homo sapiens
  source 1..292: mol_type = other DNA
cactgtctctggtggctccatcaggaattactactggagttggatccggcagcccccagggaaggggctggagtggattgggtatatctattacagtgggagcaccaactacaacccctccctcaagagtcgagtcaccatatcagtagacacgtccaagaaccagttctccctgaagctgagttctgtgaccgctgcggacacggccgtgtattattgtgcggtggggggttcggggagaatgaattacttcgatctctggggccgtggctccatggtcactgtctcctca

SEQ ID NO: 10479 - DNA, 292 bp, Homo sapiens
  source 1..292: mol_type = other DNA
cactgtctctggtggctccatcagtagttactactggagttggatccggcagcccccagggaaggggctggagtggattgggtatatccattacagtgggagcaccaactacaacccctccctcaagagtcgagtcaccatatcagtagacacgtccaagaaccagttctccctgaagctgagttctgtgaccgctgcggacacggccgtgtattattgtgcggtggggggttcggggagaatgaattacttcgatctctggggccgtggctccatggtcactgtctcctca

SEQ ID NO: 10480 - DNA, 292 bp, Homo sapiens
  source 1..292: mol_type = other DNA
cactgtctctggtggctccatcagtagttactactggagttggatccggcagcccccagggaaggggctggagtggattggctatatctattacagtgggagcaccaactacaacccctccctcaagagtcgagtcaccatatcagtagacacgtccaagaaccagttctccctgaagctgagttctgtgaccgctgcggacacggccgtgtattattgtgcggtggggggttcggggagaatgaattacttcgatctctggggccgtggctccatggtcactgtctcctca

SEQ ID NO: 10481 - DNA, 292 bp, Homo sapiens; identical to SEQ ID NO: 10394
  source 1..292: mol_type = other DNA

SEQ ID NO: 10482 - DNA, 292 bp, Homo sapiens
  source 1..292: mol_type = other DNA
cactgtctctggtggcttcatcagttcttactactggagttggatccggcagcccccagggaagggactagagtggattgggtatatccattacagtgggagcaccaactacaacccttccctcaagagtcgagtcaccatatcagtagacacgtccaagaaccagttctccctgaagctgagttctatgaccgctgcggacacggccgtgtattattgtgcggtggggggttcggggagaatgaattacttcgatctctggggccgtggctccatggtcactgtctcctca

SEQ ID NO: 10483 - DNA, 292 bp, Homo sapiens; identical to SEQ ID NO: 10383
  source 1..292: mol_type = other DNA

SEQ ID NO: 10484 - DNA, 292 bp, Homo sapiens
  source 1..292: mol_type = other DNA
cagtgtctctggtggctccatcagtagttactactggagttggatccggcagcccccagggaaggggctggagtggattgggtatattcataacagtgggagcaccaattacaacccctccctcaagagtcgagtcaccatatcagtagacatgtccaagaaccagttctccctgaagctgagttctgtgaccgctgcggacacggccgtgtattattgtgcggtggggggttcggggagaatgaactactttgatctctggggccgtggctccatggtcactgtctcctca

SEQ ID NO: 10485 - DNA, 292 bp, Homo sapiens
  source 1..292: mol_type = other DNA
cactgtctctggtggctccatcagtagttactactggagttggatccggcagcccccagggaagggattggagtggattggatatatctcttacactgggggcgccaactacaacccctccctcaacagtcgagtcaccatatcacttgacacatcccagagccagttctccctgagcctgaggtctgtgaccgctgcggacacggccgtgtattactgtgcggtggggggttcggggagaatgaattacttcgatctctggggccgtggcactctggtcactgtctcctca

SEQ ID NO: 10486 - DNA, 292 bp, Homo sapiens
  source 1..292: mol_type = other DNA
cactgtctctggtggctccatcagtagttactactggagttggatccggcagcccccagggaaggggctggagtggattgggtatatgtattacagtgggagcaccaactacaacccctccctcaagagtcgagtcaccatatcaatagacacgtccaagaaccagttctccctgaagctgagttctgtgaccgctgcggacacggccgtgtattattgtgcggtggggggttcggggagaatgaattacttcgatctctggggccgtggctccatggtcactgtctcctca

SEQ ID NO: 10487 - DNA, 292 bp, Homo sapiens
  source 1..292: mol_type = other DNA
cgctgtctctggtggctccatcagtagttactactggagttggatccggcagcccccagggaaggggctggagtggattgggtatatccacaacagtgggagcaccaattacaacccctccctcaagagtcgagtcaccatatcagtagacatgtccaagaaccagttctccctgaagctgagttctgtgaccgctgcggacacggccgtgtattattgtgcggtggggggttcggggagaatgaattacttcgatctctggggccatggctccatggtcactgtctcctca

SEQ ID NO: 10488 - DNA, 292 bp, Homo sapiens; identical to SEQ ID NO: 10411
  source 1..292: mol_type = other DNA

SEQ ID NO: 10489 - DNA, 292 bp, Homo sapiens
  source 1..292: mol_type = other DNA
cactgtctctggtggctccatcactacttactactggagttgggtccggcagcccccagggaaggcgctggagtggattgggtatgtctcttacactgggggcaccaactacaacccctccctcaagagtcgagtcaccatttcacttgacatctccaagaaccaattctccctgaagctgaactctgtgaccactgcggacacggccgtgtattattgtgcggtggggggttcggggagaatgaattacttcgatctctggggtcgtggctccatggtcactgtctcctca

SEQ ID NO: 10490 - DNA, 292 bp, Homo sapiens
  source 1..292: mol_type = other DNA
cactgtctctggtggctccatcagtagttactactggagttggatccggcagcccccagggaaggggctggagtggattgggtatatctattatagtgggagcaccaactacaacccctccctcaagagtcgagtcaccatatcactagacacgtccaagaaccagttctccctgaggctgagttctgtgaccgctgcggacacggccgtgtattattgtgcggtggggggttcggggagaatgaattacttcgatctctggggccgtggctccatggtcactgtctcctca

SEQ ID NO: 10491 - DNA, 292 bp, Homo sapiens
  source 1..292: mol_type = other DNA
cactgtctctggtggctccatcagtagttactactggagttggatccggcagcccccagggaaggggctggagtggattgggtatatctattacactgggagcaccaactacaacccctccctcaagagtcgagtcagcatttcaatagacacgtccaagaaccagttctccctgaggctgagttctgtgaccgctgcggacacggccgtgtattattgtgcggtggggggttcgggaagaatgaattacttcgatctctggggccgtggctccatggtcactgtctcctca

SEQ ID NO: 10492 - DNA, 292 bp, Homo sapiens
  source 1..292: mol_type = other DNA
tagtgtctctggtggctccatcactagtcactactggagttggatccggcagtccccagggaaggggttggagtggattgggtatgcctctcacactggcaactcctattacaacccctccctcaagagtcgagtctccatatcaatagacacgtccaaaaatcaattctccctgaggctgacttctatgagcgctgcagacacggccgtttattattgtgcggtgggaggttcgggaagaatgaattacttcgatctctggggccgtggctccatggtcactgtctcctca

SEQ ID NO: 10493 - DNA, 292 bp, Homo sapiens
  source 1..292: mol_type = other DNA
cactgtctctggtggctccatcaataattactactggagttggatccggcagcccccagggaaggggctggagtggattgggtattcctattacagtgggagctccaactacaacccctccctcaagagtcgagtcaccatatcattagacacgtccaagaaccagttctccctgaagctgagtgctgtgaccgctgcggacacggccgtgtattattgtgcggtggggggttcggggagaatgaattacttcgatctctggggccgtggctccatggtcactgtctcttca

SEQ ID NO: 10494 - DNA, 292 bp, Homo sapiens; identical to SEQ ID NO: 10392
  source 1..292: mol_type = other DNA

SEQ ID NO: 10495 - DNA, 292 bp, Homo sapiens
  source 1..292: mol_type = other DNA
cactgtctctggtggctccatcagtaattattactggagttggatccggcagcccccagggaaggggctggagtggattgggtatatctattacagtgggagcaccaactacaatccctccctcaagagtcgagtcaccatatcagtagacacgtccaagaaccagttctccctgaagctgagttctgtgaccgctgcggacacggccgtgtattattgtgcggtggggggttcggggagaatgaattacttcgatctctggggccgtggctccatggtcactgcctcctca

SEQ ID NO: 10496 - DNA, 292 bp, Homo sapiens; identical to SEQ ID NO: 10387
  source 1..292: mol_type = other DNA

SEQ ID NO: 10497 - DNA, 292 bp, Homo sapiens
  source 1..292: mol_type = other DNA
cactgtctctggtggctccatcagtagttactattggagttggatccggcagcccccagggaaggggctggagtggattgggtatatccacaacagtgggagcacaaattacaacccctccctcaagagtcgagtcaccatatcattagacatgtccaagaaccagttctccctgaagctgagttctgtgaccgctgcggacacggccgtgtattattgtgcggtggggggttcggggagaatgaattacttcgatctctggggccatggctccatggtcactgtctcctca

SEQ ID NO: 10498 - DNA, 292 bp, Homo sapiens
  source 1..292: mol_type = other DNA
cactgtctctggtggctccatcagttcttactactggagttggatccggcagtccccacgaaagggcctagagtggattgggtatatccattacaatgggagcaccaactacaacccttcccttaagagtcgactctccatatcaatagacacgtccaagaaccagttctccctgaaactaatttctgtgaccgctgcggacacggccgtgtattactgtgcggtggggggttcggggagaatgaattacttcgatctctggggccgtggctccatggttactgtctcctca

SEQ ID NO: 10499 - DNA, 292 bp, Homo sapiens
  source 1..292: mol_type = other DNA
cactgtctctggtggctccatcagtagttactactggagttggatccggcagcctccagggaaggggctggagtggattgggtatatctattacagtgggagcaccaactacaacccctccctcaagagtcgagtcaccatatcagtagacacgtccaagaaccagttctccctgaagctgagttctgtgaccgctgcggacacggccgtgtattattgtgcggtggggggttcggggagaatgaattacttcgatctctggggccgtggctccatggtcactgtctcctca

SEQ ID NO: 10500 - DNA, 292 bp, Homo sapiens
  source 1..292: mol_type = other DNA
cactgtctctggtggctccatcagtagttactactggagttggatccggcagcccccagggaaggggctggagtggattgggtatatctattacagtgggagcacctactacaacccctccctcaagagtcgagtcaccatatcagtagacacgtccaagaaccagttctccctgaagctgacttctgtgaccgctgcggacacggccgtgtattattgtgcggtggggggttcggggagaatgaattacttcgatctctggggccgtggttccatggtcactgtctcctca

SEQ ID NO: 10501 - DNA, 292 bp, Homo sapiens
  source 1..292: mol_type = other DNA
tactgtctctggtggctccatcactagtcactactggagttggatccggcagtccccagggaatgggctggagtggattgggtatatctatcacagtgggagcaccaattacaacccctccctcaagagtcgagtcaccatatcaatagacacgtccaagaatcagttctccctgaagctgagttctgtgaccgctgcggacacggccgtgtattattgtgcggtggggggttcggggagaatgaattacttcgatctctggggccgtggctccatggtcactgtctcctca

SEQ ID NO: 10502 - DNA, 292 bp, Homo sapiens
  source 1..292: mol_type = other DNA
cactgtctctggtggctccatcagtagttactactggagttggatccggcagcgcccagggaaggggctggagtggattgggtatatctattacagtgggagcaccaactccaacccctccctcaagagtcgagtcaccatgtcagtagacacgtccaaaaaccagttctccctgaagctgacttctgtgaccgctgcggacacggccgtgtattattgtgcggtggggggttcggggagaatgaattacttcgatctctggggccgtggctccaaggtcactgtctcctca

SEQ ID NO: 10503 - DNA, 292 bp, Homo sapiens
  source 1..292: mol_type = other DNA
cactgtctctggtggctccatcagtagttactactggagttggatccggcagcccccagggaaggggctggagtggattgggtatatgtatcacagtgggagcaccaactacaacccctccctcaagagtcgagtcaccatatcagtagacacgtccaagaaccagttctccctgaagctgagttctgtgaccgctgcggacacggccgtgtattattgtgcggtggggggttcggggagaatgaattacttcgatctctggggccgtggctccatggtcactgtctcctca

SEQ ID NO: 10504 - DNA, 292 bp, Homo sapiens
  source 1..292: mol_type = other DNA
cactgtctctggtggctccatccgtagttatttctggagttggatccggcagcccccagggaaggggctggagtggattgggtatatctattacgatgggagcaccaactacaacccctccctcaagagtcgagtcaccatatcactagacacgtccaagaaccagttctccctgaagctgagttctgtgatcgctgcggacacggccgtgtattattgtgcggtggggggttcggggagaatgaattacttcgatctctggggccgtggctccatggtcactgtctcctta

SEQ ID NO: 10505 - DNA, 292 bp, Homo sapiens
  source 1..292: mol_type = other DNA
cactgtctctggtggctccatcagtagttactactggagttggatccggcagcccccagggaaggggctagagtggattgggtatttccattacagtgggagcaccaactacaacccctccctcaagagtcgagtcaccatatcagtagacacgtccaagaaccagttctccctgaagctgagttctgtgaccgctgcggacacggccgtgtattattgtgcggtggggggttcggggagaatgaattacttcgatctctggggccgtggctccatggtcactgtctcctca

SEQ ID NO: 10506 - DNA, 292 bp, Homo sapiens
  source 1..292: mol_type = other DNA
cactgtctctggtggctccatcagtagttactactggagttggatccggcagcccccagggaaggggctggagtggattgggtatatctattacagtgggagtaccaactacaacccctccctcaagagtcgagtcaccatttcagtagacacgtccaagaaccagttctccctgaagctgagttctgtgaccgctgcggacacggccgtgtattattgtgcggtggggggttcggggagaatgaattacttcgatctctggggccgtggctccatggtcactgtctcctca

SEQ ID NO: 10507 - DNA, 292 bp, Homo sapiens
  source 1..292: mol_type = other DNA
cactgtctctggtggctccatcagtaattactactggagttggatccggcagcccccagggaaggggctggagtggattgggtatattcattacagtgggagcaccaactacaacccctccctcaagagtcgagtcaccatatcagtcgacacgtccaagaaccagttctccctgaagctgaattctgtgaccactcgggacacggccgtgtattattgtgcggtagggggttcggggagaatgaattacttcgatctctggggccgtggctccatggtcactgtctcctca

SEQ ID NO: 10508 - DNA, 292 bp, Homo sapiens
  source 1..292: mol_type = other DNA
ctgtgtctctggtggctccatcagtaattactactggagttggatccggcagcccccagggaaggggctggagtggattgggtatatctcttacagtgggggcaccaactacaacccctccctcaaaagtcgagtctccatgtcagtagacacgtccaagaaccagttctccctgaaggtgacttctgtgaccgctgcggacacggccgtgtattattgtgcggtgggaggttcggggagaatgaattacttcgatctctggggccgtggctccatggtcactgtctcctca

SEQ ID NO: 10509 - DNA, 292 bp, Homo sapiens
  source 1..292: mol_type = other DNA
cactgtctctggtggctccatcagtagttactactggagttggatccggcagcccccagggaaggggctggagtggattgggtatatctattacagtgggagcaccaactacaacccctccctcaagagtcgagtcaccatatcagtagacacgtccaagaaccagttctccctgaagctgacttctgtgaccgctgcggacacggccgtgtattattgtgcggtggggggttcggggagaatgaattacttcgatctctggggccgtggctccatggtcactgtctcctca

SEQ ID NO: 10510 - DNA, 292 bp, Homo sapiens
  source 1..292: mol_type = other DNA
cactgtctctggtggctccatccgtgattattactggagttggatccggcagcccccagggaaggggctggagtggattgggtatatctattacgatgggagcaccaactacaacccctccctcaagagtcgagtcaccatatcactagacacgtccaagaaccagttctccctgaagctgagttctgtgatcgctgcggacacggccgtgtattattgtgcggtggggggttcggggagaatgaattacttcgatctctggggccgtggctccatggtcactgtctcctta

SEQ ID NO: 10511 - DNA, 292 bp, Homo sapiens
  source 1..292: mol_type = other DNA
cactgtctctggtggctccatcagtagttactactggagttggatccggcagcccccagggaaggggctggagtggattgggtatatctattacagtgggagcaccaactacaacccctccctcaagagtcgagtcactatatcagtagacacgtccaagaaccagttctccctgaagctgagttctgtgaccgctgcggacacggccgtgtattattgtgcggtggggggttcggggagaatgaattacttcgatctctggggccgtggctccatggtcactgtctcctca

SEQ ID NO: 10512 - DNA, 292 bp, Homo sapiens
  source 1..292: mol_type = other DNA
cactgtctctggtggttccatcagtagttactactggagttggatccggcagcccccagggaaggggctggagtggattgggtatatccacaacagtgggagcaccaattacaacccctccctcaagagtcgagtcaccatatcagtagacatgtccaagaaccagttctccctgaagctgagttctgtgaccgctgcggacacggccgtgtattattgtgcggtggggggttcggggagaatgaattacttcgatctctggggccgtggctccacggtcactgtctcctca

SEQ ID NO: 10513 - DNA, 292 bp, Homo sapiens
  source 1..292: mol_type = other DNA
cactgtctctggtggctccatcagtagttactactggagttggatccggcagcccccagggaaggggctggagtggattgggtatatctattacagtgggagcaccaactacaacccctccctcaagagtcgagtcaccatatcagtagacacgtccaagaaccagttctccctgaagctgagttctgtgaccgctgcggacacggccgtgtattattgtgcggtggggggttcggggagaatgaattacttcgatctctggggccggggctccatggtcactgtctcctca

SEQ ID NO: 10514 - DNA, 292 bp, Homo sapiens
  source 1..292: mol_type = other DNA
cactgtctctggtggctccatcagtagctactactggagttggatccggcagcccccagggaaggggctggagtggattgggtatatctattacagtgggagcaccaactacaacccctccctcaagagtcgagtcaccatatcagtagacacgtccaagaaccagttctccctgaagctgagttctgtgaccgctgcggacacggccgtgtattattgtgcggtggggggttcggggagaatgaattacttcgatctctggggccgtggctccatggtcactgtctcctca

SEQ ID NO: 10515 - DNA, 292 bp, Homo sapiens
  source 1..292: mol_type = other DNA
cactgtctctggtggctccatcagtagttactactggagttggatccggcagcccccagggaaggggctggagtggattgggtatatctattacagtgggagcaccaactacaacccctccctgaagagtcgagtcaccatatcagtagacacgtcgaagaaccagttctccctgaagctgagttctgtgaccgctgcggacacggccgtgtattattgtgcggtggggggttcggggagaatgaattacttcgatctctggggccgtggctccatggtcactgtctcctca

SEQ ID NO: 10516 - DNA, 292 bp, Homo sapiens
  source 1..292: mol_type = other DNA
cactgtctctggtggctccatcagtagttactactggagttggatctggcagcccccagggaaggggctggagtggattggatatatccacaacagtgggagcaccaattacaacccctccctcaagagtcgagtcaccatatcagtagacatgtccaagaaccacttctccctgaagctgagttctgtgaccgctgcggacacggccgtatattattgtgcggtggggggttcggggagaatgaattacttcgatctctggggccgtggctccatggtcactgtctcctca

SEQ ID NO: 10517 - DNA, 292 bp, Homo sapiens
  source 1..292: mol_type = other DNA
cactgtctctggtggctccatcagtagttactactggagttggatccggcagcccccagggaaggggctggagtggattggctatatctattacagtgggagcaccaactacaacccctccctcaagagtcgagtcaccatggcagtagacacgtccaagaaccagttctccctgaagctgagatctgtgaccgctgcggacacggccgtgtattattgtgcggtggggggttcgggtagaatgaattacttcgatctctggggccgtggctctatggtcagtgtctcctca

SEQ ID NO: 10518 - DNA, 292 bp, Homo sapiens
  source 1..292: mol_type = other DNA
cactgtctctggtggctccatcagtagttactactggagttggatccggcagcccccagggaaggggctggaatggattgggtatatctattccagtgggagcaccaactatagtccctccctcaagagtcgagtcaccatatcaatggacacgtccaagaaccagttctccctgaagttgaattctgtgaccgctgcggacacggccgtgtattattgtgcggtggggggttcggggagaatgaattacttcgatctgtggggccgtggctccatggtcactgtctcctca

SEQ ID NO: 10519 - DNA, 292 bp, Homo sapiens
  source 1..292: mol_type = other DNA
cactgtctctggtggctccatcagtaattactactggagttggatccggcagcccccagggaagggactggagtggattgggtttatctattacagtgggagcaccaattataacccctccctcaagagtcgagtcaccatatcagtggacacgtccaagagccagttctccctgaagctgagctctgtgaccgctgcggacacggccgtctattattgtgcggtggggggttcggggagaatgaattacttcgatctctggggccgtggcaccctggtcactgtctcctca

SEQ ID NO: 10520 - DNA, 292 bp, Homo sapiens; identical to SEQ ID NO: 10406
  source 1..292: mol_type = other DNA

SEQ ID NO: 10521 - DNA, 292 bp, Homo sapiens
  source 1..292: mol_type = other DNA
cactgtctctggtggctccatcaggagttactactggagttggatccggcagcccccagggaaggggctggagtggattgggtatatctattacagtgggagcaccaactacaacccctccctcaagagtcgagtcaccatatcagtagacacgtccaagaaccagttctccctgaagctgagttctgtgaccgctgcggacacggccgtgtattattgtgcggtggggggttcggggagaatgaattacttcgatctctggggccgtggctccatggtcactgtctcctca

SEQ ID NO: 10522 - DNA, 292 bp, Homo sapiens
  source 1..292: mol_type = other DNA
cactgtgtctggtggctccatcaacagttacttctggagttggatccggcagcccccagggaagggactggagtggattggctatgtctcttacagtgggggcaccaactacaacccctccctcaagagtcgagtcaccatgtcagtagacacgcccaagaaccagttctccctgaagctgacttctgtgaccgctgcggacacggccctctattattgtgcggtggggggttcggggagaatgaattacttcgatctctggggccgtggcaccatggtcactgtctcctca

SEQ ID NO: 10523 - DNA, 292 bp, Homo sapiens
  source 1..292: mol_type = other DNA
cactgtctctggtggctccatcagtaattactactggagttggatccggcagaccccagggaaggggctggagtggattgggtttatctattacagtgggagtaccaattacaacccctccctcaagagtcgagtcaccatttcagtagacacgtcgaagaaccagttctccctgaagctgagttctgtgaccgctgcggacacggccgtgtattattgtgcggtggggggttcggggagaatgaattacttcgatctctggggccgtggctccatggtcactgtctcctca

SEQ ID NO: 10524 - DNA, 292 bp, Homo sapiens
  source 1..292: mol_type = other DNA
cactgtgtctggtggctccatcaacagttacttctggagttggatccggcagcccccagggaagggactggagtggattagctatgtctcttacagtgggggcaccaactacaacccctccctcaagagtcgagtcaccatgtcagtagacacgtccaagaaccagttctccctgaagctgacttctgtgaccgctgcggacacggccctctattattgtgcggtggggggttcggggagaatgaattacttcgatctctggggccgtggcaccatggtcactgtctcctca

SEQ ID NO: 10525 - DNA, 292 bp, Homo sapiens
  source 1..292: mol_type = other DNA
cactgtctctggtggctccatcaacagttacttctggagttggatccggcagcccccagggaagggactggagtggattggctatatctcttacagtgggggcaccaactacaacccctccctcaagagtcgagtcaccatgtcagtagacacctccaagaaccagttctccctgaagctgacttctgtgaccactgcggacacggccctctattattgtgcggtggggggttcggggagaatgaattacttcgatctctggggccgtggcaccatggtcactgtctcctca

SEQ ID NO: 10526 - DNA, 292 bp, Homo sapiens
  source 1..292: mol_type = other DNA
cactgtctctggaggctccatcagtagttactactggagttggatccggcagcccccagggaaggggctggagtggattgggtttatctattacagtgggagcaccaactacaatccctccctcaagagtcgagtgaccatatcagtagacacgtccaagaatcagttctccctacagctgaattctgtgaccactgcggacacggccgtgtattattgtgcggtggggggttcggggagaatgaattacttcgatctctggggccgtggctccatggtcacggtctcctca

SEQ ID NO: 10527 - DNA, 292 bp, Homo sapiens
  source 1..292: mol_type = other DNA
cactgtctctggtggctccatcagtaattactactggagttggatccggcagcccccagggaagggactggagtggattgggtttatctcttacagtgggagcaccaattataatccctccctcaagagtcgagtcaccatatcaatagacacgtccaagaaccagttctccctgaggctggcctctgtgagcgctgcggacacggccgtgtattattgtgcggtggggggttcggggagaatgaattacttcgatctctggggccgtggcaccctggtcactgtctcctca

SEQ ID NO: 10528 - DNA, 292 bp, Homo sapiens
  source 1..292: mol_type = other DNA
ctctgtctctggtggctccatcagtagttactactggagctggatccggcagcccccaggaaaggggctggagtggattgggtatatctattacagtgggagcaccaactacaacccctccctcaagagtcgagtcaccatatcattagacacgtccaagaaccagttctccctgaagctgagttctgtgaccgctgcggacacggccgtgtattattgtgcggtggggggttcggggagaatgaattacttcgatctctggggccgtggctccatggtcactgtctcctca

SEQ ID NO: 10529 - DNA, 292 bp, Homo sapiens
  source 1..292: mol_type = other DNA
cagtgtctctggtggctccatccgtgattattactggagttggatccggcagcccccagggaaggggctggagtggattgggtatatctattacgatggcagcaccaactacaacccctccctcaagagtcgagtcaccatatcactagacacgtccaagaaccagttctccctgaaactgagttctgtgatcgctgcggacacggccgtgtattattgtgcggtggggggttcggggagaatgaattacttcgatctgtggggccgtggctccatggtcactgtctcctta

SEQ ID NO: 10530 - DNA, 292 bp, Homo sapiens
  source 1..292: mol_type = other DNA
cactgtctctggtggctccatcagtagttactactggagttggatccggcagcccccagggaaggggctggagtggattgggtatatctattacagtgggtccaccaactacaacccctccctcaagagtcgagtcaccatgtcaatagacacgtccaagaaccagttctccctgaagctgacttctgtgaccgctgcggacacggccgtgtattattgtgcggtggggggttcggggagaatgaattacttcgatctctggggccgtggctccatggtcactgtctcctca

SEQ ID NO: 10531 - DNA, 292 bp, Homo sapiens
  source 1..292: mol_type = other DNA
cactgtctctggaggctccatcagtgattactactggagttggatccgccagtccccacggagggggctggagtggattggcaacatctatcacagtgggagcacctattacaacccctccctcaggagtcgagtcaccatatcagtagacacgtccaagaaccagttctccctgaggctgagttctgtgaccgctgcggacacggccgtgtattattgtgcggtggggggttcggggagaatgaattatttcgatctctggggtcgtggctccatggtcactgtctcctca

SEQ ID NO: 10532 - DNA, 292 bp, Homo sapiens
  source 1..292: mol_type = other DNA
cactgtctctggtggctccatcagtagttactactggagttggatccggcagcccccaggaaaggggctggagtggattgggtatatctcttacactgggagcacctactataacccctccctcaagagccgagtcaccatgtcaatagacacctccaagaaccagttctccctcaagctgagttctgtgaccgttgcggacacggccctgtattactgtgcggtggggggttcggggagaatgaattacttcgatctctggggccgtggctccatggtcactgtctcctca

SEQ ID NO: 10533 - DNA, 292 bp, Homo sapiens; identical to SEQ ID NO: 10507
  source 1..292: mol_type = other DNA

SEQ ID NO: 10534 - DNA, 292 bp, Homo sapiens; identical to SEQ ID NO: 10518
  source 1..292: mol_type = other DNA

SEQ ID NO: 10535 - DNA, 292 bp, Homo sapiens
  source 1..292: mol_type = other DNA
cactgtctctggtggctccatcagtagttactactggacttggatccggcagcccccagggaaggggctggagtggattgggtatatacacaacagtgggagcaccaattacaacccctccctcaagagtcgagtcaccatatcagtagacatgtccaagaaccagttctccctgaagctgagttctgtgaccgctgcggacacggccgtgtattattgtgcggtggggggttcggggagaatgaattacttcgatctctggggccgtggctccatggtcactgtctcctca

SEQ ID NO: 10536 - DNA, 292 bp, Homo sapiens
  source 1..292: mol_type = other DNA
cactgtctctggtggctccatcagtaatttctactggagttggatccggcagcccccagggaaggggctggagtggatgggatatgtccattatagtgggagcaccaattacaacccctccctgaagaggcgaatcaccatatcaatagacacgtccaagaaccagttctccctgaagttgaattctgtgaccgctgcggacacggccgtatactattgtgcggtggggggttcgggcagaatgaattacttcgatctctggggtcgtggctccatggtcactgtctcctca

SEQ ID NO: 10537 - DNA, 292 bp, Homo sapiens
  source 1..292: mol_type = other DNA
cactgtctctggtggctccatcagtagttactactggagttggatccggcagcccccagggaaggggctggagtggattgggtatatctattacagtgggagcaccaactacaacccctccctcaagagtcgagtcaccatatcagtagacacgtccaagaaccagttctccctgaagctgagttctgtgaccgctgcggacacggccgtgtattattgtgcggtggggggttcggggagaatgaattacttcgatctctggggccgtggctccatggtcactgtcacctca

SEQ ID NO: 10538 - DNA, 292 bp, Homo sapiens
  source 1..292: mol_type = other DNA
cactgtctctggtggctccatcagtagttactactggagttggatccggcagcccccagggaaggggctggagtggattgggtatatcttttacagtgggagcaccaactacaacccctccctcaagagtcgagtcaccatgtcagtagacacgtccaagaaccagttctccctgaaactgagttctgtgaccgctgcggacacggccgtgtattattgtgcggtggggggttcggggagaatgaattacttcgatctctggggccgtggctccatggtcactgtctcctca

SEQ ID NO: 10539 - DNA, 292 bp, Homo sapiens
  source 1..292: mol_type = other DNA
cactgtctccggtggctccatcagtagttactactggagttggatccggcagaccccagggaaggggctggagtggattgggtatatccattacagtgggagcaccaattacaacccctccctgaagagtcgagtcaccatgtcagtagacacgtccaagaaccagttctccctgaacttgagttctgtcaccgctgcggacacggccgtgtatttttgtgcggtggggggttcggggagaatgaattacttcgatctctggggccgtggctccatggtcactgtctcctca

SEQ ID NO: 10540 - DNA, 292 bp, Homo sapiens
  source 1..292: mol_type = other DNA
cactgtctctggtggctccatcagtaattactactggagttggatccggcagcccccagggaagggactggagtggattgggtatatctattacagtgggagcacctactacaacccctccctcaagagtcgagtcaccatttcagtagacacgtccaagaaccagttctccctgaggctgacttctgtgaccgctgcggacacggccctgtattattgtgcagtggggggttcggggagaatgaactatttcgatctctggggccgtggcaccatggtcactgtctcctca

SEQ ID NO: 10541 - DNA, 292 bp, Homo sapiens
  source 1..292: mol_type = other DNA
cactgtctctggtggctccatcagtagttactactggagttggatccggcagcccccagggaaggggctggagtggattgggtatatctattacagtgggagcaccaactacaacccctccctcaagagtcgagtcaccatatcagtagacacgtccaagaaccagttctccctgaagctgagttctgtaaccgctgcggacacggccgtgtattattgtgcggtggggggttcggggagaatgaattacttcgatctctggggccgtggctccatggtcactgtctcctca

SEQ ID NO: 10542 - DNA, 292 bp, Homo sapiens
  source 1..292: mol_type = other DNA
cagtgtctctggtggctccatcagtgcttaccactggagttggatccggcagcccccagggaaggggctggagtggatgggatatatccatgccagtgggagcaccaactacaacccctccctcaagagtcgagccaccatgtcagtggacacgtcccaaaatcagttttccctgaagctgacttctgtgaccgctgcggacacggccgtgtattattgtgcggtggggggttcgggaagaatgaattacttcgatctctggggccgtggctccatggtcgctgtctcctca

SEQ ID NO: 10543 - DNA, 292 bp, Homo sapiens
  source 1..292: mol_type = other DNA
cactgtctctggtggctccatcagtagttactactggagttggatccggcagcccccagggaaggggctggagtggattgggtatatctattacagtgggagcaccaattacaacccctccctcaagagtcgagtcaccatatcagtagacacgtccaagaaccagttctccctgaagctgagttctgtgaccgctgcggacacggccgtgtattattgtgcggtggggggttcggggagaatgaattacttcgatctctggggccgtggctccatggtcactgtctcctca

SEQ ID NO: 10544 - DNA, 292 bp, Homo sapiens
  source 1..292: mol_type = other DNA
cactgtctctggtggctccatcagtagttactactggagttggatccggcagcccccagggaaggggctggagtggattgggtatatctattacagtgggagcaccaactacaacccctccctcaagagtcgagtcaccatatcactagacacgtccaagaaccagttctccctgaagctgagttctgtgaccgctgcggacacggccgtatattattgtgcggtggggggttcggggagaatgaattacttcgatctctggggccgtggctccatggtcactgtctcctca

SEQ ID NO: 10545 - DNA, 292 bp, Homo sapiens
  source 1..292: mol_type = other DNA
cactgtctctggtggctccatcagtacttactactggagttggatccggcagcccccagggaagggactggactggattgggtatatctattacagtgggagcaccaactacaacccctccctcaagagtcgagtcaccatatcagtagacacgtccaagaaccagttctccctgaagctgagttctgtgaccgctgcggacacggccgtgtattattgtgcggtggggggttcggggagaatgaattacttcgatctctggggccgtggctccatggtcactgtctcctca

SEQ ID NO: 10546 - DNA, 292 bp, Homo sapiens
  source 1..292: mol_type = other DNA
cactgtctctggtggctccatcagcagttactactggagttggatccggcagcccccagggaaggggctggagtggattgggtatatccattacagtgggagcaccaactacaacccctccctcaagagtcgagtcaccatatcaatagacacgtccaagaaccagttctccctgaagctgagttctgtgaccgctgcggacacggccgtgtattattgtgcggtggggggttcggggagaatgaattacttcgatctgtggggccgtggctccatggtcactgtctcctca

SEQ ID NO: 10547 - DNA, 292 bp, Homo sapiens
  source 1..292: mol_type = other DNA
cactgtctctggtggctccatcagtagttactactggagttggatccggcagcccccagggaaggggctggagtggattggatatgtctcttacactgggagcaccaactacaacccctccctcaagagtcgagtcaccatatcaatagacacgtccaagaatcagttctccctgaggctgagttctgtgtccgctgcggacacggccgtgtatttttgtgcggtggggggttcggggagaatgaattacttcgatctctggggccgcggctccatggtcactgtctcctca

SEQ ID NO: 10548 - DNA, 292 bp, Homo sapiens
  source 1..292: mol_type = other DNA
cactgtctctggtggctccatcagtagttactactggagttggatccggcagcccccagggaaggggctggagtggattgggtatatctattacagtgggagcaccaactacaacccctccctcaagagtcgagtcaccatatcaatagacatgtccaggaaccagttctccctgaagctgagttctgtgaccgctgcggacacggccgtgtattattgtgcggtggggggttcggggagaatgaattacttcgatctctggggccgtggctccatggtcactgtctcctca

SEQ ID NO: 10549 - DNA, 292 bp, Homo sapiens
  source 1..292: mol_type = other DNA
cactgtctctggtggctccatcagtaattactactggagttggatccggcagcccccagggaaggggctggagtggattgggtatatccattacagtgggagcaccaactacaacccctccctcaggagtcgagtcaccatatcagtagacacgtccaacaaccagttctccctgaaggtgacttctgtgaccgctgcggacacggccgtgtattattgtgcggtggggggttcggggagaatgaattacttcgatctctggggccgtggctccatggtcactgtctcctca

SEQ ID NO: 10550 - DNA, 292 bp, Homo sapiens
  source 1..292: mol_type = other DNA
cactgtctctggtggctccatcagtcgttactactggagttggatccggcagcccccagggaaggggctggagtggattgggtatatctattacagtgggagcaccaactacaacccctccctcaagagtcgagtcaccatatcagtagacacgtccaagaaccagttctccctgaagctgagttctgtgaccgctgcggacacggccgtgtattattgtgcggtggggggttcggggagaatgaattacttcgatctctggggccgtggctccatggtcactgtctcctca

SEQ ID NO: 10551 - DNA, 292 bp, Homo sapiens
  source 1..292: mol_type = other DNA
tagtgtctctggtggctccatcagtatttactactggacttggatccggcagcccccagggaaggggctggagtggattgggtatatctcttacagtgggggcaccaactacaacccctccctcaagagtcgagtcacaatatcagtagacacgtccaagaaccagttctccctgaggctgacttctgtgaccgctgcggacacggccgtgtattattgtgcggtggggggttcggggagaatgaattacttcgatctctggggccgtggctccatggtcactgtctcctca

SEQ ID NO: 10552 - DNA, 292 bp, Homo sapiens
  source 1..292: mol_type = other DNA
cactgtctctggtggctccatcagtgattacttctggagttggatccggcagcccccagggaagggtctggagtggattggatatgtccactacagtgggagcaccaactacaacccctccctcaagagtcgagtcaccatatcagtagacacgtccaagaaccaattctccctgaggctttattctgtgaccgcagcggacacggccgtgtattattgtgcggtggggggttcgggaagaatgaattacttcgatctctggggccgtggctccatggtcactgtctcctca

SEQ ID NO: 10553 - DNA, 292 bp, Homo sapiens
  source 1..292: mol_type = other DNA
cactgtctctggtggctccatcagtagttactactggagttggatccggcagcccccagggaaggggctggagtggattgggtatatctcttacagtgggagcaccaactacaacccctccctcaagagtcgagtcaccatgtcagtagacacgtccaagaaccagttctccctgaagctgagttctgtgaccgctgcggacacggccctgtattattgtgcggtggggggttcggggagaatgaattacttcgatctctggggccgtggctccatggtcactgtctcctca

SEQ ID NO: 10554 - DNA, 292 bp, Homo sapiens
  source 1..292: mol_type = other DNA
cactgtctctggtggctccatcagtagttactactggagttggatccggcagcccccagggaaggggctggagtggattgggtatatccattacagtgggagcaccaactacaacccctccctcaagagtcgagtcaccatatcagtagacacgtccaagaaccagttctccctgaagctgagttctgtgaccgctgcggacacggccgtgtattattgtgcggtggggggttcggggagaatgaattacttcgatctctggggccgtggctccatggtcactgtcacctca

SEQ ID NO: 10555 - DNA, 292 bp, Homo sapiens
  source 1..292: mol_type = other DNA
cagtgtctctggtggctccatcagtagttactactggagttggatccggcagcccccagggaaggggctggagtggattgggtatatccacagcagtgggagcaccaattacaacccctccctcaagggtcgagtcaccatatcagtagacatggccaagaaccagttctctctgaatctaatttctgtgaccgctgcggacacggccgtttattattgtgcggtggggggttcggggagaatgaattacttcgatctctggggccgtggctccatggtcactgtttcctca

SEQ ID NO: 10556 - DNA, 292 bp, Homo sapiens
  source 1..292: mol_type = other DNA
cactgtgtctggcggctccatcagtagttactactggagttggatccggcagtccccagggaaggggctggagtggattggctttatccattacagtgggaccaccaactacaacccctccctcaagagtcgaggcaccatatcaatggacacgtccaagaaccagttctccctgaagctgagttctgtgaccgctgcggacacggccgtatattattgtgcggtggggggttcggggagaatgaattacttcgatctctggggccgtggctccatggtcactgtctcctca

SEQ ID NO: 10557 - DNA, 292 bp, Homo sapiens
  source 1..292: mol_type = other DNA
cactgtctctggtggctccatcagtagttactactggagttggatccggcagcccccagggaaggggctggagtggattgggtatatccattacagtgggagcaccaactacaacccctccctcaagggtcgagtcaccatatcattagacacgtccaagaaccagttctccctgaagctgaattctgtgaccgctgcggacacggccgtgtattattgtgcggtggggggttcggggagaatgaattacttcgatctctggggccgtggctccatggtcactgtctcctca

SEQ ID NO: 10558 - DNA, 292 bp, Homo sapiens
  source 1..292: mol_type = other DNA
cactgtctctggtggctccatcagtagttactactggagttggatccggcagcccccagggaaggggctggagtggattgggtatatctattacagtgggagcaccaactacaacccctccctcaagagtcgagtcaccatatcagtagacacgtccaagaatcagttctccctgaagctgagttctgtgaccgctgcggacacggccgtgtattattgtgcggtggggggttcggggagaatgaattacttcgatctctggggccgtggctccatggtcactgtctcctca

SEQ ID NO: 10559 - DNA, 292 bp, Homo sapiens
  source 1..292: mol_type = other DNA
cactgtctctggtggctccatccgtagttattactggagttggatccggcagcccccagggaaggggctggagtggattgggtatatcaattacgatgggagtaccaactacaacccctccctcaagagtcgagtcaccatatcactagacacgtccaagaaccagttctccctgaagctgagttctgtgatcgctgcggacacggccgtgtattattgtgcggtggggggttcggggagaatgaattacttcgatctctggggccgtggctccatggtcactgtctcctta

SEQ ID NO: 10560 - DNA, 292 bp, Homo sapiens
  source 1..292: mol_type = other DNA
cactgtctctggtggctccatcagttcttactactggagttggatccggcagcccccagggaaggggctggagtggattgggtatatccatgacagtgggagtaccaactacagcccctccctcaagagtcgagccaccatatcagcagacacgtccaagaaccagttttccctgaggctgagttctgtgaccgctgcagacacggccgtgtattattgtgcggtggggggttcggggagaatgaattacttcgatctctggggccgtggctccatggtcactgtctcctca

SEQ ID NO: 10561 - DNA, 292 bp, Homo sapiens
  source 1..292: mol_type = other DNA
cactgtctccggtggctccatcagtagtcattactggagttggatccggcagcccccagggaaggggctggagtggattgggtatatcttttacagtgggggcaccaactacaacccctccctcaagagtcgagtcaccatatcaatagacacgtccaagaaccggttctccctgaagctgagttctgtgaccgctgcggacacggccgtgtattattgtgcggtggggggttcggggagaatgaattacttcgatctctggggccgtggctccatggtcactgtctcctca

SEQ ID NO: 10562 - DNA, 292 bp, Homo sapiens
  source 1..292: mol_type = other DNA
cgctgtctctggtggctccatcagtagttactactggagctggatccggcagcccccaggaaagggactggagtggattggttatgtccattacactgggagcaccaactacaacccctccctcaagagtcgagtcaccatttcaatagacacgtccaggaaccagttcgccctgaggctgagttcagtgaccgctgcggacacggccgtgtattattgtgcggtggggggttcggggagaatgaattacttcgatctctggggccgtggctccatggtgactgtctcctca

SEQ ID NO: 10563 - DNA, 292 bp, Homo sapiens
  source 1..292: mol_type = other DNA
cactgtctctggtggctccatcagtagttactactggagttggatccggcagcccccagggaaggggctggagtggattgggtatatccattacactgggagcaccaattacaacccctccctcaagagtcgagtcaccatatcagtagacacgtccaagaaccagttctccctgaagctaatttctgtgaccgctgcggacacggccgtgtattattgtgcggtggggggttcggggagaatgaattacttcgatctctggggccgtgggtccatggtcactgtctcctca

SEQ ID NO: 10564 - DNA, 292 bp, Homo sapiens
  source 1..292: mol_type = other DNA
cactgtctctggtggctccctcagtacctactactggagttggatccggcagcccccagggaaggggctggagtggattgggtatatccattacagtgggagcaccaactacaacccctccctcaacagtcgagtcaccatatcagtagacacgtccaagaaccagttgtccctgaagttgagttctgttaccgctgcggacacggccgtgtattattgtgcggtggggggttcggggagaatgaattacttcgatctctggggccgtggatccatggtcactgtctcctca

SEQ ID NO: 10565 - DNA, 292 bp, Homo sapiens
  source 1..292: mol_type = other DNA
cactgtctctggtggctccatccgtagttattactggagttggatccggcagcccccagggaaggggctggagtggattgggtatatctattacgatgggagcaccaactacaacccctccctcaagagtcgagtcaccatatcactagacacgtccaagaaccagttctccctgaagctgagttctgtgatcgctgcggacacggccgtgtactattgtgcggtggggggttcggggagaatgaattacttcgatctctggggccgtggctccatggtcactgtctcctta

SEQ ID NO: 10566 - DNA, 292 bp, Homo sapiens
  source 1..292: mol_type = other DNA
cactgtctctggtggctccatcagtagttactactggagttggatccggcagcccccagggaaggggctggagtggattgggtacatctattacagtgggagcaccaactacaacccctccctcaagagtcgagtcaccatatcagtagacacgtccaagaaccagttctccctgaagctgagttctgtgaccgctgcggacacggccgtgtattattgtgcggtggggggttcggggagaatgaattacttcgatctctggggccgtggctccatggtcactgtctcctca

SEQ ID NO: 10567 - DNA, 292 bp, Homo sapiens
  source 1..292: mol_type = other DNA
cactgtctctggtggctccatccgcaattattactggagttggatccggcagcccccagggaaggggctggagtggattgggtatatctatgacgatgggagcaccaactacaacccctccctcaagagtcgagtcaccatatcactagacacgtccaagaaccagttctccctgaagctgagctctgtgatcgctgcggacacggccgtgtattattgtgcggtggggggttcggggagaatgaattacttcgatctctggggccgtggctccatggtcagtgtctcctta

SEQ ID NO: 10568 - DNA, 292 bp, Homo sapiens
  source 1..292: mol_type = other DNA
cagtgtctctggtggctccatcagtagttactactggagttggatccggcagcccccagggaaggggctggagtggattgggtatatccacagcagtgggagtaccaattacaacccctccctcaagggtcgagtcaccatatcagtagacatggccaagaaccagttctctctgaatctaatttctgtgaccgctgcggacacggccgtgtattattgtgcggtggggggttcggggagaatgaattacttcgatctctggggccgtggctccatggtcactgtctcctca

SEQ ID NO: 10569 - DNA, 292 bp, Homo sapiens
  source 1..292: mol_type = other DNA
cactgtctctggtggctccatcaataattactactggagttgggtccggcagtctccaaggaaggggctggagtggattgggtatatctcttacactgggggcaccaactacaacccctccctcaagagtcgagtcaccatgtcaatagacacctccaagaaccagttctccctgaagctcacttctgtgaccgctgcggacacggccgtatattattgtgcggtggggggttcggggagaatgaattacttcgatctctggggccgtggctccatggtcgctgtctcctca

SEQ ID NO: 10570 - DNA, 292 bp, Homo sapiens
  source 1..292: mol_type = other DNA
cactgtctctggtggctccatcagtagttactactggagttggatccggcagcccccagggaaggggctggagtggattgggtatatctattacagtgggagcaccaactacaacccctccctcaagagtcgagtcaccatatcagtagacacgtccaagaaccagttctccctgaagctgagttatgtgaccgctgcggacacggccgtgtattattgtgcggtggggggttcggggagaatgaattacttcgatctctggggccgtggctccatggtcactgtcacctca

SEQ ID NO: 10571 - DNA, 292 bp, Homo sapiens
  source 1..292: mol_type = other DNA
cactgtctctggtggctccatccgtagttattactggagttggattcggcagcccccagggaaggggctggagtggattggatatatctattacgatgggagcaccaactacaacccctccctcaagagtcgagtcaccatatcactagacacgtccaagaaccagttctccctgaagctgagttctgtgatcgctgcggacacggccgtgtattattgtgcggtggggggttcggggagaatgaattacttcgatctctggggccgtggctccatggtcactgtctcctta

SEQ ID NO: 10572 - DNA, 292 bp, Homo sapiens
  source 1..292: mol_type = other DNA
cactgtctctggtggctccatcagtagttacttctggagttggatccggcagcccccagggaaggggctggagtggattgggtatatccattacagtgggagcaccaactacaacccctccctcaagagtcgagtcaccatatcaatagacacgtccaagaaccagttctccctgaagctgagttctgtgaccgctgcggacacggccgtgtattattgtgcggtggggggttcggggagaatgaattacttcgatctctggggccgtggctccatggtcactgtcacctca

SEQ ID NO: 10573 - DNA, 292 bp, Homo sapiens
  source 1..292: mol_type = other DNA
cactgtctctggtggctccatcagtagttactactggagttggatccggcagcccccagggaaggggctggagtggattgggtatatctattacgatgggagtaccaactccaacccctccctcaagagtcgagtcaccatatcagtagacacgtccaagaaccagttctccctgaagctgagttctgtgaccgctgcggacacggccgtgtattattgtgcggtggggggttcggggagaatgaattacttcgatctctggggccgtggctccatggtcactgtctcctca

SEQ ID NO: 10574 - DNA, 292 bp, Homo sapiens
  source 1..292: mol_type = other DNA
cactgtctctggtggctccatcagtagttactactggacttggatccggcagcccccagggaaggggctggagtggattgggtatatctattacagtgggagcaccaactacaacccctccctcaagagtcgagtcaccatatcagtagacacgtccaagaaccagttctccctgaagctgagttctgtgaccgctgcggacacggccgtgtattattgtgcggtggggggttcggggagaatgaattacttcgatctctggggccgtggctccatggtcactgtctcctca

SEQ ID NO: 10575 - DNA, 292 bp, Homo sapiens
  source 1..292: mol_type = other DNA
cactgtctctggtggctccatcagtagttactattggagttggatccggcagcccccagggaaggggctggagtggattgggtatatccatcacagtgggagcaccaactacaatccctccctcaagagtcgagtcaccatatcaatagacacgtccaagaaccagttctccctgaagttgagatctgtgaccgctgcggacacggccgcgtattattgtgcggtggggggttcggggagaatgaattacttcgatctctggggccgtggttccaaggtcgctgtctcctca

SEQ ID NO: 10576 - DNA, 292 bp, Homo sapiens
  source 1..292: mol_type = other DNA
cactgtctctggtggctccatcagtagttactactggagttggatccggcagcccccagggaaggggctggagtggattgggtatatctattacaatgggaacaccaactacaacccctccctcaagagtcgagtcaccatatcagtagacacgtccaagaaccagttctccctgaagctgagttctgtgaccgctgcggacacggccgtatattactgtgcggtggggggttcggggagaatgaattacttcgatctctggggccgtggctccatggtcactgtctcctca

SEQ ID NO: 10577 - DNA, 292 bp, Homo sapiens
  source 1..292: mol_type = other DNA
cactgtctctggtggttacatcagtaattattactggagttggattcggcagcccccaggaaaggggctgcagtggattgggtatatccataatagtggggactcctactacaacccctccctcaagagtcgagtcagcatatcaatagacacgtccaagaaccagttctccctgaagttgagttctgtgaccgctgcggacacggccgtgtattattgtgcggtggggggttcgggcagaatgaattacttcgatctctggggccgtggctccatggtcactgtctcctca

SEQ ID NO: 10578 - DNA, 292 bp, Homo sapiens
  source 1..292: mol_type = other DNA
cactgtctctggtggctccatcagtaattactattggagctggatccggcagcccccagggaaggggctggagtggattgggtatatccatcacagtgggagcaccaactacaacccctccctcaagagtcgagtcaccatatcaatggacacctccaacaaccagttctccctgaggttgagatctgtgaccgctgcggacacggccgtgtatttttgtgcggtggggggttcggggagaatgaattacttcgatctctggggccgtggttccaaggtcgctgtctcctca

SEQ ID NO: 10579 - DNA, 292 bp, Homo sapiens
  source 1..292: mol_type = other DNA
cactgtctctggtggctccatcagtagttactactggagttggatccggcagcccccagggaaggggctggagtggattgggtatatctattacagtgggagcaccaactacaacccctccctcaagagtcgagtcaccatatcagtagacacgtctaagaaccagttctccctgaagctgagttctgtgaccgctgcggacacggccgtgtattattgtgcggtggggggttcggggagaatgaattacttcgatctctggggccgtggctccatggtcactgtctcctca

SEQ ID NO: 10580 - DNA, 292 bp, Homo sapiens
  source 1..292: mol_type = other DNA
cactatctctggtggctccgtcagtagttactactggagttggatccggcagcccccagggaaggggctggagtggattggatatatctattacagtgggagcaccaattacaacccctccctcaagagtcgagtcaccatatcagtagacacgtccaagaaccagttctccctgaagctgagttctgtgaccgctgcggacacggccgtgtattattgtgcggtggggggttcggggagaatgaattacttcgatctctggggccgtggctccatggtcactgtctcctca

SEQ ID NO: 10581 - DNA, 292 bp, Homo sapiens
  source 1..292: mol_type = other DNA
cactgtctctggtggctccatccgtagttattactggagttggatgcggcagcccccagggaaggggctggagtggattgggtatatctattacgatgggagcaccaactacaacccctccctcaagagtcgagtcaccatatcgctagacacgtccaagaaccagttctccctgaagctgacttctgtgatcgctgcggacacggccgtgtattattgtgcggtggggggttcggggagaatgaattacttcgatctctggggccgtggctccatggtcactgtctcctta

SEQ ID NO: 10582 - DNA, 292 bp, Homo sapiens
  source 1..292: mol_type = other DNA
cagtgtctctggtggctccatccgtagttattactggagttggatccggcagcccccagggaaggggctggagtggattgggtatatctattacgatgggagcaccaactacaacccctccctcaagagtcgagtcaccatatcactagacacgtccaagaaccagttctccctgaagctgagttctgtgatcgctgcggacacggccgtgtattattgtgcggtggggggttcggggagaatgaattacttcgatctctggggccgtggctccatggtcactgtctcctta

SEQ ID NO: 10583 - DNA, 292 bp, Homo sapiens
  source 1..292: mol_type = other DNA
cgctgtctctggtggctccatcaatacttactattggagttggatccggcagcccccagggaagggtctggaatggattggatatatccactacagtggaagcaccaactacaacccctccctcaagagtcgcgtcaccatatcaatagacacgtccaagaaccagttctccctgaggctgaattctgtgaccgctgcggacacggccgtgtattattgtgcggtggggggttcggggagaatgaattacttcgatctctggggccgtggctccatggtcactgtctcctca

SEQ ID NO: 10584 - DNA, 292 bp, Homo sapiens
  source 1..292: mol_type = other DNA
cactgtctccggtggctccatcagtagttattactggagttggatccggcagcccccagggaaggggctggagtggcttgggtttgtctattacagtgggagcaccaactacaacccctccctcaagagtcgagtcaccatatcaatagacacgtccaagaaccagttctccctgaagctgacttctgtgaccgctgcggacacggccgtgtattattgtgcggtggggggttcggggagaatgaattacttcgatctctggggccgtggctccatggtcactgtctcctca

SEQ ID NO: 10585 - DNA, 292 bp, Homo sapiens
  source 1..292: mol_type = other DNA
cactgtctctggtggctccatcagtagttactactggagttggatccggcagcccccagggaaggggctggagtggattggctttatccacaacagtgggagcaccaattacaacccctccctcaagagtcgagtcaccatatcagtagacatgtccaagaaccagttctccctgaagctgagttctgtgaccgctgcggacacggccgtgtattattgtgcggtggggggttcggggagaatgaattacttcgatctctggggccgtggctccatggtcactgtctcctca

SEQ ID NO: 10586 - DNA, 292 bp, Homo sapiens
  source 1..292: mol_type = other DNA
cactgtctctggtggctccatcagtagttactactggacttggatccggcagcccccaggaaaggggctggagtggattgggtatatctattacagtgggagcacctactataacccctccctcaagagccgagtcaccatgtcaatagacacgtccaagaaccagttctccctcaagctgagttctgttaccgctgcggacacggccgtgtattattgtgcggtggggggttcggggagaatgaattacttcgatctctggggccgtggctccatggtcactgtctcctca

SEQ ID NO: 10587 - DNA, 292 bp, Homo sapiens
  source 1..292: mol_type = other DNA
cactgtctctggtggctccatcactaattactattggagctggatccggcagtccccagggaaggggctggagtggattgggtatatccatcacagtgggagcaccaactacaacccctccctcaagagtcgagtcaccatatcaatggacacctccaacaaccagttctccctgaggttgagatctgtgaccgctgcggacacggccgtgtatttttgtgcggtggggggttcggggagaatgaattacttcgatctctggggccgtggttccaaggtcgctgtctcctca

SEQ ID NO: 10588 - DNA, 292 bp, Homo sapiens
  source 1..292: mol_type = other DNA
cagtgtctccggtggctccatcagaaactactactggagttggatccggcagaccccagggaaggggctggagtggattggatatgtccataacagtgggagcaccaattacaacccctccctcaagagtcgagtcaccatttctgtagacacgtctaagaaccacttctccctgaagttgaattcggtgaccgctgcggacacggccgtgtattattgtgcggtggggggttcggggagaatgaattacttcgatctctggggccgtggctccagggtcactgtctcctca

SEQ ID NO: 10589 - DNA, 292 bp, Homo sapiens
  source 1..292: mol_type = other DNA
cactgtctctggtggctccatcagtaattactactggagttggatccggcagcccccagggaaggggctggagtggattggatatatctattacagtgggagcaccaactacaacccctccctcaagagtcgggtcaccatatcactagacacgtccaagaaccagttctccctgaagctgagttctgtgaccgctgcggacacggccgtgtatttttgtgcggtggggggttcggggagaatgaattacttcgatctctggggccgtggctccatggtcactgtctcctca

SEQ ID NO: 10590 - DNA, 292 bp, Homo sapiens
  source 1..292: mol_type = other DNA
cactgtctctggtggctccatccgtagttattactggagttggatccggcagcccccagggaaggggctggagtggattgggtatatctattacgatgggagcaccaactacaacccctccctcaagagtcgagtcaccacatcactagacacgtccaagaaccagttttccctgaagctgagttctgtgatcgctgcggacacggccgtgtattattgtgcggtggggggttcggggagaatgaattacttcgatctctggggccgtggctccatggtcactgtctcctta

SEQ ID NO: 10591 - DNA, 292 bp, Homo sapiens
  source 1..292: mol_type = other DNA
cactgtctctggtggctccatcagtagttactactggacttggctccggcagcccccagggaaggggctggagtggattgggtatatccactacagtgggagcaccaattacaacccctccctcacgagtcgagtcaccatatcagtagacatgtccaagaaccagttctccctgaggctgacttctgtgaccgctgcggacacggccgtgtattattgtgcggtggggggttcggggagaatgaattacttcgatctctggggccgtggctccatggtcactgtctcctca

SEQ ID NO: 10592 - DNA, 292 bp, Homo sapiens
  source 1..292: mol_type = other DNA
cactgtctctggtggctccatcagtagttactactggagttggatccggcagcccccagggaaggggctggagtggattgggtatatccacaacagtgggagcaccaatcacaacccctccctcaagagtcgagtcaccatatcagtagacatgtccaagaaccagttctccctgaagctgagttatgtgaccgctgcggacacggccgtgtattattgtgcggtggggggttcggggagaatgaattactttgatctctggggccgtggctccatggtcactgtctcctca

SEQ ID NO: 10593 - DNA, 292 bp, Homo sapiens
  source 1..292: mol_type = other DNA
cactgtctctggtggctccatcagtagttactactggagttggatccggcagaccccagggaaggggctggagtgggttgggtacataaattacagtgggagcaccagttacaacccctccctcaggagtcgagtcaccatgtcaatagacacgtccaagaaccagttctccctgaagctgatttctgtgaccgctgcggacacggccgtgtattattgtgcggtggggggttcggggagaatgaattacttcgatctctggggccgtggctccatggtcactgtctcctca

SEQ ID NO: 10594 - DNA, 292 bp, Homo sapiens
  source 1..292: mol_type = other DNA
cactgtctctggtggctccatcagtagttactactggagttggatccggcagcccccagggaaggggctggaatggattgggtatatctattacagtgggagcaccaactacaacccctccctcaagagtcgagtcaccatatcagtagacacgtccaagaaccagttctccctgaagctgagttctgtgaccgctgcggacacggccgtgtattattgtgcggtggggggttcggggagaatgaattacttcgatctctggggccgtggctccatggtcactgtctcctca

SEQ ID NO: 10595 - DNA, 292 bp, Homo sapiens
  source 1..292: mol_type = other DNA
cagtgtctctgggggctccatcagtagttactattggagttggatccggcagcccccagggaaggggctggagtggattgggtatgtccattacagtgggagcgccaactacaacccctccctcaagagtcgagtcaccatttcagtagacacgtccaagaagcagttctccctgaagctgagttctgtgaccgctgcggacacggccgtgtattattgtgcggtggggggttcggggagaatgaattacttcgatctctggggccgtggctccatggtcactgtctcctca

SEQ ID NO: 10596 - DNA, 292 bp, Homo sapiens
  source 1..292: mol_type = other DNA
cactgtctctggtggctccatcagtagttactactggagttggatccggcagcccccagggaaggggctggagtggattgggtatatccattacagtgggagcacgaactacaacccctccctcaagagtcgagtcaccatatcagtagacacgtccaagaaccaattctccctgaagctgagttctgtgaccgctgcggacacggccgtgtattattgtgcggtggggggttcggggagaatgaattacttcgatctctggggccgtggctccatggtcactgtctcctca

SEQ ID NO: 10597 - DNA, 292 bp, Homo sapiens
  source 1..292: mol_type = other DNA
cactgtctctggtggctccatcagcaattacttctggagttggattcggcagtccccagggaaggggctggagtggattgggtacatccacaacagtgggggcaccaattacaatccctccctcaagagtcgagtcaccatatcaatagacatgtccaagaaccaattctccctgaagctgacttctgtgaccgctgcggacacggccgtgtacttttgtgcggtggggggttcggggagaatgaattactttgatctctggggccgtggatccatggtcaccgtctcctct

SEQ ID NO: 10598 - DNA, 292 bp, Homo sapiens
  source 1..292: mol_type = other DNA
cactgtctctggaggctccatcagtagttactactggagttggatccggcagcccccagggaaggggctggagtggattgggtatatctattacagtgggagcaccaactacaacccctccctcaagagtcgagtcaccatatcagtagacacgtccaagaaccagttctccctgaagctgacttctgtgaccgctgcggacacggccgtgtattattgtgcggtggggggttcggggagaatgaattacttcgatctttggggccgtggctccatggtcactgtctcctca

SEQ ID NO: 10599 - DNA, 292 bp, Homo sapiens
  source 1..292: mol_type = other DNA
cactgtctctggtggctccatcagtagtttctactggagttggatccggcagcccccagggaaggggctggagtggattggttatatacattacagtgggagcaccaattacaacccctccctgaagagtcgagtcaccatatcaatagacacgtccaagaaccagttctccctgaagctgacttctgtgaccgctgcggacacggccgtctattattgtgcggtggggggttcggggagaatgaattacttcgatctctggggccgtggctccatggtcactgtctcctca

SEQ ID NO: 10600 - DNA, 292 bp, Homo sapiens
  source 1..292: mol_type = other DNA
cactgtctctggtggctccatcagtagttactactggagttggatccggcagcccccagggaaggggatggagtggattgggtatatctattacagtgggagcaccaactacaacccctccctcaagagtcgagtcaccatatcaatagacacgtccaagaaccaattctccctgaagctgagttctgtgaccgctgcggacacggccgtgtattattgtgcggtggggggttcggggagaatgaattacttcgatctctggggccgtggctccatggtcactgtctcctca

SEQ ID NO: 10601 - DNA, 292 bp, Homo sapiens
  source 1..292: mol_type = other DNA
cactgtctctggtggctccatcaatagttactactggagttggatccggcagcccccagggaaggggctggagtggattgggtatacctattacagtgggagcaccaactataacccctccctcaagagtcgagtcaccatatcagtggacacgtccaggaaccagttctccctgaagctgagttctgtgaccgctgcggacacggccgtgtattattgtgcggtggggggttcggggagaatgaattacttcgatctctggggccgtggctccatggtcactgtctcctca

SEQ ID NO: 10602 - DNA, 292 bp, Homo sapiens; identical to SEQ ID NO: 10428
  source 1..292: mol_type = other DNA

SEQ ID NO: 10603 - DNA, 292 bp, Homo sapiens
  source 1..292: mol_type = other DNA
cactgtctctggtggctccatcactagttactactggagttggatccggcagcccccagggaaggggccggagtggattggctatatctattacagtggggacaccaactacaacccctccctcaagagtcgagtcaccatatcaatagacacgtccaagaaccagttctccctgaagctgagttatgtgaccgctgcggacacggccgtgtattattgtgcggtggggggttcggggagaatgaattacttcgatctgtggggccgtggctccatggtcactgtctcctca

SEQ ID NO: 10604 - DNA, 292 bp, Homo sapiens
  source 1..292: mol_type = other DNA
cactgtctctggtggccccatcagtagttactactggacttgggtccggcagcccccaggcaaggggctggagtggattgggtatatctattacagtgggagcaccaactacaacccctccctcaagagtcgagtcaccatatcactagacacgtccaagaaccaggtctccctgaagttgagttctgtgaccgctgcggacacggccgtgtattattgtgcggtggggggttcggggagaatgaattacttcgatctctggggccgtggctccatggtcactgtctcctca

SEQ ID NO: 10605 - DNA, 292 bp, Homo sapiens
  source 1..292: mol_type = other DNA
cactgtctctggtggctccatcagtagttactactggagttggatccggcagcccccagggaaggggctggagtggattgggtatatctattacagtgggagcaccaactacaacccctccctcaagagtcgcgtcaccatatcagtagacacgtccaagaaccagttctccctgaagctgacttctgtgaccgctgcggacacggccgtgtattattgtgcggtggggggttcggggagaatgaattacttcgatctctggggccgtggctccatggtcactgtctcctca

SEQ ID NO: 10606 - DNA, 292 bp, Homo sapiens
  source 1..292: mol_type = other DNA
cactgtctctggtggctccatcagtagttattactggagttggatccggcagcccccagggaaggggctggagtggattgggtatatctattatagtgggagcaccaactacaacccctccctcaagagtcgagtcaccatgtcagtagacacgtccaagaaccagttttccctgaagttaagttctgtgaccgctgcggacacggccgtgtattattgtgcggtggggggttcggggagaatgaattacttcgatctctggggccgtggctccatggtcactgtctcctca

SEQ ID NO: 10607 - DNA, 292 bp, Homo sapiens
  source 1..292: mol_type = other DNA
cactgtctctggtggctccatcagtagttactactggagttggatccggcagcccccagggaaggggctggagtggattgggtatatctattacagtgggagcaccaactacaacccctccctcaagagtcgagtcaccatatcaatagacacgtccaagaaccagttctccctgaagctgagttctgtgaccgctgcggacacggccgtgtattattgtgcggtggggggttcggggagaatgaattacttcgatctctggggccgtggctccatggtcactgtctcctca

SEQ ID NO: 10608 - DNA, 292 bp, Homo sapiens
  source 1..292: mol_type = other DNA
cactgtctctggtggctccatcagtagttactactggagttggatccggcagcccccagggaaggggctgaagtggattgggtatatctattacagtgggagcaccaactacaacccctccctcaagagtcgagtcaccatatcagtagacacgtccaagaaccagttctccctgaagctgacttctgtgaccgctgcggacacggccgtgtattattgtgcggtggggggttcggggagaatgaattacttcgatctctggggccgtggctccatggtcactgtctcctca

SEQ ID NO: 10609 - DNA, 292 bp, Homo sapiens
  source 1..292: mol_type = other DNA
cactgtctctggtggctccatccgtagttattactggagttggatccggcagcccccagggaaggggctggagtggattgggtatatctattacgatgggagcgccaactacaacccctccctcaagagtcgagtcaccatatcactagacacgtccaagaaccagttctccctgaagctgagttctgtgatcgctgcggacacggccgtgtattattgtgcggtggggggttcggggagaatgaattacttcgatctctggggccgtggctccatggtcactgtctcctta

SEQ ID NO: 10610 - DNA, 292 bp, Homo sapiens
  source 1..292: mol_type = other DNA
cactgtctctggtggctccatcagtagttattactggagttggatgcggcagcccccagggaaggggctggagtggattggctatgtccacttcagtgggagcaccaactacaacccctccctcaagggtcgggtcaccatatcagtggacacgtccaagaaccagttctccatgaggctgacctctgtgaccgctgcggacacggccgtgtattattgtgcggtggggggttcgggcagaatgaattacttcgatctctggggccgtggctccatggtcactgtctcctca

SEQ ID NO: 10611 - DNA, 292 bp, Homo sapiens
  source 1..292: mol_type = other DNA
cactgtctctggtggctccatcagtagttactactggagttggatccggcagaccccagggaaggggctggagtggattgggtatatctattacagtgggagcgccaactacaacccctccctcaagagtcgagtcaccatatcactagacacgtccaagaaccaattctccctgaaactgagttctgtgaccgctgcggacacggccctgtattattgtgcggtggggggttcggggagaatgaattacttcgatctctggggccgtggctccatggtcactgtctcctcg

SEQ ID NO: 10612 - DNA, 291 bp, Homo sapiens
  source 1..291: mol_type = other DNA
cactgtctctggtggctccatccgtagttattactggagttggatccggcagcccccagggaaggggctggagtggattgggtatatctattacgatgggagcaccaactacaacccctccctcaagagtcgagtcaccatatcactagacacgtccaagaaccagttctccctgaagctgagttctgtgatcgctgcggacacggccgtgtattattgtgcggtggggggttcggggagaatgaattacttcgatctctgggccgtggctccatggtcactgtctcctta

SEQ ID NO: 10613 - DNA, 292 bp, Homo sapiens
  source 1..292: mol_type = other DNA
cactgtctctggtggctccatcagtagttactactggagttggatccggcagcccccagggaaggggctggagtggattgggtatatctattacagtgggagcaccaactacaacccctccctcgagagtcgagtcaccatatcagtagacacgtccaagaaccacttctccctgaagctgagttctgtgaccgctgcggacacggccgtgtattattgtgcggtggggggttcggggagaatgaattacttcgatctctggggccgtggctccatggtcactgtctcctca

SEQ ID NO: 10614 - DNA, 292 bp, Homo sapiens
  source 1..292: mol_type = other DNA
cgctgtctctggtggctccatcagtagttactactggagctggatccgccagcccccaggaaagggactggagtggattggttatgtccattacactgggagcaccaactacaacccctccctcaagagtcgagtcaccatttcaatagacacgtccaggaaccagttcgccctgaggctgacttcagtgaccgctgcggacacggccgtgtattattgtgcggtggggggttcggggagaatgaattacttcgatctctggggccgtggctccatggtgactgtctcctca

SEQ ID NO: 10615 - DNA, 292 bp, Homo sapiens
  source 1..292: mol_type = other DNA
cactgtctctggtggctccatcagtagttactattggagttggatccggcagcccccagggaaggggctggagtggattgggtacatctattacagtgggagcaccaactacaacccctccctcaagagtcgagtcaccatatcagtacacacgtccaagaaccagttctccctgaagctgagttctgtgaccgctgcggacacggccgtgtattattgtgcggtggggggttcggggagaatgaattacttcgatctctggggccgtggctccatggtcactgtctcctca

SEQ ID NO: 10616 - DNA, 292 bp, Homo sapiens
  source 1..292: mol_type = other DNA
cactgtctctggtggctccatcagtagttactactggagttggatccggcagcccccagggaaggggctggagtggattgggtatatacattacagtgggagcaccaactacaacccctccctcaagagtcgagtcaccatatcagtagacacgtccaagaaccagttctccctgaagctgagttctgtgaccgctgcggacacggccgtgtattattgtgcggtggggggttcggggagaatgaattacttcgatctctggggccgtggctccatggtcactgtctcctca

SEQ ID NO: 10617 - DNA, 292 bp, Homo sapiens
  source 1..292: mol_type = other DNA
cactgtctctggtggctccatcaggagttactactggagttggatccggcagcccccagggaaggggctggagtggattgggtatatccacaacagtgggggcaccaattacaacccctccctcaagagtcgagtcaccatatcagtagacatgtccaagaatcagttctccctgaagctgagttctgtgaccgctgcggacacggccgtgtattattgtgcggtggggggttcggggagaatgaattacttcgatctctggggccgtggctccatggtcactgtctcctca

SEQ ID NO: 10618 - DNA, 292 bp, Homo sapiens
  source 1..292: mol_type = other DNA
cagtgtctctggtggctccatcagtagttattattggagttggatccggcagcccccagggaaggggctggagtggattgggtatatctattacagtgggagcaccaactacaacccctccctcaagagtcgagtcaccatatcagtagacacgtccaagaagcagttctccctgaagctgagttctgtgaccgctgcggacacggccgtgtattattgtgcggtggggggttcggggagaatgaattacttcgatctctggggccgtggctccatggtcactgtctcctca

SEQ ID NO: 10619 - DNA, 292 bp, Homo sapiens
  source 1..292: mol_type = other DNA
cactgtctctggtggctccatcaatagttactactggagttggatccggcagcccccatggaagggactggactggattggctatatctcttacagtgggggcaccaactacaacccctccctcaagagtcgagtcaccatgtcagtagacacgtccaagaaccaattctccctgaagctgacttctgtgaccgctgcggacacggccctctattattgtgcggtggggggttcggggagaatgaattacttcgatctctggggccgtggcaccatggtcactgtctcctca

SEQ ID NO: 10620 - DNA, 292 bp, Homo sapiens
  source 1..292: mol_type = other DNA
tggtgtctctggtggctccatcagtagttactactggacttggatccggcagcccccagggaaggggctggagtggattgggtatatctcttacagtgggggcaccaactacaacccctccctcaagagtcgagtcacaatatcagtagacacgtccaagaaccagttctccctgaagctgacttctgtgaccgctgcggacacggccgtgtattattgtgcggtggggggttcggggagaatgaattacttcgatctctggggccgtggctccatggtcactgtctcctca

SEQ ID NO: 10621 - DNA, 292 bp, Homo sapiens
  source 1..292: mol_type = other DNA
cactgtctctggtggctccatccgtagttattactggagttggatccggcagcccccagggaaggggctggagtggattgggtatatctatttcgatgggagcaccaactacaacccctccctcaagagtcgagtcaccatatcactagacacatccaagaaccagttctccctgaagctgagttctgtgatcgctgcggacacggccgtgtattattgtgcggtggggggttcggggagaatgaattacttcgatctctggggccgtggctccatggtcactgtctcctta

SEQ ID NO: 10622 - DNA, 292 bp, Homo sapiens; identical to SEQ ID NO: 10599
  source 1..292: mol_type = other DNA

SEQ ID NO: 10623 - DNA, 292 bp, Homo sapiens
  source 1..292: mol_type = other DNA
cactgtctctggtggctccatccgtagttattactggagttggatgcggcagcccccagggaaggggctggagtggattgggtatatctattacgatgggagcaccaactacaacccgtccctcaagagtcgagtcaccatatcgctagacacgtccaagaaccagttctccctgaagctgagttctgtgatcgctgcggacacggccgtgtattattgtgcggtggggggttcggggagaatgaattacttcgatctttggggccgtggctccatggtcactgtctcctta

SEQ ID NO: 10624 - DNA, 292 bp, Homo sapiens
  source 1..292: mol_type = other DNA
cactgtctctggtggctccatcagtagttactactggagttggatccggcagcccccagggaaggggctggaatggattgggtatacctattacagtgggagcaccaactacaacccctccctcaagagtcgagtcaccatatcagtagacacgtccaagaaccagttctccctgaagctgagttctgtgaccgctgcggacacggccgtgtattattgtgcggtggggggttcggggagaatgaattacttcgatctctggggccgtggctccatggtcactgtctcctca

SEQ ID NO: 10625 - DNA, 292 bp, Homo sapiens
  source 1..292: mol_type = other DNA
cactgtctctggtggctccatccgtagttattactggagttggatgcggcagcccccagggaaggggctggagtggattgggtatatctattacgatgggagcaccaactacaacccctccctcaagagtcgagtcaccatatcgctagacacgtccaagaaccagttctccctgaagctgatttctgtgatcgctgcggacacggccgtgtattattgtgcggtggggggttcggggagaatgaattacttcgatctctggggccgtggctccatggtcactgtctcctta

SEQ ID NO: 10626 - DNA, 292 bp, Homo sapiens
  source 1..292: mol_type = other DNA
cactgtctctggtggctccatcagtagttactactggagttggatccggcagcccccagggaaggggctggagtggattgggtatatctattacagtgggagcaccaactacaacccctccctcaagagtcgagtcaccatatcagtagacacgtccaagaaccaattctccctgaagctgagttctgtgaccgctgcggacacggccgtgtattattgtgcggtggggggttcggggagaatgaattacttcgatctctggggccgtggctccatggtcactgtctcctca

SEQ ID NO: 10627 - DNA, 292 bp, Homo sapiens
  source 1..292: mol_type = other DNA
cactgtctctggtggctccatcagtagttactactggagttggatccggcagcccccagggaaggggctgcagtggattgggtatatctattacagtgggagcaccaactacaacccctccctcaagagtcgagtcaccatatcagtagacacgtccaagaaccagttctccctgaagctgagttctgtgaccgctgcggacacggccgtgtattattgtgcggtggggggttcggggagaatgaattacttcgatctctggggccgtggctccatggtcactgtctcctca

SEQ ID NO: 10628 - DNA, 292 bp, Homo sapiens
  source 1..292: mol_type = other DNA
cactgtctctggtggctccatccgtagttattactggagttggatccggcagcccccagggaaggggctggagtggattgggtatatctattacgatgggagcaccaactacaacccctccctcaagagtcgagtcaccatatcactagacacgtccaagaaccagttttccctgaagctgagttctgtgatcgctgcggacacggccgtgtattattgtgcggtggggggttcggggagaatgaattacttcgatctctggggccgtggctccatggtcactgtctcctta

SEQ ID NO: 10629 - DNA, 292 bp, Homo sapiens
  source 1..292: mol_type = other DNA
cactgtctctggtggctccatcagtagttactactggagttggatccggcagcccccagggaaggggctggagtggattgggtatatccacaacagtgggagcaccaattacaacccctccctcaagagtcgagtcaccatgtcactagacatgtccaagaaccagttctccctgaagctgagttctgtgaccgctgcggacacggccgtgtattattgtgcggtggggggttcggggagaatgaattacttcgatctctggggccgtggctccatggtcactgtctcctca

SEQ ID NO: 10630 - DNA, 292 bp, Homo sapiens
  source 1..292: mol_type = other DNA
cactgtctctggtggctccatcagtagttactactggagttggatccggcagcccccagggaaggggctggagtggattgggtatatctattacagtgggagcaccaactacaacccctccctcaagagtcgagtcaccacatcagtagacacgtccaagaaccagttctccctgaagctgagttctgtgaccgctgcggacacggccgtgtattattgtgcggtggggggttcggggagaatgaattacttcgatctctggggccgtggctccatggtcactgtctcctca

SEQ ID NO: 10631 - DNA, 292 bp, Homo sapiens
  source 1..292: mol_type = other DNA
cactgtctctggtggctccatcagtagttactactggagttggatccggcagcccccagggaaggggctggagtggattgggtatatctattacagtgggagcaccaactccaacccctccctcaagagtcgagtcaccatatcagtagacacgtccaagaaccagttctccctgaagctgagttctgtgaccgctgcggacacggccatgtattattgtgcggtggggggttcggggagaatgaattacttcgatctctggggccgtggctccatggtcactgtcacctca

SEQ ID NO: 10632 - DNA, 292 bp, Homo sapiens
  source 1..292: mol_type = other DNA
cactgtctctggtggctccatcagtagttactactggagttggatccggcagcccccagggaaggggctggagtgggttgggtatatctattacactgggagcaccaactacaacccctccctcaagagtcgagtcaccatatcagtagacacgtccaagaaccagttctccctgaagctgagctctgtgaccgctgcggacacggccgtgtattattgtgcggtggggggttcggggagaatgaattacttcgatctctggggccgtggctccatggtcactgtctcctca

SEQ ID NO: 10633 - DNA, 292 bp, Homo sapiens
  source 1..292: mol_type = other DNA
cactgtatctggtggctccatcagtagttaccactggagttggatccggcagcccccagggaaggggctggagtggattggatatatccattacagtgggagcaccaactacaacccctccctcaagagtcgggtcaccatatcaatagacacgtccaagaaccagttctccctgaggttgagttctgtgaccgctgcggacacggccgtgtattattgtgcggtggggggttcggggagaatgaattacttcgatctatggggccgtggctccatggtcactgtctcctca

SEQ ID NO: 10634 - DNA, 292 bp, Homo sapiens
  source 1..292: mol_type = other DNA
cactgtctctggtggctccatcagtagttactactggagttggatccggcagcccccagggaaggggctggagtggattgggtatatctattacagtgggagcaccaactacaacccctccctcaagagtcgagtcaccatatcagtagacacgtccaagaaccagttctccctgaagctgagttctgtgaccgctgcggacacggccgtgtattattgtgcggtggggggttcggggagaatgaattacttcgatctctggggccgtggctccatggtcactgtctcctaa

SEQ ID NO: 10635 - DNA, 292 bp, Homo sapiens
  source 1..292: mol_type = other DNA
cactgtctctggtggctccatcagtagttattattggagttggatccggcagaccccagggaagggcctggagtggattggatatgtctattacactgggagcaccaactacaacccctccctcaagagtcgagtcaccatatcaatagacacgtccaagaatcagttctccctgaagttgagttctgtgaccgctgcggacacggccgtgtattattgtgcggtggggggttcggggagaatgaattacttcgatctctggggccgtggctccatggtcactgtctcctca

SEQ ID NO: 10636 - DNA, 292 bp, Homo sapiens
  source 1..292: mol_type = other DNA
ctctgtctctggtggctccatcactgactactactggagttggatccggcagtccccagggaaggggctggagtggattgggtatatccattccagtgggagcaccaactacaagccctccctcaagagtcgagtcaccatatcaatagacacgtccaggaaccagttctccctgaggctgacttctgtgaccgctgcggacacggccgtctattattgtgcagtggggggttcggggagaatgaattacttcgatctctggggccgtggctccatggtcactgtctcctca

SEQ ID NO: 10637 - DNA, 292 bp, Homo sapiens
  source 1..292: mol_type = other DNA
cactgtctctggtggctccatcagtagttactactggagttggatccggcagcccccagggaaggggctggagtggattgggtatatctattacagtgggagcaccaactacaacccctccctcaagagtcgagtcaccatgtcagtagacacgtccaagaaccagttctccctgaagttgagttctgtgaccgctgcggacacggccgtgtattattgtgcggtggggggttcggggagaatgaattacttcgatctctggggccgtggctccatggtcattgtctcctca

SEQ ID NO: 10638 - DNA, 292 bp, Homo sapiens
  source 1..292: mol_type = other DNA
cactgtctctggtggctccatcagtagttactactggagttggatccggcagcccccagggaagagattggagtggattggatatgtctcttacactgggggcgccaactacaacccctccctcaagggtcgagtcaccatatcacttgacacatccaagagccagttctccctgaacctgaggtctgtgaccgctgcggacaccgccgtgtattactgtgcggtggggggttcggggagaatgaattacttcgatctttggggccgtggcactctggtcactgtctcctca

SEQ ID NO: 10639 - DNA, 292 bp, Homo sapiens
  source 1..292: mol_type = other DNA
cactgtctctggtggctccatcagtagttactactggagttggatccggcagcccccagggaaggggctggagtggattgggtatatctattacagtgggagcaccaactacaacccctccctcaagagtcgagtcaccatatcagtagacacgtccaagaaccagttctccctgaagctgagttctgtgaccgctgcggacacggccgtgtattattgtgcggtggggggttcggggagaatgaattacttcgatctctggggccgtggcttcatggtcactgtctcctca

SEQ ID NO: 10640 - DNA, 292 bp, Homo sapiens
  source 1..292: mol_type = other DNA
cactgtctctggtggctccatcagtagttactattggagttggatccggcagcccccagggaaggggctggagtggattggatatatccatttcagtggaagtaccaactacaacccctccctaaagagtcgagtcatcatatcagtagacacgtccaagaaccagttctccctgaagctgagttctgtgaccgctgcggacacggccgtgtattattgtgcggtggggggttcggggagaatgaattatttcgatctctggggccgtggctccatggtcactgtctcctca

SEQ ID NO: 10641 - DNA, 292 bp, Homo sapiens
  source 1..292: mol_type = other DNA
cactgtctctggtggctccatcagtaattactactggagttggatccggcagcccccagggaaggggctggagtggattgggtatatctattacagtggcagcaccaactacaacccctccctcaagagtcgagtcaccatatcaatagacacgtccaagaaccagttctccctgaagctgacttctgtgaccgctgcggacacggccgtctattactgtgcggtggggggttcgggaagaatgaattacttcgatctctggggccgtggctccatggtcactgtctcctca

SEQ ID NO: 10642 - DNA, 292 bp, Homo sapiens
  source 1..292: mol_type = other DNA
cactgtctctggtggctccatcagtagttactactggagttggatccggcagtccccagggaaggggctggagtggattgggtacatccattatagtgggagcaccaactacaacccctccctcaagagtcgagtcaccatatcaatacacacgtccaagaaccagttctccctgaagctgagttctgtgaccgctgcggacacggccgtgtattattgtgcggtggggggttcggggagaatgaattacttcgatctctggggtcgtggctccatggtcactgtctcctca

SEQ ID NO: 10643 - DNA, 292 bp, Homo sapiens; identical to SEQ ID NO: 10623
  source 1..292: mol_type = other DNA

SEQ ID NO: 10644 - DNA, 292 bp, Homo sapiens
  source 1..292: mol_type = other DNA
ctctgtctctggtggctccattagtagttactattggagttggatccggcagcccccagggaaggggctggagtggattgggtatatccattacagtgggagcaccaactacaatccctccctcaagagtcgagtcaccatatctatggactcgtctaagaaccaattctccctaaagttgaaatctgtgaccgctgcggacacggccgtgtattattgtgcggtggggggttcggggagaatgaattacttcgatctctggggccgtggctccttggtcactgtctcctca

SEQ ID NO: 10645 - DNA, 292 bp, Homo sapiens; identical to SEQ ID NO: 10451
  source 1..292: mol_type = other DNA

SEQ ID NO: 10646 - DNA, 292 bp, Homo sapiens
  source 1..292: mol_type = other DNA
cactgtctctggtggctccatcagtagttactactggagttggatccggcagcccccagggaaggggctggagtggattgggtatatgtatcacagtgggagcaccaactacaacccctccctcaagagtcgagtcaccatatcagtagacacgtccaagaaccagttctccctgaagctgagttctgtgaccgctgcggacacggccgtgtattattgtgcagtggggggttcggggagaatgaattacttcgatctctggggccgtggctccatggtcactgtctcctca

SEQ ID NO: 10647 - DNA, 292 bp, Homo sapiens; identical to SEQ ID NO: 10432
  source 1..292: mol_type = other DNA

SEQ ID NO: 10648 - DNA, 292 bp, Homo sapiens; identical to SEQ ID NO: 10632
  source 1..292: mol_type = other DNA

SEQ ID NO: 10649 - DNA, 292 bp, Homo sapiens
  source 1..292: mol_type = other DNA
cactgtctctggtggctccatcagtagttactactggagttggatccggcagcccccagggaaggggctggagtggattgggtttatccattacagtgggagcaccaactacaacccctccctcaagagtcgagtcaccatatcagtagacacgtccaagaaccagttctccctgaagctgagatctgtgaccgctgcggacacggccgtgtatttctgtgcggtggggggttcggggagaatgaattacttcgatctctggggccgtggctccgtggtcactgtctcctca

SEQ ID NO: 10650 - DNA, 292 bp, Homo sapiens
  source 1..292: mol_type = other DNA
cactgtctctggtgactccatcagtaggcactactggagttggatccggcagcccccagggaaggggctggagtggattgggtatatccacaacagtgggagcaccaattacaacccctccctcaagagtcgagtcaccatgtcactggacatgtccaagaaccagttctccctgaagctgagttctgtgaccgctgcggacacggccgtctattattgtgcggtggggggttcggggagaatgaattactttgatctctggggccgtggctccatggtcactgtctcctca

SEQ ID NO: 10651 - DNA, 292 bp, Homo sapiens
  source 1..292: mol_type = other DNA
cactgtctctggtggctccatcagtagttactactggagttggatccggcagcccccagggaaggggctggagtggattgggtatatctattacagtgggagcaccaactacaacccctccctcaagagtcgagtcaccatatcagtagacacgtccaagaaccagttctccctgaagctgagttctgtgaccgctgcggacacggccgtgtattattgtgcggtggggggttcggggagaatgaattatttcgatctctggggccgtggctccatggtcactgtctcctca

SEQ ID NO: 10652 - DNA, 292 bp, Homo sapiens
  source 1..292: mol_type = other DNA
cactgtgtctggtggctccatcaacagttacttctggagttggatccggcagcccccagggaagggactggagtggattggctatatctcttacagtgggggcaccaactacaacccctccctcaagagtcgagtcaccatgtcagtagacacgtccaagaaccagttctccctgaagctgacttctgtgaccgctgcggacacggccctctattattgtgcggtggggggttcggggagaatgaattacttcgatctctggggccgtggcaccatggtcactgtctcctca

SEQ ID NO: 10653 - DNA, 292 bp, Homo sapiens
  source 1..292: mol_type = other DNA
cactgtctctggtggctccaccagtagttactactggagttggatccggcagcccccagggaaggggctggagtggattgggtatatctattatagtgggagcaccaactacaacccctccctcaagggtcgagtcaccatatcagtagacacgtccaagaaccagttctccctgaagctgagttctgtgaccgctgcggacacggccgtgtattattgtgcggtggggggttcggggagaatgaattacttcgatctctggggccgtggctccatggtcactgtctcctca

SEQ ID NO: 10654 - DNA, 292 bp, Homo sapiens
  source 1..292: mol_type = other DNA
cactgtctctggtggctccataagtagttactactggacttggatccggcagcccccagggaaggggctggaatggattggatatatctattacagtgggagcaccaactacaacccctccctcaagagtcgagtcaccgtatcagttgacacgtccaagaaccagttctccctgaagttgagttctgtgaccgctgcggacacggccgtgtattattgtgcggtggggggttcggggagaatgaattacttcgatctctggggccgtggctccatggtcactgtctcctca

SEQ ID NO: 10655 - DNA, 292 bp, Homo sapiens; identical to SEQ ID NO: 10539
  source 1..292: mol_type = other DNA

SEQ ID NO: 10656 - DNA, 292 bp, Homo sapiens
  source 1..292: mol_type = other DNA
cattgtctctggtggctccatcagtaattactactggagttggatccggcagtccccagggaagggactggaatggattgggtatatccattatactggggccaccaattataatccctccctcaagagtcgagtctccatatcaatagacacgtccaagaaccagttctccttgagactgacctcggtgaccgctgcggacacggccttttattattgtgcggtggggggttcggggagaatgaattacttcgatctgtggggccgtggcaccctggtcactgtctcctca

SEQ ID NO: 10657 - DNA, 292 bp, Homo sapiens
  source 1..292: mol_type = other DNA
cactgtctctggtggctccatcaggagttactactggagctggatccggcagcccccagggaaggggctggagtggattgggtatatcttttccagtggcagcaccaactgcaacccctccctcaagagtcgagtcacgatgtcaatagacacgtcgaagaaccagttctccctgaagctgacttctgtgaccgctgcagacacggccgtatattattgtgcggtggggggttcgggaagaatgaattacttcgatctctggggccgtggctccattgtcactgtctcctca

SEQ ID NO: 10658 - DNA, 292 bp, Homo sapiens
  source 1..292: mol_type = other DNA
cactgtctctggtggctccatcagtagttactactggagttggatccagcagcccccagggaaggggctggagtggattgggtatatctattacagtgggagcaccaactacaacccctccctcaagagtcgagtcaccatatcagtagacacgtccaagaaccagttctccctgaagctgagttctgtgaccgctgcggacacggccgtgtattattgtgcggtggggggttcggggagaatgaattacttcgatctctggggccgtggctccatggtcactgtctcctca

SEQ ID NO: 10659 - DNA, 292 bp, Homo sapiens
  source 1..292: mol_type = other DNA
cactgtctctggtggctccatcagtagttattactggagttggatccggcagcccccagggaaggggctggagtggattgggtatatctattacagtgggagcaccaattacaacccctccctcaagagtcgagtcaccatatcaatagacacgtccaagaaccagttctccctgaggctgagttctgtgaccgctgcggacacggccgtgtattattgtgcggtggggggttcggggagaatgaattacttcgatctctggggtcgtggctccatggtcactgtctcctca

SEQ ID NO: 10660 - DNA, 292 bp, Homo sapiens
  source 1..292: mol_type = other DNA
cactgtctctggtggctccatcagtagttattactggagttggatccggcagcccccagggaaggggctggagtggattggctatatccattacagtgggagcaccaactacaacccctccctcaagagtcgagtcaccatatcagtagacacgtccaagaaccagttctccctgaagctgagttctgtgaccgctgcggacacggccatgtattattgtgcggtggggggctcggggagaatgaattacttcgatctctggggccgtgggtccatggtcactgtctcctca

SEQ ID NO: 10661 - DNA, 292 bp, Homo sapiens
  source 1..292: mol_type = other DNA
cactgtctctggtggctccatcagtagttactactggagttggatccggcagcccccagggaaggggctggagtggattgggtatatctattacagtgggagcaccaactacaacccctccctcaagagtcgagtcaccatatcagtagacacgtccaagaaccagttctccctgaagctgaattctgtgaccgctgcggacacggccgtgtattattgtgcggtggggggttcggggagaatgaattacttcgatctctggggccgtggctccatggtcactgtctcctca

SEQ ID NO: 10662 - DNA, 292 bp, Homo sapiens
  source 1..292: mol_type = other DNA
cactgtctctggtggctccatcagtagttactactggagttggatccggcagcccccagggaaggggctggagtggattgggtatatctattacagtgggagcaccaactacaacccctccctcaagagtcgagtcaccatatcacttgacacgtcccagaaccagttctccctgcagctgagttctttgaccgctgcggacacggccgtgtattattgtgcggtggggggttcggggagaatgaattacttcgatctctggggccgtggctccatggtcactgtctcctca

SEQ ID NO: 10663 - DNA, 292 bp, Homo sapiens
  source 1..292: mol_type = other DNA
cactgtctctggtggctccatcagtagatactactggagttggatccggcagcccccagggaaggggctggagtggatagggtatatcttctacagtgggggcaccaattacaacccctccctcaagagtcgagtctccatatcagtagacacgtccaagaaccagttctccctgaagctgagttctgtgaccgctgcggacacggccgtgtattattgtgcggtggggggttcggggagaatgaattacttcgatctctggggccgtggctccatggtcactgtctcctca

SEQ ID NO: 10664 - DNA, 292 bp, Homo sapiens
  source 1..292: mol_type = other DNA
cattgtctctggtggctccatccgtagttattactggagttggatccggcagcccccagggaaggggctggagtggattgggtatatctattacgatgggagcaccaactacaacccctccctcaagagtcgagtcaccatatcactagacacgtccaagaaccagttctccctgaagctgagttctgtgatcgctgcggacacggccgtgtattattgtgcggtggggggttcggggagaatgaattacttcgatctctggggccgtggctccatggtcactgtctcctta

SEQ ID NO: 10665 - DNA, 292 bp, Homo sapiens
  source 1..292: mol_type = other DNA
cactgtctctggtggctccatcagtagttactactggagttggctccggcagcccccagggaaggggctggagtggattgggtatatccattatagtgggagcaccaacaacaacccctccctcaagagtcgagtcaccatatcggtggacacgtccaagaaccagttctccctgaggctgagttctgtgaccgctgcggacacggccgtgtattattgtgcggtggggggttcggggagaatgaattacttcgatctctggggccgtggctccatggtcactgtctcctca

SEQ ID NO: 10666 - DNA, 292 bp, Homo sapiens
  source 1..292: mol_type = other DNA
cactgtgtctggtggctccatcaacagttacttctggagttggatccggcagcccccagggaagggactggagtggattggctatgtctcttacagtgggggcaccaactacaacccctccctcaagagtcgagtcaccatgtcagtagacacgtccaagaaccagttctccctgaagctgacttctgtgaccgctgcggacacggccctctattattgtgcggtggggggttcggggagaatgaattacttcgatctctgggaccgtggcaccatggtcactgtctcctca

SEQ ID NO: 10667 - DNA, 292 bp, Homo sapiens
  source 1..292: mol_type = other DNA
cactgtctctggtggctccatcagtagttactactggagttggatccggcagcccccagggaaggggctggagtggattggctatatctattacagtgggagcaccaattacaacccctccctcaagagtcgagtcaccatatcagtagacacgtcgaagaaccagttctccctgaagttgagttctgtgaccgctgcggacacggccgtgtattattgtgcggtggggggttcggggagaatgaattacttcgatctctggggccgtggctccatggtcactgtctcctca

SEQ ID NO: 10668 - DNA, 292 bp, Homo sapiens
  source 1..292: mol_type = other DNA
cactgtctctgatggctccatccgtagttattactggagttggatccggcagcccccagggaaggggctggagtggattgggtatatctattacgatgggagcaccaactacaacccctccctcaagagtcgagtcaccatatcactagacacgtccaagaaccagttctccctgaagctgagttctgtgatcgctgcggacacggccgtgtattattgtgcggtggggggttcggggagaatgaattacttcgatctctggggccgtggctccatggtcactgtctcctta

SEQ ID NO: 10669 - DNA, 292 bp, Homo sapiens
  source 1..292: mol_type = other DNA
cactgtctctggtggctccatccgtagttattactggagttggatgcggcagcccccagggaaggggctggagtggattgggtatatctattacgatgggagcaccaactacaacccctccctcaagagtcgagtcaccatttcgctagacacgtccaagaaccaattctccctgaagttgagttctgtgatcgctgcggacacggccgtgtattattgtgcggtggggggttcggggagaatgaattacttcgatctctggggccgtggctccatggtcactgtctcctta

SEQ ID NO: 10670 - DNA, 292 bp, Homo sapiens
  source 1..292: mol_type = other DNA
cactgtctctggtggctccatcaatagttattattggagttggatccggcagcccccagggaaggggctggagtggattgggtatatctattacagtgggagcaccaactacaacccctccctcaagagtcgagtcaccatatcagtagacacgtccaagaaccagttctccctgaagctgagatctgtgaccgctgcggacacagccgtgtattattgtgcggtggggggttcggggagaatgaattacttcgatctctggggccgtggctccatggtcactgtctcctca

SEQ ID NO: 10671 - DNA, 292 bp, Homo sapiens
  source 1..292: mol_type = other DNA
cagtgtctctggtggctccatcagtagttattattggagttggctccggcagcccccagggaaggggctggagtggattgggtatgtccactccagtgggagcaccaactaccacccctccctgaagagtcgagtcaccatatcactagacacgtccaggaaccagttctccttgaagttgaattctgtgactgccagggacacggccatatattattgtgcggtggggggttcggggagaatgaattacttcgatctctggggccgtggctcgatggtcactgtctcctca

SEQ ID NO: 10672 - DNA, 292 bp, Homo sapiens
  source 1..292: mol_type = other DNA
cactgtctctggtggctccatcagtagttactactggagttggatccggcagcccccagggaaggggctggagtggattgggtatatccataacagtgggagcaccaactacaacccctccctcaagagtcgagtcaccatatcagtagacaggtccaagaaccagttctccctgaagctgagttctgtgaccgctgcggacacggccgtgtattattgtgcggtggggggttcggggagaatgaattacttcgatctctggggccgtggctccagggtcactgtctcctca

SEQ ID NO: 10673 - DNA, 292 bp, Homo sapiens
  source 1..292: mol_type = other DNA
cactgtctctggtggctccatcagtagttactactggagttggatccggcagcccccagggaaggggctggagtggattgggtatatctattacagtgggagcaccaactacaacccctccctcaagagtcgagtcaccatatcagtagacacgtccaagaaccagttctccctgaagctgagttctgtgagcgctgcggacacggccgtatattattgtgcggtggggggttcggggagaatgaattacttcgatctctggggccgtggctccatggtcactgtcacctca

SEQ ID NO: 10674 - DNA, 292 bp, Homo sapiens
  source 1..292: mol_type = other DNA
cactgtctctggtggctccatccgtagttattactggagttggatccggcagcccccaaagaaggggctggagtggattgggtatatctattacgatgggagcatcaactacaacccctccctcaagagtcgagtcaccatatcactagacacgtccaagaaccagttctccctgaagctgagttctgtgatcgctgcggacacagccgtgtattattgtgcggtggggggttcggggagaatgaattacttcgatctctggggccgtggctccatggtcactgtctcctta

SEQ ID NO: 10675 - DNA, 292 bp, Homo sapiens
  source 1..292: mol_type = other DNA
cactgtctctggtggctccatcagtagttactactggagttggatccggcagcccccagggaaggggctggagtggattgggtatatctattacagtgggagcaccaactacaacccctccctcaagagtcgagtcaccatatcagtagacacgtccaagaaccagttctccctgaagctgagttctgtgaccgctgcggacacggccgtgcattattgtgcggtggggggttcggggagaatgaattacttcgatctctggggccgtggctccatggtcactgtctcctca

SEQ ID NO: 10676 - DNA, 292 bp, Homo sapiens
  source 1..292: mol_type = other DNA
cactgtctctggtggctccatccgtagttattactggagttggatgcggcagcccccagggaaggggctggagtggattgggtatatctattacgatgggagcactaactacaacccctccctcaagagtcgagtcaccatatcgctagacacgtccaagaaccagttctccctgaagctgagttctgtgatcgctgcggacacggccgtgtattattgtgcggtggggggttcggggagaatgaattacttcgatctctggggccgtggctccatggtcactgtctcctta

SEQ ID NO: 10677 - DNA, 292 bp, Homo sapiens
  source 1..292: mol_type = other DNA
cactgtctctggtggctccatcagtagttactactggagttggatccggcagcccccagggaaggggctggagtggattgggtatatctattacagtgggagtaccaactacaacccctccctcaagagtcgagtcaccatatcagtagacacgtccaagaaccagttctccctgaagctgagttctgtgaccgctgcggacacggccgtgtattattgtgcggtggggggttcggggagaatgaattacttcgatctctggggccgtggctccatggtcactgtctcctca

SEQ ID NO: 10678 - DNA, 292 bp, Homo sapiens
  source 1..292: mol_type = other DNA
cactgtctctggtggctccatcagtagttactactggagttggatccggcagcccccagggaaggggctggagtggattgggtatatctattacagtgggagcaccaactacaacccctccctcaagagtcgagtcaccatatcagtagacacgtccaagaaccagttctccctgaagctgacttctgtgaccgctgcggacacggccgtgtattattgtgcggtggggggttcggggagaatgaattacttcgatctttggggccgtggctccatggtcactgtctcctca

SEQ ID NO: 10679 - DNA, 292 bp, Homo sapiens; identical to SEQ ID NO: 10550
  source 1..292: mol_type = other DNA

SEQ ID NO: 10680 - DNA, 292 bp, Homo sapiens
  source 1..292: mol_type = other DNA
cactgtctctggtggctccatcagtagttactactggagttggatccggcagcccccagggaaggggctggagtggataggatatttccattacactgggagcaccaactacaacccctccctcaagagtcgggtcaccatatcagtagacacgtccaagaaccagttctccctgaagctgagttctgtgaccgctgcggacacggccgtgtattattgtgcggtggggggttcggggagaatgaattacttcgatctctggggccgtggctccatggtcactgtctcctca

SEQ ID NO: 10681 - DNA, 293 bp, Homo sapiens
  source 1..293: mol_type = other DNA
tcactgtctctggtggctccatcagtagttactactggagctggatccggcagcccccagggaaggggctggagtggattgggtatatcttttacagtgggagcaccaactacaacccctccctcaagagtcgagtcaccatgtcagtagacacgtccaagaaccagttctccctgaaactgagttctgtgaccgctgcggacacggccgtgtattattgtgcggtggggggttcggggagaatgaattacttcgatctctggggccgtggctccatggtcactgtctcctca

SEQ ID NO: 10682 - DNA, 292 bp, Homo sapiens
  source 1..292: mol_type = other DNA
cgctgtctctggtggctccatccgtagttattactggagttggatccggcagcccccagggaaggggctggagtggattgggtatatctattacgatgggagcaccaactacaacccctccctcaagagtcgagtcaccatatcactagacacgtccaagaaccagttctccctgaagctgagttctgtgatcgctgcggacacggccgtgtattattgtgcggtggggggttcggggagaatgaattacttcgatctctggggccgtggctccatggtcactgtctcctta

SEQ ID NO: 10683 - DNA, 292 bp, Homo sapiens
  source 1..292: mol_type = other DNA
cagtgtctctgggggctccatcagtacttactattggagttggatccggcagcccccagggaaggggctggagtggattgggtatgtccattacagtgggagcaccaactacaacccctccctcaagagtcgagtcaccatttcagtagacacgtccaagaagcagttctccctgaagctgagttctgtgaccgctgcggacacggccgtgtattattgtgcggtggggggttcggggagaatgaattacttcgatctctggggccgtggctccatggtcactgtctcctca

SEQ ID NO: 10684 - DNA, 292 bp, Homo sapiens
  source 1..292: mol_type = other DNA
cactgtctctggtggctccatcagtagttactactggagttggatccggcagcccccagggaaggggctggagtggattgggtatatccacaacagtgggagcaccaattacaacccctccctcaagagtcgagtcaccatatcagtagacatgtccaagaaccagttctccctgaagttgagttctgtgaccgctgcggacatggccgtgtattattgtgcggtggggggttcggggagaatgaattacttcgatctctggggccgtggctccatggtcactgtctcctca

SEQ ID NO: 10685 - DNA, 292 bp, Homo sapiens
  source 1..292: mol_type = other DNA
cactgtctctggtggctccatcagtagttactactggagttggatccggcagcccccagggaaggggctggagtggattgggtatatctattacagtgggagcaccaactacaacccctccctcaagagtcgagtcaccatgtcagtagacacgtccaagaaccagttctccctgaaactgagttctgtgaccgctgcggacacggccgtgtattattgtgcggtggggggttcggggagaatgaattacttcgatctctggggccgtggctccatggtcactgtctcctca

SEQ ID NO: 10686 - DNA, 292 bp, Homo sapiens
  source 1..292: mol_type = other DNA
cactgtctctggtggctccatcagtagttactactggagttggatccggcagcccccagggaaggggctggagtggattgggtatatccattacagtgggagcaccaactacaacccctccctcaagagtcgagtcaccatttcagtcgacacgtccaagaaccagttctccctgaggctgacttctgtgaccgctgcggacacggccgtgtattattgtgcggtggggggttcgggaagaatgaattacttcgatctctggggccgtggctccatggtcactgtctcctca

SEQ ID NO: 10687 - DNA, 292 bp, Homo sapiens
  source 1..292: mol_type = other DNA
cactgtctctggtggctccatcagtagttactactggagttggattcggcagcccccagggaaggggctggagtggattggttatatctattacagtgggagcaccaactacaacccctccctcaagagtcgagtcaccatatcactagacacgtccaagaaccagttctccctgaagctgacttctgtgaccgctgcggacacggccgtgtattattgtgcggtggggggttcggggagaatgaattacttcgatctctggggccgtggctccatggtcactgtctcctca

SEQ ID NO: 10688 - DNA, 292 bp, Homo sapiens
  source 1..292: mol_type = other DNA
cactgtctctggtggctccatcagtagttactactggagttggatccggcagcccccaggaaaggggctggagtggattgggtatatctattacagtgggagcaccaactacaacccctccctcaagagtcgagtcaccatatcagtagacacgtccaagaaccagttctccctgaagctgagttctgtgaccgctgcggacacggccgtgtattattgtgcggtggggggttcggggagaatgaattacttcgatctctggggccgtggctccatggtcactgtctcctca

SEQ ID NO: 10689 - DNA, 292 bp, Homo sapiens
  source 1..292: mol_type = other DNA
cactgtctctggtggctccatcagtagttactattggagttggatccggcagcccccagggaaggggctggagtggattgggtatatctattatagtgggagcaccaactacaacccctccctcaagagtcgagtcaccatggcagtagacacgtccaagaaccagttctccctgaagttgagttctgtgaccgctgcggacacggccgtgtattattgtgcggtggggggttcggggagaatgaattacttcgatctctggggccgtggctccatggtcactgtctcctca

SEQ ID NO: 10690 - DNA, 292 bp, Homo sapiens
  source 1..292: mol_type = other DNA
cactgtctctggtggctccatcagtaattactactggagttggatccggcagcccccagggaagggactggagtggattgggtttatctcttacagtgggagcaccaattataatccctccctcaagagtcgagtcaccatatcaatagacacgtccaagaaccagttctccctgaggctggcctctgtgagcgctgcggacacggccgtgtattattgtgcggtggggggttcggggagaatgaattacttcgatctctggggccgtggcatcctggtcactgtctcctca

SEQ ID NO: 10691 - DNA, 292 bp, Homo sapiens
  source 1..292: mol_type = other DNA
cactgtgtctggtggctccatcaacagttacttctggagttggatccggcagcccccagggaaaggactggagtggattggctatgtctcttacagtgggggcaccaactacaacccctccctcaagagtcgagtcaccatgtcagtagacacgtccaagaaccagttctccctgaagctgacttctgtgaccgctgcggacacggccctctattattgtgcggtggggggttcggggagaatgaattacttcgatctctggggccgtggcaccatggtcactgtctcctca

SEQ ID NO: 10692 - DNA, 292 bp, Homo sapiens
  source 1..292: mol_type = other DNA
cactgtctctggtggctccatcagtagttactactggagttggatccggcagcccccagggaaggggctggagtggattgggtatatctattacagtgggagcaccaactacaacccctccctcaagagtcgagtcaccatatcagtagacacgtccaagaaccagttctccctgaagctgagttctgtgaccgctgcggacacggccatatattattgtgcggtggggggttcggggagaatgaattacttcgatctctggggccgtggctccatggtcactgtctcctca

SEQ ID NO: 10693 - DNA, 292 bp, Homo sapiens
  source 1..292: mol_type = other DNA
cactgtctctggtggctccatcactagttactactggagttggatccggcagcccccagggaaggggctggagtggattgggtatatctcttacactgggagtaccaactacaacccctccatcaagagtcgcgtcactatgtcagttgacacgtccaagaaccagttctccctgaacctcagttctgtgaccgctgcggacgcggccgtatacttttgtgcggtggggggttcggggagaatgaattacttcgatctctggggccgtggctccatggtcacagtctcctca

SEQ ID NO: 10694 - DNA, 292 bp, Homo sapiens
  source 1..292: mol_type = other DNA
cagtgtctctggtggctccattagtagttactactggagttggattcggcagcccccagggaaggggctggagtggattgggtatatctattacagtgggagcaccaactacaacccctccctcaagagtcgagtcaccatatcagtagaaacgtccaagaaccagttctccctgaacctgagttctgtgaccgctgcggacacggccgtgtattattgtgcggtggggggttcggggagaatgaattacttcgatctctggggccgtggctccatggtcactgtctcctca

SEQ ID NO: 10695 - DNA, 292 bp, Homo sapiens
  source 1..292: mol_type = other DNA
cactgtctctggtggctccatcagtagttactactggagttgggtccggcagcccccagggagggggctggagtggattgggtatatccacaacagtgggagcaccaattgcaacccctccctcaagagtcgagtcaccatatcagtagacatgtccaagaaccagttctccctgaagctgagttctgtgaccgccgcggacacggccgtgtattattgtgcggtggggggttcggggagaatgaattactttgatctctggggccgtggctccatggtcactgtctcctca

SEQ ID NO: 10696 - DNA, 292 bp, Homo sapiens
  source 1..292: mol_type = other DNA
cactgtctcaggtggctccatcagtaattaccactggagttggatccggcagcccccagggaaggggctagagtggattggctacgttcatgacagtgggagcgccagctacaacccctccctcaagagccgagtcaccatatcaatagacacgtccaagaaccagttctccctgaagctgaattccttgaccgctgcggacacggccgtgtattactgtgcggtggggggttcggggagaatgaattacttcgatctctggggccgtggctccatggtcactgtctcctca

SEQ ID NO: 10697 - DNA, 292 bp, Homo sapiens
  source 1..292: mol_type = other DNA
cattgtctctggtggctccatcagtagttactactggagttggatccggcagcccccagggaaggggctggagtggattgggtatatctcttacagtgggagcaccaactccaacccctccctcaagagtcgagtcaccatatcactagacacgtccaagaaccagttctccctgaagctgagttctgtgaccgctgcggacacggccgtgtattattgtgcggtggggggttcggggagaatgaattacttcgatctctggggccgtggctccatggtcactgtctcctcg

SEQ ID NO: 10698 - DNA, 292 bp, Homo sapiens
  source 1..292: mol_type = other DNA
cactgtctctggtggctccatcagtagttactactggagttggatccggcagcccccacgaaaggggctggagtggattgggtatatctcttacactgggagcacctattataatccctccctcaagagccgagtcaccatgtcaatagacacgtccaagaaccagttctccctcaggctgagttctgtgaccgctgcggacacggccgtgtattattgtgcggtggggggttcggggagaatgaattacttcgatctctggggccgtggctccatggtcactgtctcctca

SEQ ID NO: 10699 - DNA, 292 bp, Homo sapiens
  source 1..292: mol_type = other DNA
cactgtctctggtggctccatcagtagttactactggagttggatccggcagcccccagggaaggggctggagtggattggatatatctattacagtgggagcaccaactacaacccctccctcaagagtcgagtcaccatatcaatagacacgtccaagaaccagttctccctgaagctgagttctgtgaccgctgcggacacggccgtgtattattgtgcggtggggggttcggggagaatgaattacttcgatctctggggccgtggctccatggtcactgtctcctca

SEQ ID NO: 10700 - DNA, 292 bp, Homo sapiens
  source 1..292: mol_type = other DNA
cactgtctctggtggctccatcaatagttactactggagttggatccggcagcccccagggaaggggctggagtggattgggtatatctattacagtgggagcaccaactacaacccctccctcaagagtcgagtcaccatatcagtagacacgtccaagaaccagttctccctgaagctgagttctgtgaccgctgcggacacggccgtgtattattgtgcggtggggggttcggggagaatgaattacttcgatctctggggccgtggctccatggtcactgtctcctca

SEQ ID NO: 10701 - DNA, 292 bp, Homo sapiens
  source 1..292: mol_type = other DNA
cactgtctctggtggctccatcagtagttactactggagttggatccggcagcccccagggaaggggctggagtggattgggtatatctattacagcgggagtaccaactacaatccctccctcaagagtcgagtcaccatttcagtagacacgtccaagaaccagttctccctgaagctgaattctgtgaccgctgcggacacggccgtgtattattgtgcggtggggggttcggggagaatgaattacttcgatctctggggccgtggctccatggtcactgtctcctca

SEQ ID NO: 10702 - DNA, 292 bp, Homo sapiens
  source 1..292: mol_type = other DNA
cactgtctctggtggctccatcagtagttactactggagttggatccggcagcccccagggaaggggctggagtggattgggtatatccatgacagtggcagtaccaactacagaccctccctgaagagccgagccaccatatcagcagacacgtccaagaaccagttctccctgaggctgagttttgtgaccgctgcagacacggccgtgtattattgtgcggtggggggttcggggagaatgaattacttcgatctctggggccgtggctccatggtcactgtctcctca

SEQ ID NO: 10703 - DNA, 292 bp, Homo sapiens
  source 1..292: mol_type = other DNA
cactgtctctggtggctccatcagcagttactactggagttggatccggcagcccccagggaaggggctggagtggattgggtatatccattacagtgggagcaccaactacaacccctccctcaagagtcgagtcaccatatcaatagacacgtccaagaaccagttctccctgaagctgagttctgtgaccgctgcggacacggccgtgtattattgtgcggtggggggctcggggagaatgaattacttcgatctgtggggccgtggctccatggtcactgtctcctca

SEQ ID NO: 10704 - DNA, 292 bp, Homo sapiens
  source 1..292: mol_type = other DNA
cactgtctctggtggctccatccgtagttattactggagttggatccggcagcccccagggaaggggctggagtggattgggtatatctattacgatgggagcaccaactacaacccctccctcaagagtcgagtcaccatatcactagacacgcccaagaaccagttctccctgaagctgagttctgtgatcgctgcggacacggccgtgtattattgtgcggtggggggttcggggagaatgaattacttcgatctctggggccgtggctccatggtcactgtctcctta

SEQ ID NO: 10705 - DNA, 292 bp, Homo sapiens; identical to SEQ ID NO: 10414
  source 1..292: mol_type = other DNA

SEQ ID NO: 10706 - DNA, 292 bp, Homo sapiens
  source 1..292: mol_type = other DNA
cactgtctctggtggctccatcagtaattactactggagttggatccggcagcccccagggaaggggctggagtggattgggtatatccattacagtgggagcaccaactacaacccctccctcaagagtcgagtcaccatatcaatagacaggtccaagaaccagttctccctgaagatgagttatgtgaccgctgcggacacggccgtgtattattgtgcggtggggggttcggggagaatgaattacttcgatctctggggccgtggctccatggtcactgtctcctca

SEQ ID NO: 10707 - DNA, 292 bp, Homo sapiens
  source 1..292: mol_type = other DNA
cactgtctctggtggctccatcagtacttactactggagttggatccggcagcccccagggaaggggctggagtggattgggtatatctattacagtgggagcaccaactacaacccctccctcaagagtcgagtcaccatatcagtagacacgtccaagaaccagttctccctgaagctgagttctgtgaccgctgcggacacggccgtgtattattgtgcggtggggggttcggggagaatgaattacttcgatctctggggccgtggctccatggtcactgtctcctca

SEQ ID NO: 10708 - DNA, 292 bp, Homo sapiens
  source 1..292: mol_type = other DNA
cactgtctctggtggctccatcagtagttactactggagttggatccggcagcccccggggaaggggctggagtggattgggtatatccattacagtgggagcaccaactacaacccctccctcaagagtcgagtcaccatgtcaatagacacgtccaagaaccagttctccctgaagctgagttctgtgaccgctgcggacacggccgtgtattattgtgcggtggggggttcggggagaatgaattacttcgatctctggggccgtggctccatggtcactgtctcctca

SEQ ID NO: 10709 - DNA, 292 bp, Homo sapiens; identical to SEQ ID NO: 10446
  source 1..292: mol_type = other DNA

SEQ ID NO: 10710 - DNA, 292 bp, Homo sapiens
  source 1..292: mol_type = other DNA
cactgtctctggtggctccatcagtagttactactggagttggatccggcagcccccagggaaggggctggagtggattgggtatatctattacagtgggagcaccaactacaacccctccctcaagagtcgagtcaccatgtcagtagacacgtccaagaaccagttctccctgaagctgagttctgtgaccgctgcggacacggccgtgtattattgtgcggtggggggttcggggagaatgaattacttcgatctctggggacgtggctccatggtcactgtctcctcg

SEQ ID NO: 10711 - DNA, 292 bp, Homo sapiens; identical to SEQ ID NO: 10649
  source 1..292: mol_type = other DNA

SEQ ID NO: 10712 - DNA, 292 bp, Homo sapiens
  source 1..292: mol_type = other DNA
cactgtctctggtggctccataagtagttactactggagttggatccggcagcccccagggaaggggctggagtggattgggtatatctattacagtggggacaccaactacaacccctccctcaagagtcgagtcaccatatcagtagacacgtccaagaaccagttctccctgaagctgagttctgtgaccgctgcggacacggccgtgtattattgtgcggtggggggttcggggagaatgaattacttcgatctctggggccgtggctccatggtcagtgtctcctca

SEQ ID NO: 10713 - DNA, 292 bp, Homo sapiens
  source 1..292: mol_type = other DNA
cagtgtctctggtggctccatccgtgattattactggagttggatccggcagcccccagggaaggggctggagtggattgggtatatctattacgatggcagcaccaactacaacccctccctcaagagtcgagtcaccatatcactagacacgtccaagaaccagttctccctgaaactgagttctgtgatcgctgcggacacggccgtgtattattgtgcggtggggggttcggggagaatgaattacttcgatctgtggggccgtggctccatggtcactgtcttctta

SEQ ID NO: 10714 - DNA, 292 bp, Homo sapiens
  source 1..292: mol_type = other DNA
cactgtctctggtggctccatcagtaattactactggagttggatccggcagcccccagggaaggggctggaatggattgggtatgtctattatagtggcagcaccaactacaacccctccctcaagagtcgagtcaccatatcagtagacacgtccaagaaccagttctccctgaagctgacttctgtgaccgctgcggacacggccgtctattactgtgcggtggggggctcggggagaatgaattacttcgatctctggggccgtggctccatggtcactgtctcctca

SEQ ID NO: 10715 - DNA, 292 bp, Homo sapiens
  source 1..292: mol_type = other DNA
cactgtctctggcggctccatcagtagttattactggagttggatccggcagcccccagggaaggggctggagtggattgggtatatccattacagtgggagcaccaattacaacccctccctcaagagtcgagtcaccatttcagtagatatgtccaagaaccagttctccctgaagctgagttctgtgaccgctgcggacacggccgtgtattattgtgcggtggggggttcggggagaatgaattacttcgatctctggggccgtggctccatggtcactgtctcctca

SEQ ID NO: 10716 - DNA, 292 bp, Homo sapiens; identical to SEQ ID NO: 10536
  source 1..292: mol_type = other DNA

SEQ ID NO: 10717 - DNA, 292 bp, Homo sapiens
  source 1..292: mol_type = other DNA
cactgtctctggtgcctccatcagtagttactactggagctggatccggcagcccccagggaaggggctgcagtggattggctatatttattccaatggagacaccaactacaacccctccctcaagagtcgagccaccatatcagttgacacgtccaagaaccagttctccctgaagttgagttctgtgacctctgacgacacggccatgtattattgtgcggtggggggctcggggagaatgaattacttcgatctctggggccgtggctccatggtcactgtctcctca

SEQ ID NO: 10718 - DNA, 292 bp, Homo sapiens
  source 1..292: mol_type = other DNA
cactgtctctggtggctccatcagtagttactactggagttggatccggcagcccccagggaaggggctggagtggattggatatatctattacagtgggagcaccaactacaacccctccctcaagagtcgagtcaccatatcagtagacacgtccaagaaccagttctccctgaagctgacttctgtgaccgctgcggacacggccgtgtattattgtgcggtggggggttcggggagaatgaattacttcgatctctggggccgtggctccatggtcactgtctcctca

SEQ ID NO: 10719 - DNA, 292 bp, Homo sapiens
  source 1..292: mol_type = other DNA
cactgtctctggtggctccatccgtagttattactggagttggatccggcagcccccagggaaggggctggagtggattgggtatatctattacgatgggagcaccaactacaacccctccctcaagagtcgagtcaccatatcagtagacacgtccaagaaccagttctccctgaagctgagttctgtgatcgctgcggacacggccgtgtattattgtgcggtggggggttcggggagaatgaattacttcgatctctggggccgtggctccatggtcactgtctcctta

SEQ ID NO: 10720 - DNA, 292 bp, Homo sapiens
  source 1..292: mol_type = other DNA
cactgtctctggtggctccatcaggagttactactggacttggatccggcagcccccagggaaggggctggagtggattgggtatatctattacagtgggagcaccaactgcaacccctccttcaagagtcgagtcaccatatcagtagacacgtccaagaaccagttctccctgaagctgagttctgtgaccgctgcggacacggccgtgtattattgtgcggtggggggttcggggagaatgaattacttcgatctctggggccgtggctccatggtcactgtctcctca

SEQ ID NO: 10721 - DNA, 292 bp, Homo sapiens
  source 1..292: mol_type = other DNA
cactgtctctggtggctccatcagttcttactactggagttggatccggcagtccccacgaaagggcctagagtggattgggtatatccattacagtgggagcaccaactacaaccctacccttaagagtcgactctccatatcaatagacacgtccaagaaccagttctccctgaaactaatttctgtgaccgctgcggacacggccgtgtattactgtgcggtggggggttcggggagaatgaattacttcgatctctggggccgtggctccatggttactgtctcctca

SEQ ID NO: 10722 - DNA, 292 bp, Homo sapiens
  source 1..292: mol_type = other DNA
cactgtctctggtggctccatcagtagttactactggagttggatccggcagcccccagggaaggggctggagtggattgggtatatccattacagtgggggcaccaactacaacccctccctcaagagtcgagtcaccatatcagtagacacgtccaagaagcagttctccctgaagctgagctctgtgaccactgcggacacggccgtgtatttttgtgcggtggggggttcggggagaatgaattacttcgatctctggggccgtggctccatggtcactgtctcctca

SEQ ID NO: 10723 - DNA, 292 bp, Homo sapiens
  source 1..292: mol_type = other DNA
cactgtctctggtggctccatccgtagttattactggagttggatccggcagcccccagggaaggggctggagtggattgggtatatctattacgatgggagcaccaactacaacccctccctcaagagtcgagtcaccatatcactagacacatccaagaaccagttctccctgaagctgagttctgtgatcgctgcggacacggccgtgtattattgtgcggtggggggttcggggagaatgaattacttcgatctctggggccgtggctccatggtcactgtctcctta

SEQ ID NO: 10724 - DNA, 295 bp, Homo sapiens
  source 1..295: mol_type = other DNA
tgtagtctctggattcaccttcagtaactatatcatgaactgggtccgccaggctccagggaaggggctggagtgggtttcatacatcagtactagtggaaataccatagactacgcagactctgtgaagggccgattcaccatctccagagacaacgccaagaactcactctatctgcaaatgaacagcctgagagccgaggacacggctgtgtattactgtgcgagaggacgtggatacagctatggttactccgactactggggccagggaaccctggtcaccgtctcctca

SEQ ID NO: 10725 - DNA, 295 bp, Homo sapiens
  source 1..295: mol_type = other DNA
tgtagtctctggattcaccttcagtaactatatcatgaactgggtccgccaggctccagggaagggactggagtgggtttcatacatcagtactagtggaaataccatagactacgcagactctgtgaagggccgattcaccatctccagagacaacgccaagaactcactctatctgcaaatgaacagcctgagagccgaggacacggctgtgtattactgtgcgagaggacgtggatacagctatggttactccgactactggggccagggaaccctggtcaccgtctcctca

SEQ ID NO: 10726 - DNA, 295 bp, Homo sapiens
  source 1..295: mol_type = other DNA
tgcagcctctggattcaccttcagtggctacagtatgaactgggtccgccaggctccagggaaggggctggagtgggtttcatacattagtagtagtggtaataccctagactacgcagactctgtgaagggccgattcaccatctccagagacaatgccaagaactccctatatctgcaaatgaacagcctgagagacgacgacacggctgtgtattactgtgcgagaggccgtggatacagttatggctactctgactactggagccagggaaccctggtcaccgtctcctca

SEQ ID NO: 10727 - DNA, 295 bp, Homo sapiens
  source 1..295: mol_type = other DNA
tgcagcctctggattcactttcagtggctatagcatgaactgggtccgccaggctccagggaaggggctgcagtggatttcatatattagtactagtggtaataccatagactacgcagactctgtgaagggccgattcaccatctccagagacaatgccaagaactccctgtatctgcaaatgagcagcctgagagacgaggacacggctgtgtattactgtgcgagagggcgtggatacagctatggctactctgactactggagccagggaaccctggtcatcgtctcctca

SEQ ID NO: 10728 - DNA, 295 bp, Homo sapiens
  source 1..295: mol_type = other DNA
tgcagcctctggattcactttcagtggctatagcatgaactgggtccgccaggctccagggaaggggctggagtgggtttcatacattagtactagtggtaataccatggactacgcagactctgtgaagggccgattcaccatctccagagacaatgccaagaactccctgtatctgcaaatgagcagcctgagagacgaggactcggctgtgtattactgtgcgagaggccgtggatacagctatggctactctgactactggagccagggaaccctggtcatcgtctcctca

SEQ ID NO: 10729 - DNA, 280 bp, Homo sapiens
  source 1..280: mol_type = other DNA
tgcagcctctggatttgactttagtacttatggcatgaagtgggtccgccaggctccagggaaggggctggagtggatttcagacattaacggtagtggtagtgacaaaaactacgcagactctgtgaagggccgattcaccatctccagagacaatgccaagaactcactgtatctgcaaatgaacagcctgagagacgaggacacggctgtatattactgtgcgagaggcacgaaccttgactactggggccagggaatcctggtcaccgtctcctca

SEQ ID NO: 10730 - DNA, 280 bp, Homo sapiens
  source 1..280: mol_type = other DNA
tgcagcctctggatttgactttagtacttatggcatgaagtgggtccgccaggctccagggaaggggctggagtggttttcagacattaacggtagtggtagtgacaaaaactacgcagactctgtgaagggccgattcaccatctccagagacaatgccaagaactcactgtatctgcaaatgaacagcctgagagacgaggacacggctgtatattactgtgcgagaggcacgaaccttgactactggggccagggaatcctggtcaccgtctcctca

SEQ ID NO: 10731 - DNA, 280 bp, Homo sapiens
  source 1..280: mol_type = other DNA
tgcagcctctggatttgactttagtacttatggcatgaagtgggtccgccaggctccagggaaggggctggagtggatttcagacattaacggtagtggtagtgacaaaaactacgcagactctgtgaagggccgattcaccatctccagagacaatgccaagaactcactgtatctgcaaatgaacagcctgagagacgaggacacgactgtatattactgtgcgagaggcacgaaccttgactactggggccagggaatcctggtcaccgtctcctca

SEQ ID NO: 10732 - DNA, 280 bp, Homo sapiens
  source 1..280: mol_type = other DNA
tgcagcctctagattcaccttcagtacctataccatgaactgggtccgccaggctccggggaaggggctggagtgggtttcatacattagtaggcgtaataataccacatactacgcagactctgtgaagggccgattcaccatctccagagacaatgccaagaactcactgtatctgcaaatgaacagcctgagagacgaggacacggctgtgtattactgtgcgagaggcactaatcttgactactggggccagggaaccctggtcaccgtctcctca

SEQ ID NO: 10733 - DNA, 292 bp, Homo sapiens
  source 1..292: mol_type = other DNA
tgcagcctctggattcacctttagcgactatgccatgagctgggtccgccaggctccagggaaggggctggagtggatctcaattattactggtagtggtagtagtacattccacgtagactccgtgaagggccggttcaccatctccagagacccttccaagaacacagtatatctgcaaatgaacagcctgagagccgaggacacggccatatattactgtgcgaaaactggtgggagtcactgggggtttgactgttggggccagggaaccctggtcaccgtctcctca

SEQ ID NO: 10734 - DNA, 292 bp, Homo sapiens
  source 1..292: mol_type = other DNA
tgcagcctctggattcacctttagggactatgccatgagctgggtccgccaggctccagggaaggggctggagtgggtctcaattattactggtgacggtggtagcacagactacgcagactccgtgaagggccggttcaccatctccagagacaattccaagaacacggtgcagctgcaaatgaacagcctgagagccgaggacacggccgtatattactgtgcgaaaaccggagggagccactggggctttgactgctggggccagggaaccctggtcaccgtctcctca

SEQ ID NO: 10735 - DNA, 292 bp, Homo sapiens
  source 1..292: mol_type = other DNA
tacagcctctggattcacctttagggactatgccatgagctgggtccgccaggctccagggaaggggctggagtgggtctcaattattactggtgacggtggtagcacagactacgcagactccgtgaagggccggttcaccatctccagagacaattccaagaacacggtgcagctgcaaatgaacagcctgagagccgaggacacggccgtatattactgtgcgaaaaccggagggagccactggggctttgactgctggggccagggaaccctggtcaccgtctcctca

SEQ ID NO: 10736 - DNA, 292 bp, Homo sapiens
  source 1..292: mol_type = other DNA
tgcagcctctggattcacctttagggactatgccatgagctgggtccgccaggctccagggaaggggctggagtgggtctcaattattactggtgacggtggtagcacagactacgcagactccgtgaagggccggttcaccatctccagagacaattccaagaacacggtgcagctgcaaatgaacagcctgagagccgaggacacggccgtatattactgtgcgaaaaccggggggagccactggggctttgactgctggggccagggaaccctggtcaccgtctcctca

SEQ ID NO: 10737 - DNA, 295 bp, Homo sapiens
  source 1..295: mol_type = other DNA
cgcagcctctggattcaccttcagtagcaactggatgcactgggtccgccaagctccagggaaggggctggtgtgggtctcacatactaatagtgatgggagtaccacaacctacgcggactccgtgaagggccgattcaccatctccagagacaacgccaagaacacgctgtatctgcaaatgaacagtctgagagtcgaggacacggctgtgtattactgtgcaagaggaggttgtagcagtaccagctgccttgaccactggggccagggaaccctggtcaccgtctcctca

SEQ ID NO: 10738 - DNA, 295 bp, Homo sapiens
  source 1..295: mol_type = other DNA
tgcagcctctggattcaccttcaggagctactggatgcactgggtccgccaagttccagggaaggggctggtgtgggtctcacgtattactagtgatgggagtgtcacaacctacacggactccgtgaagggccgattcaccatctccagagacaacgccaagaacacgctggatctgcaaatgaacagtctaagagccgaggactcggctgtctattactgcgcaagaggtggttgcagtagtaccagttgccttgaccactggggccagggagccctggtcaccgtctcctct

SEQ ID NO: 10739 - DNA, 274 bp, Homo sapiens
  source 1..274: mol_type = other DNA
tgcagcctctggattcagcctcagcacgtatgccatgaactggttccgccaggctccagggaaggggccggagtggctttcatatattagtaggactagtgataccatatactacgcagattctgtgaagggccgattcaccatctccagagacaacgccaagaactcactgtacctgcaaatgaacagcctgagagtcgaggacacggctgtatattactgttcgagagaggccgcaccgtggggccagggaaccctggtcaccgtctcctca

SEQ ID NO: 10740 - DNA, 274 bp, Homo sapiens
  source 1..274: mol_type = other DNA
tgcagcctctggattcaccttcactacctatgccatgaactgggtccgccaggctccagggaagggactggaatgggtttcatacattagtagtgatagtattaccatatactacgcagactccgtaaagggccgattcaccatctccagagacaacgccaagaactcactgtatctgcaaatgaccagcctgagagtcgaggacacggctgtctattactgttcgagagaggcggctccgtggggccagggaaccctggtcaccgtctcctca

SEQ ID NO: 10741 - DNA, 274 bp, Homo sapiens
  source 1..274: mol_type = other DNA
tgcagcctctggattcacattcagtagctatgccttgaactggttccgccggtgtccagggaaggggctggagtgggtttcatacattagtagtagtagtactaccatatactacgcagattctgtgaagggccgattcaccgtctccagagacaacgccaagaactcactgtatctgcaaatgaacagcctgagagccgaggacacggctgtttattattgttcgagagaggcggctccgtggggccagggaaccctggtcaccgtctcctca

SEQ ID NO: 10742 - DNA, 283 bp, Homo sapiens
  source 1..283: mol_type = other DNA
tacagcttctggattcacctttggtgattctgctatgagctggttccgccaggctccagggaaggggctggaatgggtaggtttcactagagccaaggctcatggtggggcaacggaatacgccgcgtctgtgaaaggcagattcaccatctcaagagacgattccaaaagcatcgcctatctacaaatgaacagcctgaaaaccgaggacacagccgtgtattactgtacaaaaggggcctttgactactggggccagggaaccctggtcaccgtctcctca

SEQ ID NO: 10743 - DNA, 283 bp, Homo sapiens
  source 1..283: mol_type = other DNA
tacaggttctggattcacctttggtgaatctgctatgagctggttccgccaggctccagggaaggggctggaatgggtaggtttcactagagccaaggctcatggtggggcaacggaatacgccgcgtctgtgaaaggcagattcataatctcaagagatgattccaaaagcatcgcctatctgcaaatgaacagcctgaaaaccgaggacacagccgtctattattgtacaaaaggggcctttgactactggggccagggaaccctggtcaccgtctcctcc

SEQ ID NO: 10744 - DNA, 283 bp, Homo sapiens
  source 1..283: mol_type = other DNA
tacagcttctggattcacctttggtgataatggtatgagctggttccgccaggctccagggaaggggctggagtgggtaggtttcattagaagcaaagctgatggtgggacaatagaatacgccgcgtctgtgaaaggcagattcaccatctcaagagatgattccaaaagcatcgcctatctgcaaatgaacagcctgaaaaccgaggacacagccgtgtattactgtacaaaaggggcctttgactactggggccagggaaccctggtcaccgtctcctca

SEQ ID NO: 10745 - DNA, 283 bp, Homo sapiens
  source 1..283: mol_type = other DNA
tacaggttctggattcacctttggtgagtctgctatgagctggttccgccaggcgccagggaaggggctggaatgggtaggtttcactagagccaaggctcatggtggggcaacggaatacgccgcgtctgtgcaaggcagattcaccatttcaagagatgattccaaaagcatcgcctatctgcaaatgaacagcctgaaaaccgaggacacagccgtatattactgtacaaaaggggcctttgactactggggccagggaaccctggtcaccgtctcctca

SEQ ID NO: 10746 - DNA, 283 bp, Homo sapiens
  source 1..283: mol_type = other DNA
tacagcttctggattcacctttggtgattctgctgtgagctggttccgccaggctccagggaaggggctggaatgggtaggtttcactagagccaaggctcatggtggggcaacggaatacgccgcgtctgtgaaaggcagattcaccatctcaagagatgattccaaaagcatcgcctatctgcaattgaacagcctgaaaaccgaggacacagccgtgtattactgtacaaaaggggcctttgactactggggccagggaaccctggtcaccgtctcctca

SEQ ID NO: 10747 - DNA, 283 bp, Homo sapiens
  source 1..283: mol_type = other DNA
taaagcttctggattcacctttggtgatcatggtatgagctggttccgccaggctccagggaaggggctggagtgggtaggtttcattagaagcaaagctgatggtgagacaacgcaatacgccgcgtctgtgaacggcagattcaccatctcaagagatgattccaaaagcatcgcctatctgcaaatgaacagcctgaaaaccgaggacacagccgtgtattactgtacaaaaggggcctttgactactggggccagggaaccctggtcaccgtctcctca

SEQ ID NO: 10748 - DNA, 283 bp, Homo sapiens
  source 1..283: mol_type = other DNA
tacagcttctggattcacctttggtgattatggtatgagctggttccgccaggctccagggaaggggctggagtggataggtttcattagaagcaaacctgatggtgggacaacagagtacgccgcgtctgtgagaggcagattcaccatctcaagagatgatgctaaaagcatctcctatctgcaaatgaacagcctgaaaaccgaggacacaggcatttattactgtactaaaggggcctttgactactggggccagggaaccctggtcaccgtctcctca

SEQ ID NO: 10749 - DNA, 299 bp, Homo sapiens
  source 1..299: mol_type = other DNA
ccatctccggggacagtgtctctagcaacagtggtggttggaactggatcaggcagtccccatcgagaggcctagagtggctgggaaggacatattacaagtccaagacgtggtataatgattacgcagtgtctgtgagaagtcgcataaccatcaacccagacacatccacgaaccggttctcccttgagttgaactctgtgactcccgaggacacgggtgtgtattactgcggaagaggttggttacaaaccggcattgactcctggggccagggaagcctggtcaccgtctcgtca

SEQ ID NO: 10750 - DNA, 297 bp, Homo sapiens
  source 1..297: mol_type = other DNA
accatctccggggacagtgtctctaccgacagtggtggttggaactggatcaggcagtccccatcgagaggccttgagtggctgggaaggacatacttccagtccaagtggattaatgattatgcagtttccatgagaagtcgaataaccatcaaggcagacacatccaagaaccagttttccctgcaagtgaattctgtgactcccgacgacacggctatatattactgtggaagagggtggctgcaaactggaattgactcttggggccagggaaccctggtcaccgtctcctca

SEQ ID NO: 10751 - DNA, 296 bp, Homo sapiens
  source 1..296: mol_type = other DNA
ccatctccggggacagtgtctctaccgacagtggtggttggaactggatcaggcagtccccatcgagaggccttgagtggctgggaaggacatacttccagtccaagtggattaatgattatgcagtttccatgagaagtcgaataaccatcaaggcagacacatccaagaaccagttttccctgcaagtgaattctgtgactcccgacgacacggctatatattactgtggaagagggtggctgcaaactggaattgactcttggggccagggaaccctggtcaccgtctcctca

SEQ ID NO: 10752 - DNA, 298 bp, Homo sapiens
  source 1..298: mol_type = other DNA
tgcagcctctggattcacctttagcacttatgccatgaactgggtccgccaggcaccagggaaggggcttgagtgggtctcaactattgatggtcctactgctggtacatggtacgcagactccgtgaagggccggttcaccatctccagagacaattccaagaacactctgtatctgcacatgaacagcctgagagccgaggacacggccgcatattactgtgcgaaagtcgactatagcaactcgcggggctactttgactactggggccagggaaccctggtcaccgtctcctca

SEQ ID NO: 10753 - DNA, 298 bp, Homo sapiens
  source 1..298: mol_type = other DNA
tgcagcctctggattcacctttagcacttatgccatgaactgggtccgccaggcaccagggaaggggcttgagtgggtctcaactattgatggtcctactgctggtacatggtacgcagactccgtgaagggccggttcaccatctccagagacaattccaagaacactctgtatctgcagatgaacagcctgagagccgaggacacggccgaatattactgtgcgaaagtcgactatagcaactcgcggggctactttgactactggggccagggaaccctggtcaccgtctcctca

SEQ ID NO: 10754 - DNA, 298 bp, Homo sapiens
  source 1..298: mol_type = other DNA
tgcaggctctggattcacatttggcgactatgccatgaactgggtccgccaggctccagggaaggggctggagtgggtctcaactataaattacagtggttctggcacatactatgatgactccgtgaggggccggttcaccatttccagagacaattccaggaacacactgtatctgcaaatggacagcctgagagtcgaggacacggccgtatattactgtgcgaaagtcgactatagtaacagccggggttactttgactactggggccagggaaccctggtcaccgtctcctca

SEQ ID NO: 10755 - DNA, 277 bp, Homo sapiens
  source 1..277: mol_type = other DNA
agcttctggttacaccttcaccaactacggcattagctgggtgcgacaggcccctggacaagggcttgagtgcatgggatggatcagcccttacaatggcaacacagactatgcacagaagttccagggcagagtcaccatgaccacagacacatccacgaacacagcctacttggagctgaggagcctgacatctgacgacacggccatgtattactgtgcgagagatcgtcagggctcgttctggggccagggaaccctggtcaccgtctcctca

SEQ ID NO: 10756 - DNA, 276 bp, Homo sapiens
  source 1..276: mol_type = other DNA
gcttctgggtacatatttagccactatggtatgacctgggtgcgccaggcccctggacaaggccttgagtggatgggatggatcaacattaacaatgcaaaaacaaactttgcacagaagttccagggcagactcaccatgaccacagacacatccacgggcacagtctacatggagctgaggaggctgacatctgacgacacggccgtctattactgtgcgagagatcggcagggatccttctggggccagggaaccctcgtcaccgtctcctca

SEQ ID NO: 10757 - DNA, 295 bp, Homo sapiens
  source 1..295: mol_type = other DNA
tgtaggctctggattcaccttcagtggctatagcatgaactgggtccgccaagccccagggaaggggctggagtgggtttcatacattagtagtagtagtactagtaccatacattacgcagactctgtgaagggccgattcaccatctccagagacaacgccaagaactcagtgtatctgcaaatgaacagcctgagagccgacgacacgtctgtttattactgtgcgaggactatggttcgggggtggggtatggacgtctggggccaagggaccacggtcaccgtctcctca

SEQ ID NO: 10758 - DNA, 292 bp, Homo sapiens
  source 1..292: mol_type = other DNA
tgcagcctctggactcggcttcagtggctatagcatgaactgggtccgccaggctccagggaaggggctggagtggatttcatacattactactaccagtgctaccatatactacgcagactctgtgcagggccgattcaccatctccagagacaatgccaagaactcactgtatgtacaaatgaacagcctgagagacgatgacacggctgtgtattactgtgcgagaactatggttcggggatggggtatggacgtctggggccaagggaccacggtcaccgtctcctca

SEQ ID NO: 10759 - DNA, 292 bp, Homo sapiens
  source 1..292: mol_type = other DNA
cgcagtctctggatttaccgtcagtggctactggatgcactgggtccgccaagctccagggaaggggctggtgttcgtctcacgtattaatgatgatgggacctacacaaactacgcggactccattaagggccgattcaccatctccagagacaacgccaagaacacgctgtttctgcaaatgaacagtcttagagccgaggacacggctgtatattactgtgtaagaggcaccagcgactggagggggattgactactggggccagggaaccctggtcaccgtctcctca

SEQ ID NO: 10760 - DNA, 292 bp, Homo sapiens
  source 1..292: mol_type = other DNA
tgaagcctctggattcaccttcagtcattactggatgcactgggtccgccaaggtccagggaaggggctggtgtgggtctcacgtattagtgatgatagacacacaatagactacgcggactccgtgaagggccgattcaccatctccagagacgacgccaagaacacactgtatctgcaaatgaatagtctgagagacgaagacacggctttatattattgtgtcagaggaacaagtgactggagggggattgactactggggccagggaaccctggtcaccgtctcctca

SEQ ID NO: 10761 - DNA, 293 bp, Homo sapiens
  source 1..293: mol_type = other DNA
ttgaagcctctggattcaccttcagtcattactggatgcactgggtccgccaaggtccagggaaggggctggtgtgggtctcacgtattagtgatgatagacacacaatagactacgcggactccgtgaagggccgattcaccatctccagagacgacgccaagaacacactgtatctgcaaatgaatagtctgagagacgaagacacggctttatattattgtgtcagaggaacaagtgactggagggggattgactactggggccagggaaccctggtcaccgtctcctca

SEQ ID NO: 10762 - DNA, 292 bp, Homo sapiens
  source 1..292: mol_type = other DNA
tgaagcctctggattcacctccagtcattactggatgcactgggtccgccaaggtccagggaaggggctggtgtgggtctcacgtattagtgatgatagacacacaatagactacgcggactccgtgaagggccgattcaccatctccagagacgacgccaagaacacactgtatctgcaaatgaatagtctgagagacgaagacacggctttatattattgtgtcagaggaacaagtgactggagggggattgactactggggccagggaaccctggtcaccgtctcctca

SEQ ID NO: 10763 - DNA, 291 bp, Homo sapiens
  source 1..291: mol_type = other DNA
tgaagcctctggattcaccttcagtcattactggatgcactgggtccgccaaggtccagggaaggggctggtgtgggtctcacgtattagtgatgatagacacacaatagactacgcggactccgtgaagggccgattcaccatctccagagacgacgccaagaacacactgtatctgcaaatgaatagtctgagagacgaagacacggctttatattattgtgtcagaggaacaagtgactggagggggattgactactggggccaggaaccctggtcaccgtctcctca

SEQ ID NO: 10764 - DNA, 293 bp, Homo sapiens
  source 1..293: mol_type = other DNA
ccatctccggggacagtgtctctgccgacattggttggaactggatcaggcagtccccatcgagaggccttgagttgctgggaaggacatactaccagtccaaatggattactgattatgcagtctctgtgaaaggtcgaataaccatcgacgcagacacgtccaagaaccagttctccctgcagttgaactctgtgaatcccgaagacacggctgtgtatttctgtgcaagaggttggctgaggacggggtttgacccctggggccagggaaccctggtcaccgtctcctca

SEQ ID NO: 10765 - DNA, 296 bp, Homo sapiens
  source 1..296: mol_type = other DNA
ccatctccggggacagtgtctctagcaacagtgctgcttggaactggatcaggcagtccccatcgagaggccttgagtggctgggaaggacatactatatgtccaagtggtataatgattatgcagtatctgtgaaaagtcgaataaccatcaacccagacgcatccaagaaccagttttccctgcagctgaactctgtgactcccgaggacacggctgtgtattattgtgcaagagggtggcttcgtaccgggttcgacccctggggccagggaaccctggtcaccgtctcctca

SEQ ID NO: 10766 - DNA, 289 bp, Homo sapiens
  source 1..289: mol_type = other DNA
tgcagcctctggattcacctttagtaacttttggatgagctgggtccgccaggctccagggaaggggctggagtgggtggccaacataggcgaagatggaagtgagacatactatgtggactctgtgaagggccgattcaccatgtccagagacaacgccaggaagtcactgtatctgcaaatgaacagcctgagagccgaggacacggccgtgtattactgtgcgagagcgtcttcccctggaactactgactactggggccggggaaccctggtcaccgtctcctca

SEQ ID NO: 10767 - DNA, 289 bp, Homo sapiens; identical to SEQ ID NO: 10766
  source 1..289: mol_type = other DNA

SEQ ID NO: 10768 - DNA, 289 bp, Homo sapiens
  source 1..289: mol_type = other DNA
tgaagcctctggattcccctttagttactattggatgagctgggtccgccaggctccagggcaggggctggaatgggtggccaacataaaggaagatggaagtgagaaatactatgtggactctgtgaagggccgattcaccatctccagagacaacgccaagaactcactgtatttggaagtgaacagcctgagccccgaggacacggccgtatattactgtgcgagagcgtcttcacctggaaccactgactactggggccagggaaccctggtcaccgtttcctca

SEQ ID NO: 10769 - DNA, 301 bp, Homo sapiens
  source 1..301: mol_type = other DNA
tacagcctctggattcaccctcactaactactggatgcactgggtccgccaagctccagggaaggggctggtgtgggtctcacgtgttaatagagatgggactgacacaaactacgcggactccgtgaagggccgattcaccatctccagagacaacgccaagaacacgctgtatctgcaaatgaacagtctgagagccgaggacacggctgtgtattactgtgcaagagatgagggagtggctacgactctgagggggtttgactactggggccagggaaccctggtcagcgtctcctca

SEQ ID NO: 10770 - DNA, 301 bp, Homo sapiens
  source 1..301: mol_type = other DNA
tgcagccactggattcgccctaagggactactggatgcactgggtccgccaagtcccagggaagggactggtatgggtctcacgtattaatggcgacgggagtaacataaactacgcggagtccgtgaagggccgattcaccatctccagagacaacgacaagaacacgctgtatctactaatgaaccctctgagagccgaggacacggctgtgtattattgtgcaagagatgagggagtggcaactaccctccggggatttgactactggggccggggaaccctggtcaccgtctcctca

SEQ ID NO: 10771 - DNA, 298 bp, Homo sapiens
  source 1..298: mol_type = other DNA
tgcagcctctggattcacctttagcaactatgccttgagctgggtccgccaggctccagggaaggggctggagtgggtctcgggtattagtggtagtggtggtagcacatactacgcagactccgtgaagggccggttcaccatctccagagacaattccaagaacacgctgtatctgcaaatgaacagcctgagagccgaggacacggccgtatattactgtgcgaaagttgtggtggtgactgtatattggtacttcgatctctggggccgtggcaccctggtcactgtctcctca

SEQ ID NO: 10772 - DNA, 298 bp, Homo sapiens
  source 1..298: mol_type = other DNA
tgcagcctctggattcacctttagcaactatgccatgagctgggtccgccaggctccagggaaggggctggagtgggtctcaggtattagtggtagtggtggaggcacatactacgcagactccgtgaagggccggttcaccatctccagggacaattccaagggcacactttatctgcaaatgaacagcctgagagccgaggacacggccgtatattactgtgcgaaagttgtggtggtgaccgtctactggtacttcgatctctggggccgtggcaccctggtcactgtctcctca

SEQ ID NO: 10773 - DNA, 298 bp, Homo sapiens
  source 1..298: mol_type = other DNA
tgcagcctctggattcacctttagtaactatgccatgagctgggtccgccaggctccagggaaggggctggagtgggtctcaggtattagtggtagtggtggtagcacatactacgcagactccgtgaagggccggttcaccatctccagagacaattcgaagaacacgctgtatctgcaaatgaacagcctgagagccgaggacacggccgtatattactgtgcgaaagtcgtggtggtgactgtctactggtacttcgatctctggggccgtggcaccctggtcactgtctcctca

SEQ ID NO: 10774 - DNA, 298 bp, Homo sapiens
  source 1..298: mol_type = other DNA
tgcagcctctggattcacctttagcaactatcccatgagctgggtccgccaggctccagggaaggggctggagtgggtctcaggtattagtggtagtggtggtagcacatactacgcagactccgtgaagggccgcttcaccatctccagagacaactccaagaatacggtgtatctgcaaatgaaaagcctgagagccgaggacacggccgtatattactgtgcgaaagtcgtggtggtgactgtctactggtacttcgatctctggggccgtggcaccctggtcactgtctcctca

SEQ ID NO: 10775 - DNA, 283 bp, Homo sapiens
  source 1..283: mol_type = other DNA
tgcagcctctggattcacctttagcacctatggcatgagctgggtccgccaggctccagggaaggggctggagtgggtctcaggtattgttggcagtagtggtagcacatactacgcagactccgtgaagggccggttcaccatctccagagacaattccaagaacacgctgtatctgcaaatgaacagcctgagagccgaggacacggccgtatattcctgtgcgaggggggctaccggtttggacgtctggggccaagggaccacggtcaccgtctcctca

SEQ ID NO: 10776 - DNA, 283 bp, Homo sapiens
  source 1..283: mol_type = other DNA
tgtagcctctggattcacctttaccaactatggcatgacctgggtccgccaggctccagggaaggggctggagtgggtctcaggtattggtgctggtggtggtagcacatactacgcagactccgtgaagggccgcctcaccatctccagagacaattccaagaacacactgtttctgcacatgagcagcctgagagccgaggacacggccgtatatttctgtgcgagaggtgccaccggtctggacgtctggggccaagggaccacggtcaccgtcttctca

SEQ ID NO: 10777 - DNA, 301 bp, Homo sapiens
  source 1..301: mol_type = other DNA
tgcagcctctggattcacctttgatgattatgccatgcactgggtccgccaggctccaggcaagggactggagtgggtggcagttatttggtctgatggaagtagtaaatactatggagactccgtaaagggccgattcagcatctccagagacaattccaagaacacactgtatctgcagatgagcagcctgagagccgacgacacggctgtgtattattgtgcgagagattttttgggtgagattccgcgctggtacttcgatttctggggccgtggcactgtggtcactgtctcctca

SEQ ID NO: 10778 - DNA, 301 bp, Homo sapiens
  source 1..301: mol_type = other DNA
ttcagcatctggattcatcttcagtagttatggcatgcactgggtccgccaggctccaggcaagggactggagtgggtggcagttatttggtctgatggaagtagtaaatactatggagactccgtaaagggccgattcagcatctccagagacaattccaagaacacactgtatctgcagatgagcagcctgagagccgacgacacggctgtgtattattgtgcgagagattttttgggtgagattccgcgctggtacttcgatttctggggccgtggcactgtggtcactgtctcctca

SEQ ID NO: 10779 - DNA, 301 bp, Homo sapiens
  source 1..301: mol_type = other DNA
tacagcatctggattcatcttcagtagttatggcatgcactgggtccgccaggctccaggcaaggggctggagtgggtggcagttatttggtctgatggaagtagtaaatactatggagactccgtaaagggccgattcagcatctccagagacaattccaagaacacactgtatctgcagatgagcagtgtgagagccgacgacacggctgtgtactattgtgcgagagattttttgggtgagattccgcgctggtacttcgatttctggggccgtggcactgtggtcactgtctcctca

SEQ ID NO: 10780 - DNA, 301 bp, Homo sapiens
  source 1..301: mol_type = other DNA
tgcagcatctggattcatcttcagtagttatggcatgcactgggtccgccaggctccaggcaaggggctggagtgggtggcagttatttggtctgatggaagtagtaaatactatggagactccgtaaagggccgattcagcatctccagagacaattccaagaacacactgtatctgcagatgagcagcctgagagccgaggacacggctgtgtattactgtgcgagagattttttgggtgagattccgcgctggtacttcgatttctggggccgtggcactgtggtcactgtctcctca

SEQ ID NO: 10781 - DNA, 301 bp, Homo sapiens
  source 1..301: mol_type = other DNA
tgcagcgtctggattcatcttcagtagttatggcatgcactgggtccgccaggctccaggcaaggggctggagtgggtggcagttatttggtctgatggaagtagtaaatactatggagactccgtaaagggccgattcagcatctccagagacaattccaagaacacactgtatctgcagatgagcagcctgagagccgaggacacggctgtgtattactgtgcgagagattttttgggtgagattccgcggtggtacttcgatttctggggccgtggcactgtggtcgctgtctcctca

SEQ ID NO: 10782 - DNA, 301 bp, Homo sapiens
  source 1..301: mol_type = other DNA
tgcagcgtctggattcatcttcagtagttatggcatgcactgggtccgccaggttccaggcaaggggctggagtgggtggcagttatttggtctgatggaagtagtaaatactatggagactccgtaaagggccgattcagcatctccagagacaattccaagaacacactgtatctgcagatgagcagcctgagagccgaggacacggctgtgtattactgtgcgagagattttttgggtgagattccgcgctggtacttcgatttctggggccgtggcactgtggtcgctgtctcctca

SEQ ID NO: 10783 - DNA, 301 bp, Homo sapiens
  source 1..301: mol_type = other DNA
tgcagcatctggattcatcttcagtagttatggcatgcactgggtccgccaggctccaggcaaggggctggagtgggtggcagttatttggtctgatggaagtagtaaatactatggagactccgtaaagggccgattcagcatctccagagacaattccaagaacacactgtatctgcagatgagcagcctgagagccgaggacacggctgtgtattattgtgcgagagattttttgggtgagattccgcgctggtacttcgatttctggggccgtggcactgtggtcactgtctcctca

SEQ ID NO: 10784 - DNA, 301 bp, Homo sapiens
  source 1..301: mol_type = other DNA
tacagcatctggattcatcttcagtagttacggcatgcactgggtccgccaggctccaggcaaggggctggagtgggtggcagttatttggtctgatggaagtagtaaatactatggagactccgtaaagggccgattcagcatctccagagacaattccaagaacacactgtatctgcagatgagcagcctgagagccgacgacacggctgtgtattattgtgcgagagattttttgggtgagattccgcgctggtacttcgatttctggggccgtggcactgtggtcactgtctcctca

SEQ ID NO: 10785 - DNA, 301 bp, Homo sapiens
  source 1..301: mol_type = other DNA
tggagcatctggattcatcttcagtagttatggcatgcactgggtccgccaggctccaggcaaggggctggagtgggtggcagttatttggtctgatggaagtagtaaatactatggagactccgtaaagggccgattcagcatttccagagacaattccaagaacacactgtatctgcagatgagcagcctgagagccgaggacacggctgtgtattactgtgcgagagattttttgggtgagattccgcgctggtacttcgatttctggggccgtggcactgtggtcactgtctcctca

SEQ ID NO: 10786 - DNA, 301 bp, Homo sapiens
  source 1..301: mol_type = other DNA
tgcaacgtctggattcgtctttagttcctttggcatgcattggttccgccaggctccaggcaaggggccggagtgggtggcatgtttgtggtatgatggaagtagtaaatactatggagactccgtaaagggccgattcagcatttccagagacaattccaagaacacactgtatctgcagatgagcagcctgagagccgaggacacggctgtgtattactgtgcgagagattttttgggtgagattccgcgctggtacttcgatttctggggccgtggcactgtggtcactgtctcctca

SEQ ID NO: 10787 - DNA, 295 bp, Homo sapiens
  source 1..295: mol_type = other DNA
cgctatttatggtgggtccttcaatggtatctattggagctggatccgccagcccccagggaaggggctggagtggattgcggaaatcaatccaagtagagacagaggaaacatcaactacaacccgtccctcaagagtcgagtcaccatatcactagacacggccaagaatcagttctccctggagctgagttctgtgaccgccgcggacacggctgtatattactgtgcgaaatccctatattgtggtgatgactgcccctggggccagggaaccctggtcaccgtctcctca

SEQ ID NO: 10788 - DNA, 286 bp, Homo sapiens
  source 1..286: mol_type = other DNA
cagtgtctatggtgggtccttcagtggttactactggagctggatccgccagtccccagggaaggggctggagtggattggggaaatgaagaatggtgtgagcgcccagtacaatccgtccctcgagagtcgagtcaccatgtcattagacacgtccagaaaccagttctccctgaagttgacctctgtgaccgccgcggacacggctgtgtattactgtgcgaaatccctttattgtggtgatgactgcccctggggccagggaagtctggtcaccgtctcctca

SEQ ID NO: 10789 - DNA, 286 bp, Homo sapiens
  source 1..286: mol_type = other DNA
cgctgtctatggtgggtccttcagtggttactactggagctggatccgccagcccccagggaaggggctggagtggattggggaaatgaaacatagtggaagcaccaagtacaacccgtccctcaagagtcgagtcatcatgtcattagacacgtccaagaaccagttctccctgaggctgagctttgtgaccgccgcggacacggctgtgtattactgtgcgaaatccctatattgtggggatgactgcccctggggccagggaaccctggtcaccgtctcctca

SEQ ID NO: 10790 - DNA, 286 bp, Homo sapiens
  source 1..286: mol_type = other DNA
cgctgtctatggtgcgtccttcagtacttactactggagctggatccgccagcccccagggaaggggctggagtggattggggaaatcaatcatagtggaagcaccaagtacaacccgtccctcaagagtcgagtcaccatgtcattagacgcgtctaagaaccagttctccctgaggctgagctctgtgaccgccgcggacacggctgtgtattactgtgcgaaatccctttattgtggtgatgactgcccctggggccagggaacgctggtcaccgtctcctca

SEQ ID NO: 10791 - DNA, 286 bp, Homo sapiens
  source 1..286: mol_type = other DNA
cgttgacaatgctgggtccttcaatggcttctactggagctggatccgccagcccccggggaaggggctggagtggattggggaaaggaatcctgatggagtcaccaagttcaacccgtccctcaagagtcgagtcaccatatcattagacacgtccaggaatcagttctccctgaagctgatgtctgtgaccgccgcggacacggctgtttattactgtgcgaagtccctatattgcggcgatgactgcccctggggccagggaaccctggtcaccgtctcctca

SEQ ID NO: 10792 - DNA, 316 bp, Homo sapiens
  source 1..316: mol_type = other DNA
tatagcctctgggttcatcttcagggaccactacatggactgggtccgccaggctccagggaagggcctggagtggattgcccgcattagaaacaaagttaatagttacaccacagaatacgccgcgtctgtgaaaggcagattcaccatctcaagagatgattcacagaattctctgaatctgcaaatggacagcctgaaagccgaggacacggccttgtattactgtgtaagaggtggtggggtgactacaggctcccattactactacggtttggacgtctggggccaagggaccacggtcaccgtctcctca

SEQ ID NO: 10793 - DNA, 316 bp, Homo sapiens
  source 1..316: mol_type = other DNA
tgcagcctcaggattcaccttcactgaccactacatggactgggtccgccaggctccagggaaggggctggagtgggttgcccgtactagaaacaaacctaacggttacaccacagaatacgccgcgtctgtgaaaggcagattcaccatctcaagagatgactcaaagaactcagtgtatctccaaatgaccagcctagaagccgaggacgcggccgtgtatttttgtgttagaggtggtggtgtgactactggatcccactactactacggtctggacgtctggggccaagggaccacggtcaccgtctcctca

SEQ ID NO: 10794 - DNA, 307 bp, Homo sapiens
  source 1..307: mol_type = other DNA
tgtggcctctggattcaccttcagcagctacgacatgcactgggtccgccaagttaaaggaagaggtctggagtgggtctcggctactggtactactggtgacacatactattcagacgccgtgaggggccggttcaccatctccagagaagatgccaagtactccttatatcttcaaatgaacagcctgagcgccggggacacggctgtgtattactgtgctcgagattctactcttggttcggggggcggacctgactggtacttcgatctctggggccgtggcaccctggtcactgtctcctca

SEQ ID NO: 10795 - DNA, 307 bp, Homo sapiens
  source 1..307: mol_type = other DNA
tgtagcctctggattcaccttcagcagctacgacatgcactgggtccgccaagttaaaggaagaggtctggagtgggtctcagctactggtactactggtgacacatactattcagactccgtgaggggccggttcaccatctccagagaagatgccaagtactccttatatcttcaaatgaacagcctgagagccggggacacggctgtatattactgtgctagagattctactcttggttcggggggcggacctgactggtacttcgatctctggggccgtggcaccctggtcactgtctcctca

SEQ ID NO: 10796 - DNA, 290 bp, Homo sapiens
  source 1..290: mol_type = other DNA
ccatctccggggacagtgtctctagcaacagtgctacttggaactggatcaggcagtccccatcgagaggccttgagtggctgggaaggacatactacaggtccgagtggagtaatgtttatgcaatatctatgaaaagtcgaataaccatcaacccagacacatccaagaaccagttctccctgcagctgaactctgtgactcccgaggacacggctgtgtattactgtgcaagaggtgctggtccttttgactactggggccagggaaccctggtcgccgtctcctca

SEQ ID NO: 10797 - DNA, 290 bp, Homo sapiens
  source 1..290: mol_type = other DNA
ccatctccggggacagtgtctctagcaacagtgctgcttggaactggatcaggcagtccccatcgagaggccttgagtggctgggaaggacatactacaggtccaagtggtataatgattatgcagtatctgtgaaaagtcgaataaccatcaacccagacacatccaagaaccagttctccctgcagctgaactctgtgactcccgaggacacggctgtgtattactgtgcaagaggagctggaccttttgactactggggccagggaaccctggtcaccgtctcctca

SEQ ID NO: 10798 - DNA, 286 bp, Homo sapiens
  source 1..286: mol_type = other DNA
tgcagcctctggattcagcttcagcaaatataccatgggctgggtccgccaggctccagggaagggactggagtgggtctcagcaattcttagtaatggttatgacacgttctacggagactccgtgaagggccgattcaccctctccagagacaattcgaagaatatggtgtatctgcaaatgaatggcctgagagtcgacgacacggccgtgtattactgtgcgaggagggtggagtgggcatttgactcctggggccagggaaccctggccactgtctcccca

SEQ ID NO: 10799 - DNA, 283 bp, Homo sapiens
  source 1..283: mol_type = other DNA
tgaagcctctggattcaacttcagagactacaccatgggctgggtccgccaggctccgggcaaggggctggagtgggtctcagctattcttagtaatcggacaacgtcttacgcagactccgtgaagggccggttcaccatctcccgggacacttccaggaaaacagtgtttctgcaactgaacagcctgagactcgaggacacggccctatattactgtgcgagacgcgttgagtgggcctttgactcctggggccagggaaccctggtcaccgtctcctca

SEQ ID NO: 10800 - DNA, 283 bp, Homo sapiens
  source 1..283: mol_type = other DNA
tgaagcctctggattctccttcagtgactataccatgggctgggtccgccaggctccgggcaaggggctggagtgggtctcagctattcttagtaatgggaaaacatactacgcggagtccgtgaagggccggttcaccatctcccgagacaattccaagaaaacagtgtttctgcaactgaacagcctgagactcgaggacacggccctgtattactgtgcgagacgggttgagtgggcctttgactcctggggccagggaaccctggtcaccgtctcctca

SEQ ID NO: 10801 - DNA, 283 bp, Homo sapiens
  source 1..283: mol_type = other DNA
tgaagcctctggatttccttttagtatctataccatgggctgggtccgccaggctccagggaaggggctggagtgggtctcagcaattattagtaatgggaacaaatactacgcggactccgtgaagggccggttcaccatctccagagacaattccaagcaaacagttcttctccaactgaacagcctgagacccgaggacacggccctgtattactgtgcgagacgggttgagtgggcctttgactcctggggccagggaaccctggtcaccgtctcctca

SEQ ID NO: 10802 - DNA, 283 bp, Homo sapiens
  source 1..283: mol_type = other DNA
tgaagcctctggatttacttttagcgactataccatgggctgggtccgccaggctccagggaaggggctggagtgggtctcagctattattagttatgggaacacatactacgcggactccgtgaagggccggttcaccatctccagagacaactccaagaaaacagttcttctgcaactgaacagcctgagacccgaggacacggccctgtattactgtgcgagacgggttgagtgggcctttgactcctggggccagggaaccctggtcaccgtctcctca

SEQ ID NO: 10803 - DNA, 289 bp, Homo sapiens
  source 1..289: mol_type = other DNA
tgcagcctctggagtcaccgtccatactgcgtcgatgttctgggtccgccaagctccagggaaggggctggagtgggtctcacaactggaaactgatgggaaaaccatgggctacgcggactccgtgaagggccgattcaccatctccagagacatcgccaagaacacgttgtatctgcaaatgaacagtctgggagccgaggacacggctgtatatttttgtgctagaggtggagttaggtatggctttgatctttggggccaagggacaatggtcaccgtctcttca

SEQ ID NO: 10804 - DNA, 289 bp, Homo sapiens
  source 1..289: mol_type = other DNA
tgcagcctctggagtcaccgtccatactacgtcgatgttctgggtccgccaagctccagggaaggggctggagtgggtctcacaactggaaactgatgggaaaaccatgggctacgcggactccgtgaagggccgattcaccatctccagagacatcgccaagaacacgttgtatctgcaaatgaacagtctgggagccgaggacacggctgtatatttttgtgctagaggtggagttaggtatggctttgatctttggggccaagggacaatggtcaccgtctcttca

SEQ ID NO: 10805 - DNA, 289 bp, Homo sapiens
  source 1..289: mol_type = other DNA
tgcagcctctggagtcaccttcaccactaactcgatgttctgggtccgccaagctccagggaaggggctggtgtgggtctcacaactggaaagtgatgggaaaaccgtgggctacgcggactccgtgaagggccgattcaccatctccagagacatcgccaagaacaccttgtatctgcaaatgaacagtctgggagccgaggacacggctgtatatttttgtgcaagaggtggagttaggtatggttttgatctttggggccaagggacaatggtcaccgtctcttca

SEQ ID NO: 10806 - DNA, 289 bp, Homo sapiens
  source 1..289: mol_type = other DNA
tgcagcctctggattcaccttcagtagctacgacatgcactgggtccgccaagctccagggaaggggctggagtgggtctcacaactggaaactgatgggaaaaccatgggctacgcggactccgtgaagggccgattcaccatctccagagacatcgccaagaacacgttgtatctgcaaatgaacagtctgggagccgaggacacggctgtatatttttgtgctagaggtggagttaggtatggctttgatctttggggccaagggacaatggtcaccgtctcttca

SEQ ID NO: 10807 - DNA, 289 bp, Homo sapiens
  source 1..289: mol_type = other DNA
tgcagcctctggagtcaccgtcactactgcgtcgatgttctgggtccgccaagctccagggaaggggctggtgtgggtctcacaactggaaagtgatgggaaaaccatgggctacgcggactccgtgaagggccgattcaccatctccagagacatcgccaagaacacgttgtatctgcaaatgaacagtctgggagccgaggacacggctgtatatttttgtgctagaggtggagttaggtatggctttgatctttggggccaagggacaatggtcaccgtctcttca

SEQ ID NO: 10808 - DNA, 289 bp, Homo sapiens
  source 1..289: mol_type = other DNA
tgcagcctctggattcaccttcagtacgtactggatgcactgggtccgccaagctccagggaaggggctggtgtgggtctcacgtattaatagtgatgggtatagcacaggctacgcggactccgtgaagggccgattcaccttctccagagacaacgccaagaacacgctgtatctgcaaatgaacagtctgagagccgaggacacggctgtgtatttctgtgcaagagggggggtacggtatggttttgatctctggggccaagggacaatggtcaccgtctcttca

SEQ ID NO: 10809 - DNA, 271 bp, Homo sapiens
  source 1..271: mol_type = other DNA
tgcagcctctggattcacctttagtgactcttggatgagctgggtccgccaggctccagggaaggggctggagtgtgtggccaacataaagccagatggaagtgtgaaatcctatgtggactctgtgaagggccgattcaccatctcccgagacaacgccaagaactcactatatctggaaatgaacagcctgagagtcgaggacacggctgtatatcactgtgcgagagatgtcatctggggccaagggaccacggtcaccgtctcctca

SEQ ID NO: 10810 - DNA, 271 bp, Homo sapiens; identical to SEQ ID NO: 10809
  source 1..271: mol_type = other DNA

SEQ ID NO: 10811 - DNA, 271 bp, Homo sapiens
  source 1..271: mol_type = other DNA
tgcagcctctggattcacctttagtgactcttggatgagctgggtccgccaggctccagggaaggggctggagtgtgtggccaacataaagccagatggaagtgtgacatcctatgtggactctgtgaagggccgattcaccatctcccgagacaacgccaagaactcactatatctggaaatgaacagcctgagagccgaggacacggctgtatatcactgtgcgagagatgtcatctggggccaagggaccacggtcaccgtctcctca

SEQ ID NO: 10812 - DNA, 271 bp, Homo sapiens
  source 1..271: mol_type = other DNA
tgcagcctctggattcacctttagtgactcttggatgagctgggtccgccaggctccagggaaggggctggagtgtgtggccaacataaagccagatggaagtgtgaaatcctatgtggactctgtgaagggccgattcaccatctcccgagacaacgccaagaactcactgtatctggaaatgaacagcctgagagccgaggacacggctgtatatcactgtgcgagagatgtcatctggggccaagggaccacggtcaccgtctcctca

SEQ ID NO: 10813 - DNA, 269 bp, Homo sapiens
  source 1..269: mol_type = other DNA
cagcctctggattcacctttagtgactcttggatgagctgggtccgccaggctccagggaaggggctggagtgtgtggccaacataaagccagatggaagtgtgaaatcctatgtggactctgtgaagggccgattcaccatctcccgagacaacgccaagaactcactatatctggaaatgaacagcctgagagtcgaggacacggctgtatatcactgtgcgagagatgtcatctggggccaagggaccacggtcaccgtctcctca

SEQ ID NO: 10814 - DNA, 271 bp, Homo sapiens
  source 1..271: mol_type = other DNA
tgcagcctctggattcacccttagcggttactggatgagctgggtccgccaggctccggggaaggggctggagtgggtggccaatataaaggaagatggaagtgaggaatactatgcagactctgtgaggggccgattcaccatctccagagacaatgccaagaactcactgtctctgcaaatgaacagtctgagatccgaggatacggctgtctattactgtgcgagagatgtaatttggggccaagggaccacggtcaccgtctcctca

SEQ ID NO: 10815 - DNA, 298 bp, Homo sapiens
  source 1..298: mol_type = other DNA
tgaagcctctggattcgcctttagcaactttcccgtaaactggatccgccaggttccagggagggggctggagtggatcgcagttattggtgggaatagaggtggcacattctacgcagactccgtgaagggccgcttcaccatgtccagagacgattcaaagaacatgttgttcctgcaaatggacagcctgagagtcgaggacacggccatttattactgtgcgaaaggtggcctctcgttcgcaggggactactttgactcttggggccagggaaccctggtcaccgtctcctct

SEQ ID NO: 10816 - DNA, 298 bp, Homo sapiens
  source 1..298: mol_type = other DNA
tgaagcctctggattcgcctttagcaactttcccgtaaactggatccgccaggttccagggagggggctggagtggatcgcagttattggtgggaatagaggtggcacattctacgcagactccgtgaagggccgcttcaccatgtccagagacgattcaaagaaaatgttgttcctgcaaatggacagcctgagagtcgaggacacggccatttattactgtgcgaaaggtggcctctcgttcgcaggggactactttgactcttggggccagggaaccctggtcaccgtctcctca

SEQ ID NO: 10817 - DNA, 304 bp, Homo sapiens
  source 1..304: mol_type = other DNA
tgcagcctctggattcactctcagtagtgccttgatgagttgggtccgccagtctccagtgaggggtctggagtggattggccgtattacagacgatgctcggggtgggacaacagaatacgctggacccatgataggcaaagtcaccatctcaagagatgattcaaaaaacacactatatctggaaatgaacagcctgaaaatcgaggacacaggcgtttattactgtacaacggcttttccggtgtacacgtcggactcctttgactactggggccggggaaccctggtcaccgtctcctca

SEQ ID NO: 10818 - DNA, 304 bp, Homo sapiens
  source 1..304: mol_type = other DNA
tgcagcctctggattcactctcagtagtgccttgatgagttgggtccgccagtctccagtgaggggtctggagtggattggccgtattacagaagatgctcggggtgggacaacagaatacgctggacccatgataggcaaagtcaccatcttaagagatgattcaaaaaacacactatatctggaaatgaacagcctgaaaatcgaggacacaggcgtttattactgtacaacggcttttccggtgtacacgtcggactcctttgactactggggccggggaaccctggtcaccgtctcctca

SEQ ID NO: 10819 - DNA, 304 bp, Homo sapiens
  source 1..304: mol_type = other DNA
tgcagcctctggattcactctcagtagtgccttgatgagttgggtccgccagtctccagtgaggggtctggagtggattggccgtattacagacgatgctcggggtgggacaacagaatacgctggacccatgataggcaaagtcaccatctcaagagatgattcaaaaaacacactatatctggaaattaacagcctgaaaatcgaggacacaggcgtttattactgtacaacggcttttccggtgtacacgtcggactcctttgactactggggccggggaaccctggtcaccgtctcctca

SEQ ID NO: 10820 - DNA, 295 bp, Homo sapiens
  source 1..295: mol_type = other DNA
tgctggctctgggttcaatctcaataaggtcttgatgagttgggtccgccagactccagacaaggggctggagtggcttggccgcatcttaaccagtgggtcaacagaatacgctgcccccatgaaaggcagattcacaatctcaagagatgattcaagaaacacggtgtttctggaaatgaacaccctgcaaaccgaggacacaggcgtctattactgcaccacggcctttccagtttacacatcagactcctttgactactggggccagggaacactggtcaccgtcgcctca

SEQ ID NO: 10821 - DNA, 271 bp, Homo sapiens
  source 1..271: mol_type = other DNA
tgcagcgtctggattgaccttcaatacctataacatacactgggtccgccagactccaggcaaggggctggagtgggtggcacttatttactatgatggaactaggaaatattatgcagactccgtgaagggccgattcaccatctccagagacgattccaagaacactctgtatctgcaaatgaacagcctgagagccgaggacacggctgtttatttctgtggcgacttccactattggggccagggcaccttggtcaccgtttcttca

SEQ ID NO: 10822 - DNA, 271 bp, Homo sapiens
  source 1..271: mol_type = other DNA
tacagcgtctgaatccatctttagtagtcttaacatacactgggtccgccaggctccaggcaaggggctggagtgggtggcacttatatatcatgatggaaatgttaaatattatgcagactccgtgaagggccgattcaccgtctccagagacaatttcaagaacactctatatctgcaaatgaacggcctgagagacgaggacacggctgtgtattactgtggagacttccactactggggccagggcaccctggtcaccgtctcctcg

SEQ ID NO: 10823 - DNA, 271 bp, Homo sapiens
  source 1..271: mol_type = other DNA
tgcagcgtctggattaaccttcagtaactataacatacactgggtccgccagactccaggcaaggggctggagtgggtggcacttatttggtatgatggaagtaataaatactatgcagactcagtgaagggccgattcaccatctccagagacaattccaagaacacgatgtatctgcaaatgaacagcctgagagccgaggacacggctgtttattactgtggcgacttccactattggggccagggcaccttggtcaccgtctcttca

SEQ ID NO: 10824 - DNA, 271 bp, Homo sapiens
  source 1..271: mol_type = other DNA
tgcagcgtctggattaaccttcagtaactataacatacactgggtccgccagactccaggcaaggggctggagtgggtggcacttatttggtatgatggaagtaataaatactatgcagactcagtgaagggccgattcaccatctccagagacaattccaagaacacgctgtatctgcaaatgaacagcctgagagccgaggacacggctgtttattactgtggcgacttccactattggggccagggcaccttggtcaccgtctcttca

SEQ ID NO: 10825 - DNA, 286 bp, Homo sapiens
  source 1..286: mol_type = other DNA
tgcagcctctggatacaccttcagcagttactggatgcactgggtccgccaagttccagggaaggggatggtctgggtctcacggatcaatgaatatgggagtatcacaaactacgcggactccgtgaagggccgattcaccatctccagagacaacgccaagaacacactgtatctgcagatgaacagtctgagagccgaggacacgggtgtatattactgtacaagagatattggtggtagatacgcctattggggccggggaaccctggtcaccgtctcctca

SEQ ID NO: 10826 - DNA, 286 bp, Homo sapiens
  source 1..286: mol_type = other DNA
tgcagcctctggatacaccttcaccaattattggatgcactgggtccgccaggttccagggaagggaatggtctgggtctcacggatcaatgaggatgggagaatcacaaactacgcggactccgtgaagggccgattcaccatctccagggacaaccccaggaacaccctatacctccatatgaacagtctgagagccgaggactcgggtgtttattactgtacaagagatattggtggtagatatgcctattggggccagggaaccctggtcaccgtctcctca

SEQ ID NO: 10827 - DNA, 286 bp, Homo sapiens
  source 1..286: mol_type = other DNA
tgcagcctctggatacatattcagcagcatgtggatgcactgggtccgccaagttccagggaaggggctggtgtgggtctcacgtattaatactgacgggagtgtcataaactacgcggactccgtgaggggccgattcaccatctctagagacaacgccaagaacacgctgtatctgcaaatgaatgatctgagagccgaggacacggctgtctattattgtacaagagatataggtggtcgatatgcctattggggccagggaaccctggtcaccgtctcctca

SEQ ID NO: 10828 - DNA, 301 bp, Homo sapiens
  source 1..301: mol_type = other DNA
tatagcctctggattcaccttcagtgaccactacatggactggctccgccaggctccagggaaggggctggagtgggttggccgtaatagagacaaggctcacagttacaccaaagaatacgccgcgtctgtgaaaggcagattcaccatctcaagagatgattcaaagaattcactgtatctgcaaatgaacagcctgaaaagcgaggacacggccgtgtattattgtgctagagtggtagcaagagatgggtattcatttgactcctggggccagggaaccctggtctccgtctccaca

SEQ ID NO: 10829 - DNA, 301 bp, Homo sapiens
  source 1..301: mol_type = other DNA
tgtagcctctggattcaccttcagtgaccactacatggactggctccgccaggttccagggaaggggctggagtgggttggccgtaatagagacaaggctcacagttacaccaaagagtacgccgcgtctgtgaaaggcagattcaccatctcaagagatgattcaaagaactcactgtatctgcaaatgaacagcctgaaaaccgaggacacggccgtatattattgtgctagagtggtagcaagagatgggtattcatttgactcctggggccagggaaccctggtcaccgtctccaca

SEQ ID NO: 10830 - DNA, 301 bp, Homo sapiens
  source 1..301: mol_type = other DNA
tatagcctctggattcagcttcagtgaccactacatggactggctccgccaggctccagggaaggggctggagtgggttggccgtaatagagacaaggctcacagttacaccaaggaatacgccgcgtctgtgaaaggcagattcaccatctcaagagatgattcaaagaattcactgtatctacaaatgaacagcctgaaaagcgaggacacggccgtgtattattgtgctagagtggtagcaagagatgggtattcatttgactcctggggccagggaaccctggtctccgtctccaca

SEQ ID NO: 10831 - DNA, 301 bp, Homo sapiens
  source 1..301: mol_type = other DNA
tatagcctctggattcagcttcagtgaccactacatggactggctccgccaggctccagggaaggggctggagtgggttggccgtaatagagacaaggctcacagttacaccaaagaatacgccgcgtctgtgaaaggcagattcaccatctcaagagatgattcaaagaattcactgtatctgcaaatgaacagcctgaaaaccgaggacacggccgtgtattattgtgctagagtggtagcaagagatgggtattcatttgactcctggggccagggaaccctggtcaccgtctccaca

SEQ ID NO: 10832 - DNA, 301 bp, Homo sapiens
  source 1..301: mol_type = other DNA
tgtggcctctggattcagcttcagtgaccactacatggactggctccgccaggttccagggaaggggctggagtgggttggccgaaatagagacaaggctcacagttacaccaaagaatatgccgcgtctgtgaaaggcagattcaccatctcaagagatgattcaaagaattcactatatctgcaaatgaacagcctgaaaaccgaggacacggccctttattattgtgctagagtggttgcaagagatggatattcatttgactcctggggccagggaaccctggtcaccgtctccact

SEQ ID NO: 10833 - DNA, 301 bp, Homo sapiens
  source 1..301: mol_type = other DNA
tgtagcctctggattcagcttcagtgaccactacatggactggctccgccaggttccagggaaggggctggagtgggttggccgtaatagagacaaggctcacagttacaccaaagaatacgccgcgtctgtgaaaggcagattcaccatctcaagagatgattcaaagaattcactgtatctgcaaatgaacagcctgaaaaccgaggacacggccgtatattattgtgctagagtggtagcaagagatgggtattcatttgactcctggggccagggaaccctggtcaccgtctccaca

SEQ ID NO: 10834 - DNA, 301 bp, Homo sapiens
  source 1..301: mol_type = other DNA
tatagcctctggattcagcttcagtgaccactacatggactggctccgccaggctccagggaaggggctggagtgggttggccgtaatagagacaaggctcacaggtacaccaaagaatacgccgcgtctgtgaaaggcagattcaccatctcaagagatgattcaaagaattcactgtatctgcaaatgaacagcctgaaaaccgaggacacggccgtgtattattgtgctagagtggtagcaagagatgggtattcatttgactcctggggccagggaaccctggtcaccgtctccaca

SEQ ID NO: 10835 - DNA, 301 bp, Homo sapiens
  source 1..301: mol_type = other DNA
tatagcctctggattcaccttcagtgaccactacatggactggctccgccaggctccagggaaggggctggagtgggttggccgtaatagagacaaggctcacagttacacaaaagaatacgccgcgtctgtgaaaggcagattcaccatctcaagagatgattcaaagaattcactgtatctgcaaatgaacagcctgaaaagcgaggacacggccgtgtattattgtgctagagtggtagcaagagatgggtattcatttgactcctggggccagggaaccctggtctccgtctccaca

SEQ ID NO: 10836 - DNA, 301 bp, Homo sapiens
  source 1..301: mol_type = other DNA
tgcagcctctggattcaccttcagtgaccactacatggactgggtccgccaggctccagggaaggggctggagtgggttggccgtactagagacaaaggtcacagttacaccacagaatacgccgcgtctgtgaaaggcagattcaccatctcaagagatgattcaaagaactcactgtatctacaaatgaacagcctgaaaaccgaggacacggccgtgtattactgtgctagagtggtcgccagagatggctactcttttgactcctggggccagggatccctggtcaccgtctcctca

SEQ ID NO: 10837 - DNA, 280 bp, Homo sapiens
  source 1..280: mol_type = other DNA
tacagcctctggattcatcttcagcaactatgccatgtactgggtccgccaggctccagggaaggggctggagtgggtctcagctattagtggtagcacatactacgcagactctgtgaagggccggttcaccatattcagagacaattccaagaacacggtgtatctgcaaatggacagcctgagaggcgaggacacggccgtatattactgtgcgaaattagtcggtcgtaatactgaagacttctggggccagggaaccctggtcaccgtctcctca

SEQ ID NO: 10838 - DNA, 280 bp, Homo sapiens; identical to SEQ ID NO: 10837
  source 1..280: mol_type = other DNA

SEQ ID NO: 10839 - DNA, 280 bp, Homo sapiens; identical to SEQ ID NO: 10837
  source 1..280: mol_type = other DNA

SEQ ID NO: 10840 - DNA, 289 bp, Homo sapiens
  source 1..289: mol_type = other DNA
tggagcctctggactcacctttagtatgtatgccgtggactgggtccgccaggctccagggaaggggctggaatggatttcaggtataagtggcagtggtggtaacacatactacgcagactccgtgaagggccggttcaccatctccagagacaattccaggaacacggtgtatctgcaaatgaacagcctgagagccgaggacacggccgtatactactgtgcgaaactagtgggacgtaacactgaggacttctggggccagggaaccctggtcaccgtctcctca

SEQ ID NO: 10841 - DNA, 292 bp, Homo sapiens
  source 1..292: mol_type = other DNA
cgcagcctctggattcaactttaggaagtatgccatgggctgggtccgccaggctccagggacggggctggagtgggtctcagcaattagtattagcggcagtagtacattctacgcagactccgtgaagggccggttcaccatctccagagacaggtccgagaacacgctctatttgcaaatgaacagcctgagagtcgaggacacggccgtatattactgtgcgaaacgattagcagagggtggccactttgactactggggccagggagccctggtcaccgtctcctca

SEQ ID NO: 10842 - DNA, 292 bp, Homo sapiens; identical to SEQ ID NO: 10841
  source 1..292: mol_type = other DNA

SEQ ID NO: 10843 - DNA, 292 bp, Homo sapiens
  source 1..292: mol_type = other DNA
tgcagcctctggattcacctttagcacttatgccatgggctgggtccgccaggctccagggacggggctggagtgggtctcagctattagtattagtggtagtagcacattctacgcagactccgtgaagggccggttcaccatctccagagacagttccaagagtacgctgtatctgcaaatgaacagcctgagagccgacgacacggccgtatattactgtgcgaaacgattagcagagggtggccactttgactactggggccagggaaccctggtcaccgtctcctca

SEQ ID NO: 10844 - DNA, 292 bp, Homo sapiens
  source 1..292: mol_type = other DNA
cgcagcctctggattcaactttaggaagtatgccatgggctgggtccgccaggctccagggacggggctggagtgggtctcagcaattagtattagcggcagtagtacattctacgcagactccgtgaagggccggttcaccatctccagagacaggtccgagaacacgctctatttgcaaatgaatagcctgagagtcgaggacacggccgtatattactgtgcgaaacgattagcagagggtggccactttgactactggggccagggagccctggtcaccgtctcctca

SEQ ID NO: 10845 - DNA, 292 bp, Homo sapiens
  source 1..292: mol_type = other DNA
cgcagcctctggattcaactttaggaagtatgccatgggctgggcccgccaggctccagggacggggctggagtgggtctcagcaattagtattagcggcagtagtacattctacgcagactccgtgaagggccggttcaccatctccagagacaggtccgagaacacgctctatttgcaaatgaacagcctgagagtcgaggacacggccgtatattactgtgcgaaacgattagcagagggtggccactttgactactggggccagggagccctggtcaccgtctcctca

SEQ ID NO: 10846 - DNA, 292 bp, Homo sapiens
  source 1..292: mol_type = other DNA
tgcagcctctggattcaccttcagcagctacgccatgagctgggtccgccaggctccagggaaggggctggagtgggtctcagctatcagtattagtggcgcttccacattctacgcagactccgtgaagggccgattcaccatctccagagacaaatcgaagaacacactttatctgcaaatgaacaacctgagagccgaggacacggccatatatttctgtgcgaaacgtctcgcggaaggtgggcattttgactactggggccagggaaccctggtcaccgtctcctca

SEQ ID NO: 10847 - DNA, 295 bp, Homo sapiens
  source 1..295: mol_type = other DNA
tgcagcctctggattcacctttaggaaatatgccatgggctgggtccgccaggctccagggaaggggctggagtgggtctcagctatcagtattagtggttcttccacattctatgcagcagactccgtgaagggccgattcaccatctccagagacaattccaagaacacactttatctgcaaatgagtaacctgagagccgaggacacggccatatatttctgtgcgaaacgtctcgcggaaggtgggcattttgactactggggccagggaaccctggtcaccgtctcctca

SEQ ID NO: 10848 - DNA, 307 bp, Homo sapiens
  source 1..307: mol_type = other DNA
tgaagcctctggattcatctttagcagttatgtcatgacctgggtccgccaggctccagggaaggggctggagtgggtctcacttgttgctcgtaacaatgatgagacatactacgcagactccgtgaagggccggttcaccatctccagagacaattccaagaacacactgtatctgcaaatgcacagcctgagagccgaggacacggccgtatattcctgtgcgaaagggagatactatggttcggggagttatttgaattcctttgactcctggggccacggaaccctggtcaccgtctcttca

SEQ ID NO: 10849 - DNA, 307 bp, Homo sapiens
  source 1..307: mol_type = other DNA
tgaagcctctggattcatctttagcagttatgtcatgacctgggtccgccaggctccagggaaggggctggagtgggtctcacttgttgctcgtaacaatgatgagacatactacgcagactccgtgaagggccggttcaccatctccagagacaattccaagaacacactgtatctgcaaatgcacagcctgagagccgaggacacggccgtatattcctgtgcgaaagggagatactatggttcagggagttatttgaattcctttgactcctggggccacggaaccctggtcaccgtctcttca

SEQ ID NO: 10850 - DNA, 301 bp, Homo sapiens
  source 1..301: mol_type = other DNA
tgtagcctctggattcacctttagcagctatgtcatgacctgggtccgccaggctccagggaaggggctggagtgggtctcccttataagcggaagtaacacatactacgcagactccgtgaagggccggttcaccatctccacagactattccaagaacaccctgtatctgcaaatggacagcctgagaggcgaggacacgggcatatattactgtgcaaaagggagatactatggttcggggagttatttaaatagctttgactcctggggccagggaaccctggtcaccgtctcctca

SEQ ID NO: 10851 - DNA, 283 bp, Homo sapiens
  source 1..283: mol_type = other DNA
tgcagtctctggattcacatttagtaattattggatgaggtgggtccgccaggctccagggaaggggctggagtgggtggccaacataaaggaagatggaagtgagaaaaactatgtggactctgtgaagggccgattcaccatctccagagacaacgccaagaactcactgtatctgcaaatgaacagcctgagagccgaagacacggctgtgtattactgtgcgagtggtctgaccgtggcctactactggggccagggaaccctggtcaccgtctcctca

SEQ ID NO: 10852 - DNA, 283 bp, Homo sapiens
  source 1..283: mol_type = other DNA
tgcagtctctggattcacgtttagtaattattggatgaggtgggtccgccaggctccagggaaggggctggagtgggtggccaacataaaagaagatggaagtgagaaaaactatgtggactctgtgaagggccgattcaccatctccagagacaacgccaagaactcactgtatctgcaaatgaacagcctgagagccgaggacacggctgtgtattactgtgcgagtggtctgaccgtggcctactactggggccagggaaccctggtcaccgtctcctca

SEQ ID NO: 10853 - DNA, 283 bp, Homo sapiens
  source 1..283: mol_type = other DNA
tgcagtctctggattcaggtttagtagctattggatgagctgggtccgccaggctccagggaaggggctggaatgggtggccaacataaaggaagatggaggtgagaaccactatgtggactctgtgaagggccgcttcaccatctccagagacaacgccaagaattcactgtttctgcaaatgaacagcctgagagacgaggacacggctgtatattactgtgcgagtggtcttacggtggcctactactggggccagggaaccctggtcaccgtctcatca

SEQ ID NO: 10854 - DNA, 277 bp, Homo sapiens
  source 1..277: mol_type = other DNA
ggcttctggttacaccttcaccagcgatcttatcagttgggtgcggcaggcccccggagaagggcttgagtggattggatgggtcgccactcagaatcataacacatactatacagagaacttccagggcagaatcaccatgaccacagacacatccacgagcacagcctacatggaactgaggagcctgagatctgacgacacggccgtatattactgtacgagaggacatattaaggactactggggccagggaaccctggtcaccgtctcctca

SEQ ID NO: 10855 - DNA, 276 bp, Homo sapiens
  source 1..276: mol_type = other DNA
gcttctggttacacctttaccagtgatggcatcacctgggtgcgacaggcccctggacaagggcttgagtggatggggtggatcatcacttacaatggtaacacagaatatgcacagaagttccagggcagagtcaccatgaccacagacacatccacgagcacagtctacatggaactgaggagcctgagatctgacgacacggccgtgtattactgtacgagaggtcacattaaagactactggggccagggaaccctggtcaccgtctcctca

SEQ ID NO: 10856 - DNA, 294 bp, Homo sapiens
  source 1..294: mol_type = other DNA
gcttctggctacacctttaccacctatggtatcagctgggtgcgacaggccccgggacaagggcctgagtggatgggatggatcagcacttacagtggtgacacagaatatgcgcagaagttccagggcagagtcaccatgaccacagacacatccgcgagcacagtctacatggagctgaggagcctgagatctgacgacacggccctgtattattgtgcgagagacagttgtagtggtggtagctgttacgtggactattggggccagggaaccctggtcaccgtctcctca

SEQ ID NO: 10857 - DNA, 294 bp, Homo sapiens
  source 1..294: mol_type = other DNA
gcttctggttacacctttaccagctatggtatcagctgggtgcgacaggcccctggacaagggcttgagtggatgggatggatcagcgcttataatggtaacacaaagtatgcacagaagctccagggcagagtcaccatgaccacagacacatccacgagcacagcctacatggagctgaggagcctgagatctgacgacacggccgtgtattactgtgcgagagattcctgtagtggtggtagctgctacgttgactactggggccagggaaccctggtcaccgtctcctca

SEQ ID NO: 10858 - DNA, 274 bp, Homo sapiens
  source 1..274: mol_type = other DNA
tgcagcctctggattcacctttagtagtttttggatgaactgggtccgccaggctccagggaaggggctggagtgggtggccaacataaagcaagatggaagtcagaaagtctatatggactctgtgaagggccgattcaccatctccagagacaacgccgaaaactcgctgtatctgcaaatgaacagcctgagacccgaagacacggctgtctattactgtgttcgaggtaccgacgtctggggccaagggaccacggtcagagtgtcctca

SEQ ID NO: 10859 - DNA, 274 bp, Homo sapiens
  source 1..274: mol_type = other DNA
tacagcctctggattcatctttagtagtaaatggatgaactgggtccgccaggctccagggaaggggctggagtgggtggccaacataaatcaagatggaagtgagaaaaagtatgtagactctgtgaagggccgattcaccatctccagagacaacgccaagaactcactgtttctgcaaatgaacaacctgagagtcgacgacacggctgtgtattactgtgtgagagggacggacgtctggggcaaagggaccacggtcaccgtttcctca

SEQ ID NO: 10860 - DNA, 295 bp, Homo sapiens
  source 1..295: mol_type = other DNA
tgcagcctctggattcacctttagcagctatgccatgagctgggtccgccaggctccaggggaggggctggagtgggtctcatttttttatagcggtggtagtagcacatactatgcagactccgtgaagggccggttcaccatctccagagataattccaagaacacgctgtatctgcaaatgaacagcctgagagccgaggacacggccgtatattactgtgcgaaaggatatagtgcctacgatctttactttgactactggggccagggaaccctggtcaccgtctcctca

SEQ ID NO: 10861 - DNA, 295 bp, Homo sapiens
  source 1..295: mol_type = other DNA
tgcagcctctggattcatctttagcagctatgtcatgagctgggtccgccaggctccagggaaggggctggagtgggtctcagctattagcggtagtggtattaccacataccacgcagactccgtgaagggccggttcaccatctccagagacaattccaagaacacgctgaatctgcaaatgaacagcctgggagccgaggacacggccgtatattactgtgcgaagggatatagtgcctacgacctctactttgactactggggccagggagccctggtcaccgtctcctca

SEQ ID NO: 10862 - DNA, 274 bp, Homo sapiens
  source 1..274: mol_type = other DNA
tgcggcctcgggatttcccttccagacttactggatgaattgggtccgccgggctccaggaaaggggctggagtgggtggccaacataaaaccggatggaagtgcggcattttatgcgggctctgtgaagggccgattctccatctccagggacaacttcaggaattcagtacatctgcaaatgaacagtctgagagtggaggacacggctgtgtattactgtgcgagggccatgcacgtctggggccaaggggccagagtcactgtttcctca

SEQ ID NO: 10863 - DNA, 274 bp, Homo sapiens
  source 1..274: mol_type = other DNA
tgcagcctctggattcaccttcagtgactattggacgaattgggtccgccaggctccagggaaggggctggagtgggtggccaacataaacgaagatggaagtaagaaatattatgtgggctctgtgaggggccgattcaccatctacagggacaacacccagaattccgtgttcttgcaaatgaacagcctgagagtcgaggacacggctgtgtattattgtgcgagagccatgcacgtctggggccaagggaccacggtcagcgtcttctca

SEQ ID NO: 10864 - DNA, 298 bp, Homo sapiens
  source 1..298: mol_type = other DNA
tgtagcctccggattcacctttattaaccacgccatggcgtgggtccgccaggctccagggaaggggctggagtgggtctcatccatcaatggaaggggcgacaccacattctacacagactccgtaaggggccgattcaccatctccagagacacttccaagaatactctctttctcgaaatcaacaacctgagagccgaggacgcggccctatatttctgtgcgaagtactatctttcgggcagttattatcactttgactcctggggccagggaaccctggtcaccgtctcctca

SEQ ID NO: 10865 - DNA, 298 bp, Homo sapiens
  source 1..298: mol_type = other DNA
tgcagcctctggattcccctttatcaactatgccatggcctgggtccgccaggctccagggaagggactggagtgggtctcttctattagtggtgatggtcgaaccccattctacgcagactccgtgaggggccgcttcatcatctccagagacacttccgagggcacactttttctgcaaatgaacagcctcagagtcgaagacacggccgtatattactgtgcgaagtattatctttcgggcagttattaccactttgactcctggggccggggaaacttggtcactgtctcctca

SEQ ID NO: 10866 - DNA, 283 bp, Homo sapiens
  source 1..283: mol_type = other DNA
tgaagcctctggattcagatttaacgtctataccatgggctgggtccgccaggccccaggaaaggggctgatgtgggtctcagccatacttagtaacggtgtcccagagtaccctgactccatgaagggccggttcaccgtctccagggacaactccaactctatgttatacctgcgaattgactccttgacagccgacgacacggccaaatattactgtgcgagacgagtggaagggagatttgactactggggccagggagccttagtcgccgtctcctca

SEQ ID NO: 10867 - DNA, 283 bp, Homo sapiens
  source 1..283: mol_type = other DNA
tgcagcctctggattcacctttaacacctataccatgggctgggtccgccaggctccagggaagggactggagtgggtctcagctattcttagtaatggagatacatattaccctgactccgtgaagggcctgttcaccatctccagagacaattccaggagcaccctctatctgcgaatgaacagcctgagagtcgaggacacggccgtatattactgtgcgagacgcgttgaggggcgctttgactactggggccagggatccctggtcaccgtctcctca

SEQ ID NO: 10868 - DNA, 286 bp, Homo sapiens
  source 1..286: mol_type = other DNA
tgcagcctctggattctcctttagcacctataccatgggctgggtccgcaaggctccagcgaagggactggagtgggtctcagctattcttaatggtggtactagcacattctacggagactccgtgaagggccggttcaccatctccagagacaactccaagaacacgctgtatctgcaaatgagcagcctgagagccgaggacacggccgtctattactgtgcgcgccgggttgagggcaggtttgactactggggccagggaaccctggtcaccgtctcctca

SEQ ID NO: 10869 - DNA, 280 bp, Homo sapiens
  source 1..280: mol_type = other DNA
tgcagcctctggattcacctttagcacctatgacatgacctgggtccgccaggctccagggagggggctggagtgcgtcgcagttatttatggtggtgatggtagcacagaatatgcagactccgtgaagggccggttcaccatctccagagataattccaggaacacgctatttctgcaaatgaacagcctgagagtcgaggacacggccctatattactgtgcgaaagggtccgcgtgtgactactggggccagggaaccctggtcaccgtctcctca

SEQ ID NO: 10870 - DNA, 328 bp, Homo sapiens
  source 1..328: mol_type = other DNA
tgcagcctctggattcacctttagcacctatgacatgacctgggtccgccaggctccagggagggggctggagtgcgtcgcagttatttatggtggtgatggtagcacagaatatgcagactccgtgaagggccggttcaccatctccagagataattccaggaacacgctatttctgcaaatgaacagcctgagagtcgaggacacggccctatattactgtgcgaaagggtccgcgtgtgactactggggccagggaaccctggtcaccgtctcctcaggtgagtcctcacaacctggccagggaaccctggtcaccgtctcctca

SEQ ID NO: 10871 - DNA, 280 bp, Homo sapiens
  source 1..280: mol_type = other DNA
tgcagcctctggattcacctttagcacctatgacatgagctgggtccgccaggctccagggaaggggctagagtgggtctcagttatttatagggatggtagaagcacgcaatatgcagactccgtgaggggccggttcatcatctccagagataattccaagaacacactatatctacaaatgaacagcctgagagccgaggacacggccgtatattactgtgcgaaaggttcggcttgtgactactggggccagggaaccctggtcaccgtctcctca

SEQ ID NO: 10872 - DNA, 280 bp, Homo sapiens
  source 1..280: mol_type = other DNA
tgcagcctctggattcacctttagcagctatgacatgagctgggtccgccaggctccagggaaggggctggagtgggtctcagttatttatagcggtggtagaagcacatactatgcagactccgtgaagggccggttcatcatctccagagataattccaagaacacgctgtatctgcaaatgaacagcctgagagccgaggacacggccgtatattactgtgcgaaaggttcggcttgtgactactggggccagggaaccctggtcaccgtctcctca

SEQ ID NO: 10873 - DNA, 280 bp, Homo sapiens
  source 1..280: mol_type = other DNA
tgcagcctctggattcccctttagcagctatgacatgagctgggtccgccaggctccagggaaggggctggagtgggtctcagtgatttatggtggttctggaagcacatactatgcagactccgtgaagggccggttcatcatctccagagataattccaagaatacgctctatctgcaaatgaacagcctgagagccgaggacacggccgtatattactgtgcgaaaggttcggcttgtgactactggggccagggaaccctggtcaccgtctcctca

SEQ ID NO: 10874 - DNA, 283 bp, Homo sapiens
  source 1..283: mol_type = other DNA
tgcagtctctggattcaccctcagtaactactggatacactgggtccgccaagccccagggaaggggctggtgtgggtctcacgtattagtaaagatgggactgtcacaaactacgcggactccgtgaagggccgattcaccatctccagagacaacgccaagaacacggtgtatctacaaatgaacagtctgagagccgaggacacggctgtctattattgtgtaagagatctgcggatctatgacttctggggccagggaaccctggtcaccgtctcctca

SEQ ID NO: 10875 - DNA, 283 bp, Homo sapiens
  source 1..283: mol_type = other DNA
tgcagcctctggattcaccatcagtacctactggatgcactgggtccgtcaagctccagggaaggggctggtgtgggtctcacgtattaatggagatgggagtagcacaaattacgcggactccgtgaagggccgattcaccatctccagagacaacgccaagaacacagtgtttctgcaaatgaatagtctgagagacgacgacacggctgtgtattactgtgtaagagatctgcgtatatatgacttctggggccagggaaccctggtcaccgtctcctca

SEQ ID NO: 10876 - DNA, 283 bp, Homo sapiens; identical to SEQ ID NO: 10875
  source 1..283: mol_type = other DNA

SEQ ID NO: 10877 - DNA, 283 bp, Homo sapiens
  source 1..283: mol_type = other DNA
tgcagcctctggattcaccatcagtagttactggatacactgggtccgtcaagctccagggaaggggctggtgtgggtctcacgtattaatggagatgggagtagcacaagttacgcggactccgtgaagggccgattcaccatctccagagacaacgccaagaacacagtgtttctgcaaatgaatagtctgagagacgacgacacggctgtgtattactgtgtaagagatctgcgtatatatgacttctggggccagggaaccctggtcaccgtctcctca

SEQ ID NO: 10878 - DNA, 283 bp, Homo sapiens; identical to SEQ ID NO: 10875
  source 1..283: mol_type = other DNA

SEQ ID NO: 10879 - DNA, 277 bp, Homo sapiens
  source 1..277: mol_type = other DNA
tgcagcctcaggattcacctttagcaactatgtcatgagctgggtccgccatactccagggaaggggctgaagtgggtctcaactataagtgatagtggtggtagcacatactacgcagactccgtgaggggccggttcaccatctccagagacaattccaagaacacgctgtatctgcaaatgaacagcctgagagccgaggacacggccgtatattactgtgcgaaagggtggtttgactactggggccagggaaccctggtcaccgtctcctca

SEQ ID NO: 10880 - DNA, 271 bp, Homo sapiens
  source 1..271: mol_type = other DNA
tgcagcctctggattcacctttagtaactatgccatgacctgggcccgccaggctccagggaaggggctggagtgggtctcaactattagtggtcgtggcacatactacgcagactccgtgaagggccggttcaccatctccagagacaattccaagaacacgctgtatctgcaaatgaacagcctgagagccgaggacacggccgtatattactgtgcgaagggctggtttgactactggggccagggaaccctggtcaccgtctcctca

SEQ ID NO: 10881 - DNA, 289 bp, Homo sapiens
  source 1..289: mol_type = other DNA
tgcagcctctggattcacctttagcagctatgccatgagctgggtccgccaggctccagggaaggggctggagtgggtctcaattatttatagcggtggtagtagaacatattatgcagactccgtgaagggccggttcaccatctccagagatcattccaagaacacgctgtatctgcaaatgaacagcctgagagccgaggacacggccgtatattactgtgcgaaagggatagccgtggctgcttttgactactggggccagggaaccctggtcaccgtctcctca

SEQ ID NO: 10882 - DNA, 289 bp, Homo sapiens
  source 1..289: mol_type = other DNA
tgcagcctctggattcacctttaacaactatgccatgagctgggtccgccaggctccagggaaggggctggagtgggtctcagttatttatagcggtggtcgtagcacatactatgcagactccgtgaagggccggttcaccatctccagagataattccaagaacatcctgtatctgcaaatgaacagcctgagagccgaggacacggccgtatattactgtgcgaagggtatagcagtggctgcttttgactactggggccagggaattctggtcaccgtctcctca

SEQ ID NO: 10883 - DNA, 289 bp, Homo sapiens
  source 1..289: mol_type = other DNA
tgcagcctctggattcacctttagcagctatgccatgagctgggtccgccaggctccagggaaggggctggagtgggtctcagttatttatagcggtggtcgtagcacatactatgcagactccgtgaagggccggttcaccatctccagagataattccaagaacacgctgtatctgcaaatgaacagcctgagagccgacgacacggccgtatattactgtgcgaaaggtatagcagtggctgcttttgactactggggccagggaaccctggtcaccgtctcctca

SEQ ID NO: 10884 - DNA, 289 bp, Homo sapiens; identical to SEQ ID NO: 10883
  source 1..289: mol_type = other DNA

SEQ ID NO: 10885 - DNA, 289 bp, Homo sapiens
  source 1..289: mol_type = other DNA
tgcagcctctggattcacctttaacaactatgccatgagctgggtccgccaggctccagggaaggggctggagtgggtctcagttatttatagcggtggtcgtagcacatactatgcagacttcgtgaagggccggttcaccatctccagagataattccaggaacacggtgtatctgcagatgaacagcctgagagccgaggacacggccctatattactgtgcgaaaggtatagcagtggctgcttttgactactggggccagggaaccctggtcaccgtctcctca

SEQ ID NO: 10886 - DNA, 289 bp, Homo sapiens
  source 1..289: mol_type = other DNA
tgcagcctctggattcacctttagcagctatgccatgagctgggtccgccaggctccagggaaggggctggagtgggtctcagttatttatagcggtggtcgtagcacatactatgcagactccgtgaagggccggttcaccatctccagagataattccaagaacacgctgtatctgcaaatgaacagcctgagagccgacgacacggccgtatattactgcgcgaaaggtatagcagtggctgcttttgactactggggccagggaaccctggtcaccgtctcctca

SEQ ID NO: 10887 - DNA, 297 bp, Homo sapiens
  source 1..297: mol_type = other DNA
gcatctggatacaccttcaccagctactatatgcactgggtgcgacaggcccctggacaagggcttgagtggatgggaataatcaaccctaatagtggtagcacaacctacgcacagaagttccagggcagagtcatcatgaccagggacacgtccacgagcacagtctacatgcagttgagcagcctgagatctgaggacacggccgtatattactgtgcgagagggttgggtatagcagcagctggtactttacctgactactggggccagggaaccctggtcaccgtctcctca

SEQ ID NO: 10888 - DNA, 297 bp, Homo sapiens
  source 1..297: mol_type = other DNA
gcatctggatacaccttcaccagctattatatgcactgggtgcgacaggcccctggacaagggcttgagtggatgggaataatcaaccctagtggtggtagcacaagctacgcacagaagttccagggcagagtcaccatgaccagggacacgtccacgagcacaatctacatggagctgagcagcctgagatctgaggacacggccgtgtattactgtgcgagaggtttaggaatagcagcagctggtacacttcccgactactggggccagggaaccctggtcaccgtctcctca

SEQ ID NO: 10889 - DNA, 300 bp, Homo sapiens
  source 1..300: mol_type = other DNA
aagggatctggatacagttttaccagctattggatcggctgggtgcgccagatgcccgggaaaggcctggactggatggggatcatctatcctagtgactctgataccagatacagcccgtccttccaaggccaagtcaccatctcagccgacaagtccatcaacaccgcctacctgcagtggaacagcctgaaggcctcggacaccgccatgtattactgtgcgaggtttgggggtaccagtggctggtactctggctttgactactggggccagggaaccctggtcaccgtctcctca

SEQ ID NO: 10890 - DNA, 300 bp, Homo sapiens
  source 1..300: mol_type = other DNA
aagggttctggatacagttttacaaattactggatcggctgggtgcgccagatgcccgggaaaggcctggagtggatggggatcatctatcctagtgactctgataccagatacagcccgtccttccaaggccaggtcaccatctcagccgacaagtccctcaactccgcctacctgcagtggagcagcctgaaggcctcggacaccgccatgtatttctgtgcaagattcggggggaccagtggctggtactcggggtttgactactggggccagggaaccctggtcaccgtctcctca

SEQ ID NO: 10891 - DNA, 300 bp, Homo sapiens
  source 1..300: mol_type = other DNA
aagggttctggatacagctttaccaactactggatcggctgggtgcgccagatgcccgggaaaggcctggagtggatggggatcatctaccctagtgactctgataccagatacagcccgtccttccaaggccaggtcaccatctcagccgacaagtccatcaactccgcctacctgcagtggaacagcctgaaggcctcggacaccgccatgtatttctgtgcaagattcggggggaccagtggctggtactcgggctttgactactggggccagggaaccctggtcaccgtctcctca

SEQ ID NO: 10892 - DNA, 300 bp, Homo sapiens; identical to SEQ ID NO: 10890
  source 1..300: mol_type = other DNA

SEQ ID NO: 10893 - DNA, 277 bp, Homo sapiens
  source 1..277: mol_type = other DNA
tgcagcctctggattcaccttcagtacttacgacatgcactgggtccgccaaactacaggaaaaggtctggagtgggtctcaggtattgctactgctggtgacacatactattcaggctccgtgaagggccggttcaccatctccagagaaaatgccaagaactccttgtatcttcaaatgaacagcctgagagccggggacacggctgtgtattattgtgcaagaggaaatggttggggggtctggggccaagggaccacggtcaccgtctcctca

SEQ ID NO: 10894 - DNA, 277 bp, Homo sapiens
  source 1..277: mol_type = other DNA
tgcagcctctggattcaccttcagtagctacgacatgcactgggtccgccaagttacaggaaaaggtctggagtgggtctcagctattactactgctggtgacacatactatccaggctccgtgaagggccgattcaccatctccagagaaaatgccaagaactccttgtatcttcaaatgaacagcctgagagccggggacacggctgtgtattactgtgcaagaggaaacgggtggggggtctggggccaagggaccacggtcaccgtctcctca

SEQ ID NO: 10895 - DNA, 301 bp, Homo sapiens
  source 1..301: mol_type = other DNA
tacaacctctggattcacctttggtgattatgctatgagctgggtccgccaggctccagggaaggggctggagtgggtaggtttcatgagaagcaaagcttatggtgggacaacagaatacgccgcgtctgtgaaaggcagattcaccatctcaagagatgattccaaaagcatcgcctatctgcaaatgaacagcctgaaaaccgaggacacagccgtgtattactgtagtagagatcgtggatacagctatggttacggagactactggggccagggaaccctggtcaccgtctcctca

SEQ ID NO: 10896 - DNA, 301 bp, Homo sapiens
  source 1..301: mol_type = other DNA
tacagcttctggattcacctttggtgattatgctatgagctgggtccgccaggctccagggaaggggctggagtgggtaggtttcattagaagcaatgcttatggtgggacaacagaatacgccgcgtctgtgaaaggcagattcaccatctcaagagatgattccaaaagcatcgcctatctgcaaatgaacagcctgaaaaccgaggacacagccgtgtattactgtagtagagatcgcgggtacagctatggctacggagactactggggccagggaaccctggtcaccgtctcctca

SEQ ID NO: 10897 - DNA, 301 bp, Homo sapiens
  source 1..301: mol_type = other DNA
tacaacttctggattcacctttggtgattatgctttgagctgggtccgccaggctccagggaaggggctgcagtgggtaggtttcattagaagcaaagcttatggtgggacaacagaatacgccgcggctgtgaaaggcagattcaccatctcaagggatgattccaaaagcatcgcctatctgcaaatgaacagcctggaaaccgaggacacagccgtgtattactgtagtagagatcggggatacagctatggctacggggactactggggccagggaaccctggtcaccgtctcctca

SEQ ID NO: 10898 - DNA, 301 bp, Homo sapiens
  source 1..301: mol_type = other DNA
tacatcttctggattcacctttggtgattatgctatgagctgggtccgccaggctccagggaagggactggagtgggtaggtttcattagaagcaaaccttatggtgggtcaacagactacgccgcgtctgtgaaaggcagattcaccatctcaagagatgattccaaaagcatcgcctatctacaaatgaacagcctgaaaaccgaggacacagccgtgtattactgtagtagagaccgtggatacagctatggttacggtgactactggggccagggaaccctggtcaccgtctcctca

SEQ ID NO: 10899 - DNA, 283 bp, Homo sapiens
  source 1..283: mol_type = other DNA
tgcagcctctggattcacctttagtaggtattggatgacctgggtccgccaggctccagggaaggggctggagtgggtggccaacataaaggaagatggaagtgagaaaaactatgtgggctctgtgaagggccgcttcaccatatccagagacaacgccaggaactcactgtatttgcaaatgaacagcctgagagccgaggagacggctgtgtatttctgtgcgagtgggtcgggtggtcatcactactggggccagggaaccctggtcaccgtctccgca

SEQ ID NO: 10900 - DNA, 283 bp, Homo sapiens
  source 1..283: mol_type = other DNA
tgtagcctctggattcacctttagtaggtattggatgacctgggtccgccaggctccagggaaggggctggagtgggtggccaacataaaggaagatggaagtgagaaaaactatgtggactctgtgaggggccgattcaccatctccagagacaacgataagaactcactgtttttgcaaatgaacagcctgagagccgaggacacggctgtgtattactgtgcgagtggtagtggtggccaccactactggggccagggaaccctggtcaccgtctcctca

SEQ ID NO: 10901 - DNA, 283 bp, Homo sapiens
  source 1..283: mol_type = other DNA
tgcagcctcaagattcagtttcagtaattattggatgagctgggtccgccaggctccagggaaggggctggagtgggtggccaacataaaggaagatggaagtgagaaaaactatgtggactccgtgaagggccgattcaccatctccagagacaacgccaagaactcactgtatctgcaaatgaacagcctgagagtcgaggacacggctgtatattactgtgcgagcggaagtgggggccatcattactggggccagggaaccctggtcaccgtctcctca

SEQ ID NO: 10902 - DNA, 289 bp, Homo sapiens
  source 1..289: mol_type = other DNA
tacaacttctggattcacctttggtgattataatatgagctgggtccgccaggctccagggaaggggctggagtggttaggtttcattagaaggaaagcttctggtgggacaacagaatacgccgcgtctgtgaaaggcagattcaccatctcaagagatgattccaaagggatcgcctatctgcaaatgaacagcctgaaaaccgaggacacagccgtatattcctgtactagaggggatggctggtactactactggggccaaggaaccctggtcaccgtctcctca

SEQ ID NO: 10903 - DNA, 289 bp, Homo sapiens
  source 1..289: mol_type = other DNA
tacagcctctggattcacctttggtggttatgctatgagctgggtccgccaggctccagggaaggggctggagtgggtgggtctcattagaaacaaagcttatggtgggacaacagaatacgccgcgtctgtgaaaggcagattcaccatctcaagagatgattccaaaagcatcgcctatctgcaaatgaacagcctgaaaaccgaggacacagccgtgtattactgtactagaggcgatggctggtactactactggggccagggaaccctggtcaccgtctcctca

SEQ ID NO: 10904 - DNA, 307 bp, Homo sapiens
  source 1..307: mol_type = other DNA
tgcagcctctggattcacctttagtagctattggatgagctgggtccgccaggctccagggaaggggctggagtgggtggccaacataaagcaagatggaagtgagactttctatgtggactctgtgaagggccgatttaacatctccagagacaacgccaagaactcactgtatctgcaaatgaacagcctgagagccgaggacacggctgtgtattactgtgcgagaaaactgtattactatgatactagtgaattggggtggttcgacccctggggccagggaaccctggtcaccgtctcctca

SEQ ID NO: 10905 - DNA, 307 bp, Homo sapiens
  source 1..307: mol_type = other DNA
tgcagcctctggattcacctttagtaactcttggatgagttgggtccgccaggctccagggaaggggctggagtgggtggccaccataaagcaagatggaagtgagaaatactatgtggactctgtgaagggccgattcaccatctccagagacaaccccaagaactcattgtatctacaaatgaacagcctgagagccgaggacacggctgtatattactgcgcgagaaaactatattactatgatactagtgagttgggatggttcgacccctggggccagggaaccctggtcaccgtctcctca

SEQ ID NO: 10906 - DNA, 277 bp, Homo sapiens
  source 1..277: mol_type = other DNA
tggagcctctggactctcccttagtacctattggatgacctgggtccgccaggcaccagggaaggggctggagtgggtggccacaataacgggagatggaagtgagaaattctatgtggactctgtgaagggccgattcaccatctccagagacgacgccaacaacttagtctatctgcaaatgaacagtctgacagccgaggacacggctctttattactgtgtgagagatccagtggaccactggggccagggaaccccggtcaccgtctcctca

SEQ ID NO: 10907 - DNA, 277 bp, Homo sapiens
  source 1..277: mol_type = other DNA
tgcagcctctggattcacctttagtaactattggatgagttgggtccgccaggctccagggaaggggctggagtgggtggccaccttgaagcaaggtggaactgagaaattctatgtggactctgtgaagggccgattcaccatctccagagacaacgccaagaactcagtgtatctgcaaatggacagcctgagagccgaggacacggctctgtattactgtgtgcgggacccagttgaccactggggccagggaaccctggtcaccgtctcctca

SEQ ID NO: 10908 - DNA, 295 bp, Homo sapiens
  source 1..295: mol_type = other DNA
tacagcctctggattcacctttagtagctataccatgagctgggtccgccaggctccagggaaggggctggagtgggtctcagctattagtggtggtggtggtagcacatactacgcagactccgtgaagggccggttcaccatctccagagacaattccaagaacacactgtatctgcaaatgaacagcctgagagccgaggacacggccgtatattactgtgcgaaagggcggggtagtgggagctacgcccctgactactggggccagggaaccctggtcaccgtctcctca

SEQ ID NO: 10909 - DNA, 292 bp, Homo sapiens
  source 1..292: mol_type = other DNA
tgcagcctctggattcaccttgagcagctatgccatgacctgggtccgccaggctccagggaaggggctggagtgggtctcttctcttagtgggagtggtagcacatcctacgcagactccgtgaagggccggttcaccatctccagagacacttccaagaacaccctctatctgcaaatgaacagcctgagagccgcggacacggccttatatttctgtgcgaaaggcaggggttcggggagttatgctcctgactactggggccagggaaccctggtcaccgtctcctca

SEQ ID NO: 10910 - DNA, 286 bp, Homo sapiens
  source 1..286: mol_type = other DNA
taatgtctctggtgactccaccagtcaatactactggagctggatccgggagcccgccgggaagggactggagtggattgggcgcatccattccagtggaaccaccgcctacaacccctccctcacgagtcgactcaccgtgtcacttgatacgtccaagaaccaactctccctgaagttgacttctgtgaccgccgcggacacggccatgtattactgtgcgagagacccctttcggtctggctttgactactggggccagggagccctcgtcaccgtctcctca

SEQ ID NO: 10911 - DNA, 286 bp, Homo sapiens
  source 1..286: mol_type = other DNA
cactgtctctggtgcctccatcagtacttactactggaactggatccgacagcccgccgggaagggactggagtggattgggcgtatccatcccagtgtgggcaccaggtacaacccctccctcaagagtcgagtcaccatgtcggtggacacgtccaagaaccagttctcccttaatctgacgtctgtgaccgccgcggacacggccgtatattactgtgcgagagatccattccgatccggcttcgactactggggccagggaaccctggtcaccgtctcctca

SEQ ID NO: 10912 - DNA, 301 bp, Homo sapiens
  source 1..301: mol_type = other DNA
cactgtctctggtggctccatcagtagttactactggagctggatccggcagcccccagggaagggactggagtggattgggtttatttattacagtgggagtactagctacaacccctccgtcaagagtcgagtcaccatatcagtagacacgtccaagaaccagttctccctgaagctgacctctgtgagcgccgcagacacggccgtgtattactgtgggagaacgcattacgatattttgactgctcattggaaccatgactactggggccagggcaccctggtcaccgtctcctca

SEQ ID NO: 10913 - DNA, 301 bp, Homo sapiens
  source 1..301: mol_type = other DNA
cactgtctctggtggctccatcagtagttactactggagctggatccggcagcccccgggaaagggactggagtggattgggtttatttattacagtgggagtactagctacaacccctccgtcaagagtcgagtcaccatatcagtagacacgtccaagaaccagttctccctgaagctgacctctgtgagcaccgcagacacggccgtgtattactgtgggagaacgcattacgatattttgactgctcattggaaccatgactactggggtcagggcaccctggtcaccgtctcctca

SEQ ID NO: 10914 - DNA, 301 bp, Homo sapiens
  source 1..301: mol_type = other DNA
cgctgtctatggtgggtccttcagtggttactactggagctggatccgccagcccccagggaaggggctggagtggatcgggcaaatcagtcatagtggaagcaccaactacaatccgtccctcaagagtcgagtcaccatatcagtcgacacgtccaggaaccagttctccctgaagatgacctctgtgaccgccgcggacacggctgtttattactgtgcgggggctgtggtggtgactgctatggcctactggtacttcgatctctggggccgtggcaccctggtcactgtctcctca

SEQ ID NO: 10915 - DNA, 301 bp, Homo sapiens
  source 1..301: mol_type = other DNA
cgctgtctatggtgggtccttcagtggatactactggagctggatccgccagcccccagggaaggggctggagtggatcgggcaaatcagtcatagtggaagcaccaattacaatccgtccctcaagagtcgagtcaccatatcagtcgacacgtccaggaaccagttctccctgaagatgacctctgtgaccgccgcggacacggctgtatattactgtgcgggggctgtggtggtgactgctatggcctactggtacttcgatctctggggccgtggcaccctggtcactgtctcctca

SEQ ID NO: 10916 - DNA, 301 bp, Homo sapiens
  source 1..301: mol_type = other DNA
cgctgtctatggtgggtctttcagtggttactactggacctggatccgccagcccccagggaaggggctggagtggattggggaaatcaatcatagtggaagcaccaactacaacccgtccctcaagagtcgggtcaccgtatcagtagacacgtccaagaaccagttctccctgaagttgacgtctgtgaccgccgcggacacggctgtgtattactgtgcgggggctgtggtggtgactgctatggcctactggtacttcgatctctggggccgtggcaccctggtcactgtctcctca

SEQ ID NO: 10917 - DNA, 301 bp, Homo sapiens; identical to SEQ ID NO: 10916
  source 1..301: mol_type = other DNA

SEQ ID NO: 10918 - DNA, 301 bp, Homo sapiens; identical to SEQ ID NO: 10915
  source 1..301: mol_type = other DNA

SEQ ID NO: 10919 - DNA, 274 bp, Homo sapiens
  source 1..274: mol_type = other DNA
tgcagcctctggattcacctttagcagctatgccatgagctgggtccgccaggctccagggaaggggctggagtgggtctcagttatttatagcggtggtagtacaacatactatgcagactccgtgaagggccggttcaccatctccagagatgattccaagaacacgctgtatctgcaaatgaacagcctgagagccgaggacacggccgtatattactgtgtgaaagataacgactactggggccagggaaccctggtcaccgtctcctca

SEQ ID NO: 10920 - DNA, 274 bp, Homo sapiens
  source 1..274: mol_type = other DNA
tgcggcctctggattcacctttagcagtaatgccatgagctgggtccgccaggctccagggaaggggctggagtggatctcagttgtttatagcgggggtagtagcacatactatgcagactccgtgaagggccggttcaccatctccagagatgattccaagaacacgttgtatctgcaaatgaacagcctgagaggcgaggacacggccgtatatcactgtgtgaaagataatgactactggggccagggaaccctggtcaccgtctcctca

SEQ ID NO: 10921 - DNA, 293 bp, Homo sapiens
  source 1..293: mol_type = other DNA
ccatctccggggacagtgtctctagcaacagtgctacttggaattggatcaggcagtccccatcgagaggccttgagtggctgggaaggacatactacaggtccaagtggtataatgatcatatagtgtctgtgaatagtcggataaccatcaaccccgacacatccaagaaccagttctccctgcagctgaactctgtgactcccgacgacacggctatatactactgtgtaaggtattctagtggtcgctttgactactggggccagggaaccctggtcaccgtctcctca

SEQ ID NO: 10922 - DNA, 293 bp, Homo sapiens
  source 1..293: mol_type = other DNA
ccatctccggggacagtgtctctagcaacagtgctacttggaattggatcaggcagttcccatcgagaggccttgagtggctgggaaggacatactacaggtccaagtggtataatgatcatatagtgtctgtgaatagtcggataaccatcaaccccgacacatccaagaaccagttctccctgcagctgaactctgtgactcccgacgacacggctatatactactgtgtaaggtattctagtggtcgctttgactactggggccagggaaccctggtcaccgtctcctca

SEQ ID NO: 10923 - DNA, 293 bp, Homo sapiens
  source 1..293: mol_type = other DNA
ccatctccggggacagtgtctccagcaacagtgctacttggaactggatcaggcagtccccttcgagaggccttgagtggctgggaaggacatactacaggtccaagtggtctgatgattatgcagtgtctgtgaaaagtcgaataaacatcagcccagacacatccaagaacgaggtctccctgctgctgaggtctgtgactgccgaagacacggctgtgtattattgtgttcgatatagcagtggacgatttgactactggggccagggaaccctggtcaccgtctcctca

SEQ ID NO: 10924 - DNA, 293 bp, Homo sapiens
  source 1..293: mol_type = other DNA
ccatctccggcaacagtgtctccagcaacagtgctgcttggaactggatcaggcagtccccttcgagaggcctggagtggctgggaaggacatactacaggtccaagtggtctgatgattatgcagtgtctgtgaaaagtcgaataaacatcaacccagacacatccaagaacgaggtctccctgctgctgaagtctgtgactgccgaagacacggctgtgtattattgtgttcgatatagcagtggacgatttgactactggggccagggaaccctggtcaccgtctcctca

SEQ ID NO: 10925 - DNA, 274 bp, Homo sapiens
  source 1..274: mol_type = other DNA
tgcagcctctgggttcaccgtccagagcaccttcatgaattgggtccgccaggctccagggaaggggctggagtgggtctctcttattagtgccgctggtaccattcactacgtagactccgtgaagggccgattcaccatttcccgagacaattccaagaacacgatctatcttgaaataaacagcctgagagtcgatgacacggccgtgtattactgtgcgagaggtgatatggccgtctggggccaagggaccacggtcaccgtctcctca

SEQ ID NO: 10926 - DNA, 274 bp, Homo sapiens
  source 1..274: mol_type = other DNA
tgcagcctctgggttcaccgtccagagcaccttcatgaattgggtccgccaggctccagggaaggggctggagtgggtctctcttattagtgccgctggtaccgttcactacgtagactccgtgaagggccgattcaccatttcccgagacaattccaagaacacggtctatcttgaaataaacagcctgagagtcgatgacacggccgtgtattactgtgcgagaggtgatatggccgtctggggccaagggaccacggtcaccgtctcctca

SEQ ID NO: 10927 - DNA, 274 bp, Homo sapiens
  source 1..274: mol_type = other DNA
tgcagcctctgggttcaccgtccgtagcaccttcatgaattgggtccgccaggctccagggaaggggctggagtgggtctcacttattaatagcggtggtagcggttactacgtagactccgtgaagggccgattcaccatctccagagacaattccaagaacacggtgtatcttgaaataaacagcctgagagtcgacgacacggccgtgtattactgtgcgagaggtgatatggccgtctggggccaagggaccacggtcatcgtctcctca

SEQ ID NO: 10928 - DNA, 274 bp, Homo sapiens
  source 1..274: mol_type = other DNA
cgcagcctctgggttcgccgtcaatagcgacttcatcagctgggtccgccaggctccagggaaggggctggagtgggtctcccttattagtaccgctggtaccccatactatgcagactccgtgaagggccgattcaccatctccagagacaatgccaagaacagtctgtttcttcaaatgaatggcctgagagccgaagacacggccgtgtattactgtgcgagaggcgatatggccgtctggggccaagggaccacggtcatcgtctcctcg

SEQ ID NO: 10929 - DNA, 274 bp, Homo sapiens
  source 1..274: mol_type = other DNA
cgcagcctctgggttcgccgtcaatagcgacttcatcagctgggtccgccgggctccagggaaggggctggagtgggtctcccttattagtaccgctggtaccccatactatgcagactccgtgaagggccgattcaccatctccagagacaatgccaagaacagtctgtttcttcaaatgaatggcctgagagccgaagacacggccgtgtattactgtgcgagaggcgatatggccgtctggggccaagggaccacggtcatcgtctcctcg

SEQ ID NO: 10930 - DNA, 274 bp, Homo sapiens
  source 1..274: mol_type = other DNA
cgcagcctctgggttcgccgtcaatagcgacttcatcagctgggtccgccaggctccagggaaggggctggagtgggtctcccttattagtaccgctggtaccccatactatgcagactccgtgaagggccgattcaccatctccagagacaatgccaagaacagtctgtttcttcaaatgaatggcctgagagccgaagacacggccgagtattactgtgcgagaggcgatatggccgtctggggccaagggaccacggtcatcgtctcctcg

SEQ ID NO: 10931 - DNA, 292 bp, Homo sapiens
  source 1..292: mol_type = other DNA
tgcagcctctggattcaccctcaataactactggattcactgggtccgccaagctccggggaaggggctggtgtgggtctcacgtattagtgatgatgagtggaccacaaactacgcggactccgtgaggggccgattcaccatctccagagacaaagccaagaacacggtgtatctgcaaatgaacagtctgagagacgaggacacggctatgtattattgtgtaagaggtagcagtgactggaccggaattgactactggggccagggaatcctggtcaccgtctcctca

SEQ ID NO: 10932 - DNA, 292 bp, Homo sapiens
  source 1..292: mol_type = other DNA
tgcagcctctggattcaccttcagtacctactggatgcactgggtccgccaagctccagggatggggttggtgtgggtctcacgtatgactcctgatggcagttatacaaactacgcggactccgtgaagggccgattcaccatctccagagacaacaccaagaacacgctgtatctgcaaatgaacagtctgagagccgaggacacggctgtctattattgtgtaaggggtagcagtgactggaccggtatagactactggggccagggaatcctgatcaccgtctcctca

SEQ ID NO: 10933 - DNA, 280 bp, Homo sapiens
  source 1..280: mol_type = other DNA
tacagcctctggattcacctttagcacctatgccatgagctgggtccgccaggctccagggaaggggctggagtgcgtctcagttatttatagcgatggtagaagcccaaactatatagactccgtgaagggccggttcaccatctccagagataattccaagaacacggtgtatctgcaactgaacagcctgagagtcgaggacacggccgtgtattattgtacgaaaggagggcatgctgactactggggccagggaaccctggtcaccgtctcctca

SEQ ID NO: 10934 - DNA, 280 bp, Homo sapiens
  source 1..280: mol_type = other DNA
tgcagtctctggattcccctttagtagccatgaaatgagctgggtccgccaggctccagggaaggggctggagtacgtctcagttattagtagcgatggtagtaatacatactatgtagactccgtgaagggccaattcaccatctccagagataattccaagaacacgctgtatctgcaaatgaacagcctgagagccgaggacacggccgtttattactgtacgaaaggggggcacgcggactactggggccagggaaccctggtcaccgtctcctca

SEQ ID NO: 10935 - DNA, 280 bp, Homo sapiens
  source 1..280: mol_type = other DNA
tgcagtctctggattcccttttagtagctatgaaatgagctgggtccgccaggctccagggaaggggctggagtacgtctcagttattagtagcgatggtagtaatacatactatgtagactccgtgaagggccaattcaccatctccagagataattccaagaacacgctgtatctgcaaatgaacagcctgagagccgaggacacggccgtttattactgtacgaaaggggggcacgcggactactggggccagggaaccctggtcaccgtctcctca

SEQ ID NO: 10936 - DNA, 286 bp, Homo sapiens
  source 1..286: mol_type = other DNA
tgcagcctctggattcacctttagcagttacgccatgagctgggtccgccaggctccagggaaggggctggagtgtgtctcggttatttatgccgatggtactaggacatactatgcagactccgtgaggggccaattcaccatctccagagataattccaaaaacacgctgtatctgcaaatgaacagcctgagagccgaggacacggccatatattactgtgcgaaaggaggttcgcgatacttccagcactggggccagggcaccctggtcaccgtctcctca

SEQ ID NO: 10937 - DNA, 286 bp, Homo sapiens
  source 1..286: mol_type = other DNA
tgcagcctctggattcacctttagcagcagtgccatgagctgggtccgccaggctccagggaaggggctggagtgggtctcagttatttatggcggtggtagtagtacatactatgcagactctgtgaagggccggttcaccatctccagagataatcccaagaacacgctgtacctgcaaatgaacagcctgagagccgaggacacggccgtatattactgtgcgaaaggcggttcccgatacttccagcactggggccagggcaccctggtcaccgtctcctca

SEQ ID NO: 10938 - DNA, 277 bp, Homo sapiens
  source 1..277: mol_type = other DNA
tgcagcctctggattcaccttctttagttattggatgcactgggtccgccaagctccagggaaggggctggtgtgggtctcacgtatgaatggtgatgggagtctcacaacctacgcggactccgtgaagggccgattcaccatctccagagacaacgccaagaacacgctatatctgcaaatgaacagtctgagagccgaggacacggctatttattattgtgtaagaggtctgggtgacaagtggggccagggaaccctggtcaccgtctcctca

SEQ ID NO: 10939 - DNA, 277 bp, Homo sapiens
  source 1..277: mol_type = other DNA
tgcagtatttggattcaccttcagtgattactggatgtactgggtccgccaggttccagggaaggggctggtgtggctctcacgtattaatagtgacgggagtctcatagcctacgcggactccgtgaagggccgattcaccatctccagagacaacgccaagaacacgttgtttctgcaaatgaacagtctgagtggcgacgacacggctatttattattgtgtaagagggttgggcgataagtggggccagggaaccctggtcactgtctcctca

SEQ ID NO: 10940 - DNA, 277 bp, Homo sapiens
  source 1..277: mol_type = other DNA
tgcagtatctggattcaccttcagtgattactggatgtactgggtccgccaggttccagggaaggggctggtgtggctctcacgtattaatagtgacgggagtctcatagcctacgcggactccgtgaagggccgattcaccatctccagagacaacgccaagaacacgttgtttctgcaaatgaacagtctgagtggcgacgacacggctatttactattgtgtaagaggattgggcgataagtggggccagggaaccctggtcactgtctcctca

SEQ ID NO: 10941 - DNA, 304 bp, Homo sapiens
  source 1..304: mol_type = other DNA
tgcagcctctggattcactttcagtaacgcctggatgaattgggtccgccaggctccagggaaggggctggagtggattggccatattgaaagcaaatctgatggtgggtcaacagactacgctgcacccgtgaaaggcagattcaccatctcaagagatgattcacaaaacacggtgtttctgcaaatgaacagcctgaaaatcgaggactcagccatatattactgtgccacagccccgggattttacagttccgcgccgtttgactactggggccagggaaccttggtcaccgtctcctcg

SEQ ID NO: 10942 - DNA, 304 bp, Homo sapiens
  source 1..304: mol_type = other DNA
tgcagcctctggattcacttttactaacgcctggatgaactgggtccgccaggctccagggaaggggctgcagtgggttggccatattaaaagtgagactgacggtggcacaacagactacgctgcacccatgaaaggcagattcaccatctcaagagatgattcaaagaacacgctatatctgcaaatgaacagcctgacagccgaggacgccgccgtgtattactgtgccaccgccccgggcttctatagcagtgccccctttgactactggggcccgggaaccctggtcaccgtctcctca

SEQ ID NO: 10943 - DNA, 283 bp, Homo sapiens
  source 1..283: mol_type = other DNA
tgcagcccctggattcacctttagcaactatgccatgaactgggtccgccaggctccagggaaggggctggagtgggtctcaggtattagtggtaatgctgctaacacatactacacagactccgtgaagggccggttcaccatctccagggacaattccaagaacaccctgtatctgcaaatgaacagcctgagagacgaagacacggccgtttattactgtgcgaagggtggttattatttcgccgactggggccagggaaccctggtcaccgtctcctca

SEQ ID NO: 10944 - DNA, 283 bp, Homo sapiens; identical to SEQ ID NO: 10943
  source 1..283: mol_type = other DNA

SEQ ID NO: 10945 - DNA, 283 bp, Homo sapiens
  source 1..283: mol_type = other DNA
ttcagcctctggattcacctttagcagctatcccatgaactgggtccgccaggctccagggaagggaccggggtgggtctcaggtattagtgatagtggttctgacacatactacgcagactccgtgaagggccggttcaccatctccagagacaactccaagaacacggtgtatctacaaatgaacagcctgagagccgaggacacggccgtatattcgtgtgcgaaggggggctactactttgctgactggggccagggaaccctggtcaccgtctcctca

SEQ ID NO: 10946 - DNA, 301 bp, Homo sapiens
  source 1..301: mol_type = other DNA
cgcaggctctggattcatgtttaataacatgtttgataattatgccttacactggatccggcaacctccagggaagggcccggagtgggtctcaggtatttattggaatggagctaggagagactatgcggactctgtgaagggccggttcaccatctccaaggacgacgccaagaactccctgtatctgcagatgaacagtctgagacctgaggacacggccttatattactgtgtaaaagatcttgagcccggcggtgcggacgtctggggccaagggaccacggtcaccgtctcctca

SEQ ID NO: 10947 - DNA, 289 bp, Homo sapiens
  source 1..289: mol_type = other DNA
cgcagtctttggatctacctctactgattatggcatgcactgggtccggcaagctccaggcaagggcctggagtgggtcgcaggcatcatctggaatagcggtcgaatcggctatgcggactctgtgaagggccgattcaccatctccggagccaatgccctgacctccctgtatctgcaaatgaacagtctgagacctgacgacacggccttatatttctgtgtaaaagaccttgagcccgggggtgcggacgtctggggcccagggacgacggtcactgtctcctca

SEQ ID NO: 10948 - DNA, 285 bp, Homo sapiens
  source 1..285: mol_type = other DNA
ggttctggatacaccttcaccagttatgatatcaactgggtgcgacagacctctggacaagggtttgagtggatgggatggatgaatcctaacaatggtaacacaggctatgcacagaagttccaaggcagagtcaccatgaccagggacacctccataagaacagcctacatggagttgaccagcctgacatctgaagacacggccgtgtattactgtgcgaggagccctcgggagtgggggtttgacttctggggccagggaaccctggtcaccgtctcctcg

SEQ ID NO: 10949 - DNA, 285 bp, Homo sapiens
  source 1..285: mol_type = other DNA
ggttctggatacaccttcaccagttatgatatcaactgggtgcgacagacctctggacaagggtttgagtggatgggatggatgaatcctaacaatggtaacacaggctatgcacagaagttccaaggcagagtcaccatgaccagggacacctccataagaacagcctacatggagttgaccagcctgacatctgaagacacggccgtgtattactgtgcgaggagccctcgggagtgggggtttgacttctggggccagggaaccctggtcaccgtctcctca

SEQ ID NO: 10950 - DNA, 285 bp, Homo sapiens
  source 1..285: mol_type = other DNA
ggttctggatacaccttcaccagttatgatatcaactgggtgcgacagacctctggacaagggtttgagtggatgggatggatgaatcctaacaatggtaacacaggctatgcacagaagttccaaggcagagtcaccatgaccagggacacctccataagaacagcctacatggagttgaccagcctgacatctgaagacacggccgtgtattactgtgcgaggagccctcgggagtgggggtttgacttctggggccaaggaaccctggtcaccgtctcctca

SEQ ID NO: 10951 - DNA, 280 bp, Homo sapiens
  source 1..280: mol_type = other DNA
tgcagcctctggattcacctttagtagttcttggatgacctgggtccgccaggctccagggaaggggctggagtgggtggccaatataaaggaagatggaggtgacaaatcctatgtggactctgtgaagggccgattcaccatctccagagacaacgccaagaactcactgtatctgcaaatgaacggcctgagagtcgaggacacggctgtgtattattgtgtgagatttgtgtctctcggctactggggccagggaaccctggtcaccgtctcctca

SEQ ID NO: 10952 - DNA, 280 bp, Homo sapiens
  source 1..280: mol_type = other DNA
tgcagcgtctggattcgtcttcggtagttatgccatgcactgggtccgccaggctcctggcaaggggctggagtgggtggccaacataaaccaagatggaagtgagaaatactatgtggactctgtgaagggccgactcaccatctccagagacaacgccaagacctcattgtatctgcaaatgaacagcctgagagccgaggacacggcagtgtattactgtgtgcgttttgtgtctttggggtactggggccagggaaccccggtcaccgtctcctca

SEQ ID NO: 10953 - DNA, 306 bp, Homo sapiens
  source 1..306: mol_type = other DNA
gcttctggatacaccttcactaactttgctatccattgggtgcgccaggcccccggacaaaggcttgagtggatgggatggatcaacgctggcaatggtaacacaaaatattcacagaagttccagggtagagtcaccattaccagggacacatccgcgagcacagcctacatggacctgagcagcctgagatctgaagacacggctgcgtattactgtgcgagggcccattacgatattttgactggttcttcactcaactggttcgacccctggggccagggaaccctggtcaccgtctcctca

SEQ ID NO: 10954 - DNA, 306 bp, Homo sapiens
  source 1..306: mol_type = other DNA
gcttctggatacaccttcactaactatgctatccattgggtgcgccaggcccccggacaaaggcttgagtggatgggatggatcaacgctggcaatggtaacacaaaatattcacagaagttgcagggtagagtcaccattagcagggacacatccgcgagcacagcctacatggacctgagcagcctgagatctgaagacacggctgcgtattactgtgcgagggcccattacgatattttgactggttcttcactcaactggttcgacccctggggccaggggtcgctggtcaccgtctcctca

SEQ ID NO: 10955 - DNA, 306 bp, Homo sapiens
  source 1..306: mol_type = other DNA
acttctggatacaccttcactagctttggtatacattgggtgcgccaggcccccggacaaaggcttgagtgggtgggatggatcaacgctgacaacggcaacacaaaatattcacggaagttccagggcagagtcaccattaccagggacacatccgcgaacacagcctacatggaactgagcagcctgagatctgaagacacggctatgttttactgtgcgagagcccattacgatattttgactggttcatccctcaactggttcgacccctggggccagggaaccctggtcaccgtctcctca

SEQ ID NO: 10956 - DNA, 306 bp, Homo sapiens
  source 1..306: mol_type = other DNA
acttctggatacaccttcactagctatgctatacattgggtgcgccaggcccccggacaaaggcttgagtgggtgggatggatcaacgctgacaacggcaacacaaaatattcacggaagttccagggcagagtcaccattaccagggacacatccgcgaacacagcctacatggaactgagcagcctgagatctgaagacacggctgtgtattactgtgcgagagcccattacgatattttgactggttcatccctcaactggttcgacccctggggccagggaaccctggtcaccgtctcctca

SEQ ID NO: 10957 - DNA, 306 bp, Homo sapiens; identical to SEQ ID NO: 10955
  source 1..306: mol_type = other DNA

SEQ ID NO: 10958 - DNA, 286 bp, Homo sapiens
  source 1..286: mol_type = other DNA
tgcagcctctggattcaccttcagtggctactggttccactgggtccgccaagttccagggaaggggctggtgtgggtctcacgtattgatatggatgggagtaggacaaactacgcggactccgtgaagggccgattcaccatctccagagacaacgccaagaacacgctgtatctgcaaatgaacagtctgagagtcgacgacacggctgtgtattactgtgcaagggatctcactggccccgttgactactggggccagggaaccctggtcaccgtctcctca

SEQ ID NO: 10959 - DNA, 286 bp, Homo sapiens
  source 1..286: mol_type = other DNA
tgcagcctctggattcaccttcagtgactactggatgcactgggtccgccaagctccagggacggggcttgtgtgggtctcacgtattaatagagaggggacttatacaacctacgcggactccgtgaagggccgattcaccatctccagaggcaacgccaaggacaccctgtatctgcaaatgaacagtctgagagccgaggatacggctgtgtatttctgtgcaagagacttaactggaccggttgactactggggccagggaaccctggtcaccgtctcctca

SEQ ID NO: 10960 - DNA, 277 bp, Homo sapiens
  source 1..277: mol_type = other DNA
tgtagcctctggattcaccttcagggactactacatgggctggatccgccaggctccagggaaggggctggagtgggtttcatacattactagtagtgggagtaccatgtactacgcagactctgtgaagggccgattcaccatctccagggacaacgccaagaactcactgtatctgcaaatgaacagcctgagagccgaggacacggccgtatattactgtgcgaggcccggtgctgactactggggccagggaaccctggtcaccgtctcctca

SEQ ID NO: 10961 - DNA, 277 bp, Homo sapiens
  source 1..277: mol_type = other DNA
tgcagcctctggattcatcttcagtgacaccgacatgatctggatccgccaggctccagggaaggggctagagtggatttcgtatattactgtcagaggtagtaatatatattataaagactctgtgaaggggcgattcaccatctccagggacgacgccgagaactcactgtttctacaaatgaacagtctgagagtcgaagacacggccgtatattattgtgcgaggccgggggctgactactggggccagggaaccctggtcaccgtctcccca

SEQ ID NO: 10962 - DNA, 286 bp, Homo sapiens
  source 1..286: mol_type = other DNA
tgcaggatctggatacacttttgctgatctaagaatgaactgggtccgccagcttccagggaaggggctggagtggataacttttatccgaactaacgtcgatggtgggactcctgaatatgccgcgtctgtgagagggcgattcaccgtgtcaagagatgattccgaaagcatctcttatctgctgatgaccgacctgcaaatcgaagacactggcgtctatttttgtaccagaggtcactatgactcctattggggccagggggccctggtcaccgtctcctca

SEQ ID NO: 10963 - DNA, 286 bp, Homo sapiens
  source 1..286: mol_type = other DNA
tgaaggatctggatacaactttgctgatctgagaatgaactgggtccgccaggttccaggaaaggggctggagtggataagctttatcagaactgacgtcgatggtgggacacctgaatatgccgcgtctgtgagaggtcgattcaccgtgtcaagagatgattccaaaagcatctcttatctgctgatgcgcgacctgcaaatcgacgacactggcgtctatttttgtaccagaggtcattatgactcctattggggccagggggccctggtcaccgtctcctca

SEQ ID NO: 10964 - DNA, 286 bp, Homo sapiens
  source 1..286: mol_type = other DNA
tacaacttctggattcacctttggtgattttattatcaactgggtccgccagggtccagggaagaggctggagtgggtgggtttcattagaaccggggctaatggcgggaccacagaatacgccgcgtctgtgaagggcagattctccatctcaagagatgattccaaaagcatcgcctatctgcaaatgaacagcctgaaaatcgaggacacagccctatattactgtactagaggtcattatgattcttactggggccagggaacactggtcaccgtctcctca

SEQ ID NO: 10965 - DNA, 286 bp, Homo sapiens
  source 1..286: mol_type = other DNA
tgaaggatctggatacaactttgctcatctgagaatgaactgggtccgccaggttccaggaaaggggctggagtggataagctttatcagaactgacgtcgatggtgggacacctgaatatgccgcgtccgtgagaggtcgattcaccgtgtcaagagatgattccaaaagcatctcttatctgctgatgcgcgacctgcaaatcgacgacactggcgtctatttttgtaccagaggtcattatgactcctattggggccagggggccctggtcaccgtctcctca

SEQ ID NO: 10966 - DNA, 283 bp, Homo sapiens
  source 1..283: mol_type = other DNA
tgcagcctctggattcacgtttactaactattggatgacctgggtccgccaggctccagggaaggggctggagttggtggccaacataaacgaggatggaagtgagcaatactatgtggactctgtgaggggccgattcaccatctcccgagacaacaccaagaactcactgtatctgcaaatgaacagcctgagacccgaggacacggctgtgtatttctgtgcgagagcccgtgacttcgcggtctactggggccagggaaccctggtcaccgtctcctca

SEQ ID NO: 10967 - DNA, 283 bp, Homo sapiens
  source 1..283: mol_type = other DNA
tgcagcctctggattcacctttactagttattggctgacctgggtccgccaggctccagggaaggggctggagtgggtggccaacataaatgaagatggaagtgagaaatactatgtggactctgtgaagggccgattcaccatctccagagacaacgccaagaactcactgtatctgcaaatgaacagcctgagagccgaggacacggccgtgtattactgtgcgagagcaagagacttcgctgtctactggggccagggaaccctggtcaccgtctcctca

SEQ ID NO: 10968 - DNA, 277 bp, Homo sapiens
  source 1..277: mol_type = other DNA
tgcagcctctggattcacctttagcagctatgccatgagctgggtccgccaggctccagggaaggggctggagtgggtctcagctatcggtagtagcacatactacgcagactccgtgaagggccggttcaccatctccagagacagttccaaggaaactctgtatctgcaaatgaatagcctgagagtcgaggacacggccgtatattactgtgcgaaaggggaccgtggcagtggctggtactggggccagggaaccctggtcaccgtctcctca

SEQ ID NO: 10969 - DNA, 286 bp, Homo sapiens
  source 1..286: mol_type = other DNA
tgcagcctctggattcacctttagcagctatgccatgagctgggtccgccaggctccagggaaggggctggagtgggtctcagctattggtggtagcggtagtcccacagtctacgcagactccgtgaagggccggttcaccatctccagagacaattccaagaacacgctgtatctggaaacgagcagcctgagagccgaggacacggccttatattactgtgcgaaaggggatcgaggcagtggctggtactggggccagggaaccctggtcaccgtctcctca

SEQ ID NO: 10970 - DNA, 280 bp, Homo sapiens
  source 1..280: mol_type = other DNA
tgcagcctctggattcacctttagcaactatgccatgagctgggtccgccaggctccagggaaggggctggagtgggtctcagttattagtggtagtggtggtagcacatactacgcagactccgtgaagggccggttcaccatctccagagacaattccaagaacacgctgtatctgcaaatgaacagcctgagagccgaggacacggccgtatattactgtgcgaaagatcgtggctgcgcctactggggccagggaaccctggtcaccgtctcctca

SEQ ID NO: 10971 - DNA, 280 bp, Homo sapiens
  source 1..280: mol_type = other DNA
tgcagcctctggattcacctttagcagctatgccatgagctgggtccgccaggctccagggaaggggctggagtgggtctcagttattggtggtagtggtggtaccacatactacgcagactccgtgaagggccggttcaccatctccagagacaattccaagaacactctgtatctgcaaatgaacagcctgagagccgaggacacggccgtatattactgtgcgaaagatcgtggctgtgcctattggggccagggaaccctggtcaccgtctcctca

SEQ ID NO: 10972 - DNA, 304 bp, Homo sapiens
  source 1..304: mol_type = other DNA
tgcagcctctggattcaccttcagtgaccactatatggactgggtccgccaggctccagggaaggggctggagtgggttggtcgtattagagacaaacgtaccaattactacacagaatatgccgccgcgtctgtgaaaggcaggttcaccatctcaagagatgattccaaaaattcagtgtatctgcaaatgaacagcctggaaaccgaggacacggccgtttattactgtgttagagacggccgggcatacggtggctacttggattactggggccagggaaccctggtcaccgtctcctca

SEQ ID NO: 10973 - DNA, 301 bp, Homo sapiens
  source 1..301: mol_type = other DNA
tgcagcctctggattcaccttcagcgcctactacatggactgggtccgccaggctccagggaaggggctggagtgggttggccgtattagagatgaagttaatggttacatcacagaatacgccgcgtctgtgagaggcagattcaccatctcaagagatgattcaaagaactcactgtatctgcaattgaaccgcctgaaagccgacgacacggccgtatatttttgtgttagagatggaagggcctatggtggctaccttgactactggggccagggagccctggtcaccgtctcctca

SEQ ID NO: 10974 - DNA, 289 bp, Homo sapiens
  source 1..289: mol_type = other DNA
tgtagcctctggattcgtcttcagtagttatgagatgaattgggtccgccaggctccagggaaggggctggagtgggttacatacattagtggaagtgggagtgtcagagactacgcagactctgtgaagggccgattcaccatctccagagacaacgccgagaattcactgtttttgcagatggacagcctgaccgtcgcggacacggctctttattactgtgcgagagaacgccccaccagtggctttgactactggggccagggaaccctggtcaccgtctcctca

SEQ ID NO: 10975 - DNA, 289 bp, Homo sapiens
  source 1..289: mol_type = other DNA
tgcagcctctggattcaccttcagtagttttgaaatgaactgggtccgccaggctccagggaagggactggagtgggtttcatatgttaatactgatagtagtcgcaaagattttgcagactctgtaaagggccgattcaccatctccagggacaacacccagaactcgctatatctacaaatgaatggcctgagagccgaggacacggctgtttattactgtgcgcgagaaaggcccacgtccggctttgactactggggccagggaaccctggtcaccgtctcctca

SEQ ID NO: 10976 - DNA, 289 bp, Homo sapiens
  source 1..289: mol_type = other DNA
tgcagcctctggattcaccttcagtagttttgaaatgaactgggtccgccaggctccagggaaggggctggagtgggtttcatatgttaatactgatagtagtcgcaaagactttgcagactctgtaaagggccgattcaccatctccagggacaacacccagaactcgctatatctacaaatgaatggcctgagagccgaggacacggctgtttattactgtgcgcgagaaaggcccacgtccggttttgactactggggccagggaaccctggtcaccgtctcctca

SEQ ID NO: 10977 - DNA, 271 bp, Homo sapiens
  source 1..271: mol_type = other DNA
tgcagcctctggattcacctttagtagctattggatgagctgggtccgccaggctccagggaaggggctggagtgggtggccaacataaaacaagatggaagtgagaaatactatgtggactctgtgaagggccgattcaccatctccagagacaacgccaagaactcactgtatctgcaaatcaacagcctgagagtcgaggacacggctgtgtattactgtgcgagagggagctcctggggccagggaaccctggtcaccgtctcctca

SEQ ID NO: 10978 - DNA, 271 bp, Homo sapiens
  source 1..271: mol_type = other DNA
tgcagtctctggattcaccattagtagctcttggatgaactgggtccgccaggctccagggaaggggctggagtgggtggccaaagtaaaggaagatggagttgagaaacactatgtggactctgtgaagggccgattcaccatctccagagacaacgccaagaactcattctatctgcaaatgaacagcgtgagagccgaggacacggctgtctattactgtgcgagagggtcttcctggggccagggaaccctggtcaccgtctcctca

SEQ ID NO: 10979 - DNA, 280 bp, Homo sapiens
  source 1..280: mol_type = other DNA
tgcagcctctggattcaccttcaataattatgacatgaattgggtccgccaggctccagggaaggggctggagtggatttcatacattagtaatagtggtagtaccatttactacgcagactctgtgaagggccgattcaccatctcccgagacaacaccaagaactcactgtatctgcaaatgaacagcctgagagccgaggacacggctgtttattactgtgcgacaggaggaggctttgactactggggccagggaaccctggtcaccgtctcctca

SEQ ID NO: 10980 - DNA, 280 bp, Homo sapiens
  source 1..280: mol_type = other DNA
tgcagcctctggattcaccttcagtacttatgacatgaattgggtccgccaggctccagggaaggggctggagtgggtttcatacattagtaatagtggtagtaccatttactacgcagactctgtgaagggccgattcaccatctcccgagacaacaccaagaactcactgtatctgcaaatgaacagcctgagagccgaggacacggctgtttattactgtgcgacaggaggaggctttgactactggggccagggaaccctggtcaccgtctcctca

SEQ ID NO: 10981 - DNA, 280 bp, Homo sapiens
  source 1..280: mol_type = other DNA
tgcagcctctggattcaccttcagtagttatgaaatgaactgggtccgccaggctccagggaaggggctggagtgggtttcatacattagtagtagtggtagtgccaaatattacgcagactctgtgaagggccgattcaccatctccagagacaacgccaagaactcactgtatctgcaaatgaacagcctgagagccgaggacacggctgtttattactgtgcgacaggtggtggatttgactactggggccagggaaccctggtcaccgtctcctca

SEQ ID NO: 10982 - DNA, 289 bp, Homo sapiens
  source 1..289: mol_type = other DNA
tgcaacctctggattcatcttcagtacctatagcatgaactgggtccgccaggctccagggaaggggctggagtgggtctcatccattagtcgtagtagttacacatactacgcagactccgtgcagggccgattcaccatctccagagacgacgccaagaactcactgtatctgcaaatgagcagcctgagagccgaggacacggctgtgtattactgtgcgagaggagggggggattactatgctaatgattactggggccagggaaccctggtcagcgtctcctca

SEQ ID NO: 10983 - DNA, 292 bp, Homo sapiens
  source 1..292: mol_type = other DNA
tgcagcctctggattcaccttcagtagctatagcatgaactgggtccgccaggctccagggaaggggctggaatgggtctcatccattaccagtagtagttattacatattctacgcagactcagtgaagggccgattcaccatctccagagacaacgccaagaactcactgtttctgcaaatgaacagcctgagagccgaggacacggctgtgtattactgtgcgagaggggggggtgactactacgcaaacgattactggggccagggaaccctggtcaccgtctcttca

SEQ ID NO: 10984 - DNA, 292 bp, Homo sapiens
  source 1..292: mol_type = other DNA
tgcagcctctggattcacctttagtagttattcgatgagctgggtccgtcaggctccagggaaggggctggagtgggtggcctacataaagaccgatgaaagtgagacatcctatgtggactctgtgaagggccgattcaccatctccagggacaacgccaagaactcactgtctctgcaaatgaacagcctgagaaccgacgacacggctatgtattactgtgcgaggtggagagggcaccagtccgaatttgactgctggggccagggaaccctggtcaccgtctcctca

SEQ ID NO: 10985 - DNA, 292 bp, Homo sapiens
  source 1..292: mol_type = other DNA
tgcagcctctggattcacctttagtagttattcgatgagctgggtccgtcaggctccagggaaggggctggagtgggtggcctacataaagaccgatgaaagtgagacatcctatgtggactctgtgaagggccgattcaccatctccagggacaacgccaagaactcactgtctctgcaaatgaacagcctgagagccgacgacacggctatgtattactgtgcgaggtggagagggcaccagtccgaatttgactgctggggccagggaaccctggtcaccgtctcctca

SEQ ID NO: 10986 - DNA, 292 bp, Homo sapiens
  source 1..292: mol_type = other DNA
tgcagcctctggattcacctttggtgactattggatgagctgggtccgccaggctcctgggagggggctggagtgggtggccagcataaagtcagatggaagtgagaaattctatgtggactctatgatgggccgattcaccatctccagagacaacacccagaagtcaatatatctacaaatgaacagcctgagagtcgacgacacggctgtatattattgtgcgagatggagagggcaccaatcggaatttgactgttggggccagggagccctggtcaccgtctcctca

SEQ ID NO: 10987 - DNA, 277 bp, Homo sapiens
  source 1..277: mol_type = other DNA
tgcagcctctggattcacctttggtgattatggcatgagctgggtccgccaagctccagggaaggggctggagtgggtctctggtattaattggaatggtggtagcacaggttatgcagactctgtgaagggccgattcaccatctccagagacaacgccaagaactccctgtatctgcaaatgaacagtctgagagccgaggacacggccttgtattactgtgcgagagatcggggcgactactggggccagggaaccctggtcaccgtctcctca

SEQ ID NO: 10988 - DNA, 277 bp, Homo sapiens
  source 1..277: mol_type = other DNA
tgcagcctctggattcacctttggtgattatggcatgagctgggtccgccaagctccagggaaggggctggagtgggtctctggtattaattggaatggtggtagcacaggttatgcagactctgtgaagggccgattcaccatctccagagacaacgccaagaactccctgtatctgcaaatgaacagtctgagagccgaggacacggccttgtattactgtgcgagagatcgaggtgactactggggccagggaaccctggtcaccgtctcctca

SEQ ID NO: 10989 - DNA, 299 bp, Homo sapiens
  source 1..299: mol_type = other DNA
ccatctccggggacagtgtctctagcaacagtggtgcttggaactggatcaggcagtccccatcgagaggccttgagtggctgggaaggacatactactacgggtccaaatggcacaatgattatacagtatctgtgaaaagtcgaataaccgtcaacccagacacatccaagaaccagttctccctgcacctgaactctgtgactcccgaggacacggctgtgtattactgtgcaagaggatggatgcgcggcgctatggacgtctggggccaagggaccacggtcaccgtctcctca

SEQ ID NO: 10990 - DNA, 299 bp, Homo sapiens
  source 1..299: mol_type = other DNA
ccatctccgggaacggtgtctctatcaacactggtgcctggaactggatcaggcagtccccatcgcgaggccttgagtggctgggaaggacatactatcaccagtccaagtggaatactgattatgtagaatctctgaaaagtcgaatgaccgtcaacgcagacacatccaagaaccagttctccctgcacctgaactctgtgactcccgaggacacggctgtatattactgtgcaagaggttggatgaggggcgctatggacgtctggggccaagggaccacggtcatcgtctcctca

SEQ ID NO: 10991 - DNA, 292 bp, Homo sapiens
  source 1..292: mol_type = other DNA
tgcagccactggatttaccttcagtgacctctacatcaattgggtccgccaggctccagggagggggctggagtgggttggccgcaccacaaacaaagatgtgggatacatcacagaatatgccgcgtctgtgagtggcaggttcaccatctcaagggataattcaatggactctgtgtatctgcaaatgaacagcctgaagaccgaagacacggccgtgtattactgtgctagagagatatatggggcgtttgactattggggccagggaaccctactcaccgtctctcca

SEQ ID NO: 10992 - DNA, 292 bp, Homo sapiens
  source 1..292: mol_type = other DNA
tgcaacctctgacttcaccttcagtgaccacttcctggagtggttccgccaggctccagggaaggggctggagtggattggccgtagtaaaagcaaaagtaacagttacgccacagagtacgccgcgtctgtgagaggcagattcaccatctcaagagatggttcaaagaactcactgtatctgcaaatgaacagcctgaaaaccgacgacacggccgtgtattactgtgctagagagatctatggggcctttgactactggggccagggaaccctggtcaccgtctcctca

SEQ ID NO: 10993 - DNA, 291 bp, Homo sapiens
  source 1..291: mol_type = other DNA
gcttctggttacacctttaccagctatggtatcagttgggtgcgacaggcccctggacaagggcttgagtggatgggatggatcagcgcttataatggtaacacaaagtatgcacagaagctccagggcagagtcaccatgaccacagagacatccacgagcacagcctacatggagctgaggagcctgacatctgacgacacggccgtgtattactgtgcgaggtcgagagggagtggctggtactactttgactactggggccagggaaccctggtcaccgtctcctca

SEQ ID NO: 10994 - DNA, 291 bp, Homo sapiens
  source 1..291: mol_type = other DNA
gtttctggttacacctttagcagctatggtatcgcctgggtgcgacaggcccctgggcaaggacttgagtggatgggatggatcagcgcttacaatggtaacacacagtatgcacagaagctccaggacagagtcaccatgaccacagacacatccacgagcacagtctacatggagctgaggagcctgagatctgacgacacggccgtgtattactgtgcgagatcccgggggagtggctggtactactttgactactggggccagggaacgctggtcaccgtctcctca

SEQ ID NO: 10995 - DNA, 286 bp, Homo sapiens
  source 1..286: mol_type = other DNA
tacagactctgagttcaccttcagtaacttctggatgcactgggtccgccaggccccagggaaggagccggtgtgggtctcacgtattaaccctggtgggacttacacaagttacgcggacttcgtgaagggccgattcaccatgtccagagacaacgccaagaacatactgtatctccaaatgaacggtctgagagtcgaggacacggctgtgtattattgtgttagagatatgaccgctttccatgagctgtggggccagggaaccctggtcatcgtctcctca

SEQ ID NO: 10996 - DNA, 286 bp, Homo sapiens
  source 1..286: mol_type = other DNA
cgcaggctctggattcgtcttcagtaacttctggatgcactgggtccgccaggttccagggaaggggccgatgtgggtctcacggatcaatcttgacgggaccgtaataagttaccatgactccgtgaagggccgattcaccatctccagagacaatgccaagaacacagtatatctggaaatgaacagtctgagagtcgaggacacggctctgtattattgtgtaagagatatgacggcatttcatgagctctggggccagggagccctggtcaccgtctcctca

SEQ ID NO: 10997 - DNA, 298 bp, Homo sapiens
  source 1..298: mol_type = other DNA
cactgtctctggtggttccatcagtagttactactggagctggatccggcagcccccagggaagggactggagtggattgggtatatctactacagtgggagcaccaactacaacccctccctcaagagtcgagtcaccatatcagtagacacgtccaagaaccagttttccctgaagctgacctctgtgaccgctgcggacacggccgtgtattactgtgcgagggggccccgctatgatagtagtggttatccctttgactactggggccagggaaccctggtcaccgtctcctca

SEQ ID NO: 10998 - DNA, 298 bp, Homo sapiens
  source 1..298: mol_type = other DNA
cactgtctctggtggctccatcactagttactactggagctggatccggcagcccccagggaagggactggactggattgggtacatctattacagtgggaccaccaactacaacccctccctcaagagtcgagtcaccatatcaagagacacgtccaagaaccagttctccctgaagctgagctctgtgaccgctgcggacacggccgtgtattactgtgcgagaggaccccgttatgatagtagtggttatccgtttgactactggggccagggaaccctggtcaccgtctcctca

SEQ ID NO: 10999 - DNA, 295 bp, Homo sapiens
  source 1..295: mol_type = other DNA
tgcagcctctggattcaccttcactaactcctggatgcactgggtccgccaggctccagggaagggactggtgtgggtctcacgtgttaataatgatgggactactacacactacgcggactccgtgaagggccgattcaccatctccagagacaacgccaagaacacgttgtatcttcaaatgaacagtctgagagccgaggacacggctgtgtattactgtgcaagaattctggtgggaggaacgagatcctttgactactggggccagggaaccctggtcaccgtctcctca

SEQ ID NO: 11000 - DNA, 295 bp, Homo sapiens
  source 1..295: mol_type = other DNA
tgcagcctctggattcagcttcagtaactactggatgcactgggtccgccaagctccagggaaggggctggtgtgggtctcacgtattagtaatgatgggagtaccacaagctacgcggactccgtgaagggccgattcaccatctccagagacaacgccgagaacacgctgtatgtgcaaatgaacagtctgagagccgaggacacggctgtgtattactgtgcacgaatactagtaggcggtactcgtagctttgactactggggccagggaaccctggtcaccgtctcctca

SEQ ID NO: 11001 - DNA, 291 bp, Homo sapiens
  source 1..291: mol_type = other DNA
gcttctggatacaccttcagtgactatggtgtaaattgggtgcgccaggcccccggacaaggacttgagtggttgggatggatcaacggtggcaatggtcagacaggatactcaccagacttccagggcagagtcacccttaccagggacacatccgcgagcacattctacatggagttgagcacactgagaagtgaagacgcggctgtctattactgtgcgagacaaggtgttccaagtatcaattggtacgacccctggggccagggaaccctggtcaccgtctcctca

SEQ ID NO: 11002 - DNA, 291 bp, Homo sapiens
  source 1..291: mol_type = other DNA
gcttctggatacaccttcactgactatggaatcaattggctgcgccaggcccccggacaaaggcctgagtggatgggatggatcaacggtggcaatggtgaaagaggatattcacagaagttccaggacagaatgtccatgaccagggaccaatccgcgagggcggcttatatggaactgaccagtctgagatctgaagacacggctgtctactactgtgcgagacaaggagtgcctagtatcaactggtacgacccctggggccagggaaccctggtcaccgtctcctca

SEQ ID NO: 11003 - DNA, 283 bp, Homo sapiens
  source 1..283: mol_type = other DNA
ctctgtctctggtgcctccatcaacagtgataattactactggggctggatccgccagcccccagggatggggctggagtggattgggaatatctacaagagtgggagcaccaactacagcccgtccctcaagagtcgagtcaccatatccgtagacacgtccaagaaccagttctccctgaagctgacctctgtgaccgccgcagacacggctgtgtattactgtgtgagggggcagtggctgggccactggggccagggaaccctggtcaccgtctcccca

SEQ ID NO: 11004 - DNA, 283 bp, Homo sapiens
  source 1..283: mol_type = other DNA
cactgtctctggtggctccatcagcagtattggttactactggggctggatccgccagcccccaggaaaggggctggagtggattggaaatatctattataatgggaccacctactacaatccgtccctcaagagtcgagtcaccatatccgtagacacgtccaagaaccagttctccctgaagctgacctctgtgaccgccgcagacacggctgtgtattactgtgtgagaggacagtggctgggacattggggccagggaaccctggtcaccgtctcctca

SEQ ID NO: 11005 - DNA, 280 bp, Homo sapiens
  source 1..280: mol_type = other DNA
tgcagcctctggattcaccttcagtagttatgaaatgaactgggtccgccaggctccagggaaggggctggagtgggtttcctacattagtggtagtggtagtaccacatactacgcagactctgtgaagggccgattcaccatctccagagacaacgccaagaacacactgtatctgcaaatgaacagcctgagagccgaggacacggctgtttattactgtgcgagagggggcgggattggctactggggccagggaaccctggtcaccgtctcctca

SEQ ID NO: 11006 - DNA, 280 bp, Homo sapiens
  source 1..280: mol_type = other DNA
tgcagcctctggattcagcttcagtaattatgaaatgaactgggtccgccaggctccagggaaggggccggagtgggtttcacacattaattatagtggtagtaatatgtactacgcagagtctgtgaagggccgattcaccatctccagagacaacgccaagaactcactgtatctgcaaatgaacagcctgagagccgaggacacggctgtttattactgtgcgagaggggggggcattgggtactggggccagggagccctggtcaccgtcccctca

SEQ ID NO: 11007 - DNA, 304 bp, Homo sapiens
  source 1..304: mol_type = other DNA
tgcagcctctggattcacgtataataactatgccatgagttgggtccgccaggctccagggaaggggctggagtgggtctcaggtattattaacagtggtggtagtacatactacgctgactccgtgaagggccggttcaccgtctccagagacaattccaagaacatggtgtatctgcaaatgaacagcctgagagccgaggacacggccgtgtatttctgtgcgaaagatcggggggactacgggggtaaccgccgaggctttgactactggggccagggaaccctggtcaccgtctcctca

SEQ ID NO: 11008 - DNA, 304 bp, Homo sapiens
  source 1..304: mol_type = other DNA
tgcagcctctggattcacctttagcagctatgccatgagctgggtccgccaggctccagggaaggggctggagtgggtctcaggtcttagtggtagtggtggtagtacatactacgcagactccgtgaagggccgcttcaccatttccagagacaattccaagaacacgctgtttctgcaaatggacagcctgagagtcgaggacacggccgtatactactgtgcgaaagatcgaggcgactacggtggtaaccggaggggttttgactactggggccagggaaccctgctcaccgtctcctca

SEQ ID NO: 11009 - DNA, 292 bp, Homo sapiens
  source 1..292: mol_type = other DNA
tgcaggctctggattttccttcagcaattatgccatgacgtgggtccgccaggttccagccaaggggctggagtgggtctcagttattcatggtggtggtattacatactatgcagactccgtgaagggccggttcaccatctccagagacaattccaagaacaccctgtatttggaaatgaatgacctgagagccgaggacacggccatatattattgtgcgagagatgatgctgtggatggtggttaccttgactactggggccggggaaccctggtcaccgtctcctca

SEQ ID NO: 11010 - DNA, 292 bp, Homo sapiens
  source 1..292: mol_type = other DNA
tgcaggctctggattttccttcagcaattatgccatgacgtgggtccgccaggttccagccaaggggctggagtgggtctcagttactcatggtggtggtattacatactatgcagactccgtgaagggccggttcaccatctccagagacaattccaagaacaccctgtatttggaaatgaatgacctgagagccgaggacacggccatatattattgtgcgagagatgatgctgtggatggtggttaccttgactactggggccggggaaccctggtcaccgtctcctca

SEQ ID NO: 11011 - DNA, 295 bp, Homo sapiens
  source 1..295: mol_type = other DNA
tgcagcctctggattcaccttcagtagctatgccatgacgtgggtccgccaggctccagggaaggggctggagtgggtcgcggtagtcatgggcaggtatggtacgacatactacatagactccgtgaggggccggttctccatctccagagacaattccgagaacacggtgtatctgcaaatgaacagtctgagagccgaggacacggccatatattactgtgcgagagatgacgcagtagatggggggtacctcgactactggggccagggaaccctggtcaccgtctcctca

SEQ ID NO: 11012 - DNA, 301 bp, Homo sapiens
  source 1..301: mol_type = other DNA
tgcagcctctggattcaccttcagtgaccactacatggaatgggtccgccaggctccagggaaggggctggagtgggttggccgtattagagacaaagctaacagttacaccacagaatacgccgcgtctgtgaaaggcaggttcaccatctcaagagatgattccaagaactcattgtatttgcaaatgaacagcctgagaaccgaggacacggccgtgtattactgtgctagagacgcccggtcatacggtggctactttgactactggggccagggaacgctggtcaccgcctcctca

SEQ ID NO: 11013 - DNA, 301 bp, Homo sapiens
  source 1..301: mol_type = other DNA
tgcagcctctggattcaccttcagtgaccactacatggactgggtccgccaggctccagggaaggggctggagtgggttggccgtattagaaacaaagctaacagttacaccacagaatacgccacgtctgtgaaaggcagattcaccatctcaagagatgattcaaagaactcactgtatctgcaaatgaacagcctgaaaaccgaggacacggccgtgtattactgtgctagagatgcccgttcgtacggagggtactttgactactggggccagggaaccctggtcaccgtctcctca

SEQ ID NO: 11014 - DNA, 301 bp, Homo sapiens
  source 1..301: mol_type = other DNA
tgcagcctctggattcaccttcagtgaccactacatggactgggtccgccaggctccagggaaggggctggagtgggttggccgtattagaaacaaagctaacagttacaccacagaatacgccacgtctgtgaaaggcagattcaccatctcaagagatgattcaaagaactcactgtatctgcaaatgaacagcctgaaaaccgaggacacggctgtgtattactgtgctagagatgcccgttcgtacggagggtactttgactactggggccagggaaccctggtcaccgtctcctca

SEQ ID NO: 11015 - DNA, 280 bp, Homo sapiens
  source 1..280: mol_type = other DNA
tgcagcctctggattcaccttcagtagctatagcatgaactgggtccgccaggctccagggaaggggctggagtgggtctcacttatttataccggtggaactaacacatactatggagactccgtgaagggccggttcaccatctccagagataattccaagaacacgctgtatttgcaaatgaacagcctgcgagccgaggacacggccgtatattactgtacgagatctactgactttgactactggggccagggaaccctggtcaccgtctcccca

SEQ ID NO: 11016 - DNA, 280 bp, Homo sapiens
  source 1..280: mol_type = other DNA
tgcagcctctggattcacctttagcagctatgccatgaactgggtccgccaggctccagggaaggggctggaatgggtctcacttatttataccggtggaactaacacatactatggagactccgtgaagggccggttcaccatctccagagataattccaagaacacgctgtatttgcaaatgaacagcctgcgagccgaggacacggccgtatattactgtacgagatctactgactttgactactggggccagggaaccctggtcaccgtctcccca

SEQ ID NO: 11017 - DNA, 277 bp, Homo sapiens
  source 1..277: mol_type = other DNA
tgcagcctctggattcacctttagcacctataccctgaactgggtccgccaggctccagggagggggctggagcacgtctcagttatttatagtagtggtagtgcatactatgcagactccgtgaagggccggttcaccatctccagagataattccaataacacgctgtatctgcaaatgaacagcctgagagccgaggacacggccctatattattgtactcggagtacggacttcgactactggggccagggagccctggtcaccgtctcctca

SEQ ID NO: 11018 - DNA, 292 bp, Homo sapiens
  source 1..292: mol_type = other DNA
tgcagcctctagattcgccttcagtacctatgcaatgcactgggtccgccaggccccaggcagggggctggagtgggtggcacttatatcttttaatggcaataaccagtactatgcagactccgtgacgggccgattcaccatctccagagacaattccatgaacacgctgtttcttcaaatgaacagcctgagaactgaggacacggctgtgtattactgtgcgagaggtcactatgacagtagtcttttcgactactggggccagggaatcctggtcaccgtctcctca

SEQ ID NO: 11019 - DNA, 292 bp, Homo sapiens
  source 1..292: mol_type = other DNA
tgcagcctctagattcaccttcagtacctatgcgatgcactgggtccgccagtctccagacaggggactggagtgggtggcacttatatcatttaatggaaataatcaatactactcagactccgtcaagggccgattcactatttccagagacaattctaagagcactctgtatctccaaatgaacagcctgagaggtgaagacacggctatctattactgtgcgagaggacactacgatagctccctctttgactactggggccagggaaccctggtcaccgtctcctca

SEQ ID NO: 11020 - DNA, 292 bp, Homo sapiens
  source 1..292: mol_type = other DNA
tgcagcctctagattcgcctttagtacctatgcaatgcactgggtccgccaggccccaggcaggggactggagtgggtggcacttatatcttttaatggcaataaccagtactatgcagactccgtgacgggccgattcaccatctccagagacaattccaagagcacgctgtttcttcaaatgaacggcctgagaagtgaggacacggctctgtattactgtgcgagaggtcactatgacagtagtcttttcgactacttgggccagggaaccctggtcaccgtctcctca

SEQ ID NO: 11021 - DNA, 280 bp, Homo sapiens
  source 1..280: mol_type = other DNA
tgaagtctctggatccgccttcagcattttttggatgaactgggtccgccaggctccagggaaggggctggagtgggtggcccacattaagggtgatggaagtgagatgcactatgtggactctgtgaggggccgattctccatctccagagacaacaccaagaattcactgtttctgcacatgaacagcctgagggccgaggacacgggcatatattactgtacgagaggccactatgaagcctactggggccagggaaccctggtgaccgtctcctca

SEQ ID NO: 11022 - DNA, 280 bp, Homo sapiens
  source 1..280: mol_type = other DNA
tgaagtctctggatccgccttcagtattttttggatgaactgggtccgccaggctccagggaagggactcgagtgggtggcccacattaagggtgatggaagtgagatgcactatgctgactctgtgaggggccgattctccatctccagagacaacaccaagaaatcactgtttctgcacatgaacagcctgacggccgaggacacgggcacatattattgtacgagaggacactatgaagcctactggggccagggaaccctggtgaccgtctcctca

SEQ ID NO: 11023 - DNA, 280 bp, Homo sapiens
  source 1..280: mol_type = other DNA
tgtagtctctggattcatgattgatcgcttctggatgaattgggtccgccaggctccagggaagggtctggagtgggtggcccaaattaagggcgacggcactgaaaaatactatgtggactctgtgaagggccgattcaccatctccagagacaacactaagaactctgtgtatttacaaatgaacagcctgagagacgaggacacggctatgtatttctgtacgcgagggcattacgaagcgtattggggccagggaacccgggtcaccgtctcctca

SEQ ID NO: 11024 - DNA, 310 bp, Homo sapiens
  source 1..310: mol_type = other DNA
tgcagcgtctggattcaccttcagtagctatggcatgcattgggtccgccaggctccaggcaaggggctggagtgggtgacagttatatggcatgatggaagtaataaatactatgcagactccgtgaagggccgattcaccatctccagagacaattccaagaacacgctgtatctgcaaatgaacagcctgagagccgaggacacggctgtgtattactgtgcgagaggggacgatattttgactggttactactactactacggtatggacgtctggggccaagggaccacggtcaccgtctcctca

SEQ ID NO: 11025 - DNA, 310 bp, Homo sapiens
  source 1..310: mol_type = other DNA
tgcagcgtctggattcaccttcagtagctatggcatgcactgggtccgccaggctccaggcaaggggctggagtgggtggcaattatatcatatgatggaagtaataaatactatgcagactccgtgaagggccgattcaccatctccagagacaattccaagaatacgctgtatctgcaaatgaacagcctgagagccgaggacacggctgtgtattactgtgcgagaggggacgatattttgactggttattactactactacggtatggacgtctggggccaagggaccacggtcaccgtctcctca

SEQ ID NO: 11026 - DNA, 271 bp, Homo sapiens
  source 1..271: mol_type = other DNA
tgcagcctctgggttcaccgtcagtagcaactacatgagctgggtccgccaggctccagggaaggggctggagtgggtctcagttatttatagcggtggtagcacatactacccagactccgtgaagggccggttcaccatctccagagacaattccaagaacacgctgtatcttcaaatgaacagcctgagagccgaggacacggccgtgtattactgtgtgagaggtggctggaactggggccagggaaccctggtcaccgtctcctca

SEQ ID NO: 11027 - DNA, 271 bp, Homo sapiens
  source 1..271: mol_type = other DNA
tgcagcctctgggttcaccgtcactagcaactacatgacctgggtccgccaggctccagggaaggggctggagtgggtctcagttatttatggtggagatagcacaaactacgcagactccgtgaagggccgattcaccatctccagagacaattccaagaacacgctgtatcttcaaatgaacagcctgagagccgacgacacggccatgtattactgtgtgagaggagggtggaactggggccagggaaccctgatcaccgtctcctca

SEQ ID NO: 11028 - DNA, 289 bp, Homo sapiens
  source 1..289: mol_type = other DNA
tgcagcctctggattcacctttagcagctatgacatgagctgggtccgccaggctccagggaaggggctggagtgggtctcagctattcgtggtagtggtagtagcacatactacgcagactccgtgaagggccggttcaccatctccagagacaattccaagaacaccctgtatctgcaaatgaacagcctgagagccgaggacacggccgtatattactgtgcgaaagttaaagggaactggtacttcgatctctggggccgtggcaccctggtcactgtctcctca

SEQ ID NO: 11029 - DNA, 289 bp, Homo sapiens
  source 1..289: mol_type = other DNA
tgcagcctctggattcacctttagcacctatgacatggcctgggtccgccaggctccaagggaggggctggagtgggtctcagctattagtggtcgtgatggtggcacaacctacgcagacgccgtgaagggccggttcaccatctccagagacgattccaagaacacgctctttctccaaatgaacaccctgagagccgacgacacggccgtttattactgtgcgaaagttaagggtaattggtacttcgatctctggggccgtggcaccctggtcactgtctcctca

SEQ ID NO: 11030 - DNA, 289 bp, Homo sapiens
  source 1..289: mol_type = other DNA
tgcagcctctggattcacctttagcacctatgacatggcctgggtccgccaggctccaaggaaggggctggagtgggtctcagctattagtggtcgtgatggtggcacaacctacgcagacgccgtgaagggccggttcaccatctccagagacgattccaagaacacgctctttctccaaatgaacaccctgagagccgacgacacggccatttattactgtgcgaaagttaagggtaactggtacttcgatctctggggccgtggcaccctggtcactgtctcctca

SEQ ID NO: 11031 - DNA, 289 bp, Homo sapiens
  source 1..289: mol_type = other DNA
tgcagcctctggattcacctttagcacctatgacatggcctgggtccgccaggctccaaggaaggggctggagtgggtctcagctattagtggtcgtgatggtggcacaacctacgcagacgccgtgaagggccgtttcaccatctccagagacgattccaagaacacgctctttctccaaatgaacaccctgagagccgacgacacggccatttattactgtgcgaaagttaagggtaactggtacttcgatctctggggccgtggcaccctggtcactgtctcctca

SEQ ID NO: 11032 - DNA, 289 bp, Homo sapiens
  source 1..289: mol_type = other DNA
tgcagcctctggattcacctttagcacctatgacatggtctgggtccgccaggctccaagggaggggctggagtgggtctcagctattagtggtcgtgatggtggcacaacctacgcagacgccgtgaagggccggttcaccatctccagagacgattccaagaacacgctctttctccaaatgaacaccctgagagccgacgacacggccgtttattactgtgcgaaagttaagggtaactggtacttcgatctctggggccgtggcaccctggtcactgtctcctca

SEQ ID NO: 11033 - DNA, 289 bp, Homo sapiens
  source 1..289: mol_type = other DNA
tgcagcctctggattcacctttagcacctatgacatggcctgggtccgccaggctccaaggaaggggctggagtgggtctcagctattagtggtcgtgatggtggcacaacctacgcagacgccgtgaagggccggttcaccatctccagagacgattccaagaacacgctctttctccaaatgaacaccctgagagccgacgacacggccgtttattactgtgcgaaagttaagggtaactggtacttcgatctctggggccgtggcaccctggtcactgtctcctca

SEQ ID NO: 11034 - DNA, 289 bp, Homo sapiens
  source 1..289: mol_type = other DNA
tgcagcctctggattcacctttagcacctatgacatggcctgggtccgccaggctccaagggaggggctggagtgggtctcagctattagtggtcgtgatggtggcacaacctacgcagacgccgtgaagggccggttcaccatctccagagacgattccaagaacacgctctttctccaaatgaacaccctgagagccgacgacacggccgtttattactgtgcgaaagttaagggtaactggtacttcgatctctggggccgtggcaccctggtcactgtctcctca

SEQ ID NO: 11035 - DNA, 289 bp, Homo sapiens
  source 1..289: mol_type = other DNA
tgcagcctctggattcacctttagcacctatgacatggcctgggtccgccaggctccaagggaggggctggagtgggtctcagctattagtggtcgtgatggtggcacaacctacgcagacgccgtgaagggccggttcaccgtctccagagacgattccaagagcacgctctttctccaaatgaacaccctgagagccgacgacacggccgtttattactgtgcgaaagttaagggtaactggtacttcgatctctggggccgtggcaccctggtcactgtctcctca

SEQ ID NO: 11036 - DNA, 297 bp, Homo sapiens
  source 1..297: mol_type = other DNA
gcttctggattcacctttagtagatctgctgtgcagtgggtgcgacaggctcgtggacaagaccttgagtggataggatggatcgtcgttggcagtggcaacacaaactacgcacagaagttccaggaaagagtcacctttaccagggacatgtccacaagcacagcctacatggagctgagcagcctgagatccgaggacacggccgtgtattactgtgcggcggatagggggttcggggacccgtactacggtatggacgtctggggccaagggaccacggtcaccgtctcctca

SEQ ID NO: 11037 - DNA, 297 bp, Homo sapiens
  source 1..297: mol_type = other DNA
gcttctagattcacctttagtagctctgctttgcagtggctgcgacaggctcgtggacaacgccttgagtggataggatggatcgtcgttggcagtggtaacacaaactacgcacagacgttccaggggagagtcaccatgaccagggacatgtccacaagcacagcctatatggagctgagcagcctgagatccgaggacacggccgtgtattactgtgcggcagatcgggggttcggggacccctactacggtatggacgtctggggccaagggaccacggtcaccgtctcctca

SEQ ID NO: 11038 - DNA, 297 bp, Homo sapiens
  source 1..297: mol_type = other DNA
gcttctggattcaccttcagtagtactgctctacattgggtgcgacaggctcgtggacaacgccttgagtggataggatgggtcgtcgttcacaatgggaacacaaagtacgcacagaagttccacgaaagagtcaccattaccagggacatgtccacaagcacttcctacatggaaatgagcagcctgagatccgaggacacggccgtgtattactgtgcggcagatcgggggttcggggacccctactacggtatggacgtctggggccaagggaccacggtcaccgtctcctca

SEQ ID NO: 11039 - DNA, 297 bp, Homo sapiens
  source 1..297: mol_type = other DNA
gcttctggattcacctttagtagcactgctctgcattgggtgcgacaggctcgtggacaacgccttgagtggataggatgggtcgtcgttggcagtggtaacacatactacgcacagaagttccacgaaagagtcagcattaccagggacatgtccacaagcacatcctacatggagctgagcagcctgagatccgaagacacggccgtttattattgtgcggcagatcgggggttcggggacccctactacggtatggacgtctggggccaagggaccacggtcaccgtctcctca

SEQ ID NO: 11040 - DNA, 297 bp, Homo sapiens
  source 1..297: mol_type = other DNA
gcttccggattcaccttaaatagttgcgctatacaatgggtgcgccaggctcggggacaacgccctgagtgggtaggatggctcgtcgctcacagtggtaaaacaaactacgcagagaggttccagcaaagagtcaccattaccagggacatgtccacaaacacagcctacatggagctgagcagcctgacatccgaagacacggccgtgtattactgtgcggctgatcgggggttcggggacccctactacggtatggacgtctggggccaagggaccacggtcaccgtctcctcc

SEQ ID NO: 11041 - DNA, 297 bp, Homo sapiens
  source 1..297: mol_type = other DNA
gcttctggattcacctttagtagcactgctctgcattgggtgcgacaggctcgtggacaacgccttgagtggataggatggatcgtcgttggcagtggtaacacaaactacgcacagaagttccaggaaagagtcaccattaccagggacatgtccacaagcacagcctacatgcagctgagcagcctgagatccgaggacacggccgtgtattactgtgcggcagatcgggggttcggggacccctactacggtatggacgtctggggccaagggaccacggtcaccgtctcctca

SEQ ID NO: 11042 - DNA, 277 bp, Homo sapiens
  source 1..277: mol_type = other DNA
tgcagcctctgggttcaccgtcagtagcaacttcatgagctgggtccgccaggctccagggaaggggctggaatgggtctcacttattaatagcgttggtaccacttactacgcagactccgtgaagggccgattcaccatctccagagacaattccgacaacacgctgtgtcttcaagcgaacagcctgagagccgaggacacggccgtctattactgtgcgagagggaggggacatgactactggggccagggaaccctggtcaccgtctcctca

SEQ ID NO: 11043 - DNA, 277 bp, Homo sapiens
  source 1..277: mol_type = other DNA
tgcagcctctgggttcaccgtcagtagcaactacatgagctgggtccgccaggctccagggaaggggctggagtgggtctcagttatttatagcggtggtagcacatactacgcagactccgtgaagggccgattcaccatctccagagacaattccaaggacacgctgtatcttcaaatgaacagcctgagagccgaggacacggccgtgtattactgtgcgagaggccggggccatgactactggggccagggaaccctggtcaccgtctcctca

SEQ ID NO: 11044 - DNA, 286 bp, Homo sapiens
  source 1..286: mol_type = other DNA
tgcagcctctggattcaccttcagcagcaattggatgcactgggtccgccaagatccagggaaggggctggtgtgggtctcacgtactaatgaaaaaggcgattggacaaattacgcggactctgtgaggggccggttcaccatctccagagacaacgccaagaatacattgtacctgcagatgaacagtctgacaaccgaggacacgggtgtgtattattgtgcaagagatctctcgggggccaatgattactggggccagggaaccctggtcaccgtctcccca

SEQ ID NO: 11045 - DNA, 286 bp, Homo sapiens
  source 1..286: mol_type = other DNA
tgcagcctctggattcaccttcagcaccaattggatgcactgggtccgccaagatccagggaaggggctcgtgtgggtcgcacgtactaatgaatacggcgattggacaaattacgcggactctgtgaggggccggttcaccatctccagagacaacgccaagaatacattgtacctgcagatgaacagtctgactaccgaagacacgggtgtgtattattgtgcaagagatctctcgggggccaatgattactggggccggggaaccctggtcaccgtctcccca

SEQ ID NO: 11046 - DNA, 286 bp, Homo sapiens
  source 1..286: mol_type = other DNA
tgcagcctctggattcaccttcagtaggaactggatgcactgggtccgccaagttccagggaaggggctggaatgggtctcacgtcttaatgaagatgggagtttcacaacctacgcagactccgtgaagggccgattcaccatctccagagacaacgcccagaacacgctctatctgcaaatgaatagcctgagagccgaggacacggctgtgtattactgtgcaagagaccttagtggggccaatgactactggggccggggaaccctggtcaccgtctcctca

SEQ ID NO: 11047 - DNA, 286 bp, Homo sapiens
  source 1..286: mol_type = other DNA
tgcagcctctggattcaccttcagtaggaactggatgcactgggtccgccaagttccagggaaggggctggaatgggtctcacgtcttaatgaagatgggagtctcacaacctacgcagaccccgtgaagggccgattcaccatctacagagacaacgcccagaacacgctctatctgcaaatgaatagcctgagagccgaggacacggctgtgtattactgtgcaagagaccttagtggggccaatgactactggggccggggaaccctggtcaccgtctcctca

SEQ ID NO: 11048 - DNA, 286 bp, Homo sapiens
  source 1..286: mol_type = other DNA
tgcagcctctggattcaccttcagtaggaactggatgcactgggtccgccaagttccagggaaggggctggaatgggtctcacgccttaatgaagatgggagtttaacaacctacgcagactcagtgaagggccgattcaccatctccagagacaacgcccagaacacgctctatctgcaaatgaatagcctgagagccgaggacacggctgtgtattactgtgcaagagaccttagtggggccaatgactactggggccggggaaccctggtcaccgtctcctca

SEQ ID NO: 11049 - DNA, 286 bp, Homo sapiens
  source 1..286: mol_type = other DNA
tgcagcctctggattcactttcagtaggaactggatgcactgggtccgccaagttccagggaaggggctggaatgggtctcacgtcttaatgaagatgggagtttaacaacctacgcagactcagtgaagggccgattcaccatctccagagacaacgcccagaacacgctctatctgcaaatgaatagcctgagagccgaggacacggctgtgtattactgtgcaagagaccttagtggggccaatgactactggggccggggaaccctggtcaccgtctcctca

SEQ ID NO: 11050 - DNA, 280 bp, Homo sapiens
  source 1..280: mol_type = other DNA
tgcagcctctggattcacgtttagtacctcttcatttagttggctccgccaggctccagggaaggggctggagtgggtggccaacataaacgaaaatggagctcaggtatactatgtggactctgtgaggggccgattcaccatctccagagacaacgccaagaactcagtgcatctgcaaatgaacagcctgagagtcgaagacacggctgtattttactgtgcgaggggtcggggagctgacttctggggccagggaaccccggtcaccgtctcctca

SEQ ID NO: 11051 - DNA, 280 bp, Homo sapiens
  source 1..280: mol_type = other DNA
tgcagcctctggattcatatttactaagtatcacatgacctgggtccgccaggctccagggaaggggctggagtgggtggccaacataagagaaggtggacgtgacaaatactatttggactctgtgaagggccgattcaccatttcgagagacaacgccaagaattcattgtttctagaaatgaacagcctgagagccgaggacacggctctgtattactgtgcgagaggaagaggagcagacttctggggccagggaattttggtcaccgtctcctca

SEQ ID NO: 11052 - DNA, 304 bp, Homo sapiens
  source 1..304: mol_type = other DNA
cactgtctctggtggctccatcagcaatggaatttactactgggcctggatccgccagcccccagggaaggggctggaattcattgggactatctattatagtgggagaacctactacaacccgtccctcaagagtcgagtcaccatatccgtagacacgtccaagaaccagttctccctgaggctgagctctgtgaccgcccctgacacggctttttattattgtgcgaggcaggaatattgtagtggtggtagctgctcgtttgactactggggccagggaaccctggtcaccgtctcctca

SEQ ID NO: 11053 - DNA, 304 bp, Homo sapiens
  source 1..304: mol_type = other DNA
caccgtgtctggtggccccatcaccagtactagttactactgggcctggatccggcagcccccagggaaggggctggagtggattggaagtatctattatagtggaatcacatactacaaggcgtccctcaggagtcgagtcaccctattcgtagacacgtccaagaaccacttctccctgaggctgagctctgtgaccgccgcagacacggctatatattactgtgcgagacaggaatattgtagtggtggtagctgctcgtttgactactggggccagggaaccctcgtcaccgtctcctca

SEQ ID NO: 11054 - DNA, 286 bp, Homo sapiens
  source 1..286: mol_type = other DNA
tgtagcctctggattcacctttagcagcaatgccatgagctgggtccgccaggctccagggaaggggctggaatgggtcggacttatttatagtggtggtagtagtatatactctacagactccgtgaagggccggttcaccatctccagagataattccaagaacacactgtatctgcaaatgaacagtctgacagccgaggacacggccgtatattactgtgcgaaatataggggaaactactttgactcctggggccagggaaccctggtcaccgtctcctca

SEQ ID NO: 11055 - DNA, 286 bp, Homo sapiens
  source 1..286: mol_type = other DNA
tgtagcctctggattcacctttagcaataatgccatgagctgggtccgccaggctccagggaaggggctggaatgggtcggacttatttatagtggtggtagtagtatatactctacagactccgtgaagggccggttcaccatctccagagataattccaagaacacaatgtatctgcaaatgaacagtctgacagccgaggacacggccgtatattactgtgcgaaatataggggaaactactttgattcctggggccagggaaccctggtcaccgtctcctca

SEQ ID NO: 11056 - DNA, 286 bp, Homo sapiens
  source 1..286: mol_type = other DNA
tgcagcctctggattcatctttagcaactatgccatgagttgggtccgccaggctccagggaaggggctggagtgggtctcagtgatttacagcggtactagtagtacatactatgcagactccgtgaagggccgattcaccatctccacagataattccaagaacaccctatatctgcaaattaacagcctgagagccgaggacacggccgtatattactgtgcgaaataccgggggaactactttgactcttggggccagggaaccctggtcaccgtctccgca

SEQ ID NO: 11057 - DNA, 286 bp, Homo sapiens
  source 1..286: mol_type = other DNA
tgcagcctctggattcacctttagcagcaatgccatgagctgggtccgccaggctccagggaaggggctggaatgggtcggacttatttatagtggtggtagtagtatatactctacagactccgtgaagggccggttcaccatctccagagataattccaagaacacactgtatctgcaaatgaacagtctgacagccgaggacacggccgtatattactgtgcgaaatataggggaaactactttgactcctggggccagggaaccctggtcaccgtctcctca

SEQ ID NO: 11058 - DNA, 279 bp, Homo sapiens
  source 1..279: mol_type = other DNA
gcttctgggttcacctttagtaactctgctgtgcagtgggtgcgacaggctcgtgggcaacgccttgagtggatagggtggatcgtcgttggcagcggtaagacaaactacgcacagaagttcaaggaaagactcaccattgccagggacatgtccacgcgcacagcctatatggagctgagcagcctgaggtccgaggacacggccgtttattactgtgcggcagatgacctgagctccggctactggggccagggaaccctggtcaccatctcctca

SEQ ID NO: 11059 - DNA, 279 bp, Homo sapiens
  source 1..279: mol_type = other DNA
gcctctggattcacctttaccagctctgctgtgcagtggctgcgacaggcccgtggacaacgccttgagtggataggatggatcgtcgttggccgtggtaacacaaactacgcacagaagttccaggaaagggtcaccattaccagggacatgtccacaggcacagcctacatggagctgagcagcctgagatccgaggacacggccgtatattactgtgcggcagacgacctctcatctggatactggggtcagggaaccctggtcaccgtctcctca

SEQ ID NO: 11060 - DNA, 279 bp, Homo sapiens
  source 1..279: mol_type = other DNA
gcttctgggttcacctttagtaactctgctgtgcagtgggtgcgacaggctcgtggacaacgccttgagtggatggggtggatcgtcgttggcagcggtaagacaaattacgcacagaagttcaaggaaagactcaccattgtcagagacatatcgacgagcacagcctacatggagctgaacagcctgagatccgaggacacggccgtttattactgtgcggcagacgacctgagctccggctactggggccagggaaccgtggtcaccgtcacctca

SEQ ID NO: 11061 - DNA, 289 bp, Homo sapiens
  source 1..289: mol_type = other DNA
tgcagcctctggattcacctttagttataattggatgagctgggtccgccaggctccagggaaggggctggagtgggtggccaacataaaccaagatggaagtgagacatactatgtggactctgtgaagggccgattcaccatctccagagacaacgccaagaactcactatatttgcaaatgaacagcctgagagccgaggacacggctctgtattattgcgccggcggttcggggatttatagccctgactactggggccagggaaccctggtcaccgtctcctca

SEQ ID NO: 11062 - DNA, 289 bp, Homo sapiens
  source 1..289: mol_type = other DNA
tgcagcctctggattcacctttagtaggtattggatgagctgggtccgccaggctccagggaaggggctggagtgggtggccaacataaacgaagatggaagtgagaaatactctgtggactctgtgaagggccgattcaccatttccagagagaacgccaagaactcactgtatctgcaaatgaacagcctgagagccgaggacacggctgtgtattactgtgcagggggttcggggatttattcacccgactactggggccagggaaccctggtcaccgtctcctca

SEQ ID NO: 11063 - DNA, 295 bp, Homo sapiens
  source 1..295: mol_type = other DNA
tgcagcctctggattcacttttagtaacgcctggatgagctgggtccgccaggctccagggaaggggctggagtgggttggccgtattaaaagcaaaactgatggtgggacaacagactacgctgcacccgtgaaaggcagattcaccatctcaagagatgattcaaaaaacacgctgtatctgcaaatgaacagcctgaaaaccgaggacacagccatatattactgtaccacagatccgtttgaggcccctcttgactactggggccagggaaccctggtcaccgtctcctca

SEQ ID NO: 11064 - DNA, 295 bp, Homo sapiens
  source 1..295: mol_type = other DNA
tgcagcctttggattcactttcagtaacgcctggatgagttgggtccgccaggctccagggaaggggctggagtgggttggccgtattaaaagcaaaattgatggtgggacaacagactacgctgcacccgtgaaaggcagattcaccgtctcaagagatgattcacaaaacacgctgtatctgcaaatgaacagcctgaaaaccgaggacacagccgtgtatttctgtaccactgatcccttcgaggccccgcttgactactggggccagggaaccctggtcaccgtctcctca

SEQ ID NO: 11065 - DNA, 295 bp, Homo sapiens; identical to SEQ ID NO: 11064
  source 1..295: mol_type = other DNA

SEQ ID NO: 11066 - DNA, 295 bp, Homo sapiens
  source 1..295: mol_type = other DNA
tgcagcctctggattcagtttcactaacgcctggatgagttgggtccgccaggctccagggaaggggctggagtgggttggccgtattaaaagcaaaactgatggtgggacaacagactacgctgcacccgtgaaaggcagattcaccgtctcaagagatgattcaaaaaatacgctgtatctgcaaatgaacagcctgaaaaccgaggacacagccgtgtattactgtaccacagatcccttcgaggccccgcttgactactggggccagggaaccctggtcaccgtctcctca

SEQ ID NO: 11067 - DNA, 295 bp, Homo sapiens
  source 1..295: mol_type = other DNA
tgcagcctctggactcaccttcagtaactttgctttccactgggtccgccaggctccaggcaaggggctggagtgggtggcacttatatcaaatgatgaaagtaataagcggtattcagactccgtgaagggccgattcatcatctccagagacaattccaagaatacgctgtatctgcaaatggacagcctgagagatgaggacacggctgtgtatctctgtgcgagaggcgcgggtccggggagctaccgtattgactactggggccggggaaccctggtcaccgtctcctca

SEQ ID NO: 11068 - DNA, 295 bp, Homo sapiens
  source 1..295: mol_type = other DNA
tgcagcctctggattcaccttcagtagctttgctatgcactgggtccgccaggctccaggcaaggggctggagtgggtggcacttatgtcatatgatggaaataatgaaaagtatgcagactccgtgaagggccgattcaccatctccagagacaattccaagaacacgctgtatttgcaaatgagcactctgagaattgaggacacggctgtttattattgtgcgagaggcgccggtccggggagttatcgtattgactactggggccagggaaccctggtcaccgtctcctct

SEQ ID NO: 11069 - DNA, 295 bp, Homo sapiens
  source 1..295: mol_type = other DNA
tggagcctctggatttaccttcagtggttttgctgtacactgggtccgccaggctccaggcaaggggctggattgggtggcacttatgtcacatgatggaagtaatgagcggtacgcagactccgtgaagggccgattcaccatctccagagacaattccaggaacacggtatatttgcaaatgaacactctcagacttgaagacacggctgtgtattattgtgcgagaggcgccggtccggggagttatcgtattgactactggggccagggaaccctggtcaccgtctcctct

SEQ ID NO: 11070 - DNA, 295 bp, Homo sapiens
  source 1..295: mol_type = other DNA
tgcagcctctggattcaccttcagtagctttgctatgcactgggtccgccaggctccaggcaaggggctggagtgggtggcacttatgtcatatgatggaaataatgaaaagtatgcagactccgtgaagggccgattcaccatctccagagacaattccaagaacacgctgtatttgcaaatgagcactctgagaattgaggacacggctgtttattattgtgcgagaggcgccggtccggggagttatcgtattgactactggggccagggaaccctggtcaccgtctcctca

SEQ ID NO: 11071 - DNA, 286 bp, Homo sapiens
  source 1..286: mol_type = other DNA
tgcagcctctggattcaccttcgctgattacaccatgaactgggtccgccaggctccagggaaggggctggagtggatttcacatattggggcttggagcggaacggtgttagacgctgactctgtgaggggccgattcaccacctccagagacactaccaagaactcactgcatctgcaaatgaacagcctgagagacgaggacacggctgtttatttttgtgtgagagacttacactgggcctttgactcctggggccagggaaccctagtcaccgtctccgca

SEQ ID NO: 11072 - DNA, 286 bp, Homo sapiens
  source 1..286: mol_type = other DNA
tgcagcctctggattcaccttcagcaccgatcccatgaactgggtccgccaggctccagggaaggggctggagtggcttgcaaatattagagataacggttatgaaacatactacgcagactctgtgaagggccgattcaccgtaaccagagacaatgccaaggagtcactgtatctgcaaatgaacagtctgagagccgaggacacggctgtatacttctgtgtgagagatctacactgggcttttgacagttggggccagggagccctggtcaccgtctcctca

SEQ ID NO: 11073 - DNA, 286 bp, Homo sapiens
  source 1..286: mol_type = other DNA
tgcagcctctggattcaccttcagcaccgatcccatgaactgggtccgccaggctccagggaaggggctggagtggcttgcaaatattagagataacggttatgaaacatactacgcagactctgtgaagggccgattcaccgtaaccagagacaatgccaaggagtcactgtatctgcaaatgaacagtctgagagccgaggacacggctgtatacttctgtgtgagagatctacactgggcttttgacagttggggccagggagccttggtcatcgtctcctca

SEQ ID NO: 11074 - DNA, 284 bp, Homo sapiens
  source 1..284: mol_type = other DNA
cagcctctggattcaccttcagcaccgatcccatgaactgggtccgccaggctccagggaaggggctggagtggcttgcaaatattagagataacggttatgaaacatactacgcagactctgtgaagggccgattcaccgtaaccagagacaatgccaaggagtcactgtatctgcaaatgaacagtctgagagccgaggacacggctgtatacttctgtgtgagagatctacactgggcttttgacagttggggccagggagccctggtcaccgtctcctca

SEQ ID NO: 11075 - DNA, 283 bp, Homo sapiens
  source 1..283: mol_type = other DNA
tgcagcctctggattcacctttaggacctattggatgagttgggtccgccaggctccagggaagaggccggagtgggtggccaatataaaccaagatggaagtgatttctatgtggactctgtgaagggccgattcaccatctccagagacaacgccaagaactctctgtttctgcaaatgaacaccctgagagccgaggacacggctgtctattactgtgcgagggacaactatggtctctttgactactggggccagggaaccctggtcaccgtctcctca

SEQ ID NO: 11076 - DNA, 286 bp, Homo sapiens
  source 1..286: mol_type = other DNA
tgctggctctggattcacctttagtagttattggataagctgggtccgccaggctccagggaaggggctggagtgggtggccaacatgaatcaagatggaagtgagagatactatgtggactctgtgaagggccgattcaccatttccagagacaacgccaagaattcactgtatctgcagatgagcagcctgagagccgaggacacggctgtctatttctgtgcgcgagacaactatggtttatttgactactggggccagggaaccccggtcaccgtctcctca

SEQ ID NO: 11077 - DNA, 298 bp, Homo sapiens
  source 1..298: mol_type = other DNA
tgcagcctctggattcacctttagtgactatgtcatgagatggctccgccaggctccagggagggggctggagtgggtctcaactgttagtggtaatggtcgtagcacatactacgcagactccgtgaagggccggttcaccatctccagagacaattccaagaatacgctgtatctgcaaatgaacagcctgagagccgaggacacggccgtatattactgtgcgaaaccgttgcggggatttactacaccctactttgactgctggggccagggagtcctggtcaccgtctcctca

SEQ ID NO: 11078 - DNA, 298 bp, Homo sapiens
  source 1..298: mol_type = other DNA
tgaagcctctggattcagttttagtgactatgtcatgagatggctccgccaggctccagggagggggctggaatgggtctcaactattactggtgatggtcgtaacacatactacgcagactccgtgaagggccggttcaccatctccagagacacatccaagaacatgctgtatctgcaaatgaacagcctgagagccgaggacacggccgtatattactgtgcgaaaccgttgcggggatttactacaccctactttgactgctggggccagggagccctggtcaccgtctcttca

SEQ ID NO: 11079 - DNA, 298 bp, Homo sapiens
  source 1..298: mol_type = other DNA
tgaagcctctggattcagttttagtgactatgtcatgagatggctccgccaggctccagggagggggctggaatgggtctcaactattactggtgatggtcgtaacacatactacgcagactccgtgaagggccggttcaccatctccagagacacatccaagaacatgctgtatctgcaaatgaacagcctgagagccgaggacacggccgtatattactgtgcgaaaccgttgcggggatttactacaccctactttgactgctggggccagggagccctggtcaccgtctcctca

SEQ ID NO: 11080 - DNA, 298 bp, Homo sapiens
  source 1..298: mol_type = other DNA
tgaagcctctggattcagctttagtgactatgtcatgagatggctccgccaggctccagggagggggctggaatgggtctcaactattactggtaatggtcgtaacacatactacgcagactccgtgaagggccggttcaccatctccagagacacatccaagaacatgctgtatctgcaaatgaacagcctgagagccgaggacacggccgtatattactgtgcgaaaccgttgcggggatttactacaccctactttgactgctggggccagggagccctggtcaccgtctcctca

SEQ ID NO: 11081 - DNA, 298 bp, Homo sapiens
  source 1..298: mol_type = other DNA
tgaagcctctggattcagttttagtgactatgtcatgagatggctccgccaggctccagggagggggctggaatgggtctcaactattactggtgatggtcgtaacacatactacgcagactccatgaagggccggttcaccatctccagagacacatccaagaacatgctgtatctgcaaatgaacagcctgagagccgaggacacggccgtatattactgtgcgaaaccgttgcggggatttactacaccctactttgactgctggggccagggagccctggtcaccgtctcctca

SEQ ID NO: 11082 - DNA, 298 bp, Homo sapiens
  source 1..298: mol_type = other DNA
tgcagcctctggattcacctttagtgactatgtcatgagatggctccgccaggctccagggagggggctggagtgggtctcaactgttagtggtaatggtcgtagcacatactacgcagactccgtgaagggccggttcaccatctccagagacaattccaagaatacgctgtatctgcaaatgaacagcctgagagccgaggacacggccgtatattactgtgcgaaaccgttgcggggatttactacaccctacttcgactgctggggccagggagtcctggtcaccgtctcctca

SEQ ID NO: 11083 - DNA, 298 bp, Homo sapiens
  source 1..298: mol_type = other DNA
tgcagcctctggattcacctttagtgactatgtcatgagatggctccaccaggctccagggagggggctggagtgggtctcaactgttagtggtaatggtcgtagcacatactacgcagactccgtgaagggccggttcaccatctccagagacaattccaagaatacgctgtatctgcaaatgaacagcctgagagccgaggacacggccgtatattactgtgcgaaaccgttgcggggatttactacaccctactttgactgctggggccagggagtcctggtcaccgtctcctca

SEQ ID NO: 11084 - DNA, 292 bp, Homo sapiens
  source 1..292: mol_type = other DNA
tgtagcctctggattcacctttagtagctattggatgacctgggtccgccaggctccagggaaggggctggagtgggtggccaatataaagcaagatggaagtgagaaatactatgtggactctgtgaagggccgattcaccatctccagagacaacgccaagaactcactgtatctgcaaatgaacagcctgagagccgaggacacggctgtgtattactgtgcgagccatggatacagctatggttactttgactactggggccagggaaccctggtcaccgtctcctca

SEQ ID NO: 11085 - DNA, 292 bp, Homo sapiens
  source 1..292: mol_type = other DNA
tgcagcctctggattcacctttagtagttattggatgagctgggtccgccaggctccagggaaggggctggagtgggtggccaacataaagcaagatggaagtgagaaatactatgtggactctgtgaagggccgattcaccatctccagagacaacgccaagaactcactgtatctgcaaatgaacagcctgagagccgaggacacggccgtgtatcactgtgcgagccacggatacagctatggttattttgactactggggccagggaaccctggtcaccgtctcctca

SEQ ID NO: 11086 - DNA, 286 bp, Homo sapiens
  source 1..286: mol_type = other DNA
tgcagcctctggattcgccttcagcagctatagcatgaactgggtccgccaggttccagggaagggactggagtgggtttcatatattattagtagtagtaataccatatcctacgcagactctgtgaagggccgattcaccatctccagagacaacgccaagaactcactgtatctgcagatggacaacctgagagacgaggacacggctgtgtattactgtgcgagagataatcgtggttcgattgactactggggccagggaaccctggtcaccgtctcctca

SEQ ID NO: 11087 - DNA, 286 bp, Homo sapiens
  source 1..286: mol_type = other DNA
tgcagcctctggattcaccttcagctcctacaccatgagctgggtccgccaggctccagggaaggggctggaatggatttcatacattaatgctgttagtaatcccacatacatcgcagaatctgtgaggggccgattcaccatctccagagacaacgccaagaactcactgtatctgcaaatgaacagcctgagagccgaggacacggctgtatatttctgtgcgagagataatcgcggttccattgactactggggccagggaaccctggtcaccgtctcctca

SEQ ID NO: 11088 - DNA, 280 bp, Homo sapiens
  source 1..280: mol_type = other DNA
tgcagcctctggattcaccttcagtaattactggatgcactgggtccgccaagctccagggaagggactgatgtgggtctcacgtattagtggtgatgggagtgccacaagctacgcggactccgtgaagggccgattcaccgtctccagagacaacgccaagaacacgctgtatctgcaaatgaacagtctgagagccgaggacacggctgtgtattactgtgcgggtctacgcctagttgactactggggccagggaaccctggtcaccgtctcctca

SEQ ID NO: 11089 - DNA, 280 bp, Homo sapiens
  source 1..280: mol_type = other DNA
tgcagcctctggattcaccttcagtaactactggatgcactgggtccgccaagctccagggaaggggctggtgtggctctcacgtattagtagtgatgggagtagcacaagctacgcggactccgtgaagggccgattcaccatctccagagacaacaccaagaacacgctgtatctgcaaatgaacagtctgagagccgaggacacggctgtatattactgtgccggcctacgtctcgttgactactggggccagggaaccctggtcaccgtctcctca

SEQ ID NO: 11090 - DNA, 289 bp, Homo sapiens
  source 1..289: mol_type = other DNA
tgcagcctctggattcacctttggtgattatggcatgagctgggtccgccaagctccagggaaggggctggagtgggtctctggtattaattggaatggtggtagcacaggttatgcagactctgtgaagggccgattcaccatctccagagacaacgccaagaactccctgtatctgcaaatgaacagtctgagagccgaggacacggccttgtattactgtgcgagagaaagtagcagtggctggtttgactactggggccagggaaccctggtcaccgtctcctca

SEQ ID NO: 11091 - DNA, 289 bp, Homo sapiens
  source 1..289: mol_type = other DNA
tgcagcctctggattcacctttggtgattatggcatgagctgggtccgccaagctccagggaaggggctggagtgggtctctggtattaattggaatggtggtagcacaggttatgcagactctgtgaagggccgattcaccatctccagagacaacgccaagaactccctgtatctgcaaatgaacagtctgagagccgaggacacggccttgtattactgtgcgagagaatcaagcagtggctggtttgactactggggccagggaaccctggtcaccgtctcctca

SEQ ID NO: 11092 - DNA, 292 bp, Homo sapiens
  source 1..292: mol_type = other DNA
tacaacttctggattcatctttggtgattatgctatgagctgggtccgccaggctccagggaaggggctggagtgggtaggtttcattagaagcaaagcttatggtgggacaacagaatacgccgcgtctgtgaaaggcagattcaccatctcaagagatgattccaaaagcatcgcctatctgcaaatgaacagcctgaaaaccgaggacacagccgtgtattactgtactagagaagacggggggggaactgactactggggccagggaaccctggtcaccgtctcctcg

SEQ ID NO: 11093 - DNA, 292 bp, Homo sapiens
  source 1..292: mol_type = other DNA
tacagcttctggattcacctttggtgattatgctatgagctggttccgccaggctccagggaaggggctggagtgggtaggtttcattagaaacaaagcttatggtgggacaacagaatacgccgcgtctgtgaaaggcagattcaccatctcaagagatgattccaaaagcatcgcctatctgcaaatgaacagcctgaaaaccgaggacacagccctgtatttctgtactagagaggacggtggcgggactgactactggggccagggaaccctggtcaccgtctcctca

SEQ ID NO: 11094 - DNA, 292 bp, Homo sapiens; identical to SEQ ID NO: 11093
  source 1..292: mol_type = other DNA

SEQ ID NO: 11095 - DNA, 292 bp, Homo sapiens; identical to SEQ ID NO: 11093
  source 1..292: mol_type = other DNA

SEQ ID NO: 11096 - DNA, 289 bp, Homo sapiens
  source 1..289: mol_type = other DNA
tgcagcgtctggattcaccttcaggagctctggcatgcactgggtccgccaggctccaggcaaggggctggagtgggtggcagttatatggtatgatggaagtaatatatactatgcagactccgtgaagggccgattcaccatctccagagacgattccaagaacacgctgtatctgcaaatgaacagcctgagagccgaggacacggctgtatattactgtgcgaaaaaattaggtgactggagctttgactactggggccagggaactctggtcaccgtctcctca

SEQ ID NO: 11097 - DNA, 289 bp, Homo sapiens
  source 1..289: mol_type = other DNA
tgcagcgtctggattcaccttcagtagctatggcttccactgggtccgccaggctccaggcaaggggctggagtgggtggcagttatatggtatgatggaagtaataaatactatgcagactccgtgaagggccgattcaccatctccagagacaattccaagaacacgctgtatctgcaaatgaacagcctgagagccgacgacacggctgtgtattactgtgcgaaaaaattaggtgactggagctttgactactggggccagggaaccctggtcaccgtctcctca

SEQ ID NO: 11098 - DNA, 293 bp, Homo sapiens
  source 1..293: mol_type = other DNA
ccatctccggggacagtctctttagcagcgatgttgcttggaactggatcaggcagtccccatcgggaggccttgagtggctgggaaggacatactacaggtccaagtggtattatgagtatgcagtttctgtgagaagtcgaataaccatcaaccctgacacatccaagaaccagttttccctgcagctgaactctgtgactcccgaggacagggctgtttattactgtgtgagaggccagcactctgcttttgatctctggggccaagggacagtgctcaccgtctcttca

SEQ ID NO: 11099 - DNA, 293 bp, Homo sapiens
  source 1..293: mol_type = other DNA
ccatctccggggacagtctctttaacaccgatgttgcttggaactggatcaggcagtccccatcgggaggccttgagtggctgggaaggacatactacaggtccaagtggtattatgagtatgcagtttctgtgagaagtcgaataaccatcaaccctgacacatccaagaaccagttttccctgcagctgaactctgtgactcccgaggacacggctgtttattactgtgtaagaggccagcactctgcttttgatctctggggccaagggacagtgctcaccgtctcttca

SEQ ID NO: 11100 - DNA, 293 bp, Homo sapiens
  source 1..293: mol_type = other DNA
ccatctccggggacagtctctttaacaccaatgttgcttggaactggatcaggcagtccccatcgggaggccttgagtggctgggaaggacatactacaggtccaagtggtattatgagtatgcagtttctgtgagaagtcgaataaccatcaaccctgacacatccaagaaccagttttccctgcagctgaactctgtgagtcccgaggacacggctgtttattactgtgtaagaggccagcactctgcttttgatctctggggccaagggacagtgctcaccgtctcttca

SEQ ID NO: 11101 - DNA, 293 bp, Homo sapiens
  source 1..293: mol_type = other DNA
ccatctccggggacagtctctttaacaccgatgttgcttggaactggatcaggcagtccccatcgggaggccttgagtggctgggaaggacatactacaggtccgagtggttttatgagtatgcaggttctgtgagaagtcgaataaccatcaaccctgacacatccaagaaccagttttccctgcagttgaactctgtgagtcccgaggacacggctgtttattattgtgtaagaggccagcactctgcttttgatctctggggccaagggacagtgctcaccgtctcttca

SEQ ID NO: 11102 - DNA, 293 bp, Homo sapiens
  source 1..293: mol_type = other DNA
ccatctccggggacagtctctttagcagcgatgttgcttggaactggatcaggcagtccccatcgggaggccttgagtggctgggaaggacatactacaggtccaagtggtatcatgagtatgcagtttctgtgagaagtcgaataaccatcaaccctgacacatccaagaaccagttttccctgcagctgaactctgtgactcccgaggacagggctgtttattactgtgtgagaggccagcactctgcttttgatctctggggccaagggacagtgctcaccgtctcttca

SEQ ID NO: 11103 - DNA, 293 bp, Homo sapiens
  source 1..293: mol_type = other DNA
ccatctccggggacagtctctttaacaccgatgttgcttggaactggatcaggcagtccccatcggggggccttgagtggctggggaggacatactacaggttcaagtggtattatgagtatgcagtttctgtgagaagtcgaataaccatcaaccccgacacatccaagaaccagttttccctgcatctgaactctgtgactcccgaggacagggctgtttattactgtgtgagaggccagcactctgcttttgatctctggggccaagggacagtgctcatcgtctcttca

SEQ ID NO: 11104 - DNA, 293 bp, Homo sapiens; identical to SEQ ID NO: 11098
  source 1..293: mol_type = other DNA

SEQ ID NO: 11105 - DNA, 293 bp, Homo sapiens
  source 1..293: mol_type = other DNA
ccatctccggggacagtctctttaacaccgatgttgcttggaacgggatcaggcagtccccatcgggaggccttgagtggctgggaaggacatactacaggtccaagtggtattatgagtatgcagtttctgtgagaagtcgaataaccatcaaccctgacacatccaagaaccagttttccctgcagctgaactctgtgactcccgaggacacggctgtttattactgtgtaagaggccagcactctgcttttgatctctggggccaagggacagtgctcaccgtctcttca

SEQ ID NO: 11106 - DNA, 293 bp, Homo sapiens
  source 1..293: mol_type = other DNA
ccttctccggggacagcttctcttccagcagtgttgcttggaactggatcaggcagtccccatcgagaggccttgagtggctgggaaggacatactacaggtccaactggtataatgattatgcagaatctgtgaaaagtcgaataaccatcaacccagacacatccaagaaccagttctccctgcagctgaactctgtgactcccgaagacacggctgtgtattactgtgtaaggggccagcattctgcttttgatctctggggccaagggacaatggtcaccgtctcttca

SEQ ID NO: 11107 - DNA, 295 bp, Homo sapiens
  source 1..295: mol_type = other DNA
tgcagtctctgggatcaccgtcagtagcaaccacatgaactgggtccgccaggctccagggagggggctggagtgggtctcagttatttatagagatggtaccacatcctacgcggactccgtgaagggccgattcaccatctccagacacagttccaccaacaccctggaccttcaaatgtacagcctgagagatgaggacacggccatgtattactgtgcgagggatccggcgggggatggctacagtctccttgactactggggccagggaaccctgatcaccgtctcctca

SEQ ID NO: 11108 - DNA, 295 bp, Homo sapiens
  source 1..295: mol_type = other DNA
tgcagcctctgcgttcaccgtcagtggtcaccacatgaactgggtccgccaggctccagggaaggggctggagtgggtctcaactctttataaggatggtcgcacatcctatgcagactccgtgcagggccgattcaccatctccagagacacttccaagaatactctctatcttcaaatgaacagcctcagagccgaagacacggccgtttattactgcgcgagagatcccgcgggagacggctacagtcttcttgattactggggccagggaaccctggtcaccgtctcctca

SEQ ID NO: 11109 - DNA, 286 bp, Homo sapiens
  source 1..286: mol_type = other DNA
tgcagcctctggattcaccttcagtaattcctggatgcactgggtccgccaagctccagggaagggactggtgtgggtctcacgtattaatagtgattggagtagcacaatctacgcggactccgtgaagggccgattcaccatctccagagacaacgccaagaacacactgtatctgcaaatgaacagtctgaaagccgaggacacggctatgtattactgtgcaagagattactaccacaccattgactactggggccagggaaccctggtcaccgtctcctca

SEQ ID NO: 11110 - DNA, 286 bp, Homo sapiens
  source 1..286: mol_type = other DNA
tgcagcttctggattcaccttcagtaattcctggatgcactgggtccgccaagctccagggaagggactggtgtgggtctcacgtattaatagtgattggagtagcacaatctacgcggactccgtgaagggccgattcaccatctccagagacaacgccaagaacacactgtatctgcaaatgaacagtctgaaagccgaggacacggctatgtattactgtgcaagagattactaccacaccattgactactggggccagggaaccctggtcaccgtctcctca

SEQ ID NO: 11111 - DNA, 286 bp, Homo sapiens
  source 1..286: mol_type = other DNA
tgcagcctctggattcaccttcagtaattcctggatgcactgggtccgccaagctccagggaagggactggtgtgggtctcacgtattaatagtgattggagtagcacaatctacgcggactccgtgaagggccgactcaccatctccagagacaacgccaagaacacactgtatctgcaaatgaacagtctgaaagccgaggacacggctatgtattactgtgcaagagattactaccacaccattgactactggggccagggaaccctggtcaccgtctcctca

SEQ ID NO: 11112 - DNA, 286 bp, Homo sapiens
  source 1..286: mol_type = other DNA
cgaagccgctggattcacgttcagtagctcctggatgcactgggtccgccaagttccagggaaggggctggtgtgggtctctcgtattaatagtgatgggagtgacacaatctatgcggactccgtgaagggccgattcaccatctccagagacaacgccaagaacacggtgcatctgcaaatgaacagtctgagagccgaggactcggctgtatattactgtgcaagggattactatcatacaattgactactggggccagggaaccctggtcaccgtctcctca

SEQ ID NO: 11113 - DNA, 292 bp, Homo sapiens
  source 1..292: mol_type = other DNA
tgcagcctctggattcactttcactgacgcctggatgagctgggtccgccaggctccagggaaggggctggagtgggttggccgtattaaaagcaaagttgatggtgggacaacagaatacgctgcacccgtggaaggcaggttcatcatctcaagagatgattcaagaaacacgctgtctctacaaatgaacagcctgaaaaccgaggacacagccgtatatttttgtaccacagaatactggggatcccttaacaattggggccagggaaccctggtcaccgtctcctca

SEQ ID NO: 11114 - DNA, 292 bp, Homo sapiens
  source 1..292: mol_type = other DNA
tgcagcctctggattcactttcactgacgcctggatgagctgggtccgccaggctccagggaaggggctggagtgggttggccgtattaaaagcaaagttgatggtgggacaacagaatacgctgcacccgtgaaaggcagattcatcatctcaagagatgattcaagaaacacactgtctctacaaatgagcagcctgaaaaccgaggacacagccgtatatttttgtaccacagaatactggggatcccttaacaattggggccagggaaccctggtcaccgtctcctca

SEQ ID NO: 11115 - DNA, 292 bp, Homo sapiens
  source 1..292: mol_type = other DNA
tgcagcctctggattcactttcactgacgcctggatgagctgggtccgccaggctccagggaaggggctggagtgggttggccgtattaaaagcaaagttgatggtgggacaacagaatacgctgcacccctgaaaggcagattcatcatctcaagagatgattcaagaaacacgctgtctctacaaatgagcagcctgaaaaccgaggacacagccgtatatttttgtaccacagaatactggggatcccttaacaattggggccagggaaccccggtcaccgtctcctca

SEQ ID NO: 11116 - DNA, 292 bp, Homo sapiens
  source 1..292: mol_type = other DNA
tgcagcctctggattcgcattcaatgacgcctggatgagctggctccgccaggctccagggaaggggctggagtgggttggccatattaaaagcaaaactgctggtgggacaacagactacgctgcacccgtgaaaggcagagtctccatctcaagagatgattcagagagtaaggtgtatctgcaaatcaatattctcaaaaccgaggacacagccgtgtattactgtaccacagaatattggggatcccttaacaactggggccagggaatcctggtcaccgtctcctca

SEQ ID NO: 11117 - DNA, 292 bp, Homo sapiens
  source 1..292: mol_type = other DNA
tgcagcctctggattcactttcagtaacgcctggatgagctgggtccgccaggctccagggaaggggctggagtgggttgcccgtattaaaagcaaaaccgatggtgggacgccagactacgctgcacccgtgaaaggcagattcaccatctcaagagatgattcaagaaccacgctgtatctgcaaatgaacagcctgaaaaccgaggacacagccgtctattattgtaccacagaatactggggatcccttaacaattggggccagggaagtctggtcaccgtctcctca

SEQ ID NO: 11118 - DNA, 292 bp, Homo sapiens
  source 1..292: mol_type = other DNA
tgcagcctctggattcgcattcaatgacgcctggatgagctggctccgccaggctccagggaaggggctggagtgggttggccatattaaaagcaaaactgctggtgggacaacagactacgctgcacccgtgaaaggcagagtctccatctcaagagatgattcagagagtaaggtgtatctgcaaatcaatattctcaaaaccgaggacacagccgtgtactactgtaccacagaatattggggatcccttaacaactggggccagggaatcctggtcaccgtctcctca

SEQ ID NO: 11119 - DNA, 292 bp, Homo sapiens
  source 1..292: mol_type = other DNA
tgcagcctctggattcgctttcaatgacgcctggatgagctggctccgccaggctccagggaaggggctggagtgggttggccatattaaaagcaaaactgctggtgggacaacagactacgctgcacccgtgaaaggcagagtctccatctcaagagatgattcagagaataaggtgtttctgcaaatcaatagtctcaaaaccgaggacacagccgtgtattactgtaccacagaatattggggatcccttaacaactggggccagggaatcctggtcaccgtctcctca

SEQ ID NO: 11120 - DNA, 292 bp, Homo sapiens
  source 1..292: mol_type = other DNA
tgcagcctctggattcgctttcaatgacgcctggatgagctggctccgccaggctccagggaaggggctggagtgggttggccatattaaaagcaaagttgctggtgggacaacagactacgctgcacccgtgaaaggcagagtctccatctcaagagatgattcagaaagtaaggtgtatctgcaaatcaatagtctcaaaaccgaggacacagccgtctattactgtaccacagaatattggggatcccttaacaactggggccagggaatcctggtcaccgtctcctca

SEQ ID NO: 11121 - DNA, 292 bp, Homo sapiens
  source 1..292: mol_type = other DNA
tgaagtctctggattcacttttaatgtcgcctggatgatctgggtccgccagattccagggaaggggctggagtgggttggccgtattagaagcaataaagatggtgggacaacagagtccgctgcatccgtgaaaggcagattcctcatctcaagagatgactcaaaaaacacactgtatctgcaaatgaacagtctgagaatcgaagacacagccgtttattattgtaccacagagtattggggcagcttgaacaactggggccagggatcccgggtcaccgtctcttca

SEQ ID NO: 11122 - DNA, 277 bp, Homo sapiens
  source 1..277: mol_type = other DNA
tgtaggctctggattcagcttcagtaactactggatgcactgggtccgccaagctccagggagggggctggagtgggtctcacgtattaataatggtggcagtacgtacgcggactccgtgaagggccgattcaccagctccagagacaacgccaagagcacaatatatctgcaaatgaacagtctgagagccgaggacacggctatatatttctgtgcaagagcgggggcggcttttgactactggggccatgggaccctggttaccgtctcctca

SEQ ID NO: 11123 - DNA, 283 bp, Homo sapiens
  source 1..283: mol_type = other DNA
tgcagcctctggattcaccttcagtaactactggatgcactgggtccgccaagctccagggaaggggctagtgtgggtctcacgtattaatattgatgggactagcacagactacgcggactccgtgaagggccgattcaccatctccagagactacgccaagaacactctatatctggaaatgaatagtctgagagccgaggacacggctgtgtattactgtgcaagagcgggggcggcttttgactactggggccagggaaccctggtcaccgtctcctca

SEQ ID NO: 11124 - DNA, 283 bp, Homo sapiens
  source 1..283: mol_type = other DNA
tgcagcctctggctttaccttcagtagttataccatgaactgggtccgccaggctccagggaaggggctggagtgggtctcatccattagtagtagtagtagttacatatactacgcagactcagtgaagggccgattcaccatctccagagacaacgccaagaactcactgtatctgcaaatgaacagcctcagagccgaggacacggctgtgtattactgtgcgagagaccaaggcccaattgactactggggccagggaaccctggtccccgtctcctca

SEQ ID NO: 11125 - DNA, 283 bp, Homo sapiens
  source 1..283: mol_type = other DNA
tgcagcctctggagttacgttcagtagtgaaagcatgaactgggtccgccaggctccagggaaggggctggagtgggtctcatccattagtagtaggagtagttacatatactacgcagactcagtgaagggccgattcaccatctccagagacaacgccaagaactcactgtatctgcaaatgaacagcctgagagccgaggacacggctgtgtattactgtgcgagagaccaaggcccaattgactactggggccagggaaccctggtcaccgtctcctca

SEQ ID NO: 11126 - DNA, 283 bp, Homo sapiens
  source 1..283: mol_type = other DNA
tgcagcctctggatttaccttcagtagttatagcatgaactgggtccgccaggctccagggaaggggctggagtgggtctcatccattagtagtagtagtagttacatatactacgcagactcagtgaagggccgattcaccatctccagagacaacgccaagaactcactgtatctgcaaatgaacagcctgagagtcgaggacacggctgtgtactactgtgcgagagaccaaggcccaattgactactggggccagggaaccctggtcaccgtctcctca

SEQ ID NO: 11127 - DNA, 283 bp, Homo sapiens
  source 1..283: mol_type = other DNA
tgcagcctctggatttaccttcagtagttatagcatgaactgggtccgccaggctccagggaaggggctggagtgggtctcatccattagtagtagtagtacttacatatactacgcacagtcagtgaagggccgattcaccatctccagagacaacgccaagaagtcactgtatctgcaaatgaacagcctgagagccgaggacacggctgtgtattactgtgcgagagaccaaggcccaattgactactggggccagggaaccctggtcaccgtctcctca

SEQ ID NO: 11128 - DNA, 283 bp, Homo sapiens
  source 1..283: mol_type = other DNA
tgcagcctctggattttccttcagtagttatagcatgaactgggtccgccaggctccagggaaggggctggagtggctcacatccattagtagtagtagtagttacatatacttcgcagactcagtgaggggccgattcaccatctccagagacaacgccaagaactcactgtatctgcaaatgaacagcctgagagccgaggacacggctgtgtattactgtgcgagagaccaaggcccaattgactactggggccagggaaccctggtcaccgtctcctca

SEQ ID NO: 11129 - DNA, 283 bp, Homo sapiens
  source 1..283: mol_type = other DNA
tgcagcctctggagttacgttcagtagtgaaagcatgaactgggtccgccaggctccagggaaggggctggagtgggtctcatccattagtagtaggagtagttacatatactacgcagactcagtgaagggccgattcaccatctccagagacaacgccaagaactcactgtatctgcaaatgaacagcctgagagccgaggacatggctgtgtattactgtgcgagagaccaaggcccaattgactactggggccagggaaccctggtcaccgtctcctca

SEQ ID NO: 11130 - DNA, 283 bp, Homo sapiens; identical to SEQ ID NO: 11124
  source 1..283: mol_type = other DNA

SEQ ID NO: 11131 - DNA, 283 bp, Homo sapiens
  source 1..283: mol_type = other DNA
tgcagcctctggattcaccttcaggagctatagcatgaactgggtccgccaggctccagggaaggggctggagtgggtctcatgcattagtagtagtagtagttacatatactacgcagacgcagtgaagggccgattcaccatctccagagacaacgccaagaactcactgtatctgcaaatgaacagcctgagagccgaggacacggctgtgtattactgtgcgagagatcaaggccctattgactactggggccagggaaccctggtcaccgtctcctca

SEQ ID NO: 11132 - DNA, 271 bp, Homo sapiens
  source 1..271: mol_type = other DNA
tgcagcctctggattcacttttagtagctcttggatgaattgggtccgccaggctccagggaaggggctggagtgggtggccaacataaagcaagatggaagtgagaaacactatgtggactctgtgaagggccgattcaccatctccagagacaaccccaagaactcactgtatctgcaaatgaacagcctgagagccgaggacacggctgtgtattactgcacctcgagggactactggggccagggaaccctggtcaccgtctcctca

SEQ ID NO: 11133 - DNA, 271 bp, Homo sapiens
  source 1..271: mol_type = other DNA
tgcagcctctggattcacttttagtagctcttggatgaattgggtccgccaggctccagggaaggggctggagtgggtggccaacataaagcaagatggaagtgagaaacactatgtggactctgtgaagggccgattcaccatctccagagacaaccccaagaactcactgtatctcaaaatgaacagcctgagagccgaggacacggctgtgtattactgcacctcgagggactactggggccagggaaccctggtcaccgtctcctca

SEQ ID NO: 11134 - DNA, 271 bp, Homo sapiens
  source 1..271: mol_type = other DNA
tgcagcctctaaattcgcctttagtagtttttacatgagctgggtccgccaggctccagggaagggactggagagcgtggccaccataaatgaagatggacgtgacaaatattatgtggactctgtgaggggccgattcaccatctccagagacaacgcccagaactccctttctctgcagatggatagcctgagagccgaggacacggcagtctattactgtacgagtagagactactggggacagggagtcctggtcaccgtctcctca

SEQ ID NO: 11135 - DNA, 271 bp, Homo sapiens
  source 1..271: mol_type = other DNA
tgcagcctctggattcacttttagtagctcttggatgaattgggtccgccaggctccagggaaggggctggagtgggtggccaacataaagcaagatggaagtgagcaacactatgtggactctgtgaagggccgattcagcatctccagagacaaccccaggaactcactgtatctgcaaatgaacagcctgagagccgaggacacggctgtgtattactgcacctcgagggactactggggccacggaaccctggtcaccgtctcctca

SEQ ID NO: 11136 - DNA, 286 bp, Homo sapiens
  source 1..286: mol_type = other DNA
cactgtctctcctgggtccgtccgtggtcactattggagttggatccgacagccccccgggaaaggactggagtggcttggatatgtctactatactggaatcaccaacttcaccccctccctcagaagtcgagccgccatttcactcgacatgtccagggaccagttttccctgagattgacctctgtgaccgttgcggacacggccgtctattactgtgcgagagggggcagtggttatcccctggacttctggggcccgggagccctggtcaccgtcacctca

SEQ ID NO: 11137 - DNA, 286 bp, Homo sapiens
  source 1..286: mol_type = other DNA
cactgtctctcctgggtccctccgtggtcagtattggagttggatccggcagccccccgggaaaggactggagtggattggatatgtctactatactggaaccaccaacttcaccccctccctcaagagtcgagccgccatttcacttgacatgtcaagggacaagttctctctgactttaagatctctgaccgttgcggacacggccgtctattactgtgcgagagggggaagtggttatcccctggacttctggggcccgggagccctggtcaccgtcacctca

SEQ ID NO: 11138 - DNA, 286 bp, Homo sapiens
  source 1..286: mol_type = other DNA
cactgtctctcctgggtccgtccgtggtcactactggagttggatccgacaggcccccgggaaaggactggagtggattggatatgtctactatactggggtcaccaatttcatcccctccctcaccagacgagccgccatttctcttgacatgtcccgggaccagttctctctgaccataagaggtgtgaccgctgcggacacgggcgtctattattgtgcgagagggggaagtggttatcccctggacttctggggcccgggagccctggtcaccgtcacctca

SEQ ID NO: 11139 - DNA, 286 bp, Homo sapiens
  source 1..286: mol_type = other DNA
cagtgtctctggtggccccatcagtggtcattactggagttggatccggcagcccccagggaagggactggagtggattggctatatctattacactggggtcaccaactacatcccctccctcaggagtcgactcaccctctcattagacacgtccaagagtcaggtctccctgaacctcatctctctgacccctgcagacacggccgtatattactgtgcgagagggggaagtggttatccacttgacttctggggccagggaaccctggtctccgtctccgca

SEQ ID NO: 11140 - DNA, 286 bp, Homo sapiens
  source 1..286: mol_type = other DNA
tgcagcctctggattcatcgtcggtgccaactacatgagctgggtccgccaggctccagggaaggggctggagtgggtctcaattatttatagcggtggtaatacatactacgcagactccgtgaagggccgattcaccatgtccagagacaattccaagaacacggtgtatcttcaaatgaacagcctgagagttgaggacacggctgtgtatttctgtgcgagagatccgaggtatagcagtggggtctactggggccagggaaccctggtcactgtctcctca

SEQ ID NO: 11141 - DNA, 286 bp, Homo sapiens
  source 1..286: mol_type = other DNA
tgcagcctctggattccttgtcagtagcaactacatgagctgggtccgccaggctccagggaaggggctggagtgggtctcaattatttatagcggtggtagcacatactacgcagactccgtgaagggccgattcaccatctccagagacaattccaagaacacgctgtatcttcaaatgaacagcctgagagttgaggacacggctgtgtatttctgtgcgagagatccgaggtatagcagtggggtctactggggccagggaaccctggtcaccgtctcctca

SEQ ID NO: 11142 - DNA, 286 bp, Homo sapiens
  source 1..286: mol_type = other DNA
tgcagcctctggattcatcgtcagtgccaactacatgagctgggtccgccaggctccaggcaaggggctggagtgggtctcacttatttatagcggtgataccacatactacgcagactccgttaggggcagattcaccatctccagagacagttccaagaacacgctctatcttcaaatgaacagcctgagagccgaggacacggctgtatattactgtgcgagagatccgaggtatagcagtggtgtctactggggccagggaaccctggtcaccgtctcctca

SEQ ID NO: 11143 - DNA, 292 bp, Homo sapiens
  source 1..292: mol_type = other DNA
cactgtctctggtggctccattagaagtaataatcacaactggggctggacccgccagcccccagggaaggggctggagtggattgggagtctttattatactgggagcacctattacaacccgtccctcaagagtcgagtcaccatatcagtagacacgtccaagaatcagttctccctgaagctgttctctgtgaccgccgcagacacggctgtctattattgttcgagagtcccttctgggagccctggggactactggggccagggaaccctggtcaccgtctcctca

SEQ ID NO: 11144 - DNA, 292 bp, Homo sapiens
  source 1..292: mol_type = other DNA
cagtgtctctggtggctccatcagaagtagtgattacaactggggctggagccgccaccccccaggggagggactggagtggattggtagtgtctatcatactgggagcacctactacaaccccgccctcaagagtcggctcaccatcgccatagacacctccaggaaccagtttttcctgacgttgacctcggtgagcgccgcagacacggctacatattattgttcgagagtcccctctggttctcccggggactactggggccagggaaccgtggtcaccgtctcctca

SEQ ID NO: 11145 - DNA, 298 bp, Homo sapiens
  source 1..298: mol_type = other DNA
cactgtctctggtggctccatgagtagttactactggaactggatccggcagcccccagggaagggactggagtggattgggtatatctatgacagtgggagcaccaactacaacccctccctcaagagtcgagtcaccatatcaatagacacgtccaagaaccagttctccttgaagctgagttctgtgaccgctgcggacacggccgtgtattattgtgcgagagataggactaccgtgagttactactacggtatggacgtctggggccaagggaccacggtcaccgtctcctca

SEQ ID NO: 11146 - DNA, 298 bp, Homo sapiens
  source 1..298: mol_type = other DNA
cattgtctctggtggctccatgagtagttaccactggaactggatccggcagcccccagggaagggactggagtggattgggtatatctatgacagtgggagcaccaactccaacccctccctcaagagtcgagtcaccatatcaatagacacgtccaagaaccagttctccttgaagctgagttctgtgaccgctgcggacacggccgtgtattattgtgcgagagataggactaccgtgagttactactacggtatggacgtctggggccaagggaccacggtcaccgtctcctca

SEQ ID NO: 11147 - DNA, 298 bp, Homo sapiens
  source 1..298: mol_type = other DNA
cactgtctctggtggctccatgagtagttactactggaactggatccggcagcccccagggaagggactggagtggattgggtacatctatgacagtgggagcaccaactacaacccctccctcaagagtcgagtcaccatatcaatcgacacgtccaagaaccagttctccttgaagctgagttctgtgaccgctgcggacacggccgtgtattattgtgcgagagataggactaccgtgagttactactacggtatggacgtctggggccaagggaccacggtcaccgtctcctca

SEQ ID NO: 11148 - DNA, 298 bp, Homo sapiens
  source 1..298: mol_type = other DNA
cactgtctctggtggctccatgagtagttactactggaactggatccggcagcccccaggggagggactggagtggattgggtatatctatgacgatgggagcaccaactacaacccctccctcaagagtcgagtcaccatatcaatagacacgtccaagaaccagttctccttgaagctgaattctgtgaccgctgcggacacggccgtgtattattgtgcgagagataggactaccgtgagttactactacggtatggacgtctggggccaagggaccacggtcaccgtctcctca

SEQ ID NO: 11149 - DNA, 298 bp, Homo sapiens
  source 1..298: mol_type = other DNA
cactgtctctgctggctccatgagtagttactactggaactggatccggcagcccccagggaagggactggagtggattgggtatatctatgacagtgggagcaccaactacaacccctccctcaagagtcgagtcaccatatcaatagacacgtccaagaaccagttctccttgaagctgaattctgtgaccgctgcggacacggccgtgtattattgtgcgagagataggactaccgtgagttactactacggtatggacgtctggggccaagggaccacggtcaccgtctcctca

SEQ ID NO: 11150 - DNA, 298 bp, Homo sapiens
  source 1..298: mol_type = other DNA
cactgtctctcgtggctccatcagtagttactactggaactggatccggcagcccccagggaagggactggagtggattgggtatatctattacagtgggagcaccaactacaacccctccctcaacagtcgagtcaccatatcagtagacacgtccaagaaccagttctccctgaagctgagctctgtgaccgctgcggacacggccgtgtattactgtgcgagagatcgaactacggtcagctactactacggtatggacgtctggggccaagggaccacggtcaccgtctcctca

SEQ ID NO: 11151 - DNA, 283 bp, Homo sapiens
  source 1..283: mol_type = other DNA
cagtgtctttgattattccatcagcattggttactattggggctggatccggcagcccccagggaaggggcttgagtggattgggagtatctctcatcgtggaaacacttactacaacccgtccctcaagagtcgagtcaccatatcaagagacacgtccaagaatcaattctccctgaaactgacctctgtgaccgccgcagacacggccatgtattactgtgcgagagacgcagtggccggggactattggggccagggaatcctggtcaccgtctcctca

SEQ ID NO: 11152 - DNA, 283 bp, Homo sapiens
  source 1..283: mol_type = other DNA
cactgtcgccggctaccccatcgaccttggttactattggggctgggtccggcagcccccagggaagggcctggagtggattggaagtatctctcacagggggggcacctactacagcccgtccctcagcagtcgggtcaccatttcaagaaacacggctacgaaccagttctccctgaggctgacttctgtgagcgccacggacacggccatatattattgtgcgagagacgcagtggccggggactactggggccagggaatcctagtcaccgtcgccgcg

SEQ ID NO: 11153 - DNA, 283 bp, Homo sapiens
  source 1..283: mol_type = other DNA
cacagtctctggctactccatcaccattggttactactggggctggatccggcagtccccagggaagggcctggagtggattggcagtatctctcatagaggggccacctactacaacccgtctctcaagggtcgagtcaccatatcacgtgacacgtccaagaaccagttcaccatgaatctgtactctgtgaccgccgcagacacggccacatattactgtgcgagagacgcagtggctggcgactactggggcatgggaatcctggtcaccgtctcctca

SEQ ID NO: 11154 - DNA, 283 bp, Homo sapiens
  source 1..283: mol_type = other DNA
cactgtctctggttaccccatcagcattggttactactggggctggatccggcaggccccggggaagggcctggagtggattggcagtatctctcatagggggatcacctattacaacccgtccctcgagagtcgagtcaccatttcatcagacacgtccaagaaccagttctccctgaagctgaattttgtgaccgccgcagacacggccgtatattactgtgcgagagacgcagtggctggggactactggggccagggaaccctggtcaccgtctcctca

SEQ ID NO: 11155 - DNA, 283 bp, Homo sapiens
  source 1..283: mol_type = other DNA
cactgtctctggttaccccatcgacattggttactactggggctggatccggcagcccccagggaagggacttgagtggattgggagtatctctcaccgtggagacacttactacaacccgtccctcaacagtcgagtcatcatttcaagagacacgtccaagaaccaattctccctgagactgacctctgtgacggccgcggacacggccgtgtatttctgtgcgagagacgcagtggctggggactactggggccagggaatcctggtcaccgtctcctca

SEQ ID NO: 11156 - DNA, 283 bp, Homo sapiens
  source 1..283: mol_type = other DNA
cactgtctctggttaccccatctacattggttactattggggctggatccggcagcccccagggaagggcctggagtggattggcagtatctctcataggggggacacctactacaacccgtccctcaacagtcgggtcaccatatcaagagacacgtctacgaaccagttctccctgaggctgagttctgtgagcgccacggacacggccgtatattattgtgcgagagacgcagtggccggggactactggggccagggaatcctagtcaccgtcgccgca

SEQ ID NO: 11157 - DNA, 283 bp, Homo sapiens
  source 1..283: mol_type = other DNA
cacagtctctggctaccccatcaccattggttactactggggctggatccggcagcccccaggggggggcctggagtggattggcagtatttctcatagaggggccacctactacaacccgtctctcaaaggtcgagtcaccatctcacgtgacacgtccaagaaccagttcacaatgaatctgtactctgtgaccgccgcagacacgggcacatattactgtgcgagagacgcagtggctggcgactactggggcatgggaaccctggtcaccgtctcctca

SEQ ID NO: 11158 - DNA, 283 bp, Homo sapiens
  source 1..283: mol_type = other DNA
cagtgtctctggttactccatcagctggggttactactggggctggatccggcagtccccagggaagggcctggagtgggttggaagtatctctcatagggggagtacctactacaacccgtccctcaagagtcgagtcactatatcattagacacgtccaagaaccagttctccctggagctgagttctgtgaccgccgcagacacggccgtttattactgtgcgagagacgcagtggctggggactactggggccagggaagcctggtcaccgtctcctca

SEQ ID NO: 11159 - DNA, 283 bp, Homo sapiens
  source 1..283: mol_type = other DNA
cagtgtctttgattattccatcagcattggttactattggggctggatccggcagcccccagggaaggggcttgagtggattggcagtatctctcatcgtggaaacacttactacaacccgtccctcaagagtcgagtcaccatatcaagagacacgtccaagaatcaattctccctgaagctgacctctgtgaccgccgcagacacggccatgtattactgtgcgagagacgcagtggccggggactattggggccagggaatcctggtcacagtctcctca

SEQ ID NO: 11160 - DNA, 283 bp, Homo sapiens
  source 1..283: mol_type = other DNA
cactgtctctggttaccccatctacattggttactattggggctggatccgtcagcccccagggaagggcctggagtggattggcagtatctctcataggggggacacctactacaacccgtccctcaacagtcgggtcaccatatcaagagacacgtctacgaaccagttctccctgaggctgagttctgtgagcgccacggacacggccgtatattattgtgcgagagacgcagtggccggggactactggggccagggaatcctagtcaccgtcgccgca

SEQ ID NO: 11161 - DNA, 283 bp, Homo sapiens
  source 1..283: mol_type = other DNA
cactgtctctggttaccccatcactattggttactattggggctggatacggcagcccccagggaaggggctggagtggattgggagtatctctcaccgtgggagcacctactacaacccgtccctcaagggtcgagtctccatatcactggacacgcccaacaaccagttctccctgaccctgaggtttgtgaccgccgcagacacggccgtgtattactgtgcgagagacgcagtggctggggactactggggcgagggaaccctggtcaccgtctcctca

SEQ ID NO: 11162 - DNA, 283 bp, Homo sapiens
  source 1..283: mol_type = other DNA
cagtgtctctggttactccctcaccattggttactactggggctggattcggaagcccccagggaaggggcttgagtggattgggagtatctctcatcgtggactcacttactacaatccgtccctcaggggtcgagtcaccatatcccgagacacgtccaagaaccagttcttcctccaaatgatctctgtgaccgccgcagactcggccatatattactgtgcgagggacgcagtggctggggactactggggccagggaacttcggtcaccgtctcctca

SEQ ID NO: 11163 - DNA, 286 bp, Homo sapiens
  source 1..286: mol_type = other DNA
tgtagcctctggattttgcttcgcttgtgaacccatgaattgggtccgtcaggctccagggaaggggctggagtggatttcacacattagaagtaatagtgacatcataacctacgcagacgctgtgaggggccgattcaccatctccagagacaatgacaagagctcactatatctgcagatgaacagcctggcagacgaggacacggctgtatattattgtgttagagattatgattacggatttgactactggggccagggaaccctggtcaccgtctcctca

SEQ ID NO: 11164 - DNA, 286 bp, Homo sapiens
  source 1..286: mol_type = other DNA
tgcagcctctggattcaccttcaatacctataacatgaactgggtccgccagcctccagggaaggggctggagtgggtttcacacattggtagtagtggtggctcgatatactacgcagactctgtgaagggccgattcgccgtctccagagacaatgccaagaactcactgtatctgcaagtgaacagcctgagagacgaggacacggctgtatattactgtgtgagagattacgactacggctttgactactggggccagggaaccctggtctccgtctcctca

SEQ ID NO: 11165 - DNA, 286 bp, Homo sapiens
  source 1..286: mol_type = other DNA
tgcagcgtctggattcaccttcagtagcaatggcatgcactgggtccgccaggctccaggcaaggggctggagtgggtggcagttatatggtatgatggaagtaaaaaatactatgcagactccgtgaagggccgattcaccatctccagagacaattccatggacacgctgtatttgcaaatgaacaacctgagagccgaggacacggctgtgtattactgtgcgagattccagaccggtggtcttgactactggggccagggaacgctggtcaccgtctcctca

SEQ ID NO: 11166 - DNA, 286 bp, Homo sapiens
  source 1..286: mol_type = other DNA
tgcagcgtctggattcagcttcagtagcaatggcatgcactgggtccgccaggctccaggcaaggggctggagtgggtggcagttatttggtatgatggaagtaaaaaatactatgcagactccgtgaagggccgattcaccatctccagagacaattccttggacacgctgtttttgcaaatgaacaacctgagagccgaggacacggctgtttattactgtgcgagattccagaccggtggtcttgactactggggccagggaaccctggtcaccgtctcctca

SEQ ID NO: 11167 - DNA, 286 bp, Homo sapiens
  source 1..286: mol_type = other DNA
tgcagcctctggattcacctttcgtagtaatgccatgcactgggtccgccaggctccaggcaaggggctggagtgggtggcagttatagggtttgatggaagcaaacaatactatgcagacaccgtgaagggccgattcaccatttccagagacaattccatgaacatgctgtatctgcaaatgaacagcctgagagtcgaagacacggctgtctattactgtgcgaggttccagacggggggccttgactactggggccagggaaccctggtcaccgcctcctca

SEQ ID NO: 11168 - DNA, 307 bp, Homo sapiens
  source 1..307: mol_type = other DNA
ttcagcctctggattcactctcagtaaggcctgggtggcctgggtccgccaggctccagggaaggggctggagtcggttggccgcatcacaagcaacgctgatggtgggacaacagggtacgctgcacccgtgagaggcagattcaccgtctctagagatgattcaacaaacacgttgtttctgcaaatgaacagcctgacagccgaggacacagccgtctattattgtaccacggatcaagggaacagtagtcatttttactcctttgattactggggccggggaaccctggtcaccgtctcctca

SEQ ID NO: 11169 - DNA, 307 bp, Homo sapiens
  source 1..307: mol_type = other DNA
tgcagcctctggattcactttaagtaacgcctggatgacctgggtccgccaggctccggggatggggctggagtgcgttggccgtattacaagcaaaactgatggtgggacaactggctacgctgcacccgtgaaaggcagattcaccgtctcaagagatgattcaaaaaacacgctctttctgcaaatgaacagcctgaaaaccgaggacacagccatgtatttctgtaccacagatcagggtaatagtagtcatttttactcctttgactactggggccagggaaccctggtcaccgtctcctca

SEQ ID NO: 11170 - DNA, 307 bp, Homo sapiens
  source 1..307: mol_type = other DNA
tgcagcctctggattcactttaagtaacgcctggatgacctgggtccgccaggctccggggatggggctggagtgcgttggccgtattacaagcaaaactgatggtgggacaactggctacgctgcacccgtgaaaggcagattcaccgtctcaagagatgattcaaaaaacacgctctttctgcaaatgaacagcctgaaaaccgaggacacagccatgtatttctgtaccacagatcagggtaatagtagtcatttttactcctttgactattggggccagggaaccctggtcaccgtctcctca

SEQ ID NO: 11171 - DNA, 289 bp, Homo sapiens
  source 1..289: mol_type = other DNA
tgcagcctctggtttcagctttagtaactattggatgagttgggtccgccaggctccagggaaggggctggagtgggtggccaacataaaccaagatggaagtgagaaatactatgtggactctgtgaagggccgattcaccatcgccagagacaacgccaaggactcactgtatctgcaaatgaacagcctgagagccgaggacacggctgtgtattactgtgcgagaagtcctggaactggtactgttgactactggggccagggatcccgggtcaccgtctcctca

SEQ ID NO: 11172 - DNA, 289 bp, Homo sapiens
  source 1..289: mol_type = other DNA
tgcagcctctggtttcatctttagtgaagattggatgagttgggtccgccaggctccagggaaggggctgcagtgggtggccaacataaaccaagatggaagtgagaaatactatgtggactctgtgaagggccgattcaccatcgccagagacaacgccaaggactcactgtatctgcaaatgaacagcctgagagccgaggacacggctgtgtattactgtgcgagaagtcctggaactggtactgttgactactggggccagggatcccgggtcaccgtctcctca

SEQ ID NO: 11173 - DNA, 289 bp, Homo sapiens
  source 1..289: mol_type = other DNA
tgcagcctctggtttcagcttcagtaactattggatgagttgggtccgccaggctccagggaaggggctggagtgggtggccaacataaaccaagatggaagtgagaaatactatgtggactctgtgaagggccgattcaccatcgccagagacaacgccaaggactcactgtatctgcaaatgaacagcctgagagccgaggacacggctgtgtattactgtgcgagaagtcctggaactggtactgttgactactggggccagggatcccgggtcaccgtctcctca

SEQ ID NO: 11174 - DNA, 289 bp, Homo sapiens
  source 1..289: mol_type = other DNA
tgcagcctctggtttcagcttcagtaactattggatgagttgggtccgccaggctccagggaaggggctggagtgggtggccaacataaaccaaggtggaagtgagagatactatgtggattctctgaagggccgattcaccatcgccagagacaacgccaaggactcactgtatctgcaaatgaacagcctgagagccgaggacacggctgtttattactgtgcgagaagtcctggaactggtactgttgactactggggccagggatcccgggtcaccgtctcctca

SEQ ID NO: 11175 - DNA, 289 bp, Homo sapiens
  source 1..289: mol_type = other DNA
tgcagcctctggtttcagcttcagtaacgattggatgagttgggtccgccaggctccagggaaggggctggagtgggtggccaacataaaccaagatggaagtgagaaatactatgtggactctgtgaagggccgattcaccatcgccagagacaacgccaaggactcactgtatctgcaaatgaacagcctgagagccgaggacacggctgtctattactgtgcgagaagtcctggaactggtactgttgactactggggccagggatcccgggtcaccgtctcctca

SEQ ID NO: 11176 - DNA, 289 bp, Homo sapiens
  source 1..289: mol_type = other DNA
tgcagcctctggattcacgtttagtcatagttggatgagttgggtccgccaggctccagggaaggggctggagtgggtggccaacataaaccaagatggaagtgagaaatactatgtggactctgtggagggccgattcaccatctccagagacaacgccaagaattcactgtatgtgcagatgagcagcctaagagccgaggacacggctgtctattactgtgcgagatcaccaggaactggtacggttgactactggggccagggaacgcaggtcaccgtctcctca

SEQ ID NO: 11177 - DNA, 289 bp, Homo sapiens
  source 1..289: mol_type = other DNA
tgtagcctctggattcacctttagtaattattggatgagttgggtccgccaggctccagggaaggggctggagtgggtggccaacataaaccaagatggaagtgagaaatactatgtggactctgtggagggccgattcaccatctccagagacaacgccaagaactcactgtatgtgcaactgagcagtgtgagagccgaggacacggctgcctattactgtgcgagatcaccaggaactggtacggttgactactggggccagggaacgctggtcaccgtctcccca

SEQ ID NO: 11178 - DNA, 289 bp, Homo sapiens
  source 1..289: mol_type = other DNA
tgcagcctctggattcacgtttagtcatagttggatgagttgggtccgccaggctccagggaaggggctggagtgggtggccaacataaaccaagatggaagtgagaaatactatgtggactctgtggagggccgattcaccatctccagagacaacgccaagaattcactgtatgtgcagatgagcagcctaagagccgaggacacggctgtctattactgtgcgagatcaccaggaactggtacggttgactactggggccagggatcgcaggtcaccgtctcctca

SEQ ID NO: 11179 - DNA, 289 bp, Homo sapiens
  source 1..289: mol_type = other DNA
tgcagcctctggattcacgtttagtcatagttggatgagttgggtccgccaggctccagggaaggggctggagtgggtggccaacataaaccaagatggaagtgagaaatactatgtggactctgtggagggccgattcaccatctccagagacaacgccaagaattcactgtatgtgcagatgagcagcctaagagccgaggacacggctgtctattactgtgcgagatcaccaggaactggtacggttgactactggggccagggaaccctggtcaccgtctcctca

SEQ ID NO: 11180 - DNA, 289 bp, Homo sapiens
  source 1..289: mol_type = other DNA
tgcagcctctggattcacctttagtatttattggatgagctgggtccgccaggctccagggaaggggctggagtgggtggccaacatagaccaagatgggagtgcgacatactatgtggactctgtgaacggccgattcaccatgtccagagacaacgccaagaactcactgtatctgcaaatgaacagcctgagagccgacgacacggctatgtattactgtgcgaggtctccagggactgggactgtcgactactggggccagggaaccctggtcaccgtctcctca

SEQ ID NO: 11181 - DNA, 289 bp, Homo sapiens
  source 1..289: mol_type = other DNA
tgcagcctctggtttcagcttcagttactattggatgagttgggtccgccaggctccagggaaggggctggagtgggtggccaacataaaccaagacggaggtgagaaatactatgtggactctgtgaagggccgattcaccatcgccagagacaacgccaaggactcactgtatctgcaaatgaactgcctgagagccgaggacacggctgtgtattactgtgcgagaagtcctggaactggtactgttgactactggggccagggatcccgggtcaccgtctcctca

SEQ ID NO: 11182 - DNA, 289 bp, Homo sapiens; identical to SEQ ID NO: 11173
  source 1..289: mol_type = other DNA

SEQ ID NO: 11183 - DNA, 277 bp, Homo sapiens
  source 1..277: mol_type = other DNA
tgcagcctctggattcacctttagtagcgcttggatgagctgggtccgccaggctccagggcaggggctggagtgggtggccaccatgaagcatgatggaagtgagacatactatgtggactctgtgaagggccgattcaccatctccagagacaacgccaagaactcgctgtatctgcaaatgaacagcctgagagccgaggacacggctgtgtattactgtgcgagaggggcaggggccatctggggccaagggacaatggtcaccgcctcttca

SEQ ID NO: 11184 - DNA, 277 bp, Homo sapiens
  source 1..277: mol_type = other DNA
tgcagcctctggattcacacttactatgtcgtggatgagttgggtccgccaggctccagggaaggggctggagtgggtggccctcataagccaagatggaggtgggacagcgtatgtggactctgtgaagggccgattcaccatctccagagacatcgccaagaactcactgtatctgcaaatgaacagcctgagagtcgaggacacggctgtgtatttctgtgcgagaggtgccggggctatctggggccaggggacactggtcactgtctcctca

SEQ ID NO: 11185 - DNA, 280 bp, Homo sapiens
  source 1..280: mol_type = other DNA
tgcagcctctggattcaccttaggtagtttttggatgacctggggccgccaggctccagggaaggggccggagtgggtggccagcatgaagccagatgggagtggccaatactatgtggactctgtgaagggccgattcaccatctccagagacaacgccaagaactcactgtatctgcaaatgaacagcctgagagccgaggacacggctatctattactgtgcgagagctcgctactttgactcctggggccagggaaccctggtcaccgtctcctca

SEQ ID NO: 11186 - DNA, 280 bp, Homo sapiens
  source 1..280: mol_type = other DNA
tgcagcctctggattcacctttagtagtttttggatgagctgggtccgccaggctccagggaaggggctggagtgggtggccaatataaagcaagatggaagtgagaaatactatgtggactctgtgaagggccgattcaccatctccagagacaacgccgagaactcactgtatctgcaaatgaacagcctgagagccgaggacacggctgtgtattactgtgcgagagctaggtactttgactcctggggccagggaaccctggtcaccgtctcctca

SEQ ID NO: 11187 - DNA, 282 bp, Homo sapiens
  source 1..282: mol_type = other DNA
gcttctggattcacctttagtaattctgcagtgcagtgggtgcgacaggctcgtggacaacgccttgagtggataggatggatcgtcgttggcagtggtaacacaaactacggacagaagttccaggaaagagtcaccattaccagggacatgtccacaagtacagcctacatggagctgagcagcctgagatccgaggacacggccgtgtatttctgtgcggcaagtatagtggctacgggggcctcctggggccagggaaccctcgtcaccgtctcctca

SEQ ID NO: 11188 - DNA, 282 bp, Homo sapiens
  source 1..282: mol_type = other DNA
gcttctggattcacctttagtaattctgctgtgcagtgggtgcgacaggctcgtggacaacgccttgagtggataggatggatcgtcgttggcagtggtaacacaaactacgcacagaagttccaggaaagagtcaccattaccagggacatgtccacaagcacagcctacatggagctgagcagcctgagatccgaggacacggccgtgtattactgtgcggcaagtatagtggctacgggggcctcctggggccagggaaccctcgtcaccgtctcctca

SEQ ID NO: 11189 - DNA, 282 bp, Homo sapiens
  source 1..282: mol_type = other DNA
gcttctggattcacctttagaaattctgctgtgcagtgggtgcgacaggctcgtggacaacgccttgagtggataggatggatcgtcgttggcagtggtaacacaaactacgcacagaagttccaggaaagagtcaccattaccggggacatgtccacaagcacagcctacatggagctgagcagcctgagatccgaggacacggccgtgtattactgtgcggcaagtatagtggctacgggggcctcctggggccagggaaccctcgtcaccgtctcctca

SEQ ID NO: 11190 - DNA, 282 bp, Homo sapiens
  source 1..282: mol_type = other DNA
gcttctgggttcacctttagtaattctgctgtgcagtgggtgcgacaggctcgtggacaacgccttgagtgggtaggatggatcgtcgttggcagtggtaacacagactatgcacagaagttccaagacagagtcaccattacaagggacatgtcaacaagcacagcctacatggagatcaacagcctgagagccgaagactcggccgtttattactgtgcggcaagtatagtggctacgggggcctcctggggccagggaaccctcgtcaccgtctcctca

SEQ ID NO: 11191 - DNA, 282 bp, Homo sapiens
  source 1..282: mol_type = other DNA
gcttctggattcacctttactaactctgctgtccagtgggtgcgacaggctcgtggacaacgccttgagtggataggatggatcgtcgttggcactggtaacacaaactacgcacagaagtttcaggaaagggtcaccatttccagggacatggccacaagcacagcctacttggagctgagtagcctgagatccgacgacacggccgtgtattattgtgcggcaagtatagtggctacgggggcctcctggggccagggaaccctggtcaccgtctcgtca

SEQ ID NO: 11192 - DNA, 282 bp, Homo sapiens
  source 1..282: mol_type = other DNA
gcttctggattcacctttagtaattctgctgtgcagtgggtgcgacaggctcgtggacaacgccttgagtggataggatggatcgtcgttggcagtggtaacacaaactacgcacagaacttccatgaaagagtcaccattaccagggacatgtccacaagcacagcctacatggagctgagcagcctgagatccgaggacacggccgtttattactgtgcggcaagtatagtggctacgggggcctcctggggccagggaaccctcgtcaccgtctcctca

SEQ ID NO: 11193 - DNA, 282 bp, Homo sapiens
  source 1..282: mol_type = other DNA
gcttctggattcacctttagtaattctgctgtgcagtgggtgcgacaggctcgtggacaacgccttgagtggataggatggatcgtcgttggcagcggtaacacaaactacgcacagaagttccagcaaagagtcaccattagcagggacatgtccacaagcacagcctacatggagttgagcagcctgagatccgaggacacggccgtgtattactgtgcggcaagtatagtggctacgggggcctcctggggccagggaaccctcgtcaccgtctcctca

SEQ ID NO: 11194 - DNA, 285 bp, Homo sapiens
  source 1..285: mol_type = other DNA
gcttctggattcacctttcgaaattctgctgtgcagtgggtgcgacaggctcgtggacaacgccttgagtggatagggtggatcgtcgttggcagtggtaacacaaactacgcacagaagttccaggaaagagtcaccattgccagggacatgtccacaagcacagcctacatggagttgagcagcctgagatccgaggacacggccatgtattactgtgcggcaagtatagtggctacgggggcctcctggggccagggaaccctcgtcaccgtctcctcctca

SEQ ID NO: 11195 - DNA, 283 bp, Homo sapiens
  source 1..283: mol_type = other DNA
cactgtctctggtggctccatcaatgataactactggagctggatccggcagcccccagggaagggactggagtggattggatatgtctattacaaaggaaacaccgactacaacccctccttcaagagtcgagtcaccatatcagtagacacgtccaggaaccagttctccctgaagctgagctctgtgaccgctgcggacacggccctctattactgtgcgagagaccttaacaggaaccttgactactggggccagggaaccctggtcaccgtctcctcg

SEQ ID NO: 11196 - DNA, 283 bp, Homo sapiens
  source 1..283: mol_type = other DNA
cactgtctctggtggctccatcagaggtttctactggagctggatccggcagcccccaggagggggactggagtggattggatatgttttttacaggggaaacaccgactacaacccctccctcaagagtcgagtcaccatgtcagtggacacgtccaagaaccagttctccctgaaattgagctctgtgaccgctgcggacacggccgtctattattgtgcgagagatttaaaccgaaaccttgactactggggccagggaaccctggtcaccgtctcctca

SEQ ID NO: 11197 - DNA, 280 bp, Homo sapiens
  source 1..280: mol_type = other DNA
tgtagtctctggattcccctttagcacctacgccatgagctggttccgccaggctccagggaaggggctggagtgggtcgctactattagtggtagtggtggtagcgcatactacgcagactcggtgaagggccggttcaccatttccagagacaattccaagaccatgttgtatctgcaaatgaacagcctgagagccgacgacacggccgtatattattgtgcgaaagaggtaaccggaaccgactggggccagggaaccctggtcaccgtcccctca

SEQ ID NO: 11198 - DNA, 280 bp, Homo sapiens
  source 1..280: mol_type = other DNA
tggagcctctggattcacctttagcaactatgccatgagttggttccgccaggctccagggaaggggctggagtgggtctcaactgtcagtggtagtggtggtagtacatactacgcagactccgtgatgggccggtacaccatctccagagacaattccaagagccagctgtatctgcaaatgaacagtctgagagtcgacgacacggccgtgtattactgtgcgaaagaggtaaccggaaccgactggggccagggagccctggtcaccgtctcctca

SEQ ID NO: 11199 - DNA, 280 bp, Homo sapiens
  source 1..280: mol_type = other DNA
tacagcctctggattcacctttaatagctatgccatgagctggttccgccaggctccagggaaggggctggaatgggtcacaactattaatgatagtggtgggaacaggtactatgcagcctccgtgaggggccggttcaccatctcaagagacaattccaaaaacacactatttctgcaaatgaacagcctgagagccgacgacacggccatatattactgtgcgaaagaagtgaccggaaccgactggggccagggaatcctggtcaccgtctcctca

SEQ ID NO: 11200 - DNA, 280 bp, Homo sapiens
  source 1..280: mol_type = other DNA
tgcagcctctggattcacctttagcacttatgccatgagttgggtccgccaggctgcagggaaggggctggtttgggtctcaactattagtggtagtggtggtagcacatactacgcagactccgtgaagggccggttcaccattgccagagacaattccaagaacacgctgtatctgcaaatgaacagcctgagagccgaggacacggccgtatattactgtgcgaaagaggtaaccggaaccgactggggccagggaaccctggtcaccgtctcctca

SEQ ID NO: 11201 - DNA, 280 bp, Homo sapiens
  source 1..280: mol_type = other DNA
tgcagcctctggattcacctttacttcctatgccatgagctggttccgccgggctccagggaagggactggagtgggtcgcaactattaatggtggtggtagtagcacatactatgcagactccgtgaagggccggttcaccatctccagagacaattccaaggccacgctgtttctgcaaatgaacagcctgagagccgacgacacggccgtattttactgtgcgaaagaggtaaccggaactgactggggccagggaaccctggtcaccgtctcctca

SEQ ID NO: 11202 - DNA, 280 bp, Homo sapiens
  source 1..280: mol_type = other DNA
tgcagcctctggattcacctttagcagctatgccatgagctgggtccgccaggctccagggaagggactggagtgggtctcaagtattagtggtagtggtgataacacatactacgcagactccgtgaagggccggttcaccatctccagagacaatttcaagaccacactgtatctgcaaatggacagcctgagagccgacgacacggccctatattactgtgcgaaagaggtgaccggaaccgactggggccagggaaccctggtcaccgtctcctca

SEQ ID NO: 11203 - DNA, 280 bp, Homo sapiens
  source 1..280: mol_type = other DNA
tgcagcctctggattcacctttagcgactacgccatgagctgggtccgccaggctccagggaaggggctggagtgggtctcaactctgagtggtagtggtggtagcacatattacgcagactccgtgaacggccggttcaccatctccagagacaattccaagaacacagtgtatctgcaaatgaatggcctgagagccgaggacacggccatatattactgtgcgaaagaggtgaccggaaccgactggggccagggaaccctggtcaccgtctcctca

SEQ ID NO: 11204 - DNA, 280 bp, Homo sapiens
  source 1..280: mol_type = other DNA
tgcagcctctggattcacctttagcgactttgccatgagctggttccgccaggctccagggaaggggctggagtgggtctcaactttaagtggtagtggtactagcacatactacgcagactccgtgaagggccgcttcaccatctccagagacaattccaagaacatgttgtatgggcaaatgaaccgactgagagccgaggacacggccctatattactgtgcgaaagaggtaaccggaaccgactggggccagggaaccctggtcaccgtctcctca

SEQ ID NO: 11205 - DNA, 280 bp, Homo sapiens
  source 1..280: mol_type = other DNA
tgcagcctctggattcacctatagcacctatgccatgagctgggtccgccagcctccagggaaggggctggagtgggtctcaactattagtggtagtggtggtagcacatattatgcagactccgtgaagggccggttcaccatctccagagacaatgccaagaccactctgtatctgcaaatgaacagcctgagagtcgacgacacggccgtatactactgtgcaaaagaggtaaccggaaccgactggggccagggaagcctggtcaccgtctcctca

SEQ ID NO: 11206 - DNA, 280 bp, Homo sapiens
  source 1..280: mol_type = other DNA
tgcagcctctggattcatttttagcagctatgccatgagctgggtccgccaggctcctgggaaggggctggagtgggtctcaagtcttagtggaagtggtggtaacacatactacgcagactctgtgaagggccggttcaccatctccagagacaattccaagaccacggtgtatctgcaaatgaacagcctgagagtcgacgacacggccatatattactgtgcgaaggaggtaaccggaaccgactggggccagggaaccctggtcaccgtctcctca

SEQ ID NO: 11207 - DNA, 280 bp, Homo sapiens
  source 1..280: mol_type = other DNA
tgcagcctctggattcacctttagcagctttgccatgagctggttccgccaggttccagggaaggggctggactgggtctcaactattagtggtagtggtggtagcacatactacgcagactccgtgaagggccggttcaccatctccagagacaattccaagaccacgctgtatctgcaaatgaacagcctgagagtcgacgacacggccgtatattactgtgcgaaagaggtaaccggaaccgactggggccagggaaccctggtcaccgtctcctca

SEQ ID NO: 11208 - DNA, 280 bp, Homo sapiens
  source 1..280: mol_type = other DNA
tgtagcctctggattcacctttagcacctatgccatgagttggttccgccaggctccagggaaggggctgcagtgggtcgcaacaattggtggtgatggtgagaacacatactacgcagtctccgtgaagggccggttcaccctctccagagacaattccaagaccaagctgtatctgcaaatgaacagcctcagagccgacgacacggccgtatatttttgtgcgaaagaggtgaccggaaccgactggggccagggaaccctggtcaccgtctcctca

SEQ ID NO: 11209 - DNA, 280 bp, Homo sapiens
  source 1..280: mol_type = other DNA
tgcagcctctggattcacctttagcaactatgccatgagttgggtccgccaggctccagggaaggggctggaatgggtctcaactcttagtggtagtggtagtagtacatactacgcagactccgtgaaggggcggttcatcatctccagagacaattccaagaacacagtgtatctggaaatgaacagactgaaaggcgacgacacggccgtatattattgtgcgaaagaggtaaccggaaccgactggggccagggaaccctagtcaccgtctcctca

SEQ ID NO: 11210 - DNA, 280 bp, Homo sapiens
  source 1..280: mol_type = other DNA
tgcggcctctggattcacctttagcagctttgccatgagctgggtccgccaggctccagggaaggggctggagtgggtctcaactcttaattataacggtgataacagatactacgcagactccgtgaagggccggttcaccatctccagagacaattccaagaccacactatatctgcaaatgagcagcctgagacccgacgacacggccgtatattactgtgcgaaagaggtaaccgggaccgactggggccagggaaccctggtcaccgtctcctcc

SEQ ID NO: 11211 - DNA, 280 bp, Homo sapiens
  source 1..280: mol_type = other DNA
taaagcctctggattcacctttagcaactttgccatgagctggttccgccaggctccaggaaaggggctggagtgggtctcaactatcagtgatactggtgatggcacatactacgcagacgccgtgaagggccgcttcaccatctccagagacaattccaagaacactctctatctgcaaatgaacagcccgagagtcggggacacggccatgtattactgtgcgaaagaagtaactggaaccgactggggccagggaaccctggtcaccgtctcctca

SEQ ID NO: 11212 - DNA, 280 bp, Homo sapiens
  source 1..280: mol_type = other DNA
tacagcctctggattcacctttagtaactatgccatgagctggttccgccaggctcctgggaaggggctggagtgggtctcaactcttagtggaagtggtagtagtacatactacgcagactctgtgaagggccggttcaccatctccagagacaattccaaggcaatgacgtatctacaaatgaacagcctgagagccgacgacacggccgtatattactgtgcgaaagaggtaaccggaaccgactggggccagggaaccctggtcaccgtctcctca

SEQ ID NO: 11213 - DNA, 280 bp, Homo sapiens
  source 1..280: mol_type = other DNA
tgcagcctctggattcacctttaacaactatgccatgagttgggtccgccaggctccagggaaggggctggagtgggtctcaactattagtggtggtggtagtagtacatactacgcagactccgtgaagggccggttcaccatctccagagacaattccaagaacaccttgtatgtgcaaatgaacagcctgagagccgaggacacggccatatattactgtgcgaaagaggtgaccggaaccgactggggccagggaaccctggtcaccgtctcctca

SEQ ID NO: 11214 - DNA, 280 bp, Homo sapiens
  source 1..280: mol_type = other DNA
tgcagcctctggattcatctttaccaactatgccatgacctgggtccgccaggctccagggagggggctggagtgggtctcaactattagtggtagtggtggtagcacatcctacgcagactccgtgaagggccggttcaccatctccagagacaattccaagaccacactgtatctgcaaatgaacagcctgagagccgacgacacggccgtatattactgtgcgaaagaggtgaccggaaccgactggggccagggaaccctggtcaccgtctcctca

SEQ ID NO: 11215 - DNA, 280 bp, Homo sapiens
  source 1..280: mol_type = other DNA
tgcagcctctggattcacctttagctcctatgccatgagctgggtccgccagactccagggaagggcctggactgggtcgcaactattagtcgtgattctactaatatatactatgcagactccgtgaagggccggttcaccatctccagagacaattccaagaccacactgtatctgcaaatgaacaacctgagagtcggcgacaccgccgtttattactgtgcgaaagaggtaaccggaaccgactggggccagggaaccctggtcaccgtctcctca

SEQ ID NO: 11216 - DNA, 280 bp, Homo sapiens
  source 1..280: mol_type = other DNA
tgcagcctctggattcacctttagcacctatgccatgagctgggtccgccaggctccagggaagggactggagtgggtcgcaactattagtggtggtggtagtagcacatactatgcagactccgtgaagggccggttcaccatctccagagacaattccaagaccacgctgtatttgcaaatgaacagcctgagagccgacgacacggccgtatattactgtgcgaaagaggtaaccggaaccgactggggccagggaaccctggtcaccgtctcctca

SEQ ID NO: 11217 - DNA, 280 bp, Homo sapiens
  source 1..280: mol_type = other DNA
tgcagcctctggattcagcttcaccaactatgccatgagctggttccgccaggctccagggaaggggctggagtgggtctcaactattagtggtgatggtgaaaacacatactacgcagactccgtgaagggccggttcaccatctccagagacaattccaagaacacattgaatctgcaaatgaacagcctgagagccgacgacacggccgtatattactgtgcgaaagaggtaactggaaccgactggggccagggaaccctggtcaccgtctcctca

SEQ ID NO: 11218 - DNA, 280 bp, Homo sapiens
  source 1..280: mol_type = other DNA
tgcagcctctggattcacctttaccaactatgccatgagctgggtccgccaggctccagggaaggggctgcagtgggtctcaactattagtggtagtggtcgtaacatatactacgcagactccgtgaagggccggttcaccatctccagagacaattccagggccacgctgtctctccaaatgaacagcctgagagccgacgacacggccgtatattactgtgcgaaagaggtaaccggaaccgactggggccagggaatcctggtcaccgtctcctca

SEQ ID NO: 11219 - DNA, 280 bp, Homo sapiens
  source 1..280: mol_type = other DNA
tgcagcctctggattcacctttagcagctatgccatgagctgggtccgccaggctccagggaaggggctggagtgggtctcaactgttagtggtagtggtggtagcacatactacgcagactccgtgaagggccggttcaccatctccagagacaattccaagaccacgctgtatctgcagatgaacagcctgagagccgacgacacggccgtatattactgtgcgaaagaggtaaccggaaccgactggggccagggaaccctggtcaccgtctcctca

SEQ ID NO: 11220 - DNA, 280 bp, Homo sapiens
  source 1..280: mol_type = other DNA
tgcagcctctggattcacctatagcacctatgccatgagctgggtccgccagcctccagggaaggggctggagtgggtctcaactattagtggtagtggtggtagcacatattatgcagactccgtgaagggccggttcaccatctccagagacaattccaagaccacgctgtatctgcaaatgaacagcctgagagtcgacgacacggccgtatattactgtgcgaaagaggtaaccggaaccgactggggccagggaagcctggtcaccgtctcctca

SEQ ID NO: 11221 - DNA, 280 bp, Homo sapiens
  source 1..280: mol_type = other DNA
tgtagcctctggattcacctttagcagctatgccatgagttggttccgccaggctccagggaaggggctggactgggtctcaactattagtggtagtggtggtagcacatattatgcagactccgtgaaggcccgcttcaccatctccagagacaattccaaggccgcactttatctgcaaatgaacagtctgagagccgacgacacggccgtatattactgtgcgaaagaggttaccggaaccgactggggccagggaaccctggtcaccgtcgcctca

SEQ ID NO: 11222 - DNA, 280 bp, Homo sapiens
  source 1..280: mol_type = other DNA
tgcagcctctggattcacctttagcagctatgccatgaactgggtccgccaggctccagggaaggggctggagtgggtctcaactattagtggtagtggtggtaagacatactacgcagactccgtgaagggccggttcaccatctccagagacaattccaagaccacgctgtatctgcaaatgaacagcctgagagccgacgacacggccgtatattactgtgcgaaagaggtcaccggaaccgactggggccagggaatcctggtcaccgtctcctca

SEQ ID NO: 11223 - DNA, 280 bp, Homo sapiens
  source 1..280: mol_type = other DNA
tgcagcctctggattcacctttagcggctatgccatgagctggttccgccaggctccagggaaggggctggagtgggtcacaagtattagtggcagtggtaataacatatattacgcagactccgtgaagggccggttcaccatctccagagacaattccaagaccacgctgtatgtgcgaatgaacagcctgagagccgacgacacggccgtatattactgtgcgaaagaggtaaccggaaccgactggggccagggaaccctggtcaccgtctcctca

SEQ ID NO: 11224 - DNA, 280 bp, Homo sapiens
  source 1..280: mol_type = other DNA
tgcagcctctggattcacctttaccaactatgccatgagctggttccgccaggctccagggaaggggctggagtgggtttcaactattagtggtagtggtggtagcacgtactacgcagactccgtgaagggccgattcaccatctccagagacaattccaagaacacattgtatctgcaaatgaacagcctgagagccgaggacacggccgtatatctctgtgcgaaagaggtaaccggaaccgactggggccagggaaccctggtcaccgtctcctca

SEQ ID NO: 11225 - DNA, 280 bp, Homo sapiens
  source 1..280: mol_type = other DNA
tgcagcctctggattcacctttagcacctatgccatgagctgggtccgccaggctccagggaagggactggagtgggtcgcaactatcagtggtggtggtagtaccacatactatgcagactccgtgaagggccggttcaccatctccagagacaattccaagaccacgctgtatctgcaaatgaacagcctgagagccgacgacacggccgtatattactgtgcgaaagaggtaaccggaaccgactggggccagggaaccctggtcaccgtctcctca

SEQ ID NO: 11226 - DNA, 280 bp, Homo sapiens
  source 1..280: mol_type = other DNA
tgcagcctctggattcacctttaactcttatgccatgagttggttccgccaggctgcagggaaggggctggagtgggtctcaactcttagtggtagtggtggtagcacatactacgcagactccgtgaagggccggttcaccatttccagagacaattccaagaacacgctgtatctgcaaatgaacagtctgagagccgaggacacggccgtatattactgtgcgaaagaggtaaccggaaccgactggggccagggaaccctggtcaccgtctaccca

SEQ ID NO: 11227 - DNA, 280 bp, Homo sapiens
  source 1..280: mol_type = other DNA
tgcagcctctggattcacctttagcacttatgccatgagttgggtccgccaggctgcagggaaggggctggagtgggtctcaactcttagtgctagtggtggtagcacatactacgcagactccgtgaaggaccggttcaccatttccagagacaattccaagaacacggtgtatctgcaaatgaacaggctgagaggcgaggacacggccgtctattactgtgcgaaagaggtaaccggaaccgactggggccagggaaccctggtcaccgtctcctca

SEQ ID NO: 11228 - DNA, 301 bp, Homo sapiens
  source 1..301: mol_type = other DNA
tgaagcctctggattcacccttaccaactatgccatgacctgggtccgccaggcgccagggaaggggctggagtgggtctcaactattagtgatagtggtgatagaacatggtacgcagactccctgaagggccggttcaccatctccagagacaattccaagaacacgctgtttctgcaaatgaacagcctgagagccgaggacacggccctatattactgtgcgagagacggagatgacaataggcctccggatgcttatgatatgtggggccaagggacaatggtcaccgtctcttca

SEQ ID NO: 11229 - DNA, 301 bp, Homo sapiens
  source 1..301: mol_type = other DNA
tgcagcctctggattcacctttagcaactatgccatgacctgggtccgccaggctccagggaaggggctggagtgggtctcaactattagtgttattgatgatagaacattctccgcagacttcgcgaagggccgcttcaccatctccagagacaattccaagaacaccctgtttctgcagatgaacagcctgagagccgaggacacggccgtatatttctgtgcgagggatggggatgataatcgcccccccgatgcttatgatatgtggggtcaggggataatggtcaccgtctcttca

SEQ ID NO: 11230 - DNA, 301 bp, Homo sapiens
  source 1..301: mol_type = other DNA
tgcagcctccggattcacctttacccactatgccatgacctgggtccgcctggctccagggaaggggctggagtgggtctcaactatcagtggtagttctgataggacatggtatgcagactccgtgaagggccggttcaccatctccagagacaattccaaggacaccctgtatctgcaaatgaacagcctgagagccgaggacacggccgtctattactgtgcgagagatggggatgacaataggcctcctgatgcttatgatatgtggggccaagggacattggtcaccgtctcttca

SEQ ID NO: 11231 - DNA, 292 bp, Homo sapiens
  source 1..292: mol_type = other DNA
tgcagcctctgagttcagcgtcagtgactattggatgagctgggtccgccaggctccaggcaaggggcttcaatgggtggccaatttcaacccaaatggaattgagaaaaattatgtggactctgtgaagggccgattcaccgtctccagagacaacgtcaagaactcaatgtatctgcagatggacagcctgagagccgaggacacgggaatgtatttttgtgtgagaggagggggaagtggctggccctttgcctactggggccagggaaccctggtcaccgtctcgtca

SEQ ID NO: 11232 - DNA, 292 bp, Homo sapiens; identical to SEQ ID NO: 11231
  source 1..292: mol_type = other DNA

SEQ ID NO: 11233 - DNA, 292 bp, Homo sapiens
  source 1..292: mol_type = other DNA
tgcagcctctggattcacctttagtacttcttggatgagttgggtccgccaggctccagggaaggggctggagtgggtggccaacataaacttagagggaagtgagaaaaactacatggactctatgaagggccgattcaccatctccagagacaacgccaagaactcactgtttctgcagatgaacagcctgagagacgaagacacagctctatatttctgtgtgagagggggcggcagtggctggccttttgcctactggggtccgggaactctggtcaccgtctcctca

SEQ ID NO: 11234 - DNA, 292 bp, Homo sapiens
  source 1..292: mol_type = other DNA
tgcagcctctgaattcaccgtcagtgactattggatgagctgggtccgccaggctccaggcaaggggctgcagtgggtggccaacttgaacccaaatggaattgagaaaaattatgtggactctgtgaagggccgattcaccgtctccagagacaacgtcaagaactcaatgtatctgcagatggacagcctgagagccgaggacacgggagtgtatttttgtgtgagaggagggggaagtggctggccctttgcctactggggccagggaaccctggtcaccgtctcctca

SEQ ID NO: 11235 - DNA, 298 bp, Homo sapiens
  source 1..298: mol_type = other DNA
tgcagcctctggatttaccttcaataaatatgctatacactgggtccgccaggctccaggcaaggggctggagtgggtggcagttctttcatatgatggaggtaatgaatactacgcagactccgtgaagggccgattcaccgtctccagagacaattccaagaatataatgtatctgcaaatgaacagcctgagacctgaagacacggctgtctattactgtgcgagaacgatttttggagtggttacggatgcttctgatatctggggccaagggacaatggtcaccgtctcttca

SEQ ID NO: 11236 - DNA, 298 bp, Homo sapiens
  source 1..298: mol_type = other DNA
tgcagcctctggattcaccttcagtagatatggcatgcactgggtccgccaggctccaggcaaggggctggagtgggtggcagttatatcatatgatggaagcactaaatactatgcagactccgtgaagggccgattcaccatctccagagacaattccaagaacccgctgtctctacaaatgaacagcctgagagttgaggactcggctgtgtattactgtgcgcgcacgatttttggagtggtgaccgatgcttctgatatctggggccaaggggcaatggtcatcgtctcttca

SEQ ID NO: 11237 - DNA, 286 bp, Homo sapiens
  source 1..286: mol_type = other DNA
tgcagcctctggattcatctttagtagttcttggatgacgtgggtccgccaggctccaggaaaggggctggagtgggtggccaacataaagcaagatggcagtgagaaataccttgtgggctctgtgaagggccgattcaccatctccagagacaacgccgagagtacactgtatctacaattgaacagtctgagagccgaggacaccgctgtctattactgtgcgagagaccacggcagcactattgactactggggccagggaaccctggtcaccgtctcctca

SEQ ID NO: 11238 - DNA, 286 bp, Homo sapiens
  source 1..286: mol_type = other DNA
tgcagcctctggattcacctttagtagttcttggatgacctgggtccgccaggctccagggaaggggctggagtgggtggccaacataaagcaagatgggagtgagaaataccatgtgggctctgtgaagggccgattcaccatctccagagacaacgccaagagctcactgtatctgcaattgaacagcctgagagccgaggacacggctgtgtattactgtgcgagagaccacggcagcactattgactactggggccagggaaccctggtcaccgtctcctca

SEQ ID NO: 11239 - DNA, 286 bp, Homo sapiens
  source 1..286: mol_type = other DNA
tacagcctctggattcacctttagtagttcttggatgacctgggtccgccaggctccagggagggggctggagtgggtggccaacataaagccagatgggagtgagaaattccatgtgggctctgtgaagggccgattcaccatctccagagacaacgccgagaggtcattgtatctgcaattgaacagcctgagagccgaggacacggctgtatatttctgtgcgagagaccacggcagcactattgactactggggccagggaaccctggtcaccgtctcctca

SEQ ID NO: 11240 - DNA, 286 bp, Homo sapiens
  source 1..286: mol_type = other DNA
tgtagcctctgaattcacctttagtaactattggatgacctgggtccgccaggctccagggaaggggctggagtgggtggccaacataaagacagatggaagtgagaaatactatgtggagtctgtgaagggccgattcaccatctccagagacaacgccaagaactcactgtatctgcaaatggacagcctgagagtcgaggacacggctgtgttttactgtgcgagagatcacgggagtactattgactactggggccagggaaccctggtcaccgtctcctca

SEQ ID NO: 11241 - DNA, 301 bp, Homo sapiens
  source 1..301: mol_type = other DNA
tgtaggctctggattcacctttagcggctatgtcatgggctgggtccgccaggctccagggaaggggctggagtgggtctcaggtattagtggtagtggtgttaacacatactacgcagactccgtgaagggccggctcaccatctccagagacaattccaagaacacgctgtttcttcaaatgaacagcctgagagccgaggacacggccgtatattactgtgcgaaaggtcgatctggcggctacgattggtactactttgactactggggccagggaaccctggtcaccgtctcctca

SEQ ID NO: 11242 - DNA, 307 bp, Homo sapiens
  source 1..307: mol_type = other DNA
tgcagcctctggattcacctttagcggctatgtcatgagctgggtccgccaggctccagggaaggggctggagtgggtctcaggtattagtggcagtggtggtagcacattctacgcagactccgtgaagggccggttcaccatctccagagacaattccaagaacaagaacacgctgtggctgcaaatgaacagcctgagacccgaggactcggccgtatactactgtgcgaaaggtcgatctggtggctatgattggtactactttgactactggggccagggaaccctggtcaccgtctcctca

SEQ ID NO: 11243 - DNA, 301 bp, Homo sapiens
  source 1..301: mol_type = other DNA
tgcagcctctggattcaccttcagcggctatgtcatgagctgggtccgccaggctccagggaaggggctggagtgggtctcaggtattagtggtagtggtgttagcacatactacgcagactccgtgaagggccggttcaccatctccagagacaactccaagaatacgatgtatctccaaatgagcagcctgagagccgaggacacggccgtatattactgtgcgaaaggtcggtctggtggctacgattggtactactttgactactggggccagggaaccctggtcaccgtctcctca

SEQ ID NO: 11244 - DNA, 295 bp, Homo sapiens
  source 1..295: mol_type = other DNA
tgcagcctctggactcattttcagtaacgcctggatgagctgggtccgccaggctccagggatggggctggagtgggttggccgtgttacaagcaaaactgatggtgggacaacagactacgctgcacccgtgaaaggcagattcagcatctcaagagatgattcagaaaacacgctgtatctgcaaatgaacagcctgaaaaccgacgacacagccgtgtattactgcaccactgctgttgggcactacggaatggacgtctggggccaagggaccacggtcaccgtctcctca

SEQ ID NO: 11245 - DNA, 295 bp, Homo sapiens
  source 1..295: mol_type = other DNA
tgcagcctctggattcactttcagtaacgcctggatgagctgggtccgccaggctccagggaaggggctggagtgggttggccgtattaaaagcgaaactgacggtgggacaacagactacactgcacccgtgaaaggcagattcaccatctcaagagatgattcaaaaaacacgctgtatctgcaaatgaacagcctgaaaaccgaggacacagccgtatatcactgtaccacagcggtgggtcactacggcatggacgtctggggccaagggaccacggtcaccgtctcctca

SEQ ID NO: 11246 - DNA, 295 bp, Homo sapiens
  source 1..295: mol_type = other DNA
tgcagcctctggattcactttcagtaacgcctggatgagctgggtccgccaggctccagggaaggggctggagtgggttggccgtattaaaagcgaaactgacggtgggacaacagactacactgcacccgtgaaaggcagattcaccatctcaagagatgattcaaaaaacacgctgtatctgcaaatgaacagcctgaaaaccgaggacacagccgtgtatcactgtaccacagcggtgggccactacggcatggacgtctggggccaagggaccacggtcaccgtctcctca

SEQ ID NO: 11247 - DNA, 293 bp, Homo sapiens
  source 1..293: mol_type = other DNA
cagcctctggattcactttcagtaacgcctggatgagctgggtccgccaggctccagggaaggggctggagtgggttggccgtattaaaagcgaaactgacggtgggacaacagactacactgcacccgtgaaaggcagattcaccatctcaagagatgattcaaaaaacacgctgtatctgcaaatgaacagcctgaaaaccgaggacacagccgtatatcactgtaccacagcggtgggtcactacggcatggacgtctggggccaagggaccacggtcaccgtctcctca

SEQ ID NO: 11248 - DNA, 295 bp, Homo sapiens
  source 1..295: mol_type = other DNA
tgcagcctctggattcactttcagtaacgcctggatgagctgggtccgccaggccccagggaaggggctggagtgggttggccgtattaaaagcgaatctgacggtgggacaacagactacactgcacccgtgaaaggcagattcaccatctcaagagatgattcaaaaaacacgctgtatctgcaaatgaacagcctgaaaaccgaggacacagccgtatatcactgtaccacagcggtgggtcactacggcatggacgtctggggccaagggaccacggtcaccgtctcctca

SEQ ID NO: 11249 - DNA, 289 bp, Homo sapiens
  source 1..289: mol_type = other DNA
tgcagcctctggattcatctttaataacttttggatgaactgggtccgacaggcgccagggaaggggctggaatgggtggccaccataaagaaagatggaagtgacaagtactatgtggactctgtgaagggccgattcaccatctccagagacaacgccaagaactcactgtatctgcaaatgaacagcctgagagccgaagacacggctgtgtattactgtgcgagagaccagggatggctacaattcgactactggggccagggaaccctggtcaccgtctcctca

SEQ ID NO: 11250 - DNA, 289 bp, Homo sapiens
  source 1..289: mol_type = other DNA
tgcagtctctggatttaacttaaatgggtattggatgagttgggtccgccaggctccagggaaggggctggagtgggtgggccacataaaggaagacggaagtgtgaagagctatgtggtctctgtgaggggccgattcagtgtctcgagagacaacaccaagaactcagtgtacctgcaaatgaattccctgagggccgacgacacggctgtgtattactgtgcgagagatcaaggatggctacaatttgattattggggccagggatccctggtcaccgtctcctca

SEQ ID NO: 11251 - DNA, 295 bp, Homo sapiens
  source 1..295: mol_type = other DNA
tgaagcctctggattcaccttcagcacttatgtgatgtactgggtccgccaggctccagggaagggactggaatatctttcagctattagtagtcatggggttggcacattttatgcggactctgtgaagggcagattcaccatatccagagacaactccaagaacacattgtatcttcagatgggcagcctgagagttgaggacacggctgtgtattactgtgcgagaggcggcagcgcctggtacggggggtttgactactggggccagggagccctggtcaccgtctcctca

SEQ ID NO: 11252 - DNA, 295 bp, Homo sapiens
  source 1..295: mol_type = other DNA
tgcagcctctggattcaccttcagtagtcatgttatgtattgggtccgccaggctccagggaagggactggaatatgtttcctctattagtagtaatggggttagcacattctatgcaaagtctgtgaagggcagatttaccatctccagagacaattccaagaacacgctgtttcttcaaatgggcagcctgagacctgaggacatggctgtatattactgtgcgagggggggcagtgcctggtacgggggatttgactactggggccagggaacccaggtcaccgtctcctca

SEQ ID NO: 11253 - DNA, 295 bp, Homo sapiens
  source 1..295: mol_type = other DNA
tgcagcctctggattcaccttcagtagtcatgttatgtattgggtccgccaggctccagggaagggactggaatatgtttcctctattagtagtaatggggttagcacattctatgcaaagtctgtgaagggcagatttaccatctccagagacaattccaagaacacgctgtttcttcaaatgggcagcctgagacctgaggacatggctgtatattactgtgcgcgggggggcagtgcctggtacgggggatttgactactggggccagggaacccaggtcaccgtctcctca

SEQ ID NO: 11254 - DNA, 295 bp, Homo sapiens
  source 1..295: mol_type = other DNA
tgaagcctctggattcaccttcagcacctatgttatgtactgggtccgccaggctccagggaagggactggaatatgtttcagctattagtagtcatggggttggcacattttatgcagactctgtgaagggcagattcaccatctccagagacaattccaagaacacactgtatcttcaaatgggcagcctgagagttgaggacatggctgtgtattactgtgcgagaggcggcagcgcctggtacggggggtttgactactggggccagggaaccctggtcaccgtctcctca

SEQ ID NO: 11255 - DNA, 277 bp, Homo sapiens
  source 1..277: mol_type = other DNA
tgcagcctctggattcacctttagcagctttgccatgaactgggtccgccaggctccagggaaggggctggagtgggtctccggtattactaatagtggcgataacacaaattacgcagactccgtgaagggccggttcaccatctccagagacaattccaagaacacactgtatctggaaatggacagcctgagagccgaggacacggccttatattactgtgcgaggggtctcctgggcgactggggccagggaaccctggtcaccgtctcctca

SEQ ID NO: 11256 - DNA, 277 bp, Homo sapiens
  source 1..277: mol_type = other DNA
tgcagcctctggattcacctttagcagctatgccatgaactgggtccgccaggctccagggaaggggctggagtgggtctcagctattagtggtagtggtggtagcacatactacgcagactccgtgaagggccggttcaccatctccagagacaattccaaggacacgctgtatctgcaaatgaacagcctgagagccgaggacacggccgtatattactgtgcgagaggcctcctgggcgactggggccagggaatgttggtcaccgtctcctca

SEQ ID NO: 11257 - DNA, 297 bp, Homo sapiens
  source 1..297: mol_type = other DNA
aagggttccggatacagttttcccaactactggatcgcctgggtgcgccagatgcccgggaaaggcctggactggatgggggtcatttatcctggtgactttgataccagatacagcccgtccttccaaggccaggtcaccatctcagccgacaagtccaccagcaccgcctacttgcagtggagcagcctgaaggcctcggacaccgccatctattactgtgcgagacgaggttatagcaggtcgtctgacggaatggacgtctggggccaagggaccacggtcaccgtctcctca

SEQ ID NO: 11258 - DNA, 297 bp, Homo sapiens
  source 1..297: mol_type = other DNA
cagggttccggatacagttttcccacttactggatcgcctgggtgcgccagatgcccgggaaaggcctggagtggatgggggtcatctatcctggtgactctgataccagatacagcccgtccttccaaggccaggtcaccatctcagccgacaagtccaccagcatcgcctatttgcagtggggcagcctgaaggcctcggacaccgccatctattactgtgcgagacgaggctatagtaggtcgtctgacggaatggacgtctggggccaagggaccacggtcaccgtctcctca

SEQ ID NO: 11259 - DNA, 297 bp, Homo sapiens
  source 1..297: mol_type = other DNA
aagggttccggatacagttttgccaactactggatcgcctgggtgcgccagatgcccggcaaaggcctggagtggatgggggtcatctaccctggtgactctgataccagatacggcccgtccttccaaggccaggtcaccatctcaggcgacaagtccaccagcaccgcctacttgcagtggagcagcctgaaggcctcggacaccgccatctattactgtgcgagacgaggctatagcaggtcgtctgacggaatggacgtctggggccaagggaccacagtcaccgtctcctca

SEQ ID NO: 11260 - DNA, 297 bp, Homo sapiens
  source 1..297: mol_type = other DNA
aagggttccggatacagttttcccaactactggatcgcctgggtgcgccagatgcccgggaaaggcctggagtggatgggggtcatttatcctggtgactctgataccagatacagcccgtccttccaaggccaggtcaccatctcagccgacaagtccaccaccaccgcctatttgcagtggagtagtctgaaggcctcggacaccgccatctattactgtgcgagacgaggctatagcaggtcgtctgacggaatggacgtctggggccaagggaccacggtcaccgtctcctca

SEQ ID NO: 11261 - DNA, 297 bp, Homo sapiens
  source 1..297: mol_type = other DNA
aagggttccggatacagttttcccagctattggatcgcctgggtgcgccagatgcccgggaaaggcctggagtggatgggggtcatttatcctggtgactctgataccagatacagtccgtccttccaaggccaggtcaccatctcagccgacaagtccaccagcaccgcctacttgcagtggagcagcctgaaggcctcggacaccgccatctattactgtgcgagacgaggctatagcaggtcgtctgacggaatggacgtctggggccaagggaccacggtcaccgtctcctca

SEQ ID NO: 11262 - DNA, 297 bp, Homo sapiens
  source 1..297: mol_type = other DNA
aagggttccggatacagttttgccaactactggatcgcctgggtgcgccagatgcccggcaaaggcctggagtggatgggggtcatctatcctggtgactctgataccagatacagcccgtccttccaaggccaggtcaccatctcagccgacaagtccaccagcaccgcctacttgcagtggagcagcctgaaggcctcggacaccgccatctattactgtgcgagacgaggctatagcaggtcgtctgacggaatggatgtctggggccaagggaccacagtcaccgtctcctca

SEQ ID NO: 11263 - DNA, 297 bp, Homo sapiens
  source 1..297: mol_type = other DNA
aagggttctggatacagctttaccaactactggatcggctgggtgcgccagatgcccgggaaaggcctggagtggatggggatcatctatcctggtgactctggtaccagatacagcccgtccttccaaggccaggtcaccatctcagccgacaagtccatcagcaccgcctacctgcagtggagcagcctgaaggcctcggacaccgccatgtattactgtgcgagacggggatatagtaggtcgtctgacggtatggacgtctggggccaagggaccacggtcatcgtctcctca

SEQ ID NO: 11264 - DNA, 297 bp, Homo sapiens
  source 1..297: mol_type = other DNA
aagggttccggatacagttttcccacctactggatcgcctgggtgcgccagatgcccgggaaaggcctggagtggatgggggtcatctatcctggtgactttgataccagatacagcccgtccttccaaggccaggtcaccatctcagccgacaagtccagcagcaccgcctacctgcagtggagcagcctgaaggcctcggacaccgccatctattactgtgcgagacgaggctacagcaggtcgtctgacggaatggacgtctggggccaagggaccacggtcaccgtctcctca

SEQ ID NO: 11265 - DNA, 297 bp, Homo sapiens
  source 1..297: mol_type = other DNA
aagggttccggatacagttttcccagctactggatcgcctgggtgcgccagatgcccgggaaaggcctggagtggatgggggtcatttatcctggtgactttgataccagatacagcccgtccttccaaggccaggtcaccatctcagccgacaagtccaccagcaccgcctacttgcagtggagcagcctgaaggcctcggacaccgccatctattactgtgcgagacgaggctatagcaggtcgtctgacggaatggacgtctggggccaagggaccacggtcaccgtctcctca

SEQ ID NO: 11266 - DNA, 280 bp, Homo sapiens
  source 1..280: mol_type = other DNA
tgcagcctctggattcccctttagtaataattacatgagctgggtccgccaggctccagggaaggggctggagtgggtcgcaggtattagtggtagtggtggtagcatatacgcagactccgtgaagggccgcttcaccatctccagagacaattccaagaacacgctgtatctgcaaatgaacagcctgagagtcgaggacacggccgtatatcactgtgtaagaggagcagccggtatggacgtctggggccaagggaccacggtcaccgtctcctca

SEQ ID NO: 11267 - DNA, 283 bp, Homo sapiens
  source 1..283: mol_type = other DNA
tgcagcctctggattcacctttaacaactacggcatgagttgggtccgccaggctccagggaaggggctggagtgggtctcaggtattagtggaagtggtggcagcacatactacgcagactccgtgaggggccggttcaccatctccagagacaattccaagaacacgctgtatctgcaaatgaacagcctgagagtcgaggacacggccgtatattactgtgtgagaggggccgctggcatggacgtctggggccaagggaccacggtcaccgtctcctca

SEQ ID NO: 11268 - DNA, 286 bp, Homo sapiens
  source 1..286: mol_type = other DNA
tgcagcctctggattcaccttcagctcctactggatgcactgggtccgccaagttccaggggagggcctggtgtgggtctcacgtattaatggtgatgggacttccacaagcagcgcggaccatgtgaagggccgattcatcatctccagagacaacgccaagaacaccctgtatctgcagatgaacagtctgagagtcgacgacacggctgtatatttctgtacaagagggggcgggggccatggggattattggggccagggaaccctggtcaccgtctcctca

SEQ ID NO: 11269 - DNA, 286 bp, Homo sapiens
  source 1..286: mol_type = other DNA
tgcagcctctggattcaccttcagtaactcctggatgcactgggtccgccaagctccagggaaggggctggtgtgggtctcacgtattaatagtgatgggagtaccacaagctacgcggactccgtgaagggccgattcaccatctccagagacaacaccaagaacacgctgtatctgcaaatgaacagtctgagagccgaggacacggctgtgtattactgtacaagaggtggaggtggacacggtgactactggggccagggaaccctggtcaccgtctcctca

SEQ ID NO: 11270 - DNA, 286 bp, Homo sapiens
  source 1..286: mol_type = other DNA
tgcagcctctggattcaccttcagtaatttctggatgcactgggtccgccaagctccagggaaggggctggtgtgggtctcacgtattaatcctgatgggattaccacaagctacgcggactccgtgaagggccgattcaccatctccagagacaacaccaagaacataatgtatctgcaaatgaacagtctgagagccgaggacacggctctgtattactgtacaagaggtggaggtggacacggtgactactggggccagggaaccctggtcaccgtctcctca

SEQ ID NO: 11271 - DNA, 286 bp, Homo sapiens
  source 1..286: mol_type = other DNA
cactgtctctggtggctccatcggcactactagttactactggagctggatccggcagcccgccgggaagggactggagtggattgggcgtgtctataccaatggagacaccaactataatccctccctcaagagtcgagtcaccatgtcagtagacacgtccaagaaccagttctccctgaggctgagctctgtgaccgccgcagacacgggcgtgtattactgtgcgagaggcggggagctccttaattactggggccagggaaccctggtcaccgtctcctca

SEQ ID NO: 11272 - DNA, 286 bp, Homo sapiens
  source 1..286: mol_type = other DNA
cactgtctctggtggctccatcggcagtactagttactactggagctggatccggaagcccgccgggaagggactggagtggattgggcgtatctataccagtggggacaccaactacaacccctccctcaagagtcgagtcgccatatcagtggacacgtccaagaaccagttctccctgaagctgagctctgtgaccgccgcagacacggccgtatattactgtgcgagaggcggggagctccttaattactggggccagggaaccctggtcaccgtctcctca

SEQ ID NO: 11273 - DNA, 286 bp, Homo sapiens
  source 1..286: mol_type = other DNA
cactgtctctggtggctccgtcagcagtggtagttattactggagctggatccggcagcccgccgggaagcgactggagtggattgggcgtatctataccagtgggagcaccaactacaacccctccctcaagagtcgagtcaccatatcactagacacgtccaagaaccagttctccctgaggctgaactctgtgaccgccgcagacacggccgtgcattactgtgcgagaggcggggagttattaaactactggggccagggaaccctggtcaccgtctcctca

SEQ ID NO: 11274 - DNA, 286 bp, Homo sapiens
  source 1..286: mol_type = other DNA
cgcactctctggtgactccatcagtagttactactggagctggatccggcagtccccagggaagggactggagtggattggatatttctatgacagtgggagcaccagctacaatccctccctcaagagtcgagtcaccatatcagtagacacgtccaagaaccagttctccctgaggctgacctctgtgaccgctgcggacacggccgtgtattactgtgcgagggcccccatactttactactttgattactggggccagggaaccctggtcaccgtctcctca

SEQ ID NO: 11275 - DNA, 286 bp, Homo sapiens
  source 1..286: mol_type = other DNA
cactgtctctggtggctccatcagtagttactactggagctggatccggcagcccccagggaagggactggagtggattgggtatatctataacagtgggcgcaccgactacaacccctccctcaagagtcgagtcaccatatcagtagacacgtccaagaatcagttctccctgaagctgacctctgtgaccgctgcggacacggccgtgtattactgtgcgagagcccctatcctatactactttgactactggggccagggaaccctggtcaccgtctcctca

SEQ ID NO: 11276 - DNA, 286 bp, Homo sapiens
  source 1..286: mol_type = other DNA
cactgtctctggtggctccatcagtagttactactggagctggatccggcagcccccagggaaggaactggagtggattgggtatatctataacagtgggagcaccagctacaacccctccctcaagagtcgagtcaccatatcagtagacacgtccaagaaccagttctccctgaagctgagctctgtgaccgctgcggacacggccgtgtattactgtgcgagagcccctatcctatactactttgactactggggccagggaaccctggtcaccgtctcctca

SEQ ID NO: 11277 - DNA, 286 bp, Homo sapiens
  source 1..286: mol_type = other DNA
cactgtctctggtggctccatcagtagttcctactggagctggatccggcagaccccagggaagggactggagtggattgggtatatctataatagtgggaggaccgactacagcccctcccttaagagtcgagtcaccatatcagtagacacgtccaagaaccagttctccctgaagctgagctctgtgaccgctgcggacacggccgtgtattactgtgcgagagcccctatcttatactactttgactactggggccagggaaccctggtcaccgtctcctca

SEQ ID NO: 11278 - DNA, 286 bp, Homo sapiens; identical to SEQ ID NO: 11276
  source 1..286: mol_type = other DNA

SEQ ID NO: 11279 - DNA, 283 bp, Homo sapiens
  source 1..283: mol_type = other DNA
tgcagcctctggattcacctttaataactattggatgagttgggtccgccaggctccagggaaggggctggagtgggtggccaacataacgcaagatggaagtgacaaatactatgtggactctgtaaagggccgattcaccatctccagagacaacgccaagagctcactgtatgtgcaaatgaacagcctgacagccgaggacacggctgtgtattactgcgtgagagaccgtcggtatttcgatctctggggccgtggcaccctggtcactgtctcctca

SEQ ID NO: 11280 - DNA, 283 bp, Homo sapiens
  source 1..283: mol_type = other DNA
tgcagtctctggcttcacctttagtagctattggatggcctgggtccgccaggctccggggaaggggctggagtctatggccaccataaaggaagatggaagtgagaaatactatgtggactctgtgaagggccgatttaccatctccagagacaacgccaggaactcactctatctgcaaatgaacagcctgagagccgaggacacggctgtgtattactgtgtgagagataggaggtacttcgatctctggggccgtggcaccctggtcactgtctcctca

SEQ ID NO: 11281 - DNA, 292 bp, Homo sapiens
  source 1..292: mol_type = other DNA
tgcagcctctggattcacctttagtaactattggatgagctgggtccgccaggctccagggaaggggctggagtggttggccaacataaggcaagatggaagtgagaaatactatgtggattctgtgaagggccgattcaccatctccagagacaacgccaagaactcactgtatctgcaaatgaacagcctgagagccgaggacacggctgtatattactgtgcaggttgtggtggtgattgctataccgttgaccactggggccagggaaccctggtcaccgtctcctca

SEQ ID NO: 11282 - DNA, 292 bp, Homo sapiens
  source 1..292: mol_type = other DNA
tgcagcctctagattcacctttagtagctattggatgagctgggtccgccaggctccagggagggggctggagtgcgtggccaacataaaccaagatggaactgaggaatactatctggactctgtgaagggccgattcaccatctccagagacaacgccaagaactcactttatctgcaaatgaacagcctgagagccgaggacacggctgtctattactgtgcaggttgtggcggagattgctataccgttgaccactggggccagggaaccctggtcaccgtctcctca

SEQ ID NO: 11283 - DNA, 292 bp, Homo sapiens
  source 1..292: mol_type = other DNA
tgcagcctctagattcacctttagtagctactggatgagctgggtccgccaggctccagggagggggctggagtgcgtggccaacataaaccaagatggaactgaggaatactatcttgactctgtgaagggccgattcaccatctccagagacaacgccaagaactcactttatctgcaaatgaacagcctgagagccgaggacacggctgtctattactgtgcaggttgtggcggagattgctataccgttgaccactggggccagggaaccctggtcaccgtctcctca

SEQ ID NO: 11284 - DNA, 292 bp, Homo sapiens
  source 1..292: mol_type = other DNA
tgcagcctctagattcacctttagtagctattggatgagctgggtccgccaggctccagggaaggggctggagtgcgtggccaacataaaccaagatggaagtgagaaatactatctggactctgtgaagggccgattcaccatctccagagacaacgccaggaactcactgtatctgcaaatgaacagcctgagagccgaggacacggctgtctattactgtgcaggttgtggcggagattgctataccgttgaccactggggccagggaaccctggtcaccgtctcctca

SEQ ID NO: 11285 - DNA, 292 bp, Homo sapiens
  source 1..292: mol_type = other DNA
tgcagcctctagattcagctttagtagctattggatgagctgggtccgccaggctccagggaaggggctggagtgggtggccaacataagacaagatggaactgagagacactatgtggactctgtgaagggccgattcaccatctccagagacaacgccaagaattcagtgtatctgcaaatgaacagcctgagagccgaggacacggccgtgtattactgcgcgggttgtggtggtgattgctatactgttgaccactggggccagggaaccctggtcaccgtctcctca

SEQ ID NO: 11286 - DNA, 292 bp, Homo sapiens
  source 1..292: mol_type = other DNA
tgcagcctctagattcagctttagtagctattggatgagctgggtccgccaggctccagggaaggggctggagtgggtggccaatataagacaagatggaagtgagaaacactatgtggactctgtgaagggccgattcaccatctccagagacaacgccaagaattcactgtatctgcaaatgaacagcctgagagccgaggacacggccgtgtattactgtgcgggttgtggtggtgattgctatactgttgaccactggggccagggaaccctggtcaccgtctcctca

SEQ ID NO: 11287 - DNA, 292 bp, Homo sapiens
  source 1..292: mol_type = other DNA
tgcagcctctagattcagctttagtagctattggatgagctgggtccgccaggctccagggaaggggctggagtgggtggccaacataagacaagatggaagtgagaaacactatgtggactctgtgaagggccgattcaccatctccagagacaacgccaagaattcactgtatctgcaaatgagcagcctgagagccgaagacacggccgtgtattattgtgcgggctgtggtggtgattgctatactgttgaccactggggccagggaaccctggtcaccgtctcctca

SEQ ID NO: 11288 - DNA, 292 bp, Homo sapiens
  source 1..292: mol_type = other DNA
tgcagcctctagattcagctttagtagctattggatgagctgggtccgccaggctccagggaaggggctggagtgggtggccaacataagacaagatggaagtgagaaacactatgtggactctgtgaagggccgattcaccatctccagagacaacggcaagaattcactgtatctgcaaatgaacagcctgagagccgaggacacggccgtgtattactgtgcgggttgtggtggtgattgctatactgttgaccactggggccagggaaccctggtcaccgtctcctca

SEQ ID NO: 11289 - DNA, 292 bp, Homo sapiens
  source 1..292: mol_type = other DNA
tgcagcctctgaatacagctttagtagctattggctgagttgggtccgccaggctccagggaaggggccggagtgggtggccaacataaaccaagatggaactgagagacactatgtggactctgtgaagggccgattcagcatctccagagacaacaccaagaactcactgtatctgcaaatgaacagcctgagagtcgaggacacggccgtatattactgtgcgggttgtggtggtgactgctatactgttgaccactggggccagggtaccctggtcagcgtctcgtca

SEQ ID NO: 11290 - DNA, 292 bp, Homo sapiens
  source 1..292: mol_type = other DNA
tgcagcctctaaatacagctttagtagctattggatgagctgggtgcgccaggctccagggaaggggctggagtgggtggccaacataaagcaagatggaagtgagaaacactatgtggactctgtgaagggccgattcagcatctccagagacaacaccaagaactcactgtatctgcaaatgaacagcctgagagccgaggacacggccgtgtattactgtgcgggttgtggtggtgactgctatactgttgaccactggggccagggtaccctggtcaccgtctcgtca

SEQ ID NO: 11291 - DNA, 292 bp, Homo sapiens
  source 1..292: mol_type = other DNA
tgcagcctctaaatacagctttagtagctattggatgagctgggtccgccaggctccagggaaggggctggagtgggtggccaacataaaccaagatggaagtgagaaacactatgtggactctgtgaagggccgattcagcatctccagagacaacaccaggaactcactgtatctgcaaatgatcagcctgagagccgaggacacggccgtgtattactgtgcgggttgtggtggtgactgctatactgttgaccactggggccagggtaccctggtcaccgtctcgtca

SEQ ID NO: 11292 - DNA, 292 bp, Homo sapiens
  source 1..292: mol_type = other DNA
tgcagcctctgagtacagctttagtaactattggatgagttgggtccgccaggctccagggagggggctggagtgggtggccaacataaaccaagatggaagtgagaaacactatgtggactctgtgaagggccgattcagcatctccagagacaacaccaagaactcactgtatctgcagatgatcagcctgagagccgaggacacggccgtgtattactgtgcgggttgtggtggtgactgctatactgttgaccactggggccagggtaccctggtcaccgtctcgtca

SEQ ID NO: 11293 - DNA, 292 bp, Homo sapiens
  source 1..292: mol_type = other DNA
tgcagcctctgagtacagctttagtaactattggatgagttgggtccgccaggctccagggagggggctggagtgggtggccaacataaaccaagatggaagtgagaaacactatgtggactctgtgaagggccgatccagcatctccagagacaacaccaagaactcactgtatctgcagatgatcagcctgagagccgaggacacggccgtgtattactgtgcgggttgtggtggtgactgctatactgttgaccactggggccagggtaccctggtcaccgtctcgtca

SEQ ID NO: 11294 - DNA, 292 bp, Homo sapiens
  source 1..292: mol_type = other DNA
tgcagcctctgaatacagctttagtagctattggctgagttgggtccgccaggctccagggaaggggctggagtgggtggccaacataaaccaagatggaactgagagacactatgtggactctgtgaagggccgattcagcatctccagagacaacaccaagaactcactgtatctgcaaatgaacagcctgagagccgaggacacggccgtatattactgtgcgggttgtggtggtgactgctatactgttgaccactggggccagggtaccctggtcagcgtctcgtca

SEQ ID NO: 11295 - DNA, 292 bp, Homo sapiens
  source 1..292: mol_type = other DNA
tgcagcctctagattcagctttagtagctattggatgagctgggtccgccaggctccagggaaggggctggagtgggtggccaacataagacaagatggaagtgagaaacactatgtggactctgtgaagggccgattcaccatctccagagacaacggcaagaattcactgtatctgcaaatgaacagcctgagagccgaggacacggccgtgtattattgtgcgggttgtggtggtgattgctatactgttgaccactggggccagggaaccctggtcaccgtctcctca

SEQ ID NO: 11296 - DNA, 292 bp, Homo sapiens
  source 1..292: mol_type = other DNA
tgcagcctctaaatacagctttagtagctattggatgagctgggtccgccaggctccagggaaggggctggagtgggtggccaacataaaccaagatggaagtgagaaacactatgtggactctgtgaagggccgattcagcatctccagagacaacaccaagaactcactgtatctgcaaatgatcagcctgagagccgaggacacggccgtgtattactgtgcgggttgtggtggtgactgctatactgttgaccactggggccagggtaccctggtcaccgtctcgtca

SEQ ID NO: 11297 - DNA, 292 bp, Homo sapiens
  source 1..292: mol_type = other DNA
tgcagcctctagattcagctttagtagctattggatgagctgggtccgccaggctccagggaaggggctggagtgggtggccaacataagacaagatggaagtgagaaacactatgtggactctgtgaagggccgattcaccatctccagagacaacgccaagaattcactgtatctgcaaatgaacagcctgagagccgaggacacggccgtgtattactgtgcgggttgtggtggtgattgctatactgttgaccactggggccagggaaccctggtcaccgtctcctca

SEQ ID NO: 11298 - DNA, 292 bp, Homo sapiens
  source 1..292: mol_type = other DNA
tgcagcctctgaatacagctttagtaactattggatgagctgggtccgccaggctccagggaaggggctggagtgggtggccaacataaaccaagatggaagtgagaaacactatgtggactctgtgaagggccgattcagcatctccagagacaacaccaagaactcactgtatctgcaaatgaacagcctgagagccgaggacacggccgtatattactgtgcgggttgtggtggtgactgctatactgttgaccactggggccagggtaccctggtcaccgtctcgtca

SEQ ID NO: 11299 - DNA, 292 bp, Homo sapiens
  source 1..292: mol_type = other DNA
tgcagcctctagattcagttttggtagttattggatgagttgggtccgccaggctccagggaaggggctggagtgggtggccaacataagacaagatggaagtgagaaacactatgtggactctgtgaagggccgattcaccatctccagagacaacggcaagaattcactgtatctacaaatgaacagcctgagagccgaggacacggccgtgtattactgtgcgggttgtggtggtgattgttatactgttgaccactggggccagggaaccctggtcaccgtctcctca

SEQ ID NO: 11300 - DNA, 292 bp, Homo sapiens
  source 1..292: mol_type = other DNA
tgcagcctctaaatacagctttagtaactattggatgagttgggtccgccaggctccagggaaggggctggagtgggtggccaacataaaccaagatggaagtgagaaacactatgtggactctgtgaagggccgattcagcatctccagagacaacaccaagaactcactgtatctgcagatgatcagcctgagagccgaggacacggccgtgtattattgtgcgggttgtggtggtgactgctatactgttgaccactggggccagggtaccctggtcaccgtctcgtca

SEQ ID NO: 11301 - DNA, 283 bp, Homo sapiens
  source 1..283: mol_type = other DNA
tgcagcctctggattcaccttcagtaactactggatgcactgggtccgccaggctccagggaaggggctggagtgggtggccaccatagggccagatggaagtcgtgaatactatgtggactttgtgacgggccgattcaccatctccagagacaacgccgataggtcgctatatctgcaaatgaacagcctgagagccgaggacacggctctttattactgtgcgcgagatccgttcagggagggctgctggggccagggaaccctggtcaccgtctcctca

SEQ ID NO: 11302 - DNA, 283 bp, Homo sapiens
  source 1..283: mol_type = other DNA
tagagcctctggattcaccttcagtaactactggatgcactgggtccgccagactccagggagggggctggagtgggtggccaccatagggccagatggaagtgttgaatactatgtggactctgtgacgggccgattcaccatctccagagacaacgccaagaagtcgctggatctgcaaatgaacagcctgagagccgaggacacggctgtttattactgtgcgcgagatcccttcagggagggctgctggggccagggaaccctggtcaccgtctcctca

SEQ ID NO: 11303 - DNA, 283 bp, Homo sapiens
  source 1..283: mol_type = other DNA
tgcagcctctggattcaccttcagcaacttctggatgcactgggtccgccaggctccagggaaggggctggaatgggtggccaccatagggccagatggaagtcagaagtactatgtggactctgtgacgggccgattcaccatttccagagacaacgcctataggtcgctagatctgcaaatgaagagcctgagagccgaggacacggctctttattactgtgcgcgagatccgttcagggagggctgctggggccagggaaccctggtcaccgtctcctca

SEQ ID NO: 11304 - DNA, 283 bp, Homo sapiens
  source 1..283: mol_type = other DNA
tgcagcctctggattcacctttgataactattggatgacctgggtccgccaggctccagggaaggggctggagtgggtggccaatataaaagaagatggaagtgtacaatactatgtggactctgtgaagggccgattcaccatctccagagacaactccaagaactcactgtatctgcaaatggacagcctgagagtcgaggacgcggctgtgtattactgcgcgagagatccctttcgggagggctgctggggccagggagccctggtcaccgtctcctca

SEQ ID NO: 11305 - DNA, 295 bp, Homo sapiens
  source 1..295: mol_type = other DNA
tgcagcctctggtttcagcttcagaagttttgaaatgaactgggtccgccaggctccagggaaggggctggagtgggtttcatacatgactggtagtggtagtctcatatactacgcagactctgtgcagggccgattcgccatctccagagacaacgccaagaattcactgtacctccaaatgaacagcctgagagtcgaggacacggctgtttattattgtgcgagaggaagtagtggctatgatcctaactttgactactggggcccgggaaccccggtcaccgtctcctca

SEQ ID NO: 11306 - DNA, 295 bp, Homo sapiens
  source 1..295: mol_type = other DNA
tgcagcctctggtttcaccttcagaagttttgaaatgaactgggtccgccaggctccagggaaggggctggagtgggtttcatacatgactggtagtggtagtctcatatactacgcagactctgtgcagggccgattcgccatctccagagacaacgccaagaattcactgtacctccaaatgaacagcctgagagtcgaggacacggctgtttattattgtgcgagaggaagtagtggctatgatcctaactttgactactggggcccgggaaccccggtcaccgtctcctca

SEQ ID NO: 11307 - DNA, 295 bp, Homo sapiens
  source 1..295: mol_type = other DNA
tgcagcctctggattcaccttcagtagttttgaaatgaactgggtccgccaggctccagggaaggggctggagtggctttcatacatcagtagtgctggtgatactatatactatgcagactctgtgaagggccgagtcaccatctccagagacaacgccaagaactcactgtttctgcaaatgaacagcctgagagccgaagacacggctgtttattactgtgcgagagggagtagtggctacgatccaaattttgactactggggccagggaaccctggtcaccgtctcctca

SEQ ID NO: 11308 - DNA, 293 bp, Homo sapiens
  source 1..293: mol_type = other DNA
cagcctctggattcaccttcagtagttttgaaatgaactgggtccgccaggctccagggaaggggctggagtggctttcatacatcagtagtgctggtgatactatatactatgcagactctgtgaagggccgagtcaccatctccagagacaacgccaagaactcactgtttctgcaaatgaacagcctgagagccgaagacacggctgtttattactgtgcgagagggagtagtggctacgatccaaattttgactactggggccagggaaccctggtcaccgtctcctca

SEQ ID NO: 11309 - DNA, 274 bp, Homo sapiens
  source 1..274: mol_type = other DNA
tgcagccgctggattcagcatcagtggctataccatgaactgggtccgccaggatccagggaaggggctggagtgggtctcatctattagtagtagtagtgcatacatatactacgcagactcagtgaagggccgattcaccgtctccagagacaacgccaagaactcactgtttctgcaaatgaacagcctgagtgccgaagacacggctgtctattactgtgcgagaaattttgaatactggggcctgggaaccctggtcaccgtctcctca

SEQ ID NO: 11310 - DNA, 274 bp, Homo sapiens
  source 1..274: mol_type = other DNA
tgcagcctctggattcaccttcagtagttataccatgaactgggtacgccaggctccagggaaggggctggagtgggtgtcatccattagtggtagcagtaattacatctactacggagactcagtgaagggccgattcaccatctccagagacaacgccaagaactcactgtttctgcaaatgaacagcctgagagccgaggacacggctgtctattattgtgcgaggaactttgagtactggggccagggaaccctggtcaccgtctcctca

SEQ ID NO: 11311 - DNA, 274 bp, Homo sapiens
  source 1..274: mol_type = other DNA
tgcagcctctggattcaccttcagtagttataccatgaactggatacgccagactccagggaagaggcttgagtgggtctcatccatttctagtagtagtagtcacatatactacgcagactcactgaagggccgattcaccatctccagagacaacaccaagaactcactgtatctgcaaatgaacagcctgagagccgaggacacggctgtctattactgtgcgaggaactttgagtactggggccagggaaccctggtcaccgtctcctca

SEQ ID NO: 11312 - DNA, 292 bp, Homo sapiens
  source 1..292: mol_type = other DNA
tggaggctcaggattgaactttaccagtaattggatgaactgggtccgccaggctccagggaaggggctggagtgggtggccaacataaagccagatggaagtgagatacaatatgtggactctgtgaggggccgattcaccatctccagagacaatgccaagaactcattgtttctgcaaatgagcagcctgagagccgaggacacggctgtctattactgtgcgagaggaggcgattcccgaagcgttcttcactactggggccagggaaccctggtcaccgtctcctca

SEQ ID NO: 11313 - DNA, 292 bp, Homo sapiens; identical to SEQ ID NO: 11312
  source 1..292: mol_type = other DNA

SEQ ID NO: 11314 - DNA, 292 bp, Homo sapiens; identical to SEQ ID NO: 11312
  source 1..292: mol_type = other DNA

SEQ ID NO: 11315 - DNA, 292 bp, Homo sapiens
  source 1..292: mol_type = other DNA
tggagcctctggattggactttagcagcaattggatgaactgggtccgccaggctccagggaaggggctggagtgggtggccaacattgggccagatggaaatgagaagcaatatgtggactctgtggagggccgattcaccatctccagagacaatgtgaagcattcattgtttctgcaaatgagcagcctgagagtcgaggacacggctgtctatttctgtgcgcgagggggcgattcccgaagcgttcttcactactggggcaagggaaccctggtcaccgtctcctca

SEQ ID NO: 11316 - DNA, 292 bp, Homo sapiens
  source 1..292: mol_type = other DNA
tgcagcctctggattcactcttagcaactattggatgaactgggtccgccaggctccagggaaggggctggagtgggtggccaacataaagcaagatggaagtgagaaagagtatgtgaactctgtgaagggccgattcaccatctccagagacaacgccaagaattcactgtatctgcagatgaacagcctgagagccgaagacacggccatatattactgtgcgagagggggtgacagcagatcagttcttcactactggggccagggaaccctggtcaccgtctcctca

SEQ ID NO: 11317 - DNA, 286 bp, Homo sapiens
  source 1..286: mol_type = other DNA
tggagcctctggattcacccttagtagccattgggtgaattggttccgccaggctccagggaagggactggagtgggtgaccaacatgaaagaagaaggaagtgagaaattctatattgactctgtgaggggccgattcaccatctccagagacaacggcaagaactcagtgtatctgcaaatgaacagcctgagagtcgaggacacggctgtgtattactgtgcgagtggcagtggctggcttgttgactactggggccagggaaccctggtcacggtctcctca

SEQ ID NO: 11318 - DNA, 286 bp, Homo sapiens
  source 1..286: mol_type = other DNA
tgcagcctctggattcacctttagcaattattggatgaactgggtccgccaggctccagggaaggggctggagtgggtggccaacataaagcaagatggaggtgagcaatactatgtggactctgtgaagggccgattcaccatctccagagacaacgccaagaactcactgtatctgcaaatgaacagcctgagagccgaggacacggccgtgtattactgtgcgagtggcagtggctggttggttgactactggggccagggaaccctggtcaccgtctcctca

SEQ ID NO: 11319 - DNA, 283 bp, Homo sapiens
  source 1..283: mol_type = other DNA
tgcagcctctggattcacctttagtaggtattggatgagctgggtccgccaggctccagggaaggggctggagtgggtggccaccataaagcgagatggaagtgagaaatactatgtggactctgtgaagggccgattcaccatctccagagacaacgccaagaactcactgtatctgcaaatgaacagcctgagagccgaggacacggctgtgtattactgtgcgagattagttcactactttgactactggggccagggaaccctggtcaccgtctcctca

SEQ ID NO: 11320 - DNA, 283 bp, Homo sapiens
  source 1..283: mol_type = other DNA
tgcagcctctggattcacctttagtagctattggatgagctgggtccgccaggctccagggaaggggctggagtgggtggcccacataaagcaagatggaagtgagaaatactatgtggactctgtgaggggccgattcaccatctccagagacaacgccaagaactcactatatctgcaaatgaacagcctgagagccgaggacacggctgtgtattactgtgcgagactcgtccactactttgactactggggccagggaaccctggtcaccgtctcctca

SEQ ID NO: 11321 - DNA, 295 bp, Homo sapiens
  source 1..295: mol_type = other DNA
tgaagcctctggattcaccttcagtaactactggatgcactgggtccgccaagctccagggaaggggctggtgtgggtctcacgtattaacaacgacgatgggagattttcagactacgcggactccgtgaagggccggttcaccatctccagagacaacgccaaaaacacgttgtatctgcaaatgaactctctgagagccgaggacacggctgtctactactgtgtaaggggtaccagtggctggtcagggattgactactggggccagggagtcctggtcaccgtctcctca

SEQ ID NO: 11322 - DNA, 292 bp, Homo sapiens
  source 1..292: mol_type = other DNA
tgcagcctctggattcaccttcagtagttactggttccattgggtccgccaaactccagggaaggggctggtgtgcgtctcacgtattgatgctgatgggagtaccacaaattacgcggactccgtgaagggccgatttaccatctccagagacaacgccgagaacacgctgtatctgcagatgagcagtctgagagacgaggacacggctctgtatttttgtgtaagaggcaccagtggctggtccgggattgactactggggccagggaaccctggtcaccgtctcctca

SEQ ID NO: 11323 - DNA, 277 bp, Homo sapiens
  source 1..277: mol_type = other DNA
tgcagcctctggattcactttcagtaacgcctggatgagctgggtccgccaggctccagggaaggggctggagtgggttggccgtattaaaagcaaaagtgatggtgggacaacagactacgccgcacccgtgaaaggcagattcaccatctcaagagatgattcaaaaaacacgctgtctctgcaaatgaacagcctgaaaaccgaggacacagccgtgtattactgtaccaacgttgactactggggccagggaaccctggtcaccgtctcctca

SEQ ID NO: 11324 - DNA, 277 bp, Homo sapiens
  source 1..277: mol_type = other DNA
tgcagcctctggattcgctttcactaacgcctggatgtactgggtccgccaggctccagggaaggggctggagtgggttggccgcattaaaagcgcatctaatggtgggacaacagactacactacacccgtgaaaggcagattcatcatctcaagagatgattcaaaaagcacgctgtatctgcaaatgaacagcctggaaagcgaggacacagccgtgtattactgtaccaatgttgactactggggccagggaaccctggtcaccgtctcctca

SEQ ID NO: 11325 - DNA, 277 bp, Homo sapiens
  source 1..277: mol_type = other DNA
tgcagcctctggattcgctttcactaacgcctggatgtactgggtccgccaggctccagggaaggggctggagtgggttggccgcattaaaagcgcatctaatggtgggacaacagactacattacacccgtgaaaggcagattcatcatctcaagagatgattcaaaaagcacgctgtatctgcaaatgaacagcctggaaagcgaggacacagccgtgtattactgtaccaatgttgactactggggccagggaaccctggtcaccgtctcctca

SEQ ID NO: 11326 - DNA, 307 bp, Homo sapiens
  source 1..307: mol_type = other DNA
tgcagcctctggattcacctttagcaactatggcatgagctgggtccgccaggttccagggaaggggctggagtgggtctcaactattggtggtagtggtgatagtacaaactatgtagactccgtgaagggccggttcaccatctccagagacaatttcaagaacacgctgtatctgcagatgaacagcctgagagccgaggacacggccgtatattactgtgcgaaaaagtatcactatggttcggggacttatttgtactactttgactactggggccagggaaccctggtcaccgtctcctca

SEQ ID NO: 11327 - DNA, 307 bp, Homo sapiens
  source 1..307: mol_type = other DNA
tgcagcctctggattcacctttagtcactatgccatgagctgggtccgccaggctccagggaaggggctggagtgggtctcaactgtgactgctagtgatagcagtacatactacgcagactccgtgaagggccgcttcaccatctccagagacaattccaagaacacactgtatctgcaaatgaacagcctgagagccgaggacacggccgtatattactgtgcgaaaaagtatcactatggttcggggacttatttgtattattttgactactggggccaaggaaccctggtcaccgtctcctca

SEQ ID NO: 11328 - DNA, 292 bp, Homo sapiens
  source 1..292: mol_type = other DNA
tgcagcctccggattcatcttcagtagttatgagatgaactggatgcgccaggctccagggaaggggctggagtgggtttcatacattcattatagtgccaatgaaatacactatggagactctgtgaggggccgattcaccatctccagagacaacgccaagaactcgctgtttttgcaaatgaacagcctgagagtcgaggacacggctgtttattactgtgtgcgagggggatacggtgactccggccggggctactggggccagggaaccctggtcaccgtctcctca

SEQ ID NO: 11329 - DNA, 292 bp, Homo sapiens
  source 1..292: mol_type = other DNA
tgcagcctctggattcaccttcagtgattatgaaatgaactgggtccgccaggctccagggaaggggctgcagtggatttcatacattcattatagtagtgacaacacgtactacgaggactctgtgaggggccgattcaccatctccagagacaacgccaggaactcactgtctctgcaaatgaacagcctgagagtcgaggatacggctatttattactgtgtacgaggggggtacggtgactccggccggggctactggggccagggaaccctggtcaccgtctcctca

SEQ ID NO: 11330 - DNA, 292 bp, Homo sapiens; identical to SEQ ID NO: 11328
  source 1..292: mol_type = other DNA

SEQ ID NO: 11331 - DNA, 292 bp, Homo sapiens
  source 1..292: mol_type = other DNA
tgcagcttctggattcacttttagtaattatgaaatgaattgggtccgccaggctcccgggaagggactggagtgggtttcatacatacattatggagccactgacatgtactacgcagacgctgtgaagggccgattcaccatctccagagacaacgccaagaatttattgtatctgcaaatgagcagcctgagagccgaggacacggctgtttattactgtgtgagagggggatacggtgactccggccggggctactggggccagggaaccctggtcaccgtctcctca

SEQ ID NO: 11332 - DNA, 289 bp, Homo sapiens
  source 1..289: mol_type = other DNA
tgtagcctctggattcacttttgataattatgagatgaactgggtccgccaacctccagggaagggcctggaatgggttgcatacaaccattatagtggcactaaagactacgcagactccgtgaggggccgattcaccatctccagagacaacgccaagaactttctgtttctgcaaatggacaacctgagagtcgaggacacgggtgtttattattgtgtgagagggggatacggtgactccggccggggctactggggccagggaaccctggtcaccgtctcctca

SEQ ID NO: 11333 - DNA, 277 bp, Homo sapiens
  source 1..277: mol_type = other DNA
tgcagcctctggagtcatccttggtgtcaatggcatgagctgggtccgccaggctccagggatgggactgaagtgggtagcagacatcactggtgggggtggtacatactacgcagagtccgtggagggccggttcaccatctccagagacaactccaagaacacactgtatctgcagatgaacagcctgagagccgaggacacggccgtatattactgtgtgggacatggcagctcgtctgcctggggccaggggaccctggtcaccgtctcctca

SEQ ID NO: 11334 - DNA, 280 bp, Homo sapiens
  source 1..280: mol_type = other DNA
tgtaggttctggattccccttcagcggaaatggcatgacctgggcccgccaggctccagggaggggactagagtgggtctcagatattcttggtcgtggcggtcgcacattctatgcggactccgtgaagggccgcttcaccatgtccaaggacgattccaagaacacggtgtatctgcagatgaacaacctgagagccaacgacacggccgcatattactgtgtggggcacggatctagcagcgcctggggccagggaacccaggtcaccgtctcctca

SEQ ID NO: 11335 - DNA, 280 bp, Homo sapiens
  source 1..280: mol_type = other DNA
tgaagcctctggattcacgttgagcaactctggcatgagctgggtccgccaggctccagggaagggtctggagtgggtttcgtacattactatcagtggtggtaacacatactacgcagactctgtgaagggccgcttcaccatctccagagacattgtcaagaattcactgtttctgcaaatgaacagcctgagagacgaggacacggctgtgtattactgtgcgagaggaggaagtcttgacttctggggccagggaatcctggtcaccgtctcctca

SEQ ID NO: 11336 - DNA, 280 bp, Homo sapiens
  source 1..280: mol_type = other DNA
tgcagcctctggattcaccttcagtaattatgaaatgaattgggtccgccaggctccagggaaggggctggagtggatttcatatattactagtagtagtaatgccaaatactacgcagactctgtgaagggccgattcaccatctccagagacaacgccgagaactcactttatctgcaactgcacagcctgagagccgaggacacggctgtttattactgtgcgagagggggatcattagacttctggggccagggaaccctggtcaccgtctcctca

SEQ ID NO: 11337 - DNA, 280 bp, Homo sapiens; identical to SEQ ID NO: 11336
  source 1..280: mol_type = other DNA

SEQ ID NO: 11338 - DNA, 280 bp, Homo sapiens
  source 1..280: mol_type = other DNA
tgcagcctctggattcaccttcagtaattatgaaatgaattgggtccgccaggctccagggaaggggctggagtggatttcatatattaccagtagtagtaatgccaaatactacgcagactctgtgaagggccgattcaccatctccagagacaacgccgagaactcactttatctgcaactgcacagcctgagaggcgaggacacggctgtttattactgtgcgagagggggatcactagacttctggggccagggaaccctggtcaccgtctcctca

SEQ ID NO: 11339 - DNA, 280 bp, Homo sapiens; identical to SEQ ID NO: 11336
  source 1..280: mol_type = other DNA

SEQ ID NO: 11340 - DNA, 293 bp, Homo sapiens
  source 1..293: mol_type = other DNA
tcatctccggggacagtgtctctagtgacggtgttgcttggaactggatcaggcagtccccatcgagaggccttgagtggctgggaaggacatattacatgtccaagtggtatcatgaatatgcaacatctgtgaatagccgaataaccatcaacccagacacatccaggaaccagttctccctgcaactgaactctgtgactcccgaagacacggctgtctattactgtgcgagaggtcgagattcctcccttgacttctggggccaggggaccctggtcaccgtctcctcg

SEQ ID NO: 11341 - DNA, 293 bp, Homo sapiens
  source 1..293: mol_type = other DNA
tcatctccggggacagtgtctctagcgacggtgttgcttggaactggatcaggcagtccccatcgagaggccttgagtggctgggaaggacatattacatgtccaagtggtatcatgaatatgcagtatctgtgaaaagccgagtaaccatcaacccagacacatccaagaaccagttctccctgcaactgaactctgtgactcccgaagacacggctgtgtattactgtgcgagaggtcgagattcctcccttgacttctggggccaggggaccctggtcaccgtctcctcg

SEQ ID NO: 11342 - DNA, 293 bp, Homo sapiens
  source 1..293: mol_type = other DNA
acatctccggtgacagtgtctctagcaccggtatagcttggaactggatcaggcagtccccatcgagaggccttgagtggctgggaaggacatattacaactccaagtgggttaatgagtatgcagtatctgtgagaggtcgaatagacgtcaacgcagacacatcgaagaaccagttctccctgcacctgaactctgtgactcccgaggacacggctgtatattattgtgcaagaggtcgagactcatcccttgacttctggggccagggaaccctggtcatcgtctcctca

SEQ ID NO: 11343 - DNA, 292 bp, Homo sapiens
  source 1..292: mol_type = other DNA
acatctccggtgacagtgtctctagcaccggtatagcttggaactggatcaggcagtccccatcgagaggccttgagtggctgggaaggacatattacaactccaagtgggttaatgagtatgcagtatctgtgagaggtcgaatagacgtcaacgcagacacatcgaagaaccagttctccctgcacctgaactctgtgactcccgaggacacggctgtatattattgtgcaagaggtcgagactcatcccttgacttctggggccagggaaccctggtcatcgtctcctc

SEQ ID NO: 11344 - DNA, 286 bp, Homo sapiens
  source 1..286: mol_type = other DNA
tgcagcctctggattcaccttgagtagctattggatgggttgggtccgccaggctccagggaaggggctggagtgggtggccaacataaaacaagatggaagtgagacatactatgtggactctgtgaagggccgattcaccatctcccgagacaacgccaagaactcactatatctgcaaatcaacagcctgagagccgaggacacggctgtgtattactgtgcgagggcttccagcagcagctggtccgtctggggccagggaaccctagtcaccgtctcctca

SEQ ID NO: 11345 - DNA, 286 bp, Homo sapiens
  source 1..286: mol_type = other DNA
tgcagcctctggattcacctttagtgcctattggatgggctgggtccgccaggctccagggaaggggctggagtgggtggccaacataaaacaagatggaagtgagaaatactatgtggactctgtgaagggccgattcaccatctcccgagacaacgccaagaactcactgtatctgcaagtgaacagcctgagagccgaggacacggctgtgtattactgtgcgagggcttccagcagcagctggtccgtctggggccagggaaccctggtcatcgtctcctca

SEQ ID NO: 11346 - DNA, 286 bp, Homo sapiens
  source 1..286: mol_type = other DNA
tgcagcctctggattcacctttagtagctcttggatgagctgggtccgccaggctccagggaaggggctggagtgggtggccaacataaagcaagatggaagtgagaagtactatgtggactctgtgaagggccgattcaccatctccagagacaacgccaagaactcactgtatctgcaaatgaacagcctgagagccgaggacacggctgtgtattactgtgcgagagctagcagcagcagctggagtgtctggggccagggaaccctggtcaccgtctcctca

SEQ ID NO: 11347 - DNA, 295 bp, Homo sapiens
  source 1..295: mol_type = other DNA
tgcagcctctggattcagcttcagtaaatactggatgcactgggtccgccaagctccagggaaggggctgttctgggtttcacatatcaatagtgatgggagtagcacaccctacgcggactccgtgaagggccgattcaccatctccagagacaacgccaagaacacgctgtatctgcaaatgaacagtctgagagacgaggatacggctgtgtattattgtgcaagaggggaatgtactagtaccagctgccttgaccactggggccagggaaccctggtcaccgtctcctca

SEQ ID NO: 11348 - DNA, 295 bp, Homo sapiens
  source 1..295: mol_type = other DNA
tgcagcctccggattcaccttcagtaagtactggatgcactgggtccgccaagttccagggaaggggctgatgtgggtctcacatattaccactgatgggagtaccacaacgtacgcggactccgtgaagggccgattcaccatctccagagacaacaccaagaacacattgtatctgcaaatgaacagtctgagagccgaggacacggctgtctattactgtgcaagaggagagtgtactagtaccagctgccttgatcactggggccagggaaccctggtcaccgtctcctca

SEQ ID NO: 11349 - DNA, 292 bp, Homo sapiens
  source 1..292: mol_type = other DNA
tgcagcctctggattcagttttagtaattatgaaatgaactgggtccgccaggctccagggaaggggctggagtgggttgcaatcattcgtactagtggtattcccattgtctacgcggactctgtgaagggccgattcaccatctccagagacaacgccaagaactcattatatcttcaaatgaacagtctgagagtcgacgacacggctgtttattactgtgcgagagggtggtcagctggtgtccactttgaatactggggccagggaaccctggtcaccgtctcctca

SEQ ID NO: 11350 - DNA, 295 bp, Homo sapiens
  source 1..295: mol_type = other DNA
tgcagcctctggattcagtttcaggaattatgaaatgatctgggtccgccagcctccagggaaggggctggagtggatttcatacattagtagtggtagtggtagtaccaaatactacgcagattctgtgaagggccgatttaccatctccagagacaacgccaaggactcactgtatttgcaaatgaacatcctgagagccgaagacacggctatttattattgtgcgagaggatggtcagctggtgtccactttgagtactggggccagggaaccctggtcaccgtctcctca

SEQ ID NO: 11351 - DNA, 286 bp, Homo sapiens
  source 1..286: mol_type = other DNA
tgcagcctctggattcatcttcagtagttatagcatgaactgggtccgccaggctccagggaaggggctggagtggatttcatacataagtagtagtagtagtagtaccattttttacgttgactctgtgaagggccgattcaccatctccagagacaatgccgagaactcactgtatctgcaaatgaacagcctgagagacgaggacacggctgtgtattactgtgcgagagatgtgggctacatggacgtctggggcaaagggaccacggtcaccgtctcctca

SEQ ID NO: 11352 - DNA, 283 bp, Homo sapiens
  source 1..283: mol_type = other DNA
tgcagcctctggattcagcttcaggagttatgaaatgaagtgggtccgccaggctccagggaaggggctggagtgggtttcatacattagtagtagtggcaataccatatactacgcagactctgtgaagggccgattcaccatctccagagacaacgccaagaactcactgtatctgcaaatgaacagcctgagagccgaggacacggctgtttattattgtgcgagagatgtgggctacatggacgtctggggcaaagggaccacggtcaccgtctcctca

SEQ ID NO: 11353 - DNA, 292 bp, Homo sapiens
  source 1..292: mol_type = other DNA
tgcagcctctggattcacttttagcagctatgccatgagctgggtccgccaggctccagggaaggggctggagtgggtctcacttattaggagtagtggtgctgatacatactacgcagattccgtgaagggccggttcaccatctccagagacaattccaagaacacgctgtatctgcaaatgaacagcctgagagccgaggacacggccatatattactgtgcgaagactcatggcagtggctgggcttttgactactggggccagggaaccctggtcaccgtctcctca

SEQ ID NO: 11354 - DNA, 292 bp, Homo sapiens
  source 1..292: mol_type = other DNA
tgcagcctctggattcacctttagcagctatgccttgagctgggtccgccaggctccagggaaggggctgcattgggtctcacttattaaaagtactactcctgacacatactacgcagactccgtgaagggccggttcaccatctccagagacaattccaagaacacgctgtatctgcaaatgaacagtctgagagtcgaagacacggccgtgtattactgtgcaaaaactcatggcagtggctgggcgtttgactactggggccagggaaccctggtcaccgtctcctcg

SEQ ID NO: 11355 - DNA, 277 bp, Homo sapiens
  source 1..277: mol_type = other DNA
cactttctctggtggctccatcagtagttacttctggagctggatccggcagcccccagggaagggactggagtggattggatatatctattacagtgggagcaccaactacaacccctccctcaagagtcgagtcaccatatcactagacacgtccaagaaccagttctccctgaagctgacctctgtgaccgctgcggacacggccgtgtattactgtgcgagaggtgatccctttgacttctggggccagggaaccctggtcaccgtctcctca

SEQ ID NO: 11356 - DNA, 277 bp, Homo sapiens
  source 1..277: mol_type = other DNA
cactttctctggtggcgccatcagtagttactactggagctggatccggcaggccccagggaagggactggagtggattgggtatatctattacagtgggagcaccaattacaacccctccctcgagagtcgagtcaccatatcactggacacgtccaagaggcagttctccctgaatctaagctctgtgaccgctgcggacacggccgtgtattactgtgcgaggggtgacccctttgacttctggggccagggagccctggtcaccgtgtcctca

SEQ ID NO: 11357 - DNA, 277 bp, Homo sapiens
  source 1..277: mol_type = other DNA
cgctgtctcaggcgactccatcagcagtagtcgctggtggacttgggtccgccagcccccagggaaggggcttgagtggattggggaagtctatcatactggggacaccaactacaactcgtccctcaagggtcgagtcaccatttcagtggacaagtcccacaaccacttctccctgaacctgaactatgtgaccgccgcggacacggccgtctattattgtgcggatccgccttcgggcttctggggccagggaaccctggtcaccgtctcctca

SEQ ID NO: 11358 - DNA, 277 bp, Homo sapiens
  source 1..277: mol_type = other DNA
cactgtctctggtgaatctattagcagtagtcggtggtggacttgggtccgccagtccccagggaggggactggaatggattggagaaatctatcatattgggtacaccaactacaactcgtccatgaagagtcgagtcaccattgcaatggacaagtccaacaatcagttctccctgaagttacattctatgaccgccgcggacacggccatttattattgtgcggatcctccttcgggcttctggggccagggaaccctggtcaccgtctcctca

SEQ ID NO: 11359 - DNA, 283 bp, Homo sapiens
  source 1..283: mol_type = other DNA
cactgtctctggtgactccatcagcaataggcctactaactgctggaattgggtccgccagcccccaggaaaggggctggagtggattggggaaatctgtcatagtgggagtcccgactacaacccgtccctcaagagtcgagtcaccatatcagtagacaagtccaagaaccagttcttcctgaagttgacctctgtgaccgccgcggacacggccgtgtatttctgtgccgatcccccctctggcttctggggccagggagccctagtcgtcgtctcctca

SEQ ID NO: 11360 - DNA, 283 bp, Homo sapiens
  source 1..283: mol_type = other DNA
cactgtctctggtgactccatgagcaaaaggattactaattgctggaattgggtccgccagcccccaggaaaggggctggagtggattggggaagtctgtcgtagtgggcgtcccgactacaacccgtccctcaagagtcgagtcaccatatccgtagacaagtccaagaaccagttcttcctgaagttgacgtctgtgaccgccgcggacacggccgtgtatttctgtgccgatcccccctctggcttctggggccagggagcccgagtcgtcgtctcctca

SEQ ID NO: 11361 - DNA, 283 bp, Homo sapiens
  source 1..283: mol_type = other DNA
cactgtctcgggtgactccatcagcaataggcctactaattgctggaattgggtccgccagcccccaggaaaggggctggagtggattggggaagtctgtcatagtgggaggcccagctacagcccgtccctcgagagtcgagtcaccatatcagtagacaagtccaagaatcaattctccctggagttgacctctgtgaccgccgcggacacggccgtgtatttctgtgccgatcccccctctggcttctggggccagggaaccctagtcaccgtctcctca

SEQ ID NO: 11362 - DNA, 283 bp, Homo sapiens
  source 1..283: mol_type = other DNA
cagtgtctctggtgactccatcagtgatagagttactaattgctggaattgggtccggcagcccccaggaaaggggctggagtggattggcgaaatctgtcatagtgggagtcccgactacaacccgtccctcaagagtcgagtcaccatatccgtagacaagaccaagaaccagttctccctgaagttgacctctgtgaccgccgcggacacggccgtgtatttctgtgccgatcccccctctggcttctggggccagggagccctagtcgtcgtctcctca

SEQ ID NO: 11363 - DNA, 289 bp, Homo sapiens
  source 1..289: mol_type = other DNA
cactgtctctggtggctccatcagtacttactactggagctggatccggcagcccccagggaagggactggagtggattgggtatatctattatagtgggggcaccaactacaacccctccctcaagagtcgactctccatatcagtagacacgtccaggaaccagttctccctgaagctgacctctgtgaccgctgcggacacggccgtgtattactgtgcgagagatcaagggggcccctactactttgactactggggcctgggaaccctggtcaccgtctcctca

SEQ ID NO: 11364 - DNA, 289 bp, Homo sapiens
  source 1..289: mol_type = other DNA
cactctctctggtggctccatcagtacttactactggagctgggtccggcagccccccgggaagggactggagtggattgcatatatctattacagtgggggcaccaactacaacccctccctcaagagtcgagtcaccatatcaatagacacgtccaagaaccagttctccctgaggctgaggtctgtgaccgctgcggacacggccgtttattactgtgccagagatcagggtggcccttactactttgactactggggccagggaaccccggtcaccgtctcctct

SEQ ID NO: 11365 - DNA, 313 bp, Homo sapiens
  source 1..313: mol_type = other DNA
tgcagcctctggattcaccttcagtagctataccatgagctgggtccgccaggctccagggagggggctggagtgggtctcatccattactagtagtagtagttacatatactacgcagactcagtgaagggccgattcaccatctccagagacgacgccaagaactcactgtatctgcaaatgaacagcctgagagccgaggacacggctgtgtattattgcgcgagagatggaggatattgtagtggtggtggctgctactactacggtatggacgtctggggccaggggaccacggtctccgtctcctca

SEQ ID NO: 11366 - DNA, 313 bp, Homo sapiens
  source 1..313: mol_type = other DNA
tgcagcctctggattcaccttcagtagctataccatgaactgggtccgccaggctccagggaaggggctggagtgggtctcatccattgttagtagtagtggttacatttactacgcagactcactgaagggccgattcaccgtctccagagacaacgccaagaactcagtgtttctgcaaatgaacagcctgagcgccgaggacacggctgtctatttctgtgcgagagatggagggtattgtagtggtggtggctgctactactacggtatggacgtctggggccaagggaccacggtcaccgtctcctca

SEQ ID NO: 11367 - DNA, 298 bp, Homo sapiens
  source 1..298: mol_type = other DNA
cactgtctctgattacttcatcagcaatggttattactggggctggatccggcagcccccagggaaggggctggagtggattgggactatctatcataggggaagcacctactacaacccgtccctccagagtcgaggcaccctatcagtagacacgtccaagaaccagttctccctgaagctgaactctgtgaccgccgcagacacggccgtttattactgtgcgagagggacttatagcagtggccttaactggttcgacccctggggccagggaaccctggtcaccgtctcctca

SEQ ID NO: 11368 - DNA, 298 bp, Homo sapiens
  source 1..298: mol_type = other DNA
cactgtctctggttactccatcagcagtggttactactggggctggatccggcagcccccagggaaggggctggagtggattgggagtatctttcatagtgggagcacctactacaacccgtccctcaagagtcgagtcaccatatcagtagacacgtccaagaaccagttctccctgaagctgaactctgtgaccgccgcagacacggccgtgtattactgtgcgaggggaacctatagcagtggcctaaactggttcgacccctggggccagggaaccctggtcaccgtctcctca

SEQ ID NO: 11369 - DNA, 280 bp, Homo sapiens
  source 1..280: mol_type = other DNA
tgcagcctctgcattccctttcagtaatgcctggatgaggtgggtccgccaggctccagggaaggggctggagtgggttggccgtattaaaagccaggctgatggtgggacaacaggctacgctgcacccgtgaaaggcagattcatcatctcaagagatgattcaaaagacacgctgtatctgcaaatgaacagcctgaataccgaggacacagccgtgtattactgtaccgacggaatggccgtctggggccaaggaaccacggtcaccgtctcctca

SEQ ID NO: 11370 - DNA, 280 bp, Homo sapiens
  source 1..280: mol_type = other DNA
tacagcctctagattcaatttcaatcacgcctggatgagctgggtccgccaggctccagggaaggggctggagtgggttggccgtattaaaagcaaagctgctggtgggacaccagactaccctacacccgtgaaaggcagattcaccatctcaagagatgattcaaaaaacacgctgtatgtacaaatgaacagcctgaaaaccgaggacacagccgtgtattattgtacggatggtatggccgtctggggccaagggaccacggtcaccgtctcctca

SEQ ID NO: 11371 - DNA, 295 bp, Homo sapiens
  source 1..295: mol_type = other DNA
tgtcacctctggattcaccttcagtgcctactggatgcactgggtccgccaagctccagggaaggggctggagtgggtctcacgtattaatggtgatgcgagtgccagaaactacgcgaggtccgtggagggccgattcaccctctccagagacaacgcccagaacatcctctatctgcaaatgaacagtctgagagccgaggacacggctacatattactgtgcaagaaccgatactagtggtagggaggcttttgatatctggggccaagggacaatggtcaccgtctcttca

SEQ ID NO: 11372 - DNA, 295 bp, Homo sapiens
  source 1..295: mol_type = other DNA
tgcagcctctggattcaccttcagtagctcctggatgcactgggtccgccaagctccagggaagggactgatgtgggtctcacggattaaaagtgatgggagtaccacaaactacgcggactccgtgaagggccgattcaccatctccagggacaacgccaagaacacgctgtatctgcaaatgaacagtctgagagccgaggacacggctgtgtattactgtgcaagaacggataccagtggacgagaagcctttgatatctggggccaagggacaatggtcaccgtctcttca

SEQ ID NO: 11373 - DNA, 313 bp, Homo sapiens
  source 1..313: mol_type = other DNA
tgaaggctctggattcacctttagtagttattggatgagctgggtccgccaggctccagggaaggggctggagtgggtggccaacataaagcaagatggaagtgagacatactatgtggactctgtgaagggccgattcaccatctacagagacaacgccaagagttcactgtatctgcaaatgagcagcctgagagccgaggacacggctctgtattactgtgcgagggattgtagtggtggtagttgttacccccaatactactacggtatggacgtctggggccaagggaccacggtcaccgtctcctca

SEQ ID NO: 11374 - DNA, 313 bp, Homo sapiens
  source 1..313: mol_type = other DNA
tgcagcctctggattcacctttagtagctattggatgagttgggtccgccaggctccagggaaggggctggagtgggtggccaatataaagcaagatggaagtgagcaatactatgtggattctgtgaagggccgattcaccatctccagagacaacgccaagagctcactgtatctgcaaatgaacagcctgagagccgaggacacggctgtgtattactgtgcgagagattgtagtggtggtagctgctacccccagtactactacggtatggacgtctggggccaagggaccacggtcaccgtctcctca

SEQ ID NO: 11375 - DNA, 276 bp, Homo sapiens
  source 1..276: mol_type = other DNA
gcttctggatacatcttcaccaacttctttttacactgggtgcgccaggcccccggacaaggccttgagtggatgggacggatgaaccctgagacgggtcgcgcgacctatgcacgggcctttcaaggcagggtcaccatgacccgggacacgtcgacatccacaggattcatggagctgagcagactgacctccgccgacaccgccgtctattattgtgcgagagaaaattatttccacccgtggggacaggggaccctggtcatcgtctcctca

SEQ ID NO: 11376 - DNA, 276 bp, Homo sapiens
  source 1..276: mol_type = other DNA
gcttctggatacatcttcaccaacttctttttacactgggtgcgccaggcccccggacaaggccttgagtgggtgggacggatgaaccctgagacgggtcgcgcgacctatgcacgggcctttcaaggcagggtcaccatgacccgggacacgtcgacatccacaggattcatggagctgagcagactgacctccgccgacaccgccgtctattattgtgcgagagaaaactatttccacccgtggggacaggggaccctggtcatcgtctcctca

SEQ ID NO: 11377 - DNA, 276 bp, Homo sapiens
  source 1..276: mol_type = other DNA
gcttctggatacaccttcaccaacttctttatacactgggtgcgacaggcccctggacaagggcttgagtggatgggacggatgaacccgagtactggtcgagcaacctttgcacagaactttcggggcggggtcaccatgaccagggacacgtccatcaccacagcctacatggaactgaggaacctgagatcagacgacacggccgtctatttctgtgcgagagaaaactacttccacccctggggccagggaaccctagtcatcgtctcctca

SEQ ID NO: 11378 - DNA, 276 bp, Homo sapiens
  source 1..276: mol_type = other DNA
gcttctggatacaccttcaccaacttctttatacactgggtgcgacaggcccctggacaagggcttgagtggatgggacggatgaacccgagtactggtcgagcaacctttgcacagaactttcggggcagggtcaccatgaccagggacacgtccatcaccacagcctacatggaactgaggaacctgagatcagacgacacggccgtctatttctgtgcgagagaaaactacttccacccctggggccagggaaccctagtcatcgtctcctca

SEQ ID NO: 11379 - DNA, 298 bp, Homo sapiens
  source 1..298: mol_type = other DNA
tggagcctctggattcatcttcagtagctatagcatgaattgggtccgccaggctccagggaaggggctggagtgggtcacatccattagcagtgacaatacttacatatactacggagactcagtgaagggccgattcaccatctccagagacaacgccaggaactcactgtatctgcaaatgaacagcctgagagccgaggacacggctgtctactactgtgcgagggggccgagcagtgactgggtaaacggtctggacgtctggggccaagggaccacggtcaccgtctcctca

SEQ ID NO: 11380 - DNA, 298 bp, Homo sapiens
  source 1..298: mol_type = other DNA
tgaagcctctggattcgccttcactacctatagcatgaactgggtccgccaggctccagggaaggggctggagtgggtctcatccattagtagttacagtacttacatatactacacagactcactgtggggccgattcaccatctccagagacaacgccaagaactcactgtatctgcaactgaacagcctgagagccgaggacacggctgtctattactgtgcgagggggccgagcagtgactgggtaaacggtttggacgtctggggccaagggaccacggtcaccgtctcctca

SEQ ID NO: 11381 - DNA, 298 bp, Homo sapiens
  source 1..298: mol_type = other DNA
tgcagcctctggattcaccttcagtagttatagtatgaactgggtccgccaggctccagggaaggggctggagtgggtctcattcattagttttagtagtagttacatatactacgcagactcagtgatgggccggttcaccatctccagagacaacgccaagaactcactgtatctgcatatgaacagcctgagagccgaggacacggctgtatattactgtgcgagagggcccagtagtgactgggttaacggtctggacgtctggggccaagggaccacggtcaccgtctcctca

SEQ ID NO: 11382 - DNA, 280 bp, Homo sapiens
  source 1..280: mol_type = other DNA
tgcagcctctggattcagctttagtacctattggatgagctgggtccgccaggctccagggaaggggctggagtgggtggccaacataaggcaagatggaagtgtgaaatactatgtggactctatgaagggccgattcaccatctccagagacaacgccgagaactcactgtatctgcaaatgaacagcctgagagccgaagacacggctgtgtattactgtgcgagaggccagctgcttggctactggggccagggaaccctggtcaccgtctcctca

SEQ ID NO: 11383 - DNA, 280 bp, Homo sapiens
  source 1..280: mol_type = other DNA
tgcagcctctggattcacctttagtaacttttggatgagctgggtccgccaggctccagggaaggggctggagtgggtggccaacataaagcaagatggaagtgcgaaattctatgtggactctgtgaagggccgattcaccatctccagagacgacgccaacaactcactgtatctgcaaatgagcagcctgagagccgaggacacggctgtatattactgtgcgagaggccagctgctaggctactggggccagggaaccctggtcaccgtctcctca

SEQ ID NO: 11384 - DNA, 303 bp, Homo sapiens
  source 1..303: mol_type = other DNA
gcttctggatacaccttcaccagttatgatatcaactgggtgcgacaggccactggacatgggcttgagtggatgggatggatgaaccctaacagtggtaacacaggctatgcacagaaattccagggcagagtcaccatgaccaggaacacctccataagcacagcctacatagagctgagcagcctgagatctgaggacacggccgtgtattactgtgcgagaggccctggctgtattagtactagctgcccgtactactttgactactggggccagggaaccctggtcaccgtctcctca

SEQ ID NO: 11385 - DNA, 303 bp, Homo sapiens
  source 1..303: mol_type = other DNA
gcttctggatacaccttcaccaactatgatatcaactgggtgcgacaggccactggacaagggcttgagtggatgggatggatgaaccctaacagtggtaacacaggctacgcacagaagttccagggcagagtcaccatgaccaggaacacctccataagcacagcctacatggagctgagcagcctgagatctgaggacacggccgtgtattactgtgcgagaggccccggttgtattagtaccagctgcccgtactactttgactactggggccagggaaccctggtcaccgtctcctca

SEQ ID NO: 11386 - DNA, 289 bp, Homo sapiens
  source 1..289: mol_type = other DNA
tacagattctacattcacctttggtgattatattatcaactggatccgccaggctccagggaaggggctggagtgggtaggtttcattaacaacaaagctaatggtgggacaacagaatacgccgcgtctgtgagaggcagattcaccatctcaagagatgattccaaaagcatcgcctatctgcaaatgaacagcgtgaaaattgacgacacagccgtatattattgcactagaggacattactctggcccgagctggggccagggaaccctggtcaccgtctcctca

SEQ ID NO: 11387 - DNA, 289 bp, Homo sapiens
  source 1..289: mol_type = other DNA
tagagattttgatttctcgtttggtaactttataataagttgggtccgccaggctccagggaaggggctggaatgggtaggtttcatcagaaacagggcttctggtgggacaacagaatacgccgcgtctgtgcaaggcagattcactatctcaagagatgactccgcacgcattgcctacctgcacatggacagcctgagaaccgaagacacaggcatttattaccgtactcgaggccactactctggtccttcttggggcccgggaaccccggtcaccgtctcctca

SEQ ID NO: 11388 - DNA, 289 bp, Homo sapiens
  source 1..289: mol_type = other DNA
cacagtttctggattcaccatgggtgattatattatgaattgggttcgccaggctccagggaaggggctggagtgggtaggtttcatcaaaaagagtgctgatggtgggacaacagaatacgccgcgtctgtgagaggcagattcaccatctctcgagatgattccaaaagcgtcgcctatctgcaaatgaacaccctgaaaacagacgacacaggcacttattactgcactcgagggcattattctggcccgagttggggccaggcaaccctggtcaccgtcgcctca

SEQ ID NO: 11389 - DNA, 283 bp, Homo sapiens
  source 1..283: mol_type = other DNA
tgcagcctctggattctccttttataactattacatggcctgggtccgccaggctccagggaaggggctggagtgggtggccaacataaaggaagatggaagtgagaaatactatgtggactctgtgaagggccgattcaccatctccagagacagcgccaagaactcactgtatctgcaaattaacagtctgagagacgaggacacggctgtgtatttctgtgcgagagggggctggttcttcgatctctggggccgtggcaccctggtcactgtctcctca

SEQ ID NO: 11390 - DNA, 283 bp, Homo sapiens
  source 1..283: mol_type = other DNA
tgcagcctctggattcacctttaatgaccattggatgagttgggtccgccaggctccaggggaggggctggagtgggtggccaagataaagcaagatggaagtgacacatactatgtagactctgtgaagggccggttcaccatctccagagacaacgccaagaactctctgtatctacaaatgaacagcctgagagtcgccgacacggccgtttattactgtgcgagagggggctggttcttcgatctctggggccgtggcgccctggtcactgtttcctca

SEQ ID NO: 11391 - DNA, 301 bp, Homo sapiens
  source 1..301: mol_type = other DNA
cgcagcgtctggattcactttcaaaaactatggcatgcattgggttcgccaggctccaggcaaggggctggagtgggtggcagttatctggtctgatggaaataagaaatattatgcagactccgtgaagggccgattcaccatctccagagacactttcgagaacacggtgtatctgcaaatgaaccgtctgagcgacgaagacacggctgtgtattactgtgcgagagatgttgatactactagtcattacggctggttcgacccctggggccagggaaccctggtcaccgtctcctca

SEQ ID NO: 11392 - DNA, 301 bp, Homo sapiens
  source 1..301: mol_type = other DNA
tgcaacgtctggattcaccttcaccaactatggcatgcactgggtccgccaggctccaggcaagggactggagtgggtggcggttctgtgggctgacggaaataggaagtactatgtggactccgtgaagggccgattcaccgtctccagagacaactccaagaccactcagtatctgcaaatgaacagcctgagagtcgaagacacggctgtgtattactgtgcgagagatgttgacactactagtcattacgggtggttcgacccgtggggccagggaaccctggtcaccgtttcctca

SEQ ID NO: 11393 - DNA, 280 bp, Homo sapiens
  source 1..280: mol_type = other DNA
cactgtctctggtggctccatcagcagtggtacttacaagtggaactggatccggcagcccgccgggaagggactggagtggattgggcatatctataccactgggagcaccaactacaacccctccctcaagagtcgagtcaccatatcaatagacacgtccaagaatcagttctccctgaagctgagctctgtgaccgccgcagacacggccgtgtattattgtgcgagaggtgccggggcctactggggccagggaaccctggtcaccgtctccgca

SEQ ID NO: 11394 - DNA, 280 bp, Homo sapiens
  source 1..280: mol_type = other DNA
cactgtctctggtggctccatcagcagtggtggtcatcactggagctggatccggcagcccgccgggaagggactggagtggattgggcgtatcggtgccggtgggagcaccaagtacagcccctccctcgagagtcgagtcaccatatcaatagacacgtccaagaatcaattttccctgaagctgacctctgtgaccgtcgcagacacggccgtttattactgtgcgagaggggcaggtgcctactggggccagggagccctggtcaccgtctcctca

SEQ ID NO: 11395 - DNA, 280 bp, Homo sapiens; identical to SEQ ID NO: 11394
  source 1..280: mol_type = other DNA

SEQ ID NO: 11396 - DNA, 280 bp, Homo sapiens
  source 1..280: mol_type = other DNA
cactgtctctggtggctccgtcagcgatgagagttactactggagctggatccggcagcccccagggaagggactggagtggattgggtatatctattacagtgggagccccaactacaacccctccctcaagagtcgagtcaccatatcaatagacacgtccaagaaccacttctccctgaagctgcggtctgtgaccgctgcggacacggccgtatattactgtgcgagaggtgcaggggcctactggggccagggaaccctggtcaccgtctcctca

SEQ ID NO: 11397 - DNA, 280 bp, Homo sapiens
  source 1..280: mol_type = other DNA
cactgtctctggtggctccgtcagcgatgacagttactactggagctggatccggcagcccccagggaagggactggagtggattgggtatatctattacagtgggagtcccaactacaacccctccctcaagagtcgagtcaccatgtcaatagacacgtccaagaaccacttctccctgaaactgcggtctgtgaccgctgcggacacggccgtatattactgtgcgagaggtgcaggggcctactggggccagggaaccctggtcaccgtctcctca

SEQ ID NO: 11398 - DNA, 280 bp, Homo sapiens
  source 1..280: mol_type = other DNA
caaagtctctggtggctccgtcagcgatgagagttactactggagctggatccggcagcccccagggaagggactggagtggattgggtatatcttttacagtgggagccccaagtacaacccctccctcaagagtcgagtcactatatcaatagacacgtccaagaaccacttctccctgaagctgcggtctgtgaccgctgctgacacggccgtatattactgtgcgagaggtgcaggggcctactggggccagggaaccctggtcaccgtctcctca

SEQ ID NO: 11399 - DNA, 280 bp, Homo sapiens
  source 1..280: mol_type = other DNA
cactgtctctggtggctccgtcagcagtggtagttactactggagttggatccggcagcccccagggaagggactggagtggattggatatatctatgacagtgggagcactgactacaacccctccctcaagagtcgagtcaccatatcagtagacacgtccaagaaccagttctccctgaagctgacctctgtgaccgctgcggacacggccgtttattactgtgcgagaggtgcaggggcctactggggccagggaaccctggtcaccgtctcctca

SEQ ID NO: 11400 - DNA, 280 bp, Homo sapiens
  source 1..280: mol_type = other DNA
cactgtctctggtggctccgtcagcgatgacagttactactggagctggatccggcagcccccagggaagggactggagtggattgggtatatctattacagtgggagccccaactacaacccctccctcaagagtcgagtcaccatgtcaatagacacgtccaagaaccacttctccctgaaactgcggtctgtgaccgctgcggacacggccgtatattactgtgcgagaggtgcaggggcctactggggccagggaaccctggtcaccgtctcctca

SEQ ID NO: 11401 - DNA, 280 bp, Homo sapiens; identical to SEQ ID NO: 11397
  source 1..280: mol_type = other DNA

SEQ ID NO: 11402 - DNA, 280 bp, Homo sapiens
  source 1..280: mol_type = other DNA
cactgtctctggtggctccgtcagcgatgagagttgctactggagctggatccggcagcccccagggaagggactggagtggattgggtatatctattacagtgggagccccaactacaacccctccctcaagagtcgagtcaccatatcaatagacacgtccaagaaccacttctccctgaagctgcggtctgtgaccgctgcggacacggccgtatattactgtgcgagaggtgcaggggcctactggggccagggaaccctggtcaccgtctcctca

SEQ ID NO: 11403 - DNA, 280 bp, Homo sapiens
  source 1..280: mol_type = other DNA
cactgtctctggtggctccgtcagcgatgagagttactactggagctggatccggcagcccccagggaagggactggagtggattgggtatatctattacagtgggagccccaactacaacccctccctcaagagtcgagtcaccatatcaatagacacgtccaagaaccacttctccctgaagctgcggtctgtgaccgctgcggacacggccgtatattactgtgcgagaggtgcaggggcctactggggccagggaaccctggtcaccgcctcctca

SEQ ID NO: 11404 - DNA, 364 bp, Homo sapiens
  source 1..364: mol_type = other DNA
cactgtgtctggtggctccgtcagcgatgagagttactactggagctggatccggcagcccccagggaagggactggagtggattgggtatatctattacagtgggagccccaactacaacccctccctcaagagtcgagtcaccatgtcaatagacacgtccaagaaccacttctccctgatgctgcggtctgtgaccgctgcggacacggccgtatattactgtgcgagaggtgcaggggcctactggggccagggaaccctggtcaccgtctcctcaggtgagtcctcacaacgtctctcctgctttaattctgaagggttttgctgctggggccagggaaccctggtcaccgtctcctca

SEQ ID NO: 11405 - DNA, 289 bp, Homo sapiens
  source 1..289: mol_type = other DNA
tgcagcctctaaattcgtcttcagtgactactacatgagctggatccgccgggctccagggaaggggctggagtgggtctcatacattactactgctggtgccgtcttctacgcagactctgtgaagggccgattcaccgtctccagggacaacgccaggaactcactgtatctgcaaatgaccagcctgagagccgaggacacggccgtctattactgtgcgagattcgggggcagtggctggtcacttgactactggggccagggaaccctggtcaccgtctcctca

SEQ ID NO: 11406 - DNA, 295 bp, Homo sapiens
  source 1..295: mol_type = other DNA
tgcagcctctggattcaccttcagtgactactacatgagctggatccgccaggctccggggaaggggctggaatgggtttcatacattagtagtactagtggtagtaccatatactacgcagactctgtgaagggccgattcaccatctccagggacaacgcccagaactcactgtacctgcaaatgaacagcctgagagccgaggacacggccgtgtattactgtgcgagattcgggggcagtggctggtcgcttgactactggggccagggaaccctggtcaccgtctcctca

SEQ ID NO: 11407 - DNA, 292 bp, Homo sapiens
  source 1..292: mol_type = other DNA
tgaagcctctagattcaccttcagtgactactacatgagctgggtccgccaggctccagggaaggggctggagtgggtttcatacattactagtacttctacttacacaaactacgcagactctgtgaagggccgattcaccatctccagagacaacgccaagaactcactgtatctgcaaatgaacagcctgagagccgaggacacggcagtatattactgtgcgagatttggcggcagtggctggtctcttgactactggggccagggaaccctggtcaccgtctcctca

SEQ ID NO: 11408 - DNA, 292 bp, Homo sapiens
  source 1..292: mol_type = other DNA
tgcagcctctcaattcatcttcagtgactactacatgagctggatccgccaggctccagggaaggggctggagtgggtttcatacattagtagtagtggtaccaccacgtactacgcagactctgtgaagggccgattcaccatctccagggacaacgccaggcactcactgtatctgcaaatgaacagcctgagaggcgaggacacggccgtctattactgtgcgagattcgggggcagtggctggtcgcttgactactggggccagggaagcctggtcaccgtctcctca

SEQ ID NO: 11409 - DNA, 280 bp, Homo sapiens
  source 1..280: mol_type = other DNA
tacagcctctggattcatctttagcacctatgccatggcctgggtccgccaggctccagggaaggggctggaatggatctcgtctattactcctaatggtgctgcaacatactacgcagactccgtgaagggccggttcaccatctccagagacaattccaaggacacactgtatctgcaaatgaacagcctgagagccgaggacacggccgtatattactgtgcgaactccaggaactttgactactggggccaggggaccctggtcaccgtctcctca

SEQ ID NO: 11410 - DNA, 280 bp, Homo sapiens
  source 1..280: mol_type = other DNA
tgcagcctctggattcacctttagcaactatgccatgacctgggtccgccaggctccagggaaggggctggagtgggtctcaagtattggtcatggtagtgttaccacatcctacgcagacgccgtgaagggccggttcaccatctccagagacaatacgaagaagacgctgtatctacaaatgaacagcctgagacccgaggacacggccgtatactattgtgcgaattcacggaactttgactactggggccagggaaccctggtcaccgtctcctca

SEQ ID NO: 11411 - DNA, 298 bp, Homo sapiens
  source 1..298: mol_type = other DNA
tgcagcctctggattcaacttcaataaatatgctatacactgggtccgccaggctccaggcaaggggctggagtgggtggcagttatctcaaatgatggaattaataaatattatgcagactccgtgacgggccgattcaccatctccagagacaattccaggaacacactgtatctgcaaatgaacagcctgagagttgaggacacggctgtgtattggtgtgcgagagcaatttttggagtggttagagatgcttctgatatctggggccaagggacaatggtcaccgtctcttca

SEQ ID NO: 11412 - DNA, 298 bp, Homo sapiens
  source 1..298: mol_type = other DNA
tgcagcctctggattcacctttagtagatatgctatgcattgggtccgcctggctccaggcaaggggctggagtgggtggcagtcatttcatatgatggaaatactgaatattacatagactccgtgaagggccgattcaccatctccagagacaattccaagaacattttatatctgcaaatgaacagcctgaatactgaagatacggctgtgtattactgtgcgagagcaatttttggagtggtccgtgatgcttctgatatctggggccaagggacaatggtcaccgtctcttca

SEQ ID NO: 11413 - DNA, 289 bp, Homo sapiens
  source 1..289: mol_type = other DNA
tgcagcctctggattcaccttcagtaactactggatggactgggtccgccaagctccagggaaggggctggtgtgggtctcacgtatgagtagtgatgggagtagcacaagctacgcggactccgtgaagggccgattcaccatctccagagacaacgccaagaacacactgtatctgcaaatgaacagtctgagagccgaggacacggctgtgtattattgtgcaagagatttagtgggagctaccgctgactactggggccagggaaccctggtcaccgtctcctca

SEQ ID NO: 11414 - DNA, 289 bp, Homo sapiens
  source 1..289: mol_type = other DNA
tgtagcctctggtttcacgttcactacctactggatgcactgggtccgccaagctccagggaaggggctggtgtgggtctcacgtattaatattgatgcgagtagtacattctacgcggactcggtgaagggccgattcaccatctccagagacaacgccgagaacacggtgtatctgcagatgaacaatctgagagtcgaggacacggctgtgtaccactgtgctagagatctcgtgggagctacggccgactactggggccagggaatcctggtcaccgtctcctca

SEQ ID NO: 11415 - DNA, 283 bp, Homo sapiens
  source 1..283: mol_type = other DNA
cactgtctctggtggctccatcagtagttcctactggagctggatccgccagcccccagggaagggactggagtggattggatatatctctgacagtgggagcaccaactacaacccctccctccagagtcgagtcaccatatcagtagacacgtccaagaaccagttctccctgaagctgagctctgtgaccgctgcggacacggccgtgtatttctgtgcgagagggagtactaactggtacgacccctggggccagggaaccctggtcaccgtctcctca

SEQ ID NO: 11416 - DNA, 283 bp, Homo sapiens
  source 1..283: mol_type = other DNA
cactgtctctggtggctccatcagtagtcattactggagctggatccggcagcccccagggaagcgactggagtggattggctatatctattacagtgggaacatcaactacaacccctccctcaagagtcgagtcaccatatcagtagacacgtccaagaaccaggtctccctgaagctgacgtctgtgaccgctgcggacacggccgtttattactgtgcgagagggagtaccaactggtacgacccctggggccagggaaccctggtcaccgtctcctca

SEQ ID NO: 11417 - DNA, 295 bp, Homo sapiens
  source 1..295: mol_type = other DNA
cagtgtctccggtgactctataagtaatactgattactactgggactggatccgccagcccccagggaagggactggaatggattgggactatctactacagtgggatcaccttctacaacccgtccctcaggagtcgagtcaccatattcgtagacacgcccaatcaccagttctccctagacctgaactctgtgaccgccgaagacacgggtctttattactgtgcgaggcggcgcggcggtcacgactactttgactcctggggccagggaaccctggtcagagtctcctca

SEQ ID NO: 11418 - DNA, 295 bp, Homo sapiens
  source 1..295: mol_type = other DNA
cactgtctctggtggctccatcagcagtaatgataactgctgggactggatccgccagcccccagggaaggggctggagtggattgggagtatctattatagagggagcacctactacaacccgtccctcaagagtcgagtcaccatatccattgacacgtccaagaaccagttgtccctgaaactgaactctgtgaccgccgcagacatggctgtatattactgtgcgagacgccgcggtggccacgattactttgactcctggggccagggaaccctggtcaccgtctcctca

SEQ ID NO: 11419 - DNA, 280 bp, Homo sapiens
  source 1..280: mol_type = other DNA
tgcagcctctggattcacctttagcaactatgccatggcctgggtccgccaggctccagggaaggggctggagtgggtctcacttgttggtaatagtggtggtgctacatactacgcagactccgtgaagggccgcttcaccatctccagagacaattccatgaacacactgtatcttcaaatgaacagcctgagagccgaagacacggccatatattactgtgcgaaagataggagtttcgggtactggggccagggaaccctggtcaccgtctcctca

SEQ ID NO: 11420 - DNA, 277 bp, Homo sapiens
  source 1..277: mol_type = other DNA
tgcagcctctggattcacctttagcaactctgccatgagctgggctcgccaggctccagggaaggggctggaatgggtctcaactagtgggactggtgggaacacatactacgcagtctccgtgagggaccggttcagcatctccagagacaattccaagaacatgctgtttctgcaaatgaacagcctgagagccgaggacacggccgtatattactgtgcgaaagatcggtcgtttggctactggggccagggaaccctggtcaccgtctcctca

SEQ ID NO: 11421 - DNA, 280 bp, Homo sapiens
  source 1..280: mol_type = other DNA
tgcagcctctggattcacctttagtacctactggatgcactgggtccgccaagttccagggaaggagccggtgtgggtctcacgtatcaatactaatgggagtagtacaagttatgtggactccgtgaagggccgattcaccatctccagagacaacaccaataacatgttgtatctgcaaatgaacagtctgacagtcgcggacacggctgtgtattactgtgcgagaggagtgacctcggggttctggggccagggaaccctggtcaccgtctcctca

SEQ ID NO: 11422 - DNA, 280 bp, Homo sapiens
  source 1..280: mol_type = other DNA
tgcagcctctggattcagtttcagtagctactggatgcactgggtccgccaagctccagggaaggggctgatgtgggtctcacgtattaacagtgatgggagcactgttagttatgcggactccctgaagggccgattcaccacctccagagacaacgccaagaacaccctgtatctgcaaatgaacagtctgagagccgaagacacggctgtgtattactgtgcaagaggcgtaacaagtgggttctggggccagggaaccctggtcaccgtctcctca

SEQ ID NO: 11423 - DNA, 292 bp, Homo sapiens
  source 1..292: mol_type = other DNA
tgcagcctctggattcactttcagtgccgcctggatgagctgggtccgccaggctccagggaaggggctggagtgggttggccatatcagaagcaaaattgatggtgggacaacagactacgctgcacccgtgaaaggcagattcaccatctcaagggatgattcagaaaataacctatatctgcaaatgagcagcctgaaaaccgacgacacagccgtgtattactgtaccacggaatattggggagcccttaacaactggggccacggaatcctggtcaccgtctcctca

SEQ ID NO: 11424 - DNA, 292 bp, Homo sapiens
  source 1..292: mol_type = other DNA
tgcagcctctggattcattttcagtaacgcctggatgagctgggtccgccaggctccagggaaggggctggagtgggttggccgtattaaaagcagagctgatggtgggacaacagaatacgctgcacccgtgaaaggcagactcaccatctcaagagatgattcaaaaaacacgctgtatctgcaaatgaacagcctgaaaagcgaggacacagccgtatattactgtaccacagaatactggggagcgcttaacaactggggccagggaaccctggtcaccgtctcctca

SEQ ID NO: 11425 - DNA, 292 bp, Homo sapiens
  source 1..292: mol_type = other DNA
tgcagcctctggattcactttcagtgccgcctggatgagctgggtccgccaggctccagggaaggggctggagtgggttggccaaattaaaagcaaagttgatggtgggacaacagagtacgctgcacccgtgaaaggcagattcaccatctcaagggatgattcagaaaataacctatatctgcaaatgagcagcctgaaaaccgacgacacagccgtgtattactgtaccacggaatattggggagcccttaacaactggggccagggaatcctggtcaccgtctcctca

SEQ ID NO: 11426 - DNA, 289 bp, Homo sapiens
  source 1..289: mol_type = other DNA
tgcagcctctggattcaccttcagtatttacgacatgcactgggtccgccaagttacaggagaaggtctggagtgggtctcagctattggcactactggtgacacatactatgcaggctccgtgaagggccgattcaccatctccagagaaaatgccaagaactccttgtatcttcaaatgaacagcctgagcgccggggacacggctgtgtattactgtgcaagagggggtatggttcagggagacattgactactggggccagggaaccctggtcagcgtctcctca

SEQ ID NO: 11427 - DNA, 289 bp, Homo sapiens
  source 1..289: mol_type = other DNA
tgcagcctctggattcaccttcagtatttacgacatgcactgggtccgccaagttacaggagaaggtctggagtgggtctcagctgttggcactactggtgacacatattatgcaggctccgtgaagggccgattcaccatctccagagaaaatgccaagaactccttgtatcttcaaatgaacagcctgagcgccggggacacggctgtgtattactgtgcaagagggggtatggttcagggagacattgactactggggccagggaaccctggtcagcgtctcctca

SEQ ID NO: 11428 - DNA, 289 bp, Homo sapiens
  source 1..289: mol_type = other DNA
tgcagcctctggattcaccttcagtacccacgacatgcactgggtccgccaagctacaggaaaaggtctggagtgggtctcagctatttatactactggtgacacatactatcgaggctccgtgaagggccgattcaccatctccagagaagttgccagcaactccttgtatcttcaaatgaacaccctgggagccggggacacggctgtatattactgtgcaagagggggtatggttcagggagacattgactactggggccagggaaccctggtcaccgtctcctca

SEQ ID NO: 11429 - DNA, 289 bp, Homo sapiens
  source 1..289: mol_type = other DNA
tgcagcctctggattcatcttcaataactacgacatgcactgggtccgccaagctacaggaaaaggtctggagtgggtctcagccattcatactactggtgacacatactattcagactccgtgaagggccgattcaccatctccagagacaatgccaagaactccttctatcttcaaatgaacagcctgagagacggggacacggctgtgtattactgtgcaagaggtggtatggttcagggggacattgactactggggccagggaaccctggtcaccgtctcctca

SEQ ID NO: 11430 - DNA, 289 bp, Homo sapiens
  source 1..289: mol_type = other DNA
tgcagcctctggattcatcttcagtaactacgacatgcactgggtccgtcaggcaacagaaaaaggtctggaatgggtctcagcaattcatactactggtgccacatactatgcagactccgtgaagggccgattcaccatctccagagataatgccagaaactccttccatcttcaaatgaacagtctgagagccggggacacggctgtgtattactgtgcaagaggcggtatggttcagggggacattgactattggggccagggaaccctggtcaccgtctcctca

SEQ ID NO: 11431 - DNA, 289 bp, Homo sapiens
  source 1..289: mol_type = other DNA
tgcagcctctggattcatcttcagtaactacgacatgcactgggtccgtcaggcaacagaaaaaggtctggaatgggtctcagcaattcatactactggtgccacgtactatgcagactccgtgaagggccgattcaccatctccagagataatgccagaaactccttctatcttcaaatgaacagcctgagagccggggacacggctgtgtattactgtgcaagaggtggtatggttcagggggacattgactattggggccagggaaccctggtcaccgtctcctca

SEQ ID NO: 11432 - DNA, 289 bp, Homo sapiens
  source 1..289: mol_type = other DNA
tgcagcctctggattcatcttcagtaactacgacatgcactgggtccgccaagctacaggaaaaggtctggaatgggtctcagccattcatactactggtgacacatactattcaggctccgtgaagggccgattcaccatctccagagaaaatgccaagaactccttctatcttcaaatgaacagcctgagagacggggacacggctgtatattactgtgcaagaggtggtatggttcagggggacattgactactggggccagggaaccctggtcgccgtctcctca

SEQ ID NO: 11433 - DNA, 289 bp, Homo sapiens
  source 1..289: mol_type = other DNA
tgcagcctctggattcaccttcagtatttacgacatgcactgggtccgccaagttacaggagaaggtctggagtgggtctcagctattgccactactggtgacacatactatgcagactccgtgaggggccgattcaccatctccagagagaatgccaagaactccttctatcttcaaatgaacagcctgaacgccggggacacggctgtgtattactgtgcaagagggggtatggttcagggagacattgactactggggccagggaaccctggtcagcgtctcctca

SEQ ID NO: 11434 - DNA, 289 bp, Homo sapiens; identical to SEQ ID NO: 11431
  source 1..289: mol_type = other DNA

SEQ ID NO: 11435 - DNA, 289 bp, Homo sapiens
  source 1..289: mol_type = other DNA
tgcagcctctggattcatcttcagtaactacgacatgcactgggtccgccaggctacaggaaaaggtctggaatgggtctcagcaattcatactactggtgacacgtactatgcagactccgtgaagggccgattcaccatctccagagaaaatgccaggaactccttctatcttcaaatgaacagcctgagagccggggacacggctgtgtattactgtgcaagaggtggtatggttcagggggacattgactattggggccagggaaccctggtcaccgtctcctca

SEQ ID NO: 11436 - DNA, 289 bp, Homo sapiens
  source 1..289: mol_type = other DNA
tgcagcctctggattcatcttcagtaactacgacatgcactgggtccgccaggctacaggaaaaggtctggaatgggtctcagcaattcatactactggtgacacgtactatgcagactccgtgaagggccgattcaccatctccagagaaaatgccaagaactccttgtatcttcaaatgaacagcctgagagccggggacacggctgtgtattactgtgcaagaggtggtatggttcagggggacattgactattggggccagggaaccctggtcaccgtctcctca

SEQ ID NO: 11437 - DNA, 289 bp, Homo sapiens
  source 1..289: mol_type = other DNA
tgcagcctctggattcatcttcagtaactacgacatgcactgggtccgccaagctacaggcaaaggtctggaatgggtctcagccattcatactactggtgacacatactattcaggctccgtgaagggccgattcaccatctccagagaaaatgccaagaactccttctatcttcaaatgaacagcctgagagacggggacacggctgtatattactgtgcaagaggtggtatggttcagggggacattgactactggggccagggaaccctggtcgccgtctcctca

SEQ ID NO: 11438 - DNA, 289 bp, Homo sapiens
  source 1..289: mol_type = other DNA
tgcagcctctggattcatcttcagtaactacgacatgcactgggtccgccaggctacaggagaaggtctggaatgggtctcagcaattcatactactggtgacacatactatgcaggctccgcgaagggccgattcaccatctccagagaaaatgccaagaactccttctatcttcaaatgtacagcctgagagccgaggacacggctgtgtattactgtgcaagaggtggtatggttcagggggacattgactattggggccagggaaccctggtcaccgtctcctca

SEQ ID NO: 11439 - DNA, 289 bp, Homo sapiens
  source 1..289: mol_type = other DNA
tgcagcctctggattcatcttcagtaactacgacatgcactgggtccgccaggctacaggagaaggtctggaatgggtctcagcaattcacactactggtgaaacgtactatgcagactccgtgaagggtcgattcaccatctccagagaaaatgccaggaactccttctatcttcaaatgaacagcctgagagccggggacacggctgtgtattactgtgcaagaggtggtatggttcagggggacattgactattggggccagggaaccctggtcaccgtctcctca

SEQ ID NO: 11440 - DNA, 304 bp, Homo sapiens
  source 1..304: mol_type = other DNA
tgcagcctctggattcacctttgccgactatcccatgagttgggtccgccaggctccagggaaggggctggagtgggtctcggctactggtggtaatggtgttggcacattctacacagactccgtgaagggccggttcaccatctccagagacaattccaagaacacactgtatctgcaaatggacagcctgagagccgaggactcggccatgtatttctgtgcgaaagataggggccttggggatgaccacggggattactttgactactggggccagggaaccctgatcaccgtctcctca

SEQ ID NO: 11441 - DNA, 304 bp, Homo sapiens
  source 1..304: mol_type = other DNA
tgtagcctctggattcggcttttccatctatcccatgagctgggtccgccaggctccagggaaggggctggagtgggtgtcagctattagtcagaatggtcgtggcacgttctacacagactccgtgaagggccggttcaccatctccagagacaattccaagaacacgctgtatctgcacatgaacagcctgagagccgaggacacggccatatattactgtgcgaaagatcgggggcttggggatgaccacggtgactactttgactactggggccagggaaccctggtcaccgtctcctca

SEQ ID NO: 11442 - DNA, 283 bp, Homo sapiens
  source 1..283: mol_type = other DNA
tgtagtctctggattcacttttagtagttattggatgagctgggtccgccagactccagacaagcggctggagtgggtggccaccacaaacgaagatgaaagagagaagtactatgtggactctgtgaagggccgattcaccatctacagagacaacaccaggaattcagtgtttctgcagatggatatactgagagccgaggacacggctttatatttctgtgcgaggctgacgaactactttgactattggggcgagggaaccctggtcaccgtctcctca

SEQ ID NO: 11443 - DNA, 283 bp, Homo sapiens
  source 1..283: mol_type = other DNA
tgcagcctctggattcacatttagtagctattggatgagctgggtccgccaggctccagggaaggggccggagtgggtggccaccatgaaccgagatggaagtcagaaactctatctggactctgtgaagggccgattcaccatctccagagacaacgccaagaactcactgtctctgcaaatgaacagcctgagagccgacgacacggctgtgtattactgtgcgagacttacgaactactttgactactggggccagggaaccctggtcaccgtctcctca

SEQ ID NO: 11444 - DNA, 283 bp, Homo sapiens; identical to SEQ ID NO: 11443
  source 1..283: mol_type = other DNA

SEQ ID NO: 11445 - DNA, 283 bp, Homo sapiens
  source 1..283: mol_type = other DNA
tgtagtctctggattcacttttagtagttattggatgagctgggtccgccagactccagacaagcggctggagtgggtggccaccacaaacgaagatgaaagagagaagtactatgtggactctgtgaagggccgattcaccatctacagagacaacgccaggaattcagtgtttctgcagatggatatactgagagccgaggacacggctttatatttctgtgcgaggctgacgaactactttgactattggggcgagggaaccctggtcaccgtctcctca

SEQ ID NO: 11446 - DNA, 295 bp, Homo sapiens
  source 1..295: mol_type = other DNA
cactgtctctggtggctccatcagcagtagtagttactactggggctggatccgccagcccccagggaaggggctggagtggattgggagtatctattatagtgggagcacctactacaacccgtccctcaagagtcgagtcaccgtctccgtagacacgtccaagagccagttctccctgaagctgagctctgtgaccgccgcagacacggctgtatattactgtgcgagacgaggatacagctatggtttctttaactactggggccagggaaccctggtcaccgtctcctca

SEQ ID NO: 11447 - DNA, 295 bp, Homo sapiens
  source 1..295: mol_type = other DNA
cactgtctctggcggctccatcagcagtagtagttattactggggctggatccgccagcccccagggaagggactggagtggattgggagtatctgttatactgggaacatctactacaacccgtccctcaggagtcgagtcaccatatccgtagacacgtccaagaaccagttctccctgaagctggactctgtgagcgccgcagacacggctgtatactactgtgcgagacggggctacagttatgggttttttaattactggggccagggaaccctggtcaccgtctcctca

SEQ ID NO: 11448 - DNA, 289 bp, Homo sapiens
  source 1..289: mol_type = other DNA
tgcagcctctggattcacctttagtcgttattggatggagtgggtccgccaggctccagggaaggggctggagtgggtggccaacataaaggaaggtgcaagtgccaaaaactatgtggactctgtgaagggccgattcaccatctccagagacaacgccgagaactcactgtatctgcaaataaacagcctgagagccgaggacacggctgtgtattactgtgcgagaaatctgggatggcaacaatttgactactggggccagggaaccttggtcaccgtctcctca

SEQ ID NO: 11449 - DNA, 289 bp, Homo sapiens
  source 1..289: mol_type = other DNA
tacagcctctggattcacctttagtacttattggatggactgggtccgccaggctccagggaaggggctggagtgggtggccaacatacaggaagatggaagttctgaaaactatgtggactctgtgaagggccgattcaccatctccagagacaacgccaagaacttagtatatctgcaaatgaacagcctgagtgccgaggacacggctgtctattactgtgcgagaaatctggggtggcaacaatttgactactggggccagggagccctggtcaccgtctcctca

SEQ ID NO: 11450 - DNA, 271 bp, Homo sapiens
  source 1..271: mol_type = other DNA
tgcagcgtctggactcaccttcagtcactataacatacactgggtccgccaggctccaggcaaggggctggagtgggtggcacttatatattatgatggaattgaaaaatattatgaagactccgtgaagggccgattcaccatctccagagacaattccaagaacacgctgtatctgcaaatgaatagcctgagagtcgaggacacggctgtgtattactgtacgaattaccagtactggggccagggaaccctggtcaccgtctcctca

SEQ ID NO: 11451 - DNA, 271 bp, Homo sapiens
  source 1..271: mol_type = other DNA
tgcagcgtctggactcaccttcagtagctataacatccactgggtccgccaggctccaggcaagggactggagtgggtggcacttatataccatgatggaaatgataaatatcatgcagactccgtgaagggccgcttcaccatctccagagacaattccaagaacacgctgtatctgcaaatgaacagcctgagagccgaggacacggctgtgtattactgtacgaactaccaatactggggccagggaaccctggtcaccgtctcttca

SEQ ID NO: 11452 - DNA, 271 bp, Homo sapiens
  source 1..271: mol_type = other DNA
tgcagcgtctggactcaccttcagtaactataacatacactgggtccgccaggctccaggcaagggactggagtgggtggcacttatatactatgatggaattaataaatactatgcagactccgtgaagggccgattcaccatctccagagacaattccaagaacacgctgtatctgcaaatgaacagcctgagagccgaggacacggctgtgtattactgcacgaactaccaatactggggccagggaaccctggtcaccgtctcatca

SEQ ID NO: 11453 - DNA, 271 bp, Homo sapiens
  source 1..271: mol_type = other DNA
tgaagtgtctggactcaccttcagtaactataacatacactgggtccgccaggctccaggcaggggactggagtgggtggcacttatatactatgatggaattaataaatatcatgcagactccgtgaagggccgattcaccatctccagagacaattccaagaacacgctttatctgcaaatgaacagcctgagagccgaggacacggctgtgtattactgtacgaactaccaatactggggccagggaaccctggtcaccgtctcttca

SEQ ID NO: 11454 - DNA, 283 bp, Homo sapiens
  source 1..283: mol_type = other DNA
cactgtctctaatggctccatcaatacttactactggacctggatccggcagcccccagggaagggactggagtggattggctatatctattacagtgggagcaccagctacaacccctccctcaagagtcgagtcatcatatcagtggacacgtccaagaaccagttctccctgaagctgagctctgtgaccgccgcggacacggccgtatattactgtgcgagacttggaagtgggagctgccgagactggggccagggaaccctggtcaccgtctcctca

SEQ ID NO: 11455 - DNA, 283 bp, Homo sapiens
  source 1..283: mol_type = other DNA
cactgtctctggtggctccatcagtacttactcctggagctggatccggcagcccccagggaagggactggagtggattgggtatttccattccagtgggagcaccaactacaacccctccctcaagagtcgagtcaccatatcagtagatacgtccaacaaccagctctccctgaagctgagctctgtgaccgccgcagacacagccgtgtattactgtgcgagactgggcagtgggagctgccgcgactggggccagggaaccctggtcaccgtctcctca

SEQ ID NO: 11456 - DNA, 271 bp, Homo sapiens
  source 1..271: mol_type = other DNA
tgcagcctctggattcaccttcagtgactatgctatgcactgggtccgccaggctccaggcaaggggctggagtgggtggcagttatatcatatgatggaagtaatcaatactacgcagactccgtgaagggccgattcaccatctccagagacaattccaagaacaccctgtatctgcaagtgaacagcctgagagctgaggacacggctatctatttctgtggacggtttgactactggggccagggaaccctggtcaccgtctcctca

SEQ ID NO: 11457 - DNA, 271 bp, Homo sapiens
  source 1..271: mol_type = other DNA
tgcagcctctggattcaccttcagaaactatgctatgcactgggtccgccaggctccaggcaaggggctggagtgggtggcagttatatcatatgatggaagtaataaatacaacgcagactccgtgaagggccgattcaccatctccagagacaattccaagaacacgctgtttctgcaaatgaacagcctgagagttgaggacacggctgtgtattactgtggacgttttgactactggggccagggaaccctggtcaccgtctcctca

SEQ ID NO: 11458 - DNA, 292 bp, Homo sapiens
  source 1..292: mol_type = other DNA
ttatgcttctggattcacctttggtgattatactatgagctggttccgccaggctccagggaaggggctggagtggataggtttcattagaagcaaaggttatggtgggacgacacaatacgccgcgtctgtgaaaggcagattcaccatctcaagagatgattccaaaagcatcgcctatctgcaaatgagcagcctgaaaaccgacgacacagccatatattactgtcatggtagtagttggaactggttcgacccctggggccggggaaccctggtcaccgtctcctca

SEQ ID NO: 11459 - DNA, 292 bp, Homo sapiens
  source 1..292: mol_type = other DNA
tacagcttctggattcacctttggtgattatgctatgagctgggtccgccaggctccagggaaggggctggagtgggtgggtttcattagaatcaaagcttatggtgggacaccagaatacgccgcgtctgtgaaaggcagattcaccatctcaagagatgattccaaaagcatcgcctatctgcaaatgaacagcctgaaaaccgaggacacagccgtgtattactgtcatggtagcagctggaactggttcgacccctggggccagggaaccctggtcaccgtctcctca

SEQ ID NO: 11460 - DNA, 292 bp, Homo sapiens
  source 1..292: mol_type = other DNA
tacagcttctggattcacctttagtgattatactatgagttggttccgccaggctccagggaaggggctggagtgggtaggtttcattagaagtcaagcttatggtgggacaacagaatacgccgcgtctgtgaaaggcagattcaccatctcaagagatgattccaaaagcatcgcctatctgcaaatgaacagcctgaaaaccgaggacacagccgtgtattactgtcatggcagctcgtggaactggttcgacccctggggccagggaaccctggtcaccgtctcctca

SEQ ID NO: 11461 - DNA, 292 bp, Homo sapiens
  source 1..292: mol_type = other DNA
tgcagccactggattcaccgtcagtaattattggatgagctgggtccgcctggctccagggaaggggctggagtgggtggccaacataaacgaagatggaagtgagaaaaactatatagactctgtggaaggccgattcactatctccaaagacaacgcccagaactcactgtctctgcaaatgaccagcctgagggccgaggacacggctgagtatttttgtgcgaggggagggggcagtggctggccttttgcctactggggccagggaactctggtcaccgtctcctca

SEQ ID NO: 11462 - DNA, 291 bp, Homo sapiens
  source 1..291: mol_type = other DNA
tgcagccactggattcaccgtcagtaattattggatgagctgggtccgcctggctccagggaaggggctggagtgggtggccaacataaacgaagatggaagtgagaaaaactatatagactctgtggaaggccgattcactatctccaaagacaacgcccagaactcactgtctctgcaaatgaccagcctgagggccgaggacacggctgagtatttttgtgcgaggggagggggcagtggctggccttttgcctactggggccaggaactctggtcaccgtctcctca

SEQ ID NO: 11463 - DNA, 292 bp, Homo sapiens
  source 1..292: mol_type = other DNA
tgcagccactggattcaccgtcagtaattattggatgagctgggtccgcctggctccagggaaagggctggagtgggtggccaacataaacgaagatggaagtgagaaaaactatatagactctgtggaaggccgattcactatctccaaagacaacgcccagaactcactgtctctgcaaatgaccagcctgagggccgaggacacggctgagtatttttgtgcgaggggagggggcagtggctggccttttgcctactggggccagggaactctggtcaccgtctcctca

SEQ ID NO: 11464 - DNA, 292 bp, Homo sapiens
  source 1..292: mol_type = other DNA
tgcagcctcgggattcagctttagtgactcttggatgagctgggtccgccaggctccaggcaagggactggagtgggtggccaatataaatcaacgtggaagtgaggaaaactatgtggactctgtgaagggccggttcagtatctccagagacaatgccaagaacgcaatgtatttgcaaatgaacagcctgagagccgaggacacggccgtgtattactgtgcgagaggcgggggcagtggctggccctttgcctattggggccagggagccctggtcaccgtctcctca

SEQ ID NO: 11465 - DNA, 307 bp, Homo sapiens
  source 1..307: mol_type = other DNA
tgcagcctctggattcacctttgatgattatgccatgcactgggtccgtcaagctccagggaagggtctggagtgggtctctcttattagtggggatggtgctggcacatactatgctgactctgtgaagggccgattcaccatctccagagacaacagcaaacactccctgtatctgcaaatgaacagtctgagaactgaggacaccgccttatattactgtgcaaaggatcgatattgtagtggtggtaactgctacagcccttttgactactggggccagggaaccctggtcaccgtctcctca

SEQ ID NO: 11466 - DNA, 307 bp, Homo sapiens
  source 1..307: mol_type = other DNA
tgcagcctctggattcaaccttgaggattatgtcatgcactgggtccgtcaggctcctgggaagggtctggagtgggtctctcttattagtgcggatggtagtagcacattctatacagactctgtgaggggccgattcaccatctccagagacaacagcgagaactccctgtatctgcaaatgaacagtctgagaactgaggacaccgccttgtattactgtgcaaaagatcgatattgcagtggtggtaattgctactccccattcgactactggggccagggaaccctgctcaccgtctcctca

SEQ ID NO: 11467 - DNA, 286 bp, Homo sapiens
  source 1..286: mol_type = other DNA
tgcagcctctggattcaccctcagtaactatgctatgcagtgggtccgccaggctccagggaagggactggaatatgtttcatccatcagtaatgatgggagtaggacatattatgtgaactctgtgaagggcagattcaccgtctccagagacaattccaataacatgctgtatctccaagtgggcagcctgagacctgaggacatgggtgtctatttctgtgcgagagatgatattgggagctatgactgctggggccagggagccctggtcaccgtctcctca

SEQ ID NO: 11468 - DNA, 283 bp, Homo sapiens
  source 1..283: mol_type = other DNA
tgcagcctctggattcactctcactgattattctatacaatgggtccgccaggctccaggaaagggactggaatatatttcaactattacttctgagggtgggtcatcttatgcaaactctgtgaagggcagattcaccatctccagagacatttccaagaacacggtgtttcttcaaatgggcagcctgacaactgaggacacggctatgtattactgtgcgcgagatgatattgggagttatgactgttggggccagggaaccctggtcaccgtctcctca

SEQ ID NO: 11469 - DNA, 283 bp, Homo sapiens
  source 1..283: mol_type = other DNA
tgcagcctctggattcatcctcagtgactatgctatacagtgggtccgccaggctccagggaagggactggaatatattgcaactattaagagcagtggggatagaatgtttgcaaactctgtgaagggcagattcagcatctccagagacaattccaagaacacactgtatcttgaaatgggcagcctgagacctgaggacacggccatgtattactgtgcgagagatgatattgggagttatgattgttggggccagggaaccctggtcaccgtctcctca

SEQ ID NO: 11470 - DNA, 286 bp, Homo sapiens
  source 1..286: mol_type = other DNA
tgcagcctatggattcagcctcaatagttatgctatacagtgggtccgccaggttccagggaagggactggaatatgtttcaactatcagtgccagtggagacaccacagcttatgcaaggtctgtgaagggcagattcaccatctccagagacattttcaagaatatagtgtatcttcaaatgggcagcctgagaactgaggacacggctatgtattactgtgcgagagatgatattgggagttatgactgttggggtcagggaaccctggtcaccgtctcctca

SEQ ID NO: 11471 - DNA, 286 bp, Homo sapiens
  source 1..286: mol_type = other DNA
tgaaggctctggattcaccttcagtcactactacatgacttggatccgccaggctccagggaaggggctggactgggttgcgtacattgatcctagtggaagtcccatatactacgcggactctgtcaagggccgattcactgtctccagggacaacgccaagaattcactctatctgcaaatgaccagcctgagaggcgacgacacggccgtatatttctgtgcgagagaccccgttggcacccctgtctactggggccagggagcccgggtcaccgtctcctcg

SEQ ID NO: 11472 - DNA, 286 bp, Homo sapiens
  source 1..286: mol_type = other DNA
tgcagcctctggcttcaccttcagagactactacatgacctggatccgccaggctccaggcaaggggctcgagtgggtttcattcattagttctgatgggactaccatatactacgcagactctgtgaggggccgattcaccgtctccagggacaacgccaagagatcattgtttctgcaaatgaacagcctgagagccgaggacacggctgtctactactgtgcgagagacccagtgggaactcctgtctactggggtcagggaaccctggtcaccgtctcctca

SEQ ID NO: 11473 - DNA, 280 bp, Homo sapiens
  source 1..280: mol_type = other DNA
tgcagcctctggattcatctttagtggctcttggatgagctgggtccgccaggctccagggaaggggctggagtgggtggccaacataaagccagatggaagtgagacaaactatgtggactctgtgaagggccgattcaccatttccagagacaaccccaagaactcactgtatctgcaaatgaacagcctgagagccgaggacacggctgtatattactgtgcgagaaatagagggatatcccactggggccagggaaccctggtcaccgtctcctca

SEQ ID NO: 11474 - DNA, 280 bp, Homo sapiens; identical to SEQ ID NO: 11473
  source 1..280: mol_type = other DNA

SEQ ID NO: 11475 - DNA, 280 bp, Homo sapiens
  source 1..280: mol_type = other DNA
tgcagcctctggattcacctttagtgacaattggatgacctgggtccgccaggctccagggaagggactggagtgggtggccaacataaaacacgatggaagtgaggtgaactatgtggactctgtgaagggccgattcaccatctccagagacaacgccaagagctccctgtatctgcaaatgaacagcctgagagtcgaggacacggccgtatattactgtgcgagaaatcgtgggattagccactggggccagggaaccctggtcaccgtctcctca

SEQ ID NO: 11476 - DNA, 280 bp, Homo sapiens
  source 1..280: mol_type = other DNA
tgcagcctctggattcacctttagtggctcttggatgaactgggtccgccaggctccagggaagggcctggagtgggtggccaacatcaagacagatggaagtgagacatactttgtggactctgtgaagggccgattcaccatctccagagacaaccccaagaactcactgtatctgcaaatgaacagcctgagagccgacgacacggctgtatattactgtgcgagaaatagagggatatcccactggggccagggaaccctggtcaccgtctcctca

SEQ ID NO: 11477 - DNA, 280 bp, Homo sapiens; identical to SEQ ID NO: 11475
  source 1..280: mol_type = other DNA

SEQ ID NO: 11478 - DNA, 280 bp, Homo sapiens
  source 1..280: mol_type = other DNA
tgcagcctctggattcacctttagtgacagttggatgaactgggtccgccaggctccagggaagggactggagtgggtggccaacataaaacacgatggaagtgaggtgaactatgtggactctgtgaagggccgattcaccatctccagagacaacgccaagagctccctgtatttgcaaatgaacagcctgagagtcgaggacacggccgtatattactgtgcgagaaatcgtgggattagccactggggccagggaaccctggtcaccgtctcctca

SEQ ID NO: 11479 - DNA, 292 bp, Homo sapiens
  source 1..292: mol_type = other DNA
tgcagcctctggattcaccttcagtagttactggttccactggctccgccagtctccagggaaggggctggtctgggtctcacgtgttaatactgatgggagtatcacaaactacgcggactccgtgaggggccgattcaccatttccagagacgacgccaagaacacgctgtatttgcaaatgaacagtctgagcgccgaggacaccgctgtctatttttgtgtcagagggaccaatggctggcccggaattgactactggggccagggaaccctggtcaccgtctcctca

SEQ ID NO: 11480 - DNA, 292 bp, Homo sapiens
  source 1..292: mol_type = other DNA
tgcagcctctggattcaccttcagtaactactggatgcactgggtccgccaagctccaggggagggactggtgtgggtctcacgtattgatattgatgggactaacacaaactacgcggactccgtgaggggccgattcaccatctccagaggcgacgccaagaacacgttgtatctgcaaatgaacagtctgagagccgaggacacggctgtgtattactgtgtaagaggaaccaatggctggcccggaattgactactggggccagggaaccctggtcaccgtctcctcg

SEQ ID NO: 11481 - DNA, 292 bp, Homo sapiens
  source 1..292: mol_type = other DNA
tgcagcgcctggatttaccttcagtacctttggcatgcactgggtccgccaggctccaggcaaggggctggagtgggtggcagttatatggtctaatggaggtaatatatactattcagactccgtgaagggccgattcaccatctccagagacaattccaagaacacgctgtatctgcaaatgaacagcctgagagccgaggacacggctgtgtattactgtgcgagagatcttaggaaggggctctacatggacgtctggggcaaagggaccacggtcaccgtctcctca

SEQ ID NO: 11482 - DNA, 292 bp, Homo sapiens
  source 1..292: mol_type = other DNA
tgcagcctctggattcacctttagtgccgctggcatgcactgggtccgccaggctccaggcaaggggctggagtgggtggcaattatatggtatgatggaagtaagatatattatgcagactccgtgaagggccgattcaccatctccagagacaactctaagaacacgctgtatctgcaaatggacagcctgagagccgaggacacggctgtatactactgtgcgagagatctgcggaaggggctctacatggacgtctggggcaaagggaccacggtcaccgtctcctca

SEQ ID NO: 11483 - DNA, 292 bp, Homo sapiens
  source 1..292: mol_type = other DNA
tgcagcctctggattcaccttcagtacccaaggcatgcactgggtccgccaggctccaggcaaggggctggagtgggtggcaattatatggtatgatggaagtaaaaaagagtatgcagactccgtgaagggccgattcaccatctccagagacaatcccaagaacacgctgtatctgcaaatggacagcctgagagccgaggacacggctgtatattactgtgcgagagatctgcggaaggggctctacatggacgtctggggcaaagggaccacggtcaccgtctcctca

SEQ ID NO: 11484 - DNA, 298 bp, Homo sapiens
  source 1..298: mol_type = other DNA
tgcagcctctggattcaccttcagtagctatgctatgcactgggtccgccagactccaggcaaggggctggagtgggtggcagttatagcatatgatggaggtctgaaattctacgcagactccgtgaagggccgattcaccatctccagagacgactccaagaacactctatatctgcaaatgaacagcctgagagctgaggacacggctagatattattgtgcgagagatatgtttaggggaatccctgactaccttgactactggggccagggaaccctggtcaccgtctcctca

SEQ ID NO: 11485 - DNA, 298 bp, Homo sapiens
  source 1..298: mol_type = other DNA
tgcagcctctggattcaccttcggtcactatgctttccactgggtccgccaggctccaggcaaggggctggagtgggtggcagttatatcatataatggagatactacgttttacgcagactccgtgaagggccgattcaccatctctagagacgaccccaagaacactttgaacctgcaaatgtacagcctgagagccgaggactcggctgtctattactgtgcgagagatatgtttcggggaatccctgactacttagactattggggccagggaaccctggtcaccgtctcctca

SEQ ID NO: 11486 - DNA, 298 bp, Homo sapiens
  source 1..298: mol_type = other DNA
tgcagcctctggatatgcgttcagtagatatgctatgcactgggtccgccaggctccaggcaaggggctggagtgggtgtcagttattgcatatgatgggactattaaatactacgcagactccgtgaagggccgattcaccatctccagagacgactcctcgaacacgctgtatctgcaaatgaacagcctcagatctgacgacacggctgtctattactgtgcgagggacatgtttcgggggatcccggactaccttgactactggggccagggaaccctggtcaccgtctcctca

SEQ ID NO: 11487 - DNA, 298 bp, Homo sapiens
  source 1..298: mol_type = other DNA
tgcagcctctgggttcaccttcagtgactatgctttccactgggtccgccaggctccagggcaggggctgcagtgggtggcagttatttcatatgacggaaaagttcaattctacgcagactccgtgaggggccgattcaccatttttagagacagtcccagtcacacactgtatctgcaaatgaccagcctgagagttgacgacacggctgtgtattattgtgcgagagatatgtttcggggaatccccgactaccttgactactggggccagggaaccctggtcaccgtctcatca

SEQ ID NO: 11488 - DNA, 283 bp, Homo sapiens
  source 1..283: mol_type = other DNA
tgcagcctctggattcactttcggtgatgcctcaatgacctgggtccgccaggctccagggaaggggctggagtgggttggccgtattaaaaggagaactgatggtgcgacgacagactacgctgcacccgtgaaaggcagattcaccatctcaagagatgattcaaaaaacacgctgtatgtgcaaatgaacagcctgaataccgaggacacagccgtttattactgtgccacaggtggccttcgcaactggggccagggaaccctggtcaccgtctcctca

SEQ ID NO: 11489 - DNA, 283 bp, Homo sapiens
  source 1..283: mol_type = other DNA
tgcaacctctgggttcactttcagtgacgcctggatgacctgggtccgccaggctccagggaaggggctggagtgggttggtcgtattaaaagtaaaactgatggtgggacggcagactacactgcacccgtgaaaggcagattcaccatctcaagagaagattcacaaaatacgctgtatttgcaaatgaacagcctaaagaccgaagacacaggcgtgtattactgtgccacagggggattacgcaactggggccagggaaccgtggtcaccgtctcctca

SEQ ID NO: 11490 - DNA, 289 bp, Homo sapiens
  source 1..289: mol_type = other DNA
tgcagcctctggattcaccttcacctactatagcatgaactgggtccgccaggctccagggaaggggctggagtggctttcatatattaatagtggtagtgataacatataccacgcagactctgtgaagggccgattcaccatctccagagacaatgccaagagctcactatatctgcaaatgagcagcctgagagacgaagacacggctgtgtattactgtgcgagaaaactgggaaatgatgcttttgatatttggggccaagggacaatggtcaccgtctcttca

SEQ ID NO: 11491 - DNA, 289 bp, Homo sapiens
  source 1..289: mol_type = other DNA
tgcagcctctggattcaccttcagttactatagcatgaactgggtccgccaggctccagggaaggggctggagtgggtttcatacattagtagtagtagtagtatcatatactacgcagactctgtgaagggccgattcaccatctccagagacaatgccaagaactcactgtatctgcaaatgaacagcctgagagacgaggacacggctgtgtattactgtgcgagaaaactggggaatgatgcttttgatatctggggccaagggacaatggtcaccgtctcttca

SEQ ID NO: 11492 - DNA, 282 bp, Homo sapiens
  source 1..282: mol_type = other DNA
gcttccggttacattttcaccatttatggtgtcagctggttgcgacaggcccctggacaaggactcgagtggatgggatggatcagggctcacaatggtgacacagagtatgcacaggagtttcaggggagagtcaccatgaccacagacgcatccacgagcacagcctacatggagctgaggagcctgagatctgacgacacggccgtgtattactgtgcgagatcaccgtattggtacttcgatctctggggccgtggcaccctggtcactgtctcctca

SEQ ID NO: 11493 - DNA, 282 bp, Homo sapiens
  source 1..282: mol_type = other DNA
gcttctggttacatcttcaacatttatggtattagctgggtgcgacaggcccctggacaaggacttgagtgggtgggatggatccgcgctcacactggcgacacaaactatgcacagaaattccagggcagagtcaccatgacaacagacacatccacgaacacagcctacatggaattgatgaccctgagacctgacgacacggccgtgtattactgtgcgagatctccatactggtacttcgatctctggggccgtggcactctggtcactgtcgcccca

SEQ ID NO: 11494 - DNA, 289 bp, Homo sapiens
  source 1..289: mol_type = other DNA
tgcagcctctggattcacctttgatgattatggcatgcactgggtccggcaagctccagggaagggcctggagtgggtctcaggtattcgttgggacagtggtagcataggctatgcggactctgtgaagggccgattcaccatctccagagacaacgccaagaactccctgtctctgcaaatgaacagtctgagagctgacgacacggccttgtattactgtgcacggagggaccaacccggcgcttttgatatctggggccaagggacaatggtcaccgtctcttca

SEQ ID NO: 11495 - DNA, 289 bp, Homo sapiens
  source 1..289: mol_type = other DNA
tgcagcctctggattcacctttgatgattctgccatgcactgggtccggcaagctccagggaagggcctggagtgggtctcaggtattagttggaatagtggtagcatagtctatgcggactctgtgaagggccgatttagcatctccagagacaacgccaagaattccctgtatctgcaaatgaacagtctgagagctgaggacacggccttgtattactgtgcccgccgagaccagcccggtgcttttgatatctggggccaagggacaatggtcaccgtctcttca

SEQ ID NO: 11496 - DNA, 286 bp, Homo sapiens
  source 1..286: mol_type = other DNA
tgcagcctctggattcacttttagtagctattggatgggctggttccgccaggctccagggaaggggctggagtgcgtggccaacgtaaaccaagatggaactaagaaatactatgtggactctgtgaagggccgattcaccatctccaaagacaatgccgagaactctctgcttctgcaaatgaacagcctgagagtcgaggacacggctgtatattactgtgcgagactggtcacccatacctctgactactggggccagggaaccctggtcaccgtctcctca

SEQ ID NO: 11497 - DNA, 286 bp, Homo sapiens
  source 1..286: mol_type = other DNA
tgcagcctctggattcagctttagtacctattggatgggctgggtccgccagactcccgggaaggggctggagtgcgtggccaacataaatcaagatggaagtgagaaatactatgtggactctgtgaagggccgattcactatctccagagacaacgccaagaactcactgtatctgcaggtgagcagcctgagagccgaggacacggctctgtattactgtgcgaggcttgtaacccatacttcggactactggggccagggaaccctggtcaccgtctcctca

SEQ ID NO: 11498 - DNA, 297 bp, Homo sapiens
  source 1..297: mol_type = other DNA
aagggttccggatacaactttgccaactactggatcgcctgggtgcgccagatgcccggcaaaggcctggagtggatgggggtcatctatcctggtgactctgataccagatacggcccgtccttccaaggccaggtcaccatctcagccgacaagtccaccagcaccgcctacttgcagtggaacagcctgaaggcctcggacaccggcatctattactgtgcgagacgcggttatagtagttcgtctgacggaatggacgtctggggccaggggaccacagtcaccgtctcctta

SEQ ID NO: 11499 - DNA, 297 bp, Homo sapiens
  source 1..297: mol_type = other DNA
aagggttctggatacagctttaccaactactggatcgtctgggtgcgccagatgcccgggaaaggcctggagtggatggggatcatctatgctggtgactctgacagcagatacagcccgtccttcgaaggccaggtcatcatctcaggcgacaagtccatcagcaccgcctacctgcagtggagcagcctgaaggcctcggacaccgccatgtattactgtgcgagacggggctatagcagctcgtctgacggtatggacgtctggggccaagggaccacggtcaccgtctcctca

SEQ ID NO: 11500 - DNA, 297 bp, Homo sapiens; identical to SEQ ID NO: 11499
  source 1..297: mol_type = other DNA

SEQ ID NO: 11501 - DNA, 297 bp, Homo sapiens
  source 1..297: mol_type = other DNA
aaggggtccggatacaggtttaccaactactggatcggctgggtgcgccagatgcccgggaaaggcctggagtggatggggatgatctatcctgaagactctgaaaccagatacagcccgtccttccaaggccaggtcaccatctcagccgacaagtccagcagcaccgcctacctgcagtggagcagcctgaaggcctcggacaccgccatgtattactgtgcgagacgggggtatagcagctcgtctgacggtatggacgtctggggccaagggaccacggtcaccgtctcctca

SEQ ID NO: 11502 - DNA, 297 bp, Homo sapiens
  source 1..297: mol_type = other DNA
aaggggtccggatacaggtttaccaactactggatcggctgggtgcgccagatgcccgggaaaggcctggagtggatggggatgatctatcctgaagactctgaaaccagatacagcccgtccttccaaggccaggtcaccatctcagccgacaagtccatcagcaccgcctacctgcagtggagcagcctgaaggcctcggacaccgccatgtattactgtgcgagacgggggtatagcagctcgtctgacggtatggacgtctggggccaagggaccacggtcaccgtctcctca

SEQ ID NO: 11503 - DNA, 297 bp, Homo sapiens
  source 1..297: mol_type = other DNA
aagggttctggatacagctttaccaactactggatcggctgggtgcgccagatgcccgggaaaggcctggagtggatggggatcatctatgctggtgactctgacagcagatacagcccgtccttcgaaggccaggtcatcatctcaggcgacaagtccatcagcaccgcctacctgcagtggagcagcctgaaggcctcggacaccgccatgtattactgtgcgagacgggggtatagcagctcgtctgacggtatggacgtctggggccaagggaccacggtcaccgtctcctca

SEQ ID NO: 11504 - DNA, 297 bp, Homo sapiens
  source 1..297: mol_type = other DNA
aagggttctggatacaactttgccaactactggatcggctgggtgcgccagaagcccgggaaaggcctggagtggatggggatcatctatcctggtgactctgatcccagatacagcccgtccttccaaggccaggtcaccatctcaggcgacaagtccatcagcaccgcctacctgcagtggagcagcctgaaggcctcggacaccgccatgtattactgtgcgagacgggggtatagcagctcgtctgacggtatggacgtctggggccaagggaccacggtcaccgtctcctca

SEQ ID NO: 11505 - DNA, 297 bp, Homo sapiens; identical to SEQ ID NO: 11503
  source 1..297: mol_type = other DNA

SEQ ID NO: 11506 - DNA, 297 bp, Homo sapiens
  source 1..297: mol_type = other DNA
aagggttctggatacagctttaccaactactggatcggctgggtgcgccagatgcccgggaaaggcctggagtggatgggaatgatctatcctggtgactctgaaagcagatacagcccgtccttccaaggccaggtcaccatctcagccgacaagtccatcagtaccgcctacctgcagtggagcagcctgaaggcctcggacaccgccatttattactgtgcgagacgggggtatagcagctcgtctgacggtatggacgtctggggccaagggaccacggtcaccgtctcctca

SEQ ID NO: 11507 - DNA, 297 bp, Homo sapiens
  source 1..297: mol_type = other DNA
aagggttctggatacaggtttaccaactactggatcggctgggtgcgccagatgcccgggaaaggcctggagtggatggggatcatctatcctggtgactctgaaagcagatacagcccgtccttcgaaggccaggtcaccatctcagccgacaagtccatcagcaccgcctacctgcagtggagcagcctgaaggcctcggacaccgccatgtattactgtgcgagacgggggtatagcagttcgtctgacggtatggacgtctggggccaagggaccacggtcaccgtctcctca

SEQ ID NO: 11508 - DNA, 297 bp, Homo sapiens
  source 1..297: mol_type = other DNA
aagggttctggatacaggtttaccaactactggatcggttgggtgcgccagatgcccgggaaaggcctggagtggatggggatcatctatcctgatgactctgataccagatacagcccgtccttccaaggccaggtcaccatctcagccgacaagtccatcagcaccgcctacctgcagtggagcagcctgaaggcctcggacaccgccatgtattactgtgcgagacgggggtatagcagctcgtctgacggtatggacgtctggggccaagggaccacagtcaccgtctcctca

SEQ ID NO: 11509 - DNA, 297 bp, Homo sapiens
  source 1..297: mol_type = other DNA
aagggttctggatacaggtttaccaattactggatcgtctggctgcgccagatgcccgggaaaggcctggagtggatggggatcatctatcctgatgactctgaaaccagatatagcccgtccttccaaggccacgtcaccatctcagccgacaagtccatcagcaccgcctacctgcagtggagcagcctgaaggcctcggacaccgccatgtattactgtgcgagacgggggtatagcagctcgtctgacggtatggacgtctggggccaagggaccacggtcaccgtctcctca

SEQ ID NO: 11510 - DNA, 297 bp, Homo sapiens
  source 1..297: mol_type = other DNA
aagggttctggatacaggtttaccaactactggatcggctgggtgcgccagatgcccgggaaaggcctggagtggatggggaccatctatcctagtgactctgaaaccagatacagcccgtccatccaaggccaggtcaccatcacagccgacaagtccatcagcaccgcctacctgcagtggagcagcctgaaggcctcggacaccgccatgtattactgtgcgagacgggggtatagcagctcgtctgacggtatggacgtctggggccaagggaccacggtcaccgtctcctca

SEQ ID NO: 11511 - DNA, 277 bp, Homo sapiens
  source 1..277: mol_type = other DNA
tgcagcctctggatttacctttgcaagtcatgacatgacttgggtccgccaggctccagggaaggggctggagtgggtctcatttattaaaggtggtggtgatcacacagactacccagactccgtgaagggccgattcaccatctccagagacatttccaagaccacgctgtatctgcaaatgaacagcctgagagccgaggacacggccctatattactgtgtgagaggacattttgcctcatggggccagggaaccctggtcaccgtctcctca

SEQ ID NO: 11512 - DNA, 277 bp, Homo sapiens
  source 1..277: mol_type = other DNA
tgtcggctctggattcatccttagagataaggacataagttgggtccgccaggctccagggaaggggctggagtgggtctcatttattaatgttgctggtagtggcacatactatgcagactccgtgaagggccggttcaccatctccagagatgattccaagaacacactgtttctgcaaatgaatagcctgagggtcgaagacacggccatatattactgtgtgagaggccactttgcctcttggggtcagggaaccctggtcaccgtctcctca

SEQ ID NO: 11513 - DNA, 277 bp, Homo sapiens
  source 1..277: mol_type = other DNA
tgtcggctctggattcatccttagagataaggacataagttgggtccgccaggctccagggaaggggctggagtgggtctcatttattaatgttgctggtagtggcacatactatgcagactccgtgaagggccggttcaccatctccagagatgattccaagaacacactgtttctgcaaatgaatagactgagggtcgaagacacggccatatattactgtgtgagaggccactttgcctcttggggtcagggaaccctggtcaccgtctcctca

SEQ ID NO: 11514 - DNA, 277 bp, Homo sapiens
  source 1..277: mol_type = other DNA
tgtcggctctggattcatccttagagataaggacataagttgggtccgccaggctccagggaaggggctggagtgggtctcatttattaatgttgctggtagtggcacatactatgcagactccgtgaaggaccggttcaccatctccagagatgattccaagaacacactgtttctgcaaatgaatagcctgagggtcgaagacacggccatatattactgtgtgagaggccactttgcctcttggggtcagggaaccctggtcaccgtctcctca

SEQ ID NO: 11515 - DNA, 289 bp, Homo sapiens
  source 1..289: mol_type = other DNA
tgcagcctctggattcaccttcagtgactattggatgggctgggtccggcagtctccagggaaggggctggagtgggtggccaacataaaggaagatggaggtgagatatactacgtggactctgtgaagggccgattcaccatctccagagacaacgccaagaactcactgtatctgcagatgaacaggctgagggtcgaggacacggctgtctattactgtgcgagagtgaggggaaaaggttggttcgacccctggggccagggaaccctggtcaccgtctcctca

SEQ ID NO: 11516 - DNA, 289 bp, Homo sapiens
  source 1..289: mol_type = other DNA
cgcagcctctggattcacctttagtgactattggatgggctgggtccgccaggctccagggaaggggctggagtgggtggccaacatgaaggaagatggaaatgagaaatactatgtggactctgtgaagggccgattcaccatctccagagacaacgccaagaagtcactgaatctgcaaatgaacagcctgagagccgaggacacggccgtgtattattgtgcgagagtcaggggaaagggttggttcgacccctggggcccgggaaccctggtcaccgtctcctca

SEQ ID NO: 11517 - DNA, 289 bp, Homo sapiens
  source 1..289: mol_type = other DNA
cgcagcctctggattcacctttagtgactattggatgggctgggtccgccaggctccagggaaggggctggagtgggtggccaacataaaggaagatggaaatgagaaatactatgtggactctgtgaagggccgattcaccatctccagagacaacgccaagaagtcactgaatctgcaaatgaacagcctgagagccgaggacacggccgtgtattattgtgcgagagtcaggggaaagggttggttcgacccctggggcccgggaaccctggtcaccgtctcctca

SEQ ID NO: 11518 - DNA, 289 bp, Homo sapiens
  source 1..289: mol_type = other DNA
cgcagcctctggattcacctttagtgactattggatgggctgggtccgccaggctccagggaaggggctggagtgggtggccaacataaaggaagatggaaatgagaaatactatgtggactctgtgaagggccgattcaccatctccagagacaacgccaagaagtcactgcatctgcaaatgaacagcctgagagccgaggacacggccgtgtattattgtgcgagagtcaggggaaagggttggttcgacccctggggcccgggaaccctggtcaccgtctcctca

SEQ ID NO: 11519 - DNA, 289 bp, Homo sapiens; identical to SEQ ID NO: 11518
  source 1..289: mol_type = other DNA

SEQ ID NO: 11520 - DNA, 289 bp, Homo sapiens; identical to SEQ ID NO: 11516
  source 1..289: mol_type = other DNA

SEQ ID NO: 11521 - DNA, 277 bp, Homo sapiens
  source 1..277: mol_type = other DNA
tgcagcctctggattcacctttaatacgtattggatgagctgggtccgccaggctccagggaaggggctggagtgggcggccatcatgaaggaagatggaaatgacaaatactatgtggactctgtgaagggccgattcaccatctccagagacaacgccaagaactcactatatctgcaaatgaacagcctgagagccgaggacacgggtgtatattactgtgcgagagggcggggggatctctggggccgtggcaccctggtcattgtctcctca

SEQ ID NO: 11522 - DNA, 277 bp, Homo sapiens
  source 1..277: mol_type = other DNA
tgcagtctctggattcgcctttactacctattggatgagctgggtccgccaggctccagggaaggggctggagtgggtggccatcattaaccaggatggaggtgtcaaatactatctggactctgtaaagggccgagtcaccatctccagagacaacgccaagaactccctatatctgcaaatgaacagtctgagagccgaagacacggctgtatattactgtgcgagagggcggggggatctctggggccgtggcaccctggtcactgtctcctca

SEQ ID NO: 11523 - DNA, 277 bp, Homo sapiens
  source 1..277: mol_type = other DNA
tgcagcctctggattcacctttagtaactattggatgaactgggtccgccaggctccagggaaggggctggagtgggtggccaacataaagcaagatgaaagtgagaaatactatgtggactctgtgaagggccgattcaccatctccagagacaacgccaagaactcactgtatctgcaaatgaacagcctgagagccgaagacacggccgtgtattactgtgcgagaggtcgtggggatctctggggccgtggcaccctggtcactgtctcctca

SEQ ID NO: 11524 - DNA, 286 bp, Homo sapiens
  source 1..286: mol_type = other DNA
tgcaacctctgggttcaccttcaaaaattatatcatgaactgggtccgccaggctccagggaaggggctggagtgggtttcattcattggtagtagtggttttaccatatactacgcagactctgtgaagggccgattcaccatctccagagacaatgccaagaactcactgtatctgcagatgaacagcctgagagacgaggacacggctgtgtattactgtgcgagagatcaaggccgcggccttgactactggggccagggaaccctggtcaccgtctcctca

SEQ ID NO: 11525 - DNA, 295 bp, Homo sapiens
  source 1..295: mol_type = other DNA
tgcagcctctggattcactttcagtgattatagcatgaactgggtccggcaggctccagggaaggggctggagtggctttcatactttagttctgatgctgctggtcctaatttaagattctacgcagactctgtgaagggccgattcaccatctccagagacaatgccaagaactcattgtatctgcaaatgaacggcctgagagacgacgacacggctctttattactgtgcgagagaccaggggcgtggcctggactactggggccacggaaccctggtcaccgtctcctca

SEQ ID NO: 11526 - DNA, 286 bp, Homo sapiens
  source 1..286: mol_type = other DNA
tgtagcctccggattcaccttcagtagccactggatgcactgggtccgccaagctccagggaaggggctggtgtgggtctcatttattgataatgatgggcgtaccacacaaaatgcggacttcgtggagggccgattctccatctccagagacaacgccaagaacacgctctttctacaaatgaacactctgagagccgaggacacggctgtctatttctgtgcaagagggggtctgggagctgtcgactactggggccagggaaccctggtcaccgtctcctca

SEQ ID NO: 11527 - DNA, 286 bp, Homo sapiens
  source 1..286: mol_type = other DNA
tgcagcctctggattcactttcagcaactactggatgcactgggtccgccaagctccagggaaggggctggtatgggtctcatatattaatagtgatgggagtgacacaagctacgcggactccgtgaagggccgattcaccatctccagagacaacgccaagaacacgctgtttttgcaaatgaacagtctgagaaccgaggacacggctgtgtattactgtgcaagaggaggactgggagctgttgactactggggccagggaaccctggccaccgtctcctca

SEQ ID NO: 11528 - DNA, 289 bp, Homo sapiens
  source 1..289: mol_type = other DNA
tgcagcctctggattcaccttcagtcgttatgaaatgaactgggtccgccaggctccagggaaggggctggagtggatttcatacattattggtagtggtactaccatatactacgcagactctgtgaagggccgattcaccatctccagagacaacgccaagaactcactgtatctgcaaatgaacagcctgagagccgaggacacggctgtttattactgtgcgagagacctctcgtctggctggttcgacccctggggccagggaaccctggtcaccgtctcctca

SEQ ID NO: 11529 - DNA, 289 bp, Homo sapiens
  source 1..289: mol_type = other DNA
tgcagcctctggattcaccttcagtacttatgaaatgaactgggtccgccaggctccagggaaggggctggagtgggtttcatacattagtagtagtggcagtaccatatactacgcagactctgtgaagggccgattcaccatctccagagacaacgccaagaactcactgtatctgcaaatgaacagcctgagagccgaggacacggctgtttattactgtgcgagagatctctcaagtggctggttcgacccctggggccagggaaccctggtcaccgtctcctca

SEQ ID NO: 11530 - DNA, 274 bp, Homo sapiens
  source 1..274: mol_type = other DNA
tgcagcctctggattcagttttagtagtttttggatgagctgggtccgccaggctccagggaaggggccggagtgggtggccatcattaaccaagatggaagtaagaagtcttatgtggactctgtgaagggccgattcaccatctccagagacaacgccaagaactcactgtttctgcaagtgaacagcctgagagtcgacgacacggctgtgtattactgtgtgaggggagtcgatctctggggccgtggcaccctggtcactgtctcctca

SEQ ID NO: 11531 - DNA, 274 bp, Homo sapiens
  source 1..274: mol_type = other DNA
tgcaacctctggattcacctttagtagctattggatgaactgggtccgccaggctccagggaaggggctggagtgggtggcctacataaagctggacggaagtgagaaatactatgtggactctgtgaagggccgattcaccatatccagagacaacgccaagaactcactgtatctgcaaatgaacagcctgagagccgaggacacggctgtgtattactgtgtgagaggggtcgatctctggggccgtggcaccctggtcactgtctcctca

SEQ ID NO: 11532 - DNA, 286 bp, Homo sapiens
  source 1..286: mol_type = other DNA
tgcagcctctggattcaccttcagtaattacgggatgcgctgggtccgccaagctccagggaaggggctggtgtgggtctcacgtattaagggtgatgggaatagcacaacctacgcggactccgtgaagggccgattcaccatctccagagacaacgccaaaaacacactctatctgcaaatgagcagtctgagagccgaggacacggctgtgtattattgtgcaagaggtcgggattactcgtttgactattggggccagggaaccctggtcaccgtctcctca

SEQ ID NO: 11533 - DNA, 286 bp, Homo sapiens
  source 1..286: mol_type = other DNA
tgtagtctctggattcattctcagtggctccgcgatgcactgggtccgccaagctccaggggaggggctggtatgggtctcatttagtaatagtgatgggagtatcacaaactacgcggcctccgtgaggggccgattcaccatctccagagacgacgctaagaacacgctgtatctgcaaatgaacagtctgagagtcgaggacacggctgtgtattactgtgcaagaggaagggactattcgtttgactactggggccagggaaccctggtcaccgtctcctca

SEQ ID NO: 11534 - DNA, 280 bp, Homo sapiens
  source 1..280: mol_type = other DNA
tgcagcctctggattcacctttagcacctatggcatgtactgggtccgccaggctccagggaaggggctggagtgggtctcagctattagtggtagtggtagtgacacatactacgcagactccgtgaagggccggttcaccatctccagagacaattccagggacacgctgtatctggagatgaacagcctgagagccgaggacacggccgtatattactgtgcgaaaagtggcttcatggacgtctggggccaagggaccacggtcaccgtctcctca

SEQ ID NO: 11535 - DNA, 280 bp, Homo sapiens
  source 1..280: mol_type = other DNA
tgcaggctctggaatcacctttagcagctatgccatgaactgggtccgccaggctccagggaaggggctggagtgggtctctggtattagtgctacgcgtgacaggacatactacgcagactccgtgaagggccgattcaccatctccagagacacttccaagaacacactgtatctgcaaatgaacagcctgagagccgaggacacggccgtatattactgtgcgaaaagtggctttatggacgtctggggccaagggaccacggtcaccgtctcctca

SEQ ID NO: 11536 - DNA, 304 bp, Homo sapiens
  source 1..304: mol_type = other DNA
cgcagcctctggattcaccctcagtgaccactacatggactgggtccgccaggctccagggaaggggctggagtgggttggccgtcttagaaacaaagctaacagacaaaccacagaatacgccgcgtctgtgagaggcagattcaccgtctcaagagatgattcaaggaactcactgtatctgcaaatgaacagcctgaaaggcgaagacacggccgtctattattgtgctagagtgcgtgatagcgatggctggttcccatttgactactggggccagggaatcctggtcaccgtctcctca

SEQ ID NO: 11537 - DNA, 304 bp, Homo sapiens
  source 1..304: mol_type = other DNA
tgcagcctctgggttcacactcagtgaccactacatggactgggtccgccaggctccagggaaggggctggagtgggttggccgtactagaaacaaagctaacagtcacaccacagaatacgccgcgtctgtgaaaggcagattcatcgtctcaagagatgattcaaggaactcactgtatctacaaatgagcagcctgaaaaccgaggacacggccgtctattactgtgctagagtgcgtgatagcgacggctggttcccatttgactactggggccagggagtgttggtcaccgtctcctca

SEQ ID NO: 11538 - DNA, 304 bp, Homo sapiens
  source 1..304: mol_type = other DNA
tgcagcctctggattcacctccagagaccactacatggactgggtccgtcaggctccagggaaggggctggagtgggttggccgtagcagaaacaaagctaatggttacaccacagaatatgccgcgtctgtgaaaggcagattcaccatctcaagagatgattcaaagaactcactgtatctgcaaatgagcagcctgaaaaccgaagacacggccgtgtattattgcgctagagtaagggatagcgatggctggttcccctttgactactggggccagggaaccctggtcaccgtctcctca

SEQ ID NO: 11539 - DNA, 304 bp, Homo sapiens
  source 1..304: mol_type = other DNA
tgcagcctctggattcacctccagtgaccactacatggactgggtccgacagtctccagggaaggggctggagtgggtcggccgtagcagaaataaacttaatgactacaccacagaatatgccgcgtctgtgaagggcagattcaccatctcaagagatgattcaaagaactcactgaatctgcagatgaacagtttgagaatcgaagacacggccgtgtattattgtgctagagtaagggattccgatggctggtttccctttgattactggggccagggaaccttggtcaccgtctcctca

SEQ ID NO: 11540 - DNA, 318 bp, Homo sapiens
  source 1..318: mol_type = other DNA
acacagaccctcacgctgacctgcaccttctctgggttctcactcagcactaatggagtggctgtgggctggatccgtcagcccccaggaaaggccctggagtggcttgcacttatttattgggatgatgataagcgctacagtccatctttgaagaacagactcaccatcaccaaggacacctccagaaaccaggtggtccttacaatgaccaacatggaccctgtggacacagccacatattattgtgcacacaaaagttcggccggcgggtggttcgacccctggggccagggaaccctggtcaccgtctcctca

SEQ ID NO: 11541 - DNA, 318 bp, Homo sapiens
  source 1..318: mol_type = other DNA
acacagaccctcacgctgacctgcaccttctctgggttctcactcagcactagtggagtggctgtgggctggatccgtcagcccccaggaaaggccctggagtggcttgcactcatttattgggatgatgataagcgctacagcccatctctgaagagcaggctcaccatcaccaaggacacctccaaaaaccaggtggtccttacattgaccaacatggaccctgtggacacagccacatatttctgtgcacacaaaagcagtgccgggggctggttcgacccctggggccagggaaccctggtcaccgtctcctca

SEQ ID NO: 11542 - DNA, 301 bp, Homo sapiens
  source 1..301: mol_type = other DNA
tgcagcctctggattcaccttcagcacctctcctatgcactgggtccgccgggctcctggcaaggggctggagtgggtggcagttatttcacctgatgaaaatactaaagtttatgtagactccgtgaagggccgattcaccatctccagagacaattccaacaacgccttgtatctgcaaatgaacagccttagagttgaggacacggctgtgtattattgtgcgagagaggggcatagcagcggccgggcgggggcttttgatgtctggggccaagggacaatggtcaccgtcgcttca

SEQ ID NO: 11543 - DNA, 301 bp, Homo sapiens
  source 1..301: mol_type = other DNA
tgaagcctctggattcaccttcagaaattatgtcatgcactgggtccgccaggctccaggcaaggggctggaatgggtggcactctttgcatctgctgacacaagtacacagtacgcagactccgtgaagggccgcttcaccatctccagagacaattcgaggaacacggtatttctggaaattaacagtctgacaactgaggacgcggctatttatttctgtgcgagagaaggccatagcagtggccgggctggggcttttgatgtctggggccgagggacagtggtcaccgtctcctca

SEQ ID NO: 11544 - DNA, 313 bp, Homo sapiens
  source 1..313: mol_type = other DNA
tgcagcctctggattcaccttcagtagttatgaaatgaactgggtccgccaggctccagggaaggggctggagtgggtttcatacattagtaattatggtaataccatatactacgcagactctgtgaagggccgattcaccatctccagagacaacgtcaagaactcgctgtatctgcaaatgaacagcctgagagccgaggacacggctatttattactgtgcgaggtcctattgtagtggtggtagctgctatacccactactacggtatggacgtctggggccaagggaccacggtcaccgtctcctca

SEQ ID NO: 11545 - DNA, 313 bp, Homo sapiens
  source 1..313: mol_type = other DNA
tgtagcctctggattcaccttcacgaattatgaaatgaattgggtccgccagactccagggaaggggctggagtgggtttcatacatcagtagcggtggtggtagcacatactacgtagtctctgtgaagggccgattcaccatctccagagacaacgccaagaactcaacgtatctgcaaatgaacagcctgagagccgaggacacggctgtttattactgtgcgaggagttattgtagtggtggtagctgctacacccactactacggtatggacgtctggggccaagggaccacggtcaccgtctcctca

SEQ ID NO: 11546 - DNA, 313 bp, Homo sapiens
  source 1..313: mol_type = other DNA
tgtagcctctgaattcaccttcagtaattatgaaatgaactgggtccgccaggctccagggaaggggctggagtgggtttcatacattagtagtggtggtgggaccaaatactacgcagactctgtgaagggccgattcaccatctccagagacaacgccgagaactcattgtatctgcagatgaacagcctgagagccgaagacacggctgtttattactgtgcgaggagttattgtagtggtggtagctgctacacccactactacggtatggacgtctggggccaagggaccacggtcaccgtctcctca

SEQ ID NO: 11547 - DNA, 313 bp, Homo sapiens
  source 1..313: mol_type = other DNA
tgtagcctccggattcaccttcacaagttatgaaatgaattgggtccgccaggctccagggaaggggctggagtgggtttcatacatcagtagcggtggtggtaggacatactacgtagactctgtgaagggccgattcaccatctccagagacaacgccaagaactcaacgtatctgcaaatgaacagcctgagagccgaggacacggctgtttattactgtgcgaggagttattgtagtggtggtagttgctacacccactactacggtatggacgtctggggccaagggaccacggtcaccgtctcctca

SEQ ID NO: 11548 - DNA, 289 bp, Homo sapiens
  source 1..289: mol_type = other DNA
tgcggcctctggattcacctttagtacctataccataaactgggtccgccaggctccagggaaggggctggagtgggtctcattgatcagtagtagtagtgatttcatacactacgctgactcagtgaagggccgattcaccatctccagagacaacgccaagaagtcactgtatctgcaaatgaacagcctgagagccgacgacacggctgtttattactgtgcgagagattactacaagggtgcttttgatatttggggccacgggacaatggtcaccgtctcttca

SEQ ID NO: 11549 - DNA, 289 bp, Homo sapiens
  source 1..289: mol_type = other DNA
tgcagcctctggattcaccttcagtacctatagcatacactgggtccgccaggctccagggaaggggctggagtgggtctcatgcattaatagtcgtagtgattacatatactacgcagactcagtgaagggccgattcaccgtctccagagacaacgccaagaactcactgtatctgcaaatgaacagcctgagagccgaggacacggctgtctattactgtgcgagagactattacaaaggagcttttgatatctggggccaagggacaatggtcaccgtctcttca

SEQ ID NO: 11550 - DNA, 287 bp, Homo sapiens
  source 1..287: mol_type = other DNA
cagcctctggattcaccttcagtacctatagcatacactgggtccgccaggctccagggaaggggctggagtgggtctcatgcattaatagtcgtagtgattacatatactacgcagactcagtgaagggccgattcaccgtctccagagacaacgccaagaactcactgtatctgcaaatgaacagcctgagagccgaggacacggctgtctattactgtgcgagagactattacaaaggagcttttgatatctggggccaagggacaatggtcaccgtctcttca

SEQ ID NO: 11551 - DNA, 277 bp, Homo sapiens
  source 1..277: mol_type = other DNA
tgcagcctctggatttacctttccaagtcatgacatgacttgggtccgccaggctccagggaaggggctggagtgggtctcatttattaaaggtggtggtgatctcacagactacccagactccgtgaagggccggttcaccatctccagagacatttccaagaacacgctgtatctgcaaatgaacagcctgagagccgaggacacggccctgtattactgtgtgaaaggacattttgcctcatggggccagggaaccctggtcaccgtctcctca

SEQ ID NO: 11552 - DNA, 277 bp, Homo sapiens
  source 1..277: mol_type = other DNA
tgaagcctctggattcactcttagtacctatgacatgagctgggtccgccagtctccagggaagggcctggagtggatctcgttcattagggggaatcttggtggcacatactacgcagactccgtgaagggccggttcaccatctccagagacaacgcgaagaacgcgctgtatttgcaaatgagcggcctgagagccgaggacacggccttgtattactgtgtgaaggggcattttgccagctggggccagggaaccctggtcaccgtctcctca

SEQ ID NO: 11553 - DNA, 292 bp, Homo sapiens
  source 1..292: mol_type = other DNA
tgcagcctctggattcaccttcagtagttatgaaatgaactgggtccgccaggctccgggaaaggggctggagtgggtttcatacattaggggtgattctagaagcatacactacgcagactctgtgaagggccgattcaccatctccagagacaacgccaagaactcactgtatctgcaaatgaacagcctgagagccgaggacacggctgtttattactgtgcgagagatctataccacttctatggtttggacgtctggggccaagggaccacggtcaccgtctcctca

SEQ ID NO: 11554 - DNA, 292 bp, Homo sapiens
  source 1..292: mol_type = other DNA
tgaagcctctggattcattctcagtaattttgagatgaactgggtccgccaggctccagggaaggggctggagtgggtgtcgtacattgctattaatggtaatgatagaaggtacgccgactctgtgaggggccgattctccatctccagagacagcgccaggaactcactgtatctgcaaatgaacagcctgagagtcgacgacacggctatctattactgtgcgagagacctgtatcacttttacggattggacgtctggggccaagggaccactgtcaccgtctcctca

SEQ ID NO: 11555 - DNA, 274 bp, Homo sapiens
  source 1..274: mol_type = other DNA
tgcagcctctggattcaccttcagtaactactggatgcactgggtccgccaagctccagggaagggcctggtgtgggtctcagttattaaagacgatggcagtagtacagattacgcggactccgtgaagggccgattcaccatctccagagacaacgccaagaacatgctatatctgcagatgaacagtctgagagtcgacgacacggctgtgtattactgtctacgagacctttttaggggggcccagggaaccgtggtcaccgtctcctca

SEQ ID NO: 11556 - DNA, 274 bp, Homo sapiens
  source 1..274: mol_type = other DNA
tgcagcctctggattcaccttcagtacctactggatgttctgggtccgccaagctccagggaaggagctggagtgggtcgcacgtattgacaatgagggaagtttcacaagctacgcggactccgtgacgggccgattcaccatctccagagacaacgccaagagcacgctgtatctgcaaatgaacagtctgagagccgaggacacggctgtatattactgtttaagagacctctttcggagggcccagggagccctggtcaccgtctcctca

SEQ ID NO: 11557 - DNA, 283 bp, Homo sapiens
  source 1..283: mol_type = other DNA
tgcagcctctggattcacctttaggaactattggatgtgctgggtccgccaggctccaggggaggggctggagtgggtggccaacataaagcaagatggaagtgagaaatactatgtggactctgtgaagggccgattcaccatctccagagacaacgccaagaactcactgtatctgcaaatgaacagcctgagagccgaagacacggctatttattactgtgcgacagggggtggttatcccgactactggggccagggaaccctggtcaccgtctcctca

SEQ ID NO: 11558 - DNA, 283 bp, Homo sapiens
  source 1..283: mol_type = other DNA
tgtagtctctggattcacctttagaagacactggatgacctgggtccgccaggctccggggaaggggctggagtgggtggccaacataaaacaagatggaagtgagaaatattatgcggactctgtgaagggccgattcaccatctccagagacaacgcgaggaactctctgtttctccaaacgaacagcctgagagtcgacgacacggctgtttattactgtgcgacggggggcggctaccctgactactggggccagggaaccctggtcaccgtctcctca

SEQ ID NO: 11559 - DNA, 283 bp, Homo sapiens
  source 1..283: mol_type = other DNA
cactgtctctggtggctccatcagcagtggtagttcctactggagctggatccggcagcccgccgggaagggactggagtggattgggcgtatctataccagtgggagcaccagctacaacccctccctcacgagtcgagtcaccatatcaatagacacgtccaagaaccagttctccctgaagctcagctctgtgaccgccgcagacacggccgtctattactgtgcgagagggggctactttgactactggggccagggaaccctggtcaccgtctcctca

SEQ ID NO: 11560 - DNA, 283 bp, Homo sapiens
  source 1..283: mol_type = other DNA
cactgtctctggtggctccatcagcagtggtagttactactggagctggatccggcagcccgccgggaagggactggagtggattgggcgtatctataccagtgggaacaccaactacaacccctccctcgagagtcgagtcaccatatcagtagacacgtccaagagccagttctccctgaagctgagctctgtgaccgccgcagacacggccgtgtattactgtgcgagagggggatactttgactactggggccagggaaccctggtcaccgtctcctca

SEQ ID NO: 11561 - DNA, 283 bp, Homo sapiens
  source 1..283: mol_type = other DNA
tgcaggctctggattcacctttagtagttattggatgacctgggtccgccaggctccagggaaggggctggagtgggtggcctacataaaggaagatggaagtgagaaataccatctggactctgtgaagggccgattcaccatctccagagacaacgccaagaactcagtgtatctgcaaatgaacaccctgagaggcgaggacacggctgtgtattactgtgcgaggggagtctaccactttgacttttggggccagggaaccctggtcaccgtctcctca

SEQ ID NO: 11562 - DNA, 283 bp, Homo sapiens
  source 1..283: mol_type = other DNA
tgcagcctctggattcacctttagtagcttttggatgagctgggtccgcctggctccagggaaggggctggagtgggtggccaacataaaggaagatggaagtgagatatactatgtggactctgtgaagggccgattcaccatctccagagacaacgccaagaactcattgtttctgcaaatgaacagcctgagagccgaggacacggccgtttattactgtgcgagaggggtctaccactttgacttctggggccagggaaccctggtcaccgtctcctca

SEQ ID NO: 11563 - DNA, 280 bp, Homo sapiens
  source 1..280: mol_type = other DNA
tgcagcctctggatttaccttcagtagctactggatgcactgggtccgccaagctccagggaaggggctggtgtgggtctcacgtattaatagtgatgggagtactataggctacgcggactccgtgaagggccgcttcaccatctccagagacaacaccaagaacacgctgtatgtgcaaatgaacagtctgagagccgaggacacggctgtgtattactgtgtaagagggaacattatggacgtctggggccaagggaccacggtcaccgttttctca

SEQ ID NO: 11564 - DNA, 280 bp, Homo sapiens
  source 1..280: mol_type = other DNA
tgcagcctctggattcaccttcagtagctactggatgcactgggtccgccgagctccagggaaggggctggtgtgggtctcacggattaatagtgatgggactaatacaacctacgcggactccgtgaagggccgattcaccatttccagagacaacgccaagaacagactgtatctgcaaatgaacagtctgagagccgaggacacggctgtgtattactgtgtaagaggtaacattatggacgtctggggccaaggggccacggtcaccgtctcctca

SEQ ID NO: 11565 - DNA, 295 bp, Homo sapiens
  source 1..295: mol_type = other DNA
tgcagcctctggattcaccttcagcagttatagcatgaactgggtccgccaggctccagggaaggggctggagtgggtctcatccattgatagcacaactatttacatatactacgcagactcagtgaagggccgattcaccacctccagagacaacgccaagaactcagtgtctctgcaaatgggcagcctgagagccgaggacacggctgtatattactgtgcgagagatcgcggagatggccacagcccacctgactactggggccagggaaccctggtcaccgtctcctca

SEQ ID NO: 11566 - DNA, 295 bp, Homo sapiens
  source 1..295: mol_type = other DNA
tgcagcctctggattcaccttcagtagttatagcatgaactgggtccgccaggctccagggaaggggctgcagtgggtctcatccattgatactagtagtaattacatatattacgtagactcagtgaagggccgattcaccacctccagaaacaacgccaagaagtcggtggatctgcaaatgaacagcctgacagccgaggacacggctgtgtattactgtgcgagagatcgcggagatggccacagtcccccggactactggggccagggaaccctggtcaccgtctcctca

SEQ ID NO: 11567 - DNA, 277 bp, Homo sapiens
  source 1..277: mol_type = other DNA
cactgtctctggtggctccatcagtccttactcctggagctggatccggcagcccccagggaagggactggagtggattggctgtatctcttatactgggaacaccaattacaacccctccctcaagagtcgagtcaccatatcagtagacacgtccaagaacgagttctccctgaagctgcgctctgtgaccgctgcggacacggccgtctattactgtgcgaggagaatttacatggacgtctggggcaaaggggccacggtcaccgtctcctca

SEQ ID NO: 11568 - DNA, 277 bp, Homo sapiens
  source 1..277: mol_type = other DNA
ctcggtctctggtggctccatgactaattacaactggaactggatccggcagctcccaggggagggacttgagtgggttgggtatatctctgacagtgggaacaccaactacagtccctccctcaagagtcgagtcaccatgtcactagacagatccaagaacgagttttccctgaagctgaactctgtgaccgctgcggacacggccgtgtattactgtgcgagacgaatatacatggacgtctggggcagagggaccgcggtcaccgtctcctca

SEQ ID NO: 11569 - DNA, 277 bp, Homo sapiens
  source 1..277: mol_type = other DNA
cactgtctctggtggctccatcagtggttactactggaattggatccggcagcccccagggaagggactggagtggattgggaatatctctgccagtgggagcaccacctacaacccctccctcaagagtcgagtcaccatgtcagtagacaggtccaagaacgagctctccctgaagctgacgtctgtgaccgctgcggacacggccgtctattactgtgcgagaaggatctacatggacgtctggggcaaagggaccacggtcaccgtctcctca

SEQ ID NO: 11570 - DNA, 288 bp, Homo sapiens
  source 1..288: mol_type = other DNA
aagggttctggatacaggtttaccagctactggatcgcctgggtgcgccagatgcccgggaaaggcctggagtggatggggatcatctatcctggtgactctgataccaaatacagcccgtccttccaaggccaggtcaccatctcagccgacaagtccatcagcaccgcctacctgcagtggagcagcctgaaggcctcagacaccgccatgtattactgtgcgagacagggtggtacgggggcttttgatatctggggccaagggacaatggtcaccgtctcttca

SEQ ID NO: 11571 - DNA, 288 bp, Homo sapiens
  source 1..288: mol_type = other DNA
aagggttctggatacaggtttaccagctactggatcgcctgggtgcgccagatgcccgggaaaggcccggagtggatggggatcatctatcctggtgactctgatagcagatacagcccgtccttccaaggccaggtcaccatctcagccgacaagtccatcagcaccgcccacctgcagtggagcagcctgaaggcctcggacaccgccatgtattactgtgcgagacaggggggtaccggtgcttttgatatctggggccaagggacaatggtcaccgtctcttca

SEQ ID NO: 11572 - DNA, 277 bp, Homo sapiens
  source 1..277: mol_type = other DNA
tgcagcctctggattcacctttagtggtaattggatgacctgggtccgccaggctccagggaaggggctggagtgggtggccaacataaagcaagatggaagtgagaaaaactatgtggactctgtgaagggccgattcaccatctccagagacaacggcaagagctcactgtatctgcaaatgaacagcctgagagacgacgacacggctgtgtatttctgtgcgagaggtcggggcatcagctggggccagggaaccctggtcaccgtctcctca

SEQ ID NO: 11573 - DNA, 277 bp, Homo sapiens
  source 1..277: mol_type = other DNA
tgcagactctggattcacctttagtagctattggatgacctgggtccgccaggctccagggaaggggctggagtgggtggccaacataaagcaggatggaagagagaaaaactatgtggactctgtgaagggccgcttcaccatctccagagacaacgccaagaactcactgtatctgcaaatgaacagcctgagagccgaggacacggctgtgtattactgtgcgagaggacgcggcatcagctggggccagggaaccctggtcaccgtctcctca

SEQ ID NO: 11574 - DNA, 283 bp, Homo sapiens
  source 1..283: mol_type = other DNA
ttcagcctctggattctccttcagtagctactgcatgcactgggtccgccaagctccagggaaggggccattgtgggtcgcacgtatttgtgacgctgcgactagtccagactacgcggactctgtgaagggccgattcaccatctccagagacaatgccaagaataccgtgtatctccaaatggacagtctgagagccgaagacacggctgtttactactgtgcaagaattgattatcccgacgattgctggggccagggaaccctggtcaccgtctcctca

SEQ ID NO: 11575 - DNA, 283 bp, Homo sapiens
  source 1..283: mol_type = other DNA
tgcagcctctggattcaccttcagtagttattggatgcactggatccgccaagctccagggaaggggctagtgtgggtctcacgtattgatggtgctgggactagtacaaactacgcggactccgtgaaggcccgattcaccgtctccagagacaacgccaagaatacgctgtatctgcaaatggacagcctgagagccgaggacacggctgtatattactgtgcaagaatagattatccagatgactgctggggccagggaaccctggtcaccgtctcctca

SEQ ID NO: 11576 - DNA, 282 bp, Homo sapiens
  source 1..282: mol_type = other DNA
gcttctggatacagcttcactacctatgctatacactgggtgtgccaggcccccggacaaaggcttgagtggataggatacatcaacgctggcaatggtaacacaaaatattcacagaaattccaaaacagagtcaccattaccagagacacatccgcgagcacagtcttcatggaactgagcagcctgagatctgaagacacggctctgtacttctgtgcgagagggttggcgggggcctttgactactggggccagggtaccctggtcaccgtctcctca

SEQ ID NO: 11577 - DNA, 282 bp, Homo sapiens
  source 1..282: mol_type = other DNA
gcttctggatacaccttcactagttatgttatgcattgggtgcgccaggcccccggacaaaggcttgagtggatgggaaggatccacgctggcaatagtaacacaaaatactcacagatgttccagggcagagtcaccattaccagggacacatccgcgagcacagcctacatggagctgagcagcctgagatctgaagacgcggctgtctattattgtgcgagaggactagctggtgcgtttgactactggggccagggaaccctggtcgccgtctcctca

SEQ ID NO: 11578 - DNA, 280 bp, Homo sapiens
  source 1..280: mol_type = other DNA
tgtagcctctggattcaccttcaataattatgaaatgaactgggtccgccaggctccagggaaggggctggagtgggtttcatccattactgttagcggtgatagcacattctacgcagactctgttaggagccggttcaccatctccagagacaacgccaggaattctgcctttctgcaaatgaacagcctgagcgccgacgacacggctgtttattattgtgtgagaggtagtgctggtagctggtggggccggggaagcctggtcaccgtctcctca

SEQ ID NO: 11579 - DNA, 280 bp, Homo sapiens
  source 1..280: mol_type = other DNA
tgcagcctctggattcatcttcagtagttatgaaataaattgggtccgccaggctccagggaaggggctggagtgggtctcacacattagtagtagtggtaacagcatatactacgcagactctgtgaagggccgattcaccatctccagagacaacgccaagaactcactgtatctacaaatgaacagcctgagagccgaggacacggctgtttattactgtgtgagaggcagtgctggtagctggtggggccagggaaccctggtcaccgtctcctca

SEQ ID NO: 11580 - DNA, 277 bp, Homo sapiens
  source 1..277: mol_type = other DNA
cagtgtctctggtgcctccgtcagcagttactactggagctggatccgccagcccccagggaagggactggagtggattggttatgcctataacagtgggatcaccaactacaacccctccctcaagagtcgagtcaccatatcaatcgacacgtccagaaaccagttctccctgaagctggcctctgtgaccgctgcggacacggccatgtattactgtgcgagaggtattttatttgactactggggccagggaaccctggtcaccgtctcctca

SEQ ID NO: 11581 - DNA, 277 bp, Homo sapiens
  source 1..277: mol_type = other DNA
cactgtctctgatggctccttcagtagttactactggagctggatccgccagcccccggggaagcgactggagtggattggggatatctattacagtgggagcaccaactacaacccctccctcaagagtcgagtcaccatatcagtagacacgtccaagaaccagttctccctgaagctgagctctgtgaccgcagcggacacggccgtgtattactgtgcgagaggcatcctctttgactactggggccagggaaccctggtcaccgtctcctca

SEQ ID NO: 11582 - DNA, 276 bp, Homo sapiens
  source 1..276: mol_type = other DNA
gcttctggttacacctttacgacttatggtatcagctgggtgcgacaggcccctggacaagggcttgagtggatgggatggatcagcgctaacaatggtaacacaaactatgcacagaagttccagggcagagtcaccatgaccacagacacatccacgagcacagcctacatggagctgaggagcctgttatctgacgacacggccgtgtattactgtgcgagacgtaattatggggactactggggccagggaaccctggtcaccgtctcctca

SEQ ID NO: 11583 - DNA, 276 bp, Homo sapiens
  source 1..276: mol_type = other DNA
gcttctggttacgcctttaccagctattttatcacctgggtgcgacaggcccctggacaaggacctgagtggatggggtggatcagcccttacaatggtaacacaaagtatgcacagaaactccagggcagagtcaccatgaccacaaacacatccacgaccacagcctacatggagctggggagcctgacatctgacgacacggccgtgtattactgtgcgagacggaactacggtgactactggggccaggggaccctggtcaccgtctcctca

SEQ ID NO: 11584 - DNA, 292 bp, Homo sapiens
  source 1..292: mol_type = other DNA
tgcagcctctggattcaccttcagtgactataccatgaactgggtccgccaggctccagggaaggggctggagtgggtctcatccattagtagtggtagtgttgtctacaaatattacgcagactcagtgaagggccgattcaccatctccagagacaacgccaagaactcactggatctgcaaatggaaagcctgcgagccgaggacacggctgtttattactgtgcgagagatttgggctggtatggtcttgactactggggccacggaagcctggtcaccgtctcgtca

SEQ ID NO: 11585 - DNA, 292 bp, Homo sapiens
  source 1..292: mol_type = other DNA
tgcagcctctggattcccgttcagcagttatagtatgaattgggtccgccaggctccagggaaggggctggagtgggtctcatccattagtagcagtggtagtagtttcacatactatgcagactcagtgaggggccggttcaccatctccagagacgacgccacgaactcactgtatttgcaaatgaacagcctgagagccgaggacacggctgtgtatcactgtgcgagagatctgggctggtatggtcttgattattggggccagggaaccctggtcaccgtctcctca

SEQ ID NO: 11586 - DNA, 295 bp, Homo sapiens
  source 1..295: mol_type = other DNA
tgcagcctctggattcacctttagcagctatgccatgagctgggtccgccaggctccagggaaggggctggagtgggtctcaactgttagtagtagtggtggtaacacatactacgcagactccgtgaagggccggttcaccatctccagagacaattccaagaacacactgtatctgcaaatgaacagcctgagagccgacgacacggccgtatattactgtgcgaaagatctacgggacctactccaatacttccagcactggggccagggcaccctcgtcaccgtcgcctca

SEQ ID NO: 11587 - DNA, 295 bp, Homo sapiens
  source 1..295: mol_type = other DNA
tgcagcctctcaattcacctttagcacctatgccatgagctgggtccgccaggctccagggaaggggctggagtgggtctcaagtgttagtggtggtgctgataacacatactacgcagactccgtgaagggccggttcaccatctccagagacaattccaagaacacgctgtatctgcaaatgaacagcctgagagtcgaggacacggccgtatattactgtgcgaaagatttgagggatctactacaatacttccaacactggggccagggcaccctggtcaccgtctcctca

SEQ ID NO: 11588 - DNA, 276 bp, Homo sapiens
  source 1..276: mol_type = other DNA
acttctggatacaccttcaccagttatgatatcaactgggtgcgacaggccacgggacaagggcttgagtgggtgggatggatgaatcctaacaatggtaacgcaggctttgcacagaagttccagggcagagtcataatgactagggacacctccataagcacagcctacatggaggtgagcagcctgagatctgacgacacgggcgtgtattactgtgcgagatcggcgttactagactcctggggccagggaaccctggtcaccgtctcctca

SEQ ID NO: 11589 - DNA, 276 bp, Homo sapiens
  source 1..276: mol_type = other DNA
gcttctggatacaccttcagcaactctgatatcaactgggtgcgacaggccactggacaagggcttgagtggatgggatggatgaatcctaacaataataacgcaggctttgcacagaagttccagggcagagtcaccatgaccaggaacacctccataagcacagcctatctggagctgagcagcctgagatttgaggacacggccgtttattactgtgcgagatccgctctgcttgactcctggggccagggaaccctggtcaccgtctcctca

SEQ ID NO: 11590 - DNA, 283 bp, Homo sapiens
  source 1..283: mol_type = other DNA
tgcagcctctggattcacctttactacctattggatgacctgggtccgccaggctccagggaaggggctggagtgggtggccaacataaaccaagatggaagtgagaaatactatgtggactctgtgaacggccgattcaccatctccagagacaacgcccagaactcactgtatctgcaaatgaacagcctgagagccgaagacacggctctgtattactgcgcgagaggccgatcctgggttgactcctggggccagggaaccctggtcaccgtctcctca

SEQ ID NO: 11591 - DNA, 283 bp, Homo sapiens
  source 1..283: mol_type = other DNA
tgcagcctctggattcacctttagtgcctattggatgatctgggtccgccaggttccagggaaggggctggagtgggtggccgacataaaggaagatggaagtgagaaaaactatatggactctgtgaagggccgattcaccatctccagagacaacaccaagaactcactgtatctgcaaatgaacagccttagaggcgaggacacggccgtgtattactgtgcgagaggccgcagttgggttgactcctggggcccgggaaccctggtcaccgtctcctca

SEQ ID NO: 11592 - DNA, 298 bp, Homo sapiens
  source 1..298: mol_type = other DNA
tgcaacctctggattcaccttcagcaagtatcctatgcactgggtccgtcaggctccaggcaaggggctggagtgggtggcagttataggatatgatggaagacttagattttacgcagactccgtgaagggccgattcactatctccagagacgattccaggaacattctgtatttgcaaatgaacagcctgagaactgaagacacggctgtgtatttctgtgcgagagacatgtttcagggagtccctgattactttgacttatggggccagggaaccctggtcgccgtctcctca

SEQ ID NO: 11593 - DNA, 298 bp, Homo sapiens
  source 1..298: mol_type = other DNA
tgcagcctctggattcaccttcagcaactttgccatgcactgggtccgccaggctccaggcaaggggctggagtgggtggcagttatcggatttgatgggcgtcttaagttctactcaggctccgtggggggccgattcaccatctccagagacgattccaagaacatgctatttttgcaaatggacaacctgagaagtgaagacacggctatgtattactgtgcgagagatatgtttcagggagttcctgactactttgacttgtggggccgggggaccctggtctccgtctccccg

SEQ ID NO: 11594 - DNA, 298 bp, Homo sapiens
  source 1..298: mol_type = other DNA
tgcaacctctggattcaccttcagcaagtatcctatgcactgggtccgtcaggctccaggcaaggggctggagtgggtggcagttataggatatgatggaagacttagattttacgcagactccgtgaagggccgattcactatctccagagacgattccaggaacattctgtatttgcaaatgaacagcctgagaactgaagacacggctgtgtgtttctgtgcgagagacatgtttcagggagtccctgattactttgacttatggggccagggaaccctggtcgccgtctcctca

SEQ ID NO: 11595 - DNA, 295 bp, Homo sapiens
  source 1..295: mol_type = other DNA
tgcagcctctggattcacctttaccgcctatgccatgagctgggtccgccaggctccagggatggggctggagtgggtcgcaactcttagtacttctggagatgccgcagtctacgcagactccgtaaagggccggttcaccatctccagagacgtttccaaatacacactgtctctgcaaatgaacagcctgagagtcgaggacacggccctatattactgtgcgaaacgggggggcgatggctggggagcctttgactactggggccagggaaccctggtcaccgtctcctca

SEQ ID NO: 11596 - DNA, 295 bp, Homo sapiens
  source 1..295: mol_type = other DNA
tgtagcctctggattcaggtttagcatctatgccatgaactgggtccgccaggctccagggaaggggctggaatgggtctcaaccattggaggtacttctactaacacattctatgcagactccgtgaagggccggtttaccatttccagagacgattccaagaacacagtgtatctgcaaatgaacagcctgaatgccgaagacacggccctatattactgtgcgaaacgcggcggtgacgggtggggggcctttgactactggggccagggaaccctggtcaccgtctcctca

SEQ ID NO: 11597 - DNA, 295 bp, Homo sapiens
  source 1..295: mol_type = other DNA
cactgtctctggtggctccatcagcagtagtcgttacttctggggctggatccgccagcccccagggaaggggctggagtggattgggagtatttcttatagtgggggcaccgactacaacccgtccctcaggagtcgagtcaccatatccgtagacaagtccaagaaccaattctccctgaaggtgaactctgtgaccgccgctgacacggctgtctattactgtgcgagacggggagacagccatggcatgtttgactactggggccagggaaccctggtcaccgtctcctca

SEQ ID NO: 11598 - DNA, 295 bp, Homo sapiens
  source 1..295: mol_type = other DNA
cattgtctctggtggctccatcagcagtagtcgttacttctggggctggatccgccagcccccagggaaggggctggagtggattgggactattttttatagtgggggcaccgactacaacccgtccctcaggagtcgagtcaccatatccgtagacaagtccaagaaccagttctccctgaaggtgagctctgtgaccgccgctgacacggctgtctattactgtgcgagacggggagacagccatggcatgtttgactactggggccagggaaccctggtcaccgtctcctca

SEQ ID NO: 11599 - DNA, 292 bp, Homo sapiens
  source 1..292: mol_type = other DNA
cactgtctctggtggctccatcagtagtcgttactactggggctggatccgccagtccccagggaagggcctggagtggattgggagtatctcttatagtgggagcaccgactacaacccgtccctcaggagtcgagtcaccatatcggtagacaagtccaagaaccatttctccctgaaggtgacctctgtgaccgccgctgacacggctgtctattactgtgcgagacggggagacagccatggcatgtttgactactggggccagggaaccctggtcaccgtctcctca

SEQ ID NO: 11600 - DNA, 295 bp, Homo sapiens; identical to SEQ ID NO: 11597
  source 1..295: mol_type = other DNA

SEQ ID NO: 11601 - DNA, 295 bp, Homo sapiens
  source 1..295: mol_type = other DNA
cactgtctctggtggctccatcagcagtagttgttacttctggggctggatccgccagcccccagggaaggggctggagtggattgggagtatttcttatagtgggggcaccgactacaacccgtccctcaggagtcgagtcaccatatccgtagacaagtccaagaaccaattctccctgaaggtgaactctgtgaccgccgctgacacggctgtctattactgtgcgagacggggagacagccatggcatgtttgactactggggccagggaaccctggtcaccgtctcctca

SEQ ID NO: 11602 - DNA, 295 bp, Homo sapiens
  source 1..295: mol_type = other DNA
cactgtatctggtggctccatcagcagtcctaagtactactgggcctggatccgccagcccccagggaagggtctggagtggattgggactatctattatagtgggagcacctattacagcgcgtccctcaagagtcgagtcaccatatctgtagacacgtccaagaaccagttctccctgaagctgagctctgtgaccgccgcagacacggctgtttattactgtgcgagacgcggagacagtcatggtatgtttgactactggggccagggaaccctggtcaccgtctcctca

SEQ ID NO: 11603 - DNA, 286 bp, Homo sapiens
  source 1..286: mol_type = other DNA
cactgtctctggtggctccatcagtagttactactggagctggatccggcagcccccggggaagggactggagtggattggatatttctattacagtgggagcaccaactacaacccctccctcaagagtcgagtcaccatatcatcagacacgtccaagaaccagttctccctgaagctgagctctgtgaccgctgcggacacggccgtgtattactgtgcgagagattctatggggggaccatttgactactggggccagggaaccctgctcaccgtctcctca

SEQ ID NO: 11604 - DNA, 286 bp, Homo sapiens
  source 1..286: mol_type = other DNA
cactgtctctggtggctccatcagtacttactactggagctggatccggcagccccccggaaagggactggagtggattgcgtatgtccattacagtgggagcgccaactacaacccctccctcaagagtcgagtcatcatatcgctagacacgtccaagaaccagttctccctgaggctgtactctgtgaccgctgcggacacggccgtgtattactgtgcgagagattcgatgggcggcccctttgactactggggccagggagccctggtcaccgtctcctca

SEQ ID NO: 11605 - DNA, 286 bp, Homo sapiens
  source 1..286: mol_type = other DNA
cactgtctctggtggctccatcagtacttactactggagttggatccggcagccccccggaaagggactggagtggattgcgtatgtccattacactgggagcgccacctacaacccctccctcaagagtcgagtcatcatatcgctagacacgtccaagaaccagttctccctgaggctgggctctgtgaccgctgcggacacggccgtgtattactgtgcgagagattcgatgggcggcccctttgactactggggccagggagccctggtcaccgtctcctca

SEQ ID NO: 11606 - DNA, 286 bp, Homo sapiens
  source 1..286: mol_type = other DNA
cactgtctctggtggctccatcagtacttactactggagctggatccggcagccccccggaaagggactggagtggattgcgtttgtccattacagtgggagcgccaactacaacccctccctcaagagtcgagtcatcgtatcgctagacacgtccaagaaccagttctccctgaggctgggctctgtgaccgctgcggacacggccgtgtattactgtgcgagagattccatgggcggcccctttgactactggggccagggagccctggtcaccgtctcctca

SEQ ID NO: 11607 - DNA, 292 bp, Homo sapiens
  source 1..292: mol_type = other DNA
tgcagcctttggattcaccttcagtaactacgacatgcactgggtccgccaagctccaggacaaggtctggagtgggtctcaagtattggtaccgctggtgacccatactcttcaggctccgtgaagggccgattcaccgtctccagagaaaatggcaagaactccttgtatcttcaaatgaatagcctgagagccggcgacacggctgtgtattactgtgcgagaggggggtactttggttcggggccgcttgactcctggggccagggaaccctggtcaccgtctcctca

SEQ ID NO: 11608 - DNA, 292 bp, Homo sapiens
  source 1..292: mol_type = other DNA
tgcagcctttggattcaccttcagtaactacgacatgcactgggtccgccaagctccaggacaaggtctggagtgggtctcaagtattggtaccgctggtgacccatactcttcaggctccgtgaagggccgattcaccgtctccagagaaaatggcaagaactccttgtatcttcaaatgaatggcctgagagccggcgacacggctgtgtattactgtgcgagaggggggtactttggttcggggccgcttgactcctggggccagggaaccctggtcaccgtctcctca

SEQ ID NO: 11609 - DNA, 292 bp, Homo sapiens
  source 1..292: mol_type = other DNA
tgcagcctctggattcaccttcagtagctacgacatgcactgggtccgccaaccttcaggaaaaggtctggagtgggtctcttctattgatactgctggtgacacatactattcaggctccgtgaaaggccgattcaccatctccagagaaaatgccaagaactccttctatcttcagatgagcgccctgagagccggggacacggctgtgtattactgtgcaagaggcggttattttggttcggggccacttgactcctggggccagggaaccctggtcaccgtctcctca

SEQ ID NO: 11610 - DNA, 292 bp, Homo sapiens
  source 1..292: mol_type = other DNA
tgcagcctttggattcaccttcagtaactacgacatgcactgggtccgccaagctccaggacaaggtctggagtgggtctcaagtattggtaccgctggtgacccatactcttcaggctccgtgaagggccgattcaccgtctccagagaaaatggccagaactccttctatcttcaaatgaaaagcctgagagccggcgacacggctgtgtattactgtgcgagaggggggtactttggttcggggccgcttgactcctggggccagggaaccctggtcaccgtctcctca

SEQ ID NO: 11611 - DNA, 292 bp, Homo sapiens
  source 1..292: mol_type = other DNA
tgcagcctttggattcaccttcagtaactacgacatgcactgggtccgccaagctccaggacaaggtctggagtgggtctcaagtattggtaccgctggtgacccatactcttcaggctccgtgaagggccgattcaccgtctccagagaaaatggcaagaactccttgtatcttcaaatgaatagcctgagagccggcgacacggctgtgtattactgtgcgagagggggatactttggttcggggccgcttgactcctggggccagggaaccctggtcaccgtctcctca

SEQ ID NO: 11612 - DNA, 295 bp, Homo sapiens
  source 1..295: mol_type = other DNA
cactgtctctggtggctccatcagtggataccactggagctggatccggcagcccccagggaagggactggagtggattgggtatatctcttacagtgggagcaccaactacaacccctccctcaagagtcgagtcaccatgtcagtagacacgtccaagaaccagttctccctgaagctgagctctgtgaccgccgcagacacggccgtgtattactgtgcgagacatggggattactatggttcggggcggttcgacccctggggccagggaaccctggtcaccgtctcctca

SEQ ID NO: 11613 - DNA, 295 bp, Homo sapiens; identical to SEQ ID NO: 11612
  source 1..295: mol_type = other DNA

SEQ ID NO: 11614 - DNA, 295 bp, Homo sapiens
  source 1..295: mol_type = other DNA
cactgtctctggtggctccatcagtggttactactggagctggatccggcagcccccagggaagggactggagtggattggctatattcattccaatggagtcaccaactacaacccctccctcaagagtcgagtcaccatatcagtagacacgtccaagaaccagttctccctgaacctgagctctgtgaccgccgcagacacggccttttattactgtgcgagacatggggattactatggttcggggcggttcgacccctggggccagggaaccctggtcaccgtctcctca

SEQ ID NO: 11615 - DNA, 295 bp, Homo sapiens
  source 1..295: mol_type = other DNA
cactgtctctggtggctccatcagtggataccactggagctggatccggcagcccccagggaagggactggagtggattgggtatatctcttacagtgggagcaccaactacaacccctccctcacgagtcgagtcaccatgtcagtagacacgtccaagaaccagttctccctgaagctgagctctgtgaccgccgcagacacggccgtgtattactgtgcgagacatggggattactatggttcggggcggttcgacccctggggccagggaaccctggtcaccgtctcctca

SEQ ID NO: 11616 - DNA, 295 bp, Homo sapiens
  source 1..295: mol_type = other DNA
cactgtctctggtggctccatcagtggataccactggagctggatccggcagcccccagggaagggactggagtggattggctatatctcttacagtgggggcaccaactacaacccctccctcaggagtcgagtcaccatgtcagtagacacgtccaagaaccagttctccctgaagctgagctctatgaccgccgcagacacggccgtgtattactgtgcgagacatggggattactatggttcggggcggttcgacccctggggccagggaaccctggtcaccgtctcctca

SEQ ID NO: 11617 - DNA, 298 bp, Homo sapiens
  source 1..298: mol_type = other DNA
tgcagcctctgaattcatcttcaataggtatgccatgagctgggtccgccaggctccggggaaggggctggagtgggtctcagcaatttctgatagcggtggtgacacgtactacgcagactccgtgaagggccggttcaccatctccagagacaattccaagaacacactgtatttgcaaatgaacagcctaagggacgacgacacggccgtatattactgtgtgaaaggttctagtgatggtagaccgtactactttgaccactggggccagggaaccctggtaaccgtctcctca

SEQ ID NO: 11618 - DNA, 298 bp, Homo sapiens
  source 1..298: mol_type = other DNA
cgcagcgtctggattcacctttagtaactatgccatgagttgggtccggcaggctccagggaaggggctgcagtgggtctcagccatcacttggagtggtggtgacacataccaagcagactccgcgacgggccggttcaccatctccagagacaactccaagaacactctgttcctgcatttgaacaacctgagagccgaggacacggccctttattactgtgtgaaagggagtagcgacggcaggccttactactttgaccactggggccagggaaccctggtcatggtctcccca

SEQ ID NO: 11619 - DNA, 300 bp, Homo sapiens
  source 1..300: mol_type = other DNA
gcttctggttacacctttaccagccacagtatcacgtgggtgcgacaggcccctggacaagggcttgagtggatgggttggatcagcaactacaatggtgacacaaagtatgcgcagagggtccagggcagagtcacctttaccacagacgcatccacgaccacagcctacatggagctgaggaacctgagatcagacgacacggccgtgtattactgtgcgagagatccgtcaaataccagtggactatatgcgtactttgactactggggccagggaaccctggtcaccgtctcctca

SEQ ID NO: 11620 - DNA, 300 bp, Homo sapiens
  source 1..300: mol_type = other DNA
gcttctggttacacctttaccagccatggtatcagctgggtgcgacaggcccctggacaagggcttgagtggatgggatggatcagcgcctggaatggtgacacaaagtatgcacagaacctccagggcagagtcaccatgaccacagacgcatccacgagcacagcctacatggagctgaggagcctgagatctgacgacacggccgtatattactgtgcgagagatccctcgaataccagtggtttgtacgcatactttgactactggggccagggaaccctggtcaccgtctcctca

SEQ ID NO: 11621 - DNA, 300 bp, Homo sapiens
  source 1..300: mol_type = other DNA
gcttctggttacacctttaccagccatggtatcagctgggtgcgacaggcccctggacaagggcttgagtggatgggatggatcagcgcctacaatggtgacacaaagtatgcacagaagctccagggcagagtcaccatgaccacagacacatccacgagcacagcctacatggagctgaggagcctgacatctgacgacacggccgtatattactgtgcgagagatccctcgaataccagtggcttgtacgcatactttgactactggggccagggaaccctggtcaccgtctcctca

SEQ ID NO: 11622 - DNA, 300 bp, Homo sapiens
  source 1..300: mol_type = other DNA
gcttctggttacacctttaccagccacagtatcacgtgggtgcgacaggcccctggacaaggccttgagtggatgggttggatcagcaactacaatggtgacacaaagtatgcgcagagggtccagggcagagtcaccatgaccacagacgcatccacgaccacagcctacatggagctgaggagcctgagatcagacgacacggccgtgtattactgtgcgagagatccgtcaaataccagtgggttatatgcgtactttgactactggggccagggaaccctggtcaccgtctcctca

SEQ ID NO: 11623 - DNA, 282 bp, Homo sapiens
  source 1..282: mol_type = other DNA
gcatctggatacaccttcaccaactactatatgcactgggtgcgacaggcccctggacaagggcttgagtggatgggaataatcaaccctactggtacaaccacaaactacgcacagaggttccagggcagactcaccatgaccagagacacgtccacgagcacactctacatggaactgagcagccttatatctgaggacacggccatgtattactgtgcgagagaattgccgaaggcttttgatatctggggccaagggacaatggtcaccgtctcttca

SEQ ID NO: 11624 - DNA, 282 bp, Homo sapiens
  source 1..282: mol_type = other DNA
gcgtctggatacaccttcagcaactactatatgcactgggtgcgacaggcccctggacaagggcttgagtggatgggaataatcaaccctactggtacagtcacaatctacgcacagaggttccagggcagactcaccatgaccagagacacgtccacgagcacactctacatggaactgagcagccttcaatctgaggacacggccatgttttactgtgcgagagaattgccgaaggcttttgatatctggggccaagggacaatggtcaccgtctcttca

SEQ ID NO: 11625 - DNA, 279 bp, Homo sapiens
  source 1..279: mol_type = other DNA
ggatctggatacaccttcaccagccactatatgcactgggtgcgacaggcccctggacaagggcttgagtggatgggaattataaatctcaatggtgatggaacgtacgcacagaagttccagggcagagtcaccatgaccagggacacgtccacgagcacagtgtacatggagctgagcagcctgagacctgacgacacggccgtgtattattgtgcgagagagttaccaaaggctttcgatatctggggccaagggacattggtcaccgtctcttca

SEQ ID NO: 11626 - DNA, 279 bp, Homo sapiens
  source 1..279: mol_type = other DNA
gcatctggatacaccttcaccagccactatacgcactgggtgcgacaggcccctggacaagggcctgagtggatgggaataataaatcttagtggtggcacatggtacgcacagaagttccagggcagagtcaccatgaccagggacacgtccacgagcacagcgtacatggagttgagcagcctgaggtctgaggacacggccgtttattactgtgcgagagagttaccaaaggcttttgatatctggggccaagggacattggtcaccgtctcttca

SEQ ID NO: 11627 - DNA, 289 bp, Homo sapiens
  source 1..289: mol_type = other DNA
tgcagcctctggattcaccttcagtaattatgctatacactgggtccgccaggctccaggcaaggggctgcagtgggtgggagtcatatcatctgatggaagtaagaaatattacgcagactccgtgaagggccgattcaccatctccagagacaattccaagaacacgctgtatctggaaatgaacagcctgagacctgaggacacggctgtgtattactgtgcgagaggaccgagtgggagctactatgactactggggccagggaaccctggtcaccgtctcctca

SEQ ID NO: 11628 - DNA, 289 bp, Homo sapiens
  source 1..289: mol_type = other DNA
tgcaggctctggattcaccttcagtacctatgctatccactgggtccgccaggctccaggcaaggggctggagtgggtggcagttatatcatttgatggaagtaataaatactacgcagactccgtgaagggccgattcaccatctccagagacaatcccaagaatacgctgtatctgcaaatgaacagcctgagagttgaggacacggctgtgtattactgtgcgagaggccccagtgggagttactatgactactggggccagggaaccctggtcaccgtctcctca

SEQ ID NO: 11629 - DNA, 286 bp, Homo sapiens
  source 1..286: mol_type = other DNA
tgcagcctctgggttcaccctcagtggctctactattcactgggtccgccaggcttccgggaaaggcctggagtgggttggccgtattaaaggcaaagctaacaattacgcgacagcatatgctgcgtcggtgaaaggcaggttcaccatctccagagatgattcaaagaacacggcgtatctgcaaatgaacagcctgaaaaccgaggacacggccgtgtattactgtgcttccgggggggactgtgactcctggggccacggaaccctggtcaccgtctcctca

SEQ ID NO: 11630 - DNA, 286 bp, Homo sapiens
  source 1..286: mol_type = other DNA
tgcagcctctggtttcatcttcagtgactctactatacactgggtccgccaggcttccgggaaagggctggagtgggttggccgtattaaaagcaaagctaacaattacgcgacagcatatgttgcgtcggtgaaaggcagattcaccatctccagagatgattcacagaacacggcgtatctgcaaatgaacagcctgaaaaccgacgacacggccgtgtattattgtgctagtggtggtgactgcgactcctggggccagggaaccctgatcaccgtctcctca

SEQ ID NO: 11631 - DNA, 286 bp, Homo sapiens
  source 1..286: mol_type = other DNA
cgcagcctctggtttcaccttcagtgactctactatacactgggtccgccaggcttccggcacagggctggagtgggttggccgtattaaaaggaaaaagaacaattacgagacagcatatgttgcgtcggtgaaaggcaggttcaccatctccagagatgattcacagaacacggcgtatctgcaaatgaacaacctgaaaaccgacgacacggccgtgtattattgtgctagtggtggtgactgcgactcctggggccagggaaccctggtcaccgtctcctca

SEQ ID NO: 11632 - DNA, 286 bp, Homo sapiens
  source 1..286: mol_type = other DNA
tgcagcctctggtttcagcttcagtgactctactatacactgggtccgccaggcttccgggaaagggctggagtgggttggccgcattaaaagcaaagctaacaattacgcgacagcatatgttgcgtcggtgaaaggcagattcaccatctccagagatgattcacagaacacggcgtatctgcaaatgaacagcctgagagccgacgacacggccgtgtattattgtgctagtggtggtgactgcgactcctggggccagggaaccctgatcaccgtctcctca

SEQ ID NO: 11633 - DNA, 286 bp, Homo sapiens
  source 1..286: mol_type = other DNA
tgcagcctctggtttcagcttcagtgactctaccatacactgggtccgccaggcttccgggaaagggctggagtgggttggccgtattaaaagaaaaagtaacaattacgagacagcatatgttgcgtcggtgaaaggcaggttcaccatctccagagatgattcacagaacacggcgtatctgcaaatgaaccgcctgaaaatcgacgacacggccgtttattattgtgctagtggtggtgactgcgactcctggggccagggaaccctggtcaccgtctcctca

SEQ ID NO: 11634 - DNA, 286 bp, Homo sapiens
  source 1..286: mol_type = other DNA
tgcagcctctggtttcatcttcagtgactctactatacactgggtccgccaggcttccgggaaagggctggagtgggttggccgtattaaaagcaaagctaacaattacgcgacagcatatgttgcgtcggtgaaaggcagattcaccatctccagagatgattcacagaacacggcgtatctgcaaatgaacagcctaaaaaccgacgacacggccgtgtattattgtgctagtggtggtgactgcgactcctggggccagggaaccctgatcaccgtctcctca

SEQ ID NO: 11635 - DNA, 286 bp, Homo sapiens; identical to SEQ ID NO: 11632
  source 1..286: mol_type = other DNA

SEQ ID NO: 11636 - DNA, 304 bp, Homo sapiens
  source 1..304: mol_type = other DNA
tgcagcctctggattcacctttgacagctatgccatgggctgggtccgccaggctccagggaaggggctgcagtgggtctcgcttattagtggtagtggtggtagcacatactacacagactccgtgaagggccggtttatcatctccagagacaattccaagaacacactatatctgcaaatgaacagcctgagagccgaggacacggccgtatattactgtgcgaaagctggttgtagtggtggtaactgctaccgaccgcctgactactggggccagggaaccctggtcaccgtctcctca

SEQ ID NO: 11637 - DNA, 304 bp, Homo sapiens
  source 1..304: mol_type = other DNA
tgcagcctctggattcacctttagcagctatgccatgagctgggtccgccaggctccaggaaaggggctggagtgggtctcaactattagtggaggtggtggtagcacattctacgcagactccgtgaagggccggttcaccatctccagagacaattccaagaacacgctgtatctgcaaatgctcagcctgagagccgaggacacggccctatattactgtgcgaaagcgggttgtagtggtggcaactgctaccgacccccggactactggggccagggaaccctggtcaccgtctcctca

SEQ ID NO: 11638 - DNA, 286 bp, Homo sapiens
  source 1..286: mol_type = other DNA
tgcagcctctggattcagctttagcgcctatgccatgagttgggtccgccaggctccagagaaggggctggagtgggtctcggctgctaggggtagtggtggttacacatattacggagactccgtgaagggccggttcaccagctccagagacaattcccagaacacgctgtacttgcaaatgaacagcctgagagccgaggacacggccatatattactgtgcgagagattctcgtggcgcttttgatatctggggccaggggacaatggtcaccgtctcttca

SEQ ID NO: 11639 - DNA, 286 bp, Homo sapiens
  source 1..286: mol_type = other DNA
tgtagcctctggatgggactttagcacctctgccatgagttgggtccgccaggctccagagaaggggctggagtgggtctcggctgctaggggtagtggtggttacacatattacggagactccgtgaagggccggttcaccagctccagagacaattcccagaatacactgtacttgcaaatgaacagcctgagagccgaggacacggccatttattactgtgcgagagattctcgcggcgcttttgatatttggggccaggggacaatggtcaccgtctcttca

SEQ ID NO: 11640 - DNA, 286 bp, Homo sapiens
  source 1..286: mol_type = other DNA
tgcagcctctggattcacctttaccaactatgccatgagctgggtccgccaggctccagggaaggggctggagtgggtctcggctatgaggggtagtggtgattacacatactacgcagactccgtgaagggccgattcaccatctccagagacaattcccagaatacgctgtatcttcaaatgaacagcctgagagccgaggacacggccatatattactgtgcgagagattctcgtggcgcttttgatatctggggccaagggacaatggtcaccgtctcttca

SEQ ID NO: 11641 - DNA, 286 bp, Homo sapiens
  source 1..286: mol_type = other DNA
tgcagcctctggattcagctttagcacctctgccatgagttgggtccgccaggctccagagaaggggctggagtgggtctcggctgctaggggtagtggtggttacacatattacggagactccgtgaagggccggttcaccagctccagagacaattcccagaacacgctgtacttgcaaatgaacagcctgagagacgaggacacggccatatattactgtgcgagagattctcgtggcgcttttgatatctggggccaggggacaatggtcaccgtctcttca

SEQ ID NO: 11642 - DNA, 286 bp, Homo sapiens
  source 1..286: mol_type = other DNA
tgcagcctctggattcacctttagcaactatgccatgagttgggtccgccaggctccagggaaggggctggagtgggtctcggctattaggggtagtggtggttacacatactacgtagactccgtgaagggccggttcaccagctccagagacaattcccagaacacgctgtatctgcaaatgaacagcctgagagccgaggacacggccatatattactgtgcgagagattctcgtggcgcttttgatatctggggccaagggacaatggtcaccgtctcttca

SEQ ID NO: 11643 - DNA, 286 bp, Homo sapiens
  source 1..286: mol_type = other DNA
tgcagcctctggattcacctttagcagctatgccatgagttgggtccgccagggtccagagaaggggctggagtgggtctcggctgctaggggtagtggtggttacacatattacggagactccgtgaagggccggttcaccagctccagagacaattcccagaacacgctgtacttgcaaatgaacagcctgagagccgaggacacggccatatattactgtgcgagagattctcgtggcgcttttgatatctggggccaggggacaatggtcaccgtctcttca

SEQ ID NO: 11644 - DNA, 286 bp, Homo sapiens
  source 1..286: mol_type = other DNA
tgcggcctctggattcacctttaccaactatgccatgagctgggtccgccaggctccagggaaggggctggagtgggtctcggctatgaggggtagtggtgattacacatactacgcagactccgtgaagggccgattcaccatctccagagacaattcccagaattcgctgtatcttcaaatgaacagcctgagagccgaggacacggccatatattactgtgcgagagattctcgtggcgcttttgatatctggggccaagggacaatggtcaccgtctcttca

SEQ ID NO: 11645 - DNA, 286 bp, Homo sapiens
  source 1..286: mol_type = other DNA
tgtagcctctggatgggactttagcacctctgccatgagttgggtccgccaggctccagagaaggggctggagtgggtctcggctgctaggggtagtggtggttacacatattacggagactccgtgaagggccggttcaccagctccagagacaattcccagaatacactgtacttgcaaatgaacagcctgagagccgaggacacggccatttattactgtgcgagagattctcgtggcgcttttgatatctggggccaggggacaatggtcaccgtctcttca

SEQ ID NO: 11646 - DNA, 286 bp, Homo sapiens
  source 1..286: mol_type = other DNA
tgcagcctctggattcagctttagcacctctgccatgagttgggtccgccaggctccagagaaggggctggagtgggtctcggctgctaggggcagtggtggttacacatattacggagactccgtgaagggccggttcaccagctccagagacaattcccagaacatgctgtacttgcaaatgaacagcctgagagccgaggacacggccatatattactgtgcgagagattctcgtggcgcttttgatatctggggccaggggacaatggtcaccgtctcttca

SEQ ID NO: 11647 - DNA, 286 bp, Homo sapiens
  source 1..286: mol_type = other DNA
tgcagcctctggattcatctttagtaactatgccatgagttgggtccgccaggctccagggaaggggctggagtgggtctcgaacatgcgtggcagtggtgattatacatactacgcagactccgtgaagggccggttcaccatctccagagacaattccaagaggacgctgtctctgcaaatgaacagcctaagagccgaggacacggccgtatattactgtgccagagatagccgaggggcttttgatatctggggccaagggaccgtggtcaccgtctcttca

SEQ ID NO: 11648 - DNA, 286 bp, Homo sapiens
  source 1..286: mol_type = other DNA
tgcagcctctggattcatctttagtaactatgccatgagctgggtccgccaggctccagggaaggggctggagtgggtctcgaacatgcgtggcagtggtgattatacatactacgcagactccgtgaagggccggttcaccatctccagagacaattccaagaggacgctgtctctgcaaatgaacagcctgagagccgaggacacggccgtatattactgtgccagagatagccgaggggcttttgatatctggggccaagggaccgtggtcaccgtctcttca

SEQ ID NO: 11649 - DNA, 286 bp, Homo sapiens
  source 1..286: mol_type = other DNA
tgcagcctctggatccatctttagtaactatgccatgagttgggtccgccaggctccagggaaggggctggagtgggtctcgaacatgcgtggcagtggtgattatacatactacgcagactccgtgaagggccggttcaccatctccagagacaattccaagaggacgctgtctctgcaaatgaacagcctaagagccgaggacacggccgtatattactgtgccagagatagccgaggggcttttgatatctggggccaagggaccgtggtcaccgtctcttca

SEQ ID NO: 11650 - DNA, 286 bp, Homo sapiens
  source 1..286: mol_type = other DNA
tgcagcctctggattcatctttagtaactatgccatgagctgggtccgccaggctccagggaaggggctggagtgggtctcgaacatgcgtggcagtggtgattatacatactacgcagactccgtgaagggccggttcaccatctccagagacaattccaagaggacgctgtctctgcaaatgaacagcctgagagccgaggacacggccgtatattactgtgccagagatagccgaggggcttttgatatctggggccaagggaccgtggtcaccgtctcctca

SEQ ID NO: 11651 - DNA, 286 bp, Homo sapiens
  source 1..286: mol_type = other DNA
tgcagcctctggattcatctttagtaactatgccatgagttgggtccgccaggctccagggaaggggctggagtgggtctcgaacatgcgtggcagtggtgattatacatactacgcagactccgtgaagggccggttcaccatctccagagacaattccaagaggacgctgtctctgcaaatgagcagcctaagagccgaggacacggccgtatattactgtgccagagatagccgaggggcttttgatatctggggccaagggaccgtggtcaccgtctcttca

SEQ ID NO: 11652 - DNA, 286 bp, Homo sapiens
  source 1..286: mol_type = other DNA
tgcagcctctggattcacctttagcaactatgccataagttgggtccgccaggctccagggaaggggctggagtgggtctcagctgttcgtggtggtggggataagacatactacacagactccgtgaagggccggttcaccatctccagagacaattccaagaacacgctgtatctgcaaatgaacagcctgagagccgaggacacggccatatattactgtgcgagagattcacggggcgcttttgatatttggggccaagggacaatggtcaccgtctcttca

SEQ ID NO: 11653 - DNA, 286 bp, Homo sapiens
  source 1..286: mol_type = other DNA
tgcagcctctggattcacctttagcaactatgccatgagctgggtccgccaggctccagggaaggggctggagtgggtctcggctatgaggggtagtggtgattacacatactacgcagactccgtgaagggccgattcaccatctccagagacaattcccagaatacgctgtatcttcaaatgaacagcctgagagccgaggacacggccatatattactgtgcgagagactctcgtggcgcttttgatatttggggccaagggacaatggtcaccgtctcttca

SEQ ID NO: 11654 - DNA, 286 bp, Homo sapiens
  source 1..286: mol_type = other DNA
tgcagcctctggattcagctttagcacctctgccatgagttgggtccgccaggctccagagaaggggctggagtgggtctcggctgctagggggagtggtggttacacatattacggagactccgtgaagggccggttcaccagctccagagacaattcccagaacatgttctacttgcaaatgaacagcctgagagccgaggacacggccatatattactgtgcgagagattctcgtggcgcctttgatatctggggccaggggacaatggtcaccgtctcttca

SEQ ID NO: 11655 - DNA, 286 bp, Homo sapiens
  source 1..286: mol_type = other DNA
tgtagcctctggattgagctttagcacctctgccatgagttgggtccgccaggctccagagaaggggctggagtgggtctcggctgctaggggtagtggtggttacacatattacggagactccgtgaagggccggttcaccagctccagagacaattcccagaacacgctgtacttgcaaatgaacagcctgagagccgaggacacggccatttattactgtgcgagagattctcgtggcgcttttgatatctggggccaggggacaatggtcaccgtctcttca

SEQ ID NO: 11656 - DNA, 286 bp, Homo sapiens
  source 1..286: mol_type = other DNA
tgcagcctctggattcacctttagtaactatgccatgatttgggtccgccaggccccagagaaggggctggagtgggtctcggctgccaggggtagtaatggttacacatactatggagactccgtgaagggccggttcgtcacctccagagacaattcccagaacacactatacttgcaaatgaacagcctgagagccgaggacacggccatatattactgtgcgagagattctcgtggcgcttttgatatctggggccaggggacagtggtcaccgtctcttca

SEQ ID NO: 11657 - DNA, 286 bp, Homo sapiens
  source 1..286: mol_type = other DNA
tgcagcctctggattcacctttagcacctctgccatgagttgggtccgccaggctccagagaaggggctggagtgggtctcggctgctaggggtagtggaggttacacatactacggagactccgtgaagggccggttcaccagctccagagacaattcccagaacacgctgtacttgcaaatgaacagcctgagagccgaggacacggccatatattactgtgcgagagattctcgtggcgcttttgatatctggggccaggggacaatggtcaccgtctcttca

SEQ ID NO: 11658 - DNA, 286 bp, Homo sapiens
  source 1..286: mol_type = other DNA
tgcagcctctggattcacctttaccaactatgccatgagctgggtccgccaggctccagggaaggggctggagtgggtctcggctatgaggggtagtggtgattacacatactatgcagactccgtgaagggccgattcaccatctccagagacaattcccagaatacgctgtatcttcaaatgaacagcctgagagccgaggacacggccatatattactgtgcgagagattctcgtggcgcttttgatatctggggccaagggacaatggtcaccgtctcttca

SEQ ID NO: 11659 - DNA, 289 bp, Homo sapiens
  source 1..289: mol_type = other DNA
tgcagcctctggattcaccttcagtagctactggatgcactgggtccgccaaactccagggaaggggctggtgtgggtctcgcacattaatcataatgggaatagtagaggctacgcggactccgtgaagggccgattcaccatctccagagacaacgacaagaacacggtgtctctgcaaatgaacagtctgagagccgaggacacggctgtgtattactgtgcaagagaggggctaatgagagctactgactactggggccagggaaccctggtcaccgtctcctca

SEQ ID NO: 11660 - DNA, 289 bp, Homo sapiens; identical to SEQ ID NO: 11659
  source 1..289: mol_type = other DNA

SEQ ID NO: 11661 - DNA, 289 bp, Homo sapiens
  source 1..289: mol_type = other DNA
tgcagcctctggattcaccgtcagttcctattggatgcactgggtccgccaaactccagggaaggggccggtgtgggtctcgcacattaatcataatgggaatagtagaggctacgcggactccgtgaagggccgattcaccatctccagagacaacgacaagaacacggtgtctctgcaaatgaacagtctgagagccgaggacacggctgtgtattactgtgcaagagaggggctaatgagagctactgactactggggccagggaaccctggtcaccgtctcctca

SEQ ID NO: 11662 - DNA, 289 bp, Homo sapiens
  source 1..289: mol_type = other DNA
tgcagcctctggattcaccgtcagtagttattggatgcactgggtccgccaaactccagggaaggggccggtgtgggtctcgcacattaatcataatgggaatagtagaggctacgcggactccgtgaagggccgattcaccatctccagagacaacgacaagaacacggtgtctctgcaaatggacagtctgagagccgaggacacggctgtgtattactgtgcaagagagggactaatgagagctactgactactggggccagggaaccctggtcaccgtctcctca

SEQ ID NO: 11663 - DNA, 289 bp, Homo sapiens
  source 1..289: mol_type = other DNA
tgcagcctctggattcaccctcagtagctactggatgcactgggtccgccaaactccagggaaggggctggtgtgggtctcgcacattaatcataatgggaatagtagaggctacgcggactccgtgaagggccgattcaccatctccagagacaacgacaagaacacggtgtctctgcaaatgaacagtctgagagccgaggacacgggagtatattactgtgcaagagaggggctaatgagagctactgactactggggccagggaaccctggtcaccgtctcctca

SEQ ID NO: 11664 - DNA, 287 bp, Homo sapiens
  source 1..287: mol_type = other DNA
cagcctctggattcaccgtcagttcctattggatgcactgggtccgccaaactccagggaaggggccggtgtgggtctcgcacattaatcataatgggaatagtagaggctacgcggactccgtgaagggccgattcaccatctccagagacaacgacaagaacacggtgtctctgcaaatgaacagtctgagagccgaggacacggctgtgtattactgtgcaagagaggggctaatgagagctactgactactggggccagggaaccctggtcaccgtctcctca

SEQ ID NO: 11665 - DNA, 289 bp, Homo sapiens
  source 1..289: mol_type = other DNA
tgcagtctctggattcaccttcagtagctactggatgcactgggtccgccaagctccagggaaggggctggtgtgggtctcacatattagaggtgatgggagagatacaggctacgcggactccgtgaagggccgattcaccatctccagagacaacgccaagaatacgatgtatctgcaaatgaacagtctgagagtcgaggacacggctgtatatctctgtgcaagagaaggactaatgagagctactgactactggggccagggaaccctggtcaccgtctcctca

SEQ ID NO: 11666 - DNA, 310 bp, Homo sapiens
  source 1..310: mol_type = other DNA
tgcagcctctggattcacttttagtagttattggatgagttgggtccgccaggctccagggaaggggctggagtgggtggccaagataaagcaagatggaagtgacaaagactatgtggactctgtgaagggccgattcaccatctccagagacaacgccaagaactcactgtatctgcaaatgaacaacctgagagccgaggacacggctgtgtattactgtgcgagagatggatattgtagtggtggtaggtgctactcaggctggttcgacccctggggccagggaaccctggtcaccgtctcctca

SEQ ID NO: 11667 - DNA, 310 bp, Homo sapiens
  source 1..310: mol_type = other DNA
tgtagcctctggattcacctttagtaattattggatgagctgggtccgccaggctccagggaaggggccggagtgggtggccaacataaagcaagatggaagtgagaaatactatgtggactctgtgaagggccgattcaccatctccagagacaacgccaagaactcactgtatctgcaaatgaacagcctgagagccgaggacaccgctgtgtattactgtgcgagagatggttattgtagtggtggtcggtgctactccggctggttcgacccctggggccagggaaccctggtcaccgtctcctca

SEQ ID NO: 11668 - DNA, 310 bp, Homo sapiens
  source 1..310: mol_type = other DNA
tgtagcctctggattcacctttagtaattattggatgagctgggtccgtcaggctccagggaaggggccggagtgggtggccaacataaagcaggatggaagtgagaaaaactatgtggactctgtgaagggccgattcaccatctccagagacaacgccaagaactcactgtatttgcaaatgaacagcctgagagccgaggacacggctatgtattactgtgcgagagatggttactgtagtggtggtcggtgctactccggctggttcgacccctggggccagggaaccctggtcaccgtctcctca

SEQ ID NO: 11669 - DNA, 310 bp, Homo sapiens
  source 1..310: mol_type = other DNA
tgcagcctctggattcacttttagtagttattggatgacttgggtccgccaggctccagggagggggctggagtgggtggccaagataaagcaagatggaagtgacaaagactatgtggactctgtgaagggccgattcaccatctccagagacaacgccaagaactcactgtatctgcaaatgaacaacctgagagccgaggacacggctgtgtattactgtgcgagagatggatattgtagtggtggtaggtgctactcaggctggtttgacccctggggccagggaaccctggtcaccgtctcctca

SEQ ID NO: 11670 - DNA, 310 bp, Homo sapiens
  source 1..310: mol_type = other DNA
tgcagcctctggattcacttttagtagttattggatgagttgggtccgccaggctccagggaaggggctggagtgggtggccaagataaagcaagatggaagtgacaaagactatgtggactctgtgaagggccgattcaccatctccagagacaacgccgagagctcactgtatctgcaaatgaacaacctgagagccgaggacacggctgtgtattactgtgcgagagatggatattgtagtggtggtaggtgctactcaggctggttcgacccctggggccagggaaccctggtcaccgtctcctca

SEQ ID NO: 11671 - DNA, 310 bp, Homo sapiens
  source 1..310: mol_type = other DNA
tgtagcctctggattcacctttagtaattattggatgagctgggtccgccaggctccagggaaggggccggagtgggtggccaacataaagcaagatggaggtgagaaatactatgtggactctgtgacgggccgattcaccatctccagagacaacgccaagaactcactgtatctgcaaatgaacagcctgagagccgaggacaccgctgtgtatttctgtgcgagagatggttactgtagtggtggtcggtgctactccggctggttcgacccctggggccagggaaccctggtcaccgtctcctca

SEQ ID NO: 11672 - DNA, 291 bp, Homo sapiens
  source 1..291: mol_type = other DNA
tcgtctggatacaccttcactacctatgctttgcattgggtgcgccaggcccccggacaaaggcttgagtggatgggatggatcaacgttggcaacacttacacacactttgcacagaggttccagggcagaatcacgattaccagtgacacatccgcgagcacagcctacatggagctgagcagcctgagatctgaggacacagctgtctattactgtgcgagatcacgtggatatagtgcctacgagtttgactactggggccagggaactctggtcaccgtctcctca

SEQ ID NO: 11673 - DNA, 291 bp, Homo sapiens
  source 1..291: mol_type = other DNA
gcttctggaggcaccttcagcagctatgctatcaactgggtgcgacaggcccctggacaaaggcttgagtggatgggatggatcaacgttggcaacacttacacacactttgcacagaggttccagggcagaatcacgattaccagtgacacatccgcgagcacagcctacatggagctgagcagcctgagatctgaggacacagctgtctattactgtgcgagatcacgtggatatagtgcctacgagtttgactactggggccagggaactctggtcaccgtctcctca

SEQ ID NO: 11674 - DNA, 291 bp, Homo sapiens
  source 1..291: mol_type = other DNA
tcgtctggatacaccttcactacctatgctttgcattgggtgcgccaggcccccggacaaaggcttgagtggatgggatggatcaacgttggcaacacttacacacactttgcacagaggttccagggcagaatcacgattaccagtgacacatccgcgagcacagcctacatggagctgagcagcctgagatctgaggacacagctgtctattactgtgcgagatcacgtggatatagtgcctacgagtttgactactggggccagggaaccctggtcaccgtctcctca

SEQ ID NO: 11675 - DNA, 291 bp, Homo sapiens
  source 1..291: mol_type = other DNA
gcttctggatactccctcactgactttgctctccattgggtgcgccaggcccccggacagaggcttgagtggatgggatggatcaacgctggcaatggaaacacaaaattttcacagcagttccagggcagagtcaccattaccacctacacatccgcgaccacagcctacatggaactgagcagcctgagatctgaagacacggctgtatattactgtgcgagatcccgtggatacagtgcctacgaatttgactactggggccagggaaccctggtcaccgtctcctca

SEQ ID NO: 11676 - DNA, 291 bp, Homo sapiens; identical to SEQ ID NO: 11675
  source 1..291: mol_type = other DNA

SEQ ID NO: 11677 - DNA, 291 bp, Homo sapiens
  source 1..291: mol_type = other DNA
gcttctggatacattttcactacttatgctttacattgggtgcgccaggcccccggacaaagccttgagtggatgggatggatcaacgctgccactggttccacattcttttcacagaaattccagggcagagtcatcatcaccagagacacatccgcgagcacggcctacatggagctgaatggcctgagatctgaagacacggctatctattactgtgcgagatctcgtggatatagtgcctatgaatttgattattggggccagggaatcctggtcaccgtctcctcc

SEQ ID NO: 11678 - DNA, 285 bp, Homo sapiens
  source 1..285: mol_type = other DNA
gcttctggatacaccttcactagtcatactatgtattgggtgcgccaggcccccggacaaaggcttgagtggatgggatggatcaccgctggcagtggtaacacaaaaaattcacagaagttccagggcagagtcaccattacccgggacacatccgcgagcacaacctacatggaactgagcagcctgacatctgaagacacggctgtctattactgtgcgagaggtaatgggagctactcccttggctactggggccagggaaccctggtcaccgtctcctcc

SEQ ID NO: 11679 - DNA, 285 bp, Homo sapiens
  source 1..285: mol_type = other DNA
gcttctggatacaccttcactagtcatactatgtattgggtgcgccaggcccccggacaaaggcttgagtggatgggatggatcaccgctggcagtggtaacacaaaaaattcacagaagttccagggcagagtcaccattacccgggacacatccgcgagcacaacctacatggaactgagcagcctgacatctgaagacacggctgtctattactgtgcgagaggtaatgggagctactcccttggctactggggccagggaaccctggtcaccgtctcctca

SEQ ID NO: 11680 - DNA, 285 bp, Homo sapiens
  source 1..285: mol_type = other DNA
gcttctggatacaccttcactagctatgctattcattgggtgcgccaggcccccggacaaaggcttgagtggatgggatggatcaacgctggcaatggtaacacaaaatattcacagaacttccaggggagagtcaccattattagggacacatccgcgagcacagcctacatggagctgagcagcctgagatctgaagacacggctgtgtattattgtgcgaggggcaatgggagctactcccttggctactggggccagggaaccctggtcaccgtctcctca

SEQ ID NO: 11681 - DNA, 285 bp, Homo sapiens
  source 1..285: mol_type = other DNA
gcttctggatacaccttcactagctatgctattcattgggtgcgccaggcccccggacaaaggcttgagtggatgggatggatcaacgctggcaatggtaacacaaaatattcacagaagttccaggggagagtcaccattattagggacacatccgcgagcacagcctacatggagctgagcagcctgagatctgaagacacggctgtgtattattgtgcgaggggcaatgggagctactcccttggctactggggccagggaaccctggtcaccgtctcctca

SEQ ID NO: 11682 - DNA, 289 bp, Homo sapiens
  source 1..289: mol_type = other DNA
tgcagcctctggattcacctttgatcattatgtcatgcagtgggtccgtcaagctccagggaagggtctggagtgggtctctcttattagtggggatgctggtagcacatactatgctgaccctgtgaagggccgattcatcatctccagagacaacagcaaaaactccctgtatctgcaaatgaacagtctgaaaactgaggacaccgccttgtattactgtgcaacagtcctctggcccgggggaattgactactggggccagggaaccctggtcatagtctcctca

SEQ ID NO: 11683 - DNA, 289 bp, Homo sapiens
  source 1..289: mol_type = other DNA
tgcaggctctggattcacctttgatcattatgtcatggactgggtccgtcaagctccagggaagggtccggagtgggtctctcttattagtgggaatggtgatagcacatactatgcagactctgtgaagggccgattcaccatctccagagacaacagcaaaaactccctgtatctgcaaatgaacagtctgagaactgaggacaccgccttgtattactgtgcaacagtactatggcctggtgggattgactactggggccaaggaaccctggtcaccgtctcctca

SEQ ID NO: 11684 - DNA, 289 bp, Homo sapiens
  source 1..289: mol_type = other DNA
tgcaggctctggattcacctttgatcattatgtcatggactgggtccgtcaagttccagggaagggtctggagtgggtctctcttattagtgggaatggtgatagcacatactatgcagactctgtgaagggccgattcaccatctccagagacaacagcaaaaactccctatatctgcaaatgaacagtctgagaactgaagacaccgccttgtattactgtgcaacagtactatggcctggtgggattgactactggggccaaggaaccctggtcaccgtctcctca

SEQ ID NO: 11685 - DNA, 289 bp, Homo sapiens
  source 1..289: mol_type = other DNA
tgtaggctctggattcacctttgatcattatgtcatggactgggtccgtcaagctccagggaagggtccggagtgggtctctcttattagtgggaatgctgatagcacatactatgcagactctgtgaagggccgattcaccatctccagagacaacagcaaaaactccctgtatctgcaaatgaacagtctgagaactgaggacaccgccttatattattgtgcaacagtactatggcctggtgggattgactactggggccaaggaaccctggtcaccgtctcctca

SEQ ID NO: 11686 - DNA, 289 bp, Homo sapiens
  source 1..289: mol_type = other DNA
tgcagcctctggattcacttttgataattatgtcatgcagtgggtccgtcaagctccagggaggggtctggagtgggtctctcttattagtggggttggtgatagcacacactatgcaggctctgtgaagggccgattcaccatctccagagacaacagcaaaaactccctgtatctgcaaatgagcagtctgagagctgaggacaccgccttgtattactgtgcaacggtactctggcccggggggattgactactggggccagggaaccctggtcgccgtctcttca

SEQ ID NO: 11687 - DNA, 289 bp, Homo sapiens
  source 1..289: mol_type = other DNA
tgcagcctctggattcacttttgatgattatgtcatgcagtgggtccgtcaagctccagggaggggtctggagtgggtctctcttattagtggggttggtgatagcacacactatgcagactctgtgaagggccgattcaccatctccagagacaacagcaaaaactccctgtatctgcaaatgagcagtctgcgagctgacgacaccgccttgtattactgtgcaacggtactctggcccggggggattgactactggggccagggaaccctggtcaccgtctcttca

SEQ ID NO: 11688 - DNA, 289 bp, Homo sapiens
  source 1..289: mol_type = other DNA
tgcagcctctggattcacctttgataattatgtcatggagtgggtccgccaacgtccggggaggggtctggagtgggtctctcttattagtggaaatggagatagcacacactatgcagactctgtgaagggccgattcaccatctcccgagacaacaacaaaaactccctgtatctgcaaatgaacagtctgacaagtgaggacaccgccttgtattactgtgcaacggtactttggcccggggggattgactactggggccagggaaccctggtcaccgtctcctca

SEQ ID NO: 11689 - DNA, 291 bp, Homo sapiens
  source 1..291: mol_type = other DNA
aagggttctggatacaccttttccgactactggatcggctgggtgcgccagatgcccgggaaaggcctggagtggatggggatcatctatccaggtgactctgatacccgatacagcccgtccttccaaggccaggtcatcatctcagccgacaagtccgtcaacaccgcctacctgcagtggagcagcctgaaggcctcggacaccgccatgtattactgtgcgagacgggggggggacagtgaatggttcgacccctggggccagggaaccctggtcaccgtctcctca

SEQ ID NO: 11690 - DNA, 291 bp, Homo sapiens
  source 1..291: mol_type = other DNA
aagggttctggatataactttgccacctactggatcggctgggtgcgccagatgcccgggaaaggcctggagtggatggggatcatctatcctggtgactctgataccagatacaacccgtccttccaaggccaggtcaccatctcagccgacaagtccatcaccaccgcctacctgcagtggagcagcctgaaggcctcggacaccgccatgtattactgtgcgagacggggcggtgactccgagtggttcgacccctggggccagggaaccctggtcaccgtctcctca

SEQ ID NO: 11691 - DNA, 291 bp, Homo sapiens
  source 1..291: mol_type = other DNA
aagggttctggatataactttgccacctactggatcggctgggtgcgccagatgcccgggaaaggcctggagtggatggggatcatctatcctggtgactctgataccagatacaacccgtccttccaaggccaggtcaccatctcagccgacaagtccatcaccaccgcctacctgcagtggagcagcctgaaggcctcggacaccgccatgtattactgtgcgagacggggcggtgactccgagtggttcgacccccggggccagggaaccctggtcaccgtctcctca

SEQ ID NO: 11692 - DNA, 283 bp, Homo sapiens
  source 1..283: mol_type = other DNA
tgcagcctctggattcaccttcagtagctatagcatgaactgggtccgccaggctccacggaaggggctggagtgggtctcatatattagtggtagtagtagtaccatatactacgcagagtctgtgaagggccgactcaccatctccagagacaatgccaagaactcactgtttctgcaaatgaacagcctgagagacgaggacacggctgtgtatttctgtgcgagaggccctacgacctttgactactggggccagggaaccctggtcaccgtctcctca

SEQ ID NO: 11693 - DNA, 283 bp, Homo sapiens
  source 1..283: mol_type = other DNA
tgcagcctctagattcagcttcagtgcctatagtatgaactgggtccgccaggctccagggaaggggctggaatgggtttcatatattaattttgattctacaaccacatactactcagactctgtgatgggccgattcaccatctccagagacaatgccaagaattcattgtatctgcaaatgaacagcctgagagacgaggacacggctgtttattactgtgcgagaggtcccaccacgttcgactactggggacagggaaccctggtcgccgtctcctca

SEQ ID NO: 11694 - DNA, 289 bp, Homo sapiens
  source 1..289: mol_type = other DNA
caccgtctctggtggctccatcagcactagtagttccttctggggctggatccgccagcccccagggaaggggctggagtggattgcgagtatccatcatggtgacaccacctactaccacccgtcccttaagagtcgagtcaccatatccatggacaggtccgaaaaccagttctccctggagctgacttctgtgaccgccgcagacacggctgtgtatcactgtgtgagaccgagggatcacggctttgacgactggggccggggaaccctggtcaccgtctcctca

SEQ ID NO: 11695 - DNA, 289 bp, Homo sapiens
  source 1..289: mol_type = other DNA
cactgtctctggtggctccgtcagcaccacaagttccttctggggctggatccgccagtccccagggaagggactggagtggattgcgagtatccatcatgttgcgaccacctattacaacccgtcccttgacactcgagtcaccatatccgcagacacgtccgcgaaccagttctccctgacacttggttctgtgaccgccgcagacacggctgtatatcattgtgtgagaccgagggatcacggctttgacgactggggccagggaatcctggtcaccgtctccgca

SEQ ID NO: 11696 - DNA, 289 bp, Homo sapiens
  source 1..289: mol_type = other DNA
cactgtctctggtggctccgtcaggattagtagtaccttctggggctgggtccgccagctcccagggaagggcctggagtggcttgggagtgttcactcaattgtcaccacctactataacccgtccctcaagagtcgaatcaccatttccgcagacacgtctaagaaccaattctccctgagactgacctctgtgaccgccgcagacacggctgtatattactgtgtgagacctcgtgaccatggctttgacgactggggccagggaaccctagtcaccgtctcctcg

SEQ ID NO: 11697 - DNA, 295 bp, Homo sapiens
  source 1..295: mol_type = other DNA
tgtagcgtctggattcaccttcagtggatatggcatgcactgggtccgccaggctccaggcaaggggctggagtgggtgtcagctatatggtatgatggaagtaagacatattatggagactccgtggagggccgattcaccatctccagagacgattccaagagcacgctgtatctgcaaatgaacagcctgagaggcgaagacacggctgtatattattgtgcgagagatcctggaacgacgtattactactttgattcttggggccagggaaccctcgtcaccgtctcctca

SEQ ID NO: 11698 - DNA, 295 bp, Homo sapiens
  source 1..295: mol_type = other DNA
tgcagcgtctggatacaccttcagtagatatggcatgcactgggtccggcaggctccaggcaaggggctggagtgggtggcagttatatggtatgatggaagtaaagtatactatgcagactccgtgaagggccgattcaccatctccagagacgattccaagagcactctgtatctgcaaatgaacagcctgagagccgacgacacggctgtgtattactgtgcgagagatccggggactacgtattactattttgactcctggggccagggaaccctggtcaccgtctcctca

SEQ ID NO: 11699 - DNA, 286 bp, Homo sapiens
  source 1..286: mol_type = other DNA
ggcctctggatacaccttcaccgactaccatatacactgggtgcgacaggcccctggacaagggcttgagtacatgggttggatctaccctaacagtggtggcacacactatgcacagacctttcagggctgggtcaccatgaccagggacacgtccatcagcacagcctacatggagctgaacaggctgagatctgacgacacggccgtgtattactgtgcgaggagtggctacaattggggctttgactactggggccagggaaccctggtcaccgtctcctca

SEQ ID NO: 11700 - DNA, 285 bp, Homo sapiens
  source 1..285: mol_type = other DNA
acttctggatacaacttcgggggctaccatatacactggatgcgacaggcccctggacaagggcttgagtggatgggatgggtctaccctaacagcggtgactcaaagtatgcgcagaactttcagggcagggtcaccatgaccagggacacgtccatcagcacagcctacatggaggtgagcgggctgcgatctgacgacacggccgtatattactgtgcgagatccggctacaattggggctttgactactggggccagggaaccctggtcaccgtctcctca

SEQ ID NO: 11701 - DNA, 289 bp, Homo sapiens
  source 1..289: mol_type = other DNA
tgcagtctctggcttcacctccacgacttatgaattctactgggtccgccaggctccagggatgagtctggaattcgtgtcgtatattagcagaagtggtggagtcgtacagtatgcagactctgtgaggggccgattctccgttattagagacaacgccaagaattcagtctatctgcaaatggacagcctgcgagccgaggacacggccacttatttttgtgcgagacgattaccctattatggcatggacctctggggccaagggaccacggtcaccgtctcctca

SEQ ID NO: 11702 - DNA, 289 bp, Homo sapiens
  source 1..289: mol_type = other DNA
tgcagtctctggattcacgttcagtagttatgaaatgtattgggtccgccaggctccagggagggggctggaatacctttcatacgtgaatatgagaggtgataccagatattatgcagactctgtgaagggccgattcaccgtctccagagacaatgccaagaattcagtttatctagaaatgaacagcctgagagccgacgacacggccatttattactgtgcgagaaggcttccttactacggtatggacctctggggccaagggaccacggtcaccgtctcctca

SEQ ID NO: 11703 - DNA, 289 bp, Homo sapiens
  source 1..289: mol_type = other DNA
tgcagtctctggattcacgttcagtagttatgaaatgtattgggtccgccaggctccagggagggggctggaatacttttcatacgtgaatatgagaggtgataccagatattatgcagactctgtgaagggccgattcaccgtctccagagacaatgccaagaattcagtttatctagaaatgaacagcctgagagccgacgacacggccatttattactgtgcgagaaggcttccttactacggtatggacctctggggccaagggaccacggtcaccgtctcctca

SEQ ID NO: 11704 - DNA, 289 bp, Homo sapiens; identical to SEQ ID NO: 11702
  source 1..289: mol_type = other DNA

SEQ ID NO: 11705 - DNA, 287 bp, Homo sapiens
  source 1..287: mol_type = other DNA
cagtctctggattcacgttcagtagttatgaaatgtattgggtccgccaggctccagggagggggctggaatacctttcatacgtgaatatgagaggtgataccagatattatgcagactctgtgaagggccgattcaccgtctccagagacaatgccaagaattcagtttatctagaaatgaacagcctgagagccgacgacacggccatttattactgtgcgagaaggcttccttactacggtatggacctctggggccaagggaccacggtcaccgtctcctca

SEQ ID NO: 11706 - DNA, 301 bp, Homo sapiens
  source 1..301: mol_type = other DNA
tgcagcctctggattcacctttagcagctatgccatgagctgggtccgccaggctccagggaaggggctggagtgggtctcaactattagtggtagtggtggtaacacatactacgaagactccgtgaagggccggttcaccatctccagagacaattccaagaaaacgctgtatctgcaattgaccagtctgagagccgaggacacggccgtatattactgtgcgaaagatagatggtatagcagtggctcagatgcttttgatatctggggccaggggacaatggtcaccgtctcttca

SEQ ID NO: 11707 - DNA, 301 bp, Homo sapiens
  source 1..301: mol_type = other DNA
tgcagcctctggattcacctttagtagttatgccatgagctgggtccgccaggctccagggaaggggctggagtgggtctcagctattagtggtactagtgataccacataccacgcagactccgtgaagggccggttcaccatctccagagacaattccaagaacacgctgtatctgcaaatgaacagcctgagagccgaggacacggccgtatattactgtgcgaaagatcggtggtatagcagtggctcggatgcttttgatatctggggccaagggacaatggtcaccgtctcttca

SEQ ID NO: 11708 - DNA, 295 bp, Homo sapiens
  source 1..295: mol_type = other DNA
tgcagcctctggattcaccttcagagactactacatgacctggatccgccaggctccagggaaggggctggagtgggtttcatccattagtattggtgtcactacgatagattacgcagactctgtgaagggccgattcaccatctccagggacgacgccaagaactcactgtatctgcacatgaacagcctgagagccgaggacacggccgtgtattactgtgcgagggatcacccagtggctggtttatactttgactactggggccagggaaccctggtcaccgtctcctca

SEQ ID NO: 11709 - DNA, 292 bp, Homo sapiens
  source 1..292: mol_type = other DNA
tgcagcctctggattcaccttcagtgacttctacatgagctggatccgccaggctccagggaaggggctggagtgggtttcatacattagttttactaataccatatactacgcagactctgtgaagggccgattcaccatctccagggacaacgccaagaactcactgtatctgcaaatgaacagcctgagagccgaggacacggccgtgtattactgtgcgagagatcatcccgtggctgggctctactttgactactggggccagggagccctggtcaccgtctcctca

SEQ ID NO: 11710 - DNA, 295 bp, Homo sapiens
  source 1..295: mol_type = other DNA
tgcagcctctggattcacttttagcagctatgccatgagctgggtccgccaggctccagggaaggggctggagtgggtctcagctattagtggaagtggtggcagcacaaacgacgcagactccgtgaagggccggttcaccatctccagagacaatcccaacaacatgctgtatctgcaaatgaacagcctgagagccgaggacacggccgtatattattgtgcgaaaggcggagctactacgcggtattattttgactactggggccagggaaccctggtcaccgtctcctca

SEQ ID NO: 11711 - DNA, 295 bp, Homo sapiens
  source 1..295: mol_type = other DNA
tgcagcctctggattcacctttagcagctatgccatgagctgggtccgccaggctccagggaaggggctggagtgggtttcagctattagtggtagtggtggaagcacaaactacgcagactccgtgaagggccggttcaccatctccagagacaattccaagaacacgctgtatctgcaaatgaacagcctgagagccgaggacacggccgtatattactgtgcgaaagggggagctactactaggtactactttgactactggggccagggaaccctggtcaccgtctcctca

SEQ ID NO: 11712 - DNA, 295 bp, Homo sapiens
  source 1..295: mol_type = other DNA
tgcagcctctggattcacctttagcagctatgccatgagctgggtccgccaggctccagggaaggggctggagtgggtttcagctattagtggtagtggtggaagcacaaactacgcagactccgtgaagggccggttcaccatctccagagacaattccaagaacacgctgtatctgcaaatgaacagcctgagagccgaggacacggccgtatattactgtgcgaaagggggagctactactaggtactactttgactactggggccagggaaccccggtcaccgtctcctca

SEQ ID NO: 11713 - DNA, 295 bp, Homo sapiens
  source 1..295: mol_type = other DNA
tgcagcctctggattcacctttagcagctatgccatgagctgggtccgccaggctccagggaaggggctggagtgggtctcagctattagtggtagtggtggtagcacaaactacgcagactccgtgaagggccggttcaccatctccagagacaattccaagaacacgctgtctctgcaaatgaacagcctgagagacgaggacacggccgtatattactgtgcgaaagggggggctacaacccgatactactttgactactggggccagggaaccctggtcaccgtctcctca

SEQ ID NO: 11714 - DNA, 293 bp, Homo sapiens
  source 1..293: mol_type = other DNA
ccatctccggggacagtgtctctaccaacagtgctgcttggacctggatcaggcagtccccatcgagaggccttgagtggctgggaaggacatactacaggtccaagtggtatattgattatgcagtatctgtgaaaagtcgaataaccatcaagtcagacacatccaagaaccagttctccctgcaactgaactctgtgactcccgaggacacggctgtgtattactgtgcaagagaggggactaactgctttgactactggggccagggaaccctggtcaccgtctcctca

SEQ ID NO: 11715 - DNA, 293 bp, Homo sapiens
  source 1..293: mol_type = other DNA
ccatctccggggacagtgtctctaccaacagtgctgcttggaactggatcaggctgtcaccatcgagaggccttgagtggctgggaaggacatactacaggtccaagtggttttatgattatgcagtatctgtgaaaagtcgaataacgatcaacccagacacatccaagaaccagttctccctgcagctgaactctgtgagtcccgaggacacggctgtgtattactgtgcaagagaggggactaactgctttgactactggggccagggaaccctggtcaccgtctcctca

SEQ ID NO: 11716 - DNA, 293 bp, Homo sapiens
  source 1..293: mol_type = other DNA
ccatctccggggacagtgtctctaccaacagtgctgcttggacctggatcaggcagtccccatcgagaggccttgagtggctgggaaggacatactacaggtccaagtggtatattgattatgcagtatctgtgaaaagtcgaataaccatcaacccagacacatccaagaaccagttctccctgcaactgaactctgtgactcccgaggacacggctgtgtattactgtgcaagagaggggactaactgctttgactactggggccagggaaccctggtcaccgtctcctca

SEQ ID NO: 11717 - DNA, 293 bp, Homo sapiens
  source 1..293: mol_type = other DNA
ccatctccggggacagtgtctctaccagcagtgctgcttggagctggatcaggcagtccccatcgagaggccttgagtttctgggaaggacattctacaggtccaagtggtattatgattatgcagtctctgtgaaaagtcgaataagtatcaacccagacacagccaagaaccagttctccctgcagctgaactctgtgactcccgaggacacggctgtatattactgtgcaagagaggggactaactgctttgactactggggccagggaaccctggtcaccttctcctca

SEQ ID NO: 11718 - DNA, 293 bp, Homo sapiens
  source 1..293: mol_type = other DNA
ccatctccggggacagtgtctctaccagcagagctgcttggagctggatcaggcagtccccatcgagaggccttgagtttctgggaaggacatactacaggtccaagtggtataatgattatgcagtatctgtgaaaagtcgaataaccctcaacccagacacatccaagaaccagttctccctccggctgaactctgtgactcccgaggacacggctgtatatttctgtgcaagagaggggactaactgctttgactactggggccagggaaccctggtcaccgtcccctca

SEQ ID NO: 11719 - DNA, 293 bp, Homo sapiens
  source 1..293: mol_type = other DNA
ccatctccggggacagtgtctctaccatcaatggtgcttggaactggatcaggcagtccccatcgagaggccttgagtggctgggaaggacatactaccggtccaagtggtataatgattatgcagtgtctgtgagaggtcgaatagccatcaacccagacacatccaagaaccagttctccctgcagctaaactctgtgactcccgaggacacggctgtgtattactgtgcaagagagggcaccaactgctttgactactggggccagggaaccctggtcaccgtctcctca

SEQ ID NO: 11720 - DNA, 293 bp, Homo sapiens
  source 1..293: mol_type = other DNA
ccatatctggggacagtgtctctacggacagtgctgcttggaactggatcaggcagtccccatcgggaggccttgagtggctggggaggacatattacaggtccaagtggtatcatgattatgcagtatctgtgaaaagtcgattaaccatcagtccagacacatccaagaaccagttctccctgcagctgagctctgtgactcccgaggacacggctgtatatttctgtgctagagaagggaccaactgctttgactactggggccagggaaccctggtcaccgtctcctca

SEQ ID NO: 11721 - DNA, 280 bp, Homo sapiens
  source 1..280: mol_type = other DNA
tgcagcctctggattcaccctcagtagctatgctatgcactgggtccgccaggctccaggcaaggggctggagtgggtggcagttatctcatatgatggaagcaataaatactacgcagactccgtgaagggccgattcaccatctccagagacatttccaagaacacagtgtttcttcaaatgagcagcctgagacctgaggacacggctgtatattactgtgcgagagatttgacctatgactactggggccagggaaccctggtcaccgtctcctca

SEQ ID NO: 11722 - DNA, 280 bp, Homo sapiens
  source 1..280: mol_type = other DNA
tgtagcctctggattcaccttcagtaactatgctatgcactgggtccgccaggctccaggcaaggggctggagtgggtggcagttatatcatatgatgaaagtaataaattctacgcagactccgtgcagggccgattcaccatctccagagacaattccaagaacacactgtatctgcaaatgaacagcctgagagctgaggacacggctgtgtattactgtgcgagagatctaacttatgactactggggccagggaactctggtcaccgtctcctca

SEQ ID NO: 11723 - DNA, 283 bp, Homo sapiens
  source 1..283: mol_type = other DNA
tgcagcgtctggattcaccttcagtagttatggcatgcactgggtccgccaggctccaggcaaggggctggagtgggtggcagtcatttggtatgatggaagtaataaatactatggagactccgtgaagggccgattcaccatctccagagacaattccaagaacacgctgtatctgcaaatgaacagcctgagagccgaggacacggctgtgtattactgtgtgagagccgggaatgcttttgatgtctggggccaagggacaatggtcaccgtctcttca

SEQ ID NO: 11724 - DNA, 283 bp, Homo sapiens
  source 1..283: mol_type = other DNA
tgcagcgtctggattcaccttcagtagttatggcatgcactgggtccgccaggctccaggcaaggggctggagtgggtggcagttatttggtatgatggaagtaataaatactatggagactccgtgaagggccgattcaccatctccagagacaattccaagaacacgttgtctctgcaaatgaacagcctgagagtcgaggacacggctgtgtattactgtgtgagagccgggaatgcttttgatgtctggggccaagggacattggtcaccgtctcttca

SEQ ID NO: 11725 - DNA, 283 bp, Homo sapiens
  source 1..283: mol_type = other DNA
tgcagcgtctggattcaccttcagtagttatggcatgcactgggtccgccaggctccaggcaaggggctggagtgggtggcagtcatttggtatgatggaagtaataaatactatggagactccgtgaagggccgattcaccatctccagagacaattccaagaacacgctgtatctgcaaatgaacagcctgagagccgaagacacggctgtgtattactgtgtgagagccgggaatgcttttgatgtctggggccaagggacaatggtcaccgtctcttca

SEQ ID NO: 11726 - DNA, 283 bp, Homo sapiens
  source 1..283: mol_type = other DNA
tgcagcgtctggattcaccttcagtagttatggcatgcactgggtccgccaggctccaggcaaggggctggagtgggtggcagttatttggtatgatggaagtaataaatactatggagactccgtgaagggccgattcaccatctccagagacaattccaagaacacgctgtatctacaaatgaacagcctgagagccgaggacacggctgtgtattactgtgtgagagccgggaatgcttttgatgtctggggccaagggacaatggtcaccgtctcttca

SEQ ID NO: 11727 - DNA, 283 bp, Homo sapiens
  source 1..283: mol_type = other DNA
tgcagcgtctggattcaccttcagcagctatggcatgcactgggtccgccgggccccaggcaaggggctggactgggtggcagttatatggtatgatggaagtaataaatactatgcagactccgtgaagggccgattcaccatctccagagacaattccaagaacacactatatctgcaaatgaacaccctgagagtcgaggatacggctctatattactgtgtgagagccggtaatgcttttgatgtctggggccaaggggcaatggtcaccgtcacttca

SEQ ID NO: 11728 - DNA, 283 bp, Homo sapiens
  source 1..283: mol_type = other DNA
tgcagcctctggattcacctttagccgctatgccatgacctgggtccgccagcctccagggaagggactggagtgggtctcagttatttatactaatggtggtagcacatactacgcagactccgtgaagggccggttcaccatctccagagacaattccaagaacacgctgtatctgcaaatgaacagcctgagagccgaggacacggccgtatattactgtgcgaaacagggccgggagccggactactggggccagggaaccctggtcaccgtctcctca

SEQ ID NO: 11729 - DNA, 283 bp, Homo sapiens
  source 1..283: mol_type = other DNA
tgtagcctctggattcacctttagcacctataccatgacctgggtccgccaggctccagggaaggggctggagtgggtctcacttattactagcgccggtactgccacatcctatgcaggctctgtgaggggccggttcaccatctccagagataattccaagaacacgctctatctgcaaatgaacagcctgagagccgaggacacggccgtgtattattgtgccaaacagggacgggaacctgactactggggccagggaaccctggtcaccgtctcctca

SEQ ID NO: 11730 - DNA, 283 bp, Homo sapiens; identical to SEQ ID NO: 11729
  source 1..283: mol_type = other DNA

SEQ ID NO: 11731 - DNA, 280 bp, Homo sapiens
  source 1..280: mol_type = other DNA
tgcagcctctggattcagcttcagtaactattggatgacctggattcgccaggctccagggaaggggctggagtgggtggccaacataaggcacgatggacgtgagaaatactatgtggactctgtgaagggccgattcaccgtctccagagacaatgccaagaactcactgtatctgcaaatgaacagcctgagagtcgaggacacggccgtgtattactgtgcgagacataaaggacttgagtactggggccagggaaccctggtcaccgtctcctca

SEQ ID NO: 11732 - DNA, 280 bp, Homo sapiens
  source 1..280: mol_type = other DNA
tgcagcctctggattcacgtttggtagttattggatgacttgggtccgccaggctccagggaaggggctggaatgggtggccaacataaacccagatggaagaaggaaatactatgtggactctgtgaagggccgattcaccatctccagggacaacgccaagaactcactgtttctgcaaatgaacagcctgagagtcgaggacacggctgtttattactgtgcgagacataagggccttgaatattggggccagggaaccctggtcaccgtctcctca

SEQ ID NO: 11733 - DNA, 280 bp, Homo sapiens
  source 1..280: mol_type = other DNA
tctagcctctggattcacctttagtaggttttggatgacttgggtccgccaggctccagggaaggggctggagtgggtggccaacataaaggaagatggacgtgagaaatattatgtggactctgtgaagggacgattcaccatctccagagacaacgccaagaactcactgtatctgcaaatgaacagcctgagagccgaggacacggccgtatattactgtgcgagacataaaggccttgaatactggggccagggaatcctggtcaccgtctcctca

SEQ ID NO: 11734 - DNA, 280 bp, Homo sapiens
  source 1..280: mol_type = other DNA
tctagcctctggattcacctttagtaggttttggatgacttgggtccgccaggctccagggaaggggctggagtgggtggccaacataaaggaagatggacgtgagaaatattatgtggactctgtgaagggccgattcaccatctccagagacaacgccaagaactcactgtatctgcaaatgaacagcctgagagccgaggacacggccgtatattactgtgcgagacataaaggccttgaatactggggccagggaatcctggtcaccgtctcctca

SEQ ID NO: 11735 - DNA, 307 bp, Homo sapiens
  source 1..307: mol_type = other DNA
tgcagcctctggattcacctttagtacctcttggatgagctgggtccgccaggctccagggaaggggctggagtgggtggccaacataaagcaagatggaagtgagaattcctgtgtggactctgtgaagggccgattcaccatctccagagacaacgccaagaactcactgtatctgcaaatgaacagcctgagagccgaggacacggccgtgtattactgtgcgagaggtcccacatattgtggtggtgactgctactactactttgactactggggccagggaaccctggtcaccgtctcctca

SEQ ID NO: 11736 - DNA, 307 bp, Homo sapiens
  source 1..307: mol_type = other DNA
tgcagcctctggattcacctttagtagttattggatgagctgggtccgccaggctccagggaaggggctggagtgggtggccaacataaagcaagatggaagtgagaaatcctatgtggactctgtgaagggccgattcaccatctccagagacaaccccaagaactcactgtatctgcaaatgaacagcctgagagccgaagacacggccgtgtattactgtgcgagaggtcccacatattgtggtggtgactgctactactactttgactactggggccagggaaccctggtccccgtctcctca

SEQ ID NO: 11737 - DNA, 307 bp, Homo sapiens
  source 1..307: mol_type = other DNA
tgcagcctctagattcacctttagtagctattggatgagctgggtccgccaggctccagggaaggggctggagtgggtggccaacataaagcaagatggaagtgagaaatcctatgtggactctgtgaagggccgattcaccatctccagagacaacgccaagaactcactgtatctgcaaatgaacagcctgagagccgaggactcggccgtgtatttctgtgcgagaggtcccacatattgtggtggtgactgctactactactttgactactggggccagggaaccctggtcaccgtctcctca

SEQ ID NO: 11738 - DNA, 307 bp, Homo sapiens
  source 1..307: mol_type = other DNA
tgcagcctctggattcacctttagaagctattggatgagctgggtccgccagactccagggaaggggctggagtgggtggccaacataaagcaagatggaggtgagaaagactatgtggactctgtgaagggccgattcaccatctccagagacaacgccaagaactcactgtatctgcaaatgaacagcctgagagccgaggacacggctgtgtattactgtgcgagaggcccaacatattgtggtggtgactgctattactactttgactactggggccagggaaccctggtcaccgtctcctca

SEQ ID NO: 11739 - DNA, 283 bp, Homo sapiens
  source 1..283: mol_type = other DNA
tgaagcctctggattcaccttcagcagctatggcatgagctgggtccgccaggctccagggaaggggctggagtgggtctcagctattagtggtactggcgttagcagatactacgcagactccgagaagggccggttcaccatctccagagacaattccaagaacacgctgtttctgcaaatgaacagcctgagagccgaggacacggccgtgtattactgtgcgaaaggggggagctatatggactactggggccagggaaccctggtcaccgtctcctca

SEQ ID NO: 11740 - DNA, 277 bp, Homo sapiens
  source 1..277: mol_type = other DNA
tgcagcctctggattcacttttagcatctatgccatgagctgggtccgccaggctccagggaaggggctggagtgggtctcatctattactggtggtggcacatactacgcagactccgtgaagggccggttcaccatctccagagacaattccaagaacacgctgtatctgcaaatgagcagcctgagagccgaggacacggccgtattttactgtgcgaagggtgggagttacatggattactggggccagggaaccctggtcaccgtctcctca

SEQ ID NO: 11741 - DNA, 277 bp, Homo sapiens
  source 1..277: mol_type = other DNA
tgcagcctctgatttcacctttagcaactatgccatgagctgggtccgccaggctccagggaaggggctggagtgggtctcaggtattagtggtagtggtgacaacacatactacgcagactccgtgaagggccggttcaccatctccagagacaattccaagaacacgctgtatctgcaaatgagcagcctgagagtcgaggacacggccgtatattattgtgcgaaagggggtggaggctcctggggccagggaaccctggtcaccgtctcctca

SEQ ID NO: 11742 - DNA, 277 bp, Homo sapiens
  source 1..277: mol_type = other DNA
tgcagcctctggattcacctttagcagctatgacatgaactgggtccgccagactccagggaaggggctggagtgggtctcaggtattggtagaaggggttttctcacatcctacgctgactccgtgaagggccggttcaccatctccagagacaactccaagaacaccgtgtttctgcaaatggacagcctgagagccgaggacacggccgtctattactgtgcgaaaggaggggggggctcctggggccagggaaccctggtcatcgtctcctca

SEQ ID NO: 11743 - DNA, 274 bp, Homo sapiens
  source 1..274: mol_type = other DNA
tgcagcctctggattcaccttcagtagttatgaaatgaactgggtccgccaggctccagggaaggggctggagtgggtttcattcattagtagtagtggtggtaccatatactacgcagactctgtgaagggccgattcaccatctccagagacaacgccaagaactcactgtatctgcaaatgaacagcctgagagccgaggacacggctgtttattactgtgcgagaaaaggggaccactggggccagggaaccctggtcaccgtctcctca

SEQ ID NO: 11744 - DNA, 274 bp, Homo sapiens
  source 1..274: mol_type = other DNA
tgcagcctctggattcaccttcagtagttatgacatgaactgggtccgccaggctccagggaaggggctggagtgggtttcatacattagtggtagtggtagtgccatatcctacgcagactctgtgaagggccggttcaccatctccagagacaacgccaagaattcactgtatctgcaaatgaacagcctgagagtcgaggacacggctgtttattactgtgcgaggaagggtgaccactggggccggggaaccctggtcaccgtctcctca

SEQ ID NO: 11745 - DNA, 274 bp, Homo sapiens
  source 1..274: mol_type = other DNA
tgcagcctctggattcatcttcagtaattatgaaatgaactgggtccgccaggctccagggaaggggctggagtgggtttcatacattaatagtggtggtactaccatatattacgcagactctgtgaagggccgattcaccatctccagagacaacgccaggaactcactgtatctacaaatgaacagcctgagagccgaggacacggctgtttattactgtgcgaggaagggggaccactggggccagggaaccctggtcaccgtctcctca

SEQ ID NO: 11746 - DNA, 286 bp, Homo sapiens
  source 1..286: mol_type = other DNA
tgcagcctctggattcacctttagtaggtcttggatggcctgggtccgccaggctccagggaaggggctggagtgggtggccaagataaagacagatggaagtgataagtattatgaggactctgtgaggggccgattcaccatctccagagacaacgccaagaactcactctatctgcaaatgaacagcctgagaggcgacgacacggctgtgtattactgtgcgacaaacatcaattggtgtttcgactcctggggccagggaaccctggtcaccgtctcctca

SEQ ID NO: 11747 - DNA, 286 bp, Homo sapiens
  source 1..286: mol_type = other DNA
tgcagcctctggattcgcctttagtagggcttggatggcctgggtccgccaggctccagggaaggggctggagtgggtggccaagataaagccagatggaattgagaggtattatgtggactctgtgaggggccgattcaccatctccagagacaacgccaagaactcactctatctccaaatgaacagcctcagaggcgacgacacggctgtgtattactgtgcgacaaacatcaattggtgtttcgactcctggggccagggaacactggtcagcgtctcctca

SEQ ID NO: 11748 - DNA, 286 bp, Homo sapiens
  source 1..286: mol_type = other DNA
tgcagcctctggattcacctttagtaggtcttggatggcctgggtccgccaggctccagggaaggggctggagtgggtggccaagataaagacagatggaagtgataagtattatgtggactctgtgaggggccgattcaccatctccagagacaacgccaagaactcactctatctgcaaatgaacagcctgagaggcgacgacacggctgtgtattactgtgcgacaaacatcaattggtgtttcgactcctggggccagggaaccctggtcaccgtctcctca

SEQ ID NO: 11749 - DNA, 286 bp, Homo sapiens
  source 1..286: mol_type = other DNA
tgcagcctctggattcgcctttagtagggcttggatggcctgggtccgccaggctccagggaaggggctggagtgggtggccaagataaagccagatggaattgagaggtattatgtggactctgtgaggggccgattcaccatctccagagacaacgccgagaactcactctatctccaaatgaacagcctcagaggcgacgacacggctgtgtattactgtgcgacaaacatcaattggtgtttcgactcctggggccagggaacactggtcagcgtctccaca

SEQ ID NO: 11750 - DNA, 286 bp, Homo sapiens; identical to SEQ ID NO: 11747
  source 1..286: mol_type = other DNA

SEQ ID NO: 11751 - DNA, 286 bp, Homo sapiens
  source 1..286: mol_type = other DNA
tgcagcctctggattcgcctttagtaggtcttggatggcctgggtccgccaggctccagggaaggggctggagtgggtggccaagataaagacagatggaagtgagagctattatgtggactctgtgaggggccgattcaccatctccagagacaacgccaagaactcactctatctccaaatgaacagcctcagaggcgacgacacggctgtgtattactgtgcgacaaacatcaattggtgtttcgactcctggggccagggaacactggtcagcgtctcctca

SEQ ID NO: 11752 - DNA, 286 bp, Homo sapiens
  source 1..286: mol_type = other DNA
tgcagcctctggattcacctttagtcggtcttggatggcctgggtccgccaggctccagggaaggggctggagtgggtggccaagataaagccagatggaagtgagaggtattatgtggactctgtgaggggccgattcaccatctccagagacaacgccaagaactcactctatctgcaaatgaacagcctgagaggcgacgacacggctgtgtattactgtgcgacaaacatcaattggtgtttcgactcctggggccagggaacactggtcagcgtctcctca

SEQ ID NO: 11753 - DNA, 286 bp, Homo sapiens
  source 1..286: mol_type = other DNA
tgcagcctctggattcacctttagtaggtcttggatggcctgggtccgccaggctccagggaaggggctggagtgggtggccaagataaagccagatggaagtgagaggtattatgtggactctgtgaggggccgattcaccatctccagagacaacgccaagaactcactctatctgcaaatgaacagcctgagaggcgacgacacggctgtgtattactgtgcgacaaacatcaattggtgtttcgactcctggggccagggaacactggtcagcgtctcctca

SEQ ID NO: 11754 - DNA, 286 bp, Homo sapiens
  source 1..286: mol_type = other DNA
tgcagcctctggattcgcctttagtagggcttggatggcctgggtccgccaggctccagggaaggggctggagtgggtggccaagataaagccagatggaagtgagaggtattatgtggactctgtgaggggccgattcaccatctccagagacaacgccaagaactcactctatctccaaatgaacagcctcagaggcgacgacacggctgtgtattactgtgcgacaaacatcaattggtgtttcgactcctggggccagggaacactggtcagcgtctcctca

SEQ ID NO: 11755 - DNA, 286 bp, Homo sapiens
  source 1..286: mol_type = other DNA
tgcagcctctggattcgcctttagtaggtcttggatggcctgggtccgccaggctccagggaaggggctggagtgggtggccaagataaagacagatggaagtgagaggcattatgtggactctgtgaggggccgattcaccatctccagagacaacgccaagaagtcactctatctccaaatgaacagcctcagaggcgacgacacggctgtgtattactgtgcgacaaacatcaattggtgtttcgactcctggggccagggaacactggtcagcgtctcctca

SEQ ID NO: 11756 - DNA, 286 bp, Homo sapiens
  source 1..286: mol_type = other DNA
tgcagcctctggattcgcctttagtaggtcttggatggcctgggtccgccaggctccagggaaggggctggagtgggtggccaagataaagacagatggaagtgagaggcactatgtggactctgtgaggggccgattcaccatctccagagacaacgccaggaactcactctatctccaaatgaacagcctcagaggcgacgacacggctgtgtattactgtgcgacaaacatcaattggtgtttcgactcctggggccagggaacactggtcagcgtctcctca

SEQ ID NO: 11757 - DNA, 286 bp, Homo sapiens; identical to SEQ ID NO: 11753
  source 1..286: mol_type = other DNA

SEQ ID NO: 11758 - DNA, 286 bp, Homo sapiens
  source 1..286: mol_type = other DNA
tgcagcctctggattcacctttagtaggtcttggatggcctgggtccgccaggctccagggaaggggctggagtgggtggccaagataaagacagatggaagtgagagtcattatgtggcctctgtgaggggccgattcaccatctccagagacaacgccaagaactcactctatctgcaaatgaacagcctgagaggcgacgacacggctgtgtattactgtgcgacaaacattaattggtgtttcgactcctggggccagggaaccctggtcatcgtctcctca

SEQ ID NO: 11759 - DNA, 286 bp, Homo sapiens
  source 1..286: mol_type = other DNA
tgcagcctctggattcgcctttagtagggcttggatggcctgggtccgccaggctccagggaaggggctggagtgggtggccaagataaagccagatggaattgagagctattatgtggactctgtgaggggccgattcaccatctccagagacaacgccaagaactcactctatctccaaatgaacagcctcagaggcgacgacacggctgtgtattactgtgcgacaaacatcaattggtgtttcgactcctggggccagggaacactggtcagcgtctcctca

SEQ ID NO: 11760 - DNA, 286 bp, Homo sapiens
  source 1..286: mol_type = other DNA
tgcagcctctggattcgcctttagtaggtcttggatggcctgggtccgccaggctccagggaaggggctggagtgggtggccaagataaagccagatggacgtgagagggattatgtggactctgtgaggggccgattcaccatctccagagacaacgccaagaactcactctatctccaaatgaacagcctcagaggcgacgacacggctgtgtattactgtgcgaccaacatcaattggtgtttcgactcctggggccagggaacactggtcagcgtctcctca

SEQ ID NO: 11761 - DNA, 295 bp, Homo sapiens
  source 1..295: mol_type = other DNA
tacagcctctggattcacctttagcttctatgccatgagctgggtccgccaggctccagggaaggggccggagtgggtctcaactattgggggtggtggtactgagacatacaacgcagactccgtgaagggccggttcaccatctccagagacaactccaagaacacgttgtatctgcaaatgaacagcctgagagccgacgacacggccgtatattactgtgcgaaaggtcccggcacaggttactccggtatggacgtctggggccaggggaccacggccaccgtctcctca

SEQ ID NO: 11762 - DNA, 295 bp, Homo sapiens
  source 1..295: mol_type = other DNA
tgcagcctctggactcaccttcaggtacttcgccatgagctgggtccgccaggctccagggacgggactggagtgggtctcaactattggcggtggtggtatcatcacatactacgatgactccgtgaagggccggttcaccatctccagagacaatgccaaggacacgctgttcctgcaaatgagcagcctgagagccgaggacacggccgtttattactgtgcgaaagggcccggtacgggctactctggtatggacgtctggggccaagggaccacggtcaccgtctactca

SEQ ID NO: 11763 - DNA, 280 bp, Homo sapiens
  source 1..280: mol_type = other DNA
tgttgcctctggattcacctttagaagcttttcgatgaactgggtccgccaggctccagggaaggggctggagtgggtggccaagataaagcaagatggaagtgagaaggactatgtagactctgtgaggggccgattcaccatctccagagacaacgccaagaactcactatatctgcaaatgaacagcctgagagtcgaggacacggccgtgtattactgtgcgagatctgcccggggggactactggggccagggaaccccggtcaccgtctcctca

SEQ ID NO: 11764 - DNA, 280 bp, Homo sapiens
  source 1..280: mol_type = other DNA
tgcagcctctggattcacctttagtaaccattggatgagctgggtccgccaggctccagggaaggggctggagtgggtggccatcataaagcaagatggcagtgagaaaaactctgtggactctgtgaagggccgattcaccatctccagagacaacaccaagaactcactgtttctgcaaatgaacagcctgagagtcgaggacacggctgtgtattattgtgcgaggagcgccaggggtgactactggggccagggaaccctggtcaccgtctcctca

SEQ ID NO: 11765 - DNA, 292 bp, Homo sapiens
  source 1..292: mol_type = other DNA
tgcagccactggattcacttttagtagttattggatcagctgggtccgccaggctccagggaaggggctggagtgggtggccaatacaaacgaagatggaagtgagaaatactatgtggactctgtgaagggccgattcaccatttccaaagacaacgccaagaactcactatatctgcaaatgaacagcctgagagccgaggacacggctgtctattactgtgcgagagggacggtgactactcccggtatggacgtctggggccaagggaccacggtcaccgtctcctca

SEQ ID NO: 11766 - DNA, 292 bp, Homo sapiens; identical to SEQ ID NO: 11765
  source 1..292: mol_type = other DNA

SEQ ID NO: 11767 - DNA, 292 bp, Homo sapiens
  source 1..292: mol_type = other DNA
tgcagcctctggattcagctttagtggctattggatgaactgggtccgccaggctccagggaaggggctggagtgggtggccaacacaaatgaagatggaagtgggaaattctatgtggactctgtaaagggccgattcaccatctccagagacaacgccaagaactcactgtatctacaaatgaacagtctgagagccgaggacatggctgtgtattactgtgcgagaggtacggtgactacgcctgggatggacgtctggggcttgggggccacggtcaccgtctcctca

SEQ ID NO: 11768 - DNA, 292 bp, Homo sapiens
  source 1..292: mol_type = other DNA
tgcagcctctggattcagctttagtggctattggatgaactgggtccgccaggctccagggaaggggctggagtgggtggccaatacaaatgaagatggaagtgggaaattctatgtggactctgtaaagggccgattcaccatctccagagacaacgccaagaactcactgtatctacaaatgaacagtctgagagccgaggacatggctgtgtattactgtgcgagaggtacggtgactacgcctgggatggacgtctggggcttgggggccacggtcaccgtctcctca

SEQ ID NO: 11769 - DNA, 292 bp, Homo sapiens
  source 1..292: mol_type = other DNA
cactgtctctggtgtctccatcagcagtagtagttactactggggctggatccgccaggccccagggaaggggctggagtggattgggaatatctattatagtgggagcacctaccagaacccgtccctcaagagtcgagtcaccatatccgtagacacgtcgaagaaccagctctccctgaagctgagctctgtgaccgccgcagacacggctgtctattactgtgcgagacatgttagccatacagctatggattactggggccagggaaccctggtcaccgtctcctca

SEQ ID NO: 11770 - DNA, 292 bp, Homo sapiens
  source 1..292: mol_type = other DNA
ccctgtctctggtgtctccatcagcagtagtagttacaactgggtctggatccgccagccccccgggaagggactggagtggattgggagtatctattatagtgggagcacctactacaacccgtccctcgagagtcgagtcgccatatccgtagacacgtccaagaaccagttctccctgaagctgagctctgtgaccgccgcagacacggctgtgtattactgtgcgagacatgtttcgcatacagctatggactactggggccagggaaccctggtcaccgtctcctca

SEQ ID NO: 11771 - DNA, 292 bp, Homo sapiens; identical to SEQ ID NO: 11770
  source 1..292: mol_type = other DNA

SEQ ID NO: 11772 - DNA, 277 bp, Homo sapiens
  source 1..277: mol_type = other DNA
cactgtctctggtggctccatcagcagtagtagttactactggggctggatccgccagcccccagggaaggggctggagtggattggaattatctattatagtgggagcacctactacaacccgtccctcaagagtcgagtcaccatatccatagacacgtccaagaaccagttctccctgaagctgagctctgtgaccgccgcagacacggctgtgtattactgtgcgagacgaggagagtactggggccagggaaccctggtcaccgtctcctca

SEQ ID NO: 11773 - DNA, 277 bp, Homo sapiens
  source 1..277: mol_type = other DNA
cactgtctctggtggctccatcagcagtagtagttactactggggctggatccgccagcccccagggaaggggctggagtggattgggattatctattataatgggagcacctactacaacccgtccctcaagagtcgagtcaccatatccgtagacacgtccaagaaccagttctccctgaagttgagctctgtgaccgccgcagacacggctgtgtactactgtgcgagacgaggagaatactggggccagggaaccctggtcaccgtctcctca

SEQ ID NO: 11774 - DNA, 277 bp, Homo sapiens
  source 1..277: mol_type = other DNA
cactgtctctggtggctccatcagcagtagtagttactactggggctggatccgccagcccccagggaaggggctggagtggattgggattatctattatagtgggagcacctactacaacccgtccctcaagagtcgagtcaccatatccgtagacacgtccaagaaccagttctccctgaagctgagctctgtgaccgccgcagacacggctgtctattactgtgcgagacggggggagtactggggccagggaatcctggtcaccgtctcctca

SEQ ID NO: 11775 - DNA, 277 bp, Homo sapiens
  source 1..277: mol_type = other DNA
cagtgtctctggtggctccatcaccagtgatagttactactggggctggatccgccagcccccagggaaggggctggagtggattgggattatctattatagtgggaccacctactacaacccgtccctcaagagtcgagtcaccatattcatagacacgtccaagaaccagttctccctgaacctgacctctgtgaccgcctcagacacggctgtgtattactgtgcgagacgaggagagtactggggccagggaattctggtcaccgtctcctca

SEQ ID NO: 11776 - DNA, 277 bp, Homo sapiens
  source 1..277: mol_type = other DNA
cactgtctctggtggctccatcagcagtagtaattactactggggctggatccgccagcccccagggaaggggctggagtggattgggattatctattataatgggagcacctactacaacccgtcactcaagagtcgagtcaccatatccgtagacgcttccaagaaccagttctccctgaaactgaactctgtgaccgccgcagacacggctgtttattactgtgcgagacgtggggaatactggggccagggaagcctggtcaccgtctcctca

SEQ ID NO: 11777 - DNA, 277 bp, Homo sapiens
  source 1..277: mol_type = other DNA
cactgtctccggtggctccctcagcggtgataattactactggggctggatccgccagcccccagggaaggggctggagtggattgggattatctattatagtgggagaacccactacaatccgtccctcgagagtcgagtcaccatatccatagacacgtccaagaaccagttctccctgaagctgagctctgtgaccgccgcagacacggctgtatattactgtgcgagacggggagagtactggggccacggaaccctcgtcaccgtctcctca

SEQ ID NO: 11778 - DNA, 277 bp, Homo sapiens
  source 1..277: mol_type = other DNA
cactgtctctggtggctccatcagtagtattatttactactggggctggatccgccagcccccagggaagggactggagtggattggtagtatctattatagtgggaacacctcctacaacccgtccctcaagagtcgagtcaccatatccgtagacacgtccaagaaccagatctccctgaagctgagctctgtgaccgccgcagacacggctgtgtattactgtgcgagacgtggggagtattggggccagggaaccctggtcaccgtctcctca

SEQ ID NO: 11779 - DNA, 277 bp, Homo sapiens
  source 1..277: mol_type = other DNA
cactgtctctggtggctccatcagcagtggtatttactactggggctggatccgccagcccccagggaagggactggagtggattggtagtatctattttagtgggaacacctactacaacccgtccctcaagagtcgagtcaccatatccgtagacacgtccaagaaccagttctccctgaagctgagctctgtgaccgccgcagacacggctgtatattactgtgcgagacgtggggagtactggggccagggaaccctggtcaccgtctcctca

SEQ ID NO: 11780 - DNA, 277 bp, Homo sapiens
  source 1..277: mol_type = other DNA
cactgtctctggtggctccatcagcagtagtagttactactggggctggatccgccagcccccagggaagggactggagtggattggtagtatctattatagtgggaacacctactacaacccgtccctcaagagtcgagtcaccatatccgtagacacgtccaagaaccagttctccctgaaactgagctctgtgaccgccgcagacacggctgtgtattactgtgcgagacgtggggagtactggggccagggaaccctggtcaccgtctcctca

SEQ ID NO: 11781 - DNA, 277 bp, Homo sapiens
  source 1..277: mol_type = other DNA
cactgtctctggtggctccatcagcagtggtaattactactggggctggatccgccagcccccagggaaggggctggagtggattgggattatctattatagtgggagcacctactacaacccgtccctcaagagtcgagtcaccatatccgttgacacgtccaagaaccagttctccctgaagttgaggtctgtgaccgccgcagacacggctgtgtattactgtgcgagacggggggagtactggggccagggaaccctggtcaccgtctcctca

SEQ ID NO: 11782 - DNA, 286 bp, Homo sapiens
  source 1..286: mol_type = other DNA
cactgtctctggtggctccatcagcagtggtagttactactggggctggatccgccagcccccagggaagggactggagtggattggttatatctattatagtgggaacagtgggaacacctactacaacccgtccctcaagagtcgagtcaccatatccgtagacatgtccaagaaccagttctccctgaagctgagctctgtgaccgccgcagacacggctgtgtattactgtgcgagacgtggggagtactggggccagggaaccctggtcaccgtctcctca

SEQ ID NO: 11783 - DNA, 277 bp, Homo sapiens
  source 1..277: mol_type = other DNA
cactgtctctggtggctccatcagcagtattatttactactggggctggatccgccagcccccagggaagggactggagtggattggtagtatctattatagtgggaacacctcctacaacccgtccctcaagagtcgagtcaccatttccgtagacacgtccaagaaccagatctccctgaagctgagctctgtgaccgccgcagacacggctgtgtattactgtgcgagacgtggggagtattggggccagggaaccctggtcaccgtctcctca

SEQ ID NO: 11784 - DNA, 301 bp, Homo sapiens
  source 1..301: mol_type = other DNA
tgcagcctctggattcagcttcaggactcatagcatgaactgggtccgccaggctccagggaaggggctggagtggatttcatggattagtgatggtggtggcaccatattctacgcagactctgtgaagggccgattcaccatctccagagacgatgacaagaccacagtttatctgcaaatgaagagcctgagagacgaggatacggctgtctattactgtgcgagcgatggagtgggagttgttcccggggatgtatttgatatctggggccaagggacactggtcaccgtgtcccca

SEQ ID NO: 11785 - DNA, 301 bp, Homo sapiens
  source 1..301: mol_type = other DNA
tgcagcctctggattcagcttcaggactcatagcatgaactgggtccgccaggctccagggaaggggctggagtggctttcgtggattgctgatggtggtggcaccaaattctacgcagactctgtgaagggccgattcaccatctccagagacgatgccaagaccacagtttatctgcaaatgaacagcctgagagacgacgacacggctgtctattactgtgcgagcgatggagtgggagttgttcccggagatgtttttgatatctggggccaagggacactggtcaccgtgtcctca

SEQ ID NO: 11786 - DNA, 301 bp, Homo sapiens
  source 1..301: mol_type = other DNA
tggagcctctggattcaccttcaatagtcatagtttcaactgggtccgccaggctccagggaagggactggagtgggtttcattcattagtaacattggtgacaccacatactacgcagactctgtgaagggccgattcaccatctccagagacaatgccaagcgctcagtgtatctgcaaatgaacagcctgagagaggaggacacggctgtatatttctgtgcgagcgacggagtgggagttgtaccaggagatgtttttgatatctggggccaagggacaatggtcaccgtctcttca

SEQ ID NO: 11787 - DNA, 289 bp, Homo sapiens
  source 1..289: mol_type = other DNA
tgcagcctctggattcaccttcagtacctatgctacgcactgggtccgccaggctccaggcaaggggctggagtgggtggcagttatttcatatgatggaagtaacaaatactatgcagactccgtgaagggccgattcaccatctccagagacaattccaagaacacgctgtatctgcaaatgagcagcctgagagtggaggacacggctatttattactgtacgagagggccaagtgggagctattttgactactggggccagggaaccctggtcaccgtctcctca

SEQ ID NO: 11788 - DNA, 289 bp, Homo sapiens
  source 1..289: mol_type = other DNA
tgcagcctctggattcattttcattacctatgctattcactgggtccgtcaggctccaggcaaggggctgcagtgggtggcagttatatcaaaagatggaagtaataaatactacgcagactccgtgaagggccgattcaccatctccagagacaattccagggctacgctacatctgcaaatgaacagcctgagagctgaggacacggctgtatattactgtacgagaggccctagtgggagctattttgactactggggccagggaaccctggtcaccgtctcctca

SEQ ID NO: 11789 - DNA, 289 bp, Homo sapiens
  source 1..289: mol_type = other DNA
tggagcctctgaattcaccttcagttcttatgctatacactgggtccgccaggctccaggcaaggggctggagtgggtggcagttatatcaaaagatggaagtaatagatattacgcagactccgtgaagggccgattcaccgtctccagagacaattccaagaacacgctgtatctgcaaatggacagcctgagagctgatgacacggctgtttattactgcacgagagggccctcggggagttattttgactactggggccagggaaccctggtcaccgtctcctca

SEQ ID NO: 11790 - DNA, 298 bp, Homo sapiens
  source 1..298: mol_type = other DNA
caccgtctctcgtggctccatcaggagttactactggggctggatccggcagcccccagggaagggactggagtggattgggtatatctattacagtgggagcaccaactacaacccctccctcaagagtcgagtcaccatatcagtagacacgtccaagaaccagttctccctgaagctgagctctgtgaccgctgcggacacggccgtgtattactgtgcgagagtcccccctatagtgggaactactacagtttttgactactggggccagggaaccctggtcaccgtctcctca

SEQ ID NO: 11791 - DNA, 298 bp, Homo sapiens
  source 1..298: mol_type = other DNA
cactgtctctggtggctccatcaggaattactactggggctggatccggcagcccccagggaagggactggagtggattggatatatctattacagtgggagcgccaactacaacccctccctcaagagtcgagtcaccatgtcagtagacacgtccaagaaccagttctccctgaagctgaactctgtgaccactgcggacacggccgtgtatttctgtgcgagagtccctcctatagtgggaactactacagtctttgactactggggccagggaaccctgatcaccgtctcctca

SEQ ID NO: 11792 - DNA, 286 bp, Homo sapiens
  source 1..286: mol_type = other DNA
tgcagcctctggattcacctttagtaactattggatgagttggctccgccaggctccagggaaggggctggagtgggtggccaacataaatgaagatgcaagtaagaaatattatgtggactctgtgaagggccgattcaccgtctccagagacaatgccaagaactcactctatctgcaaatgaacaccctgacagccgaagacacggccgtctattactgtgcgagagggggctggtattactttgactcctggggccagggaaccctggtcaccgtctcctca

SEQ ID NO: 11793 - DNA, 286 bp, Homo sapiens
  source 1..286: mol_type = other DNA
tgcagcctctggattcacctttagtaactattggatgagttggctccgccaggctccagggaagggactggagtgggtggccaacataaatgaagatgcaactaagaaatattatgaggactctgtgaagggccgattcaccgtctccagagacaatgccaagaactcactctatctgcaaatgaacaccctgacagccgaagacacggccgtctattactgtgcgagagggggctggtattactttgactcctggggccagggaaccctggtcaccgtctcctca

SEQ ID NO: 11794 - DNA, 286 bp, Homo sapiens
  source 1..286: mol_type = other DNA
tgcagcctctggattcacctttagtacctattggatgagttgggtccgccaggctccagggaaggggctggagtgggtggccaacataaaacaggatggaagtgacatatactatgtggactctgtgaagggccgattcgttatctccagagacaacgccaggaactcactgtatatgcaaatgagcagcctgagagccgaagacacggccgtttattattgtgcgagagggggttggtattattttgactcctggggccagggaacccaggtcaccgtctcctca

SEQ ID NO: 11795 - DNA, 286 bp, Homo sapiens
  source 1..286: mol_type = other DNA
tgcagcctctggattcacgtttagtacctattggatgagttgggtccgccaggctccagggaaggggctggagtgggtggacaacataaaacaggatggaagtgacatatactatgtggagtctgtgaagggccgattcgttatctccagagacaacgccaggaactcactgtatatgcaattgagcagcctgagagccgaagacacggccgtttatttttgtgcgagagggggttggtattattttgactcctggggccagggaacccaggtcaccgtctcctca

SEQ ID NO: 11796 - DNA, 286 bp, Homo sapiens
  source 1..286: mol_type = other DNA
tgcagcctctggattcacgtttagtacctattggatgagttgggtccgccaggctccagggaaggggctggagtgggtggccaacataaaacaggatggaagtgacatatactatgtggagtctgtgaagggccgattcgttatctccagagacaacgccaggaactcactgtatatgcaattgagcagcctgagagccgaagacacggccgtttatttttgtgcgagagggggttggtattattttgactcctggggccagggaacccaggtcaccgtctcctca

SEQ ID NO: 11797 - DNA, 292 bp, Homo sapiens
  source 1..292: mol_type = other DNA
tgcagcctctggattcaccttcagtacctatggcatgcactgggtccgccaggctccaggcaaggggctggagtgggtggcagttatatcatctgatggaaatgtgaaatattatgcagactccatgatgggccgattcaccctctccagagacaattccaagaacaccctgtatatgcaaatgaacagcctgagagctgaggacacggctgtctattactgtgcgaaagaaatagcagtggctgatttctttgactactggggccagggaaccctggtcaccgtctcctca

SEQ ID NO: 11798 - DNA, 292 bp, Homo sapiens
  source 1..292: mol_type = other DNA
tgcagcctctggattcaccttcagtgcctatggcatacactgggtccgccaggctccaggcaaggggctggagtggatggcagttatctcatctgatggaagtcgtcaatattatgcagactccgtgaagggccgcttcaccatctccagagacaattccaagaacacactgtttctgcaaataaacagcctgagagctgaggacacggctgtctattactgtgcaaaagaaatagcagtggctgacttttttgactactggggccaggggacccttgtcaccgtctcctca

SEQ ID NO: 11799 - DNA, 294 bp, Homo sapiens
  source 1..294: mol_type = other DNA
aagggttctggatacagctttcccttctactggatcggctgggtgcgccagatgcccgggaaaggcctggaatggatgggcgtcatctatcctcgtgactctaataccatatacagcccgtccttccaaggccaggtcaccatctcagtcgacaagtccatcggcaccgcctatctgcagtggagcagcctgaaggccccggacaccgccatgtattactgtgcgagacaagacggtgacgcaaaatactactttgactactggggccagggaaccctggtcaccgtctcctca

SEQ ID NO: 11800 - DNA, 294 bp, Homo sapiens
  source 1..294: mol_type = other DNA
aagggttctggatacagctttacctactactggattgcctgggtgcgccagatgcccgggaaaggcctggagtggatggggatcatctatcctggtgagtctaatactagatacagcccgtccttccaaggccaggtcaccatctcagtcgacaagtccatcggcaccgcctacctgcagtggagcagcctgaaggcctcggacaccgccatgtattattgtgcgagacaagacggggatgccaaatactactttgactactggggccagggaaccctggtcatcgtctcctca

SEQ ID NO: 11801 - DNA, 294 bp, Homo sapiens
  source 1..294: mol_type = other DNA
aagggttctggatacagctttcccttctactggatcggctgggtgcgccagatgcccgggaaaggcctggagtggatggggatcatctatcctggtgactctaataccagatacagcccgtccttccaaggccaggtcaccatctcagtcgacaagtccatcggcaccgcctatctgcagtggagcagcctgaaggccccggacaccgccatgtattactgtgcgagacaagacggtgacgcaaaatactactttgactactggggccagggaaccctggtcaccgtctcctca

SEQ ID NO: 11802 - DNA, 294 bp, Homo sapiens
  source 1..294: mol_type = other DNA
aagggttctggatacagctttcccttttactggatcggctgggtgcgccagatgcccgggaaaggcctggagtggatggggatcatctatcctggtgactctaaaagcagatacagcccgtccttccaaggccaggtcaccatctcagtcgacaagtccatcggcaccgcctatctgcagtggagcagcctgaaggccccggacaccgccatgtatttttgtgcgagacaagatggtgacgcaaaatactactttgactactggggccagggaaccctggtcaccgtctcctca

SEQ ID NO: 11803 - DNA, 294 bp, Homo sapiens
  source 1..294: mol_type = other DNA
aagggttctggatacagctttcccttctactggatcggctgggtgcgccagatgcccgggaaaggcctggagtggatggggatcatctatcctggtgactctaataccagatacagcccgtccttccaaggccaggtcaccatctcagtcgacaagtccatcggcaccgcctacctgcagtggagcagcctgaaggccccggacaccgccatgtattactgtgcgagacaagacggtgacgcaaaatactactttgactactggggccagggaaccctggtcaccgtctcctca

SEQ ID NO: 11804 - DNA, 294 bp, Homo sapiens
  source 1..294: mol_type = other DNA
aagggttctggatacagcttcacctactactggatcgcctgggtgcgccagatgcccgggaaaggcctggagtggatggggatcatctatcctggtgactctaaaaccaaatacagtccgtccttccaaggccagttcaccatctcagccgacaagtccaccagcaccgcctacctgcagtggagcagcctgcaggcctcggacaccgccatatattactgtgcaagacaggatggcgacgcgaaatattactttgactactggggccagggaaccctggtcaccgtctcctca

SEQ ID NO: 11805 - DNA, 298 bp, Homo sapiens
  source 1..298: mol_type = other DNA
tgcagcctctggattcagcttcagtatttatgctatgcactgggtccgccaggctccaggcaaggggctggagtgggtggcagttatatcatatgatggaagtgataaattctatgcggactccgtgaagggccgattcaccatctccagagacaattccaagaacacactgtatctacaaatgaacagcctgagaactgcagacacggctgtgtattactgtgcgagagagagccggcagcagctggtgagctggttcgacccctggggccagggaaccctggtcaccgtctcctca

SEQ ID NO: 11806 - DNA, 298 bp, Homo sapiens
  source 1..298: mol_type = other DNA
tgcagcctctggattcaccttcagtaactatgctatacactgggtccgccaggctccaggcaaggggctggagtgggtggcagttatatcatatgatggaagggataaattctacgcagactccgtgaagggccggttcaccatctccagagacaattccaagaacacactgtatctgcaaatgagcagcctgagagctgaggacacggctgtgtattactgtgcgagagagagtcggcagcaactggtgagctggttcgacccctggggccagggaaccctggtcaccgtctcctca

SEQ ID NO: 11807 - DNA, 298 bp, Homo sapiens
  source 1..298: mol_type = other DNA
tggagtctttggattcaccttcagtaattatgccttccactgggtccgccaggcgccaggcaaggggctggagtgggtggcagtaatatcacatgatggcagtgtccaattctatgaagattccgtgaagggccgattcacgttctccagagacaattccaagaacacactgtatctgcaaatggacagcctgagagatgaggacaccgctgtctattactgtgcgagagaatcgcggcagcagttggtcagttggttcgacccctggggccagggaaccctggtcatcgtctcttca

SEQ ID NO: 11808 - DNA, 298 bp, Homo sapiens
  source 1..298: mol_type = other DNA
tgcagtctctggattcaccttcagtaactatgctttccactgggtccgccaggctccaggcaaggggctggagtgggtggcagttatatcatatgatggaagtgtgacattctactcagactccgtgaagggccgattcaccttctccagagacaattccaagaacacactttatctacaaatgaacagcctgagagatgacgacacggctatgtattactgtgcgagagagtcgcgacaacagctggtaagctggttcgacccctggggccagggaaccctggtcaccgtctcctca

SEQ ID NO: 11809 - DNA, 292 bp, Homo sapiens
  source 1..292: mol_type = other DNA
tgcagcctctggattcagattgagtgactcttggatgagctgggtccgccaggctccagggaaggggctggagtgggtggccaacattaagcaagatggaagtgacaaatactatgtggactctgtgaagggccgattcaccatctccagagacaccgccaagaattcactgtttttgcaaatgaacagcctgagagccgaggacacggctgtctattactgtgcgagagaaaaaccctacggtgactgctttgactactggggccagggaaccctggtcaccgtctcctca

SEQ ID NO: 11810 - DNA, 292 bp, Homo sapiens; identical to SEQ ID NO: 11809
  source 1..292: mol_type = other DNA

SEQ ID NO: 11811 - DNA, 292 bp, Homo sapiens
  source 1..292: mol_type = other DNA
tgcagcctctggattcatctttagtcactcttggatgagctgggtccgccaggctccggggaaggggctggagtgggtggccgccataaaacaagatggaagtgagaaattctatgtggactctgtgaagggccgattcgccatctccagagacaacgccgagaactcactgtttctgcaaatgaacagcctgagagccgaggacacggctgtgtattactgtgcgagagaaaagccctacggtgactgcttcgactactggggccagggaaccctggtcaccgtctcctca

SEQ ID NO: 11812 - DNA, 286 bp, Homo sapiens
  source 1..286: mol_type = other DNA
cactgtctctggcggctccatcagtagtagcaattactactgggcctggatccgccagcccccagggaagggcctggagtggattgggatgatgcattacagtgggagcacctactacaacccgtccctccagagtcgagtcaccatatccgtagacacgtccaagaaccacatttccctgaaggtgaggtctgtgaccggcgcagacacggctgtctattactgtgcgacgcgtgggagcaactttgactactggggccagggaaccctggtcaccgtctcctca

SEQ ID NO: 11813 - DNA, 286 bp, Homo sapiens
  source 1..286: mol_type = other DNA
cactgtctctggtggctccatcagtagtggttcttactactggggctggatccgccagaccccagggaagggactggagtggattgggagtttctattatactggaaccacctactacaacccgtccctcaagagtcgagtcaccatatccgtagacccgtccaagcagaagttctccctgacgctgaggtctgtgaccgccgcagacgcggctgtatatttctgtgcgacgcgtgggagtaattttgactactggggccagggaaccctggtcatcgtctcctca

SEQ ID NO: 11814 - DNA, 292 bp, Homo sapiens
  source 1..292: mol_type = other DNA
tgcagcctctgggttcaccgtcagtagcaactatatggtctgggtccgccaggctccagggaaggggctggagtgggtctcagttatttataccggtggtagcacatactacgcagactccgtgaagggccgattcaccatctccagagacaattccaagaacacgctttatcttcaaatgaacagcctgagagccgaggacacggccgtgtattactgtgcgggagtcgataacagtggctggtactgctttgactactggggccagggaaccctggtcaccgcctcctca

SEQ ID NO: 11815 - DNA, 292 bp, Homo sapiens
  source 1..292: mol_type = other DNA
tgcagcctctgggatcaccgtcagtagcaactacatgagctgggtccgccaggctccagggaaggggctggagtgggtctcacttatttatagcgatggtagcacattctacgcagactccgtgaagggccgtctcaccatctccagacacaattccaagaacacgctgtatcttcaaatgaacagtctgagaactgaggacacggccgtgtattactgtgcgggggtggataacagtggctggtattgctttgactactggggccagggaatcctggtcaccgtctcctca

SEQ ID NO: 11816 - DNA, 292 bp, Homo sapiens
  source 1..292: mol_type = other DNA
tgcagcctctgggttcaccgtcagtagcaactatatgggctgggtccgccaggctccagggaagggcctggagtgggtctcagttatttataccggtggtagcacatactacgcagactccgtgaagggccgattcaccatctccagagacaactccaagaacacgctttatcttcaaatgaacagcctgagagccgaggacacggccgtgtattactgtgcgggagtcgataacagtggctggtactgctttgactactggggccagggaaccctggtcaccgcctcctca

SEQ ID NO: 11817 - DNA, 283 bp, Homo sapiens
  source 1..283: mol_type = other DNA
tgcagcgtctggattcaccttcagtagctatggcatgcactgggtccgccaggctccaggcaaggggctggagtgggtggcagttatatggtatgatggaagtaataaatactatgcagactccgtgaagggccgattcaccatctccagagacaattccaagaacacgctgtatctgcaaatgaacagcctgagagccgaggacacggctgtatattattgtgcgaggtatagtagtggttatgactactggggccagggaaccctggtcaccgtctcctca

SEQ ID NO: 11818 - DNA, 283 bp, Homo sapiens
  source 1..283: mol_type = other DNA
tgcagcctctggattcaccttcagtagctatggcatgcactgggtccgccaggctccaggcaaggggctggagtgggtggcagttatatggtatgatggaagtaataaatactatgcagactccgtgaagggccgattcaccatctccagagacaattccaagaatacgctgtatctgcaaatgagcagcctgagagtcgaggacacggctgtgtattattgtgcgagatatagcagtggctatgactactggggccagggaaccctggtcaccgtctcctca

SEQ ID NO: 11819 - DNA, 292 bp, Homo sapiens
  source 1..292: mol_type = other DNA
tgcagtctctggatttactttcagtaatgaatggatgggctgggtccgccaggctccagggaaggggctggagtgggtcggccgtattaaaaggacaattgacggtgggacaacagactacgctgcacccgtgaaaggcagattcaccatctcaagagatgattcaagaaacacgttgtatttgcaactgaatagcctgaaaatcgaggacacagccgtgtattactgtaccacagatccgcccggggcttctgattactggggccagggagcccaggtcaccgtctcctca

SEQ ID NO: 11820 - DNA, 292 bp, Homo sapiens
  source 1..292: mol_type = other DNA
tgcagtctctggattcactttcaataatgagtggatgagctgggtccgccaggctccagggaagggcctggagtgggtcggccgcattaaaaccaaagctgaaggtgggacgaccgactacgcttcagtcgtgaaagacagattcaccatctcaagagatgattcaaaaagtacactgtatctgcaaatgaacagcctgagaaccgaggacacaggcctatattactgtaccacagatccgcctggggcctctgactactggggccagggaaccctggtcaccgtctcgtca

SEQ ID NO: 11821 - DNA, 286 bp, Homo sapiens
  source 1..286: mol_type = other DNA
tgcagcctctggattcaccttcagtacctataccatgaactgggtccgccaggctccagggaagggactggagtgggtttcaaacattaggactaatgagggtaccatgcactacgctgactctgtgaagggccgattcaccatctccagagacgatgccaaaaactcactgtttctgcaaatgaacagcctgagagacgaggacacggctgtgtatttctgtgcgagggattttcagtgggcttttgaccactggggccagggaatcctggtcaccgtctcctca

SEQ ID NO: 11822 - DNA, 289 bp, Homo sapiens
  source 1..289: mol_type = other DNA
tgcagcctctggattcagattcactacctatagcttcaactgggtccgccaggctccagggaaggggctggagtggcttgcatatgttggaagtggtccttctcgtcccataaactacgcagactctgtgaggggccgattcaccatctccagagacgatggcgacaattcagtgtttctgcaaatgaacaacctgagagacgacgacacggctgtctatttctgtgcgagagattttcagtgggcctttgaccactggggccagggagccctggtcaccgtctcctca

SEQ ID NO: 11823 - DNA, 280 bp, Homo sapiens
  source 1..280: mol_type = other DNA
tgcagtctctggattcacctttagtagttcttggatgagctgggtccgccaggctccagggaaggggctggagtgggtggccaacataaagcaagatggaagtgagaaaaactatgtggactctgtgaagggccgattcaccatctccagagacaacgccaagaattcattgaatctgcaaatgaacagcctgagagccgaggacacgggtgtgtattactgtgcgagagatcggggtggcagcagctggggccagggaaccctggtcaccgtctcctca

SEQ ID NO: 11824 - DNA, 280 bp, Homo sapiens
  source 1..280: mol_type = other DNA
tgcagcctctgaattcacctttagtaggtcttggatgagctgggtccgccaggctccagggaaagggctggagtgggtggccaacataaagcaagatggaagtgagaaatactatgtggactctgtgaagggccgattcaccatctccagagacaacgccaagaactcactatatctgcaaatgaacagcctgagagccgaggacacggctgtgtattactgtgcgagagatcgtgggggcagcagctggggccagggaaccctggtcaccgtctcctca

SEQ ID NO: 11825 - DNA, 280 bp, Homo sapiens
  source 1..280: mol_type = other DNA
tgtagcctctggattcaccttcagtgcctactacatgacctggatccgccaggctccagggaaggggctggagtgggtttcatacattactagtagtagttacacaaactacgcagactctgtgaagggccgattcaccatctccagagacaacgccaagaactcactgtatctgcaaatgaacagcctgagagccgaggacacggctgtatattactgtgtgagggacagctatggtcttgactactggggccagggaaccctggtcaccgtctcctca

SEQ ID NO: 11826 - DNA, 283 bp, Homo sapiens
  source 1..283: mol_type = other DNA
tgcagcctctggattcacgatcagactctactacatgggctggatccgccaggctccaggaaaggggctggagtgggtttcatacatcacttccagtcctagtaccatgtactacgcagactctgtgaagggccgattcaccatctccagggacgacgccaagaactcagtgttcctgcaaatgaacagcctgagagccgaggacacggctgtctattactgtgtgagagattcctatggtctggactactggggccagggaaacctggtcaccgtctcctca

SEQ ID NO: 11827 - DNA, 289 bp, Homo sapiens
  source 1..289: mol_type = other DNA
tgcagcctctggattcaccttcagtttcagtgactactacatgggctggatccgccaggctccagggaaggggctggattgggtttcatatattactagtggcggtagtaatatatactacgcagagtctgtgaagggccgattcaccatctccagggacgacgccaagaactcactgtatctgcaaatgaagagcctgagagccgaggacacggctgtgtattactgtgtgagagattcctatgggttggactactggggccagggaaccctggtcaccgtctcctca

SEQ ID NO: 11828 - DNA, 283 bp, Homo sapiens
  source 1..283: mol_type = other DNA
tgcagcctctggattcacgatcagggactactacctgggctgggtccgccaggctccaggaaagggactggagtgggtttcatacatcactagtattccaagtaccttgtattatgcagactctgtgaagggccgattcaccatctccagggacgacgccaagaactcagtgttcctgcaaatgaacagcctgagagccgaggacacggctgtctattactgtgtgagagattcctatggtctggactactggggccagggaaccctggtcaccgtctcctca

SEQ ID NO: 11829 - DNA, 283 bp, Homo sapiens
  source 1..283: mol_type = other DNA
tgtagcctctggattcacgatcagagactactacctgggctggatccgccaggctccaggaaaggggctggagtgggtttcatacatcactagtagtcctagtaccatgtactacgcagactctgtgaagggccgattcaccatctccagggacaacgccaagaactcagtattcctgcaaatgaacagcctgagagccgaggacacggctgtctattactgtgtgagagattcctatggtctggactactggggccagggaaccctggtcaccgtctcctca

SEQ ID NO: 11830 - DNA, 289 bp, Homo sapiens
  source 1..289: mol_type = other DNA
tgcagcctctggattcaccttcagtttcagtgactactacatgggctggatccgccaggctccagggaaggggctggattgggtttcatatattactagtggcggtagtaccatatactacgcagagtctgtgaagggccgattcaccatctccagggacgacgccaagaagtcactgtatctgcaaatgaagagcctgagagccgaggacacggctgtttattactgtgtgagagattcctatgggttggactactggggccagggaaccctggtcaccgtctcctca

SEQ ID NO: 11831 - DNA, 283 bp, Homo sapiens
  source 1..283: mol_type = other DNA
tgcagcctctggattcacgatcagagactactacatgggctggatccgccaggctccaggaaaggggctggagtgggtttcatacatcactagtagtcctagtaccatgtactacgcagactctgtgaagggccgattcaccatctccagggacaacgccaagaactcagtgttcctgcaaatgaacagcctgagagccgaggacacggctgtctattactgtgtgagagattcctatggtctggactactggggccagggaaccctggtcaccgtctcctca

SEQ ID NO: 11832 - DNA, 283 bp, Homo sapiens
  source 1..283: mol_type = other DNA
tgtagcctctggattcacgatcagagactactacctgggctggatccgccaggctccaggaaaggggctggagtgggtttcatacatcactagtagtcctagtaccatgtactacacagactctgtgaagggccgattcaccatctccagggacgacgccaagaactcagtattcctgcaaatgaacagcctgagagccgaggacacggctgtctattactgtgtgagagattcctatggtctcgactactggggccagggaaccctggtcaccgtctcctca

SEQ ID NO: 11833 - DNA, 283 bp, Homo sapiens
  source 1..283: mol_type = other DNA
tgtagcctctggattcacgatcagagactactacctgggctggatccgccaggctccaggaaaggggctggagtgggtttcatacatcactagtagtcctagtaccatgtactacacagactctgtgaagggccgattcaccatctccagggacgacgccaagaactcagtattcctgcaaatgaacagcctgagagccgaggacacggctgtctattactgtgtgagagattcctatggtctggactactggggccagggaaccctggtcaccgtctcctca

SEQ ID NO: 11834 - DNA, 283 bp, Homo sapiens
  source 1..283: mol_type = other DNA
tgcagcctctggattcacgatcagaccctactacatgggctggatccgccaggctccaggaaaggggctggagtgggtttcatacatcacttctagtcctagtaccatgtactacgcagactctgtgaagggccgattcaccatctccagggacgacgccaagaactcagtgttcctgcaaatgaacagcctgagagccgaggacacggctgtctattactgtgtgagagattcctatggtctggactactggggccagggaaacctggtcaccgtctcctca

SEQ ID NO: 11835 - DNA, 280 bp, Homo sapiens
  source 1..280: mol_type = other DNA
tgttgcctctggattcaccttcagtccctactacatgacctggatccgccaggctccagggaagggactggagtgggtctcatacattactagtagtagttacacaaactacgcagactttgtgaagggccgattcaccatctccagagacaacgccaagaactcactgtatctgcaaatgaacagcctgagagccgaggacacggctgtgtattactgtgtgagggacagctatggtcttgactactggggccagggaaccctggtcaccgtctcctca

SEQ ID NO: 11836 - DNA, 280 bp, Homo sapiens
  source 1..280: mol_type = other DNA
tgttgcctctggattcaccttcagtgcctactacatgacctggatccgccaggctccagggaagggactggagtgggtttcatacattactagtagtagttacacaaactacgcagactttgtgaagggccgattcaccatctccagagacaacgccaagaactcactgtatctgcaaatgaacagcctgagagccgaggacacggctgtgtattactgtgtgagggacagctatggtcttgactactggggccagggaaccctggtcaccgtctcctca

SEQ ID NO: 11837 - DNA, 283 bp, Homo sapiens
  source 1..283: mol_type = other DNA
tgctgcctctggcttcagcttcagtgactactacatgaactggatccgccaggctccagggaaggggctggagtggctttcatacattagtgatcgtggtaattacacagactacgcagactctgtgaagggccgattaaccatctccagagacaacgccaagaactcactgtatctgcaaatgaacagcctgagagccgaggacacggctgtgtattactgtgcgagaggttcggggaagcttgactactggggccagggaaccctggtcaccgtctcctca

SEQ ID NO: 11838 - DNA, 283 bp, Homo sapiens
  source 1..283: mol_type = other DNA
tgcagcctctggattcagcttcagtgactactacatgagctgggttcgccagactccagggaaggggctggagtggatttcatatattagcaatagtggtggtaccatatataacgaagacactgtgaagggccgattcaccatctccagggacaacgccaagaattcattgtatctgcaaatgaacagcctgagagccgaggacacggctatttattactgtgcgagaggtagtggaaaacttgactactggggccagggaaccctggtcatcgtctcctca

SEQ ID NO: 11839 - DNA, 286 bp, Homo sapiens
  source 1..286: mol_type = other DNA
tgcagcctctggattcatcttcagtgactaccccatgaactgggtccgccagactccagggagggggctggagtgggtctcacaatttaggagtagcggtagaatgatatactacgcagactctgtgaagggccgattcaccatctccagagacaatgccaagaactcactgtttctgcaaatgaacagcctgagagacgaggacacggctgtctattactgtgcgagagaccatcaatggggctttgactactggggccagggaatcctggtcaccgtctcctca

SEQ ID NO: 11840 - DNA, 283 bp, Homo sapiens
  source 1..283: mol_type = other DNA
tgcagcctctggattcaccttcagtccctatgccatgaactgggtccgccaggctccagggaaggggctggagtgggttgcatatatctctcccacctatgccatttactacggagactctgtgaagggccgcttcaccatctccagagacaatgccaaggactcggtgtatctgcaaatgcacagcctcagagacgaggatacggctgtgtatttctgtgcgagagatcatcagtgggggtttgactactggggccagggaaccctggtcaccgtctcctca

SEQ ID NO: 11841 - DNA, 298 bp, Homo sapiens
  source 1..298: mol_type = other DNA
tgcagcctctggattcacctttagtcgctcttggatgagctgggtccgccaggctccagggaaggggctggagtgggtggccaacataaatgaagatggaagtgagaaatactatttggactctgtgaagggccgattcaccatctccagagacaacgccaagaactcactgtatctgcaaatgaacagcctgagagccgaggacacggccgtgtattactgtgcgagagagttggtggttggtcccgctgaatacttccagcactggggccagggcaccctggtcaccgtctcctca

SEQ ID NO: 11842 - DNA, 298 bp, Homo sapiens
  source 1..298: mol_type = other DNA
tgcagcctctggattcacctttagtggctcttggatgagctgggtccgccagagtccagggaaggggctggagtgggtggccaacataaaccgacaaggaagtgagaagtactatgtggactcagtgaagggccgattcaccatctccagagacaacaccaagaactcactgtatctgcaaatgaacagcctgagacccgaggacacggctgtatattactgtgcgagagaattagttgtgggccctgccgagtatttccaacactggggccagggcaccctggtcaccgtctcctca

SEQ ID NO: 11843 - DNA, 298 bp, Homo sapiens
  source 1..298: mol_type = other DNA
tgcagcctctggattcacctttagtggctcttggatgagctgggtccgccagagtccagggaaggggctggagtgggtggccaacataaaccgacaaggaagtgagaagtactatgtggactcagtgaagggccgattcaccatctccagagacaacaccaagaactcactgtatctgcaaatgaacagcctgagacccgaggacacggctgtatattactgtgcgagagaattagttgtgggccctgccgagtatttccaacaccggggccagggcaccctggtcaccgtctcctca

SEQ ID NO: 11844 - DNA, 298 bp, Homo sapiens
  source 1..298: mol_type = other DNA
tgcaggctcaggattcacctttagtagctcttggatgagctgggtccgccagcttccggggaaggggctggagtgggtggccaacataaatcaagatggaagtgaaaaatactttgtgggctctgtgaagggccgattcaccatctccagagacaacgccaagaattcactgtatctgcaaatgaacagcctgagagccgaggacacggccgtgtattactgtgcgagagagttggtggttggtcccgctgaatacttccagcactggggccagggcaccgtggtcatcgtctcctca

SEQ ID NO: 11845 - DNA, 292 bp, Homo sapiens
  source 1..292: mol_type = other DNA
tgcagcctctggattcactttcagtaacgcctggatgaactgggtccgccaggctccagggaaggggctggagtggcttggccgtgttaaaagcaaaagtgatgctgagacaacagactacgctgcacccgcgaaaggcagattcaccatctccagagatgattcaaaaaacacgctctatctgcaaatgaacagcctgaaaatcgaggacactgccatgtattattgcaccacaagggttcgaaccaccaatgaccactggggccagggaactctggtaaccgtctcctca

SEQ ID NO: 11846 - DNA, 292 bp, Homo sapiens
  source 1..292: mol_type = other DNA
tgcaacctctggattcactttcagtaacgtctggatgaactgggtccgccagactccagggaaggggctggagtggcttggccgtattaaaaccaaaactgagggtgcgacaatagactccgttgcacccgtgaaaggcagattcaccatctcaagagatgattcaaaaaacacactctatttggaaatgaacagcctgcaaatcgaggacacagccgtgtattattgtaccacacgggtaagaacgacaaatgaccactggggccagggaaccctggtcaccgtctcccca

SEQ ID NO: 11847 - DNA, 292 bp, Homo sapiens
  source 1..292: mol_type = other DNA
tgcagcctctggattcagtttcagtgacgtctggatgaactgggtccgccaggctccagggaaggggccggagtggattggccgtgttaaaagtaaaagtgatggtgagacaacagactactctgcacccgcgaaaggcagattcaccatctcaagagatgattcaaggaatactctgtatctgcagatgaacagtctgcaaaccgaggacactgccttgtattactgcaccacgagggttcgaaccaccaatgaccactggggccagggaaccctggtcaccgtctcctca

SEQ ID NO: 11848 - DNA, 298 bp, Homo sapiens
  source 1..298: mol_type = other DNA
tgcagcctctggattcacctttaacagccatgccatgagctgggtccgccaggctccagggaaggggctggagtgggtttcagctattagtggtagtggtggtagcacatactatgcagactccgtgaagggccggttcaccatctccagagacaattccaagaacacgctgtatctgcaaatgaacagcctgagagccgaggacacggccgtatattactgtgcgaagggccgggggagcagcagctggtacttctttgactactggggccagggaaccctggtcaccgtctcctca

SEQ ID NO: 11849 - DNA, 298 bp, Homo sapiens
  source 1..298: mol_type = other DNA
tgcagcctctggattcacctttagcagctatgccatgggctgggtccgccaggctccagggaaggggctggagtgggtctcagcaattagtgatagtggtggtagcacatactacgcagactccgtgaggggccggttcaccatctccagagacaattccaagaacacgctgtatctgcaaatgaacagcctgagagtcgaggacacggccgtatattactgtgcgaaggggcgggggagcagcagctggtacttctttgactactggggccagggaaccctggtcaccgtctcctca

SEQ ID NO: 11850 - DNA, 298 bp, Homo sapiens; identical to SEQ ID NO: 11849
  source 1..298: mol_type = other DNA

SEQ ID NO: 11851 - DNA, 286 bp, Homo sapiens
  source 1..286: mol_type = other DNA
cgctgtctatggtgggaccttcagtggttactacttgagctggatccgccagcccccagggaaggggctggagtggattggggaaatcaatgatagtggaagtaccagctacaatccgtccctcaagagtcgagtcaccatatcggtggacacgtccaagaaccagttctccctgaagctgagctctgtgaccgccgcggacacggctgtgtattactgtgcgagggggcccatgttgggctggttcgacccctggggccagggaaccctggtcaccgtctcctca

SEQ ID NO: 11852 - DNA, 286 bp, Homo sapiens
  source 1..286: mol_type = other DNA
cgctgtctatggtgggtccttcagtggttactactggagctggatccgccagcccccagggaaggggctggagtggattggtgaaatgaatcatagtggaagcaccaactacaacccgtccctcaagagtcgagtcaccatatcagtagacacgtccaagaaccagttctccctgaagctgagctctgtgaccgccgcggacacggctgtgtattactgtgcgagaggcccgatgttgggctggttcgacccctggggccagggaaccctggtcaccgtctcctca

SEQ ID NO: 11853 - DNA, 295 bp, Homo sapiens
  source 1..295: mol_type = other DNA
tgaagtctctggattcacctttagtagctattggatgaactgggtccgccaggctccagggaaggggctggagtgggtggccaacataaagtacgatggaactgagaaatactatgtggactctgtgaagggccgattcaccatctccagagacaacgccaagaactcactgtatctgcaattgaacagcctgagagccgaggacacgtctatgtattactgtgcgagagatcatgtagcgcctggcatcatctttgacaactggggccagggaaccctggtcaccgtctcctca

SEQ ID NO: 11854 - DNA, 295 bp, Homo sapiens
  source 1..295: mol_type = other DNA
tgaagtctctggattcacctttagtagctattggatgaactgggtccgccaggctccagggaaggggctggagtgggtggccaacataaagtacgatggaagtgagaaatactatgtggactctgtgaagggccgattcaccatctccagagacaacgccaagaactcactgtatctgcaaatgaacagcctgagagccgaagacacgtctatgtattactgtgcgagagatcatgtagcgcctggcatcatctttgacaactggggccagggaaccctggtcaccgtctcctca

SEQ ID NO: 11855 - DNA, 295 bp, Homo sapiens
  source 1..295: mol_type = other DNA
tgaagtctctggattcacctttagtagctattggatgaactgggtccgccaggctccagggaaggggctggagtgggtggccaacataaagtacgatggaagtgagaaatactatgtggactctgtgaagggccgattcaccatctccagagacaacgccaagaactcactgtatctgcaaatgaacagcctgagagccgaggacacgtctatgtattactgtgcgagagatcatgtagcgcctggcatcatctttgacaactggggccagggaaccctggtcaccgtctcctca

SEQ ID NO: 11856 - DNA, 295 bp, Homo sapiens
  source 1..295: mol_type = other DNA
tgaagtctctggattctcgtttagtagtcattggatgaattgggtccgccaggctccagggaaggggctggagtgggtggccaacataaaccaagatggaagtgagaaatactatttggactctgtgaagggccgattcaccatctccagagacaacgccaagaactcactgtatctgcaagtgagcagcctgagagccgaggacacggctgtctattactgtgcgagagatcatgtggcacctggtataatatttgacaactggggccggggaaccctggtcaccgtctcctca

SEQ ID NO: 11857 - DNA, 295 bp, Homo sapiens
  source 1..295: mol_type = other DNA
tgaagtctctggattcacctttagtagctattggatgaactgggtccgccaggctccagggaagggactggagtgggtggccaacataaagtacgacggaagtgagagatactatgtggactctgtgaagggccgattcaccatctccagagacaacgccaagaactcactgtatctgcaaatggacagcctgagagccgaggacacgtctatgtattactgtgcgagagatcatgtagcgcctggcatcatctttgacaactggggccagggaaccctggtcaccgtctcctca

SEQ ID NO: 11858 - DNA, 295 bp, Homo sapiens
  source 1..295: mol_type = other DNA
tgtagcctctggattcacctttagcagttattggatgaattgggtccgccaggctccagggaaggggctggagtgggtggccaacataaagcaagatggaagtgagaaatactatctggactctgtgaagggccgattcaccatctccagagacaacgccaagaactcactgtttctgcaaatgagcagcctgagagtcgaggacacggcagtctattactgcgcgagggatcatgtggcacctggtataatttttgacaactggggccagggagtcttggtcaccgtctcctca

SEQ ID NO: 11859 - DNA, 292 bp, Homo sapiens
  source 1..292: mol_type = other DNA
tgcagcgtctggattcatcttcagtaactatggcatgcactgggtccgccaggctccaggcaaggggctggagtgggtggcaattatatggtatgatggaagtcagaaatactatgcagactccgtgaagggccgattcaccatctccagagacgattccaagaacatgctgtatctgcaaatgaacagcctgagagccgaggacacggctgtgtattactgtgcgagagatttatcctatggttcggggagttacgaggggggccagggaaccctggtcaccgtctcttca

SEQ ID NO: 11860 - DNA, 292 bp, Homo sapiens
  source 1..292: mol_type = other DNA
tgcagcatctggattcaccttcagtaattatggcatgcactgggtccgccaggctccagacaaggggctggagtgggtggctgttatatggtatgatggaagtaagagatactatgctgactccgtgaagggccgattcaccatctccagagacgattccaagaacacgctgtatctgcaaatgaacagccttagagtcgaggacacggctgtatattattgtgcgagagatcttagttatggttcggggagttacgaggggggccagggaaccctggtcaccgtctcctca

(The sequence listing continues in the following parts.)
